United States Patent Application Publication US 2018/0305689 A1 - sequence listing, part 156

SEQ ID NO: 2242064 - RNA, 19 nt, Artificial Sequence
  Description of Artificial Sequence: Synthetic oligonucleotide
  Sense strand starting at position 2116 of SEQ ID NO: 1884125
gaucauagucccugugcua

SEQ ID NO: 2242065 - RNA, 19 nt, Artificial Sequence
  Description of Artificial Sequence: Synthetic oligonucleotide
  Antisense strand to SEQ ID NO: 2242064
uagcacagggacuaugauc

SEQ ID NO: 2242066 - RNA, 19 nt, Artificial Sequence
  Description of Artificial Sequence: Synthetic oligonucleotide
  Sense strand starting at position 2425 of SEQ ID NO: 1884125
cgccguauccuguggguuu

SEQ ID NO: 2242067 - RNA, 19 nt, Artificial Sequence
  Description of Artificial Sequence: Synthetic oligonucleotide
  Antisense strand to SEQ ID NO: 2242066
aaacccacaggauacggcg

SEQ ID NO: 2242068 - RNA, 19 nt, Artificial Sequence
  Description of Artificial Sequence: Synthetic oligonucleotide
  Sense strand starting at position 2469 of SEQ ID NO: 1884125
ugaagugucuggcagcagu

SEQ ID NO: 2242069 - RNA, 19 nt, Artificial Sequence
  Description of Artificial Sequence: Synthetic oligonucleotide
  Antisense strand to SEQ ID NO: 2242068
acugcugccagacacuuca

SEQ ID NO: 2242070 - RNA, 19 nt, Artificial Sequence
  Description of Artificial Sequence: Synthetic oligonucleotide
  Sense strand starting at position 2636 of SEQ ID NO: 1884125
caaggcauggcccaagauu

SEQ ID NO: 2242071 - RNA, 19 nt, Artificial Sequence
  Description of Artificial Sequence: Synthetic oligonucleotide
  Antisense strand to SEQ ID NO: 2242070
aaucuugggccaugccuug

SEQ ID NO: 2242072 - RNA, 19 nt, Artificial Sequence
  Description of Artificial Sequence: Synthetic oligonucleotide
  Sense strand starting at position 2644 of SEQ ID NO: 1884125
ggcccaagauuccucagau

SEQ ID NO: 2242073 - RNA, 19 nt, Artificial Sequence
  Description of Artificial Sequence: Synthetic oligonucleotide
  Antisense strand to SEQ ID NO: 2242072
aucugaggaaucuugggcc

SEQ ID NO: 2242074 - RNA, 19 nt, Artificial Sequence
  Description of Artificial Sequence: Synthetic oligonucleotide
  Sense strand starting at position 2645 of SEQ ID NO: 1884125
gcccaagauuccucagaua

SEQ ID NO: 2242075 - RNA, 19 nt, Artificial Sequence
  Description of Artificial Sequence: Synthetic oligonucleotide
  Antisense strand to SEQ ID NO: 2242074
uaucugaggaaucuugggc

SEQ ID NO: 2242076 - RNA, 19 nt, Artificial Sequence
  Description of Artificial Sequence: Synthetic oligonucleotide
  Sense strand starting at position 2742 of SEQ ID NO: 1884125
gggaggaggugucagcuuu

SEQ ID NO: 2242077 - RNA, 19 nt, Artificial Sequence
  Description of Artificial Sequence: Synthetic oligonucleotide
  Antisense strand to SEQ ID NO: 2242076
aaagcugacaccuccuccc

SEQ ID NO: 2242078 - RNA, 19 nt, Artificial Sequence
  Description of Artificial Sequence: Synthetic oligonucleotide
  Sense strand starting at position 2854 of SEQ ID NO: 1884125
ggagcuacgccugcucuua

SEQ ID NO: 2242079 - RNA, 19 nt, Artificial Sequence
  Description of Artificial Sequence: Synthetic oligonucleotide
  Antisense strand to SEQ ID NO: 2242078
uaagagcaggcguagcucc

SEQ ID NO: 2242080 - RNA, 19 nt, Artificial Sequence
  Description of Artificial Sequence: Synthetic oligonucleotide
  Sense strand starting at position 2866 of SEQ ID NO: 1884125
gcucuuagagccgagggaa

SEQ ID NO: 2242081 - RNA, 19 nt, Artificial Sequence
  Description of Artificial Sequence: Synthetic oligonucleotide
  Antisense strand to SEQ ID NO: 2242080
uucccucggcucuaagagc

SEQ ID NO: 2242082 - RNA, 19 nt, Artificial Sequence
  Description of Artificial Sequence: Synthetic oligonucleotide
  Sense strand starting at position 3080 of SEQ ID NO: 1884125
ggguguuaagccuggguca

SEQ ID NO: 2242083 - RNA, 19 nt, Artificial Sequence
  Description of Artificial Sequence: Synthetic oligonucleotide
  Antisense strand to SEQ ID NO: 2242082
ugacccaggcuuaacaccc

SEQ ID NO: 2242084 - RNA, 19 nt, Artificial Sequence
  Description of Artificial Sequence: Synthetic oligonucleotide
  Sense strand starting at position 210 of SEQ ID NO: 1884126
gcaggaagauccuuccaau

SEQ ID NO: 2242085 - RNA, 19 nt, Artificial Sequence
  Description of Artificial Sequence: Synthetic oligonucleotide
  Antisense strand to SEQ ID NO: 2242084
auuggaaggaucuuccugc

SEQ ID NO: 2242086 - RNA, 19 nt, Artificial Sequence
  Description of Artificial Sequence: Synthetic oligonucleotide
  Sense strand starting at position 248 of SEQ ID NO: 1884126
cuuaguauccuccagugac

SEQ ID NO: 2242087 - RNA, 19 nt, Artificial Sequence
  Description of Artificial Sequence: Synthetic oligonucleotide
  Antisense strand to SEQ ID NO: 2242086
gucacuggaggauacuaag

SEQ ID NO: 2242088 - RNA, 19 nt, Artificial Sequence
  Description of Artificial Sequence: Synthetic oligonucleotide
  Sense strand starting at position 382 of SEQ ID NO: 1884126
ccucuuggcuauucuggaa

SEQ ID NO: 2242089 - RNA, 19 nt, Artificial Sequence
  Description of Artificial Sequence: Synthetic oligonucleotide
  Antisense strand to SEQ ID NO: 2242088
uuccagaauagccaagagg

SEQ ID NO: 2242090 - RNA, 19 nt, Artificial Sequence
  Description of Artificial Sequence: Synthetic oligonucleotide
  Sense strand starting at position 467 of SEQ ID NO: 1884126
uccagaucuccauauggcu

SEQ ID NO: 2242091 - RNA, 19 nt, Artificial Sequence
  Description of Artificial Sequence: Synthetic oligonucleotide
  Antisense strand to SEQ ID NO: 2242090
agccauauggagaucugga

SEQ ID NO: 2242092 - RNA, 19 nt, Artificial Sequence
  Description of Artificial Sequence: Synthetic oligonucleotide
  Sense strand starting at position 517 of SEQ ID NO: 1884126
agugucaccuuguuggaga

SEQ ID NO: 2242093 - RNA, 19 nt, Artificial Sequence
  Description of Artificial Sequence: Synthetic oligonucleotide
  Antisense strand to SEQ ID NO: 2242092
ucuccaacaaggugacacu

SEQ ID NO: 2242094 - RNA, 19 nt, Artificial Sequence
  Description of Artificial Sequence: Synthetic oligonucleotide
  Sense strand starting at position 519 of SEQ ID NO: 1884126
ugucaccuuguuggagaua

SEQ ID NO: 2242095 - RNA, 19 nt, Artificial Sequence
  Description of Artificial Sequence: Synthetic oligonucleotide
  Antisense strand to SEQ ID NO: 2242094
uaucuccaacaaggugaca

SEQ ID NO: 2242096 - RNA, 19 nt, Artificial Sequence
  Description of Artificial Sequence: Synthetic oligonucleotide
  Sense strand starting at position 622 of SEQ ID NO: 1884126
aucuauuggccauggacau

SEQ ID NO: 2242097 - RNA, 19 nt, Artificial Sequence
  Description of Artificial Sequence: Synthetic oligonucleotide
  Antisense strand to SEQ ID NO: 2242096
auguccauggccaauagau

SEQ ID NO: 2242098 - RNA, 19 nt, Artificial Sequence
  Description of Artificial Sequence: Synthetic oligonucleotide
  Sense strand starting at position 623 of SEQ ID NO: 1884126
ucuauuggccauggacaua

SEQ ID NO: 2242099 - RNA, 19 nt, Artificial Sequence
  Description of Artificial Sequence: Synthetic oligonucleotide
  Antisense strand to SEQ ID NO: 2242098
uauguccauggccaauaga

SEQ ID NO: 2242100 - RNA, 19 nt, Artificial Sequence
  Description of Artificial Sequence: Synthetic oligonucleotide
  Sense strand starting at position 705 of SEQ ID NO: 1884126
gguuccacuugaucaggaa

SEQ ID NO: 2242101 - RNA, 19 nt, Artificial Sequence
  Description of Artificial Sequence: Synthetic oligonucleotide
  Antisense strand to SEQ ID NO: 2242100
uuccugaucaaguggaacc

SEQ ID NO: 2242102 - RNA, 19 nt, Artificial Sequence
  Description of Artificial Sequence: Synthetic oligonucleotide
  Sense strand starting at position 759 of SEQ ID NO: 1884126
cgugaaacagaguggcaua

SEQ ID NO: 2242103 - RNA, 19 nt, Artificial Sequence
  Description of Artificial Sequence: Synthetic oligonucleotide
  Antisense strand to SEQ ID NO: 2242102
uaugccacucuguuucacg

SEQ ID NO: 2242104 - RNA, 19 nt, Artificial Sequence
  Description of Artificial Sequence: Synthetic oligonucleotide
  Sense strand starting at position 984 of SEQ ID NO: 1884126
agcagugguguuugaagaa

SEQ ID NO: 2242105 - RNA, 19 nt, Artificial Sequence
  Description of Artificial Sequence: Synthetic oligonucleotide
  Antisense strand to SEQ ID NO: 2242104
uucuucaaacaccacugcu

SEQ ID NO: 2242106 - RNA, 19 nt, Artificial Sequence
  Description of Artificial Sequence: Synthetic oligonucleotide
  Sense strand starting at position 996 of SEQ ID NO: 1884126
ugaagaauucuuggagguu

SEQ ID NO: 2242107 - RNA, 19 nt, Artificial Sequence
  Description of Artificial Sequence: Synthetic oligonucleotide
  Antisense strand to SEQ ID NO: 2242106
aaccuccaagaauucuuca

SEQ ID NO: 2242108 - RNA, 19 nt, Artificial Sequence
  Description of Artificial Sequence: Synthetic oligonucleotide
  Sense strand starting at position 999 of SEQ ID NO: 1884126
agaauucuuggagguuaug

SEQ ID NO: 2242109 - RNA, 19 nt, Artificial Sequence
  Description of Artificial Sequence: Synthetic oligonucleotide
  Antisense strand to SEQ ID NO: 2242108
cauaaccuccaagaauucu

SEQ ID NO: 2242110 - RNA, 19 nt, Artificial Sequence
  Description of Artificial Sequence: Synthetic oligonucleotide
  Sense strand starting at position 1150 of SEQ ID NO: 1884126
uguuacggacccuaaauua

SEQ ID NO: 2242111 - RNA, 19 nt, Artificial Sequence
  Description of Artificial Sequence: Synthetic oligonucleotide
  Antisense strand to SEQ ID NO: 2242110
uaauuuaggguccguaaca

SEQ ID NO: 2242112 - RNA, 19 nt, Artificial Sequence
  Description of Artificial Sequence: Synthetic oligonucleotide
  Sense strand starting at position 1258 of SEQ ID NO: 1884126
ugcaaacuugcuggacauu

SEQ ID NO: 2242113 - RNA, 19 nt, Artificial Sequence
  Description of Artificial Sequence: Synthetic oligonucleotide
  Antisense strand to SEQ ID NO: 2242112
aauguccagcaaguuugca

SEQ ID NO: 2242114 - RNA, 19 nt, Artificial Sequence
  Description of Artificial Sequence: Synthetic oligonucleotide
  Sense strand starting at position 1361 of SEQ ID NO: 1884126
gguguucugaugcagugaa

SEQ ID NO: 2242115 - RNA, 19 nt, Artificial Sequence
  Description of Artificial Sequence: Synthetic oligonucleotide
  Antisense strand to SEQ ID NO: 2242114
uucacugcaucagaacacc

SEQ ID NO: 2242116 - RNA, 19 nt, Artificial Sequence
  Description of Artificial Sequence: Synthetic oligonucleotide
  Sense strand starting at position 1365 of SEQ ID NO: 1884126
uucugaugcagugaaguuu

SEQ ID NO: 2242117 - RNA, 19 nt, Artificial Sequence
  Description of Artificial Sequence: Synthetic oligonucleotide
  Antisense strand to SEQ ID NO: 2242116
aaacuucacugcaucagaa

SEQ ID NO: 2242118 - RNA, 19 nt, Artificial Sequence
  Description of Artificial Sequence: Synthetic oligonucleotide
  Sense strand starting at position 1577 of SEQ ID NO: 1884126
gggagagucuaucucuaca

SEQ ID NO: 2242119 - RNA, 19 nt, Artificial Sequence
  Description of Artificial Sequence: Synthetic oligonucleotide
  Antisense strand to SEQ ID NO: 2242118
uguagagauagacucuccc

SEQ ID NO: 2242120 - RNA, 19 nt, Artificial Sequence
  Description of Artificial Sequence: Synthetic oligonucleotide
  Sense strand starting at position 1785 of SEQ ID NO: 1884126
uggccauguuaauccuaau

SEQ ID NO: 2242121 - RNA, 19 nt, Artificial Sequence
  Description of Artificial Sequence: Synthetic oligonucleotide
  Antisense strand to SEQ ID NO: 2242120
auuaggauuaacauggcca

SEQ ID NO: 2242122 - RNA, 19 nt, Artificial Sequence
  Description of Artificial Sequence: Synthetic oligonucleotide
  Sense strand starting at position 1797 of SEQ ID NO: 1884126
uccuaauacugaguucuag

SEQ ID NO: 2242123 - RNA, 19 nt, Artificial Sequence
  Description of Artificial Sequence: Synthetic oligonucleotide
  Antisense strand to SEQ ID NO: 2242122
cuagaacucaguauuagga

SEQ ID NO: 2242124 - RNA, 19 nt, Artificial Sequence
  Description of Artificial Sequence: Synthetic oligonucleotide
  Sense strand starting at position 1822 of SEQ ID NO: 1884126
uuaucaagcugugugaaac

SEQ ID NO: 2242125 - RNA, 19 nt, Artificial Sequence
  Description of Artificial Sequence: Synthetic oligonucleotide
  Antisense strand to SEQ ID NO: 2242124
guuucacacagcuugauaa

SEQ ID NO: 2242126 - RNA, 19 nt, Artificial Sequence
  Description of Artificial Sequence: Synthetic oligonucleotide
  Sense strand starting at position 1946 of SEQ ID NO: 1884126
gcuggugugaaaugaauua

SEQ ID NO: 2242127 - RNA, 19 nt, Artificial Sequence
  Description of Artificial Sequence: Synthetic oligonucleotide
  Antisense strand to SEQ ID NO: 2242126
uaauucauuucacaccagc

SEQ ID NO: 2242128 - RNA, 19 nt, Artificial Sequence
  Description of Artificial Sequence: Synthetic oligonucleotide
  Sense strand starting at position 1953 of SEQ ID NO: 1884126
ugaaaugaauuagcaaugu

SEQ ID NO: 2242129 - RNA, 19 nt, Artificial Sequence
  Description of Artificial Sequence: Synthetic oligonucleotide
  Antisense strand to SEQ ID NO: 2242128
acauugcuaauucauuuca

SEQ ID NO: 2242130 - RNA, 19 nt, Artificial Sequence
  Description of Artificial Sequence: Synthetic oligonucleotide
  Sense strand starting at position 2242 of SEQ ID NO: 1884126
ggccuucugcucuaauuac

SEQ ID NO: 2242131 - RNA, 19 nt, Artificial Sequence
  Description of Artificial Sequence: Synthetic oligonucleotide
  Antisense strand to SEQ ID NO: 2242130
guaauuagagcagaaggcc

SEQ ID NO: 2242132 - RNA, 19 nt, Artificial Sequence
  Description of Artificial Sequence: Synthetic oligonucleotide
  Sense strand starting at position 2275 of SEQ ID NO: 1884126
cguugugaacaaggacuuu

SEQ ID NO: 2242133 - RNA, 19 nt, Artificial Sequence
  Description of Artificial Sequence: Synthetic oligonucleotide
  Antisense strand to SEQ ID NO: 2242132
aaaguccuuguucacaacg

SEQ ID NO: 2242134 - RNA, 19 nt, Artificial Sequence
  Description of Artificial Sequence: Synthetic oligonucleotide
  Sense strand starting at position 2346 of SEQ ID NO: 1884126
gcugguauugcuggagaaa

SEQ ID NO: 2242135 - RNA, 19 nt, Artificial Sequence
  Description of Artificial Sequence: Synthetic oligonucleotide
  Antisense strand to SEQ ID NO: 2242134
uuucuccagcaauaccagc

SEQ ID NO: 2242136 - RNA, 19 nt, Artificial Sequence
  Description of Artificial Sequence: Synthetic oligonucleotide
  Sense strand starting at position 2347 of SEQ ID NO: 1884126
cugguauugcuggagaaau

SEQ ID NO: 2242137 - RNA, 19 nt, Artificial Sequence
  Description of Artificial Sequence: Synthetic oligonucleotide
  Antisense strand to SEQ ID NO: 2242136
auuucuccagcaauaccag

SEQ ID NO: 2242138 - RNA, 19 nt, Artificial Sequence
  Description of Artificial Sequence: Synthetic oligonucleotide
  Sense strand starting at position 2349 of SEQ ID NO: 1884126
gguauugcuggagaaauuc

SEQ ID NO: 2242139 - RNA, 19 nt, Artificial Sequence
  Description of Artificial Sequence: Synthetic oligonucleotide
  Antisense strand to SEQ ID NO: 2242138
gaauuucuccagcaauacc

SEQ ID NO: 2242140 - RNA, 19 nt, Artificial Sequence
  Description of Artificial Sequence: Synthetic oligonucleotide
  Sense strand starting at position 2377 of SEQ ID NO: 1884126
gggaaucacuucuucuuaa

SEQ ID NO: 2242141 - RNA, 19 nt, Artificial Sequence
  Description of Artificial Sequence: Synthetic oligonucleotide
  Antisense strand to SEQ ID NO: 2242140
uuaagaagaagugauuccc

SEQ ID NO: 2242142 - RNA, 19 nt, Artificial Sequence
  Description of Artificial Sequence: Synthetic oligonucleotide
  Sense strand starting at position 3016 of SEQ ID NO: 1884126
uuaugaguguuggcaaaga

SEQ ID NO: 2242143 - RNA, 19 nt, Artificial Sequence
  Description of Artificial Sequence: Synthetic oligonucleotide
  Antisense strand to SEQ ID NO: 2242142
ucuuugccaacacucauaa

SEQ ID NO: 2242144 - RNA, 19 nt, Artificial Sequence
  Description of Artificial Sequence: Synthetic oligonucleotide
  Sense strand starting at position 3081 of SEQ ID NO: 1884126
uggugcaaucacuguggaa

SEQ ID NO: 2242145 - RNA, 19 nt, Artificial Sequence
  Description of Artificial Sequence: Synthetic oligonucleotide
  Antisense strand to SEQ ID NO: 2242144
uuccacagugauugcacca

SEQ ID NO: 2242146 - RNA, 19 nt, Artificial Sequence
  Description of Artificial Sequence: Synthetic oligonucleotide
  Sense strand starting at position 3152 of SEQ ID NO: 1884126
gcaguuccauuccuggaua

SEQ ID NO: 2242147 - RNA, 19 nt, Artificial Sequence
  Description of Artificial Sequence: Synthetic oligonucleotide
  Antisense strand to SEQ ID NO: 2242146
uauccaggaauggaacugc

SEQ ID NO: 2242148 - RNA, 19 nt, Artificial Sequence
  Description of Artificial Sequence: Synthetic oligonucleotide
  Sense strand starting at position 3154 of SEQ ID NO: 1884126
aguuccauuccuggauaua

SEQ ID NO: 2242149 - RNA, 19 nt, Artificial Sequence
  Description of Artificial Sequence: Synthetic oligonucleotide
  Antisense strand to SEQ ID NO: 2242148
uauauccaggaauggaacu

SEQ ID NO: 2242150 - RNA, 19 nt, Artificial Sequence
  Description of Artificial Sequence: Synthetic oligonucleotide
  Sense strand starting at position 3155 of SEQ ID NO: 1884126
guuccauuccuggauauag

SEQ ID NO: 2242151 - RNA, 19 nt, Artificial Sequence
  Description of Artificial Sequence: Synthetic oligonucleotide
  Antisense strand to SEQ ID NO: 2242150
cuauauccaggaauggaac

SEQ ID NO: 2242152 - RNA, 19 nt, Artificial Sequence
  Description of Artificial Sequence: Synthetic oligonucleotide
  Sense strand starting at position 3266 of SEQ ID NO: 1884126
aaugucuaucacuggauga

SEQ ID NO: 2242153 - RNA, 19 nt, Artificial Sequence
  Description of Artificial Sequence: Synthetic oligonucleotide
  Antisense strand to SEQ ID NO: 2242152
ucauccagugauagacauu

SEQ ID NO: 2242154 - RNA, 19 nt, Artificial Sequence
  Description of Artificial Sequence: Synthetic oligonucleotide
  Sense strand starting at position 3270 of SEQ ID NO: 1884126
ucuaucacuggaugaauca

SEQ ID NO: 2242155 - RNA, 19 nt, Artificial Sequence
  Description of Artificial Sequence: Synthetic oligonucleotide
  Antisense strand to SEQ ID NO: 2242154
ugauucauccagugauaga

SEQ ID NO: 2242156 - RNA, 19 nt, Artificial Sequence
  Description of Artificial Sequence: Synthetic oligonucleotide
  Sense strand starting at position 3548 of SEQ ID NO: 1884126
agaguugcaguuugagaug

SEQ ID NO: 2242157 - RNA, 19 nt, Artificial Sequence
  Description of Artificial Sequence: Synthetic oligonucleotide
  Antisense strand to SEQ ID NO: 2242156
caucucaaacugcaacucu

SEQ ID NO: 2242158 - RNA, 19 nt, Artificial Sequence
  Description of Artificial Sequence: Synthetic oligonucleotide
  Sense strand starting at position 3553 of SEQ ID NO: 1884126
ugcaguuugagaugaugag

SEQ ID NO: 2242159 - RNA, 19 nt, Artificial Sequence
  Description of Artificial Sequence: Synthetic oligonucleotide
  Antisense strand to SEQ ID NO: 2242158
cucaucaucucaaacugca

SEQ ID NO: 2242160 - RNA, 19 nt, Artificial Sequence
  Description of Artificial Sequence: Synthetic oligonucleotide
  Sense strand starting at position 3648 of SEQ ID NO: 1884126
augguaacuuugguauuau

SEQ ID NO: 2242161 - RNA, 19 nt, Artificial Sequence
  Description of Artificial Sequence: Synthetic oligonucleotide
  Antisense strand to SEQ ID NO: 2242160
auaauaccaaaguuaccau

SEQ ID NO: 2242162 - RNA, 19 nt, Artificial Sequence
  Description of Artificial Sequence: Synthetic oligonucleotide
  Sense strand starting at position 3914 of SEQ ID NO: 1884126
guauguguggcagagacua

SEQ ID NO: 2242163 - RNA, 19 nt, Artificial Sequence
  Description of Artificial Sequence: Synthetic oligonucleotide
  Antisense strand to SEQ ID NO: 2242162
uagucucugccacacauac

SEQ ID NO: 2242164 - RNA, 19 nt, Artificial Sequence
  Description of Artificial Sequence: Synthetic oligonucleotide
  Sense strand starting at position 63 of SEQ ID NO: 1884127
agguuaagcuuguuagcuu

SEQ ID NO: 2242165 - RNA, 19 nt, Artificial Sequence
  Description of Artificial Sequence: Synthetic oligonucleotide
  Antisense strand to SEQ ID NO: 2242164
aagcuaacaagcuuaaccu

SEQ ID NO: 2242166 - RNA, 19 nt, Artificial Sequence
  Description of Artificial Sequence: Synthetic oligonucleotide
  Sense strand starting at position 325 of SEQ ID NO: 1884127
gugagaggugguuagcaua

SEQ ID NO: 2242167 - RNA, 19 nt, Artificial Sequence
  Description of Artificial Sequence: Synthetic oligonucleotide
  Antisense strand to SEQ ID NO: 2242166
uaugcuaaccaccucucac

SEQ ID NO: 2242168 - RNA, 19 nt, Artificial Sequence
  Description of Artificial Sequence: Synthetic oligonucleotide
  Sense strand starting at position 333 of SEQ ID NO: 1884127
ugguuagcauaccuugauu

SEQ ID NO: 2242169 - RNA, 19 nt, Artificial Sequence
  Description of Artificial Sequence: Synthetic oligonucleotide
  Antisense strand to SEQ ID NO: 2242168
aaucaagguaugcuaacca

SEQ ID NO: 2242170 - RNA, 19 nt, Artificial Sequence
  Description of Artificial Sequence: Synthetic oligonucleotide
  Sense strand starting at position 341 of SEQ ID NO: 1884127
auaccuugauuccucugua

SEQ ID NO: 2242171 - RNA, 19 nt, Artificial Sequence
  Description of Artificial Sequence: Synthetic oligonucleotide
  Antisense strand to SEQ ID NO: 2242170
uacagaggaaucaagguau

SEQ ID NO: 2242172 - RNA, 19 nt, Artificial Sequence
  Description of Artificial Sequence: Synthetic oligonucleotide
  Sense strand starting at position 427 of SEQ ID NO: 1884127
gugagaagcacuugugucu

SEQ ID NO: 2242173 - RNA, 19 nt, Artificial Sequence
  Description of Artificial Sequence: Synthetic oligonucleotide
  Antisense strand to SEQ ID NO: 2242172
agacacaagugcuucucac

SEQ ID NO: 2242174 - RNA, 19 nt, Artificial Sequence
  Description of Artificial Sequence: Synthetic oligonucleotide
  Sense strand starting at position 550 of SEQ ID NO: 1884127
ccauaaauuuaagagcaga

SEQ ID NO: 2242175 - RNA, 19 nt, Artificial Sequence
  Description of Artificial Sequence: Synthetic oligonucleotide
  Antisense strand to SEQ ID NO: 2242174
ucugcucuuaaauuuaugg

SEQ ID NO: 2242176 - RNA, 19 nt, Artificial Sequence
  Description of Artificial Sequence: Synthetic oligonucleotide
  Sense strand starting at position 594 of SEQ ID NO: 1884127
gaagcagggucauaaauau

SEQ ID NO: 2242177 - RNA, 19 nt, Artificial Sequence
  Description of Artificial Sequence: Synthetic oligonucleotide
  Antisense strand to SEQ ID NO: 2242176
auauuuaugacccugcuuc

SEQ ID NO: 2242178 - RNA, 19 nt, Artificial Sequence
  Description of Artificial Sequence: Synthetic oligonucleotide
  Sense strand starting at position 790 of SEQ ID NO: 1884127
ugauguggugucugcaaac

SEQ ID NO: 2242179 - RNA, 19 nt, Artificial Sequence
  Description of Artificial Sequence: Synthetic oligonucleotide
  Antisense strand to SEQ ID NO: 2242178
guuugcagacaccacauca

SEQ ID NO: 2242180 - RNA, 19 nt, Artificial Sequence
  Description of Artificial Sequence: Synthetic oligonucleotide
  Sense strand starting at position 796 of SEQ ID NO: 1884127
ggugucugcaaacaaaugu

SEQ ID NO: 2242181 - RNA, 19 nt, Artificial Sequence
  Description of Artificial Sequence: Synthetic oligonucleotide
  Antisense strand to SEQ ID NO: 2242180
acauuuguuugcagacacc

SEQ ID NO: 2242182 - RNA, 19 nt, Artificial Sequence
  Description of Artificial Sequence: Synthetic oligonucleotide
  Sense strand starting at position 995 of SEQ ID NO: 1884127
uuucucuugcuuugcagau

SEQ ID NO: 2242183 - RNA, 19 nt, Artificial Sequence
  Description of Artificial Sequence: Synthetic oligonucleotide
  Antisense strand to SEQ ID NO: 2242182
aucugcaaagcaagagaaa

SEQ ID NO: 2242184 - RNA, 19 nt, Artificial Sequence
  Description of Artificial Sequence: Synthetic oligonucleotide
  Sense strand starting at position 1042 of SEQ ID NO: 1884127
aucugucuucugugcacau

SEQ ID NO: 2242185 - RNA, 19 nt, Artificial Sequence
  Description of Artificial Sequence: Synthetic oligonucleotide
  Antisense strand to SEQ ID NO: 2242184
augugcacagaagacagau

SEQ ID NO: 2242186 - RNA, 19 nt, Artificial Sequence
  Description of Artificial Sequence: Synthetic oligonucleotide
  Sense strand starting at position 1087 of SEQ ID NO: 1884127
acgccagucauaugggauu

SEQ ID NO: 2242187 - RNA, 19 nt, Artificial Sequence
  Description of Artificial Sequence: Synthetic oligonucleotide
  Antisense strand to SEQ ID NO: 2242186
aaucccauaugacuggcgu

SEQ ID NO: 2242188 - RNA, 19 nt, Artificial Sequence
  Description of Artificial Sequence: Synthetic oligonucleotide
  Sense strand starting at position 1510 of SEQ ID NO: 1884127
ccacaagagucagcugagu

SEQ ID NO: 2242189 - RNA, 19 nt, Artificial Sequence
  Description of Artificial Sequence: Synthetic oligonucleotide
  Antisense strand to SEQ ID NO: 2242188
acucagcugacucuugugg

SEQ ID NO: 2242190 - RNA, 19 nt, Artificial Sequence
  Description of Artificial Sequence: Synthetic oligonucleotide
  Sense strand starting at position 1512 of SEQ ID NO: 1884127
acaagagucagcugaguaa

SEQ ID NO: 2242191 - RNA, 19 nt, Artificial Sequence
  Description of Artificial Sequence: Synthetic oligonucleotide
  Antisense strand to SEQ ID NO: 2242190
uuacucagcugacucuugu

SEQ ID NO: 2242192 - RNA, 19 nt, Artificial Sequence
  Description of Artificial Sequence: Synthetic oligonucleotide
  Sense strand starting at position 1532 of SEQ ID NO: 1884127
cggacauguagacguauga

SEQ ID NO: 2242193 - RNA, 19 nt, Artificial Sequence
  Description of Artificial Sequence: Synthetic oligonucleotide
  Antisense strand to SEQ ID NO: 2242192
ucauacgucuacauguccg

SEQ ID NO: 2242194 - RNA, 19 nt, Artificial Sequence
  Description of Artificial Sequence: Synthetic oligonucleotide
  Sense strand starting at position 1536 of SEQ ID NO: 1884127
cauguagacguaugaauga

SEQ ID NO: 2242195 - RNA, 19 nt, Artificial Sequence
  Description of Artificial Sequence: Synthetic oligonucleotide
  Antisense strand to SEQ ID NO: 2242194
ucauucauacgucuacaug

SEQ ID NO: 2242196 - RNA, 19 nt, Artificial Sequence
  Description of Artificial Sequence: Synthetic oligonucleotide
  Sense strand starting at position 1541 of SEQ ID NO: 1884127
agacguaugaaugagucuu

SEQ ID NO: 2242197 - RNA, 19 nt, Artificial Sequence
  Description of Artificial Sequence: Synthetic oligonucleotide
  Antisense strand to SEQ ID NO: 2242196
aagacucauucauacgucu

SEQ ID NO: 2242198 - RNA, 19 nt, Artificial Sequence
  Description of Artificial Sequence: Synthetic oligonucleotide
  Sense strand starting at position 1549 of SEQ ID NO: 1884127
gaaugagucuugguggcag

SEQ ID NO: 2242199 - RNA, 19 nt, Artificial Sequence
  Description of Artificial Sequence: Synthetic oligonucleotide
  Antisense strand to SEQ ID NO: 2242198
cugccaccaagacucauuc

SEQ ID NO: 2242200 - RNA, 19 nt, Artificial Sequence
  Description of Artificial Sequence: Synthetic oligonucleotide
  Sense strand starting at position 1745 of SEQ ID NO: 1884127
cgugaacgccguugucaga

SEQ ID NO: 2242201 - RNA, 19 nt, Artificial Sequence
  Description of Artificial Sequence: Synthetic oligonucleotide
  Antisense strand to SEQ ID NO: 2242200
ucugacaacggcguucacg

SEQ ID NO: 2242202 - RNA, 19 nt, Artificial Sequence
  Description of Artificial Sequence: Synthetic oligonucleotide
  Sense strand starting at position 1798 of SEQ ID NO: 1884127
acgggcugugggugagaau

SEQ ID NO: 2242203 - RNA, 19 nt, Artificial Sequence
  Description of Artificial Sequence: Synthetic oligonucleotide
  Antisense strand to SEQ ID NO: 2242202
auucucacccacagcccgu

SEQ ID NO: 2242204 - RNA, 19 nt, Artificial Sequence
  Description of Artificial Sequence: Synthetic oligonucleotide
  Sense strand starting at position 1965 of SEQ ID NO: 1884127
cagacauggcccugcugua

SEQ ID NO: 2242205 - RNA, 19 nt, Artificial Sequence
  Description of Artificial Sequence: Synthetic oligonucleotide
  Antisense strand to SEQ ID NO: 2242204
uacagcagggccaugucug

SEQ ID NO: 2242206 - RNA, 19 nt, Artificial Sequence
  Description of Artificial Sequence: Synthetic oligonucleotide
  Sense strand starting at position 2175 of SEQ ID NO: 1884127
gcuccugacaguugucagu

SEQ ID NO: 2242207 - RNA, 19 nt, Artificial Sequence
  Description of Artificial Sequence: Synthetic oligonucleotide
  Antisense strand to SEQ ID NO: 2242206
acugacaacugucaggagc

SEQ ID NO: 2242208 - RNA, 19 nt, Artificial Sequence
  Description of Artificial Sequence: Synthetic oligonucleotide
  Sense strand starting at position 2519 of SEQ ID NO: 1884127
guaucugugaaaugggauc

SEQ ID NO: 2242209 - RNA, 19 nt, Artificial Sequence
  Description of Artificial Sequence: Synthetic oligonucleotide
  Antisense strand to SEQ ID NO: 2242208
gaucccauuucacagauac

SEQ ID NO: 2242210 - RNA, 19 nt, Artificial Sequence
  Description of Artificial Sequence: Synthetic oligonucleotide
  Sense strand starting at position 2560 of SEQ ID NO: 1884127
ucaggaaaguaacaucaua

SEQ ID NO: 2242211 - RNA, 19 nt, Artificial Sequence
  Description of Artificial Sequence: Synthetic oligonucleotide
  Antisense strand to SEQ ID NO: 2242210
uaugauguuacuuuccuga

SEQ ID NO: 2242212 - RNA, 19 nt, Artificial Sequence
  Description of Artificial Sequence: Synthetic oligonucleotide
  Sense strand starting at position 2893 of SEQ ID NO: 1884127
agacuuugugccugcucau

SEQ ID NO: 2242213 - RNA, 19 nt, Artificial Sequence
  Description of Artificial Sequence: Synthetic oligonucleotide
  Antisense strand to SEQ ID NO: 2242212
augagcaggcacaaagucu

SEQ ID NO: 2242214 - RNA, 19 nt, Artificial Sequence
  Description of Artificial Sequence: Synthetic oligonucleotide
  Sense strand starting at position 3469 of SEQ ID NO: 1884127
caaaguagucguugcucau

SEQ ID NO: 2242215 - RNA, 19 nt, Artificial Sequence
  Description of Artificial Sequence: Synthetic oligonucleotide
  Antisense strand to SEQ ID NO: 2242214
augagcaacgacuacuuug

SEQ ID NO: 2242216 - RNA, 19 nt, Artificial Sequence
  Description of Artificial Sequence: Synthetic oligonucleotide
  Sense strand starting at position 3475 of SEQ ID NO: 1884127
agucguugcucaucggaga

SEQ ID NO: 2242217 - RNA, 19 nt, Artificial Sequence
  Description of Artificial Sequence: Synthetic oligonucleotide
  Antisense strand to SEQ ID NO: 2242216
ucuccgaugagcaacgacu

SEQ ID NO: 2242218 - RNA, 19 nt, Artificial Sequence
  Description of Artificial Sequence: Synthetic oligonucleotide
  Sense strand starting at position 3476 of SEQ ID NO: 1884127
gucguugcucaucggagau

SEQ ID NO: 2242219 - RNA, 19 nt, Artificial Sequence
  Description of Artificial Sequence: Synthetic oligonucleotide
  Antisense strand to SEQ ID NO: 2242218
aucuccgaugagcaacgac

SEQ ID NO: 2242220 - RNA, 19 nt, Artificial Sequence
  Description of Artificial Sequence: Synthetic oligonucleotide
  Sense strand starting at position 3505 of SEQ ID NO: 1884127
ccaggugucuugcauuugu

SEQ ID NO: 2242221 - RNA, 19 nt, Artificial Sequence
  Description of Artificial Sequence: Synthetic oligonucleotide
  Antisense strand to SEQ ID NO: 2242220
acaaaugcaagacaccugg

SEQ ID NO: 2242222 - RNA, 19 nt, Artificial Sequence
  Description of Artificial Sequence: Synthetic oligonucleotide
  Sense strand starting at position 3509 of SEQ ID NO: 1884127
gugucuugcauuuguguuu

SEQ ID NO: 2242223 - RNA, 19 nt, Artificial Sequence
  Description of Artificial Sequence: Synthetic oligonucleotide
  Antisense strand to SEQ ID NO: 2242222
aaacacaaaugcaagacac

SEQ ID NO: 2242224 - RNA, 19 nt, Artificial Sequence
  Description of Artificial Sequence: Synthetic oligonucleotide
  Sense strand starting at position 3514 of SEQ ID NO: 1884127
uugcauuuguguuugcuaa

SEQ ID NO: 2242225 - RNA, 19 nt, Artificial Sequence
  Description of Artificial Sequence: Synthetic oligonucleotide
  Antisense strand to SEQ ID NO: 2242224
uuagcaaacacaaaugcaa

SEQ ID NO: 2242226 - RNA, 19 nt, Artificial Sequence
  Description of Artificial Sequence: Synthetic oligonucleotide
  Sense strand starting at position 3515 of SEQ ID NO: 1884127
ugcauuuguguuugcuaag

SEQ ID NO: 2242227 - RNA, 19 nt, Artificial Sequence
  Description of Artificial Sequence: Synthetic oligonucleotide
  Antisense strand to SEQ ID NO: 2242226
cuuagcaaacacaaaugca

SEQ ID NO: 2242228 - RNA, 19 nt, Artificial Sequence
  Description of Artificial Sequence: Synthetic oligonucleotide
  Sense strand starting at position 3516 of SEQ ID NO: 1884127
gcauuuguguuugcuaagu

SEQ ID NO: 2242229 - RNA, 19 nt, Artificial Sequence
  Description of Artificial Sequence: Synthetic oligonucleotide
  Antisense strand to SEQ ID NO: 2242228
acuuagcaaacacaaaugc

SEQ ID NO: 2242230 - RNA, 19 nt, Artificial Sequence
  Description of Artificial Sequence: Synthetic oligonucleotide
  Sense strand starting at position 3518 of SEQ ID NO: 1884127
auuuguguuugcuaagucu

SEQ ID NO: 2242231 - RNA, 19 nt, Artificial Sequence
  Description of Artificial Sequence: Synthetic oligonucleotide
  Antisense strand to SEQ ID NO: 2242230
agacuuagcaaacacaaau

SEQ ID NO: 2242232 - RNA, 19 nt, Artificial Sequence
  Description of Artificial Sequence: Synthetic oligonucleotide
  Sense strand starting at position 3570 of SEQ ID NO: 1884127
gaaggauggugccuuguca

SEQ ID NO: 2242233 - RNA, 19 nt, Artificial Sequence
  Description of Artificial Sequence: Synthetic oligonucleotide
  Antisense strand to SEQ ID NO: 2242232
ugacaaggcaccauccuuc

SEQ ID NO: 2242234 - RNA, 19 nt, Artificial Sequence
  Description of Artificial Sequence: Synthetic oligonucleotide
  Sense strand starting at position 3607 of SEQ ID NO: 1884127
auaaguacucaguguguga

SEQ ID NO: 2242235 - RNA, 19 nt, Artificial Sequence
  Description of Artificial Sequence: Synthetic oligonucleotide
  Antisense strand to SEQ ID NO: 2242234
ucacacacugaguacuuau

SEQ ID NO: 2242236 - RNA, 19 nt, Artificial Sequence
  Description of Artificial Sequence: Synthetic oligonucleotide
  Sense strand starting at position 3627 of SEQ ID NO: 1884127
ccaugaauugcuuguauuc

SEQ ID NO: 2242237 - RNA, 19 nt, Artificial Sequence
  Description of Artificial Sequence: Synthetic oligonucleotide
  Antisense strand to SEQ ID NO: 2242236
gaauacaagcaauucaugg

SEQ ID NO: 2242238 - RNA, 19 nt, Artificial Sequence
  Description of Artificial Sequence: Synthetic oligonucleotide
  Sense strand starting at position 3665 of SEQ ID NO: 1884127
gcagaaguucuuggaggga

SEQ ID NO: 2242239 - RNA, 19 nt, Artificial Sequence
  Description of Artificial Sequence: Synthetic oligonucleotide
  Antisense strand to SEQ ID NO: 2242238
ucccuccaagaacuucugc

SEQ ID NO: 2242240 - RNA, 19 nt, Artificial Sequence
  Description of Artificial Sequence: Synthetic oligonucleotide
  Sense strand starting at position 3795 of SEQ ID NO: 1884127
uuccuuugagcucagggau

SEQ ID NO: 2242241 - RNA, 19 nt, Artificial Sequence
  Description of Artificial Sequence: Synthetic oligonucleotide
  Antisense strand to SEQ ID NO: 2242240
aucccugagcucaaaggaa

SEQ ID NO: 2242242 - RNA, 19 nt, Artificial Sequence
  Description of Artificial Sequence: Synthetic oligonucleotide
  Sense strand starting at position 3807 of SEQ ID NO: 1884127
cagggauccugggagagaa

SEQ ID NO: 2242243 - RNA, 19 nt, Artificial Sequence
  Description of Artificial Sequence: Synthetic oligonucleotide
  Antisense strand to SEQ ID NO: 2242242
uucucucccaggaucccug

SEQ ID NO: 2242244 - RNA, 19 nt, Artificial Sequence
  Description of Artificial Sequence: Synthetic oligonucleotide
  Sense strand starting at position 10 of SEQ ID NO: 1884128
acaaaugcaucugugcaga

SEQ ID NO: 2242245 - RNA, 19 nt, Artificial Sequence
  Description of Artificial Sequence: Synthetic oligonucleotide
  Antisense strand to SEQ ID NO: 2242244
ucugcacagaugcauuugu

SEQ ID NO: 2242246 - RNA, 19 nt, Artificial Sequence
  Description of Artificial Sequence: Synthetic oligonucleotide
  Sense strand starting at position 354 of SEQ ID NO: 1884128
cuaaaugugggcgaaucaa

SEQ ID NO: 2242247 - RNA, 19 nt, Artificial Sequence
  Description of Artificial Sequence: Synthetic oligonucleotide
  Antisense strand to SEQ ID NO: 2242246
uugauucgcccacauuuag

SEQ ID NO: 2242248 - RNA, 19 nt, Artificial Sequence
  Description of Artificial Sequence: Synthetic oligonucleotide
  Sense strand starting at position 634 of SEQ ID NO: 1884128
uggccaugcucaccaagaa

SEQ ID NO: 2242249 - RNA, 19 nt, Artificial Sequence
  Description of Artificial Sequence: Synthetic oligonucleotide
  Antisense strand to SEQ ID NO: 2242248
uucuuggugagcauggcca

SEQ ID NO: 2242250 - RNA, 19 nt, Artificial Sequence
  Description of Artificial Sequence: Synthetic oligonucleotide
  Sense strand starting at position 635 of SEQ ID NO: 1884128
ggccaugcucaccaagaaa

SEQ ID NO: 2242251 - RNA, 19 nt, Artificial Sequence
  Description of Artificial Sequence: Synthetic oligonucleotide
  Antisense strand to SEQ ID NO: 2242250
uuucuuggugagcauggcc

SEQ ID NO: 2242252 - RNA, 19 nt, Artificial Sequence
  Description of Artificial Sequence: Synthetic oligonucleotide
  Sense strand starting at position 790 of SEQ ID NO: 1884128
cuggaaugccucuaccaau

SEQ ID NO: 2242253 - RNA, 19 nt, Artificial Sequence
  Description of Artificial Sequence: Synthetic oligonucleotide
  Antisense strand to SEQ ID NO: 2242252
auugguagaggcauuccag

SEQ ID NO: 2242254 - RNA, 19 nt, Artificial Sequence
  Description of Artificial Sequence: Synthetic oligonucleotide
  Sense strand starting at position 893 of SEQ ID NO: 1884128
agggaucuuucuccuuaaa

SEQ ID NO: 2242255 - RNA, 19 nt, Artificial Sequence
  Description of Artificial Sequence: Synthetic oligonucleotide
  Antisense strand to SEQ ID NO: 2242254
uuuaaggagaaagaucccu

SEQ ID NO: 2242256 - RNA, 19 nt, Artificial Sequence
  Description of Artificial Sequence: Synthetic oligonucleotide
  Sense strand starting at position 983 of SEQ ID NO: 1884128
gcuugaaggcaggaaaugu

SEQ ID NO: 2242257 - RNA, 19 nt, Artificial Sequence
  Description of Artificial Sequence: Synthetic oligonucleotide
  Antisense strand to SEQ ID NO: 2242256
acauuuccugccuucaagc

SEQ ID NO: 2242258 - RNA, 19 nt, Artificial Sequence
  Description of Artificial Sequence: Synthetic oligonucleotide
  Sense strand starting at position 1125 of SEQ ID NO: 1884128
ggcaaauguccguaggaga

SEQ ID NO: 2242259 - RNA, 19 nt, Artificial Sequence
  Description of Artificial Sequence: Synthetic oligonucleotide
  Antisense strand to SEQ ID NO: 2242258
ucuccuacggacauuugcc

SEQ ID NO: 2242260 - RNA, 19 nt, Artificial Sequence
  Description of Artificial Sequence: Synthetic oligonucleotide
  Sense strand starting at position 1149 of SEQ ID NO: 1884128
agaauuagcuccucuaaug

SEQ ID NO: 2242261 - RNA, 19 nt, Artificial Sequence
  Description of Artificial Sequence: Synthetic oligonucleotide
  Antisense strand to SEQ ID NO: 2242260
cauuagaggagcuaauucu

SEQ ID NO: 2242262 - RNA, 19 nt, Artificial Sequence
  Description of Artificial Sequence: Synthetic oligonucleotide
  Sense strand starting at position 1293 of SEQ ID NO: 1884128
augggcauggauuguaaau

SEQ ID NO: 2242263 - RNA, 19 nt, Artificial Sequence
  Description of Artificial Sequence: Synthetic oligonucleotide
  Antisense strand to SEQ ID NO: 2242262
auuuacaauccaugcccau

SEQ ID NO: 2242264 - RNA, 19 nt, Artificial Sequence
  Description of Artificial Sequence: Synthetic oligonucleotide
  Sense strand starting at position 1486 of SEQ ID NO: 1884128
uggagaugcugagugauua

SEQ ID NO: 2242265 - RNA, 19 nt, Artificial Sequence
  Description of Artificial Sequence: Synthetic oligonucleotide
  Antisense strand to SEQ ID NO: 2242264
uaaucacucagcaucucca

SEQ ID NO: 2242266 - RNA, 19 nt, Artificial Sequence
  Description of Artificial Sequence: Synthetic oligonucleotide
  Sense strand starting at position 1487 of SEQ ID NO: 1884128
ggagaugcugagugauuaa

SEQ ID NO: 2242267 - RNA, 19 nt, Artificial Sequence
  Description of Artificial Sequence: Synthetic oligonucleotide
  Antisense strand to SEQ ID NO: 2242266
uuaaucacucagcaucucc

SEQ ID NO: 2242268 - RNA, 19 nt, Artificial Sequence
  Description of Artificial Sequence: Synthetic oligonucleotide
  Sense strand starting at position 1490 of SEQ ID NO: 1884128
gaugcugagugauuaagac

SEQ ID NO: 2242269 - RNA, 19 nt, Artificial Sequence
  Description of Artificial Sequence: Synthetic oligonucleotide
  Antisense strand to SEQ ID NO: 2242268
gucuuaaucacucagcauc

SEQ ID NO: 2242270 - RNA, 19 nt, Artificial Sequence
  Description of Artificial Sequence: Synthetic oligonucleotide
  Sense strand starting at position 1556 of SEQ ID NO: 1884128
gcagcagacuccucagaaa

SEQ ID NO: 2242271 - RNA, 19 nt, Artificial Sequence
  Description of Artificial Sequence: Synthetic oligonucleotide
  Antisense strand to SEQ ID NO: 2242270
uuucugaggagucugcugc

SEQ ID NO: 2242272 - RNA, 19 nt, Artificial Sequence
  Description of Artificial Sequence: Synthetic oligonucleotide
  Sense strand starting at position 1696 of SEQ ID NO: 1884128
gaggcaaugguaugauauu

SEQ ID NO: 2242273 - RNA, 19 nt, Artificial Sequence
  Description of Artificial Sequence: Synthetic oligonucleotide
  Antisense strand to SEQ ID NO: 2242272
aauaucauaccauugccuc

SEQ ID NO: 2242274 - RNA, 19 nt, Artificial Sequence
  Description of Artificial Sequence: Synthetic oligonucleotide
  Sense strand starting at position 1806 of SEQ ID NO: 1884128
uguagucaacaccauauga

SEQ ID NO: 2242275 - RNA, 19 nt, Artificial Sequence
  Description of Artificial Sequence: Synthetic oligonucleotide
  Antisense strand to SEQ ID NO: 2242274
ucauaugguguugacuaca

SEQ ID NO: 2242276 - RNA, 19 nt, Artificial Sequence
  Description of Artificial Sequence: Synthetic oligonucleotide
  Sense strand starting at position 2044 of SEQ ID NO: 1884128
aauaaagacugaggagaaa

SEQ ID NO: 2242277 - RNA, 19 nt, Artificial Sequence
  Description of Artificial Sequence: Synthetic oligonucleotide
  Antisense strand to SEQ ID NO: 2242276
uuucuccucagucuuuauu

SEQ ID NO: 2242278 - RNA, 19 nt, Artificial Sequence
  Description of Artificial Sequence: Synthetic oligonucleotide
  Sense strand starting at position 2153 of SEQ ID NO: 1884128
gcucuauuacucugggaaa

SEQ ID NO: 2242279 - RNA, 19 nt, Artificial Sequence
  Description of Artificial Sequence: Synthetic oligonucleotide
  Antisense strand to SEQ ID NO: 2242278
uuucccagaguaauagagc

SEQ ID NO: 2242280 - RNA, 19 nt, Artificial Sequence
  Description of Artificial Sequence: Synthetic oligonucleotide
  Sense strand starting at position 2284 of SEQ ID NO: 1884128
ucuggagugagucaugacu

SEQ ID NO: 2242281 - RNA, 19 nt, Artificial Sequence
  Description of Artificial Sequence: Synthetic oligonucleotide
  Antisense strand to SEQ ID NO: 2242280
agucaugacucacuccaga

SEQ ID NO: 2242282 - RNA, 19 nt, Artificial Sequence
  Description of Artificial Sequence: Synthetic oligonucleotide
  Sense strand starting at position 2510 of SEQ ID NO: 1884128
uagucuucucugcauggga

SEQ ID NO: 2242283 - RNA, 19 nt, Artificial Sequence
  Description of Artificial Sequence: Synthetic oligonucleotide
  Antisense strand to SEQ ID NO: 2242282
ucccaugcagagaagacua

SEQ ID NO: 2242284 - RNA, 19 nt, Artificial Sequence
  Description of Artificial Sequence: Synthetic oligonucleotide
  Sense strand starting at position 2758 of SEQ ID NO: 1884128
agcucucuccuguaagaug

SEQ ID NO: 2242285 - RNA, 19 nt, Artificial Sequence
  Description of Artificial Sequence: Synthetic oligonucleotide
  Antisense strand to SEQ ID NO: 2242284
caucuuacaggagagagcu

SEQ ID NO: 2242286 - RNA, 19 nt, Artificial Sequence
  Description of Artificial Sequence: Synthetic oligonucleotide
  Sense strand starting at position 2763 of SEQ ID NO: 1884128
ucuccuguaagauggagaa

SEQ ID NO: 2242287 - RNA, 19 nt, Artificial Sequence
  Description of Artificial Sequence: Synthetic oligonucleotide
  Antisense strand to SEQ ID NO: 2242286
uucuccaucuuacaggaga

SEQ ID NO: 2242288 - RNA, 19 nt, Artificial Sequence
  Description of Artificial Sequence: Synthetic oligonucleotide
  Sense strand starting at position 2804 of SEQ ID NO: 1884128
ucuggugaugcuuaaagca

SEQ ID NO: 2242289 - RNA, 19 nt, Artificial Sequence
  Description of Artificial Sequence: Synthetic oligonucleotide
  Antisense strand to SEQ ID NO: 2242288
ugcuuuaagcaucaccaga

SEQ ID NO: 2242290 - RNA, 19 nt, Artificial Sequence
  Description of Artificial Sequence: Synthetic oligonucleotide
  Sense strand starting at position 2866 of SEQ ID NO: 1884128
ggaguacucaaaggaugug

SEQ ID NO: 2242291 - RNA, 19 nt, Artificial Sequence
  Description of Artificial Sequence: Synthetic oligonucleotide
  Antisense strand to SEQ ID NO: 2242290
cacauccuuugaguacucc

SEQ ID NO: 2242292 - RNA, 19 nt, Artificial Sequence
  Description of Artificial Sequence: Synthetic oligonucleotide
  Sense strand starting at position 2871 of SEQ ID NO: 1884128
acucaaaggaugugagcua

SEQ ID NO: 2242293 - RNA, 19 nt, Artificial Sequence
  Description of Artificial Sequence: Synthetic oligonucleotide
  Antisense strand to SEQ ID NO: 2242292
uagcucacauccuuugagu

SEQ ID NO: 2242294 - RNA, 19 nt, Artificial Sequence
  Description of Artificial Sequence: Synthetic oligonucleotide
  Sense strand starting at position 2920 of SEQ ID NO: 1884128
cguaauucucuaugaccca

SEQ ID NO: 2242295 - RNA, 19 nt, Artificial Sequence
  Description of Artificial Sequence: Synthetic oligonucleotide
  Antisense strand to SEQ ID NO: 2242294
ugggucauagagaauuacg

SEQ ID NO: 2242296 - RNA, 19 nt, Artificial Sequence
  Description of Artificial Sequence: Synthetic oligonucleotide
  Sense strand starting at position 2935 of SEQ ID NO: 1884128
cccacuauguguuccagau

SEQ ID NO: 2242297 - RNA, 19 nt, Artificial Sequence
  Description of Artificial Sequence: Synthetic oligonucleotide
  Antisense strand to SEQ ID NO: 2242296
aucuggaacacauaguggg

SEQ ID NO: 2242298 - RNA, 19 nt, Artificial Sequence
  Description of Artificial Sequence: Synthetic oligonucleotide
  Sense strand starting at position 2939 of SEQ ID NO: 1884128
cuauguguuccagaugaug

SEQ ID NO: 2242299 - RNA, 19 nt, Artificial Sequence
  Description of Artificial Sequence: Synthetic oligonucleotide
  Antisense strand to SEQ ID NO: 2242298
caucaucuggaacacauag

SEQ ID NO: 2242300 - RNA, 19 nt, Artificial Sequence
  Description of Artificial Sequence: Synthetic oligonucleotide
  Sense strand starting at position 3254 of SEQ ID NO: 1884128
uguaaauacccaggcauua

SEQ ID NO: 2242301 - RNA, 19 nt, Artificial Sequence
  Description of Artificial Sequence: Synthetic oligonucleotide
  Antisense strand to SEQ ID NO: 2242300
uaaugccuggguauuuaca

SEQ ID NO: 2242302 - RNA, 19 nt, Artificial Sequence
  Description of Artificial Sequence: Synthetic oligonucleotide
  Sense strand starting at position 3411 of SEQ ID NO: 1884128
ucgcauuaccaugaacacu

SEQ ID NO: 2242303 - RNA, 19 nt, Artificial Sequence
  Description of Artificial Sequence: Synthetic oligonucleotide
  Antisense strand to SEQ ID NO: 2242302
aguguucaugguaaugcga

SEQ ID NO: 2242304 - RNA, 19 nt, Artificial Sequence
  Description of Artificial Sequence: Synthetic oligonucleotide
  Sense strand starting at position 3495 of SEQ ID NO: 1884128
acuauuucuggccgguaca

SEQ ID NO: 2242305 - RNA, 19 nt, Artificial Sequence
  Description of Artificial Sequence: Synthetic oligonucleotide
  Antisense strand to SEQ ID NO: 2242304
uguaccggccagaaauagu

SEQ ID NO: 2242306 - RNA, 19 nt, Artificial Sequence
  Description of Artificial Sequence: Synthetic oligonucleotide
  Sense strand starting at position 3508 of SEQ ID NO: 1884128
gguacacuauagucagaag

SEQ ID NO: 2242307 - RNA, 19 nt, Artificial Sequence
  Description of Artificial Sequence: Synthetic oligonucleotide
  Antisense strand to SEQ ID NO: 2242306
cuucugacuauaguguacc

SEQ ID NO: 2242308 - RNA, 19 nt, Artificial Sequence
  Description of Artificial Sequence: Synthetic oligonucleotide
  Sense strand starting at position 3525 of SEQ ID NO: 1884128
agugauguaccucaacuuu

SEQ ID NO: 2242309 - RNA, 19 nt, Artificial Sequence
  Description of Artificial Sequence: Synthetic oligonucleotide
  Antisense strand to SEQ ID NO: 2242308
aaaguugagguacaucacu

SEQ ID NO: 2242310 - RNA, 19 nt, Artificial Sequence
  Description of Artificial Sequence: Synthetic oligonucleotide
  Sense strand starting at position 3550 of SEQ ID NO: 1884128
aaauauugaugagcuggua

SEQ ID NO: 2242311 - RNA, 19 nt, Artificial Sequence
  Description of Artificial Sequence: Synthetic oligonucleotide
  Antisense strand to SEQ ID NO: 2242310
uaccagcucaucaauauuu

SEQ ID NO: 2242312 - RNA, 19 nt, Artificial Sequence
  Description of Artificial Sequence: Synthetic oligonucleotide
  Sense strand starting at position 3656 of SEQ ID NO: 1884128
cugucaaugcuugaucaac

SEQ ID NO: 2242313 - RNA, 19 nt, Artificial Sequence
  Description of Artificial Sequence: Synthetic oligonucleotide
  Antisense strand to SEQ ID NO: 2242312
guugaucaagcauugacag

SEQ ID NO: 2242314 - RNA, 19 nt, Artificial Sequence
  Description of Artificial Sequence: Synthetic oligonucleotide
  Sense strand starting at position 3658 of SEQ ID NO: 1884128
gucaaugcuugaucaacuu

SEQ ID NO: 2242315 - RNA, 19 nt, Artificial Sequence
  Description of Artificial Sequence: Synthetic oligonucleotide
  Antisense strand to SEQ ID NO: 2242314
aaguugaucaagcauugac

SEQ ID NO: 2242316 - RNA, 19 nt, Artificial Sequence
  Description of Artificial Sequence: Synthetic oligonucleotide
  Sense strand starting at position 3691 of SEQ ID NO: 1884128
aaagaaaccuuuguugugu

SEQ ID NO: 2242317 - RNA, 19 nt, Artificial Sequence
  Description of Artificial Sequence: Synthetic oligonucleotide
  Antisense strand to SEQ ID NO: 2242316
acacaacaaagguuucuuu

SEQ ID NO: 2242318 - RNA, 19 nt, Artificial Sequence
  Description of Artificial Sequence: Synthetic oligonucleotide
  Sense strand starting at position 3706 of SEQ ID NO: 1884128
guguuaaaccaccagaauu

SEQ ID NO: 2242319 - RNA, 19 nt, Artificial Sequence
  Description of Artificial Sequence: Synthetic oligonucleotide
  Antisense strand to SEQ ID NO: 2242318
aauucuggugguuuaacac

SEQ ID NO: 2242320 - RNA, 19 nt, Artificial Sequence
  Description of Artificial Sequence: Synthetic oligonucleotide
  Sense strand starting at position 3937 of SEQ ID NO: 1884128
uugagaguuugugcaggau

SEQ ID NO: 2242321 - RNA, 19 nt, Artificial Sequence
  Description of Artificial Sequence: Synthetic oligonucleotide
  Antisense strand to SEQ ID NO: 2242320
auccugcacaaacucucaa

SEQ ID NO: 2242322 - RNA, 19 nt, Artificial Sequence
  Description of Artificial Sequence: Synthetic oligonucleotide
  Sense strand starting at position 3951 of SEQ ID NO: 1884128
aggaucagggaguguugua

SEQ ID NO: 2242323 - RNA, 19 nt, Artificial Sequence
  Description of Artificial Sequence: Synthetic oligonucleotide
  Antisense strand to SEQ ID NO: 2242322
uacaacacucccugauccu

SEQ ID NO: 2242324 - RNA, 19 nt, Artificial Sequence
  Description of Artificial Sequence: Synthetic oligonucleotide
  Sense strand starting at position 46 of SEQ ID NO: 1884129
ggcagcucugaaggugaua

SEQ ID NO: 2242325 - RNA, 19 nt, Artificial Sequence
  Description of Artificial Sequence: Synthetic oligonucleotide
  Antisense strand to SEQ ID NO: 2242324
uaucaccuucagagcugcc

SEQ ID NO: 2242326 - RNA, 19 nt, Artificial Sequence
  Description of Artificial Sequence: Synthetic oligonucleotide
  Sense strand starting at position 55 of SEQ ID NO: 1884129
gaaggugauagcggaaaua

SEQ ID NO: 2242327 - RNA, 19 nt, Artificial Sequence
  Description of Artificial Sequence: Synthetic oligonucleotide
  Antisense strand to SEQ ID NO: 2242326
uauuuccgcuaucaccuuc

SEQ ID NO: 2242328 - RNA, 19 nt, Artificial Sequence
  Description of Artificial Sequence: Synthetic oligonucleotide
  Sense strand starting at position 304 of SEQ ID NO: 1884129
uguggaauuugugccauua

SEQ ID NO: 2242329 - RNA, 19 nt, Artificial Sequence
  Description of Artificial Sequence: Synthetic oligonucleotide
  Antisense strand to SEQ ID NO: 2242328
uaauggcacaaauuccaca

SEQ ID NO: 2242330 - RNA, 19 nt, Artificial Sequence
  Description of Artificial Sequence: Synthetic oligonucleotide
  Sense strand starting at position 700 of SEQ ID NO: 1884129
agccaaguuggcuaaucua

SEQ ID NO: 2242331 - RNA, 19 nt, Artificial Sequence
  Description of Artificial Sequence: Synthetic oligonucleotide
  Antisense strand to SEQ ID NO: 2242330
uagauuagccaacuuggcu

SEQ ID NO: 2242332 - RNA, 19 nt, Artificial Sequence
  Description of Artificial Sequence: Synthetic oligonucleotide
  Sense strand starting at position 1012 of SEQ ID NO: 1884129
ucagauuagcugcauccua

SEQ ID NO: 2242333 - RNA, 19 nt, Artificial Sequence
  Description of Artificial Sequence: Synthetic oligonucleotide
  Antisense strand to SEQ ID NO: 2242332
uaggaugcagcuaaucuga

SEQ ID NO: 2242334 - RNA, 19 nt, Artificial Sequence
  Description of Artificial Sequence: Synthetic oligonucleotide
  Sense strand starting at position 1057 of SEQ ID NO: 1884129
guauuuagccaugguaagu

SEQ ID NO: 2242335 - RNA, 19 nt, Artificial Sequence
  Description of Artificial Sequence: Synthetic oligonucleotide
  Antisense strand to SEQ ID NO: 2242334
acuuaccauggcuaaauac

SEQ ID NO: 2242336 - RNA, 19 nt, Artificial Sequence
  Description of Artificial Sequence: Synthetic oligonucleotide
  Sense strand starting at position 1123 of SEQ ID NO: 1884129
uuguaaagcuuccugggaa

SEQ ID NO: 2242337 - RNA, 19 nt, Artificial Sequence
  Description of Artificial Sequence: Synthetic oligonucleotide
  Antisense strand to SEQ ID NO: 2242336
uucccaggaagcuuuacaa

SEQ ID NO: 2242338 - RNA, 19 nt, Artificial Sequence
  Description of Artificial Sequence: Synthetic oligonucleotide
  Sense strand starting at position 1306 of SEQ ID NO: 1884129
ucccauuucuagcaaugga

SEQ ID NO: 2242339 - RNA, 19 nt, Artificial Sequence
  Description of Artificial Sequence: Synthetic oligonucleotide
  Antisense strand to SEQ ID NO: 2242338
uccauugcuagaaauggga

SEQ ID NO: 2242340 - RNA, 19 nt, Artificial Sequence
  Description of Artificial Sequence: Synthetic oligonucleotide
  Sense strand starting at position 1845 of SEQ ID NO: 1884129
caaacugucgacuaugacu

SEQ ID NO: 2242341 - RNA, 19 nt, Artificial Sequence
  Description of Artificial Sequence: Synthetic oligonucleotide
  Antisense strand to SEQ ID NO: 2242340
agucauagucgacaguuug

SEQ ID NO: 2242342 - RNA, 19 nt, Artificial Sequence
  Description of Artificial Sequence: Synthetic oligonucleotide
  Sense strand starting at position 1852 of SEQ ID NO: 1884129
ucgacuaugacucaauggu

SEQ ID NO: 2242343 - RNA, 19 nt, Artificial Sequence
  Description of Artificial Sequence: Synthetic oligonucleotide
  Antisense strand to SEQ ID NO: 2242342
accauugagucauagucga

SEQ ID NO: 2242344 - RNA, 19 nt, Artificial Sequence
  Description of Artificial Sequence: Synthetic oligonucleotide
  Sense strand starting at position 1856 of SEQ ID NO: 1884129
cuaugacucaauggugaug

SEQ ID NO: 2242345 - RNA, 19 nt, Artificial Sequence
  Description of Artificial Sequence: Synthetic oligonucleotide
  Antisense strand to SEQ ID NO: 2242344
caucaccauugagucauag

SEQ ID NO: 2242346 - RNA, 19 nt, Artificial Sequence
  Description of Artificial Sequence: Synthetic oligonucleotide
  Sense strand starting at position 2152 of SEQ ID NO: 1884129
uuucuuaggauacgaaaga

SEQ ID NO: 2242347 - RNA, 19 nt, Artificial Sequence
  Description of Artificial Sequence: Synthetic oligonucleotide
  Antisense strand to SEQ ID NO: 2242346
ucuuucguauccuaagaaa

SEQ ID NO: 2242348 - RNA, 19 nt, Artificial Sequence
  Description of Artificial Sequence: Synthetic oligonucleotide
  Sense strand starting at position 2188 of SEQ ID NO: 1884129
cucccaagucucggauaaa

SEQ ID NO: 2242349 - RNA, 19 nt, Artificial Sequence
  Description of Artificial Sequence: Synthetic oligonucleotide
  Antisense strand to SEQ ID NO: 2242348
uuuauccgagacuugggag

SEQ ID NO: 2242350 - RNA, 19 nt, Artificial Sequence
  Description of Artificial Sequence: Synthetic oligonucleotide
  Sense strand starting at position 2191 of SEQ ID NO: 1884129
ccaagucucggauaaaucu

SEQ ID NO: 2242351 - RNA, 19 nt, Artificial Sequence
  Description of Artificial Sequence: Synthetic oligonucleotide
  Antisense strand to SEQ ID NO: 2242350
agauuuauccgagacuugg

SEQ ID NO: 2242352 - RNA, 19 nt, Artificial Sequence
  Description of Artificial Sequence: Synthetic oligonucleotide
  Sense strand starting at position 2202 of SEQ ID NO: 1884129
auaaaucugcgucacccau

SEQ ID NO: 2242353 - RNA, 19 nt, Artificial Sequence
  Description of Artificial Sequence: Synthetic oligonucleotide
  Antisense strand to SEQ ID NO: 2242352
augggugacgcagauuuau

SEQ ID NO: 2242354 - RNA, 19 nt, Artificial Sequence
  Description of Artificial Sequence: Synthetic oligonucleotide
  Sense strand starting at position 2859 of SEQ ID NO: 1884129
acugacuuggccugaaacu

SEQ ID NO: 2242355 - RNA, 19 nt, Artificial Sequence
  Description of Artificial Sequence: Synthetic oligonucleotide
  Antisense strand to SEQ ID NO: 2242354
aguuucaggccaagucagu

SEQ ID NO: 2242356 - RNA, 19 nt, Artificial Sequence
  Description of Artificial Sequence: Synthetic oligonucleotide
  Sense strand starting at position 2860 of SEQ ID NO: 1884129
cugacuuggccugaaacua

SEQ ID NO: 2242357 - RNA, 19 nt, Artificial Sequence
  Description of Artificial Sequence: Synthetic oligonucleotide
  Antisense strand to SEQ ID NO: 2242356
uaguuucaggccaagucag

SEQ ID NO: 2242358 - RNA, 19 nt, Artificial Sequence
  Description of Artificial Sequence: Synthetic oligonucleotide
  Sense strand starting at position 2986 of SEQ ID NO: 1884129
cucaaucaucgauggagac

SEQ ID NO: 2242359 - RNA, 19 nt, Artificial Sequence
  Description of Artificial Sequence: Synthetic oligonucleotide
  Antisense strand to SEQ ID NO: 2242358
gucuccaucgaugauugag

SEQ ID NO: 2242360 - RNA, 19 nt, Artificial Sequence
  Description of Artificial Sequence: Synthetic oligonucleotide
  Sense strand starting at position 2987 of SEQ ID NO: 1884129
ucaaucaucgauggagaca

SEQ ID NO: 2242361 - RNA, 19 nt, Artificial Sequence
  Description of Artificial Sequence: Synthetic oligonucleotide
  Antisense strand to SEQ ID NO: 2242360
ugucuccaucgaugauuga

SEQ ID NO: 2242362 - RNA, 19 nt, Artificial Sequence
  Description of Artificial Sequence: Synthetic oligonucleotide
  Sense strand starting at position 3035 of SEQ ID NO: 1884129
gcgcgauucacugugguag

SEQ ID NO: 2242363 - RNA, 19 nt, Artificial Sequence
  Description of Artificial Sequence: Synthetic oligonucleotide
  Antisense strand to SEQ ID NO: 2242362
cuaccacagugaaucgcgc

SEQ ID NO: 2242364 - RNA, 19 nt, Artificial Sequence
  Description of Artificial Sequence: Synthetic oligonucleotide
  Sense strand starting at position 3246 of SEQ ID NO: 1884129
caaagagacgcuuauguuu

SEQ ID NO: 2242365 - RNA, 19 nt, Artificial Sequence
  Description of Artificial Sequence: Synthetic oligonucleotide
  Antisense strand to SEQ ID NO: 2242364
aaacauaagcgucucuuug

SEQ ID NO: 2242366 - RNA, 19 nt, Artificial Sequence
  Description of Artificial Sequence: Synthetic oligonucleotide
  Sense strand starting at position 3257 of SEQ ID NO: 1884129
uuauguuugugcuugagaa

SEQ ID NO: 2242367 - RNA, 19 nt, Artificial Sequence
  Description of Artificial Sequence: Synthetic oligonucleotide
  Antisense strand to SEQ ID NO: 2242366
uucucaagcacaaacauaa

SEQ ID NO: 2242368 - RNA, 19 nt, Artificial Sequence
  Description of Artificial Sequence: Synthetic oligonucleotide
  Sense strand starting at position 3258 of SEQ ID NO: 1884129
uauguuugugcuugagaaa

SEQ ID NO: 2242369 - RNA, 19 nt, Artificial Sequence
  Description of Artificial Sequence: Synthetic oligonucleotide
  Antisense strand to SEQ ID NO: 2242368
uuucucaagcacaaacaua

SEQ ID NO: 2242370 - RNA, 19 nt, Artificial Sequence
  Description of Artificial Sequence: Synthetic oligonucleotide
  Sense strand starting at position 3259 of SEQ ID NO: 1884129
auguuugugcuugagaaau

SEQ ID NO: 2242371 - RNA, 19 nt, Artificial Sequence
  Description of Artificial Sequence: Synthetic oligonucleotide
  Antisense strand to SEQ ID NO: 2242370
auuucucaagcacaaacau

SEQ ID NO: 2242372 - RNA, 19 nt, Artificial Sequence
  Description of Artificial Sequence: Synthetic oligonucleotide
  Sense strand starting at position 3265 of SEQ ID NO: 1884129
gugcuugagaaaugaguaa

SEQ ID NO: 2242373 - RNA, 19 nt, Artificial Sequence
  Description of Artificial Sequence: Synthetic oligonucleotide
  Antisense strand to SEQ ID NO: 2242372
uuacucauuucucaagcac

SEQ ID NO: 2242374 - RNA, 19 nt, Artificial Sequence
  Description of Artificial Sequence: Synthetic oligonucleotide
  Sense strand starting at position 3272 of SEQ ID NO: 1884129
agaaaugaguaacaacaga

SEQ ID NO: 2242375 - RNA, 19 nt, Artificial Sequence
  Description of Artificial Sequence: Synthetic oligonucleotide
  Antisense strand to SEQ ID NO: 2242374
ucuguuguuacucauuucu

SEQ ID NO: 2242376 - RNA, 19 nt, Artificial Sequence
  Description of Artificial Sequence: Synthetic oligonucleotide
  Sense strand starting at position 3410 of SEQ ID NO: 1884129
cucugaguuucucuuaaag

SEQ ID NO: 2242377 - RNA, 19 nt, Artificial Sequence
  Description of Artificial Sequence: Synthetic oligonucleotide
  Antisense strand to SEQ ID NO: 2242376
cuuuaagagaaacucagag

SEQ ID NO: 2242378 - RNA, 19 nt, Artificial Sequence
  Description of Artificial Sequence: Synthetic oligonucleotide
  Sense strand starting at position 3529 of SEQ ID NO: 1884129
ugcauaagauuguuugggu

SEQ ID NO: 2242379 - RNA, 19 nt, Artificial Sequence
  Description of Artificial Sequence: Synthetic oligonucleotide
  Antisense strand to SEQ ID NO: 2242378
acccaaacaaucuuaugca

SEQ ID NO: 2242380 - RNA, 19 nt, Artificial Sequence
  Description of Artificial Sequence: Synthetic oligonucleotide
  Sense strand starting at position 3530 of SEQ ID NO: 1884129
gcauaagauuguuugggua

SEQ ID NO: 2242381 - RNA, 19 nt, Artificial Sequence
  Description of Artificial Sequence: Synthetic oligonucleotide
  Antisense strand to SEQ ID NO: 2242380
uacccaaacaaucuuaugc

SEQ ID NO: 2242382 - RNA, 19 nt, Artificial Sequence
  Description of Artificial Sequence: Synthetic oligonucleotide
  Sense strand starting at position 3534 of SEQ ID NO: 1884129
aagauuguuuggguauguu

SEQ ID NO: 2242383 - RNA, 19 nt, Artificial Sequence
  Description of Artificial Sequence: Synthetic oligonucleotide
  Antisense strand to SEQ ID NO: 2242382
aacauacccaaacaaucuu

SEQ ID NO: 2242384 - RNA, 19 nt, Artificial Sequence
  Description of Artificial Sequence: Synthetic oligonucleotide
  Sense strand starting at position 3574 of SEQ ID NO: 1884129
aggcaugucuaguugacua

SEQ ID NO: 2242385 - RNA, 19 nt, Artificial Sequence
  Description of Artificial Sequence: Synthetic oligonucleotide
  Antisense strand to SEQ ID NO: 2242384
uagucaacuagacaugccu

SEQ ID NO: 2242386 - RNA, 19 nt, Artificial Sequence
  Description of Artificial Sequence: Synthetic oligonucleotide
  Sense strand starting at position 3576 of SEQ ID NO: 1884129
gcaugucuaguugacuauu

SEQ ID NO: 2242387 - RNA, 19 nt, Artificial Sequence
  Description of Artificial Sequence: Synthetic oligonucleotide
  Antisense strand to SEQ ID NO: 2242386
aauagucaacuagacaugc

SEQ ID NO: 2242388 - RNA, 19 nt, Artificial Sequence
  Description of Artificial Sequence: Synthetic oligonucleotide
  Sense strand starting at position 3579 of SEQ ID NO: 1884129
ugucuaguugacuauugua

SEQ ID NO: 2242389 - RNA, 19 nt, Artificial Sequence
  Description of Artificial Sequence: Synthetic oligonucleotide
  Antisense strand to SEQ ID NO: 2242388
uacaauagucaacuagaca

SEQ ID NO: 2242390 - RNA, 19 nt, Artificial Sequence
  Description of Artificial Sequence: Synthetic oligonucleotide
  Sense strand starting at position 3630 of SEQ ID NO: 1884129
acauaauugcuggaaaugu

SEQ ID NO: 2242391 - RNA, 19 nt, Artificial Sequence
  Description of Artificial Sequence: Synthetic oligonucleotide
  Antisense strand to SEQ ID NO: 2242390
acauuuccagcaauuaugu

SEQ ID NO: 2242392 - RNA, 19 nt, Artificial Sequence
  Description of Artificial Sequence: Synthetic oligonucleotide
  Sense strand starting at position 3638 of SEQ ID NO: 1884129
gcuggaaaugugcauaauu

SEQ ID NO: 2242393 - RNA, 19 nt, Artificial Sequence
  Description of Artificial Sequence: Synthetic oligonucleotide
  Antisense strand to SEQ ID NO: 2242392
aauuaugcacauuuccagc

SEQ ID NO: 2242394 - RNA, 19 nt, Artificial Sequence
  Description of Artificial Sequence: Synthetic oligonucleotide
  Sense strand starting at position 3649 of SEQ ID NO: 1884129
gcauaauugccugauccca

SEQ ID NO: 2242395 - RNA, 19 nt, Artificial Sequence
  Description of Artificial Sequence: Synthetic oligonucleotide
  Antisense strand to SEQ ID NO: 2242394
ugggaucaggcaauuaugc

SEQ ID NO: 2242396 - RNA, 19 nt, Artificial Sequence
  Description of Artificial Sequence: Synthetic oligonucleotide
  Sense strand starting at position 3745 of SEQ ID NO: 1884129
auuagaacuguuuguggac

SEQ ID NO: 2242397 - RNA, 19 nt, Artificial Sequence
  Description of Artificial Sequence: Synthetic oligonucleotide
  Antisense strand to SEQ ID NO: 2242396
guccacaaacaguucuaau

SEQ ID NO: 2242398 - RNA, 19 nt, Artificial Sequence
  Description of Artificial Sequence: Synthetic oligonucleotide
  Sense strand starting at position 3938 of SEQ ID NO: 1884129
uugucaacacucuguggau

SEQ ID NO: 2242399 - RNA, 19 nt, Artificial Sequence
  Description of Artificial Sequence: Synthetic oligonucleotide
  Antisense strand to SEQ ID NO: 2242398
auccacagaguguugacaa

SEQ ID NO: 2242400 - RNA, 19 nt, Artificial Sequence
  Description of Artificial Sequence: Synthetic oligonucleotide
  Sense strand starting at position 3939 of SEQ ID NO: 1884129
ugucaacacucuguggauu

SEQ ID NO: 2242401 - RNA, 19 nt, Artificial Sequence
  Description of Artificial Sequence: Synthetic oligonucleotide
  Antisense strand to SEQ ID NO: 2242400
aauccacagaguguugaca

SEQ ID NO: 2242402 - RNA, 19 nt, Artificial Sequence
  Description of Artificial Sequence: Synthetic oligonucleotide
  Sense strand starting at position 3940 of SEQ ID NO: 1884129
gucaacacucuguggauua

SEQ ID NO: 2242403 - RNA, 19 nt, Artificial Sequence
  Description of Artificial Sequence: Synthetic oligonucleotide
  Antisense strand to SEQ ID NO: 2242402
uaauccacagaguguugac

SEQ ID NO: 2242404 - RNA, 19 nt, Artificial Sequence
  Description of Artificial Sequence: Synthetic oligonucleotide
  Sense strand starting at position 31 of SEQ ID NO: 1884130
uuguuuguggccguaacuu

SEQ ID NO: 2242405 - RNA, 19 nt, Artificial Sequence
  Description of Artificial Sequence: Synthetic oligonucleotide
  Antisense strand to SEQ ID NO: 2242404
aaguuacggccacaaacaa

SEQ ID NO: 2242406 - RNA, 19 nt, Artificial Sequence
  Description of Artificial Sequence: Synthetic oligonucleotide
  Sense strand starting at position 75 of SEQ ID NO: 1884130
ucauuuguaugguuguuau

SEQ ID NO: 2242407 - RNA, 19 nt, Artificial Sequence
  Description of Artificial Sequence: Synthetic oligonucleotide
  Antisense strand to SEQ ID NO: 2242406
auaacaaccauacaaauga

SEQ ID NO: 2242408 - RNA, 19 nt, Artificial Sequence
  Description of Artificial Sequence: Synthetic oligonucleotide
  Sense strand starting at position 586 of SEQ ID NO: 1884130
caaggucuuccugagcaaa

SEQ ID NO: 2242409 - RNA, 19 nt, Artificial Sequence
  Description of Artificial Sequence: Synthetic oligonucleotide
  Antisense strand to SEQ ID NO: 2242408
uuugcucaggaagaccuug

SEQ ID NO: 2242410 - RNA, 19 nt, Artificial Sequence
  Description of Artificial Sequence: Synthetic oligonucleotide
  Sense strand starting at position 589 of SEQ ID NO: 1884130
ggucuuccugagcaaagga

SEQ ID NO: 2242411 - RNA, 19 nt, Artificial Sequence
  Description of Artificial Sequence: Synthetic oligonucleotide
  Antisense strand to SEQ ID NO: 2242410
uccuuugcucaggaagacc

SEQ ID NO: 2242412 - RNA, 19 nt, Artificial Sequence
  Description of Artificial Sequence: Synthetic oligonucleotide
  Sense strand starting at position 1088 of SEQ ID NO: 1884130
uuugaaagugugcaauauc

SEQ ID NO: 2242413 - RNA, 19 nt, Artificial Sequence
  Description of Artificial Sequence: Synthetic oligonucleotide
  Antisense strand to SEQ ID NO: 2242412
gauauugcacacuuucaaa

SEQ ID NO: 2242414 - RNA, 19 nt, Artificial Sequence
  Description of Artificial Sequence: Synthetic oligonucleotide
  Sense strand starting at position 1420 of SEQ ID NO: 1884130
ugcuguguucuguccugca

SEQ ID NO: 2242415 - RNA, 19 nt, Artificial Sequence
  Description of Artificial Sequence: Synthetic oligonucleotide
  Antisense strand to SEQ ID NO: 2242414
ugcaggacagaacacagca

SEQ ID NO: 2242416 - RNA, 19 nt, Artificial Sequence
  Description of Artificial Sequence: Synthetic oligonucleotide
  Sense strand starting at position 1663 of SEQ ID NO: 1884130
gcaugcuuauguccagaaa

SEQ ID NO: 2242417 - RNA, 19 nt, Artificial Sequence
  Description of Artificial Sequence: Synthetic oligonucleotide
  Antisense strand to SEQ ID NO: 2242416
uuucuggacauaagcaugc

SEQ ID NO: 2242418 - RNA, 19 nt, Artificial Sequence
  Description of Artificial Sequence: Synthetic oligonucleotide
  Sense strand starting at position 1664 of SEQ ID NO: 1884130
caugcuuauguccagaaag

SEQ ID NO: 2242419 - RNA, 19 nt, Artificial Sequence
  Description of Artificial Sequence: Synthetic oligonucleotide
  Antisense strand to SEQ ID NO: 2242418
cuuucuggacauaagcaug

SEQ ID NO: 2242420 - RNA, 19 nt, Artificial Sequence
  Description of Artificial Sequence: Synthetic oligonucleotide
  Sense strand starting at position 1861 of SEQ ID NO: 1884130
ggaggaaccggccaguuau

SEQ ID NO: 2242421 - RNA, 19 nt, Artificial Sequence
  Description of Artificial Sequence: Synthetic oligonucleotide
  Antisense strand to SEQ ID NO: 2242420
auaacuggccgguuccucc

SEQ ID NO: 2242422 - RNA, 19 nt, Artificial Sequence
  Description of Artificial Sequence: Synthetic oligonucleotide
  Sense strand starting at position 2134 of SEQ ID NO: 1884130
gguuuaaugacggagucuu

SEQ ID NO: 2242423 - RNA, 19 nt, Artificial Sequence
  Description of Artificial Sequence: Synthetic oligonucleotide
  Antisense strand to SEQ ID NO: 2242422
aagacuccgucauuaaacc

SEQ ID NO: 2242424 - RNA, 19 nt, Artificial Sequence
  Description of Artificial Sequence: Synthetic oligonucleotide
  Sense strand starting at position 2144 of SEQ ID NO: 1884130
cggagucuuauggguauua

SEQ ID NO: 2242425 - RNA, 19 nt, Artificial Sequence
  Description of Artificial Sequence: Synthetic oligonucleotide
  Antisense strand to SEQ ID NO: 2242424
uaauacccauaagacuccg

SEQ ID NO: 2242426 - RNA, 19 nt, Artificial Sequence
  Description of Artificial Sequence: Synthetic oligonucleotide
  Sense strand starting at position 2145 of SEQ ID NO: 1884130
ggagucuuauggguauuaa

SEQ ID NO: 2242427 - RNA, 19 nt, Artificial Sequence
  Description of Artificial Sequence: Synthetic oligonucleotide
  Antisense strand to SEQ ID NO: 2242426
uuaauacccauaagacucc

SEQ ID NO: 2242428 - RNA, 19 nt, Artificial Sequence
  Description of Artificial Sequence: Synthetic oligonucleotide
  Sense strand starting at position 2275 of SEQ ID NO: 1884130
cuggcagaguccuuaaaga

SEQ ID NO: 2242429 - RNA, 19 nt, Artificial Sequence
  Description of Artificial Sequence: Synthetic oligonucleotide
  Antisense strand to SEQ ID NO: 2242428
ucuuuaaggacucugccag

SEQ ID NO: 2242430 - RNA, 19 nt, Artificial Sequence
  Description of Artificial Sequence: Synthetic oligonucleotide
  Sense strand starting at position 2370 of SEQ ID NO: 1884130
agugaauuaacuuggguua

SEQ ID NO: 2242431 - RNA, 19 nt, Artificial Sequence
  Description of Artificial Sequence: Synthetic oligonucleotide
  Antisense strand to SEQ ID NO: 2242430
uaacccaaguuaauucacu

SEQ ID NO: 2242432 - RNA, 19 nt, Artificial Sequence
  Description of Artificial Sequence: Synthetic oligonucleotide
  Sense strand starting at position 2371 of SEQ ID NO: 1884130
gugaauuaacuuggguuaa

SEQ ID NO: 2242433 - RNA, 19 nt, Artificial Sequence
  Description of Artificial Sequence: Synthetic oligonucleotide
  Antisense strand to SEQ ID NO: 2242432
uuaacccaaguuaauucac

SEQ ID NO: 2242434 - RNA, 19 nt, Artificial Sequence
  Description of Artificial Sequence: Synthetic oligonucleotide
  Sense strand starting at position 2383 of SEQ ID NO: 1884130
ggguuaaucuaguucuuuc

SEQ ID NO: 2242435 - RNA, 19 nt, Artificial Sequence
  Description of Artificial Sequence: Synthetic oligonucleotide
  Antisense strand to SEQ ID NO: 2242434
gaaagaacuagauuaaccc

SEQ ID NO: 2242436 - RNA, 19 nt, Artificial Sequence
  Description of Artificial Sequence: Synthetic oligonucleotide
  Sense strand starting at position 2558 of SEQ ID NO: 1884130
uacgauugugcggauuaau

SEQ ID NO: 2242437 - RNA, 19 nt, Artificial Sequence
  Description of Artificial Sequence: Synthetic oligonucleotide
  Antisense strand to SEQ ID NO: 2242436
auuaauccgcacaaucgua

SEQ ID NO: 2242438 - RNA, 19 nt, Artificial Sequence
  Description of Artificial Sequence: Synthetic oligonucleotide
  Sense strand starting at position 2561 of SEQ ID NO: 1884130
gauugugcggauuaaucca

SEQ ID NO: 2242439 - RNA, 19 nt, Artificial Sequence
  Description of Artificial Sequence: Synthetic oligonucleotide
  Antisense strand to SEQ ID NO: 2242438
uggauuaauccgcacaauc

SEQ ID NO: 2242440 - RNA, 19 nt, Artificial Sequence
  Description of Artificial Sequence: Synthetic oligonucleotide
  Sense strand starting at position 2566 of SEQ ID NO: 1884130
ugcggauuaauccagaguu

SEQ ID NO: 2242441 - RNA, 19 nt, Artificial Sequence
  Description of Artificial Sequence: Synthetic oligonucleotide
  Antisense strand to SEQ ID NO: 2242440
aacucuggauuaauccgca

SEQ ID NO: 2242442 - RNA, 19 nt, Artificial Sequence
  Description of Artificial Sequence: Synthetic oligonucleotide
  Sense strand starting at position 2568 of SEQ ID NO: 1884130
cggauuaauccagaguuua

SEQ ID NO: 2242443 - RNA, 19 nt, Artificial Sequence
  Description of Artificial Sequence: Synthetic oligonucleotide
  Antisense strand to SEQ ID NO: 2242442
uaaacucuggauuaauccg

SEQ ID NO: 2242444 - RNA, 19 nt, Artificial Sequence
  Description of Artificial Sequence: Synthetic oligonucleotide
  Sense strand starting at position 2626 of SEQ ID NO: 1884130
ucucuaccuugagcuguaa

SEQ ID NO: 2242445 - RNA, 19 nt, Artificial Sequence
  Description of Artificial Sequence: Synthetic oligonucleotide
  Antisense strand to SEQ ID NO: 2242444
uuacagcucaagguagaga

SEQ ID NO: 2242446 - RNA, 19 nt, Artificial Sequence
  Description of Artificial Sequence: Synthetic oligonucleotide
  Sense strand starting at position 2711 of SEQ ID NO: 1884130
ggcagagaguuucuuucca

SEQ ID NO: 2242447 - RNA, 19 nt, Artificial Sequence
  Description of Artificial Sequence: Synthetic oligonucleotide
  Antisense strand to SEQ ID NO: 2242446
uggaaagaaacucucugcc

SEQ ID NO: 2242448 - RNA, 19 nt, Artificial Sequence
  Description of Artificial Sequence: Synthetic oligonucleotide
  Sense strand starting at position 2900 of SEQ ID NO: 1884130
accucuuguuaaccugaga

SEQ ID NO: 2242449 - RNA, 19 nt, Artificial Sequence
  Description of Artificial Sequence: Synthetic oligonucleotide
  Antisense strand to SEQ ID NO: 2242448
ucucagguuaacaagaggu

SEQ ID NO: 2242450 - RNA, 19 nt, Artificial Sequence
  Description of Artificial Sequence: Synthetic oligonucleotide
  Sense strand starting at position 3109 of SEQ ID NO: 1884130
ccguaaugacuccacuguu

SEQ ID NO: 2242451 - RNA, 19 nt, Artificial Sequence
  Description of Artificial Sequence: Synthetic oligonucleotide
  Antisense strand to SEQ ID NO: 2242450
aacaguggagucauuacgg

SEQ ID NO: 2242452 - RNA, 19 nt, Artificial Sequence
  Description of Artificial Sequence: Synthetic oligonucleotide
  Sense strand starting at position 3132 of SEQ ID NO: 1884130
cuguguuacaucugagaag

SEQ ID NO: 2242453 - RNA, 19 nt, Artificial Sequence
  Description of Artificial Sequence: Synthetic oligonucleotide
  Antisense strand to SEQ ID NO: 2242452
cuucucagauguaacacag

SEQ ID NO: 2242454 - RNA, 19 nt, Artificial Sequence
  Description of Artificial Sequence: Synthetic oligonucleotide
  Sense strand starting at position 3236 of SEQ ID NO: 1884130
gauuaaucacuacgggcau

SEQ ID NO: 2242455 - RNA, 19 nt, Artificial Sequence
  Description of Artificial Sequence: Synthetic oligonucleotide
  Antisense strand to SEQ ID NO: 2242454
augcccguagugauuaauc

SEQ ID NO: 2242456 - RNA, 19 nt, Artificial Sequence
  Description of Artificial Sequence: Synthetic oligonucleotide
  Sense strand starting at position 3289 of SEQ ID NO: 1884130
gcacuuaauccagaaaguu

SEQ ID NO: 2242457 - RNA, 19 nt, Artificial Sequence
  Description of Artificial Sequence: Synthetic oligonucleotide
  Antisense strand to SEQ ID NO: 2242456
aacuuucuggauuaagugc

SEQ ID NO: 2242458 - RNA, 19 nt, Artificial Sequence
  Description of Artificial Sequence: Synthetic oligonucleotide
  Sense strand starting at position 3333 of SEQ ID NO: 1884130
gcauuuaccucugaaauug

SEQ ID NO: 2242459 - RNA, 19 nt, Artificial Sequence
  Description of Artificial Sequence: Synthetic oligonucleotide
  Antisense strand to SEQ ID NO: 2242458
caauuucagagguaaaugc

SEQ ID NO: 2242460 - RNA, 19 nt, Artificial Sequence
  Description of Artificial Sequence: Synthetic oligonucleotide
  Sense strand starting at position 3366 of SEQ ID NO: 1884130
uguugcaugcaucuaguuu

SEQ ID NO: 2242461 - RNA, 19 nt, Artificial Sequence
  Description of Artificial Sequence: Synthetic oligonucleotide
  Antisense strand to SEQ ID NO: 2242460
aaacuagaugcaugcaaca

SEQ ID NO: 2242462 - RNA, 19 nt, Artificial Sequence
  Description of Artificial Sequence: Synthetic oligonucleotide
  Sense strand starting at position 3398 of SEQ ID NO: 1884130
gaauuagacuugucaugaa

SEQ ID NO: 2242463 - RNA, 19 nt, Artificial Sequence
  Description of Artificial Sequence: Synthetic oligonucleotide
  Antisense strand to SEQ ID NO: 2242462
uucaugacaagucuaauuc

SEQ ID NO: 2242464 - RNA, 19 nt, Artificial Sequence
  Description of Artificial Sequence: Synthetic oligonucleotide
  Sense strand starting at position 3408 of SEQ ID NO: 1884130
ugucaugaagcagguauaa

SEQ ID NO: 2242465 - RNA, 19 nt, Artificial Sequence
  Description of Artificial Sequence: Synthetic oligonucleotide
  Antisense strand to SEQ ID NO: 2242464
uuauaccugcuucaugaca

SEQ ID NO: 2242466 - RNA, 19 nt, Artificial Sequence
  Description of Artificial Sequence: Synthetic oligonucleotide
  Sense strand starting at position 3474 of SEQ ID NO: 1884130
gcucucugugagcaagaua

SEQ ID NO: 2242467 - RNA, 19 nt, Artificial Sequence
  Description of Artificial Sequence: Synthetic oligonucleotide
  Antisense strand to SEQ ID NO: 2242466
uaucuugcucacagagagc

SEQ ID NO: 2242468 - RNA, 19 nt, Artificial Sequence
  Description of Artificial Sequence: Synthetic oligonucleotide
  Sense strand starting at position 3643 of SEQ ID NO: 1884130
ccuacuuguccauauggua

SEQ ID NO: 2242469 - RNA, 19 nt, Artificial Sequence
  Description of Artificial Sequence: Synthetic oligonucleotide
  Antisense strand to SEQ ID NO: 2242468
uaccauauggacaaguagg

SEQ ID NO: 2242470 - RNA, 19 nt, Artificial Sequence
  Description of Artificial Sequence: Synthetic oligonucleotide
  Sense strand starting at position 3651 of SEQ ID NO: 1884130
uccauaugguacuuugcaa

SEQ ID NO: 2242471 - RNA, 19 nt, Artificial Sequence
  Description of Artificial Sequence: Synthetic oligonucleotide
  Antisense strand to SEQ ID NO: 2242470
uugcaaaguaccauaugga

SEQ ID NO: 2242472 - RNA, 19 nt, Artificial Sequence
  Description of Artificial Sequence: Synthetic oligonucleotide
  Sense strand starting at position 3720 of SEQ ID NO: 1884130
ugccuauuacuggauagug

SEQ ID NO: 2242473 - RNA, 19 nt, Artificial Sequence
  Description of Artificial Sequence: Synthetic oligonucleotide
  Antisense strand to SEQ ID NO: 2242472
cacuauccaguaauaggca

SEQ ID NO: 2242474 - RNA, 19 nt, Artificial Sequence
  Description of Artificial Sequence: Synthetic oligonucleotide
  Sense strand starting at position 3728 of SEQ ID NO: 1884130
acuggauagugucuuaacu

SEQ ID NO: 2242475 - RNA, 19 nt, Artificial Sequence
  Description of Artificial Sequence: Synthetic oligonucleotide
  Antisense strand to SEQ ID NO: 2242474
aguuaagacacuauccagu

SEQ ID NO: 2242476 - RNA, 19 nt, Artificial Sequence
  Description of Artificial Sequence: Synthetic oligonucleotide
  Sense strand starting at position 3830 of SEQ ID NO: 1884130
ggaugcuuugaacaaguuu

SEQ ID NO: 2242477 - RNA, 19 nt, Artificial Sequence
  Description of Artificial Sequence: Synthetic oligonucleotide
  Antisense strand to SEQ ID NO: 2242476
aaacuuguucaaagcaucc

SEQ ID NO: 2242478 - RNA, 19 nt, Artificial Sequence
  Description of Artificial Sequence: Synthetic oligonucleotide
  Sense strand starting at position 3855 of SEQ ID NO: 1884130
uuacaauaugccgagcuua

SEQ ID NO: 2242479 - RNA, 19 nt, Artificial Sequence
  Description of Artificial Sequence: Synthetic oligonucleotide
  Antisense strand to SEQ ID NO: 2242478
uaagcucggcauauuguaa

SEQ ID NO: 2242480 - RNA, 19 nt, Artificial Sequence
  Description of Artificial Sequence: Synthetic oligonucleotide
  Sense strand starting at position 3885 of SEQ ID NO: 1884130
ucaugcugugaauacauua

SEQ ID NO: 2242481 - RNA, 19 nt, Artificial Sequence
  Description of Artificial Sequence: Synthetic oligonucleotide
  Antisense strand to SEQ ID NO: 2242480
uaauguauucacagcauga

SEQ ID NO: 2242482 - RNA, 19 nt, Artificial Sequence
  Description of Artificial Sequence: Synthetic oligonucleotide
  Sense strand starting at position 3933 of SEQ ID NO: 1884130
auggaaauuucuuagccac

SEQ ID NO: 2242483 - RNA, 19 nt, Artificial Sequence
  Description of Artificial Sequence: Synthetic oligonucleotide
  Antisense strand to SEQ ID NO: 2242482
guggcuaagaaauuuccau

SEQ ID NO: 2242484 - RNA, 19 nt, Artificial Sequence
  Description of Artificial Sequence: Synthetic oligonucleotide
  Sense strand starting at position 51 of SEQ ID NO: 1884131
uccugagaauggcaaacau

SEQ ID NO: 2242485 - RNA, 19 nt, Artificial Sequence
  Description of Artificial Sequence: Synthetic oligonucleotide
  Antisense strand to SEQ ID NO: 2242484
auguuugccauucucagga

SEQ ID NO: 2242486 - RNA, 19 nt, Artificial Sequence
  Description of Artificial Sequence: Synthetic oligonucleotide
  Sense strand starting at position 168 of SEQ ID NO: 1884131
agggcuuugccaggaguuu

SEQ ID NO: 2242487 - RNA, 19 nt, Artificial Sequence
  Description of Artificial Sequence: Synthetic oligonucleotide
  Antisense strand to SEQ ID NO: 2242486
aaacuccuggcaaagcccu

SEQ ID NO: 2242488 - RNA, 19 nt, Artificial Sequence
  Description of Artificial Sequence: Synthetic oligonucleotide
  Sense strand starting at position 180 of SEQ ID NO: 1884131
ggaguuugcugccugaguu

SEQ ID NO: 2242489 - RNA, 19 nt, Artificial Sequence
  Description of Artificial Sequence: Synthetic oligonucleotide
  Antisense strand to SEQ ID NO: 2242488
aacucaggcagcaaacucc

SEQ ID NO: 2242490 - RNA, 19 nt, Artificial Sequence
  Description of Artificial Sequence: Synthetic oligonucleotide
  Sense strand starting at position 181 of SEQ ID NO: 1884131
gaguuugcugccugaguug

SEQ ID NO: 2242491 - RNA, 19 nt, Artificial Sequence
  Description of Artificial Sequence: Synthetic oligonucleotide
  Antisense strand to SEQ ID NO: 2242490
caacucaggcagcaaacuc

SEQ ID NO: 2242492 - RNA, 19 nt, Artificial Sequence
  Description of Artificial Sequence: Synthetic oligonucleotide
  Sense strand starting at position 184 of SEQ ID NO: 1884131
uuugcugccugaguugauu

SEQ ID NO: 2242493 - RNA, 19 nt, Artificial Sequence
  Description of Artificial Sequence: Synthetic oligonucleotide
  Antisense strand to SEQ ID NO: 2242492
aaucaacucaggcagcaaa

SEQ ID NO: 2242494 - RNA, 19 nt, Artificial Sequence
  Description of Artificial Sequence: Synthetic oligonucleotide
  Sense strand starting at position 186 of SEQ ID NO: 1884131
ugcugccugaguugauuaa

SEQ ID NO: 2242495 - RNA, 19 nt, Artificial Sequence
  Description of Artificial Sequence: Synthetic oligonucleotide
  Antisense strand to SEQ ID NO: 2242494
uuaaucaacucaggcagca

SEQ ID NO: 2242496 - RNA, 19 nt, Artificial Sequence
  Description of Artificial Sequence: Synthetic oligonucleotide
  Sense strand starting at position 190 of SEQ ID NO: 1884131
gccugaguugauuaaggug

SEQ ID NO: 2242497 - RNA, 19 nt, Artificial Sequence
  Description of Artificial Sequence: Synthetic oligonucleotide
  Antisense strand to SEQ ID NO: 2242496
caccuuaaucaacucaggc

SEQ ID NO: 2242498 - RNA, 19 nt, Artificial Sequence
  Description of Artificial Sequence: Synthetic oligonucleotide
  Sense strand starting at position 285 of SEQ ID NO: 1884131
ucuccaaagugagaucauu

SEQ ID NO: 2242499 - RNA, 19 nt, Artificial Sequence
  Description of Artificial Sequence: Synthetic oligonucleotide
  Antisense strand to SEQ ID NO: 2242498
aaugaucucacuuuggaga

SEQ ID NO: 2242500 - RNA, 19 nt, Artificial Sequence
  Description of Artificial Sequence: Synthetic oligonucleotide
  Sense strand starting at position 293 of SEQ ID NO: 1884131
gugagaucauuugaccaug

SEQ ID NO: 2242501 - RNA, 19 nt, Artificial Sequence
  Description of Artificial Sequence: Synthetic oligonucleotide
  Antisense strand to SEQ ID NO: 2242500
cauggucaaaugaucucac

SEQ ID NO: 2242502 - RNA, 19 nt, Artificial Sequence
  Description of Artificial Sequence: Synthetic oligonucleotide
  Sense strand starting at position 304 of SEQ ID NO: 1884131
ugaccaugauugggagaua

SEQ ID NO: 2242503 - RNA, 19 nt, Artificial Sequence
  Description of Artificial Sequence: Synthetic oligonucleotide
  Antisense strand to SEQ ID NO: 2242502
uaucucccaaucaugguca

SEQ ID NO: 2242504 - RNA, 19 nt, Artificial Sequence
  Description of Artificial Sequence: Synthetic oligonucleotide
  Sense strand starting at position 305 of SEQ ID NO: 1884131
gaccaugauugggagauaa

SEQ ID NO: 2242505 - RNA, 19 nt, Artificial Sequence
  Description of Artificial Sequence: Synthetic oligonucleotide
  Antisense strand to SEQ ID NO: 2242504
uuaucucccaaucaugguc

SEQ ID NO: 2242506 - RNA, 19 nt, Artificial Sequence
  Description of Artificial Sequence: Synthetic oligonucleotide
  Sense strand starting at position 343 of SEQ ID NO: 1884131
uuucuaaugucaucccugu

SEQ ID NO: 2242507 - RNA, 19 nt, Artificial Sequence
  Description of Artificial Sequence: Synthetic oligonucleotide
  Antisense strand to SEQ ID NO: 2242506
acagggaugacauuagaaa

SEQ ID NO: 2242508 - RNA, 19 nt, Artificial Sequence
  Description of Artificial Sequence: Synthetic oligonucleotide
  Sense strand starting at position 347 of SEQ ID NO: 1884131
uaaugucaucccuguggca

SEQ ID NO: 2242509 - RNA, 19 nt, Artificial Sequence
  Description of Artificial Sequence: Synthetic oligonucleotide
  Antisense strand to SEQ ID NO: 2242508
ugccacagggaugacauua

SEQ ID NO: 2242510 - RNA, 19 nt, Artificial Sequence
  Description of Artificial Sequence: Synthetic oligonucleotide
  Sense strand starting at position 349 of SEQ ID NO: 1884131
augucaucccuguggcaaa

SEQ ID NO: 2242511 - RNA, 19 nt, Artificial Sequence
  Description of Artificial Sequence: Synthetic oligonucleotide
  Antisense strand to SEQ ID NO: 2242510
uuugccacagggaugacau

SEQ ID NO: 2242512 - RNA, 19 nt, Artificial Sequence
  Description of Artificial Sequence: Synthetic oligonucleotide
  Sense strand starting at position 361 of SEQ ID NO: 1884131
uggcaaacccauugucuau

SEQ ID NO: 2242513 - RNA, 19 nt, Artificial Sequence
  Description of Artificial Sequence: Synthetic oligonucleotide
  Antisense strand to SEQ ID NO: 2242512
auagacaauggguuugcca

SEQ ID NO: 2242514 - RNA, 19 nt, Artificial Sequence
  Description of Artificial Sequence: Synthetic oligonucleotide
  Sense strand starting at position 367 of SEQ ID NO: 1884131
acccauugucuaugaugua

SEQ ID NO: 2242515 - RNA, 19 nt, Artificial Sequence
  Description of Artificial Sequence: Synthetic oligonucleotide
  Antisense strand to SEQ ID NO: 2242514
uacaucauagacaaugggu

SEQ ID NO: 2242516 - RNA, 19 nt, Artificial Sequence
  Description of Artificial Sequence: Synthetic oligonucleotide
  Sense strand starting at position 376 of SEQ ID NO: 1884131
cuaugauguaucuggguuc

SEQ ID NO: 2242517 - RNA, 19 nt, Artificial Sequence
  Description of Artificial Sequence: Synthetic oligonucleotide
  Antisense strand to SEQ ID NO: 2242516
gaacccagauacaucauag

SEQ ID NO: 2242518 - RNA, 19 nt, Artificial Sequence
  Description of Artificial Sequence: Synthetic oligonucleotide
  Sense strand starting at position 379 of SEQ ID NO: 1884131
ugauguaucuggguucaga

SEQ ID NO: 2242519 - RNA, 19 nt, Artificial Sequence
  Description of Artificial Sequence: Synthetic oligonucleotide
  Antisense strand to SEQ ID NO: 2242518
ucugaacccagauacauca

SEQ ID NO: 2242520 - RNA, 19 nt, Artificial Sequence
  Description of Artificial Sequence: Synthetic oligonucleotide
  Sense strand starting at position 450 of SEQ ID NO: 1884131
ggaccacucccauguauua

SEQ ID NO: 2242521 - RNA, 19 nt, Artificial Sequence
  Description of Artificial Sequence: Synthetic oligonucleotide
  Antisense strand to SEQ ID NO: 2242520
uaauacaugggaguggucc

SEQ ID NO: 2242522 - RNA, 19 nt, Artificial Sequence
  Description of Artificial Sequence: Synthetic oligonucleotide
  Sense strand starting at position 473 of SEQ ID NO: 1884131
caccuugauuaagggauga

SEQ ID NO: 2242523 - RNA, 19 nt, Artificial Sequence
  Description of Artificial Sequence: Synthetic oligonucleotide
  Antisense strand to SEQ ID NO: 2242522
ucaucccuuaaucaaggug

SEQ ID NO: 2242524 - RNA, 19 nt, Artificial Sequence
  Description of Artificial Sequence: Synthetic oligonucleotide
  Sense strand starting at position 577 of SEQ ID NO: 1884131
ccagaugggugagaauuca

SEQ ID NO: 2242525 - RNA, 19 nt, Artificial Sequence
  Description of Artificial Sequence: Synthetic oligonucleotide
  Antisense strand to SEQ ID NO: 2242524
ugaauucucacccaucugg

SEQ ID NO: 2242526 - RNA, 19 nt, Artificial Sequence
  Description of Artificial Sequence: Synthetic oligonucleotide
  Sense strand starting at position 618 of SEQ ID NO: 1884131
caacgcauccugugaggau

SEQ ID NO: 2242527 - RNA, 19 nt, Artificial Sequence
  Description of Artificial Sequence: Synthetic oligonucleotide
  Antisense strand to SEQ ID NO: 2242526
auccucacaggaugcguug

SEQ ID NO: 2242528 - RNA, 19 nt, Artificial Sequence
  Description of Artificial Sequence: Synthetic oligonucleotide
  Sense strand starting at position 652 of SEQ ID NO: 1884131
guucuaccuuucuuugaga

SEQ ID NO: 2242529 - RNA, 19 nt, Artificial Sequence
  Description of Artificial Sequence: Synthetic oligonucleotide
  Antisense strand to SEQ ID NO: 2242528
ucucaaagaaagguagaac

SEQ ID NO: 2242530 - RNA, 19 nt, Artificial Sequence
  Description of Artificial Sequence: Synthetic oligonucleotide
  Sense strand starting at position 680 of SEQ ID NO: 1884131
aagggugauugugaagaga

SEQ ID NO: 2242531 - RNA, 19 nt, Artificial Sequence
  Description of Artificial Sequence: Synthetic oligonucleotide
  Antisense strand to SEQ ID NO: 2242530
ucucuucacaaucacccuu

SEQ ID NO: 2242532 - RNA, 19 nt, Artificial Sequence
  Description of Artificial Sequence: Synthetic oligonucleotide
  Sense strand starting at position 682 of SEQ ID NO: 1884131
gggugauugugaagagaaa

SEQ ID NO: 2242533 - RNA, 19 nt, Artificial Sequence
  Description of Artificial Sequence: Synthetic oligonucleotide
  Antisense strand to SEQ ID NO: 2242532
uuucucuucacaaucaccc

SEQ ID NO: 2242534 - RNA, 19 nt, Artificial Sequence
  Description of Artificial Sequence: Synthetic oligonucleotide
  Sense strand starting at position 782 of SEQ ID NO: 1884131
agucaagaaucuggacauu

SEQ ID NO: 2242535 - RNA, 19 nt, Artificial Sequence
  Description of Artificial Sequence: Synthetic oligonucleotide
  Antisense strand to SEQ ID NO: 2242534
aauguccagauucuugacu

SEQ ID NO: 2242536 - RNA, 19 nt, Artificial Sequence
  Description of Artificial Sequence: Synthetic oligonucleotide
  Sense strand starting at position 905 of SEQ ID NO: 1884131
ugagaaauguaacugcuaa

SEQ ID NO: 2242537 - RNA, 19 nt, Artificial Sequence
  Description of Artificial Sequence: Synthetic oligonucleotide
  Antisense strand to SEQ ID NO: 2242536
uuagcaguuacauuucuca

SEQ ID NO: 2242538 - RNA, 19 nt, Artificial Sequence
  Description of Artificial Sequence: Synthetic oligonucleotide
  Sense strand starting at position 993 of SEQ ID NO: 1884131
acuggaaauuacuaccaga

SEQ ID NO: 2242539 - RNA, 19 nt, Artificial Sequence
  Description of Artificial Sequence: Synthetic oligonucleotide
  Antisense strand to SEQ ID NO: 2242538
ucugguaguaauuuccagu

SEQ ID NO: 2242540 - RNA, 19 nt, Artificial Sequence
  Description of Artificial Sequence: Synthetic oligonucleotide
  Sense strand starting at position 996 of SEQ ID NO: 1884131
ggaaauuacuaccagagac

SEQ ID NO: 2242541 - RNA, 19 nt, Artificial Sequence
  Description of Artificial Sequence: Synthetic oligonucleotide
  Antisense strand to SEQ ID NO: 2242540
gucucugguaguaauuucc

SEQ ID NO: 2242542 - RNA, 19 nt, Artificial Sequence
  Description of Artificial Sequence: Synthetic oligonucleotide
  Sense strand starting at position 1011 of SEQ ID NO: 1884131
agaccuugauuugaaacaa

SEQ ID NO: 2242543 - RNA, 19 nt, Artificial Sequence
  Description of Artificial Sequence: Synthetic oligonucleotide
  Antisense strand to SEQ ID NO: 2242542
uuguuucaaaucaaggucu

SEQ ID NO: 2242544 - RNA, 19 nt, Artificial Sequence
  Description of Artificial Sequence: Synthetic oligonucleotide
  Sense strand starting at position 1115 of SEQ ID NO: 1884131
gugugucuccguguaagua

SEQ ID NO: 2242545 - RNA, 19 nt, Artificial Sequence
  Description of Artificial Sequence: Synthetic oligonucleotide
  Antisense strand to SEQ ID NO: 2242544
uacuuacacggagacacac

SEQ ID NO: 2242546 - RNA, 19 nt, Artificial Sequence
  Description of Artificial Sequence: Synthetic oligonucleotide
  Sense strand starting at position 1116 of SEQ ID NO: 1884131
ugugucuccguguaaguau

SEQ ID NO: 2242547 - RNA, 19 nt, Artificial Sequence
  Description of Artificial Sequence: Synthetic oligonucleotide
  Antisense strand to SEQ ID NO: 2242546
auacuuacacggagacaca

SEQ ID NO: 2242548 - RNA, 19 nt, Artificial Sequence
  Description of Artificial Sequence: Synthetic oligonucleotide
  Sense strand starting at position 1123 of SEQ ID NO: 1884131
ccguguaaguauucugaau

SEQ ID NO: 2242549 - RNA, 19 nt, Artificial Sequence
  Description of Artificial Sequence: Synthetic oligonucleotide
  Antisense strand to SEQ ID NO: 2242548
auucagaauacuuacacgg

SEQ ID NO: 2242550 - RNA, 19 nt, Artificial Sequence
  Description of Artificial Sequence: Synthetic oligonucleotide
  Sense strand starting at position 1161 of SEQ ID NO: 1884131
cugagcugaguugauaaua

SEQ ID NO: 2242551 - RNA, 19 nt, Artificial Sequence
  Description of Artificial Sequence: Synthetic oligonucleotide
  Antisense strand to SEQ ID NO: 2242550
uauuaucaacucagcucag

SEQ ID NO: 2242552 - RNA, 19 nt, Artificial Sequence
  Description of Artificial Sequence: Synthetic oligonucleotide
  Sense strand starting at position 1317 of SEQ ID NO: 1884131
aguuacuauugcuucguga

SEQ ID NO: 2242553 - RNA, 19 nt, Artificial Sequence
  Description of Artificial Sequence: Synthetic oligonucleotide
  Antisense strand to SEQ ID NO: 2242552
ucacgaagcaauaguaacu

SEQ ID NO: 2242554 - RNA, 19 nt, Artificial Sequence
  Description of Artificial Sequence: Synthetic oligonucleotide
  Sense strand starting at position 1319 of SEQ ID NO: 1884131
uuacuauugcuucgugacu

SEQ ID NO: 2242555 - RNA, 19 nt, Artificial Sequence
  Description of Artificial Sequence: Synthetic oligonucleotide
  Antisense strand to SEQ ID NO: 2242554
agucacgaagcaauaguaa

SEQ ID NO: 2242556 - RNA, 19 nt, Artificial Sequence
  Description of Artificial Sequence: Synthetic oligonucleotide
  Sense strand starting at position 1446 of SEQ ID NO: 1884131
uggcaauaggaagguaaua

SEQ ID NO: 2242557 - RNA, 19 nt, Artificial Sequence
  Description of Artificial Sequence: Synthetic oligonucleotide
  Antisense strand to SEQ ID NO: 2242556
uauuaccuuccuauugcca

SEQ ID NO: 2242558 - RNA, 19 nt, Artificial Sequence
  Description of Artificial Sequence: Synthetic oligonucleotide
  Sense strand starting at position 1498 of SEQ ID NO: 1884131
ucuuuauggcaauauggau

SEQ ID NO: 2242559 - RNA, 19 nt, Artificial Sequence
  Description of Artificial Sequence: Synthetic oligonucleotide
  Antisense strand to SEQ ID NO: 2242558
auccauauugccauaaaga

SEQ ID NO: 2242560 - RNA, 19 nt, Artificial Sequence
  Description of Artificial Sequence: Synthetic oligonucleotide
  Sense strand starting at position 2353 of SEQ ID NO: 1884131
acgccucucugauuauuaa

SEQ ID NO: 2242561 - RNA, 19 nt, Artificial Sequence
  Description of Artificial Sequence: Synthetic oligonucleotide
  Antisense strand to SEQ ID NO: 2242560
uuaauaaucagagaggcgu

SEQ ID NO: 2242562 - RNA, 19 nt, Artificial Sequence
  Description of Artificial Sequence: Synthetic oligonucleotide
  Sense strand starting at position 3239 of SEQ ID NO: 1884131
gugccugauguccagguau

SEQ ID NO: 2242563 - RNA, 19 nt, Artificial Sequence
  Description of Artificial Sequence: Synthetic oligonucleotide
  Antisense strand to SEQ ID NO: 2242562
auaccuggacaucaggcac

SEQ ID NO: 2242564 - RNA, 19 nt, Artificial Sequence
  Description of Artificial Sequence: Synthetic oligonucleotide
  Sense strand starting at position 130 of SEQ ID NO: 1884132
gcuuaaaugguacaaucuu

SEQ ID NO: 2242565 - RNA, 19 nt, Artificial Sequence
  Description of Artificial Sequence: Synthetic oligonucleotide
  Antisense strand to SEQ ID NO: 2242564
aagauuguaccauuuaagc

SEQ ID NO: 2242566 - RNA, 19 nt, Artificial Sequence
  Description of Artificial Sequence: Synthetic oligonucleotide
  Sense strand starting at position 179 of SEQ ID NO: 1884132
aagugaaguuucuucuagu

SEQ ID NO: 2242567 - RNA, 19 nt, Artificial Sequence
  Description of Artificial Sequence: Synthetic oligonucleotide
  Antisense strand to SEQ ID NO: 2242566
acuagaagaaacuucacuu

SEQ ID NO: 2242568 - RNA, 19 nt, Artificial Sequence
  Description of Artificial Sequence: Synthetic oligonucleotide
  Sense strand starting at position 207 of SEQ ID NO: 1884132
cuguuugaagaguaagagu

SEQ ID NO: 2242569 - RNA, 19 nt, Artificial Sequence
  Description of Artificial Sequence: Synthetic oligonucleotide
  Antisense strand to SEQ ID NO: 2242568
acucuuacucuucaaacag

SEQ ID NO: 2242570 - RNA, 19 nt, Artificial Sequence
  Description of Artificial Sequence: Synthetic oligonucleotide
  Sense strand starting at position 275 of SEQ ID NO: 1884132
aggaguuaaucuguagcua

SEQ ID NO: 2242571 - RNA, 19 nt, Artificial Sequence
  Description of Artificial Sequence: Synthetic oligonucleotide
  Antisense strand to SEQ ID NO: 2242570
uagcuacagauuaacuccu

SEQ ID NO: 2242572 - RNA, 19 nt, Artificial Sequence
  Description of Artificial Sequence: Synthetic oligonucleotide
  Sense strand starting at position 276 of SEQ ID NO: 1884132
ggaguuaaucuguagcuaa

SEQ ID NO: 2242573 - RNA, 19 nt, Artificial Sequence
  Description of Artificial Sequence: Synthetic oligonucleotide
  Antisense strand to SEQ ID NO: 2242572
uuagcuacagauuaacucc

SEQ ID NO: 2242574 - RNA, 19 nt, Artificial Sequence
  Description of Artificial Sequence: Synthetic oligonucleotide
  Sense strand starting at position 493 of SEQ ID NO: 1884132
uagugaaacuaguuacaga

SEQ ID NO: 2242575 - RNA, 19 nt, Artificial Sequence
  Description of Artificial Sequence: Synthetic oligonucleotide
  Antisense strand to SEQ ID NO: 2242574
ucuguaacuaguuucacua

SEQ ID NO: 2242576 - RNA, 19 nt, Artificial Sequence
  Description of Artificial Sequence: Synthetic oligonucleotide
  Sense strand starting at position 510 of SEQ ID NO: 1884132
gaugauguugacgagcaaa

SEQ ID NO: 2242577 - RNA, 19 nt, Artificial Sequence
  Description of Artificial Sequence: Synthetic oligonucleotide
  Antisense strand to SEQ ID NO: 2242576
uuugcucgucaacaucauc

SEQ ID NO: 2242578 - RNA, 19 nt, Artificial Sequence
  Description of Artificial Sequence: Synthetic oligonucleotide
  Sense strand starting at position 647 of SEQ ID NO: 1884132
cgagguuccacagagcagu

SEQ ID NO: 2242579 - RNA, 19 nt, Artificial Sequence
  Description of Artificial Sequence: Synthetic oligonucleotide
  Antisense strand to SEQ ID NO: 2242578
acugcucuguggaaccucg

SEQ ID NO: 2242580 - RNA, 19 nt, Artificial Sequence
  Description of Artificial Sequence: Synthetic oligonucleotide
  Sense strand starting at position 878 of SEQ ID NO: 1884132
caaccuaucuuggugggaa

SEQ ID NO: 2242581 - RNA, 19 nt, Artificial Sequence
  Description of Artificial Sequence: Synthetic oligonucleotide
  Antisense strand to SEQ ID NO: 2242580
uucccaccaagauagguug

SEQ ID NO: 2242582 - RNA, 19 nt, Artificial Sequence
  Description of Artificial Sequence: Synthetic oligonucleotide
  Sense strand starting at position 926 of SEQ ID NO: 1884132
cgaccucucgcuuaagaag

SEQ ID NO: 2242583 - RNA, 19 nt, Artificial Sequence
  Description of Artificial Sequence: Synthetic oligonucleotide
  Antisense strand to SEQ ID NO: 2242582
cuucuuaagcgagaggucg

SEQ ID NO: 2242584 - RNA, 19 nt, Artificial Sequence
  Description of Artificial Sequence: Synthetic oligonucleotide
  Sense strand starting at position 935 of SEQ ID NO: 1884132
gcuuaagaagugugaacca

SEQ ID NO: 2242585 - RNA, 19 nt, Artificial Sequence
  Description of Artificial Sequence: Synthetic oligonucleotide
  Antisense strand to SEQ ID NO: 2242584
ugguucacacuucuuaagc

SEQ ID NO: 2242586 - RNA, 19 nt, Artificial Sequence
  Description of Artificial Sequence: Synthetic oligonucleotide
  Sense strand starting at position 942 of SEQ ID NO: 1884132
aagugugaaccaugacaag

SEQ ID NO: 2242587 - RNA, 19 nt, Artificial Sequence
  Description of Artificial Sequence: Synthetic oligonucleotide
  Antisense strand to SEQ ID NO: 2242586
cuugucaugguucacacuu

SEQ ID NO: 2242588 - RNA, 19 nt, Artificial Sequence
  Description of Artificial Sequence: Synthetic oligonucleotide
  Sense strand starting at position 1013 of SEQ ID NO: 1884132
agacaauugugacuggucu

SEQ ID NO: 2242589 - RNA, 19 nt, Artificial Sequence
  Description of Artificial Sequence: Synthetic oligonucleotide
  Antisense strand to SEQ ID NO: 2242588
agaccagucacaauugucu

SEQ ID NO: 2242590 - RNA, 19 nt, Artificial Sequence
  Description of Artificial Sequence: Synthetic oligonucleotide
  Sense strand starting at position 1034 of SEQ ID NO: 1884132
uccggaaggcuucauguuu

SEQ ID NO: 2242591 - RNA, 19 nt, Artificial Sequence
  Description of Artificial Sequence: Synthetic oligonucleotide
  Antisense strand to SEQ ID NO: 2242590
aaacaugaagccuuccgga

SEQ ID NO: 2242592 - RNA, 19 nt, Artificial Sequence
  Description of Artificial Sequence: Synthetic oligonucleotide
  Sense strand starting at position 1068 of SEQ ID NO: 1884132
gagcuugagagauggucaa

SEQ ID NO: 2242593 - RNA, 19 nt, Artificial Sequence
  Description of Artificial Sequence: Synthetic oligonucleotide
  Antisense strand to SEQ ID NO: 2242592
uugaccaucucucaagcuc

SEQ ID NO: 2242594 - RNA, 19 nt, Artificial Sequence
  Description of Artificial Sequence: Synthetic oligonucleotide
  Sense strand starting at position 1334 of SEQ ID NO: 1884132
ugauuaaauuggcuuaagu

SEQ ID NO: 2242595 - RNA, 19 nt, Artificial Sequence
  Description of Artificial Sequence: Synthetic oligonucleotide
  Antisense strand to SEQ ID NO: 2242594
acuuaagccaauuuaauca

SEQ ID NO: 2242596 - RNA, 19 nt, Artificial Sequence
  Description of Artificial Sequence: Synthetic oligonucleotide
  Sense strand starting at position 1391 of SEQ ID NO: 1884132
gcugcaacuguccagagau

SEQ ID NO: 2242597 - RNA, 19 nt, Artificial Sequence
  Description of Artificial Sequence: Synthetic oligonucleotide
  Antisense strand to SEQ ID NO: 2242596
aucucuggacaguugcagc

SEQ ID NO: 2242598 - RNA, 19 nt, Artificial Sequence
  Description of Artificial Sequence: Synthetic oligonucleotide
  Sense strand starting at position 1393 of SEQ ID NO: 1884132
ugcaacuguccagagauaa

SEQ ID NO: 2242599 - RNA, 19 nt, Artificial Sequence
  Description of Artificial Sequence: Synthetic oligonucleotide
  Antisense strand to SEQ ID NO: 2242598
uuaucucuggacaguugca

SEQ ID NO: 2242600 - RNA, 19 nt, Artificial Sequence
  Description of Artificial Sequence: Synthetic oligonucleotide
  Sense strand starting at position 1457 of SEQ ID NO: 1884132
agggaaagauaugaggaau

SEQ ID NO: 2242601 - RNA, 19 nt, Artificial Sequence
  Description of Artificial Sequence: Synthetic oligonucleotide
  Antisense strand to SEQ ID NO: 2242600
auuccucauaucuuucccu

SEQ ID NO: 2242602 - RNA, 19 nt, Artificial Sequence
  Description of Artificial Sequence: Synthetic oligonucleotide
  Sense strand starting at position 1468 of SEQ ID NO: 1884132
ugaggaaugcuaugcagga

SEQ ID NO: 2242603 - RNA, 19 nt, Artificial Sequence
  Description of Artificial Sequence: Synthetic oligonucleotide
  Antisense strand to SEQ ID NO: 2242602
uccugcauagcauuccuca

SEQ ID NO: 2242604 - RNA, 19 nt, Artificial Sequence
  Description of Artificial Sequence: Synthetic oligonucleotide
  Sense strand starting at position 1676 of SEQ ID NO: 1884132
ucaauuucucggugaaagc

SEQ ID NO: 2242605 - RNA, 19 nt, Artificial Sequence
  Description of Artificial Sequence: Synthetic oligonucleotide
  Antisense strand to SEQ ID NO: 2242604
gcuuucaccgagaaauuga

SEQ ID NO: 2242606 - RNA, 19 nt, Artificial Sequence
  Description of Artificial Sequence: Synthetic oligonucleotide
  Sense strand starting at position 1865 of SEQ ID NO: 1884132
cagucaaucgaguguagag

SEQ ID NO: 2242607 - RNA, 19 nt, Artificial Sequence
  Description of Artificial Sequence: Synthetic oligonucleotide
  Antisense strand to SEQ ID NO: 2242606
cucuacacucgauugacug

SEQ ID NO: 2242608 - RNA, 19 nt, Artificial Sequence
  Description of Artificial Sequence: Synthetic oligonucleotide
  Sense strand starting at position 1917 of SEQ ID NO: 1884132
uggugcaaaucaucacaga

SEQ ID NO: 2242609 - RNA, 19 nt, Artificial Sequence
  Description of Artificial Sequence: Synthetic oligonucleotide
  Antisense strand to SEQ ID NO: 2242608
ucugugaugauuugcacca

SEQ ID NO: 2242610 - RNA, 19 nt, Artificial Sequence
  Description of Artificial Sequence: Synthetic oligonucleotide
  Sense strand starting at position 2712 of SEQ ID NO: 1884132
aguugcugugaggauguaa

SEQ ID NO: 2242611 - RNA, 19 nt, Artificial Sequence
  Description of Artificial Sequence: Synthetic oligonucleotide
  Antisense strand to SEQ ID NO: 2242610
uuacauccucacagcaacu

SEQ ID NO: 2242612 - RNA, 19 nt, Artificial Sequence
  Description of Artificial Sequence: Synthetic oligonucleotide
  Sense strand starting at position 2753 of SEQ ID NO: 1884132
gcagcugugcuugccuaau

SEQ ID NO: 2242613 - RNA, 19 nt, Artificial Sequence
  Description of Artificial Sequence: Synthetic oligonucleotide
  Antisense strand to SEQ ID NO: 2242612
auuaggcaagcacagcugc

SEQ ID NO: 2242614 - RNA, 19 nt, Artificial Sequence
  Description of Artificial Sequence: Synthetic oligonucleotide
  Sense strand starting at position 2784 of SEQ ID NO: 1884132
auauuacuguuagcauuga

SEQ ID NO: 2242615 - RNA, 19 nt, Artificial Sequence
  Description of Artificial Sequence: Synthetic oligonucleotide
  Antisense strand to SEQ ID NO: 2242614
ucaaugcuaacaguaauau

SEQ ID NO: 2242616 - RNA, 19 nt, Artificial Sequence
  Description of Artificial Sequence: Synthetic oligonucleotide
  Sense strand starting at position 2792 of SEQ ID NO: 1884132
guuagcauugaauaccaau

SEQ ID NO: 2242617 - RNA, 19 nt, Artificial Sequence
  Description of Artificial Sequence: Synthetic oligonucleotide
  Antisense strand to SEQ ID NO: 2242616
auugguauucaaugcuaac

SEQ ID NO: 2242618 - RNA, 19 nt, Artificial Sequence
  Description of Artificial Sequence: Synthetic oligonucleotide
  Sense strand starting at position 2812 of SEQ ID NO: 1884132
uguugacugcauggaugau

SEQ ID NO: 2242619 - RNA, 19 nt, Artificial Sequence
  Description of Artificial Sequence: Synthetic oligonucleotide
  Antisense strand to SEQ ID NO: 2242618
aucauccaugcagucaaca

SEQ ID NO: 2242620 - RNA, 19 nt, Artificial Sequence
  Description of Artificial Sequence: Synthetic oligonucleotide
  Sense strand starting at position 2813 of SEQ ID NO: 1884132
guugacugcauggaugauu

SEQ ID NO: 2242621 - RNA, 19 nt, Artificial Sequence
  Description of Artificial Sequence: Synthetic oligonucleotide
  Antisense strand to SEQ ID NO: 2242620
aaucauccaugcagucaac

SEQ ID NO: 2242622 - RNA, 19 nt, Artificial Sequence
  Description of Artificial Sequence: Synthetic oligonucleotide
  Sense strand starting at position 2868 of SEQ ID NO: 1884132
cguagauaacugggauccu

SEQ ID NO: 2242623 - RNA, 19 nt, Artificial Sequence
  Description of Artificial Sequence: Synthetic oligonucleotide
  Antisense strand to SEQ ID NO: 2242622
aggaucccaguuaucuacg

SEQ ID NO: 2242624 - RNA, 19 nt, Artificial Sequence
  Description of Artificial Sequence: Synthetic oligonucleotide
  Sense strand starting at position 2964 of SEQ ID NO: 1884132
ggcugaguuaacgauguca

SEQ ID NO: 2242625 - RNA, 19 nt, Artificial Sequence
  Description of Artificial Sequence: Synthetic oligonucleotide
  Antisense strand to SEQ ID NO: 2242624
ugacaucguuaacucagcc

SEQ ID NO: 2242626 - RNA, 19 nt, Artificial Sequence
  Description of Artificial Sequence: Synthetic oligonucleotide
  Sense strand starting at position 3023 of SEQ ID NO: 1884132
ggguuuaggucuccagaag

SEQ ID NO: 2242627 - RNA, 19 nt, Artificial Sequence
  Description of Artificial Sequence: Synthetic oligonucleotide
  Antisense strand to SEQ ID NO: 2242626
cuucuggagaccuaaaccc

SEQ ID NO: 2242628 - RNA, 19 nt, Artificial Sequence
  Description of Artificial Sequence: Synthetic oligonucleotide
  Sense strand starting at position 3024 of SEQ ID NO: 1884132
gguuuaggucuccagaagu

SEQ ID NO: 2242629 - RNA, 19 nt, Artificial Sequence
  Description of Artificial Sequence: Synthetic oligonucleotide
  Antisense strand to SEQ ID NO: 2242628
acuucuggagaccuaaacc

SEQ ID NO: 2242630 - RNA, 19 nt, Artificial Sequence
  Description of Artificial Sequence: Synthetic oligonucleotide
  Sense strand starting at position 3178 of SEQ ID NO: 1884132
auuugaucauuccgaaaua

SEQ ID NO: 2242631 - RNA, 19 nt, Artificial Sequence
  Description of Artificial Sequence: Synthetic oligonucleotide
  Antisense strand to SEQ ID NO: 2242630
uauuucggaaugaucaaau

SEQ ID NO: 2242632 - RNA, 19 nt, Artificial Sequence
  Description of Artificial Sequence: Synthetic oligonucleotide
  Sense strand starting at position 3189 of SEQ ID NO: 1884132
ccgaaauagccaugauaua

SEQ ID NO: 2242633 - RNA, 19 nt, Artificial Sequence
  Description of Artificial Sequence: Synthetic oligonucleotide
  Antisense strand to SEQ ID NO: 2242632
uauaucauggcuauuucgg

SEQ ID NO: 2242634 - RNA, 19 nt, Artificial Sequence
  Description of Artificial Sequence: Synthetic oligonucleotide
  Sense strand starting at position 3407 of SEQ ID NO: 1884132
ggagguggcagguguuaau

SEQ ID NO: 2242635 - RNA, 19 nt, Artificial Sequence
  Description of Artificial Sequence: Synthetic oligonucleotide
  Antisense strand to SEQ ID NO: 2242634
auuaacaccugccaccucc

SEQ ID NO: 2242636 - RNA, 19 nt, Artificial Sequence
  Description of Artificial Sequence: Synthetic oligonucleotide
  Sense strand starting at position 3440 of SEQ ID NO: 1884132
gaggcauaguuccuaguga

SEQ ID NO: 2242637 - RNA, 19 nt, Artificial Sequence
  Description of Artificial Sequence: Synthetic oligonucleotide
  Antisense strand to SEQ ID NO: 2242636
ucacuaggaacuaugccuc

SEQ ID NO: 2242638 - RNA, 19 nt, Artificial Sequence
  Description of Artificial Sequence: Synthetic oligonucleotide
  Sense strand starting at position 3713 of SEQ ID NO: 1884132
aaccaagaugcacgugaaa

SEQ ID NO: 2242639 - RNA, 19 nt, Artificial Sequence
  Description of Artificial Sequence: Synthetic oligonucleotide
  Antisense strand to SEQ ID NO: 2242638
uuucacgugcaucuugguu

SEQ ID NO: 2242640 - RNA, 19 nt, Artificial Sequence
  Description of Artificial Sequence: Synthetic oligonucleotide
  Sense strand starting at position 3715 of SEQ ID NO: 1884132
ccaagaugcacgugaaagu

SEQ ID NO: 2242641 - RNA, 19 nt, Artificial Sequence
  Description of Artificial Sequence: Synthetic oligonucleotide
  Antisense strand to SEQ ID NO: 2242640
acuuucacgugcaucuugg

SEQ ID NO: 2242642 - RNA, 19 nt, Artificial Sequence
  Description of Artificial Sequence: Synthetic oligonucleotide
  Sense strand starting at position 3724 of SEQ ID NO: 1884132
acgugaaaguguucuggaa

SEQ ID NO: 2242643 - RNA, 19 nt, Artificial Sequence
  Description of Artificial Sequence: Synthetic oligonucleotide
  Antisense strand to SEQ ID NO: 2242642
uuccagaacacuuucacgu

SEQ ID NO: 2242644 - RNA, 19 nt, Artificial Sequence
  Description of Artificial Sequence: Synthetic oligonucleotide
  Sense strand starting at position 65 of SEQ ID NO: 1884133
ggacuuuaaacugggcuua

SEQ ID NO: 2242645 - RNA, 19 nt, Artificial Sequence
  Description of Artificial Sequence: Synthetic oligonucleotide
  Antisense strand to SEQ ID NO: 2242644
uaagcccaguuuaaagucc

SEQ ID NO: 2242646 - RNA, 19 nt, Artificial Sequence
  Description of Artificial Sequence: Synthetic oligonucleotide
  Sense strand starting at position 158 of SEQ ID NO: 1884133
guuggcuucuuccugauuu

SEQ ID NO: 2242647 - RNA, 19 nt, Artificial Sequence
  Description of Artificial Sequence: Synthetic oligonucleotide
  Antisense strand to SEQ ID NO: 2242646
aaaucaggaagaagccaac

SEQ ID NO: 2242648 - RNA, 19 nt, Artificial Sequence
  Description of Artificial Sequence: Synthetic oligonucleotide
  Sense strand starting at position 488 of SEQ ID NO: 1884133
agccauacugccuggacaa

SEQ ID NO: 2242649 - RNA, 19 nt, Artificial Sequence
  Description of Artificial Sequence: Synthetic oligonucleotide
  Antisense strand to SEQ ID NO: 2242648
uuguccaggcaguauggcu

SEQ ID NO: 2242650 - RNA, 19 nt, Artificial Sequence
  Description of Artificial Sequence: Synthetic oligonucleotide
  Sense strand starting at position 540 of SEQ ID NO: 1884133
gccaaagauuuaggacaaa

SEQ ID NO: 2242651 - RNA, 19 nt, Artificial Sequence
  Description of Artificial Sequence: Synthetic oligonucleotide
  Antisense strand to SEQ ID NO: 2242650
uuuguccuaaaucuuuggc

SEQ ID NO: 2242652 - RNA, 19 nt, Artificial Sequence
  Description of Artificial Sequence: Synthetic oligonucleotide
  Sense strand starting at position 895 of SEQ ID NO: 1884133
gagggaagaucuucucuuu

SEQ ID NO: 2242653 - RNA, 19 nt, Artificial Sequence
  Description of Artificial Sequence: Synthetic oligonucleotide
  Antisense strand to SEQ ID NO: 2242652
aaagagaagaucuucccuc

SEQ ID NO: 2242654 - RNA, 19 nt, Artificial Sequence
  Description of Artificial Sequence: Synthetic oligonucleotide
  Sense strand starting at position 898 of SEQ ID NO: 1884133
ggaagaucuucucuuugua

SEQ ID NO: 2242655 - RNA, 19 nt, Artificial Sequence
  Description of Artificial Sequence: Synthetic oligonucleotide
  Antisense strand to SEQ ID NO: 2242654
uacaaagagaagaucuucc

SEQ ID NO: 2242656 - RNA, 19 nt, Artificial Sequence
  Description of Artificial Sequence: Synthetic oligonucleotide
  Sense strand starting at position 931 of SEQ ID NO: 1884133
aguaauagucuuuacuagu

SEQ ID NO: 2242657 - RNA, 19 nt, Artificial Sequence
  Description of Artificial Sequence: Synthetic oligonucleotide
  Antisense strand to SEQ ID NO: 2242656
acuaguaaagacuauuacu

SEQ ID NO: 2242658 - RNA, 19 nt, Artificial Sequence
  Description of Artificial Sequence: Synthetic oligonucleotide
  Sense strand starting at position 982 of SEQ ID NO: 1884133
uugaauuguugauuacacu

SEQ ID NO: 2242659 - RNA, 19 nt, Artificial Sequence
  Description of Artificial Sequence: Synthetic oligonucleotide
  Antisense strand to SEQ ID NO: 2242658
aguguaaucaacaauucaa

SEQ ID NO: 2242660 - RNA, 19 nt, Artificial Sequence
  Description of Artificial Sequence: Synthetic oligonucleotide
  Sense strand starting at position 1069 of SEQ ID NO: 1884133
guaggagagucuucuuuaa

SEQ ID NO: 2242661 - RNA, 19 nt, Artificial Sequence
  Description of Artificial Sequence: Synthetic oligonucleotide
  Antisense strand to SEQ ID NO: 2242660
uuaaagaagacucuccuac

SEQ ID NO: 2242662 - RNA, 19 nt, Artificial Sequence
  Description of Artificial Sequence: Synthetic oligonucleotide
  Sense strand starting at position 1419 of SEQ ID NO: 1884133
gugaauaguaacgaguuua

SEQ ID NO: 2242663 - RNA, 19 nt, Artificial Sequence
  Description of Artificial Sequence: Synthetic oligonucleotide
  Antisense strand to SEQ ID NO: 2242662
uaaacucguuacuauucac

SEQ ID NO: 2242664 - RNA, 19 nt, Artificial Sequence
  Description of Artificial Sequence: Synthetic oligonucleotide
  Sense strand starting at position 1478 of SEQ ID NO: 1884133
caaauagcccuggagguua

SEQ ID NO: 2242665 - RNA, 19 nt, Artificial Sequence
  Description of Artificial Sequence: Synthetic oligonucleotide
  Antisense strand to SEQ ID NO: 2242664
uaaccuccagggcuauuug

SEQ ID NO: 2242666 - RNA, 19 nt, Artificial Sequence
  Description of Artificial Sequence: Synthetic oligonucleotide
  Sense strand starting at position 1490 of SEQ ID NO: 1884133
gagguuacacuaggaaguu

SEQ ID NO: 2242667 - RNA, 19 nt, Artificial Sequence
  Description of Artificial Sequence: Synthetic oligonucleotide
  Antisense strand to SEQ ID NO: 2242666
aacuuccuaguguaaccuc

SEQ ID NO: 2242668 - RNA, 19 nt, Artificial Sequence
  Description of Artificial Sequence: Synthetic oligonucleotide
  Sense strand starting at position 1499 of SEQ ID NO: 1884133
cuaggaaguuucuugaguu

SEQ ID NO: 2242669 - RNA, 19 nt, Artificial Sequence
  Description of Artificial Sequence: Synthetic oligonucleotide
  Antisense strand to SEQ ID NO: 2242668
aacucaagaaacuuccuag

SEQ ID NO: 2242670 - RNA, 19 nt, Artificial Sequence
  Description of Artificial Sequence: Synthetic oligonucleotide
  Sense strand starting at position 1503 of SEQ ID NO: 1884133
gaaguuucuugaguugaca

SEQ ID NO: 2242671 - RNA, 19 nt, Artificial Sequence
  Description of Artificial Sequence: Synthetic oligonucleotide
  Antisense strand to SEQ ID NO: 2242670
ugucaacucaagaaacuuc

SEQ ID NO: 2242672 - RNA, 19 nt, Artificial Sequence
  Description of Artificial Sequence: Synthetic oligonucleotide
  Sense strand starting at position 1514 of SEQ ID NO: 1884133
aguugacauccuugaucau

SEQ ID NO: 2242673 - RNA, 19 nt, Artificial Sequence
  Description of Artificial Sequence: Synthetic oligonucleotide
  Antisense strand to SEQ ID NO: 2242672
augaucaaggaugucaacu

SEQ ID NO: 2242674 - RNA, 19 nt, Artificial Sequence
  Description of Artificial Sequence: Synthetic oligonucleotide
  Sense strand starting at position 1515 of SEQ ID NO: 1884133
guugacauccuugaucaua

SEQ ID NO: 2242675 - RNA, 19 nt, Artificial Sequence
  Description of Artificial Sequence: Synthetic oligonucleotide
  Antisense strand to SEQ ID NO: 2242674
uaugaucaaggaugucaac

SEQ ID NO: 2242676 - RNA, 19 nt, Artificial Sequence
  Description of Artificial Sequence: Synthetic oligonucleotide
  Sense strand starting at position 1517 of SEQ ID NO: 1884133
ugacauccuugaucauagu

SEQ ID NO: 2242677 - RNA, 19 nt, Artificial Sequence
  Description of Artificial Sequence: Synthetic oligonucleotide
  Antisense strand to SEQ ID NO: 2242676
acuaugaucaaggauguca

SEQ ID NO: 2242678 - RNA, 19 nt, Artificial Sequence
  Description of Artificial Sequence: Synthetic oligonucleotide
  Sense strand starting at position 1616 of SEQ ID NO: 1884133
uggagagguggauguguau

SEQ ID NO: 2242679 - RNA, 19 nt, Artificial Sequence
  Description of Artificial Sequence: Synthetic oligonucleotide
  Antisense strand to SEQ ID NO: 2242678
auacacauccaccucucca

SEQ ID NO: 2242680 - RNA, 19 nt, Artificial Sequence
  Description of Artificial Sequence: Synthetic oligonucleotide
  Sense strand starting at position 1693 of SEQ ID NO: 1884133
ugacucaucucaguuauga

SEQ ID NO: 2242681 - RNA, 19 nt, Artificial Sequence
  Description of Artificial Sequence: Synthetic oligonucleotide
  Antisense strand to SEQ ID NO: 2242680
ucauaacugagaugaguca

SEQ ID NO: 2242682 - RNA, 19 nt, Artificial Sequence
  Description of Artificial Sequence: Synthetic oligonucleotide
  Sense strand starting at position 1728 of SEQ ID NO: 1884133
gaaagaauacggugucuua

SEQ ID NO: 2242683 - RNA, 19 nt, Artificial Sequence
  Description of Artificial Sequence: Synthetic oligonucleotide
  Antisense strand to SEQ ID NO: 2242682
uaagacaccguauucuuuc

SEQ ID NO: 2242684 - RNA, 19 nt, Artificial Sequence
  Description of Artificial Sequence: Synthetic oligonucleotide
  Sense strand starting at position 1776 of SEQ ID NO: 1884133
gcugaaacuggguaguuua

SEQ ID NO: 2242685 - RNA, 19 nt, Artificial Sequence
  Description of Artificial Sequence: Synthetic oligonucleotide
  Antisense strand to SEQ ID NO: 2242684
uaaacuacccaguuucagc

SEQ ID NO: 2242686 - RNA, 19 nt, Artificial Sequence
  Description of Artificial Sequence: Synthetic oligonucleotide
  Sense strand starting at position 2159 of SEQ ID NO: 1884133
cagaguuguccuuauuaug

SEQ ID NO: 2242687 - RNA, 19 nt, Artificial Sequence
  Description of Artificial Sequence: Synthetic oligonucleotide
  Antisense strand to SEQ ID NO: 2242686
cauaauaaggacaacucug

SEQ ID NO: 2242688 - RNA, 19 nt, Artificial Sequence
  Description of Artificial Sequence: Synthetic oligonucleotide
  Sense strand starting at position 2260 of SEQ ID NO: 1884133
ccaacauaugagugcuuga

SEQ ID NO: 2242689 - RNA, 19 nt, Artificial Sequence
  Description of Artificial Sequence: Synthetic oligonucleotide
  Antisense strand to SEQ ID NO: 2242688
ucaagcacucauauguugg

SEQ ID NO: 2242690 - RNA, 19 nt, Artificial Sequence
  Description of Artificial Sequence: Synthetic oligonucleotide
  Sense strand starting at position 2263 of SEQ ID NO: 1884133
acauaugagugcuugaaag

SEQ ID NO: 2242691 - RNA, 19 nt, Artificial Sequence
  Description of Artificial Sequence: Synthetic oligonucleotide
  Antisense strand to SEQ ID NO: 2242690
cuuucaagcacucauaugu

SEQ ID NO: 2242692 - RNA, 19 nt, Artificial Sequence
  Description of Artificial Sequence: Synthetic oligonucleotide
  Sense strand starting at position 2269 of SEQ ID NO: 1884133
gagugcuugaaagauguuu

SEQ ID NO: 2242693 - RNA, 19 nt, Artificial Sequence
  Description of Artificial Sequence: Synthetic oligonucleotide
  Antisense strand to SEQ ID NO: 2242692
aaacaucuuucaagcacuc

SEQ ID NO: 2242694 - RNA, 19 nt, Artificial Sequence
  Description of Artificial Sequence: Synthetic oligonucleotide
  Sense strand starting at position 2343 of SEQ ID NO: 1884133
augugacaacguuaauuac

SEQ ID NO: 2242695 - RNA, 19 nt, Artificial Sequence
  Description of Artificial Sequence: Synthetic oligonucleotide
  Antisense strand to SEQ ID NO: 2242694
guaauuaacguugucacau

SEQ ID NO: 2242696 - RNA, 19 nt, Artificial Sequence
  Description of Artificial Sequence: Synthetic oligonucleotide
  Sense strand starting at position 2394 of SEQ ID NO: 1884133
gcaccaucaucucugaaug

SEQ ID NO: 2242697 - RNA, 19 nt, Artificial Sequence
  Description of Artificial Sequence: Synthetic oligonucleotide
  Antisense strand to SEQ ID NO: 2242696
cauucagagaugauggugc

SEQ ID NO: 2242698 - RNA, 19 nt, Artificial Sequence
  Description of Artificial Sequence: Synthetic oligonucleotide
  Sense strand starting at position 2412 of SEQ ID NO: 1884133
gugggcacuuucccagaau

SEQ ID NO: 2242699 - RNA, 19 nt, Artificial Sequence
  Description of Artificial Sequence: Synthetic oligonucleotide
  Antisense strand to SEQ ID NO: 2242698
auucugggaaagugcccac

SEQ ID NO: 2242700 - RNA, 19 nt, Artificial Sequence
  Description of Artificial Sequence: Synthetic oligonucleotide
  Sense strand starting at position 2415 of SEQ ID NO: 1884133
ggcacuuucccagaaugau

SEQ ID NO: 2242701 - RNA, 19 nt, Artificial Sequence
  Description of Artificial Sequence: Synthetic oligonucleotide
  Antisense strand to SEQ ID NO: 2242700
aucauucugggaaagugcc

SEQ ID NO: 2242702 - RNA, 19 nt, Artificial Sequence
  Description of Artificial Sequence: Synthetic oligonucleotide
  Sense strand starting at position 2482 of SEQ ID NO: 1884133
acugaaauuagaugguugu

SEQ ID NO: 2242703 - RNA, 19 nt, Artificial Sequence
  Description of Artificial Sequence: Synthetic oligonucleotide
  Antisense strand to SEQ ID NO: 2242702
acaaccaucuaauuucagu

SEQ ID NO: 2242704 - RNA, 19 nt, Artificial Sequence
  Description of Artificial Sequence: Synthetic oligonucleotide
  Sense strand starting at position 2483 of SEQ ID NO: 1884133
cugaaauuagaugguuguu

SEQ ID NO: 2242705 - RNA, 19 nt, Artificial Sequence
  Description of Artificial Sequence: Synthetic oligonucleotide
  Antisense strand to SEQ ID NO: 2242704
aacaaccaucuaauuucag

SEQ ID NO: 2242706 - RNA, 19 nt, Artificial Sequence
  Description of Artificial Sequence: Synthetic oligonucleotide
  Sense strand starting at position 2741 of SEQ ID NO: 1884133
auggguuugaguugugaaa

SEQ ID NO: 2242707 - RNA, 19 nt, Artificial Sequence
  Description of Artificial Sequence: Synthetic oligonucleotide
  Antisense strand to SEQ ID NO: 2242706
uuucacaacucaaacccau

SEQ ID NO: 2242708 - RNA, 19 nt, Artificial Sequence
  Description of Artificial Sequence: Synthetic oligonucleotide
  Sense strand starting at position 2920 of SEQ ID NO: 1884133
ccucaaagaugcuuccuga

SEQ ID NO: 2242709 - RNA, 19 nt, Artificial Sequence
  Description of Artificial Sequence: Synthetic oligonucleotide
  Antisense strand to SEQ ID NO: 2242708
ucaggaagcaucuuugagg

SEQ ID NO: 2242710 - RNA, 19 nt, Artificial Sequence
  Description of Artificial Sequence: Synthetic oligonucleotide
  Sense strand starting at position 3128 of SEQ ID NO: 1884133
ggguucucacaucagugaa

SEQ ID NO: 2242711 - RNA, 19 nt, Artificial Sequence
  Description of Artificial Sequence: Synthetic oligonucleotide
  Antisense strand to SEQ ID NO: 2242710
uucacugaugugagaaccc

SEQ ID NO: 2242712 - RNA, 19 nt, Artificial Sequence
  Description of Artificial Sequence: Synthetic oligonucleotide
  Sense strand starting at position 3190 of SEQ ID NO: 1884133
ggguaaacaccuuaauguu

SEQ ID NO: 2242713 - RNA, 19 nt, Artificial Sequence
  Description of Artificial Sequence: Synthetic oligonucleotide
  Antisense strand to SEQ ID NO: 2242712
aacauuaagguguuuaccc

SEQ ID NO: 2242714 - RNA, 19 nt, Artificial Sequence
  Description of Artificial Sequence: Synthetic oligonucleotide
  Sense strand starting at position 3308 of SEQ ID NO: 1884133
acaguauuccuuuaaaugu

SEQ ID NO: 2242715 - RNA, 19 nt, Artificial Sequence
  Description of Artificial Sequence: Synthetic oligonucleotide
  Antisense strand to SEQ ID NO: 2242714
acauuuaaaggaauacugu

SEQ ID NO: 2242716 - RNA, 19 nt, Artificial Sequence
  Description of Artificial Sequence: Synthetic oligonucleotide
  Sense strand starting at position 3446 of SEQ ID NO: 1884133
cuuauccugagaggaguaa

SEQ ID NO: 2242717 - RNA, 19 nt, Artificial Sequence
  Description of Artificial Sequence: Synthetic oligonucleotide
  Antisense strand to SEQ ID NO: 2242716
uuacuccucucaggauaag

SEQ ID NO: 2242718 - RNA, 19 nt, Artificial Sequence
  Description of Artificial Sequence: Synthetic oligonucleotide
  Sense strand starting at position 3695 of SEQ ID NO: 1884133
gcacguuugaaucacugga

SEQ ID NO: 2242719 - RNA, 19 nt, Artificial Sequence
  Description of Artificial Sequence: Synthetic oligonucleotide
  Antisense strand to SEQ ID NO: 2242718
uccagugauucaaacgugc

SEQ ID NO: 2242720 - RNA, 19 nt, Artificial Sequence
  Description of Artificial Sequence: Synthetic oligonucleotide
  Sense strand starting at position 3697 of SEQ ID NO: 1884133
acguuugaaucacuggaga

SEQ ID NO: 2242721 - RNA, 19 nt, Artificial Sequence
  Description of Artificial Sequence: Synthetic oligonucleotide
  Antisense strand to SEQ ID NO: 2242720
ucuccagugauucaaacgu

SEQ ID NO: 2242722 - RNA, 19 nt, Artificial Sequence
  Description of Artificial Sequence: Synthetic oligonucleotide
  Sense strand starting at position 3862 of SEQ ID NO: 1884133
ccugcauugcuauacagaa

SEQ ID NO: 2242723 - RNA, 19 nt, Artificial Sequence
  Description of Artificial Sequence: Synthetic oligonucleotide
  Antisense strand to SEQ ID NO: 2242722
uucuguauagcaaugcagg

SEQ ID NO: 2242724 - RNA, 19 nt, Artificial Sequence
  Description of Artificial Sequence: Synthetic oligonucleotide
  Sense strand starting at position 342 of SEQ ID NO: 1884134
auuccauaagguuguaaau

SEQ ID NO: 2242725 - RNA, 19 nt, Artificial Sequence
  Description of Artificial Sequence: Synthetic oligonucleotide
  Antisense strand to SEQ ID NO: 2242724
auuuacaaccuuauggaau

SEQ ID NO: 2242726 - RNA, 19 nt, Artificial Sequence
  Description of Artificial Sequence: Synthetic oligonucleotide
  Sense strand starting at position 413 of SEQ ID NO: 1884134
ccguaagauuuccacauua

SEQ ID NO: 2242727 - RNA, 19 nt, Artificial Sequence
  Description of Artificial Sequence: Synthetic oligonucleotide
  Antisense strand to SEQ ID NO: 2242726
uaauguggaaaucuuacgg

SEQ ID NO: 2242728 - RNA, 19 nt, Artificial Sequence
  Description of Artificial Sequence: Synthetic oligonucleotide
  Sense strand starting at position 477 of SEQ ID NO: 1884134
cggcuucuuggacgauaga

SEQ ID NO: 2242729 - RNA, 19 nt, Artificial Sequence
  Description of Artificial Sequence: Synthetic oligonucleotide
  Antisense strand to SEQ ID NO: 2242728
ucuaucguccaagaagccg

SEQ ID NO: 2242730 - RNA, 19 nt, Artificial Sequence
  Description of Artificial Sequence: Synthetic oligonucleotide
  Sense strand starting at position 515 of SEQ ID NO: 1884134
ggucauaaucuggguguag

SEQ ID NO: 2242731 - RNA, 19 nt, Artificial Sequence
  Description of Artificial Sequence: Synthetic oligonucleotide
  Antisense strand to SEQ ID NO: 2242730
cuacacccagauuaugacc

SEQ ID NO: 2242732 - RNA, 19 nt, Artificial Sequence
  Description of Artificial Sequence: Synthetic oligonucleotide
  Sense strand starting at position 516 of SEQ ID NO: 1884134
gucauaaucuggguguaga

SEQ ID NO: 2242733 - RNA, 19 nt, Artificial Sequence
  Description of Artificial Sequence: Synthetic oligonucleotide
  Antisense strand to SEQ ID NO: 2242732
ucuacacccagauuaugac

SEQ ID NO: 2242734 - RNA, 19 nt, Artificial Sequence
  Description of Artificial Sequence: Synthetic oligonucleotide
  Sense strand starting at position 517 of SEQ ID NO: 1884134
ucauaaucuggguguagaa

SEQ ID NO: 2242735 - RNA, 19 nt, Artificial Sequence
  Description of Artificial Sequence: Synthetic oligonucleotide
  Antisense strand to SEQ ID NO: 2242734
uucuacacccagauuauga

SEQ ID NO: 2242736 - RNA, 19 nt, Artificial Sequence
  Description of Artificial Sequence: Synthetic oligonucleotide
  Sense strand starting at position 527 of SEQ ID NO: 1884134
gguguagaauaauuaacau

SEQ ID NO: 2242737 - RNA, 19 nt, Artificial Sequence
  Description of Artificial Sequence: Synthetic oligonucleotide
  Antisense strand to SEQ ID NO: 2242736
auguuaauuauucuacacc

SEQ ID NO: 2242738 - RNA, 19 nt, Artificial Sequence
  Description of Artificial Sequence: Synthetic oligonucleotide
  Sense strand starting at position 603 of SEQ ID NO: 1884134
uugggcaaguucucacauu

SEQ ID NO: 2242739 - RNA, 19 nt, Artificial Sequence
  Description of Artificial Sequence: Synthetic oligonucleotide
  Antisense strand to SEQ ID NO: 2242738
aaugugagaacuugcccaa

SEQ ID NO: 2242740 - RNA, 19 nt, Artificial Sequence
  Description of Artificial Sequence: Synthetic oligonucleotide
  Sense strand starting at position 779 of SEQ ID NO: 1884134
augggagacucugugaugu

SEQ ID NO: 2242741 - RNA, 19 nt, Artificial Sequence
  Description of Artificial Sequence: Synthetic oligonucleotide
  Antisense strand to SEQ ID NO: 2242740
acaucacagagucucccau

SEQ ID NO: 2242742 - RNA, 19 nt, Artificial Sequence
  Description of Artificial Sequence: Synthetic oligonucleotide
  Sense strand starting at position 1085 of SEQ ID NO: 1884134
ucagguugcaugggaucau

SEQ ID NO: 2242743 - RNA, 19 nt, Artificial Sequence
  Description of Artificial Sequence: Synthetic oligonucleotide
  Antisense strand to SEQ ID NO: 2242742
augaucccaugcaaccuga

SEQ ID NO: 2242744 - RNA, 19 nt, Artificial Sequence
  Description of Artificial Sequence: Synthetic oligonucleotide
  Sense strand starting at position 1094 of SEQ ID NO: 1884134
augggaucaucuucucuga

SEQ ID NO: 2242745 - RNA, 19 nt, Artificial Sequence
  Description of Artificial Sequence: Synthetic oligonucleotide
  Antisense strand to SEQ ID NO: 2242744
ucagagaagaugaucccau

SEQ ID NO: 2242746 - RNA, 19 nt, Artificial Sequence
  Description of Artificial Sequence: Synthetic oligonucleotide
  Sense strand starting at position 1096 of SEQ ID NO: 1884134
gggaucaucuucucugacu

SEQ ID NO: 2242747 - RNA, 19 nt, Artificial Sequence
  Description of Artificial Sequence: Synthetic oligonucleotide
  Antisense strand to SEQ ID NO: 2242746
agucagagaagaugauccc

SEQ ID NO: 2242748 - RNA, 19 nt, Artificial Sequence
  Description of Artificial Sequence: Synthetic oligonucleotide
  Sense strand starting at position 1176 of SEQ ID NO: 1884134
ugcauuuccugucucagga

SEQ ID NO: 2242749 - RNA, 19 nt, Artificial Sequence
  Description of Artificial Sequence: Synthetic oligonucleotide
  Antisense strand to SEQ ID NO: 2242748
uccugagacaggaaaugca

SEQ ID NO: 2242750 - RNA, 19 nt, Artificial Sequence
  Description of Artificial Sequence: Synthetic oligonucleotide
  Sense strand starting at position 1576 of SEQ ID NO: 1884134
uuuauaacugcucacagga

SEQ ID NO: 2242751 - RNA, 19 nt, Artificial Sequence
  Description of Artificial Sequence: Synthetic oligonucleotide
  Antisense strand to SEQ ID NO: 2242750
uccugugagcaguuauaaa

SEQ ID NO: 2242752 - RNA, 19 nt, Artificial Sequence
  Description of Artificial Sequence: Synthetic oligonucleotide
  Sense strand starting at position 1628 of SEQ ID NO: 1884134
augagaugcucucuuguug

SEQ ID NO: 2242753 - RNA, 19 nt, Artificial Sequence
  Description of Artificial Sequence: Synthetic oligonucleotide
  Antisense strand to SEQ ID NO: 2242752
caacaagagagcaucucau

SEQ ID NO: 2242754 - RNA, 19 nt, Artificial Sequence
  Description of Artificial Sequence: Synthetic oligonucleotide
  Sense strand starting at position 1654 of SEQ ID NO: 1884134
ucugguuucuuaguugaga

SEQ ID NO: 2242755 - RNA, 19 nt, Artificial Sequence
  Description of Artificial Sequence: Synthetic oligonucleotide
  Antisense strand to SEQ ID NO: 2242754
ucucaacuaagaaaccaga

SEQ ID NO: 2242756 - RNA, 19 nt, Artificial Sequence
  Description of Artificial Sequence: Synthetic oligonucleotide
  Sense strand starting at position 1655 of SEQ ID NO: 1884134
cugguuucuuaguugagaa

SEQ ID NO: 2242757 - RNA, 19 nt, Artificial Sequence
  Description of Artificial Sequence: Synthetic oligonucleotide
  Antisense strand to SEQ ID NO: 2242756
uucucaacuaagaaaccag

SEQ ID NO: 2242758 - RNA, 19 nt, Artificial Sequence
  Description of Artificial Sequence: Synthetic oligonucleotide
  Sense strand starting at position 1656 of SEQ ID NO: 1884134
ugguuucuuaguugagaag

SEQ ID NO: 2242759 - RNA, 19 nt, Artificial Sequence
  Description of Artificial Sequence: Synthetic oligonucleotide
  Antisense strand to SEQ ID NO: 2242758
cuucucaacuaagaaacca

SEQ ID NO: 2242760 - RNA, 19 nt, Artificial Sequence
  Description of Artificial Sequence: Synthetic oligonucleotide
  Sense strand starting at position 1726 of SEQ ID NO: 1884134
cucuauuguuggcccugaa

SEQ ID NO: 2242761 - RNA, 19 nt, Artificial Sequence
  Description of Artificial Sequence: Synthetic oligonucleotide
  Antisense strand to SEQ ID NO: 2242760
uucagggccaacaauagag

SEQ ID NO: 2242762 - RNA, 19 nt, Artificial Sequence
  Description of Artificial Sequence: Synthetic oligonucleotide
  Sense strand starting at position 1752 of SEQ ID NO: 1884134
cgcacauuacccgaaagcu

SEQ ID NO: 2242763 - RNA, 19 nt, Artificial Sequence
  Description of Artificial Sequence: Synthetic oligonucleotide
  Antisense strand to SEQ ID NO: 2242762
agcuuucggguaaugugcg

SEQ ID NO: 2242764 - RNA, 19 nt, Artificial Sequence
  Description of Artificial Sequence: Synthetic oligonucleotide
  Sense strand starting at position 1887 of SEQ ID NO: 1884134
uaggcugcaucagucaauu

SEQ ID NO: 2242765 - RNA, 19 nt, Artificial Sequence
  Description of Artificial Sequence: Synthetic oligonucleotide
  Antisense strand to SEQ ID NO: 2242764
aauugacugaugcagccua

SEQ ID NO: 2242766 - RNA, 19 nt, Artificial Sequence
  Description of Artificial Sequence: Synthetic oligonucleotide
  Sense strand starting at position 1913 of SEQ ID NO: 1884134
caagguugaugaguaauag

SEQ ID NO: 2242767 - RNA, 19 nt, Artificial Sequence
  Description of Artificial Sequence: Synthetic oligonucleotide
  Antisense strand to SEQ ID NO: 2242766
cuauuacucaucaaccuug

SEQ ID NO: 2242768 - RNA, 19 nt, Artificial Sequence
  Description of Artificial Sequence: Synthetic oligonucleotide
  Sense strand starting at position 2076 of SEQ ID NO: 1884134
aacuaaggucccgagguua

SEQ ID NO: 2242769 - RNA, 19 nt, Artificial Sequence
  Description of Artificial Sequence: Synthetic oligonucleotide
  Antisense strand to SEQ ID NO: 2242768
uaaccucgggaccuuaguu

SEQ ID NO: 2242770 - RNA, 19 nt, Artificial Sequence
  Description of Artificial Sequence: Synthetic oligonucleotide
  Sense strand starting at position 2139 of SEQ ID NO: 1884134
ugcucuuaccauuggaauc

SEQ ID NO: 2242771 - RNA, 19 nt, Artificial Sequence
  Description of Artificial Sequence: Synthetic oligonucleotide
  Antisense strand to SEQ ID NO: 2242770
gauuccaaugguaagagca

SEQ ID NO: 2242772 - RNA, 19 nt, Artificial Sequence
  Description of Artificial Sequence: Synthetic oligonucleotide
  Sense strand starting at position 2204 of SEQ ID NO: 1884134
caaguucgccauugagaga

SEQ ID NO: 2242773 - RNA, 19 nt, Artificial Sequence
  Description of Artificial Sequence: Synthetic oligonucleotide
  Antisense strand to SEQ ID NO: 2242772
ucucucaauggcgaacuug

SEQ ID NO: 2242774 - RNA, 19 nt, Artificial Sequence
  Description of Artificial Sequence: Synthetic oligonucleotide
  Sense strand starting at position 2228 of SEQ ID NO: 1884134
ccgaaugacuaauucuuaa

SEQ ID NO: 2242775 - RNA, 19 nt, Artificial Sequence
  Description of Artificial Sequence: Synthetic oligonucleotide
  Antisense strand to SEQ ID NO: 2242774
uuaagaauuagucauucgg

SEQ ID NO: 2242776 - RNA, 19 nt, Artificial Sequence
  Description of Artificial Sequence: Synthetic oligonucleotide
  Sense strand starting at position 2254 of SEQ ID NO: 1884134
ggugcauaauaaucaccua

SEQ ID NO: 2242777 - RNA, 19 nt, Artificial Sequence
  Description of Artificial Sequence: Synthetic oligonucleotide
  Antisense strand to SEQ ID NO: 2242776
uaggugauuauuaugcacc

SEQ ID NO: 2242778 - RNA, 19 nt, Artificial Sequence
  Description of Artificial Sequence: Synthetic oligonucleotide
  Sense strand starting at position 2312 of SEQ ID NO: 1884134
gguagcgaagucuguauuu

SEQ ID NO: 2242779 - RNA, 19 nt, Artificial Sequence
  Description of Artificial Sequence: Synthetic oligonucleotide
  Antisense strand to SEQ ID NO: 2242778
aaauacagacuucgcuacc

SEQ ID NO: 2242780 - RNA, 19 nt, Artificial Sequence
  Description of Artificial Sequence: Synthetic oligonucleotide
  Sense strand starting at position 2884 of SEQ ID NO: 1884134
guuguauuggaagggaaga

SEQ ID NO: 2242781 - RNA, 19 nt, Artificial Sequence
  Description of Artificial Sequence: Synthetic oligonucleotide
  Antisense strand to SEQ ID NO: 2242780
ucuucccuuccaauacaac

SEQ ID NO: 2242782 - RNA, 19 nt, Artificial Sequence
  Description of Artificial Sequence: Synthetic oligonucleotide
  Sense strand starting at position 2980 of SEQ ID NO: 1884134
ugccuaacacuuuacgaga

SEQ ID NO: 2242783 - RNA, 19 nt, Artificial Sequence
  Description of Artificial Sequence: Synthetic oligonucleotide
  Antisense strand to SEQ ID NO: 2242782
ucucguaaaguguuaggca

SEQ ID NO: 2242784 - RNA, 19 nt, Artificial Sequence
  Description of Artificial Sequence: Synthetic oligonucleotide
  Sense strand starting at position 3194 of SEQ ID NO: 1884134
acguguuuacguguuuaag

SEQ ID NO: 2242785 - RNA, 19 nt, Artificial Sequence
  Description of Artificial Sequence: Synthetic oligonucleotide
  Antisense strand to SEQ ID NO: 2242784
cuuaaacacguaaacacgu

SEQ ID NO: 2242786 - RNA, 19 nt, Artificial Sequence
  Description of Artificial Sequence: Synthetic oligonucleotide
  Sense strand starting at position 3195 of SEQ ID NO: 1884134
cguguuuacguguuuaagg

SEQ ID NO: 2242787 - RNA, 19 nt, Artificial Sequence
  Description of Artificial Sequence: Synthetic oligonucleotide
  Antisense strand to SEQ ID NO: 2242786
ccuuaaacacguaaacacg

SEQ ID NO: 2242788 - RNA, 19 nt, Artificial Sequence
  Description of Artificial Sequence: Synthetic oligonucleotide
  Sense strand starting at position 3414 of SEQ ID NO: 1884134
gguacuauuagcuacgaau

SEQ ID NO: 2242789 - RNA, 19 nt, Artificial Sequence
  Description of Artificial Sequence: Synthetic oligonucleotide
  Antisense strand to SEQ ID NO: 2242788
auucguagcuaauaguacc

SEQ ID NO: 2242790 - RNA, 19 nt, Artificial Sequence
  Description of Artificial Sequence: Synthetic oligonucleotide
  Sense strand starting at position 3529 of SEQ ID NO: 1884134
aagaccguucgugagauga

SEQ ID NO: 2242791 - RNA, 19 nt, Artificial Sequence
  Description of Artificial Sequence: Synthetic oligonucleotide
  Antisense strand to SEQ ID NO: 2242790
ucaucucacgaacggucuu

SEQ ID NO: 2242792 - RNA, 19 nt, Artificial Sequence
  Description of Artificial Sequence: Synthetic oligonucleotide
  Sense strand starting at position 3533 of SEQ ID NO: 1884134
ccguucgugagaugaauuu

SEQ ID NO: 2242793 - RNA, 19 nt, Artificial Sequence
  Description of Artificial Sequence: Synthetic oligonucleotide
  Antisense strand to SEQ ID NO: 2242792
aaauucaucucacgaacgg

SEQ ID NO: 2242794 - RNA, 19 nt, Artificial Sequence
  Description of Artificial Sequence: Synthetic oligonucleotide
  Sense strand starting at position 3594 of SEQ ID NO: 1884134
agaggauaguaucuaccuu

SEQ ID NO: 2242795 - RNA, 19 nt, Artificial Sequence
  Description of Artificial Sequence: Synthetic oligonucleotide
  Antisense strand to SEQ ID NO: 2242794
aagguagauacuauccucu

SEQ ID NO: 2242796 - RNA, 19 nt, Artificial Sequence
  Description of Artificial Sequence: Synthetic oligonucleotide
  Sense strand starting at position 3927 of SEQ ID NO: 1884134
acaccauuauucgugggau

SEQ ID NO: 2242797 - RNA, 19 nt, Artificial Sequence
  Description of Artificial Sequence: Synthetic oligonucleotide
  Antisense strand to SEQ ID NO: 2242796
aucccacgaauaauggugu

SEQ ID NO: 2242798 - RNA, 19 nt, Artificial Sequence
  Description of Artificial Sequence: Synthetic oligonucleotide
  Sense strand starting at position 3931 of SEQ ID NO: 1884134
cauuauucgugggauuuaa

SEQ ID NO: 2242799 - RNA, 19 nt, Artificial Sequence
  Description of Artificial Sequence: Synthetic oligonucleotide
  Antisense strand to SEQ ID NO: 2242798
uuaaaucccacgaauaaug

SEQ ID NO: 2242800 - RNA, 19 nt, Artificial Sequence
  Description of Artificial Sequence: Synthetic oligonucleotide
  Sense strand starting at position 3951 of SEQ ID NO: 1884134
aggaguuaaugaguuaaua

SEQ ID NO: 2242801 - RNA, 19 nt, Artificial Sequence
  Description of Artificial Sequence: Synthetic oligonucleotide
  Antisense strand to SEQ ID NO: 2242800
uauuaacucauuaacuccu

SEQ ID NO: 2242802 - RNA, 19 nt, Artificial Sequence
  Description of Artificial Sequence: Synthetic oligonucleotide
  Sense strand starting at position 3978 of SEQ ID NO: 1884134
uuuccaaacucagugguuu

SEQ ID NO: 2242803 - RNA, 19 nt, Artificial Sequence
  Description of Artificial Sequence: Synthetic oligonucleotide
  Antisense strand to SEQ ID NO: 2242802
aaaccacugaguuuggaaa

SEQ ID NO: 2242804 - RNA, 19 nt, Artificial Sequence
  Description of Artificial Sequence: Synthetic oligonucleotide
  Sense strand starting at position 122 of SEQ ID NO: 1884135
aucacuguacaaugaguau

SEQ ID NO: 2242805 - RNA, 19 nt, Artificial Sequence
  Description of Artificial Sequence: Synthetic oligonucleotide
  Antisense strand to SEQ ID NO: 2242804
auacucauuguacagugau

SEQ ID NO: 2242806 - RNA, 19 nt, Artificial Sequence
  Description of Artificial Sequence: Synthetic oligonucleotide
  Sense strand starting at position 133 of SEQ ID NO: 1884135
augaguauuugaugaauga

SEQ ID NO: 2242807 - RNA, 19 nt, Artificial Sequence
  Description of Artificial Sequence: Synthetic oligonucleotide
  Antisense strand to SEQ ID NO: 2242806
ucauucaucaaauacucau

SEQ ID NO: 2242808 - RNA, 19 nt, Artificial Sequence
  Description of Artificial Sequence: Synthetic oligonucleotide
  Sense strand starting at position 282 of SEQ ID NO: 1884135
gacuguguggcagagaauu

SEQ ID NO: 2242809 - RNA, 19 nt, Artificial Sequence
  Description of Artificial Sequence: Synthetic oligonucleotide
  Antisense strand to SEQ ID NO: 2242808
aauucucugccacacaguc

SEQ ID NO: 2242810 - RNA, 19 nt, Artificial Sequence
  Description of Artificial Sequence: Synthetic oligonucleotide
  Sense strand starting at position 319 of SEQ ID NO: 1884135
ucuauuugauauggcauuu

SEQ ID NO: 2242811 - RNA, 19 nt, Artificial Sequence
  Description of Artificial Sequence: Synthetic oligonucleotide
  Antisense strand to SEQ ID NO: 2242810
aaaugccauaucaaauaga

SEQ ID NO: 2242812 - RNA, 19 nt, Artificial Sequence
  Description of Artificial Sequence: Synthetic oligonucleotide
  Sense strand starting at position 515 of SEQ ID NO: 1884135
uguggacuccuccauaacu

SEQ ID NO: 2242813 - RNA, 19 nt, Artificial Sequence
  Description of Artificial Sequence: Synthetic oligonucleotide
  Antisense strand to SEQ ID NO: 2242812
aguuauggaggaguccaca

SEQ ID NO: 2242814 - RNA, 19 nt, Artificial Sequence
  Description of Artificial Sequence: Synthetic oligonucleotide
  Sense strand starting at position 699 of SEQ ID NO: 1884135
ggucauguaaccugguaag

SEQ ID NO: 2242815 - RNA, 19 nt, Artificial Sequence
  Description of Artificial Sequence: Synthetic oligonucleotide
  Antisense strand to SEQ ID NO: 2242814
cuuaccagguuacaugacc

SEQ ID NO: 2242816 - RNA, 19 nt, Artificial Sequence
  Description of Artificial Sequence: Synthetic oligonucleotide
  Sense strand starting at position 782 of SEQ ID NO: 1884135
guacucacacaauguaaua

SEQ ID NO: 2242817 - RNA, 19 nt, Artificial Sequence
  Description of Artificial Sequence: Synthetic oligonucleotide
  Antisense strand to SEQ ID NO: 2242816
uauuacauugugugaguac

SEQ ID NO: 2242818 - RNA, 19 nt, Artificial Sequence
  Description of Artificial Sequence: Synthetic oligonucleotide
  Sense strand starting at position 817 of SEQ ID NO: 1884135
ggagaugaauuauagcaga

SEQ ID NO: 2242819 - RNA, 19 nt, Artificial Sequence
  Description of Artificial Sequence: Synthetic oligonucleotide
  Antisense strand to SEQ ID NO: 2242818
ucugcuauaauucaucucc

SEQ ID NO: 2242820 - RNA, 19 nt, Artificial Sequence
  Description of Artificial Sequence: Synthetic oligonucleotide
  Sense strand starting at position 820 of SEQ ID NO: 1884135
gaugaauuauagcagagga

SEQ ID NO: 2242821 - RNA, 19 nt, Artificial Sequence
  Description of Artificial Sequence: Synthetic oligonucleotide
  Antisense strand to SEQ ID NO: 2242820
uccucugcuauaauucauc

SEQ ID NO: 2242822 - RNA, 19 nt, Artificial Sequence
  Description of Artificial Sequence: Synthetic oligonucleotide
  Sense strand starting at position 862 of SEQ ID NO: 1884135
cuuuguaagggugguauaa

SEQ ID NO: 2242823 - RNA, 19 nt, Artificial Sequence
  Description of Artificial Sequence: Synthetic oligonucleotide
  Antisense strand to SEQ ID NO: 2242822
uuauaccacccuuacaaag

SEQ ID NO: 2242824 - RNA, 19 nt, Artificial Sequence
  Description of Artificial Sequence: Synthetic oligonucleotide
  Sense strand starting at position 1039 of SEQ ID NO: 1884135
acugguauuggauguugua

SEQ ID NO: 2242825 - RNA, 19 nt, Artificial Sequence
  Description of Artificial Sequence: Synthetic oligonucleotide
  Antisense strand to SEQ ID NO: 2242824
uacaacauccaauaccagu

SEQ ID NO: 2242826 - RNA, 19 nt, Artificial Sequence
  Description of Artificial Sequence: Synthetic oligonucleotide
  Sense strand starting at position 1067 of SEQ ID NO: 1884135
cagugugucucagugggaa

SEQ ID NO: 2242827 - RNA, 19 nt, Artificial Sequence
  Description of Artificial Sequence: Synthetic oligonucleotide
  Antisense strand to SEQ ID NO: 2242826
uucccacugagacacacug

SEQ ID NO: 2242828 - RNA, 19 nt, Artificial Sequence
  Description of Artificial Sequence: Synthetic oligonucleotide
  Sense strand starting at position 1281 of SEQ ID NO: 1884135
ugagaaguacccugaauac

SEQ ID NO: 2242829 - RNA, 19 nt, Artificial Sequence
  Description of Artificial Sequence: Synthetic oligonucleotide
  Antisense strand to SEQ ID NO: 2242828
guauucaggguacuucuca

SEQ ID NO: 2242830 - RNA, 19 nt, Artificial Sequence
  Description of Artificial Sequence: Synthetic oligonucleotide
  Sense strand starting at position 1673 of SEQ ID NO: 1884135
cugaccauggaauguuauu

SEQ ID NO: 2242831 - RNA, 19 nt, Artificial Sequence
  Description of Artificial Sequence: Synthetic oligonucleotide
  Antisense strand to SEQ ID NO: 2242830
aauaacauuccauggucag

SEQ ID NO: 2242832 - RNA, 19 nt, Artificial Sequence
  Description of Artificial Sequence: Synthetic oligonucleotide
  Sense strand starting at position 1964 of SEQ ID NO: 1884135
aauauuauauggguaugca

SEQ ID NO: 2242833 - RNA, 19 nt, Artificial Sequence
  Description of Artificial Sequence: Synthetic oligonucleotide
  Antisense strand to SEQ ID NO: 2242832
ugcauacccauauaauauu

SEQ ID NO: 2242834 - RNA, 19 nt, Artificial Sequence
  Description of Artificial Sequence: Synthetic oligonucleotide
  Sense strand starting at position 1972 of SEQ ID NO: 1884135
auggguaugcacuaaguau

SEQ ID NO: 2242835 - RNA, 19 nt, Artificial Sequence
  Description of Artificial Sequence: Synthetic oligonucleotide
  Antisense strand to SEQ ID NO: 2242834
auacuuagugcauacccau

SEQ ID NO: 2242836 - RNA, 19 nt, Artificial Sequence
  Description of Artificial Sequence: Synthetic oligonucleotide
  Sense strand starting at position 2010 of SEQ ID NO: 1884135
gcuauuguccugcauauca

SEQ ID NO: 2242837 - RNA, 19 nt, Artificial Sequence
  Description of Artificial Sequence: Synthetic oligonucleotide
  Antisense strand to SEQ ID NO: 2242836
ugauaugcaggacaauagc

SEQ ID NO: 2242838 - RNA, 19 nt, Artificial Sequence
  Description of Artificial Sequence: Synthetic oligonucleotide
  Sense strand starting at position 2123 of SEQ ID NO: 1884135
gcuuauucucacuaaagug

SEQ ID NO: 2242839 - RNA, 19 nt, Artificial Sequence
  Description of Artificial Sequence: Synthetic oligonucleotide
  Antisense strand to SEQ ID NO: 2242838
cacuuuagugagaauaagc

SEQ ID NO: 2242840 - RNA, 19 nt, Artificial Sequence
  Description of Artificial Sequence: Synthetic oligonucleotide
  Sense strand starting at position 2211 of SEQ ID NO: 1884135
agaguaugcugggucuuca

SEQ ID NO: 2242841 - RNA, 19 nt, Artificial Sequence
  Description of Artificial Sequence: Synthetic oligonucleotide
  Antisense strand to SEQ ID NO: 2242840
ugaagacccagcauacucu

SEQ ID NO: 2242842 - RNA, 19 nt, Artificial Sequence
  Description of Artificial Sequence: Synthetic oligonucleotide
  Sense strand starting at position 2232 of SEQ ID NO: 1884135
uggagaagcuuacauuuau

SEQ ID NO: 2242843 - RNA, 19 nt, Artificial Sequence
  Description of Artificial Sequence: Synthetic oligonucleotide
  Antisense strand to SEQ ID NO: 2242842
auaaauguaagcuucucca

SEQ ID NO: 2242844 - RNA, 19 nt, Artificial Sequence
  Description of Artificial Sequence: Synthetic oligonucleotide
  Sense strand starting at position 2372 of SEQ ID NO: 1884135
uucuuccagcucuaggaau

SEQ ID NO: 2242845 - RNA, 19 nt, Artificial Sequence
  Description of Artificial Sequence: Synthetic oligonucleotide
  Antisense strand to SEQ ID NO: 2242844
auuccuagagcuggaagaa

SEQ ID NO: 2242846 - RNA, 19 nt, Artificial Sequence
  Description of Artificial Sequence: Synthetic oligonucleotide
  Sense strand starting at position 2396 of SEQ ID NO: 1884135
gauuguguagcauaucuau

SEQ ID NO: 2242847 - RNA, 19 nt, Artificial Sequence
  Description of Artificial Sequence: Synthetic oligonucleotide
  Antisense strand to SEQ ID NO: 2242846
auagauaugcuacacaauc

SEQ ID NO: 2242848 - RNA, 19 nt, Artificial Sequence
  Description of Artificial Sequence: Synthetic oligonucleotide
  Sense strand starting at position 2399 of SEQ ID NO: 1884135
uguguagcauaucuauauu

SEQ ID NO: 2242849 - RNA, 19 nt, Artificial Sequence
  Description of Artificial Sequence: Synthetic oligonucleotide
  Antisense strand to SEQ ID NO: 2242848
aauauagauaugcuacaca

SEQ ID NO: 2242850 - RNA, 19 nt, Artificial Sequence
  Description of Artificial Sequence: Synthetic oligonucleotide
  Sense strand starting at position 2402 of SEQ ID NO: 1884135
guagcauaucuauauuaag

SEQ ID NO: 2242851 - RNA, 19 nt, Artificial Sequence
  Description of Artificial Sequence: Synthetic oligonucleotide
  Antisense strand to SEQ ID NO: 2242850
cuuaauauagauaugcuac

SEQ ID NO: 2242852 - RNA, 19 nt, Artificial Sequence
  Description of Artificial Sequence: Synthetic oligonucleotide
  Sense strand starting at position 2472 of SEQ ID NO: 1884135
uugugccaucccuauuacu

SEQ ID NO: 2242853 - RNA, 19 nt, Artificial Sequence
  Description of Artificial Sequence: Synthetic oligonucleotide
  Antisense strand to SEQ ID NO: 2242852
aguaauagggauggcacaa

SEQ ID NO: 2242854 - RNA, 19 nt, Artificial Sequence
  Description of Artificial Sequence: Synthetic oligonucleotide
  Sense strand starting at position 2498 of SEQ ID NO: 1884135
cuaaaugaguaauuccagu

SEQ ID NO: 2242855 - RNA, 19 nt, Artificial Sequence
  Description of Artificial Sequence: Synthetic oligonucleotide
  Antisense strand to SEQ ID NO: 2242854
acuggaauuacucauuuag

SEQ ID NO: 2242856 - RNA, 19 nt, Artificial Sequence
  Description of Artificial Sequence: Synthetic oligonucleotide
  Sense strand starting at position 2504 of SEQ ID NO: 1884135
gaguaauuccagugaggau

SEQ ID NO: 2242857 - RNA, 19 nt, Artificial Sequence
  Description of Artificial Sequence: Synthetic oligonucleotide
  Antisense strand to SEQ ID NO: 2242856
auccucacuggaauuacuc

SEQ ID NO: 2242858 - RNA, 19 nt, Artificial Sequence
  Description of Artificial Sequence: Synthetic oligonucleotide
  Sense strand starting at position 2518 of SEQ ID NO: 1884135
aggauaagugaaugaguug

SEQ ID NO: 2242859 - RNA, 19 nt, Artificial Sequence
  Description of Artificial Sequence: Synthetic oligonucleotide
  Antisense strand to SEQ ID NO: 2242858
caacucauucacuuauccu

SEQ ID NO: 2242860 - RNA, 19 nt, Artificial Sequence
  Description of Artificial Sequence: Synthetic oligonucleotide
  Sense strand starting at position 2519 of SEQ ID NO: 1884135
ggauaagugaaugaguugu

SEQ ID NO: 2242861 - RNA, 19 nt, Artificial Sequence
  Description of Artificial Sequence: Synthetic oligonucleotide
  Antisense strand to SEQ ID NO: 2242860
acaacucauucacuuaucc

SEQ ID NO: 2242862 - RNA, 19 nt, Artificial Sequence
  Description of Artificial Sequence: Synthetic oligonucleotide
  Sense strand starting at position 2525 of SEQ ID NO: 1884135
gugaaugaguugucuaaga

SEQ ID NO: 2242863 - RNA, 19 nt, Artificial Sequence
  Description of Artificial Sequence: Synthetic oligonucleotide
  Antisense strand to SEQ ID NO: 2242862
ucuuagacaacucauucac

SEQ ID NO: 2242864 - RNA, 19 nt, Artificial Sequence
  Description of Artificial Sequence: Synthetic oligonucleotide
  Sense strand starting at position 2967 of SEQ ID NO: 1884135
cagauuaguggaugaagca

SEQ ID NO: 2242865 - RNA, 19 nt, Artificial Sequence
  Description of Artificial Sequence: Synthetic oligonucleotide
  Antisense strand to SEQ ID NO: 2242864
ugcuucauccacuaaucug

SEQ ID NO: 2242866 - RNA, 19 nt, Artificial Sequence
  Description of Artificial Sequence: Synthetic oligonucleotide
  Sense strand starting at position 2976 of SEQ ID NO: 1884135
ggaugaagcaggcauguua

SEQ ID NO: 2242867 - RNA, 19 nt, Artificial Sequence
  Description of Artificial Sequence: Synthetic oligonucleotide
  Antisense strand to SEQ ID NO: 2242866
uaacaugccugcuucaucc

SEQ ID NO: 2242868 - RNA, 19 nt, Artificial Sequence
  Description of Artificial Sequence: Synthetic oligonucleotide
  Sense strand starting at position 2990 of SEQ ID NO: 1884135
uguuaugugcuacuugcua

SEQ ID NO: 2242869 - RNA, 19 nt, Artificial Sequence
  Description of Artificial Sequence: Synthetic oligonucleotide
  Antisense strand to SEQ ID NO: 2242868
uagcaaguagcacauaaca

SEQ ID NO: 2242870 - RNA, 19 nt, Artificial Sequence
  Description of Artificial Sequence: Synthetic oligonucleotide
  Sense strand starting at position 3105 of SEQ ID NO: 1884135
gaaagugguguuuggcuua

SEQ ID NO: 2242871 - RNA, 19 nt, Artificial Sequence
  Description of Artificial Sequence: Synthetic oligonucleotide
  Antisense strand to SEQ ID NO: 2242870
uaagccaaacaccacuuuc

SEQ ID NO: 2242872 - RNA, 19 nt, Artificial Sequence
  Description of Artificial Sequence: Synthetic oligonucleotide
  Sense strand starting at position 3110 of SEQ ID NO: 1884135
ugguguuuggcuuagguuu

SEQ ID NO: 2242873 - RNA, 19 nt, Artificial Sequence
  Description of Artificial Sequence: Synthetic oligonucleotide
  Antisense strand to SEQ ID NO: 2242872
aaaccuaagccaaacacca

SEQ ID NO: 2242874 - RNA, 19 nt, Artificial Sequence
  Description of Artificial Sequence: Synthetic oligonucleotide
  Sense strand starting at position 3547 of SEQ ID NO: 1884135
gggccaaguggucaauaua

SEQ ID NO: 2242875 - RNA, 19 nt, Artificial Sequence
  Description of Artificial Sequence: Synthetic oligonucleotide
  Antisense strand to SEQ ID NO: 2242874
uauauugaccacuuggccc

SEQ ID NO: 2242876 - RNA, 19 nt, Artificial Sequence
  Description of Artificial Sequence: Synthetic oligonucleotide
  Sense strand starting at position 3607 of SEQ ID NO: 1884135
cccaaagauccaggcauua

SEQ ID NO: 2242877 - RNA, 19 nt, Artificial Sequence
  Description of Artificial Sequence: Synthetic oligonucleotide
  Antisense strand to SEQ ID NO: 2242876
uaaugccuggaucuuuggg

SEQ ID NO: 2242878 - RNA, 19 nt, Artificial Sequence
  Description of Artificial Sequence: Synthetic oligonucleotide
  Sense strand starting at position 3791 of SEQ ID NO: 1884135
gcuauugagaaauaugcag

SEQ ID NO: 2242879 - RNA, 19 nt, Artificial Sequence
  Description of Artificial Sequence: Synthetic oligonucleotide
  Antisense strand to SEQ ID NO: 2242878
cugcauauuucucaauagc

SEQ ID NO: 2242880 - RNA, 19 nt, Artificial Sequence
  Description of Artificial Sequence: Synthetic oligonucleotide
  Sense strand starting at position 3871 of SEQ ID NO: 1884135
ccugauuucuuuguguuga

SEQ ID NO: 2242881 - RNA, 19 nt, Artificial Sequence
  Description of Artificial Sequence: Synthetic oligonucleotide
  Antisense strand to SEQ ID NO: 2242880
ucaacacaaagaaaucagg

SEQ ID NO: 2242882 - RNA, 19 nt, Artificial Sequence
  Description of Artificial Sequence: Synthetic oligonucleotide
  Sense strand starting at position 3920 of SEQ ID NO: 1884135
cacauagucccuggaagga

SEQ ID NO: 2242883 - RNA, 19 nt, Artificial Sequence
  Description of Artificial Sequence: Synthetic oligonucleotide
  Antisense strand to SEQ ID NO: 2242882
uccuuccagggacuaugug

SEQ ID NO: 2242884 - RNA, 19 nt, Artificial Sequence
  Description of Artificial Sequence: Synthetic oligonucleotide
  Sense strand starting at position 199 of SEQ ID NO: 1884136
accacuauccauuggcaga

SEQ ID NO: 2242885 - RNA, 19 nt, Artificial Sequence
  Description of Artificial Sequence: Synthetic oligonucleotide
  Antisense strand to SEQ ID NO: 2242884
ucugccaauggauaguggu

SEQ ID NO: 2242886 - RNA, 19 nt, Artificial Sequence
  Description of Artificial Sequence: Synthetic oligonucleotide
  Sense strand starting at position 321 of SEQ ID NO: 1884136
accucauguaaguggagua

SEQ ID NO: 2242887 - RNA, 19 nt, Artificial Sequence
  Description of Artificial Sequence: Synthetic oligonucleotide
  Antisense strand to SEQ ID NO: 2242886
uacuccacuuacaugaggu

SEQ ID NO: 2242888 - RNA, 19 nt, Artificial Sequence
  Description of Artificial Sequence: Synthetic oligonucleotide
  Sense strand starting at position 322 of SEQ ID NO: 1884136
ccucauguaaguggaguaa

SEQ ID NO: 2242889 - RNA, 19 nt, Artificial Sequence
  Description of Artificial Sequence: Synthetic oligonucleotide
  Antisense strand to SEQ ID NO: 2242888
uuacuccacuuacaugagg

SEQ ID NO: 2242890 - RNA, 19 nt, Artificial Sequence
  Description of Artificial Sequence: Synthetic oligonucleotide
  Sense strand starting at position 484 of SEQ ID NO: 1884136
acuuaucugucgguaaaca

SEQ ID NO: 2242891 - RNA, 19 nt, Artificial Sequence
  Description of Artificial Sequence: Synthetic oligonucleotide
  Antisense strand to SEQ ID NO: 2242890
uguuuaccgacagauaagu

SEQ ID NO: 2242892 - RNA, 19 nt, Artificial Sequence
  Description of Artificial Sequence: Synthetic oligonucleotide
  Sense strand starting at position 485 of SEQ ID NO: 1884136
cuuaucugucgguaaacau

SEQ ID NO: 2242893 - RNA, 19 nt, Artificial Sequence
  Description of Artificial Sequence: Synthetic oligonucleotide
  Antisense strand to SEQ ID NO: 2242892
auguuuaccgacagauaag

SEQ ID NO: 2242894 - RNA, 19 nt, Artificial Sequence
  Description of Artificial Sequence: Synthetic oligonucleotide
  Sense strand starting at position 557 of SEQ ID NO: 1884136
uaucaaauaucuguucgag

SEQ ID NO: 2242895 - RNA, 19 nt, Artificial Sequence
  Description of Artificial Sequence: Synthetic oligonucleotide
  Antisense strand to SEQ ID NO: 2242894
cucgaacagauauuugaua

SEQ ID NO: 2242896 - RNA, 19 nt, Artificial Sequence
  Description of Artificial Sequence: Synthetic oligonucleotide
  Sense strand starting at position 767 of SEQ ID NO: 1884136
uugagcucauggucaaagu

SEQ ID NO: 2242897 - RNA, 19 nt, Artificial Sequence
  Description of Artificial Sequence: Synthetic oligonucleotide
  Antisense strand to SEQ ID NO: 2242896
acuuugaccaugagcucaa

SEQ ID NO: 2242898 - RNA, 19 nt, Artificial Sequence
  Description of Artificial Sequence: Synthetic oligonucleotide
  Sense strand starting at position 775 of SEQ ID NO: 1884136
auggucaaagugugaauua

SEQ ID NO: 2242899 - RNA, 19 nt, Artificial Sequence
  Description of Artificial Sequence: Synthetic oligonucleotide
  Antisense strand to SEQ ID NO: 2242898
uaauucacacuuugaccau

SEQ ID NO: 2242900 - RNA, 19 nt, Artificial Sequence
  Description of Artificial Sequence: Synthetic oligonucleotide
  Sense strand starting at position 849 of SEQ ID NO: 1884136
gguaguagauugcuuacca

SEQ ID NO: 2242901 - RNA, 19 nt, Artificial Sequence
  Description of Artificial Sequence: Synthetic oligonucleotide
  Antisense strand to SEQ ID NO: 2242900
ugguaagcaaucuacuacc

SEQ ID NO: 2242902 - RNA, 19 nt, Artificial Sequence
  Description of Artificial Sequence: Synthetic oligonucleotide
  Sense strand starting at position 922 of SEQ ID NO: 1884136
guagcaagugguuaggaga

SEQ ID NO: 2242903 - RNA, 19 nt, Artificial Sequence
  Description of Artificial Sequence: Synthetic oligonucleotide
  Antisense strand to SEQ ID NO: 2242902
ucuccuaaccacuugcuac

SEQ ID NO: 2242904 - RNA, 19 nt, Artificial Sequence
  Description of Artificial Sequence: Synthetic oligonucleotide
  Sense strand starting at position 1076 of SEQ ID NO: 1884136
gcagguuuaagugaggauu

SEQ ID NO: 2242905 - RNA, 19 nt, Artificial Sequence
  Description of Artificial Sequence: Synthetic oligonucleotide
  Antisense strand to SEQ ID NO: 2242904
aauccucacuuaaaccugc

SEQ ID NO: 2242906 - RNA, 19 nt, Artificial Sequence
  Description of Artificial Sequence: Synthetic oligonucleotide
  Sense strand starting at position 1079 of SEQ ID NO: 1884136
gguuuaagugaggauugca

SEQ ID NO: 2242907 - RNA, 19 nt, Artificial Sequence
  Description of Artificial Sequence: Synthetic oligonucleotide
  Antisense strand to SEQ ID NO: 2242906
ugcaauccucacuuaaacc

SEQ ID NO: 2242908 - RNA, 19 nt, Artificial Sequence
  Description of Artificial Sequence: Synthetic oligonucleotide
  Sense strand starting at position 1161 of SEQ ID NO: 1884136
cacggaugcccagauaucu

SEQ ID NO: 2242909 - RNA, 19 nt, Artificial Sequence
  Description of Artificial Sequence: Synthetic oligonucleotide
  Antisense strand to SEQ ID NO: 2242908
agauaucugggcauccgug

SEQ ID NO: 2242910 - RNA, 19 nt, Artificial Sequence
  Description of Artificial Sequence: Synthetic oligonucleotide
  Sense strand starting at position 1200 of SEQ ID NO: 1884136
ugugucugugaaguuguuu

SEQ ID NO: 2242911 - RNA, 19 nt, Artificial Sequence
  Description of Artificial Sequence: Synthetic oligonucleotide
  Antisense strand to SEQ ID NO: 2242910
aaacaacuucacagacaca

SEQ ID NO: 2242912 - RNA, 19 nt, Artificial Sequence
  Description of Artificial Sequence: Synthetic oligonucleotide
  Sense strand starting at position 1226 of SEQ ID NO: 1884136
agaugagcauuugaaugga

SEQ ID NO: 2242913 - RNA, 19 nt, Artificial Sequence
  Description of Artificial Sequence: Synthetic oligonucleotide
  Antisense strand to SEQ ID NO: 2242912
uccauucaaaugcucaucu

SEQ ID NO: 2242914 - RNA, 19 nt, Artificial Sequence
  Description of Artificial Sequence: Synthetic oligonucleotide
  Sense strand starting at position 1333 of SEQ ID NO: 1884136
ggaagaauguguccugucu

SEQ ID NO: 2242915 - RNA, 19 nt, Artificial Sequence
  Description of Artificial Sequence: Synthetic oligonucleotide
  Antisense strand to SEQ ID NO: 2242914
agacaggacacauucuucc

SEQ ID NO: 2242916 - RNA, 19 nt, Artificial Sequence
  Description of Artificial Sequence: Synthetic oligonucleotide
  Sense strand starting at position 1356 of SEQ ID NO: 1884136
cugcaugcuugaucuggga

SEQ ID NO: 2242917 - RNA, 19 nt, Artificial Sequence
  Description of Artificial Sequence: Synthetic oligonucleotide
  Antisense strand to SEQ ID NO: 2242916
ucccagaucaagcaugcag

SEQ ID NO: 2242918 - RNA, 19 nt, Artificial Sequence
  Description of Artificial Sequence: Synthetic oligonucleotide
  Sense strand starting at position 1358 of SEQ ID NO: 1884136
gcaugcuugaucugggaua

SEQ ID NO: 2242919 - RNA, 19 nt, Artificial Sequence
  Description of Artificial Sequence: Synthetic oligonucleotide
  Antisense strand to SEQ ID NO: 2242918
uaucccagaucaagcaugc

SEQ ID NO: 2242920 - RNA, 19 nt, Artificial Sequence
  Description of Artificial Sequence: Synthetic oligonucleotide
  Sense strand starting at position 1360 of SEQ ID NO: 1884136
augcuugaucugggauauc

SEQ ID NO: 2242921 - RNA, 19 nt, Artificial Sequence
  Description of Artificial Sequence: Synthetic oligonucleotide
  Antisense strand to SEQ ID NO: 2242920
gauaucccagaucaagcau

SEQ ID NO: 2242922 - RNA, 19 nt, Artificial Sequence
  Description of Artificial Sequence: Synthetic oligonucleotide
  Sense strand starting at position 1526 of SEQ ID NO: 1884136
ccauaacugcaugagcuaa

SEQ ID NO: 2242923 - RNA, 19 nt, Artificial Sequence
  Description of Artificial Sequence: Synthetic oligonucleotide
  Antisense strand to SEQ ID NO: 2242922
uuagcucaugcaguuaugg

SEQ ID NO: 2242924 - RNA, 19 nt, Artificial Sequence
  Description of Artificial Sequence: Synthetic oligonucleotide
  Sense strand starting at position 1631 of SEQ ID NO: 1884136
augaguaaaugcucaguaa

SEQ ID NO: 2242925 - RNA, 19 nt, Artificial Sequence
  Description of Artificial Sequence: Synthetic oligonucleotide
  Antisense strand to SEQ ID NO: 2242924
uuacugagcauuuacucau

SEQ ID NO: 2242926 - RNA, 19 nt, Artificial Sequence
  Description of Artificial Sequence: Synthetic oligonucleotide
  Sense strand starting at position 1716 of SEQ ID NO: 1884136
gguucuuucuuaccaguaa

SEQ ID NO: 2242927 - RNA, 19 nt, Artificial Sequence
  Description of Artificial Sequence: Synthetic oligonucleotide
  Antisense strand to SEQ ID NO: 2242926
uuacugguaagaaagaacc

SEQ ID NO: 2242928 - RNA, 19 nt, Artificial Sequence
  Description of Artificial Sequence: Synthetic oligonucleotide
  Sense strand starting at position 1720 of SEQ ID NO: 1884136
cuuucuuaccaguaaggug

SEQ ID NO: 2242929 - RNA, 19 nt, Artificial Sequence
  Description of Artificial Sequence: Synthetic oligonucleotide
  Antisense strand to SEQ ID NO: 2242928
caccuuacugguaagaaag

SEQ ID NO: 2242930 - RNA, 19 nt, Artificial Sequence
  Description of Artificial Sequence: Synthetic oligonucleotide
  Sense strand starting at position 2169 of SEQ ID NO: 1884136
acguauggccaagaggaau

SEQ ID NO: 2242931 - RNA, 19 nt, Artificial Sequence
  Description of Artificial Sequence: Synthetic oligonucleotide
  Antisense strand to SEQ ID NO: 2242930
auuccucuuggccauacgu

SEQ ID NO: 2242932 - RNA, 19 nt, Artificial Sequence
  Description of Artificial Sequence: Synthetic oligonucleotide
  Sense strand starting at position 2199 of SEQ ID NO: 1884136
uuguuuaguaagcaggaga

SEQ ID NO: 2242933 - RNA, 19 nt, Artificial Sequence
  Description of Artificial Sequence: Synthetic oligonucleotide
  Antisense strand to SEQ ID NO: 2242932
ucuccugcuuacuaaacaa

SEQ ID NO: 2242934 - RNA, 19 nt, Artificial Sequence
  Description of Artificial Sequence: Synthetic oligonucleotide
  Sense strand starting at position 2246 of SEQ ID NO: 1884136
aucagaugccuccagcaga

SEQ ID NO: 2242935 - RNA, 19 nt, Artificial Sequence
  Description of Artificial Sequence: Synthetic oligonucleotide
  Antisense strand to SEQ ID NO: 2242934
ucugcuggaggcaucugau

SEQ ID NO: 2242936 - RNA, 19 nt, Artificial Sequence
  Description of Artificial Sequence: Synthetic oligonucleotide
  Sense strand starting at position 2303 of SEQ ID NO: 1884136
cguggcaccaaauauguua

SEQ ID NO: 2242937 - RNA, 19 nt, Artificial Sequence
  Description of Artificial Sequence: Synthetic oligonucleotide
  Antisense strand to SEQ ID NO: 2242936
uaacauauuuggugccacg

SEQ ID NO: 2242938 - RNA, 19 nt, Artificial Sequence
  Description of Artificial Sequence: Synthetic oligonucleotide
  Sense strand starting at position 2314 of SEQ ID NO: 1884136
auauguuaccaguggcaaa

SEQ ID NO: 2242939 - RNA, 19 nt, Artificial Sequence
  Description of Artificial Sequence: Synthetic oligonucleotide
  Antisense strand to SEQ ID NO: 2242938
uuugccacugguaacauau

SEQ ID NO: 2242940 - RNA, 19 nt, Artificial Sequence
  Description of Artificial Sequence: Synthetic oligonucleotide
  Sense strand starting at position 3126 of SEQ ID NO: 1884136
cugugcacgcuucucaauu

SEQ ID NO: 2242941 - RNA, 19 nt, Artificial Sequence
  Description of Artificial Sequence: Synthetic oligonucleotide
  Antisense strand to SEQ ID NO: 2242940
aauugagaagcgugcacag

SEQ ID NO: 2242942 - RNA, 19 nt, Artificial Sequence
  Description of Artificial Sequence: Synthetic oligonucleotide
  Sense strand starting at position 3566 of SEQ ID NO: 1884136
guguuugggaaugauugua

SEQ ID NO: 2242943 - RNA, 19 nt, Artificial Sequence
  Description of Artificial Sequence: Synthetic oligonucleotide
  Antisense strand to SEQ ID NO: 2242942
uacaaucauucccaaacac

SEQ ID NO: 2242944 - RNA, 19 nt, Artificial Sequence
  Description of Artificial Sequence: Synthetic oligonucleotide
  Sense strand starting at position 3672 of SEQ ID NO: 1884136
cagggagcucuuuauuauc

SEQ ID NO: 2242945 - RNA, 19 nt, Artificial Sequence
  Description of Artificial Sequence: Synthetic oligonucleotide
  Antisense strand to SEQ ID NO: 2242944
gauaauaaagagcucccug

SEQ ID NO: 2242946 - RNA, 19 nt, Artificial Sequence
  Description of Artificial Sequence: Synthetic oligonucleotide
  Sense strand starting at position 3674 of SEQ ID NO: 1884136
gggagcucuuuauuaucca

SEQ ID NO: 2242947 - RNA, 19 nt, Artificial Sequence
  Description of Artificial Sequence: Synthetic oligonucleotide
  Antisense strand to SEQ ID NO: 2242946
uggauaauaaagagcuccc

SEQ ID NO: 2242948 - RNA, 19 nt, Artificial Sequence
  Description of Artificial Sequence: Synthetic oligonucleotide
  Sense strand starting at position 3678 of SEQ ID NO: 1884136
gcucuuuauuauccagaag

SEQ ID NO: 2242949 - RNA, 19 nt, Artificial Sequence
  Description of Artificial Sequence: Synthetic oligonucleotide
  Antisense strand to SEQ ID NO: 2242948
cuucuggauaauaaagagc

SEQ ID NO: 2242950 - RNA, 19 nt, Artificial Sequence
  Description of Artificial Sequence: Synthetic oligonucleotide
  Sense strand starting at position 3769 of SEQ ID NO: 1884136
ucuguuuacaauggguaga

SEQ ID NO: 2242951 - RNA, 19 nt, Artificial Sequence
  Description of Artificial Sequence: Synthetic oligonucleotide
  Antisense strand to SEQ ID NO: 2242950
ucuacccauuguaaacaga

SEQ ID NO: 2242952 - RNA, 19 nt, Artificial Sequence
  Description of Artificial Sequence: Synthetic oligonucleotide
  Sense strand starting at position 3770 of SEQ ID NO: 1884136
cuguuuacaauggguagau

SEQ ID NO: 2242953 - RNA, 19 nt, Artificial Sequence
  Description of Artificial Sequence: Synthetic oligonucleotide
  Antisense strand to SEQ ID NO: 2242952
aucuacccauuguaaacag

SEQ ID NO: 2242954 - RNA, 19 nt, Artificial Sequence
  Description of Artificial Sequence: Synthetic oligonucleotide
  Sense strand starting at position 3771 of SEQ ID NO: 1884136
uguuuacaauggguagauu

SEQ ID NO: 2242955 - RNA, 19 nt, Artificial Sequence
  Description of Artificial Sequence: Synthetic oligonucleotide
  Antisense strand to SEQ ID NO: 2242954
aaucuacccauuguaaaca

SEQ ID NO: 2242956 - RNA, 19 nt, Artificial Sequence
  Description of Artificial Sequence: Synthetic oligonucleotide
  Sense strand starting at position 3829 of SEQ ID NO: 1884136
uuuguacuacagugauacu

SEQ ID NO: 2242957 - RNA, 19 nt, Artificial Sequence
  Description of Artificial Sequence: Synthetic oligonucleotide
  Antisense strand to SEQ ID NO: 2242956
aguaucacuguaguacaaa

SEQ ID NO: 2242958 - RNA, 19 nt, Artificial Sequence
  Description of Artificial Sequence: Synthetic oligonucleotide
  Sense strand starting at position 3885 of SEQ ID NO: 1884136
guauucaaaguguauguga

SEQ ID NO: 2242959 - RNA, 19 nt, Artificial Sequence
  Description of Artificial Sequence: Synthetic oligonucleotide
  Antisense strand to SEQ ID NO: 2242958
ucacauacacuuugaauac

SEQ ID NO: 2242960 - RNA, 19 nt, Artificial Sequence
  Description of Artificial Sequence: Synthetic oligonucleotide
  Sense strand starting at position 3894 of SEQ ID NO: 1884136
guguaugugaggcauaaua

SEQ ID NO: 2242961 - RNA, 19 nt, Artificial Sequence
  Description of Artificial Sequence: Synthetic oligonucleotide
  Antisense strand to SEQ ID NO: 2242960
uauuaugccucacauacac

SEQ ID NO: 2242962 - RNA, 19 nt, Artificial Sequence
  Description of Artificial Sequence: Synthetic oligonucleotide
  Sense strand starting at position 3896 of SEQ ID NO: 1884136
guaugugaggcauaauaua

SEQ ID NO: 2242963 - RNA, 19 nt, Artificial Sequence
  Description of Artificial Sequence: Synthetic oligonucleotide
  Antisense strand to SEQ ID NO: 2242962
uauauuaugccucacauac

SEQ ID NO: 2242964 - RNA, 19 nt, Artificial Sequence
  Description of Artificial Sequence: Synthetic oligonucleotide
  Sense strand starting at position 24 of SEQ ID NO: 1884137
acccuagagcaaugagaau

SEQ ID NO: 2242965 - RNA, 19 nt, Artificial Sequence
  Description of Artificial Sequence: Synthetic oligonucleotide
  Antisense strand to SEQ ID NO: 2242964
auucucauugcucuagggu

SEQ ID NO: 2242966 - RNA, 19 nt, Artificial Sequence
  Description of Artificial Sequence: Synthetic oligonucleotide
  Sense strand starting at position 36 of SEQ ID NO: 1884137
ugagaauuauggucacuca

SEQ ID NO: 2242967 - RNA, 19 nt, Artificial Sequence
  Description of Artificial Sequence: Synthetic oligonucleotide
  Antisense strand to SEQ ID NO: 2242966
ugagugaccauaauucuca

SEQ ID NO: 2242968 - RNA, 19 nt, Artificial Sequence
  Description of Artificial Sequence: Synthetic oligonucleotide
  Sense strand starting at position 112 of SEQ ID NO: 1884137
gugagacaauaguccaaca

SEQ ID NO: 2242969 - RNA, 19 nt, Artificial Sequence
  Description of Artificial Sequence: Synthetic oligonucleotide
  Antisense strand to SEQ ID NO: 2242968
uguuggacuauugucucac

SEQ ID NO: 2242970 - RNA, 19 nt, Artificial Sequence
  Description of Artificial Sequence: Synthetic oligonucleotide
  Sense strand starting at position 242 of SEQ ID NO: 1884137
gccugauaccaaggcaaca

SEQ ID NO: 2242971 - RNA, 19 nt, Artificial Sequence
  Description of Artificial Sequence: Synthetic oligonucleotide
  Antisense strand to SEQ ID NO: 2242970
uguugccuugguaucaggc

SEQ ID NO: 2242972 - RNA, 19 nt, Artificial Sequence
  Description of Artificial Sequence: Synthetic oligonucleotide
  Sense strand starting at position 254 of SEQ ID NO: 1884137
ggcaacauugauugaggua

SEQ ID NO: 2242973 - RNA, 19 nt, Artificial Sequence
  Description of Artificial Sequence: Synthetic oligonucleotide
  Antisense strand to SEQ ID NO: 2242972
uaccucaaucaauguugcc

SEQ ID NO: 2242974 - RNA, 19 nt, Artificial Sequence
  Description of Artificial Sequence: Synthetic oligonucleotide
  Sense strand starting at position 550 of SEQ ID NO: 1884137
ggaagucuauuauucuauc

SEQ ID NO: 2242975 - RNA, 19 nt, Artificial Sequence
  Description of Artificial Sequence: Synthetic oligonucleotide
  Antisense strand to SEQ ID NO: 2242974
gauagaauaauagacuucc

SEQ ID NO: 2242976 - RNA, 19 nt, Artificial Sequence
  Description of Artificial Sequence: Synthetic oligonucleotide
  Sense strand starting at position 638 of SEQ ID NO: 1884137
ucauucuugcaaggaaucu

SEQ ID NO: 2242977 - RNA, 19 nt, Artificial Sequence
  Description of Artificial Sequence: Synthetic oligonucleotide
  Antisense strand to SEQ ID NO: 2242976
agauuccuugcaagaauga

SEQ ID NO: 2242978 - RNA, 19 nt, Artificial Sequence
  Description of Artificial Sequence: Synthetic oligonucleotide
  Sense strand starting at position 763 of SEQ ID NO: 1884137
gccauacugugaccaggaa

SEQ ID NO: 2242979 - RNA, 19 nt, Artificial Sequence
  Description of Artificial Sequence: Synthetic oligonucleotide
  Antisense strand to SEQ ID NO: 2242978
uuccuggucacaguauggc

SEQ ID NO: 2242980 - RNA, 19 nt, Artificial Sequence
  Description of Artificial Sequence: Synthetic oligonucleotide
  Sense strand starting at position 889 of SEQ ID NO: 1884137
gccuuacugguagacucua

SEQ ID NO: 2242981 - RNA, 19 nt, Artificial Sequence
  Description of Artificial Sequence: Synthetic oligonucleotide
  Antisense strand to SEQ ID NO: 2242980
uagagucuaccaguaaggc

SEQ ID NO: 2242982 - RNA, 19 nt, Artificial Sequence
  Description of Artificial Sequence: Synthetic oligonucleotide
  Sense strand starting at position 1375 of SEQ ID NO: 1884137
ggucacaugagcugaagaa

SEQ ID NO: 2242983 - RNA, 19 nt, Artificial Sequence
  Description of Artificial Sequence: Synthetic oligonucleotide
  Antisense strand to SEQ ID NO: 2242982
uucuucagcucaugugacc

SEQ ID NO: 2242984 - RNA, 19 nt, Artificial Sequence
  Description of Artificial Sequence: Synthetic oligonucleotide
  Sense strand starting at position 1418 of SEQ ID NO: 1884137
aaauauguugcaggaagaa

SEQ ID NO: 2242985 - RNA, 19 nt, Artificial Sequence
  Description of Artificial Sequence: Synthetic oligonucleotide
  Antisense strand to SEQ ID NO: 2242984
uucuuccugcaacauauuu

SEQ ID NO: 2242986 - RNA, 19 nt, Artificial Sequence
  Description of Artificial Sequence: Synthetic oligonucleotide
  Sense strand starting at position 1587 of SEQ ID NO: 1884137
uguaauguaccagggauuc

SEQ ID NO: 2242987 - RNA, 19 nt, Artificial Sequence
  Description of Artificial Sequence: Synthetic oligonucleotide
  Antisense strand to SEQ ID NO: 2242986
gaaucccugguacauuaca

SEQ ID NO: 2242988 - RNA, 19 nt, Artificial Sequence
  Description of Artificial Sequence: Synthetic oligonucleotide
  Sense strand starting at position 1648 of SEQ ID NO: 1884137
gucucaaacagauguggau

SEQ ID NO: 2242989 - RNA, 19 nt, Artificial Sequence
  Description of Artificial Sequence: Synthetic oligonucleotide
  Antisense strand to SEQ ID NO: 2242988
auccacaucuguuugagac

SEQ ID NO: 2242990 - RNA, 19 nt, Artificial Sequence
  Description of Artificial Sequence: Synthetic oligonucleotide
  Sense strand starting at position 1664 of SEQ ID NO: 1884137
gauuguggccuugaaaggu

SEQ ID NO: 2242991 - RNA, 19 nt, Artificial Sequence
  Description of Artificial Sequence: Synthetic oligonucleotide
  Antisense strand to SEQ ID NO: 2242990
accuuucaaggccacaauc

SEQ ID NO: 2242992 - RNA, 19 nt, Artificial Sequence
  Description of Artificial Sequence: Synthetic oligonucleotide
  Sense strand starting at position 1732 of SEQ ID NO: 1884137
acuugauuccaagggugag

SEQ ID NO: 2242993 - RNA, 19 nt, Artificial Sequence
  Description of Artificial Sequence: Synthetic oligonucleotide
  Antisense strand to SEQ ID NO: 2242992
cucacccuuggaaucaagu

SEQ ID NO: 2242994 - RNA, 19 nt, Artificial Sequence
  Description of Artificial Sequence: Synthetic oligonucleotide
  Sense strand starting at position 1733 of SEQ ID NO: 1884137
cuugauuccaagggugagu

SEQ ID NO: 2242995 - RNA, 19 nt, Artificial Sequence
  Description of Artificial Sequence: Synthetic oligonucleotide
  Antisense strand to SEQ ID NO: 2242994
acucacccuuggaaucaag

SEQ ID NO: 2242996 - RNA, 19 nt, Artificial Sequence
  Description of Artificial Sequence: Synthetic oligonucleotide
  Sense strand starting at position 1744 of SEQ ID NO: 1884137
gggugaguagccgggauuu

SEQ ID NO: 2242997 - RNA, 19 nt, Artificial Sequence
  Description of Artificial Sequence: Synthetic oligonucleotide
  Antisense strand to SEQ ID NO: 2242996
aaaucccggcuacucaccc

SEQ ID NO: 2242998 - RNA, 19 nt, Artificial Sequence
  Description of Artificial Sequence: Synthetic oligonucleotide
  Sense strand starting at position 1775 of SEQ ID NO: 1884137
aggaauuucuccugggaga

SEQ ID NO: 2242999 - RNA, 19 nt, Artificial Sequence
  Description of Artificial Sequence: Synthetic oligonucleotide
  Antisense strand to SEQ ID NO: 2242998
ucucccaggagaaauuccu

SEQ ID NO: 2243000 - RNA, 19 nt, Artificial Sequence
  Description of Artificial Sequence: Synthetic oligonucleotide
  Sense strand starting at position 1855 of SEQ ID NO: 1884137
agaacuaugccaugguuga

SEQ ID NO: 2243001 - RNA, 19 nt, Artificial Sequence
  Description of Artificial Sequence: Synthetic oligonucleotide
  Antisense strand to SEQ ID NO: 2243000
ucaaccauggcauaguucu

SEQ ID NO: 2243002 - RNA, 19 nt, Artificial Sequence
  Description of Artificial Sequence: Synthetic oligonucleotide
  Sense strand starting at position 1856 of SEQ ID NO: 1884137
gaacuaugccaugguugag

SEQ ID NO: 2243003 - RNA, 19 nt, Artificial Sequence
  Description of Artificial Sequence: Synthetic oligonucleotide
  Antisense strand to SEQ ID NO: 2243002
cucaaccauggcauaguuc

SEQ ID NO: 2243004 - RNA, 19 nt, Artificial Sequence
  Description of Artificial Sequence: Synthetic oligonucleotide
  Sense strand starting at position 1916 of SEQ ID NO: 1884137
gacucagugcaugagaagu

SEQ ID NO: 2243005 - RNA, 19 nt, Artificial Sequence
  Description of Artificial Sequence: Synthetic oligonucleotide
  Antisense strand to SEQ ID NO: 2243004
acuucucaugcacugaguc

SEQ ID NO: 2243006 - RNA, 19 nt, Artificial Sequence
  Description of Artificial Sequence: Synthetic oligonucleotide
  Sense strand starting at position 2128 of SEQ ID NO: 1884137
cuagaagcccuaugaaaca

SEQ ID NO: 2243007 - RNA, 19 nt, Artificial Sequence
  Description of Artificial Sequence: Synthetic oligonucleotide
  Antisense strand to SEQ ID NO: 2243006
uguuucauagggcuucuag

SEQ ID NO: 2243008 - RNA, 19 nt, Artificial Sequence
  Description of Artificial Sequence: Synthetic oligonucleotide
  Sense strand starting at position 2214 of SEQ ID NO: 1884137
gcagguaucuuucucauuu

SEQ ID NO: 2243009 - RNA, 19 nt, Artificial Sequence
  Description of Artificial Sequence: Synthetic oligonucleotide
  Antisense strand to SEQ ID NO: 2243008
aaaugagaaagauaccugc

SEQ ID NO: 2243010 - RNA, 19 nt, Artificial Sequence
  Description of Artificial Sequence: Synthetic oligonucleotide
  Sense strand starting at position 2423 of SEQ ID NO: 1884137
cucacaauuguaugugaga

SEQ ID NO: 2243011 - RNA, 19 nt, Artificial Sequence
  Description of Artificial Sequence: Synthetic oligonucleotide
  Antisense strand to SEQ ID NO: 2243010
ucucacauacaauugugag

SEQ ID NO: 2243012 - RNA, 19 nt, Artificial Sequence
  Description of Artificial Sequence: Synthetic oligonucleotide
  Sense strand starting at position 2424 of SEQ ID NO: 1884137
ucacaauuguaugugagau

SEQ ID NO: 2243013 - RNA, 19 nt, Artificial Sequence
  Description of Artificial Sequence: Synthetic oligonucleotide
  Antisense strand to SEQ ID NO: 2243012
aucucacauacaauuguga

SEQ ID NO: 2243014 - RNA, 19 nt, Artificial Sequence
  Description of Artificial Sequence: Synthetic oligonucleotide
  Sense strand starting at position 2463 of SEQ ID NO: 1884137
agcagaauucugcaaaguu

SEQ ID NO: 2243015 - RNA, 19 nt, Artificial Sequence
  Description of Artificial Sequence: Synthetic oligonucleotide
  Antisense strand to SEQ ID NO: 2243014
aacuuugcagaauucugcu

SEQ ID NO: 2243016 - RNA, 19 nt, Artificial Sequence
  Description of Artificial Sequence: Synthetic oligonucleotide
  Sense strand starting at position 2495 of SEQ ID NO: 1884137
cagcuaguucugcuagugu

SEQ ID NO: 2243017 - RNA, 19 nt, Artificial Sequence
  Description of Artificial Sequence: Synthetic oligonucleotide
  Antisense strand to SEQ ID NO: 2243016
acacuagcagaacuagcug

SEQ ID NO: 2243018 - RNA, 19 nt, Artificial Sequence
  Description of Artificial Sequence: Synthetic oligonucleotide
  Sense strand starting at position 2532 of SEQ ID NO: 1884137
auaggaacauuguuccaca

SEQ ID NO: 2243019 - RNA, 19 nt, Artificial Sequence
  Description of Artificial Sequence: Synthetic oligonucleotide
  Antisense strand to SEQ ID NO: 2243018
uguggaacaauguuccuau

SEQ ID NO: 2243020 - RNA, 19 nt, Artificial Sequence
  Description of Artificial Sequence: Synthetic oligonucleotide
  Sense strand starting at position 2610 of SEQ ID NO: 1884137
guuaacuaaugggcaaaga

SEQ ID NO: 2243021 - RNA, 19 nt, Artificial Sequence
  Description of Artificial Sequence: Synthetic oligonucleotide
  Antisense strand to SEQ ID NO: 2243020
ucuuugcccauuaguuaac

SEQ ID NO: 2243022 - RNA, 19 nt, Artificial Sequence
  Description of Artificial Sequence: Synthetic oligonucleotide
  Sense strand starting at position 2644 of SEQ ID NO: 1884137
aguggaauguuggugaaca

SEQ ID NO: 2243023 - RNA, 19 nt, Artificial Sequence
  Description of Artificial Sequence: Synthetic oligonucleotide
  Antisense strand to SEQ ID NO: 2243022
uguucaccaacauuccacu

SEQ ID NO: 2243024 - RNA, 19 nt, Artificial Sequence
  Description of Artificial Sequence: Synthetic oligonucleotide
  Sense strand starting at position 2741 of SEQ ID NO: 1884137
gagcuaagaucagcaugau

SEQ ID NO: 2243025 - RNA, 19 nt, Artificial Sequence
  Description of Artificial Sequence: Synthetic oligonucleotide
  Antisense strand to SEQ ID NO: 2243024
aucaugcugaucuuagcuc

SEQ ID NO: 2243026 - RNA, 19 nt, Artificial Sequence
  Description of Artificial Sequence: Synthetic oligonucleotide
  Sense strand starting at position 2742 of SEQ ID NO: 1884137
agcuaagaucagcaugaua

SEQ ID NO: 2243027 - RNA, 19 nt, Artificial Sequence
  Description of Artificial Sequence: Synthetic oligonucleotide
  Antisense strand to SEQ ID NO: 2243026
uaucaugcugaucuuagcu

SEQ ID NO: 2243028 - RNA, 19 nt, Artificial Sequence
  Description of Artificial Sequence: Synthetic oligonucleotide
  Sense strand starting at position 2744 of SEQ ID NO: 1884137
cuaagaucagcaugauauu

SEQ ID NO: 2243029 - RNA, 19 nt, Artificial Sequence
  Description of Artificial Sequence: Synthetic oligonucleotide
  Antisense strand to SEQ ID NO: 2243028
aauaucaugcugaucuuag

SEQ ID NO: 2243030 - RNA, 19 nt, Artificial Sequence
  Description of Artificial Sequence: Synthetic oligonucleotide
  Sense strand starting at position 2779 of SEQ ID NO: 1884137
gacucaugggcuggaaaga

SEQ ID NO: 2243031 - RNA, 19 nt, Artificial Sequence
  Description of Artificial Sequence: Synthetic oligonucleotide
  Antisense strand to SEQ ID NO: 2243030
ucuuuccagcccaugaguc

SEQ ID NO: 2243032 - RNA, 19 nt, Artificial Sequence
  Description of Artificial Sequence: Synthetic oligonucleotide
  Sense strand starting at position 2847 of SEQ ID NO: 1884137
ucauaaugcuggguaugaa

SEQ ID NO: 2243033 - RNA, 19 nt, Artificial Sequence
  Description of Artificial Sequence: Synthetic oligonucleotide
  Antisense strand to SEQ ID NO: 2243032
uucauacccagcauuauga

SEQ ID NO: 2243034 - RNA, 19 nt, Artificial Sequence
  Description of Artificial Sequence: Synthetic oligonucleotide
  Sense strand starting at position 2848 of SEQ ID NO: 1884137
cauaaugcuggguaugaau

SEQ ID NO: 2243035 - RNA, 19 nt, Artificial Sequence
  Description of Artificial Sequence: Synthetic oligonucleotide
  Antisense strand to SEQ ID NO: 2243034
auucauacccagcauuaug

SEQ ID NO: 2243036 - RNA, 19 nt, Artificial Sequence
  Description of Artificial Sequence: Synthetic oligonucleotide
  Sense strand starting at position 3020 of SEQ ID NO: 1884137
gaucauaggccuugagaau

SEQ ID NO: 2243037 - RNA, 19 nt, Artificial Sequence
  Description of Artificial Sequence: Synthetic oligonucleotide
  Antisense strand to SEQ ID NO: 2243036
auucucaaggccuaugauc

SEQ ID NO: 2243038 - RNA, 19 nt, Artificial Sequence
  Description of Artificial Sequence: Synthetic oligonucleotide
  Sense strand starting at position 3029 of SEQ ID NO: 1884137
ccuugagaaugguucugau

SEQ ID NO: 2243039 - RNA, 19 nt, Artificial Sequence
  Description of Artificial Sequence: Synthetic oligonucleotide
  Antisense strand to SEQ ID NO: 2243038
aucagaaccauucucaagg

SEQ ID NO: 2243040 - RNA, 19 nt, Artificial Sequence
  Description of Artificial Sequence: Synthetic oligonucleotide
  Sense strand starting at position 3546 of SEQ ID NO: 1884137
auuguaccaccguaauaug

SEQ ID NO: 2243041 - RNA, 19 nt, Artificial Sequence
  Description of Artificial Sequence: Synthetic oligonucleotide
  Antisense strand to SEQ ID NO: 2243040
cauauuacggugguacaau

SEQ ID NO: 2243042 - RNA, 19 nt, Artificial Sequence
  Description of Artificial Sequence: Synthetic oligonucleotide
  Sense strand starting at position 3555 of SEQ ID NO: 1884137
ccguaauauggccaucaca

SEQ ID NO: 2243043 - RNA, 19 nt, Artificial Sequence
  Description of Artificial Sequence: Synthetic oligonucleotide
  Antisense strand to SEQ ID NO: 2243042
ugugauggccauauuacgg

SEQ ID NO: 2243044 - RNA, 19 nt, Artificial Sequence
  Description of Artificial Sequence: Synthetic oligonucleotide
  Sense strand starting at position 549 of SEQ ID NO: 1884138
guuaccucacuguaauauu

SEQ ID NO: 2243045 - RNA, 19 nt, Artificial Sequence
  Description of Artificial Sequence: Synthetic oligonucleotide
  Antisense strand to SEQ ID NO: 2243044
aauauuacagugagguaac

SEQ ID NO: 2243046 - RNA, 19 nt, Artificial Sequence
  Description of Artificial Sequence: Synthetic oligonucleotide
  Sense strand starting at position 565 of SEQ ID NO: 1884138
auuagcuaugccuagacua

SEQ ID NO: 2243047 - RNA, 19 nt, Artificial Sequence
  Description of Artificial Sequence: Synthetic oligonucleotide
  Antisense strand to SEQ ID NO: 2243046
uagucuaggcauagcuaau

SEQ ID NO: 2243048 - RNA, 19 nt, Artificial Sequence
  Description of Artificial Sequence: Synthetic oligonucleotide
  Sense strand starting at position 595 of SEQ ID NO: 1884138
agguuaaaguuccuuaaua

SEQ ID NO: 2243049 - RNA, 19 nt, Artificial Sequence
  Description of Artificial Sequence: Synthetic oligonucleotide
  Antisense strand to SEQ ID NO: 2243048
uauuaaggaacuuuaaccu

SEQ ID NO: 2243050 - RNA, 19 nt, Artificial Sequence
  Description of Artificial Sequence: Synthetic oligonucleotide
  Sense strand starting at position 596 of SEQ ID NO: 1884138
gguuaaaguuccuuaauaa

SEQ ID NO: 2243051 - RNA, 19 nt, Artificial Sequence
  Description of Artificial Sequence: Synthetic oligonucleotide
  Antisense strand to SEQ ID NO: 2243050
uuauuaaggaacuuuaacc

SEQ ID NO: 2243052 - RNA, 19 nt, Artificial Sequence
  Description of Artificial Sequence: Synthetic oligonucleotide
  Sense strand starting at position 1067 of SEQ ID NO: 1884138
agccuaaguggauaguaau

SEQ ID NO: 2243053 - RNA, 19 nt, Artificial Sequence
  Description of Artificial Sequence: Synthetic oligonucleotide
  Antisense strand to SEQ ID NO: 2243052
auuacuauccacuuaggcu

SEQ ID NO: 2243054 - RNA, 19 nt, Artificial Sequence
  Description of Artificial Sequence: Synthetic oligonucleotide
  Sense strand starting at position 1229 of SEQ ID NO: 1884138
uagaaauagcaguaaugca

SEQ ID NO: 2243055 - RNA, 19 nt, Artificial Sequence
  Description of Artificial Sequence: Synthetic oligonucleotide
  Antisense strand to SEQ ID NO: 2243054
ugcauuacugcuauuucua

SEQ ID NO: 2243056 - RNA, 19 nt, Artificial Sequence
  Description of Artificial Sequence: Synthetic oligonucleotide
  Sense strand starting at position 1237 of SEQ ID NO: 1884138
gcaguaaugcaucacuaca

SEQ ID NO: 2243057 - RNA, 19 nt, Artificial Sequence
  Description of Artificial Sequence: Synthetic oligonucleotide
  Antisense strand to SEQ ID NO: 2243056
uguagugaugcauuacugc

SEQ ID NO: 2243058 - RNA, 19 nt, Artificial Sequence
  Description of Artificial Sequence: Synthetic oligonucleotide
  Sense strand starting at position 1647 of SEQ ID NO: 1884138
cuuugaaucagccagagug

SEQ ID NO: 2243059 - RNA, 19 nt, Artificial Sequence
  Description of Artificial Sequence: Synthetic oligonucleotide
  Antisense strand to SEQ ID NO: 2243058
cacucuggcugauucaaag

SEQ ID NO: 2243060 - RNA, 19 nt, Artificial Sequence
  Description of Artificial Sequence: Synthetic oligonucleotide
  Sense strand starting at position 1758 of SEQ ID NO: 1884138
cuugaagaacuuugucuuu

SEQ ID NO: 2243061 - RNA, 19 nt, Artificial Sequence
  Description of Artificial Sequence: Synthetic oligonucleotide
  Antisense strand to SEQ ID NO: 2243060
aaagacaaaguucuucaag

SEQ ID NO: 2243062 - RNA, 19 nt, Artificial Sequence
  Description of Artificial Sequence: Synthetic oligonucleotide
  Sense strand starting at position 1894 of SEQ ID NO: 1884138
cuguuaauauaaucuaggu

SEQ ID NO: 2243063 - RNA, 19 nt, Artificial Sequence
  Description of Artificial Sequence: Synthetic oligonucleotide
  Antisense strand to SEQ ID NO: 2243062
accuagauuauauuaacag

SEQ ID NO: 2243064 - RNA, 19 nt, Artificial Sequence
  Description of Artificial Sequence: Synthetic oligonucleotide
  Sense strand starting at position 1907 of SEQ ID NO: 1884138
cuaggugagauacauuguu

SEQ ID NO: 2243065 - RNA, 19 nt, Artificial Sequence
  Description of Artificial Sequence: Synthetic oligonucleotide
  Antisense strand to SEQ ID NO: 2243064
aacaauguaucucaccuag

SEQ ID NO: 2243066 - RNA, 19 nt, Artificial Sequence
  Description of Artificial Sequence: Synthetic oligonucleotide
  Sense strand starting at position 1912 of SEQ ID NO: 1884138
ugagauacauuguuagcau

SEQ ID NO: 2243067 - RNA, 19 nt, Artificial Sequence
  Description of Artificial Sequence: Synthetic oligonucleotide
  Antisense strand to SEQ ID NO: 2243066
augcuaacaauguaucuca

SEQ ID NO: 2243068 - RNA, 19 nt, Artificial Sequence
  Description of Artificial Sequence: Synthetic oligonucleotide
  Sense strand starting at position 1915 of SEQ ID NO: 1884138
gauacauuguuagcaugaa

SEQ ID NO: 2243069 - RNA, 19 nt, Artificial Sequence
  Description of Artificial Sequence: Synthetic oligonucleotide
  Antisense strand to SEQ ID NO: 2243068
uucaugcuaacaauguauc

SEQ ID NO: 2243070 - RNA, 19 nt, Artificial Sequence
  Description of Artificial Sequence: Synthetic oligonucleotide
  Sense strand starting at position 2026 of SEQ ID NO: 1884138
uuacuuggaucaguaugua

SEQ ID NO: 2243071 - RNA, 19 nt, Artificial Sequence
  Description of Artificial Sequence: Synthetic oligonucleotide
  Antisense strand to SEQ ID NO: 2243070
uacauacugauccaaguaa

SEQ ID NO: 2243072 - RNA, 19 nt, Artificial Sequence
  Description of Artificial Sequence: Synthetic oligonucleotide
  Sense strand starting at position 2059 of SEQ ID NO: 1884138
gcuuccugucuagaaauca

SEQ ID NO: 2243073 - RNA, 19 nt, Artificial Sequence
  Description of Artificial Sequence: Synthetic oligonucleotide
  Antisense strand to SEQ ID NO: 2243072
ugauuucuagacaggaagc

SEQ ID NO: 2243074 - RNA, 19 nt, Artificial Sequence
  Description of Artificial Sequence: Synthetic oligonucleotide
  Sense strand starting at position 2114 of SEQ ID NO: 1884138
cugaauuaagacuguuagu

SEQ ID NO: 2243075 - RNA, 19 nt, Artificial Sequence
  Description of Artificial Sequence: Synthetic oligonucleotide
  Antisense strand to SEQ ID NO: 2243074
acuaacagucuuaauucag

SEQ ID NO: 2243076 - RNA, 19 nt, Artificial Sequence
  Description of Artificial Sequence: Synthetic oligonucleotide
  Sense strand starting at position 2119 of SEQ ID NO: 1884138
uuaagacuguuaguuggau

SEQ ID NO: 2243077 - RNA, 19 nt, Artificial Sequence
  Description of Artificial Sequence: Synthetic oligonucleotide
  Antisense strand to SEQ ID NO: 2243076
auccaacuaacagucuuaa

SEQ ID NO: 2243078 - RNA, 19 nt, Artificial Sequence
  Description of Artificial Sequence: Synthetic oligonucleotide
  Sense strand starting at position 2127 of SEQ ID NO: 1884138
guuaguuggauguauaaag

SEQ ID NO: 2243079 - RNA, 19 nt, Artificial Sequence
  Description of Artificial Sequence: Synthetic oligonucleotide
  Antisense strand to SEQ ID NO: 2243078
cuuuauacauccaacuaac

SEQ ID NO: 2243080 - RNA, 19 nt, Artificial Sequence
  Description of Artificial Sequence: Synthetic oligonucleotide
  Sense strand starting at position 2176 of SEQ ID NO: 1884138
uuagaugcacguuacauau

SEQ ID NO: 2243081 - RNA, 19 nt, Artificial Sequence
  Description of Artificial Sequence: Synthetic oligonucleotide
  Antisense strand to SEQ ID NO: 2243080
auauguaacgugcaucuaa

SEQ ID NO: 2243082 - RNA, 19 nt, Artificial Sequence
  Description of Artificial Sequence: Synthetic oligonucleotide
  Sense strand starting at position 2338 of SEQ ID NO: 1884138
acuaaagcauccguauaua

SEQ ID NO: 2243083 - RNA, 19 nt, Artificial Sequence
  Description of Artificial Sequence: Synthetic oligonucleotide
  Antisense strand to SEQ ID NO: 2243082
uauauacggaugcuuuagu

SEQ ID NO: 2243084 - RNA, 19 nt, Artificial Sequence
  Description of Artificial Sequence: Synthetic oligonucleotide
  Sense strand starting at position 2517 of SEQ ID NO: 1884138
caagucagggccuaauagu

SEQ ID NO: 2243085 - RNA, 19 nt, Artificial Sequence
  Description of Artificial Sequence: Synthetic oligonucleotide
  Antisense strand to SEQ ID NO: 2243084
acuauuaggcccugacuug

SEQ ID NO: 2243086 - RNA, 19 nt, Artificial Sequence
  Description of Artificial Sequence: Synthetic oligonucleotide
  Sense strand starting at position 2527 of SEQ ID NO: 1884138
ccuaauagucaguggaucu

SEQ ID NO: 2243087 - RNA, 19 nt, Artificial Sequence
  Description of Artificial Sequence: Synthetic oligonucleotide
  Antisense strand to SEQ ID NO: 2243086
agauccacugacuauuagg

SEQ ID NO: 2243088 - RNA, 19 nt, Artificial Sequence
  Description of Artificial Sequence: Synthetic oligonucleotide
  Sense strand starting at position 2572 of SEQ ID NO: 1884138
ugggaaugcacuuggugau

SEQ ID NO: 2243089 - RNA, 19 nt, Artificial Sequence
  Description of Artificial Sequence: Synthetic oligonucleotide
  Antisense strand to SEQ ID NO: 2243088
aucaccaagugcauuccca

SEQ ID NO: 2243090 - RNA, 19 nt, Artificial Sequence
  Description of Artificial Sequence: Synthetic oligonucleotide
  Sense strand starting at position 2573 of SEQ ID NO: 1884138
gggaaugcacuuggugauu

SEQ ID NO: 2243091 - RNA, 19 nt, Artificial Sequence
  Description of Artificial Sequence: Synthetic oligonucleotide
  Antisense strand to SEQ ID NO: 2243090
aaucaccaagugcauuccc

SEQ ID NO: 2243092 - RNA, 19 nt, Artificial Sequence
  Description of Artificial Sequence: Synthetic oligonucleotide
  Sense strand starting at position 2578 of SEQ ID NO: 1884138
ugcacuuggugauuaagga

SEQ ID NO: 2243093 - RNA, 19 nt, Artificial Sequence
  Description of Artificial Sequence: Synthetic oligonucleotide
  Antisense strand to SEQ ID NO: 2243092
uccuuaaucaccaagugca

SEQ ID NO: 2243094 - RNA, 19 nt, Artificial Sequence
  Description of Artificial Sequence: Synthetic oligonucleotide
  Sense strand starting at position 2634 of SEQ ID NO: 1884138
gagguuacaacugggaagu

SEQ ID NO: 2243095 - RNA, 19 nt, Artificial Sequence
  Description of Artificial Sequence: Synthetic oligonucleotide
  Antisense strand to SEQ ID NO: 2243094
acuucccaguuguaaccuc

SEQ ID NO: 2243096 - RNA, 19 nt, Artificial Sequence
  Description of Artificial Sequence: Synthetic oligonucleotide
  Sense strand starting at position 2635 of SEQ ID NO: 1884138
agguuacaacugggaagua

SEQ ID NO: 2243097 - RNA, 19 nt, Artificial Sequence
  Description of Artificial Sequence: Synthetic oligonucleotide
  Antisense strand to SEQ ID NO: 2243096
uacuucccaguuguaaccu

SEQ ID NO: 2243098 - RNA, 19 nt, Artificial Sequence
  Description of Artificial Sequence: Synthetic oligonucleotide
  Sense strand starting at position 2655 of SEQ ID NO: 1884138
gcagacauauaccugaauu

SEQ ID NO: 2243099 - RNA, 19 nt, Artificial Sequence
  Description of Artificial Sequence: Synthetic oligonucleotide
  Antisense strand to SEQ ID NO: 2243098
aauucagguauaugucugc

SEQ ID NO: 2243100 - RNA, 19 nt, Artificial Sequence
  Description of Artificial Sequence: Synthetic oligonucleotide
  Sense strand starting at position 2813 of SEQ ID NO: 1884138
gucacacaaccugaaaguu

SEQ ID NO: 2243101 - RNA, 19 nt, Artificial Sequence
  Description of Artificial Sequence: Synthetic oligonucleotide
  Antisense strand to SEQ ID NO: 2243100
aacuuucagguugugugac

SEQ ID NO: 2243102 - RNA, 19 nt, Artificial Sequence
  Description of Artificial Sequence: Synthetic oligonucleotide
  Sense strand starting at position 2825 of SEQ ID NO: 1884138
gaaaguuaguaagcaguca

SEQ ID NO: 2243103 - RNA, 19 nt, Artificial Sequence
  Description of Artificial Sequence: Synthetic oligonucleotide
  Antisense strand to SEQ ID NO: 2243102
ugacugcuuacuaacuuuc

SEQ ID NO: 2243104 - RNA, 19 nt, Artificial Sequence
  Description of Artificial Sequence: Synthetic oligonucleotide
  Sense strand starting at position 2837 of SEQ ID NO: 1884138
gcagucacugguuaucaga

SEQ ID NO: 2243105 - RNA, 19 nt, Artificial Sequence
  Description of Artificial Sequence: Synthetic oligonucleotide
  Antisense strand to SEQ ID NO: 2243104
ucugauaaccagugacugc

SEQ ID NO: 2243106 - RNA, 19 nt, Artificial Sequence
  Description of Artificial Sequence: Synthetic oligonucleotide
  Sense strand starting at position 2839 of SEQ ID NO: 1884138
agucacugguuaucagaaa

SEQ ID NO: 2243107 - RNA, 19 nt, Artificial Sequence
  Description of Artificial Sequence: Synthetic oligonucleotide
  Antisense strand to SEQ ID NO: 2243106
uuucugauaaccagugacu

SEQ ID NO: 2243108 - RNA, 19 nt, Artificial Sequence
  Description of Artificial Sequence: Synthetic oligonucleotide
  Sense strand starting at position 2987 of SEQ ID NO: 1884138
auuagaugggcguaguauu

SEQ ID NO: 2243109 - RNA, 19 nt, Artificial Sequence
  Description of Artificial Sequence: Synthetic oligonucleotide
  Antisense strand to SEQ ID NO: 2243108
aauacuacgcccaucuaau

SEQ ID NO: 2243110 - RNA, 19 nt, Artificial Sequence
  Description of Artificial Sequence: Synthetic oligonucleotide
  Sense strand starting at position 3195 of SEQ ID NO: 1884138
ccuagaauuguauagcaca

SEQ ID NO: 2243111 - RNA, 19 nt, Artificial Sequence
  Description of Artificial Sequence: Synthetic oligonucleotide
  Antisense strand to SEQ ID NO: 2243110
ugugcuauacaauucuagg

SEQ ID NO: 2243112 - RNA, 19 nt, Artificial Sequence
  Description of Artificial Sequence: Synthetic oligonucleotide
  Sense strand starting at position 3318 of SEQ ID NO: 1884138
auccucaagucacuggaaa

SEQ ID NO: 2243113 - RNA, 19 nt, Artificial Sequence
  Description of Artificial Sequence: Synthetic oligonucleotide
  Antisense strand to SEQ ID NO: 2243112
uuuccagugacuugaggau

SEQ ID NO: 2243114 - RNA, 19 nt, Artificial Sequence
  Description of Artificial Sequence: Synthetic oligonucleotide
  Sense strand starting at position 3393 of SEQ ID NO: 1884138
cuacauucugguuauguua

SEQ ID NO: 2243115 - RNA, 19 nt, Artificial Sequence
  Description of Artificial Sequence: Synthetic oligonucleotide
  Antisense strand to SEQ ID NO: 2243114
uaacauaaccagaauguag

SEQ ID NO: 2243116 - RNA, 19 nt, Artificial Sequence
  Description of Artificial Sequence: Synthetic oligonucleotide
  Sense strand starting at position 3479 of SEQ ID NO: 1884138
auguaacaaucagugggaa

SEQ ID NO: 2243117 - RNA, 19 nt, Artificial Sequence
  Description of Artificial Sequence: Synthetic oligonucleotide
  Antisense strand to SEQ ID NO: 2243116
uucccacugauuguuacau

SEQ ID NO: 2243118 - RNA, 19 nt, Artificial Sequence
  Description of Artificial Sequence: Synthetic oligonucleotide
  Sense strand starting at position 3554 of SEQ ID NO: 1884138
ccgaucauucuuuacugua

SEQ ID NO: 2243119 - RNA, 19 nt, Artificial Sequence
  Description of Artificial Sequence: Synthetic oligonucleotide
  Antisense strand to SEQ ID NO: 2243118
uacaguaaagaaugaucgg

SEQ ID NO: 2243120 - RNA, 19 nt, Artificial Sequence
  Description of Artificial Sequence: Synthetic oligonucleotide
  Sense strand starting at position 3745 of SEQ ID NO: 1884138
acauaaugguaccuugaua

SEQ ID NO: 2243121 - RNA, 19 nt, Artificial Sequence
  Description of Artificial Sequence: Synthetic oligonucleotide
  Antisense strand to SEQ ID NO: 2243120
uaucaagguaccauuaugu

SEQ ID NO: 2243122 - RNA, 19 nt, Artificial Sequence
  Description of Artificial Sequence: Synthetic oligonucleotide
  Sense strand starting at position 3837 of SEQ ID NO: 1884138
aaauguuaacagugaaaug

SEQ ID NO: 2243123 - RNA, 19 nt, Artificial Sequence
  Description of Artificial Sequence: Synthetic oligonucleotide
  Antisense strand to SEQ ID NO: 2243122
cauuucacuguuaacauuu

SEQ ID NO: 2243124 - RNA, 19 nt, Artificial Sequence
  Description of Artificial Sequence: Synthetic oligonucleotide
  Sense strand starting at position 165 of SEQ ID NO: 1884139
uguaauaucccucgacagg

SEQ ID NO: 2243125 - RNA, 19 nt, Artificial Sequence
  Description of Artificial Sequence: Synthetic oligonucleotide
  Antisense strand to SEQ ID NO: 2243124
ccugucgagggauauuaca

SEQ ID NO: 2243126 - RNA, 19 nt, Artificial Sequence
  Description of Artificial Sequence: Synthetic oligonucleotide
  Sense strand starting at position 1418 of SEQ ID NO: 1884139
ccaucccuacucugugaua

SEQ ID NO: 2243127 - RNA, 19 nt, Artificial Sequence
  Description of Artificial Sequence: Synthetic oligonucleotide
  Antisense strand to SEQ ID NO: 2243126
uaucacagaguagggaugg

SEQ ID NO: 2243128 - RNA, 19 nt, Artificial Sequence
  Description of Artificial Sequence: Synthetic oligonucleotide
  Sense strand starting at position 1420 of SEQ ID NO: 1884139
aucccuacucugugauacu

SEQ ID NO: 2243129 - RNA, 19 nt, Artificial Sequence
  Description of Artificial Sequence: Synthetic oligonucleotide
  Antisense strand to SEQ ID NO: 2243128
aguaucacagaguagggau

SEQ ID NO: 2243130 - RNA, 19 nt, Artificial Sequence
  Description of Artificial Sequence: Synthetic oligonucleotide
  Sense strand starting at position 1450 of SEQ ID NO: 1884139
aguuuagugccugaaccau

SEQ ID NO: 2243131 - RNA, 19 nt, Artificial Sequence
  Description of Artificial Sequence: Synthetic oligonucleotide
  Antisense strand to SEQ ID NO: 2243130
augguucaggcacuaaacu

SEQ ID NO: 2243132 - RNA, 19 nt, Artificial Sequence
  Description of Artificial Sequence: Synthetic oligonucleotide
  Sense strand starting at position 1473 of SEQ ID NO: 1884139
augaaaucugccugagacg

SEQ ID NO: 2243133 - RNA, 19 nt, Artificial Sequence
  Description of Artificial Sequence: Synthetic oligonucleotide
  Antisense strand to SEQ ID NO: 2243132
cgucucaggcagauuucau

SEQ ID NO: 2243134 - RNA, 19 nt, Artificial Sequence
  Description of Artificial Sequence: Synthetic oligonucleotide
  Sense strand starting at position 1621 of SEQ ID NO: 1884139
gcuuacauucugcaggaau

SEQ ID NO: 2243135 - RNA, 19 nt, Artificial Sequence
  Description of Artificial Sequence: Synthetic oligonucleotide
  Antisense strand to SEQ ID NO: 2243134
auuccugcagaauguaagc

SEQ ID NO: 2243136 - RNA, 19 nt, Artificial Sequence
  Description of Artificial Sequence: Synthetic oligonucleotide
  Sense strand starting at position 1646 of SEQ ID NO: 1884139
ccugaaucuuugguauaau

SEQ ID NO: 2243137 - RNA, 19 nt, Artificial Sequence
  Description of Artificial Sequence: Synthetic oligonucleotide
  Antisense strand to SEQ ID NO: 2243136
auuauaccaaagauucagg

SEQ ID NO: 2243138 - RNA, 19 nt, Artificial Sequence
  Description of Artificial Sequence: Synthetic oligonucleotide
  Sense strand starting at position 1658 of SEQ ID NO: 1884139
guauaaucuugaccuggac

SEQ ID NO: 2243139 - RNA, 19 nt, Artificial Sequence
  Description of Artificial Sequence: Synthetic oligonucleotide
  Antisense strand to SEQ ID NO: 2243138
guccaggucaagauuauac

SEQ ID NO: 2243140 - RNA, 19 nt, Artificial Sequence
  Description of Artificial Sequence: Synthetic oligonucleotide
  Sense strand starting at position 1749 of SEQ ID NO: 1884139
cgaguagagacauagcaau

SEQ ID NO: 2243141 - RNA, 19 nt, Artificial Sequence
  Description of Artificial Sequence: Synthetic oligonucleotide
  Antisense strand to SEQ ID NO: 2243140
auugcuaugucucuacucg

SEQ ID NO: 2243142 - RNA, 19 nt, Artificial Sequence
  Description of Artificial Sequence: Synthetic oligonucleotide
  Sense strand starting at position 1787 of SEQ ID NO: 1884139
ugagucauggcccaacaga

SEQ ID NO: 2243143 - RNA, 19 nt, Artificial Sequence
  Description of Artificial Sequence: Synthetic oligonucleotide
  Antisense strand to SEQ ID NO: 2243142
ucuguugggccaugacuca

SEQ ID NO: 2243144 - RNA, 19 nt, Artificial Sequence
  Description of Artificial Sequence: Synthetic oligonucleotide
  Sense strand starting at position 1846 of SEQ ID NO: 1884139
gcaaacaugcucuguauuu

SEQ ID NO: 2243145 - RNA, 19 nt, Artificial Sequence
  Description of Artificial Sequence: Synthetic oligonucleotide
  Antisense strand to SEQ ID NO: 2243144
aaauacagagcauguuugc

SEQ ID NO: 2243146 - RNA, 19 nt, Artificial Sequence
  Description of Artificial Sequence: Synthetic oligonucleotide
  Sense strand starting at position 2211 of SEQ ID NO: 1884139
aguuuaggcgugccucuaa

SEQ ID NO: 2243147 - RNA, 19 nt, Artificial Sequence
  Description of Artificial Sequence: Synthetic oligonucleotide
  Antisense strand to SEQ ID NO: 2243146
uuagaggcacgccuaaacu

SEQ ID NO: 2243148 - RNA, 19 nt, Artificial Sequence
  Description of Artificial Sequence: Synthetic oligonucleotide
  Sense strand starting at position 2279 of SEQ ID NO: 1884139
agacguucugugcaggaaa

SEQ ID NO: 2243149 - RNA, 19 nt, Artificial Sequence
  Description of Artificial Sequence: Synthetic oligonucleotide
  Antisense strand to SEQ ID NO: 2243148
uuuccugcacagaacgucu

SEQ ID NO: 2243150 - RNA, 19 nt, Artificial Sequence
  Description of Artificial Sequence: Synthetic oligonucleotide
  Sense strand starting at position 2345 of SEQ ID NO: 1884139
augucaaugccugaauauu

SEQ ID NO: 2243151 - RNA, 19 nt, Artificial Sequence
  Description of Artificial Sequence: Synthetic oligonucleotide
  Antisense strand to SEQ ID NO: 2243150
aauauucaggcauugacau

SEQ ID NO: 2243152 - RNA, 19 nt, Artificial Sequence
  Description of Artificial Sequence: Synthetic oligonucleotide
  Sense strand starting at position 2382 of SEQ ID NO: 1884139
uguagaacuuugcucaaau

SEQ ID NO: 2243153 - RNA, 19 nt, Artificial Sequence
  Description of Artificial Sequence: Synthetic oligonucleotide
  Antisense strand to SEQ ID NO: 2243152
auuugagcaaaguucuaca

SEQ ID NO: 2243154 - RNA, 19 nt, Artificial Sequence
  Description of Artificial Sequence: Synthetic oligonucleotide
  Sense strand starting at position 2383 of SEQ ID NO: 1884139
guagaacuuugcucaaauu

SEQ ID NO: 2243155 - RNA, 19 nt, Artificial Sequence
  Description of Artificial Sequence: Synthetic oligonucleotide
  Antisense strand to SEQ ID NO: 2243154
aauuugagcaaaguucuac

SEQ ID NO: 2243156 - RNA, 19 nt, Artificial Sequence
  Description of Artificial Sequence: Synthetic oligonucleotide
  Sense strand starting at position 2490 of SEQ ID NO: 1884139
gcauucagcgagcauuugu

SEQ ID NO: 2243157 - RNA, 19 nt, Artificial Sequence
  Description of Artificial Sequence: Synthetic oligonucleotide
  Antisense strand to SEQ ID NO: 2243156
acaaaugcucgcugaaugc

SEQ ID NO: 2243158 - RNA, 19 nt, Artificial Sequence
  Description of Artificial Sequence: Synthetic oligonucleotide
  Sense strand starting at position 2793 of SEQ ID NO: 1884139
auguuaugccaagauaaca

SEQ ID NO: 2243159 - RNA, 19 nt, Artificial Sequence
  Description of Artificial Sequence: Synthetic oligonucleotide
  Antisense strand to SEQ ID NO: 2243158
uguuaucuuggcauaacau

SEQ ID NO: 2243160 - RNA, 19 nt, Artificial Sequence
  Description of Artificial Sequence: Synthetic oligonucleotide
  Sense strand starting at position 2925 of SEQ ID NO: 1884139
uuauuaauugagugaccca

SEQ ID NO: 2243161 - RNA, 19 nt, Artificial Sequence
  Description of Artificial Sequence: Synthetic oligonucleotide
  Antisense strand to SEQ ID NO: 2243160
ugggucacucaauuaauaa

SEQ ID NO: 2243162 - RNA, 19 nt, Artificial Sequence
  Description of Artificial Sequence: Synthetic oligonucleotide
  Sense strand starting at position 2928 of SEQ ID NO: 1884139
uuaauugagugacccaagu

SEQ ID NO: 2243163 - RNA, 19 nt, Artificial Sequence
  Description of Artificial Sequence: Synthetic oligonucleotide
  Antisense strand to SEQ ID NO: 2243162
acuugggucacucaauuaa

SEQ ID NO: 2243164 - RNA, 19 nt, Artificial Sequence
  Description of Artificial Sequence: Synthetic oligonucleotide
  Sense strand starting at position 3045 of SEQ ID NO: 1884139
augauaggccgcuauaaau

SEQ ID NO: 2243165 - RNA, 19 nt, Artificial Sequence
  Description of Artificial Sequence: Synthetic oligonucleotide
  Antisense strand to SEQ ID NO: 2243164
auuuauagcggccuaucau

SEQ ID NO: 2243166 - RNA, 19 nt, Artificial Sequence
  Description of Artificial Sequence: Synthetic oligonucleotide
  Sense strand starting at position 3251 of SEQ ID NO: 1884139
auggauaucuuguucuuag

SEQ ID NO: 2243167 - RNA, 19 nt, Artificial Sequence
  Description of Artificial Sequence: Synthetic oligonucleotide
  Antisense strand to SEQ ID NO: 2243166
cuaagaacaagauauccau

SEQ ID NO: 2243168 - RNA, 19 nt, Artificial Sequence
  Description of Artificial Sequence: Synthetic oligonucleotide
  Sense strand starting at position 3252 of SEQ ID NO: 1884139
uggauaucuuguucuuaga

SEQ ID NO: 2243169 - RNA, 19 nt, Artificial Sequence
  Description of Artificial Sequence: Synthetic oligonucleotide
  Antisense strand to SEQ ID NO: 2243168
ucuaagaacaagauaucca

SEQ ID NO: 2243170 - RNA, 19 nt, Artificial Sequence
  Description of Artificial Sequence: Synthetic oligonucleotide
  Sense strand starting at position 3330 of SEQ ID NO: 1884139
ccagaccaugucugaauua

SEQ ID NO: 2243171 - RNA, 19 nt, Artificial Sequence
  Description of Artificial Sequence: Synthetic oligonucleotide
  Antisense strand to SEQ ID NO: 2243170
uaauucagacauggucugg

SEQ ID NO: 2243172 - RNA, 19 nt, Artificial Sequence
  Description of Artificial Sequence: Synthetic oligonucleotide
  Sense strand starting at position 3341 of SEQ ID NO: 1884139
cugaauuaucugggcacuc

SEQ ID NO: 2243173 - RNA, 19 nt, Artificial Sequence
  Description of Artificial Sequence: Synthetic oligonucleotide
  Antisense strand to SEQ ID NO: 2243172
gagugcccagauaauucag

SEQ ID NO: 2243174 - RNA, 19 nt, Artificial Sequence
  Description of Artificial Sequence: Synthetic oligonucleotide
  Sense strand starting at position 3342 of SEQ ID NO: 1884139
ugaauuaucugggcacucu

SEQ ID NO: 2243175 - RNA, 19 nt, Artificial Sequence
  Description of Artificial Sequence: Synthetic oligonucleotide
  Antisense strand to SEQ ID NO: 2243174
agagugcccagauaauuca

SEQ ID NO: 2243176 - RNA, 19 nt, Artificial Sequence
  Description of Artificial Sequence: Synthetic oligonucleotide
  Sense strand starting at position 3366 of SEQ ID NO: 1884139
uuggaugcccuuugacaua

SEQ ID NO: 2243177 - RNA, 19 nt, Artificial Sequence
  Description of Artificial Sequence: Synthetic oligonucleotide
  Antisense strand to SEQ ID NO: 2243176
uaugucaaagggcauccaa

SEQ ID NO: 2243178 - RNA, 19 nt, Artificial Sequence
  Description of Artificial Sequence: Synthetic oligonucleotide
  Sense strand starting at position 3388 of SEQ ID NO: 1884139
gcccacuugguccaaucau

SEQ ID NO: 2243179 - RNA, 19 nt, Artificial Sequence
  Description of Artificial Sequence: Synthetic oligonucleotide
  Antisense strand to SEQ ID NO: 2243178
augauuggaccaagugggc

SEQ ID NO: 2243180 - RNA, 19 nt, Artificial Sequence
  Description of Artificial Sequence: Synthetic oligonucleotide
  Sense strand starting at position 3396 of SEQ ID NO: 1884139
gguccaaucauguaguaca

SEQ ID NO: 2243181 - RNA, 19 nt, Artificial Sequence
  Description of Artificial Sequence: Synthetic oligonucleotide
  Antisense strand to SEQ ID NO: 2243180
uguacuacaugauuggacc

SEQ ID NO: 2243182 - RNA, 19 nt, Artificial Sequence
  Description of Artificial Sequence: Synthetic oligonucleotide
  Sense strand starting at position 3403 of SEQ ID NO: 1884139
ucauguaguacagagaagu

SEQ ID NO: 2243183 - RNA, 19 nt, Artificial Sequence
  Description of Artificial Sequence: Synthetic oligonucleotide
  Antisense strand to SEQ ID NO: 2243182
acuucucuguacuacauga

SEQ ID NO: 2243184 - RNA, 19 nt, Artificial Sequence
  Description of Artificial Sequence: Synthetic oligonucleotide
  Sense strand starting at position 3564 of SEQ ID NO: 1884139
gguccuugcagagauggga

SEQ ID NO: 2243185 - RNA, 19 nt, Artificial Sequence
  Description of Artificial Sequence: Synthetic oligonucleotide
  Antisense strand to SEQ ID NO: 2243184
ucccaucucugcaaggacc

SEQ ID NO: 2243186 - RNA, 19 nt, Artificial Sequence
  Description of Artificial Sequence: Synthetic oligonucleotide
  Sense strand starting at position 3610 of SEQ ID NO: 1884139
gaauuugauuugggccaga

SEQ ID NO: 2243187 - RNA, 19 nt, Artificial Sequence
  Description of Artificial Sequence: Synthetic oligonucleotide
  Antisense strand to SEQ ID NO: 2243186
ucuggcccaaaucaaauuc

SEQ ID NO: 2243188 - RNA, 19 nt, Artificial Sequence
  Description of Artificial Sequence: Synthetic oligonucleotide
  Sense strand starting at position 3646 of SEQ ID NO: 1884139
cuucuaagagaauguuaga

SEQ ID NO: 2243189 - RNA, 19 nt, Artificial Sequence
  Description of Artificial Sequence: Synthetic oligonucleotide
  Antisense strand to SEQ ID NO: 2243188
ucuaacauucucuuagaag

SEQ ID NO: 2243190 - RNA, 19 nt, Artificial Sequence
  Description of Artificial Sequence: Synthetic oligonucleotide
  Sense strand starting at position 3681 of SEQ ID NO: 1884139
gggauaaauuuguagaucu

SEQ ID NO: 2243191 - RNA, 19 nt, Artificial Sequence
  Description of Artificial Sequence: Synthetic oligonucleotide
  Antisense strand to SEQ ID NO: 2243190
agaucuacaaauuuauccc

SEQ ID NO: 2243192 - RNA, 19 nt, Artificial Sequence
  Description of Artificial Sequence: Synthetic oligonucleotide
  Sense strand starting at position 3692 of SEQ ID NO: 1884139
guagaucuggcaggagaga

SEQ ID NO: 2243193 - RNA, 19 nt, Artificial Sequence
  Description of Artificial Sequence: Synthetic oligonucleotide
  Antisense strand to SEQ ID NO: 2243192
ucucuccugccagaucuac

SEQ ID NO: 2243194 - RNA, 19 nt, Artificial Sequence
  Description of Artificial Sequence: Synthetic oligonucleotide
  Sense strand starting at position 3818 of SEQ ID NO: 1884139
auuugcaacugagagaaau

SEQ ID NO: 2243195 - RNA, 19 nt, Artificial Sequence
  Description of Artificial Sequence: Synthetic oligonucleotide
  Antisense strand to SEQ ID NO: 2243194
auuucucucaguugcaaau

SEQ ID NO: 2243196 - RNA, 19 nt, Artificial Sequence
  Description of Artificial Sequence: Synthetic oligonucleotide
  Sense strand starting at position 3897 of SEQ ID NO: 1884139
uauggucagcucuggagau

SEQ ID NO: 2243197 - RNA, 19 nt, Artificial Sequence
  Description of Artificial Sequence: Synthetic oligonucleotide
  Antisense strand to SEQ ID NO: 2243196
aucuccagagcugaccaua

SEQ ID NO: 2243198 - RNA, 19 nt, Artificial Sequence
  Description of Artificial Sequence: Synthetic oligonucleotide
  Sense strand starting at position 3901 of SEQ ID NO: 1884139
gucagcucuggagauccaa

SEQ ID NO: 2243199 - RNA, 19 nt, Artificial Sequence
  Description of Artificial Sequence: Synthetic oligonucleotide
  Antisense strand to SEQ ID NO: 2243198
uuggaucuccagagcugac

SEQ ID NO: 2243200 - RNA, 19 nt, Artificial Sequence
  Description of Artificial Sequence: Synthetic oligonucleotide
  Sense strand starting at position 3920 of SEQ ID NO: 1884139
cugagaaugaauugcuagu

SEQ ID NO: 2243201 - RNA, 19 nt, Artificial Sequence
  Description of Artificial Sequence: Synthetic oligonucleotide
  Antisense strand to SEQ ID NO: 2243200
acuagcaauucauucucag

SEQ ID NO: 2243202 - RNA, 19 nt, Artificial Sequence
  Description of Artificial Sequence: Synthetic oligonucleotide
  Sense strand starting at position 3933 of SEQ ID NO: 1884139
gcuagugguucugcaauuu

SEQ ID NO: 2243203 - RNA, 19 nt, Artificial Sequence
  Description of Artificial Sequence: Synthetic oligonucleotide
  Antisense strand to SEQ ID NO: 2243202
aaauugcagaaccacuagc

SEQ ID NO: 2243204 - RNA, 19 nt, Artificial Sequence
  Description of Artificial Sequence: Synthetic oligonucleotide
  Sense strand starting at position 30 of SEQ ID NO: 1884140
gcucauaaaucagcagaug

SEQ ID NO: 2243205 - RNA, 19 nt, Artificial Sequence
  Description of Artificial Sequence: Synthetic oligonucleotide
  Antisense strand to SEQ ID NO: 2243204
caucugcugauuuaugagc

SEQ ID NO: 2243206 - RNA, 19 nt, Artificial Sequence
  Description of Artificial Sequence: Synthetic oligonucleotide
  Sense strand starting at position 31 of SEQ ID NO: 1884140
cucauaaaucagcagaugu

SEQ ID NO: 2243207 - RNA, 19 nt, Artificial Sequence
  Description of Artificial Sequence: Synthetic oligonucleotide
  Antisense strand to SEQ ID NO: 2243206
acaucugcugauuuaugag

SEQ ID NO: 2243208 - RNA, 19 nt, Artificial Sequence
  Description of Artificial Sequence: Synthetic oligonucleotide
  Sense strand starting at position 115 of SEQ ID NO: 1884140
gagcuugccagggagaguu

SEQ ID NO: 2243209 - RNA, 19 nt, Artificial Sequence
  Description of Artificial Sequence: Synthetic oligonucleotide
  Antisense strand to SEQ ID NO: 2243208
aacucucccuggcaagcuc

SEQ ID NO: 2243210 - RNA, 19 nt, Artificial Sequence
  Description of Artificial Sequence: Synthetic oligonucleotide
  Sense strand starting at position 222 of SEQ ID NO: 1884140
guuugacgaccuuauuaua

SEQ ID NO: 2243211 - RNA, 19 nt, Artificial Sequence
  Description of Artificial Sequence: Synthetic oligonucleotide
  Antisense strand to SEQ ID NO: 2243210
uauaauaaggucgucaaac

SEQ ID NO: 2243212 - RNA, 19 nt, Artificial Sequence
  Description of Artificial Sequence: Synthetic oligonucleotide
  Sense strand starting at position 268 of SEQ ID NO: 1884140
gcacaagauauugguaaga

SEQ ID NO: 2243213 - RNA, 19 nt, Artificial Sequence
  Description of Artificial Sequence: Synthetic oligonucleotide
  Antisense strand to SEQ ID NO: 2243212
ucuuaccaauaucuugugc

SEQ ID NO: 2243214 - RNA, 19 nt, Artificial Sequence
  Description of Artificial Sequence: Synthetic oligonucleotide
  Sense strand starting at position 314 of SEQ ID NO: 1884140
ccaugaucuugaccuugga

SEQ ID NO: 2243215 - RNA, 19 nt, Artificial Sequence
  Description of Artificial Sequence: Synthetic oligonucleotide
  Antisense strand to SEQ ID NO: 2243214
uccaaggucaagaucaugg

SEQ ID NO: 2243216 - RNA, 19 nt, Artificial Sequence
  Description of Artificial Sequence: Synthetic oligonucleotide
  Sense strand starting at position 317 of SEQ ID NO: 1884140
ugaucuugaccuuggaauu

SEQ ID NO: 2243217 - RNA, 19 nt, Artificial Sequence
  Description of Artificial Sequence: Synthetic oligonucleotide
  Antisense strand to SEQ ID NO: 2243216
aauuccaaggucaagauca

SEQ ID NO: 2243218 - RNA, 19 nt, Artificial Sequence
  Description of Artificial Sequence: Synthetic oligonucleotide
  Sense strand starting at position 490 of SEQ ID NO: 1884140
ucaacaucuucucugggaa

SEQ ID NO: 2243219 - RNA, 19 nt, Artificial Sequence
  Description of Artificial Sequence: Synthetic oligonucleotide
  Antisense strand to SEQ ID NO: 2243218
uucccagagaagauguuga

SEQ ID NO: 2243220 - RNA, 19 nt, Artificial Sequence
  Description of Artificial Sequence: Synthetic oligonucleotide
  Sense strand starting at position 566 of SEQ ID NO: 1884140
aagaauuaguguuuggguu

SEQ ID NO: 2243221 - RNA, 19 nt, Artificial Sequence
  Description of Artificial Sequence: Synthetic oligonucleotide
  Antisense strand to SEQ ID NO: 2243220
aacccaaacacuaauucuu

SEQ ID NO: 2243222 - RNA, 19 nt, Artificial Sequence
  Description of Artificial Sequence: Synthetic oligonucleotide
  Sense strand starting at position 581 of SEQ ID NO: 1884140
gguucuucgagugacauug

SEQ ID NO: 2243223 - RNA, 19 nt, Artificial Sequence
  Description of Artificial Sequence: Synthetic oligonucleotide
  Antisense strand to SEQ ID NO: 2243222
caaugucacucgaagaacc

SEQ ID NO: 2243224 - RNA, 19 nt, Artificial Sequence
  Description of Artificial Sequence: Synthetic oligonucleotide
  Sense strand starting at position 616 of SEQ ID NO: 1884140
uauuaaagauuggccugua

SEQ ID NO: 2243225 - RNA, 19 nt, Artificial Sequence
  Description of Artificial Sequence: Synthetic oligonucleotide
  Antisense strand to SEQ ID NO: 2243224
uacaggccaaucuuuaaua

SEQ ID NO: 2243226 - RNA, 19 nt, Artificial Sequence
  Description of Artificial Sequence: Synthetic oligonucleotide
  Sense strand starting at position 619 of SEQ ID NO: 1884140
uaaagauuggccuguagaa

SEQ ID NO: 2243227 - RNA, 19 nt, Artificial Sequence
  Description of Artificial Sequence: Synthetic oligonucleotide
  Antisense strand to SEQ ID NO: 2243226
uucuacaggccaaucuuua

SEQ ID NO: 2243228 - RNA, 19 nt, Artificial Sequence
  Description of Artificial Sequence: Synthetic oligonucleotide
  Sense strand starting at position 1009 of SEQ ID NO: 1884140
cuuccagauuccuugaaug

SEQ ID NO: 2243229 - RNA, 19 nt, Artificial Sequence
  Description of Artificial Sequence: Synthetic oligonucleotide
  Antisense strand to SEQ ID NO: 2243228
cauucaaggaaucuggaag

SEQ ID NO: 2243230 - RNA, 19 nt, Artificial Sequence
  Description of Artificial Sequence: Synthetic oligonucleotide
  Sense strand starting at position 1232 of SEQ ID NO: 1884140
ccaaauaaaugcuuguuga

SEQ ID NO: 2243231 - RNA, 19 nt, Artificial Sequence
  Description of Artificial Sequence: Synthetic oligonucleotide
  Antisense strand to SEQ ID NO: 2243230
ucaacaagcauuuauuugg

SEQ ID NO: 2243232 - RNA, 19 nt, Artificial Sequence
  Description of Artificial Sequence: Synthetic oligonucleotide
  Sense strand starting at position 1273 of SEQ ID NO: 1884140
gggcuaaucuacuuaaauc

SEQ ID NO: 2243233 - RNA, 19 nt, Artificial Sequence
  Description of Artificial Sequence: Synthetic oligonucleotide
  Antisense strand to SEQ ID NO: 2243232
gauuuaaguagauuagccc

SEQ ID NO: 2243234 - RNA, 19 nt, Artificial Sequence
  Description of Artificial Sequence: Synthetic oligonucleotide
  Sense strand starting at position 1289 of SEQ ID NO: 1884140
aucugauucugucucugaa

SEQ ID NO: 2243235 - RNA, 19 nt, Artificial Sequence
  Description of Artificial Sequence: Synthetic oligonucleotide
  Antisense strand to SEQ ID NO: 2243234
uucagagacagaaucagau

SEQ ID NO: 2243236 - RNA, 19 nt, Artificial Sequence
  Description of Artificial Sequence: Synthetic oligonucleotide
  Sense strand starting at position 1334 of SEQ ID NO: 1884140
ggacucuuccuugauuggu

SEQ ID NO: 2243237 - RNA, 19 nt, Artificial Sequence
  Description of Artificial Sequence: Synthetic oligonucleotide
  Antisense strand to SEQ ID NO: 2243236
accaaucaaggaagagucc

SEQ ID NO: 2243238 - RNA, 19 nt, Artificial Sequence
  Description of Artificial Sequence: Synthetic oligonucleotide
  Sense strand starting at position 1340 of SEQ ID NO: 1884140
uuccuugauugguccaaga

SEQ ID NO: 2243239 - RNA, 19 nt, Artificial Sequence
  Description of Artificial Sequence: Synthetic oligonucleotide
  Antisense strand to SEQ ID NO: 2243238
ucuuggaccaaucaaggaa

SEQ ID NO: 2243240 - RNA, 19 nt, Artificial Sequence
  Description of Artificial Sequence: Synthetic oligonucleotide
  Sense strand starting at position 1342 of SEQ ID NO: 1884140
ccuugauugguccaagacu

SEQ ID NO: 2243241 - RNA, 19 nt, Artificial Sequence
  Description of Artificial Sequence: Synthetic oligonucleotide
  Antisense strand to SEQ ID NO: 2243240
agucuuggaccaaucaagg

SEQ ID NO: 2243242 - RNA, 19 nt, Artificial Sequence
  Description of Artificial Sequence: Synthetic oligonucleotide
  Sense strand starting at position 1397 of SEQ ID NO: 1884140
ugaauaguccuccggaauu

SEQ ID NO: 2243243 - RNA, 19 nt, Artificial Sequence
  Description of Artificial Sequence: Synthetic oligonucleotide
  Antisense strand to SEQ ID NO: 2243242
aauuccggaggacuauuca

SEQ ID NO: 2243244 - RNA, 19 nt, Artificial Sequence
  Description of Artificial Sequence: Synthetic oligonucleotide
  Sense strand starting at position 1645 of SEQ ID NO: 1884140
agcuacuugcuguagauaa

SEQ ID NO: 2243245 - RNA, 19 nt, Artificial Sequence
  Description of Artificial Sequence: Synthetic oligonucleotide
  Antisense strand to SEQ ID NO: 2243244
uuaucuacagcaaguagcu

SEQ ID NO: 2243246 - RNA, 19 nt, Artificial Sequence
  Description of Artificial Sequence: Synthetic oligonucleotide
  Sense strand starting at position 1663 of SEQ ID NO: 1884140
aggcauaggcucuacaacu

SEQ ID NO: 2243247 - RNA, 19 nt, Artificial Sequence
  Description of Artificial Sequence: Synthetic oligonucleotide
  Antisense strand to SEQ ID NO: 2243246
aguuguagagccuaugccu

SEQ ID NO: 2243248 - RNA, 19 nt, Artificial Sequence
  Description of Artificial Sequence: Synthetic oligonucleotide
  Sense strand starting at position 1759 of SEQ ID NO: 1884140
gcacauauuucucuguguu

SEQ ID NO: 2243249 - RNA, 19 nt, Artificial Sequence
  Description of Artificial Sequence: Synthetic oligonucleotide
  Antisense strand to SEQ ID NO: 2243248
aacacagagaaauaugugc

SEQ ID NO: 2243250 - RNA, 19 nt, Artificial Sequence
  Description of Artificial Sequence: Synthetic oligonucleotide
  Sense strand starting at position 1787 of SEQ ID NO: 1884140
gacugagagcuguauaauu

SEQ ID NO: 2243251 - RNA, 19 nt, Artificial Sequence
  Description of Artificial Sequence: Synthetic oligonucleotide
  Antisense strand to SEQ ID NO: 2243250
aauuauacagcucucaguc

SEQ ID NO: 2243252 - RNA, 19 nt, Artificial Sequence
  Description of Artificial Sequence: Synthetic oligonucleotide
  Sense strand starting at position 1789 of SEQ ID NO: 1884140
cugagagcuguauaauucu

SEQ ID NO: 2243253 - RNA, 19 nt, Artificial Sequence
  Description of Artificial Sequence: Synthetic oligonucleotide
  Antisense strand to SEQ ID NO: 2243252
agaauuauacagcucucag

SEQ ID NO: 2243254 - RNA, 19 nt, Artificial Sequence
  Description of Artificial Sequence: Synthetic oligonucleotide
  Sense strand starting at position 1792 of SEQ ID NO: 1884140
agagcuguauaauucuaga

SEQ ID NO: 2243255 - RNA, 19 nt, Artificial Sequence
  Description of Artificial Sequence: Synthetic oligonucleotide
  Antisense strand to SEQ ID NO: 2243254
ucuagaauuauacagcucu

SEQ ID NO: 2243256 - RNA, 19 nt, Artificial Sequence
  Description of Artificial Sequence: Synthetic oligonucleotide
  Sense strand starting at position 2106 of SEQ ID NO: 1884140
ucucucaagguuuaucuga

SEQ ID NO: 2243257 - RNA, 19 nt, Artificial Sequence
  Description of Artificial Sequence: Synthetic oligonucleotide
  Antisense strand to SEQ ID NO: 2243256
ucagauaaaccuugagaga

SEQ ID NO: 2243258 - RNA, 19 nt, Artificial Sequence
  Description of Artificial Sequence: Synthetic oligonucleotide
  Sense strand starting at position 2108 of SEQ ID NO: 1884140
ucucaagguuuaucugaaa

SEQ ID NO: 2243259 - RNA, 19 nt, Artificial Sequence
  Description of Artificial Sequence: Synthetic oligonucleotide
  Antisense strand to SEQ ID NO: 2243258
uuucagauaaaccuugaga

SEQ ID NO: 2243260 - RNA, 19 nt, Artificial Sequence
  Description of Artificial Sequence: Synthetic oligonucleotide
  Sense strand starting at position 2146 of SEQ ID NO: 1884140
guuggaagcuuaucagaca

SEQ ID NO: 2243261 - RNA, 19 nt, Artificial Sequence
  Description of Artificial Sequence: Synthetic oligonucleotide
  Antisense strand to SEQ ID NO: 2243260
ugucugauaagcuuccaac

SEQ ID NO: 2243262 - RNA, 19 nt, Artificial Sequence
  Description of Artificial Sequence: Synthetic oligonucleotide
  Sense strand starting at position 2465 of SEQ ID NO: 1884140
ggcaacuagguuuaucuua

SEQ ID NO: 2243263 - RNA, 19 nt, Artificial Sequence
  Description of Artificial Sequence: Synthetic oligonucleotide
  Antisense strand to SEQ ID NO: 2243262
uaagauaaaccuaguugcc

SEQ ID NO: 2243264 - RNA, 19 nt, Artificial Sequence
  Description of Artificial Sequence: Synthetic oligonucleotide
  Sense strand starting at position 2550 of SEQ ID NO: 1884140
acaaaugguuucuuuagca

SEQ ID NO: 2243265 - RNA, 19 nt, Artificial Sequence
  Description of Artificial Sequence: Synthetic oligonucleotide
  Antisense strand to SEQ ID NO: 2243264
ugcuaaagaaaccauuugu

SEQ ID NO: 2243266 - RNA, 19 nt, Artificial Sequence
  Description of Artificial Sequence: Synthetic oligonucleotide
  Sense strand starting at position 2649 of SEQ ID NO: 1884140
accagauaaucagcaagua

SEQ ID NO: 2243267 - RNA, 19 nt, Artificial Sequence
  Description of Artificial Sequence: Synthetic oligonucleotide
  Antisense strand to SEQ ID NO: 2243266
uacuugcugauuaucuggu

SEQ ID NO: 2243268 - RNA, 19 nt, Artificial Sequence
  Description of Artificial Sequence: Synthetic oligonucleotide
  Sense strand starting at position 2912 of SEQ ID NO: 1884140
ucuauucuugauggacauu

SEQ ID NO: 2243269 - RNA, 19 nt, Artificial Sequence
  Description of Artificial Sequence: Synthetic oligonucleotide
  Antisense strand to SEQ ID NO: 2243268
aauguccaucaagaauaga

SEQ ID NO: 2243270 - RNA, 19 nt, Artificial Sequence
  Description of Artificial Sequence: Synthetic oligonucleotide
  Sense strand starting at position 2922 of SEQ ID NO: 1884140
auggacauuugagauaguu

SEQ ID NO: 2243271 - RNA, 19 nt, Artificial Sequence
  Description of Artificial Sequence: Synthetic oligonucleotide
  Antisense strand to SEQ ID NO: 2243270
aacuaucucaaauguccau

SEQ ID NO: 2243272 - RNA, 19 nt, Artificial Sequence
  Description of Artificial Sequence: Synthetic oligonucleotide
  Sense strand starting at position 3072 of SEQ ID NO: 1884140
ucagcuuuccuagauacag

SEQ ID NO: 2243273 - RNA, 19 nt, Artificial Sequence
  Description of Artificial Sequence: Synthetic oligonucleotide
  Antisense strand to SEQ ID NO: 2243272
cuguaucuaggaaagcuga

SEQ ID NO: 2243274 - RNA, 19 nt, Artificial Sequence
  Description of Artificial Sequence: Synthetic oligonucleotide
  Sense strand starting at position 3090 of SEQ ID NO: 1884140
gucaaauaguauuccaaag

SEQ ID NO: 2243275 - RNA, 19 nt, Artificial Sequence
  Description of Artificial Sequence: Synthetic oligonucleotide
  Antisense strand to SEQ ID NO: 2243274
cuuuggaauacuauuugac

SEQ ID NO: 2243276 - RNA, 19 nt, Artificial Sequence
  Description of Artificial Sequence: Synthetic oligonucleotide
  Sense strand starting at position 3133 of SEQ ID NO: 1884140
ccaagaauuuaggagaguu

SEQ ID NO: 2243277 - RNA, 19 nt, Artificial Sequence
  Description of Artificial Sequence: Synthetic oligonucleotide
  Antisense strand to SEQ ID NO: 2243276
aacucuccuaaauucuugg

SEQ ID NO: 2243278 - RNA, 19 nt, Artificial Sequence
  Description of Artificial Sequence: Synthetic oligonucleotide
  Sense strand starting at position 3261 of SEQ ID NO: 1884140
guugguuggucauuugaau

SEQ ID NO: 2243279 - RNA, 19 nt, Artificial Sequence
  Description of Artificial Sequence: Synthetic oligonucleotide
  Antisense strand to SEQ ID NO: 2243278
auucaaaugaccaaccaac

SEQ ID NO: 2243280 - RNA, 19 nt, Artificial Sequence
  Description of Artificial Sequence: Synthetic oligonucleotide
  Sense strand starting at position 3398 of SEQ ID NO: 1884140
uggugauaucuguauugca

SEQ ID NO: 2243281 - RNA, 19 nt, Artificial Sequence
  Description of Artificial Sequence: Synthetic oligonucleotide
  Antisense strand to SEQ ID NO: 2243280
ugcaauacagauaucacca

SEQ ID NO: 2243282 - RNA, 19 nt, Artificial Sequence
  Description of Artificial Sequence: Synthetic oligonucleotide
  Sense strand starting at position 3919 of SEQ ID NO: 1884140
cuguaauauugucuuagau

SEQ ID NO: 2243283 - RNA, 19 nt, Artificial Sequence
  Description of Artificial Sequence: Synthetic oligonucleotide
  Antisense strand to SEQ ID NO: 2243282
aucuaagacaauauuacag

SEQ ID NO: 2243284 - RNA, 19 nt, Artificial Sequence
  Description of Artificial Sequence: Synthetic oligonucleotide
  Sense strand starting at position 81 of SEQ ID NO: 1884141
guacuugugcaagaauaga

SEQ ID NO: 2243285 - RNA, 19 nt, Artificial Sequence
  Description of Artificial Sequence: Synthetic oligonucleotide
  Antisense strand to SEQ ID NO: 2243284
ucuauucuugcacaaguac

SEQ ID NO: 2243286 - RNA, 19 nt, Artificial Sequence
  Description of Artificial Sequence: Synthetic oligonucleotide
  Sense strand starting at position 323 of SEQ ID NO: 1884141
uagguaaagcaaugaaguu

SEQ ID NO: 2243287 - RNA, 19 nt, Artificial Sequence
  Description of Artificial Sequence: Synthetic oligonucleotide
  Antisense strand to SEQ ID NO: 2243286
aacuucauugcuuuaccua

SEQ ID NO: 2243288 - RNA, 19 nt, Artificial Sequence
  Description of Artificial Sequence: Synthetic oligonucleotide
  Sense strand starting at position 356 of SEQ ID NO: 1884141
uaguaagaaugucuuuaug

SEQ ID NO: 2243289 - RNA, 19 nt, Artificial Sequence
  Description of Artificial Sequence: Synthetic oligonucleotide
  Antisense strand to SEQ ID NO: 2243288
cauaaagacauucuuacua

SEQ ID NO: 2243290 - RNA, 19 nt, Artificial Sequence
  Description of Artificial Sequence: Synthetic oligonucleotide
  Sense strand starting at position 358 of SEQ ID NO: 1884141
guaagaaugucuuuaugac

SEQ ID NO: 2243291 - RNA, 19 nt, Artificial Sequence
  Description of Artificial Sequence: Synthetic oligonucleotide
  Antisense strand to SEQ ID NO: 2243290
gucauaaagacauucuuac

SEQ ID NO: 2243292 - RNA, 19 nt, Artificial Sequence
  Description of Artificial Sequence: Synthetic oligonucleotide
  Sense strand starting at position 368 of SEQ ID NO: 1884141
cuuuaugaccuugaugcaa

SEQ ID NO: 2243293 - RNA, 19 nt, Artificial Sequence
  Description of Artificial Sequence: Synthetic oligonucleotide
  Antisense strand to SEQ ID NO: 2243292
uugcaucaaggucauaaag

SEQ ID NO: 2243294 - RNA, 19 nt, Artificial Sequence
  Description of Artificial Sequence: Synthetic oligonucleotide
  Sense strand starting at position 426 of SEQ ID NO: 1884141
augcuacuguaauuaagaa

SEQ ID NO: 2243295 - RNA, 19 nt, Artificial Sequence
  Description of Artificial Sequence: Synthetic oligonucleotide
  Antisense strand to SEQ ID NO: 2243294
uucuuaauuacaguagcau

SEQ ID NO: 2243296 - RNA, 19 nt, Artificial Sequence
  Description of Artificial Sequence: Synthetic oligonucleotide
  Sense strand starting at position 433 of SEQ ID NO: 1884141
uguaauuaagaaugagagu

SEQ ID NO: 2243297 - RNA, 19 nt, Artificial Sequence
  Description of Artificial Sequence: Synthetic oligonucleotide
  Antisense strand to SEQ ID NO: 2243296
acucucauucuuaauuaca

SEQ ID NO: 2243298 - RNA, 19 nt, Artificial Sequence
  Description of Artificial Sequence: Synthetic oligonucleotide
  Sense strand starting at position 780 of SEQ ID NO: 1884141
uccuaaauucuugguggga

SEQ ID NO: 2243299 - RNA, 19 nt, Artificial Sequence
  Description of Artificial Sequence: Synthetic oligonucleotide
  Antisense strand to SEQ ID NO: 2243298
ucccaccaagaauuuagga

SEQ ID NO: 2243300 - RNA, 19 nt, Artificial Sequence
  Description of Artificial Sequence: Synthetic oligonucleotide
  Sense strand starting at position 781 of SEQ ID NO: 1884141
ccuaaauucuuggugggag

SEQ ID NO: 2243301 - RNA, 19 nt, Artificial Sequence
  Description of Artificial Sequence: Synthetic oligonucleotide
  Antisense strand to SEQ ID NO: 2243300
cucccaccaagaauuuagg

SEQ ID NO: 2243302 - RNA, 19 nt, Artificial Sequence
  Description of Artificial Sequence: Synthetic oligonucleotide
  Sense strand starting at position 783 of SEQ ID NO: 1884141
uaaauucuuggugggagua

SEQ ID NO: 2243303 - RNA, 19 nt, Artificial Sequence
  Description of Artificial Sequence: Synthetic oligonucleotide
  Antisense strand to SEQ ID NO: 2243302
uacucccaccaagaauuua

SEQ ID NO: 2243304 - RNA, 19 nt, Artificial Sequence
  Description of Artificial Sequence: Synthetic oligonucleotide
  Sense strand starting at position 784 of SEQ ID NO: 1884141
aaauucuuggugggaguau

SEQ ID NO: 2243305 - RNA, 19 nt, Artificial Sequence
  Description of Artificial Sequence: Synthetic oligonucleotide
  Antisense strand to SEQ ID NO: 2243304
auacucccaccaagaauuu

SEQ ID NO: 2243306 - RNA, 19 nt, Artificial Sequence
  Description of Artificial Sequence: Synthetic oligonucleotide
  Sense strand starting at position 793 of SEQ ID NO: 1884141
gugggaguauggguugaua

SEQ ID NO: 2243307 - RNA, 19 nt, Artificial Sequence
  Description of Artificial Sequence: Synthetic oligonucleotide
  Antisense strand to SEQ ID NO: 2243306
uaucaacccauacucccac

SEQ ID NO: 2243308 - RNA, 19 nt, Artificial Sequence
  Description of Artificial Sequence: Synthetic oligonucleotide
  Sense strand starting at position 795 of SEQ ID NO: 1884141
gggaguauggguugauaua

SEQ ID NO: 2243309 - RNA, 19 nt, Artificial Sequence
  Description of Artificial Sequence: Synthetic oligonucleotide
  Antisense strand to SEQ ID NO: 2243308
uauaucaacccauacuccc

SEQ ID NO: 2243310 - RNA, 19 nt, Artificial Sequence
  Description of Artificial Sequence: Synthetic oligonucleotide
  Sense strand starting at position 822 of SEQ ID NO: 1884141
ggaauacuauuugacugua

SEQ ID NO: 2243311 - RNA, 19 nt, Artificial Sequence
  Description of Artificial Sequence: Synthetic oligonucleotide
  Antisense strand to SEQ ID NO: 2243310
uacagucaaauaguauucc

SEQ ID NO: 2243312 - RNA, 19 nt, Artificial Sequence
  Description of Artificial Sequence: Synthetic oligonucleotide
  Sense strand starting at position 875 of SEQ ID NO: 1884141
uuggcaauuuccuuugcga

SEQ ID NO: 2243313 - RNA, 19 nt, Artificial Sequence
  Description of Artificial Sequence: Synthetic oligonucleotide
  Antisense strand to SEQ ID NO: 2243312
ucgcaaaggaaauugccaa

SEQ ID NO: 2243314 - RNA, 19 nt, Artificial Sequence
  Description of Artificial Sequence: Synthetic oligonucleotide
  Sense strand starting at position 893 of SEQ ID NO: 1884141
agcguauguccagaagaaa

SEQ ID NO: 2243315 - RNA, 19 nt, Artificial Sequence
  Description of Artificial Sequence: Synthetic oligonucleotide
  Antisense strand to SEQ ID NO: 2243314
uuucuucuggacauacgcu

SEQ ID NO: 2243316 - RNA, 19 nt, Artificial Sequence
  Description of Artificial Sequence: Synthetic oligonucleotide
  Sense strand starting at position 1114 of SEQ ID NO: 1884141
cgguauaaacuguauuauu

SEQ ID NO: 2243317 - RNA, 19 nt, Artificial Sequence
  Description of Artificial Sequence: Synthetic oligonucleotide
  Antisense strand to SEQ ID NO: 2243316
aauaauacaguuuauaccg

SEQ ID NO: 2243318 - RNA, 19 nt, Artificial Sequence
  Description of Artificial Sequence: Synthetic oligonucleotide
  Sense strand starting at position 1174 of SEQ ID NO: 1884141
guuauauaugagcauagug

SEQ ID NO: 2243319 - RNA, 19 nt, Artificial Sequence
  Description of Artificial Sequence: Synthetic oligonucleotide
  Antisense strand to SEQ ID NO: 2243318
cacuaugcucauauauaac

SEQ ID NO: 2243320 - RNA, 19 nt, Artificial Sequence
  Description of Artificial Sequence: Synthetic oligonucleotide
  Sense strand starting at position 1204 of SEQ ID NO: 1884141
aagaguaguaccugguaag

SEQ ID NO: 2243321 - RNA, 19 nt, Artificial Sequence
  Description of Artificial Sequence: Synthetic oligonucleotide
  Antisense strand to SEQ ID NO: 2243320
cuuaccagguacuacucuu

SEQ ID NO: 2243322 - RNA, 19 nt, Artificial Sequence
  Description of Artificial Sequence: Synthetic oligonucleotide
  Sense strand starting at position 1445 of SEQ ID NO: 1884141
agauaaaccuaguugccaa

SEQ ID NO: 2243323 - RNA, 19 nt, Artificial Sequence
  Description of Artificial Sequence: Synthetic oligonucleotide
  Antisense strand to SEQ ID NO: 2243322
uuggcaacuagguuuaucu

SEQ ID NO: 2243324 - RNA, 19 nt, Artificial Sequence
  Description of Artificial Sequence: Synthetic oligonucleotide
  Sense strand starting at position 1494 of SEQ ID NO: 1884141
uguugaagucuugagaccu

SEQ ID NO: 2243325 - RNA, 19 nt, Artificial Sequence
  Description of Artificial Sequence: Synthetic oligonucleotide
  Antisense strand to SEQ ID NO: 2243324
aggucucaagacuucaaca

SEQ ID NO: 2243326 - RNA, 19 nt, Artificial Sequence
  Description of Artificial Sequence: Synthetic oligonucleotide
  Sense strand starting at position 1552 of SEQ ID NO: 1884141
uuuccugaucucugaauug

SEQ ID NO: 2243327 - RNA, 19 nt, Artificial Sequence
  Description of Artificial Sequence: Synthetic oligonucleotide
  Antisense strand to SEQ ID NO: 2243326
caauucagagaucaggaaa

SEQ ID NO: 2243328 - RNA, 19 nt, Artificial Sequence
  Description of Artificial Sequence: Synthetic oligonucleotide
  Sense strand starting at position 1711 of SEQ ID NO: 1884141
ucugaaucgacucaugguu

SEQ ID NO: 2243329 - RNA, 19 nt, Artificial Sequence
  Description of Artificial Sequence: Synthetic oligonucleotide
  Antisense strand to SEQ ID NO: 2243328
aaccaugagucgauucaga

SEQ ID NO: 2243330 - RNA, 19 nt, Artificial Sequence
  Description of Artificial Sequence: Synthetic oligonucleotide
  Sense strand starting at position 1775 of SEQ ID NO: 1884141
uccaacauggguugaugaa

SEQ ID NO: 2243331 - RNA, 19 nt, Artificial Sequence
  Description of Artificial Sequence: Synthetic oligonucleotide
  Antisense strand to SEQ ID NO: 2243330
uucaucaacccauguugga

SEQ ID NO: 2243332 - RNA, 19 nt, Artificial Sequence
  Description of Artificial Sequence: Synthetic oligonucleotide
  Sense strand starting at position 2154 of SEQ ID NO: 1884141
agagaaauaugugcuuacu

SEQ ID NO: 2243333 - RNA, 19 nt, Artificial Sequence
  Description of Artificial Sequence: Synthetic oligonucleotide
  Antisense strand to SEQ ID NO: 2243332
aguaagcacauauuucucu

SEQ ID NO: 2243334 - RNA, 19 nt, Artificial Sequence
  Description of Artificial Sequence: Synthetic oligonucleotide
  Sense strand starting at position 2156 of SEQ ID NO: 1884141
agaaauaugugcuuacuau

SEQ ID NO: 2243335 - RNA, 19 nt, Artificial Sequence
  Description of Artificial Sequence: Synthetic oligonucleotide
  Antisense strand to SEQ ID NO: 2243334
auaguaagcacauauuucu

SEQ ID NO: 2243336 - RNA, 19 nt, Artificial Sequence
  Description of Artificial Sequence: Synthetic oligonucleotide
  Sense strand starting at position 2298 of SEQ ID NO: 1884141
ugugauauuguggagaugu

SEQ ID NO: 2243337 - RNA, 19 nt, Artificial Sequence
  Description of Artificial Sequence: Synthetic oligonucleotide
  Antisense strand to SEQ ID NO: 2243336
acaucuccacaauaucaca

SEQ ID NO: 2243338 - RNA, 19 nt, Artificial Sequence
  Description of Artificial Sequence: Synthetic oligonucleotide
  Sense strand starting at position 2435 of SEQ ID NO: 1884141
ggauuuggcucagagacaa

SEQ ID NO: 2243339 - RNA, 19 nt, Artificial Sequence
  Description of Artificial Sequence: Synthetic oligonucleotide
  Antisense strand to SEQ ID NO: 2243338
uugucucugagccaaaucc

SEQ ID NO: 2243340 - RNA, 19 nt, Artificial Sequence
  Description of Artificial Sequence: Synthetic oligonucleotide
  Sense strand starting at position 2445 of SEQ ID NO: 1884141
cagagacaauuaguuugua

SEQ ID NO: 2243341 - RNA, 19 nt, Artificial Sequence
  Description of Artificial Sequence: Synthetic oligonucleotide
  Antisense strand to SEQ ID NO: 2243340
uacaaacuaauugucucug

SEQ ID NO: 2243342 - RNA, 19 nt, Artificial Sequence
  Description of Artificial Sequence: Synthetic oligonucleotide
  Sense strand starting at position 2446 of SEQ ID NO: 1884141
agagacaauuaguuuguaa

SEQ ID NO: 2243343 - RNA, 19 nt, Artificial Sequence
  Description of Artificial Sequence: Synthetic oligonucleotide
  Antisense strand to SEQ ID NO: 2243342
uuacaaacuaauugucucu

SEQ ID NO: 2243344 - RNA, 19 nt, Artificial Sequence
  Description of Artificial Sequence: Synthetic oligonucleotide
  Sense strand starting at position 3008 of SEQ ID NO: 1884141
gaaugauauuuagaaguga

SEQ ID NO: 2243345 - RNA, 19 nt, Artificial Sequence
  Description of Artificial Sequence: Synthetic oligonucleotide
  Antisense strand to SEQ ID NO: 2243344
ucacuucuaaauaucauuc

SEQ ID NO: 2243346 - RNA, 19 nt, Artificial Sequence
  Description of Artificial Sequence: Synthetic oligonucleotide
  Sense strand starting at position 3031 of SEQ ID NO: 1884141
agcaauuagggcuaagguu

SEQ ID NO: 2243347 - RNA, 19 nt, Artificial Sequence
  Description of Artificial Sequence: Synthetic oligonucleotide
  Antisense strand to SEQ ID NO: 2243346
aaccuuagcccuaauugcu

SEQ ID NO: 2243348 - RNA, 19 nt, Artificial Sequence
  Description of Artificial Sequence: Synthetic oligonucleotide
  Sense strand starting at position 3235 of SEQ ID NO: 1884141
aguugagaucacuacucuu

SEQ ID NO: 2243349 - RNA, 19 nt, Artificial Sequence
  Description of Artificial Sequence: Synthetic oligonucleotide
  Antisense strand to SEQ ID NO: 2243348
aagaguagugaucucaacu

SEQ ID NO: 2243350 - RNA, 19 nt, Artificial Sequence
  Description of Artificial Sequence: Synthetic oligonucleotide
  Sense strand starting at position 3449 of SEQ ID NO: 1884141
aacucuuauugaguggagu

SEQ ID NO: 2243351 - RNA, 19 nt, Artificial Sequence
  Description of Artificial Sequence: Synthetic oligonucleotide
  Antisense strand to SEQ ID NO: 2243350
acuccacucaauaagaguu

SEQ ID NO: 2243352 - RNA, 19 nt, Artificial Sequence
  Description of Artificial Sequence: Synthetic oligonucleotide
  Sense strand starting at position 3471 of SEQ ID NO: 1884141
ugugaauucuuuccuggaa

SEQ ID NO: 2243353 - RNA, 19 nt, Artificial Sequence
  Description of Artificial Sequence: Synthetic oligonucleotide
  Antisense strand to SEQ ID NO: 2243352
uuccaggaaagaauucaca

SEQ ID NO: 2243354 - RNA, 19 nt, Artificial Sequence
  Description of Artificial Sequence: Synthetic oligonucleotide
  Sense strand starting at position 3472 of SEQ ID NO: 1884141
gugaauucuuuccuggaac

SEQ ID NO: 2243355 - RNA, 19 nt, Artificial Sequence
  Description of Artificial Sequence: Synthetic oligonucleotide
  Antisense strand to SEQ ID NO: 2243354
guuccaggaaagaauucac

SEQ ID NO: 2243356 - RNA, 19 nt, Artificial Sequence
  Description of Artificial Sequence: Synthetic oligonucleotide
  Sense strand starting at position 3646 of SEQ ID NO: 1884141
caauaucuugugcagauga

SEQ ID NO: 2243357 - RNA, 19 nt, Artificial Sequence
  Description of Artificial Sequence: Synthetic oligonucleotide
  Antisense strand to SEQ ID NO: 2243356
ucaucugcacaagauauug

SEQ ID NO: 2243358 - RNA, 19 nt, Artificial Sequence
  Description of Artificial Sequence: Synthetic oligonucleotide
  Sense strand starting at position 3648 of SEQ ID NO: 1884141
auaucuugugcagaugaaa

SEQ ID NO: 2243359 - RNA, 19 nt, Artificial Sequence
  Description of Artificial Sequence: Synthetic oligonucleotide
  Antisense strand to SEQ ID NO: 2243358
uuucaucugcacaagauau

SEQ ID NO: 2243360 - RNA, 19 nt, Artificial Sequence
  Description of Artificial Sequence: Synthetic oligonucleotide
  Sense strand starting at position 3687 of SEQ ID NO: 1884141
auaauaaggucgucaaacu

SEQ ID NO: 2243361 - RNA, 19 nt, Artificial Sequence
  Description of Artificial Sequence: Synthetic oligonucleotide
  Antisense strand to SEQ ID NO: 2243360
aguuugacgaccuuauuau

SEQ ID NO: 2243362 - RNA, 19 nt, Artificial Sequence
  Description of Artificial Sequence: Synthetic oligonucleotide
  Sense strand starting at position 3901 of SEQ ID NO: 1884141
gaugaugccuuggugacaa

SEQ ID NO: 2243363 - RNA, 19 nt, Artificial Sequence
  Description of Artificial Sequence: Synthetic oligonucleotide
  Antisense strand to SEQ ID NO: 2243362
uugucaccaaggcaucauc

SEQ ID NO: 2243364 - RNA, 19 nt, Artificial Sequence
  Description of Artificial Sequence: Synthetic oligonucleotide
  Sense strand starting at position 21 of SEQ ID NO: 1884142
agauaacauucuugggauc

SEQ ID NO: 2243365 - RNA, 19 nt, Artificial Sequence
  Description of Artificial Sequence: Synthetic oligonucleotide
  Antisense strand to SEQ ID NO: 2243364
gaucccaagaauguuaucu

SEQ ID NO: 2243366 - RNA, 19 nt, Artificial Sequence
  Description of Artificial Sequence: Synthetic oligonucleotide
  Sense strand starting at position 23 of SEQ ID NO: 1884142
auaacauucuugggaucuu

SEQ ID NO: 2243367 - RNA, 19 nt, Artificial Sequence
  Description of Artificial Sequence: Synthetic oligonucleotide
  Antisense strand to SEQ ID NO: 2243366
aagaucccaagaauguuau

SEQ ID NO: 2243368 - RNA, 19 nt, Artificial Sequence
  Description of Artificial Sequence: Synthetic oligonucleotide
  Sense strand starting at position 44 of SEQ ID NO: 1884142
auagcauucuugggcacaa

SEQ ID NO: 2243369 - RNA, 19 nt, Artificial Sequence
  Description of Artificial Sequence: Synthetic oligonucleotide
  Antisense strand to SEQ ID NO: 2243368
uugugcccaagaaugcuau

SEQ ID NO: 2243370 - RNA, 19 nt, Artificial Sequence
  Description of Artificial Sequence: Synthetic oligonucleotide
  Sense strand starting at position 2149 of SEQ ID NO: 1884142
uuucguuacguguuagcuu

SEQ ID NO: 2243371 - RNA, 19 nt, Artificial Sequence
  Description of Artificial Sequence: Synthetic oligonucleotide
  Antisense strand to SEQ ID NO: 2243370
aagcuaacacguaacgaaa

SEQ ID NO: 2243372 - RNA, 19 nt, Artificial Sequence
  Description of Artificial Sequence: Synthetic oligonucleotide
  Sense strand starting at position 2200 of SEQ ID NO: 1884142
gccucuaauuccuuuggaa

SEQ ID NO: 2243373 - RNA, 19 nt, Artificial Sequence
  Description of Artificial Sequence: Synthetic oligonucleotide
  Antisense strand to SEQ ID NO: 2243372
uuccaaaggaauuagaggc

SEQ ID NO: 2243374 - RNA, 19 nt, Artificial Sequence
  Description of Artificial Sequence: Synthetic oligonucleotide
  Sense strand starting at position 2390 of SEQ ID NO: 1884142
gcuuaacaguaagccaaau

SEQ ID NO: 2243375 - RNA, 19 nt, Artificial Sequence
  Description of Artificial Sequence: Synthetic oligonucleotide
  Antisense strand to SEQ ID NO: 2243374
auuuggcuuacuguuaagc

SEQ ID NO: 2243376 - RNA, 19 nt, Artificial Sequence
  Description of Artificial Sequence: Synthetic oligonucleotide
  Sense strand starting at position 2465 of SEQ ID NO: 1884142
auauccauguuuggcaauu

SEQ ID NO: 2243377 - RNA, 19 nt, Artificial Sequence
  Description of Artificial Sequence: Synthetic oligonucleotide
  Antisense strand to SEQ ID NO: 2243376
aauugccaaacauggauau

SEQ ID NO: 2243378 - RNA, 19 nt, Artificial Sequence
  Description of Artificial Sequence: Synthetic oligonucleotide
  Sense strand starting at position 2467 of SEQ ID NO: 1884142
auccauguuuggcaauuua

SEQ ID NO: 2243379 - RNA, 19 nt, Artificial Sequence
  Description of Artificial Sequence: Synthetic oligonucleotide
  Antisense strand to SEQ ID NO: 2243378
uaaauugccaaacauggau

SEQ ID NO: 2243380 - RNA, 19 nt, Artificial Sequence
  Description of Artificial Sequence: Synthetic oligonucleotide
  Sense strand starting at position 2516 of SEQ ID NO: 1884142
ccauaacuugaauguggaa

SEQ ID NO: 2243381 - RNA, 19 nt, Artificial Sequence
  Description of Artificial Sequence: Synthetic oligonucleotide
  Antisense strand to SEQ ID NO: 2243380
uuccacauucaaguuaugg

SEQ ID NO: 2243382 - RNA, 19 nt, Artificial Sequence
  Description of Artificial Sequence: Synthetic oligonucleotide
  Sense strand starting at position 2566 of SEQ ID NO: 1884142
ugggauucgugcuuuguca

SEQ ID NO: 2243383 - RNA, 19 nt, Artificial Sequence
  Description of Artificial Sequence: Synthetic oligonucleotide
  Antisense strand to SEQ ID NO: 2243382
ugacaaagcacgaauccca

SEQ ID NO: 2243384 - RNA, 19 nt, Artificial Sequence
  Description of Artificial Sequence: Synthetic oligonucleotide
  Sense strand starting at position 2568 of SEQ ID NO: 1884142
ggauucgugcuuugucaaa

SEQ ID NO: 2243385 - RNA, 19 nt, Artificial Sequence
  Description of Artificial Sequence: Synthetic oligonucleotide
  Antisense strand to SEQ ID NO: 2243384
uuugacaaagcacgaaucc

SEQ ID NO: 2243386 - RNA, 19 nt, Artificial Sequence
  Description of Artificial Sequence: Synthetic oligonucleotide
  Sense strand starting at position 2570 of SEQ ID NO: 1884142
auucgugcuuugucaaacu

SEQ ID NO: 2243387 - RNA, 19 nt, Artificial Sequence
  Description of Artificial Sequence: Synthetic oligonucleotide
  Antisense strand to SEQ ID NO: 2243386
aguuugacaaagcacgaau

SEQ ID NO: 2243388 - RNA, 19 nt, Artificial Sequence
  Description of Artificial Sequence: Synthetic oligonucleotide
  Sense strand starting at position 2594 of SEQ ID NO: 1884142
agcccugcucuauaaugua

SEQ ID NO: 2243389 - RNA, 19 nt, Artificial Sequence
  Description of Artificial Sequence: Synthetic oligonucleotide
  Antisense strand to SEQ ID NO: 2243388
uacauuauagagcagggcu

SEQ ID NO: 2243390 - RNA, 19 nt, Artificial Sequence
  Description of Artificial Sequence: Synthetic oligonucleotide
  Sense strand starting at position 2805 of SEQ ID NO: 1884142
aagucaaagcuguauggua

SEQ ID NO: 2243391 - RNA, 19 nt, Artificial Sequence
  Description of Artificial Sequence: Synthetic oligonucleotide
  Antisense strand to SEQ ID NO: 2243390
uaccauacagcuuugacuu

SEQ ID NO: 2243392 - RNA, 19 nt, Artificial Sequence
  Description of Artificial Sequence: Synthetic oligonucleotide
  Sense strand starting at position 2807 of SEQ ID NO: 1884142
gucaaagcuguaugguaug

SEQ ID NO: 2243393 - RNA, 19 nt, Artificial Sequence
  Description of Artificial Sequence: Synthetic oligonucleotide
  Antisense strand to SEQ ID NO: 2243392
cauaccauacagcuuugac

SEQ ID NO: 2243394 - RNA, 19 nt, Artificial Sequence
  Description of Artificial Sequence: Synthetic oligonucleotide
  Sense strand starting at position 2810 of SEQ ID NO: 1884142
aaagcuguaugguauguau

SEQ ID NO: 2243395 - RNA, 19 nt, Artificial Sequence
  Description of Artificial Sequence: Synthetic oligonucleotide
  Antisense strand to SEQ ID NO: 2243394
auacauaccauacagcuuu

SEQ ID NO: 2243396 - RNA, 19 nt, Artificial Sequence
  Description of Artificial Sequence: Synthetic oligonucleotide
  Sense strand starting at position 2812 of SEQ ID NO: 1884142
agcuguaugguauguauac

SEQ ID NO: 2243397 - RNA, 19 nt, Artificial Sequence
  Description of Artificial Sequence: Synthetic oligonucleotide
  Antisense strand to SEQ ID NO: 2243396
guauacauaccauacagcu

SEQ ID NO: 2243398 - RNA, 19 nt, Artificial Sequence
  Description of Artificial Sequence: Synthetic oligonucleotide
  Sense strand starting at position 2813 of SEQ ID NO: 1884142
gcuguaugguauguauaca

SEQ ID NO: 2243399 - RNA, 19 nt, Artificial Sequence
  Description of Artificial Sequence: Synthetic oligonucleotide
  Antisense strand to SEQ ID NO: 2243398
uguauacauaccauacagc

SEQ ID NO: 2243400 - RNA, 19 nt, Artificial Sequence
  Description of Artificial Sequence: Synthetic oligonucleotide
  Sense strand starting at position 2834 of SEQ ID NO: 1884142
gaaaguuuauugccucaug

SEQ ID NO: 2243401 - RNA, 19 nt, Artificial Sequence
  Description of Artificial Sequence: Synthetic oligonucleotide
  Antisense strand to SEQ ID NO: 2243400
caugaggcaauaaacuuuc

SEQ ID NO: 2243402 - RNA, 19 nt, Artificial Sequence
  Description of Artificial Sequence: Synthetic oligonucleotide
  Sense strand starting at position 2837 of SEQ ID NO: 1884142
aguuuauugccucauguga

SEQ ID NO: 2243403 - RNA, 19 nt, Artificial Sequence
  Description of Artificial Sequence: Synthetic oligonucleotide
  Antisense strand to SEQ ID NO: 2243402
ucacaugaggcaauaaacu

SEQ ID NO: 2243404 - RNA, 19 nt, Artificial Sequence
  Description of Artificial Sequence: Synthetic oligonucleotide
  Sense strand starting at position 2848 of SEQ ID NO: 1884142
ucaugugacccuugagaau

SEQ ID NO: 2243405 - RNA, 19 nt, Artificial Sequence
  Description of Artificial Sequence: Synthetic oligonucleotide
  Antisense strand to SEQ ID NO: 2243404
auucucaagggucacauga

SEQ ID NO: 2243406 - RNA, 19 nt, Artificial Sequence
  Description of Artificial Sequence: Synthetic oligonucleotide
  Sense strand starting at position 2851 of SEQ ID NO: 1884142
ugugacccuugagaauaaa

SEQ ID NO: 2243407 - RNA, 19 nt, Artificial Sequence
  Description of Artificial Sequence: Synthetic oligonucleotide
  Antisense strand to SEQ ID NO: 2243406
uuuauucucaagggucaca

SEQ ID NO: 2243408 - RNA, 19 nt, Artificial Sequence
  Description of Artificial Sequence: Synthetic oligonucleotide
  Sense strand starting at position 2951 of SEQ ID NO: 1884142
uauuaagucuaaguggaaa

SEQ ID NO: 2243409 - RNA, 19 nt, Artificial Sequence
  Description of Artificial Sequence: Synthetic oligonucleotide
  Antisense strand to SEQ ID NO: 2243408
uuuccacuuagacuuaaua

SEQ ID NO: 2243410 - RNA, 19 nt, Artificial Sequence
  Description of Artificial Sequence: Synthetic oligonucleotide
  Sense strand starting at position 2995 of SEQ ID NO: 1884142
ggcuucagacuguaugaga

SEQ ID NO: 2243411 - RNA, 19 nt, Artificial Sequence
  Description of Artificial Sequence: Synthetic oligonucleotide
  Antisense strand to SEQ ID NO: 2243410
ucucauacagucugaagcc

SEQ ID NO: 2243412 - RNA, 19 nt, Artificial Sequence
  Description of Artificial Sequence: Synthetic oligonucleotide
  Sense strand starting at position 3073 of SEQ ID NO: 1884142
ugauguauaucacuuggca

SEQ ID NO: 2243413 - RNA, 19 nt, Artificial Sequence
  Description of Artificial Sequence: Synthetic oligonucleotide
  Antisense strand to SEQ ID NO: 2243412
ugccaagugauauacauca

SEQ ID NO: 2243414 - RNA, 19 nt, Artificial Sequence
  Description of Artificial Sequence: Synthetic oligonucleotide
  Sense strand starting at position 3076 of SEQ ID NO: 1884142
uguauaucacuuggcacau

SEQ ID NO: 2243415 - RNA, 19 nt, Artificial Sequence
  Description of Artificial Sequence: Synthetic oligonucleotide
  Antisense strand to SEQ ID NO: 2243414
augugccaagugauauaca

SEQ ID NO: 2243416 - RNA, 19 nt, Artificial Sequence
  Description of Artificial Sequence: Synthetic oligonucleotide
  Sense strand starting at position 3118 of SEQ ID NO: 1884142
caagcuaacgucuguauuu

SEQ ID NO: 2243417 - RNA, 19 nt, Artificial Sequence
  Description of Artificial Sequence: Synthetic oligonucleotide
  Antisense strand to SEQ ID NO: 2243416
aaauacagacguuagcuug

SEQ ID NO: 2243418 - RNA, 19 nt, Artificial Sequence
  Description of Artificial Sequence: Synthetic oligonucleotide
  Sense strand starting at position 3603 of SEQ ID NO: 1884142
cagguaagagccuagaucu

SEQ ID NO: 2243419 - RNA, 19 nt, Artificial Sequence
  Description of Artificial Sequence: Synthetic oligonucleotide
  Antisense strand to SEQ ID NO: 2243418
agaucuaggcucuuaccug

SEQ ID NO: 2243420 - RNA, 19 nt, Artificial Sequence
  Description of Artificial Sequence: Synthetic oligonucleotide
  Sense strand starting at position 3652 of SEQ ID NO: 1884142
uggcuucuaccauguacua

SEQ ID NO: 2243421 - RNA, 19 nt, Artificial Sequence
  Description of Artificial Sequence: Synthetic oligonucleotide
  Antisense strand to SEQ ID NO: 2243420
uaguacaugguagaagcca

SEQ ID NO: 2243422 - RNA, 19 nt, Artificial Sequence
  Description of Artificial Sequence: Synthetic oligonucleotide
  Sense strand starting at position 3775 of SEQ ID NO: 1884142
ggaccugcuccacaagauu

SEQ ID NO: 2243423 - RNA, 19 nt, Artificial Sequence
  Description of Artificial Sequence: Synthetic oligonucleotide
  Antisense strand to SEQ ID NO: 2243422
aaucuuguggagcaggucc

SEQ ID NO: 2243424 - RNA, 19 nt, Artificial Sequence
  Description of Artificial Sequence: Synthetic oligonucleotide
  Sense strand starting at position 3823 of SEQ ID NO: 1884142
gaggcaguccuguacagau

SEQ ID NO: 2243425 - RNA, 19 nt, Artificial Sequence
  Description of Artificial Sequence: Synthetic oligonucleotide
  Antisense strand to SEQ ID NO: 2243424
aucuguacaggacugccuc

SEQ ID NO: 2243426 - RNA, 19 nt, Artificial Sequence
  Description of Artificial Sequence: Synthetic oligonucleotide
  Sense strand starting at position 3887 of SEQ ID NO: 1884142
ucacaagagucacguucuu

SEQ ID NO: 2243427 - RNA, 19 nt, Artificial Sequence
  Description of Artificial Sequence: Synthetic oligonucleotide
  Antisense strand to SEQ ID NO: 2243426
aagaacgugacucuuguga

SEQ ID NO: 2243428 - RNA, 19 nt, Artificial Sequence
  Description of Artificial Sequence: Synthetic oligonucleotide
  Sense strand starting at position 54 of SEQ ID NO: 1884143
cccagagaccaugguguua

SEQ ID NO: 2243429 - RNA, 19 nt, Artificial Sequence
  Description of Artificial Sequence: Synthetic oligonucleotide
  Antisense strand to SEQ ID NO: 2243428
uaacaccauggucucuggg

SEQ ID NO: 2243430 - RNA, 19 nt, Artificial Sequence
  Description of Artificial Sequence: Synthetic oligonucleotide
  Sense strand starting at position 77 of SEQ ID NO: 1884143
acaauuugcuguguuacuu

SEQ ID NO: 2243431 - RNA, 19 nt, Artificial Sequence
  Description of Artificial Sequence: Synthetic oligonucleotide
  Antisense strand to SEQ ID NO: 2243430
aaguaacacagcaaauugu

SEQ ID NO: 2243432 - RNA, 19 nt, Artificial Sequence
  Description of Artificial Sequence: Synthetic oligonucleotide
  Sense strand starting at position 206 of SEQ ID NO: 1884143
gcuaaagccucuccaagaa

SEQ ID NO: 2243433 - RNA, 19 nt, Artificial Sequence
  Description of Artificial Sequence: Synthetic oligonucleotide
  Antisense strand to SEQ ID NO: 2243432
uucuuggagaggcuuuagc

SEQ ID NO: 2243434 - RNA, 19 nt, Artificial Sequence
  Description of Artificial Sequence: Synthetic oligonucleotide
  Sense strand starting at position 227 of SEQ ID NO: 1884143
ucucucuggccaggaagau

SEQ ID NO: 2243435 - RNA, 19 nt, Artificial Sequence
  Description of Artificial Sequence: Synthetic oligonucleotide
  Antisense strand to SEQ ID NO: 2243434
aucuuccuggccagagaga

SEQ ID NO: 2243436 - RNA, 19 nt, Artificial Sequence
  Description of Artificial Sequence: Synthetic oligonucleotide
  Sense strand starting at position 336 of SEQ ID NO: 1884143
ggaugaguucgugggaaac

SEQ ID NO: 2243437 - RNA, 19 nt, Artificial Sequence
  Description of Artificial Sequence: Synthetic oligonucleotide
  Antisense strand to SEQ ID NO: 2243436
guuucccacgaacucaucc

SEQ ID NO: 2243438 - RNA, 19 nt, Artificial Sequence
  Description of Artificial Sequence: Synthetic oligonucleotide
  Sense strand starting at position 542 of SEQ ID NO: 1884143
gcuuauccacaggauguaa

SEQ ID NO: 2243439 - RNA, 19 nt, Artificial Sequence
  Description of Artificial Sequence: Synthetic oligonucleotide
  Antisense strand to SEQ ID NO: 2243438
uuacauccuguggauaagc

SEQ ID NO: 2243440 - RNA, 19 nt, Artificial Sequence
  Description of Artificial Sequence: Synthetic oligonucleotide
  Sense strand starting at position 625 of SEQ ID NO: 1884143
uaaacugccuugguuugaa

SEQ ID NO: 2243441 - RNA, 19 nt, Artificial Sequence
  Description of Artificial Sequence: Synthetic oligonucleotide
  Antisense strand to SEQ ID NO: 2243440
uucaaaccaaggcaguuua

SEQ ID NO: 2243442 - RNA, 19 nt, Artificial Sequence
  Description of Artificial Sequence: Synthetic oligonucleotide
  Sense strand starting at position 748 of SEQ ID NO: 1884143
uaggaccgucccgaagaau

SEQ ID NO: 2243443 - RNA, 19 nt, Artificial Sequence
  Description of Artificial Sequence: Synthetic oligonucleotide
  Antisense strand to SEQ ID NO: 2243442
auucuucgggacgguccua

SEQ ID NO: 2243444 - RNA, 19 nt, Artificial Sequence
  Description of Artificial Sequence: Synthetic oligonucleotide
  Sense strand starting at position 751 of SEQ ID NO: 1884143
gaccgucccgaagaaugaa

SEQ ID NO: 2243445 - RNA, 19 nt, Artificial Sequence
  Description of Artificial Sequence: Synthetic oligonucleotide
  Antisense strand to SEQ ID NO: 2243444
uucauucuucgggacgguc

SEQ ID NO: 2243446 - RNA, 19 nt, Artificial Sequence
  Description of Artificial Sequence: Synthetic oligonucleotide
  Sense strand starting at position 821 of SEQ ID NO: 1884143
cccauuucucaucguuaug

SEQ ID NO: 2243447 - RNA, 19 nt, Artificial Sequence
  Description of Artificial Sequence: Synthetic oligonucleotide
  Antisense strand to SEQ ID NO: 2243446
cauaacgaugagaaauggg

SEQ ID NO: 2243448 - RNA, 19 nt, Artificial Sequence
  Description of Artificial Sequence: Synthetic oligonucleotide
  Sense strand starting at position 842 of SEQ ID NO: 1884143
ugugauaauuuggucuguu

SEQ ID NO: 2243449 - RNA, 19 nt, Artificial Sequence
  Description of Artificial Sequence: Synthetic oligonucleotide
  Antisense strand to SEQ ID NO: 2243448
aacagaccaaauuaucaca

SEQ ID NO: 2243450 - RNA, 19 nt, Artificial Sequence
  Description of Artificial Sequence: Synthetic oligonucleotide
  Sense strand starting at position 843 of SEQ ID NO: 1884143
gugauaauuuggucuguuc

SEQ ID NO: 2243451 - RNA, 19 nt, Artificial Sequence
  Description of Artificial Sequence: Synthetic oligonucleotide
  Antisense strand to SEQ ID NO: 2243450
gaacagaccaaauuaucac

SEQ ID NO: 2243452 - RNA, 19 nt, Artificial Sequence
  Description of Artificial Sequence: Synthetic oligonucleotide
  Sense strand starting at position 865 of SEQ ID NO: 1884143
cucccuuuccuuuagggaa

SEQ ID NO: 2243453 - RNA, 19 nt, Artificial Sequence
  Description of Artificial Sequence: Synthetic oligonucleotide
  Antisense strand to SEQ ID NO: 2243452
uucccuaaaggaaagggag

SEQ ID NO: 2243454 - RNA, 19 nt, Artificial Sequence
  Description of Artificial Sequence: Synthetic oligonucleotide
  Sense strand starting at position 1499 of SEQ ID NO: 1884143
ggucuaaguagcguauguu

SEQ ID NO: 2243455 - RNA, 19 nt, Artificial Sequence
  Description of Artificial Sequence: Synthetic oligonucleotide
  Antisense strand to SEQ ID NO: 2243454
aacauacgcuacuuagacc

SEQ ID NO: 2243456 - RNA, 19 nt, Artificial Sequence
  Description of Artificial Sequence: Synthetic oligonucleotide
  Sense strand starting at position 1561 of SEQ ID NO: 1884143
uuuggaucagcauggauga

SEQ ID NO: 2243457 - RNA, 19 nt, Artificial Sequence
  Description of Artificial Sequence: Synthetic oligonucleotide
  Antisense strand to SEQ ID NO: 2243456
ucauccaugcugauccaaa

SEQ ID NO: 2243458 - RNA, 19 nt, Artificial Sequence
  Description of Artificial Sequence: Synthetic oligonucleotide
  Sense strand starting at position 1881 of SEQ ID NO: 1884143
aagcuagaugagugugauc

SEQ ID NO: 2243459 - RNA, 19 nt, Artificial Sequence
  Description of Artificial Sequence: Synthetic oligonucleotide
  Antisense strand to SEQ ID NO: 2243458
gaucacacucaucuagcuu

SEQ ID NO: 2243460 - RNA, 19 nt, Artificial Sequence
  Description of Artificial Sequence: Synthetic oligonucleotide
  Sense strand starting at position 1886 of SEQ ID NO: 1884143
agaugagugugaucaucag

SEQ ID NO: 2243461 - RNA, 19 nt, Artificial Sequence
  Description of Artificial Sequence: Synthetic oligonucleotide
  Antisense strand to SEQ ID NO: 2243460
cugaugaucacacucaucu

SEQ ID NO: 2243462 - RNA, 19 nt, Artificial Sequence
  Description of Artificial Sequence: Synthetic oligonucleotide
  Sense strand starting at position 2147 of SEQ ID NO: 1884143
cugcuuaugugauuuaagc

SEQ ID NO: 2243463 - RNA, 19 nt, Artificial Sequence
  Description of Artificial Sequence: Synthetic oligonucleotide
  Antisense strand to SEQ ID NO: 2243462
gcuuaaaucacauaagcag

SEQ ID NO: 2243464 - RNA, 19 nt, Artificial Sequence
  Description of Artificial Sequence: Synthetic oligonucleotide
  Sense strand starting at position 2280 of SEQ ID NO: 1884143
gcugucaguauggaaacaa

SEQ ID NO: 2243465 - RNA, 19 nt, Artificial Sequence
  Description of Artificial Sequence: Synthetic oligonucleotide
  Antisense strand to SEQ ID NO: 2243464
uuguuuccauacugacagc

SEQ ID NO: 2243466 - RNA, 19 nt, Artificial Sequence
  Description of Artificial Sequence: Synthetic oligonucleotide
  Sense strand starting at position 2290 of SEQ ID NO: 1884143
uggaaacaaggccguuaua

SEQ ID NO: 2243467 - RNA, 19 nt, Artificial Sequence
  Description of Artificial Sequence: Synthetic oligonucleotide
  Antisense strand to SEQ ID NO: 2243466
uauaacggccuuguuucca

SEQ ID NO: 2243468 - RNA, 19 nt, Artificial Sequence
  Description of Artificial Sequence: Synthetic oligonucleotide
  Sense strand starting at position 2593 of SEQ ID NO: 1884143
auacgaauuugggaaugau

SEQ ID NO: 2243469 - RNA, 19 nt, Artificial Sequence
  Description of Artificial Sequence: Synthetic oligonucleotide
  Antisense strand to SEQ ID NO: 2243468
aucauucccaaauucguau

SEQ ID NO: 2243470 - RNA, 19 nt, Artificial Sequence
  Description of Artificial Sequence: Synthetic oligonucleotide
  Sense strand starting at position 2635 of SEQ ID NO: 1884143
aucaaaguucuugauguau

SEQ ID NO: 2243471 - RNA, 19 nt, Artificial Sequence
  Description of Artificial Sequence: Synthetic oligonucleotide
  Antisense strand to SEQ ID NO: 2243470
auacaucaagaacuuugau

SEQ ID NO: 2243472 - RNA, 19 nt, Artificial Sequence
  Description of Artificial Sequence: Synthetic oligonucleotide
  Sense strand starting at position 2657 of SEQ ID NO: 1884143
gagcaaacccgagguauag

SEQ ID NO: 2243473 - RNA, 19 nt, Artificial Sequence
  Description of Artificial Sequence: Synthetic oligonucleotide
  Antisense strand to SEQ ID NO: 2243472
cuauaccucggguuugcuc

SEQ ID NO: 2243474 - RNA, 19 nt, Artificial Sequence
  Description of Artificial Sequence: Synthetic oligonucleotide
  Sense strand starting at position 2689 of SEQ ID NO: 1884143
agucaaugacauugaaguu

SEQ ID NO: 2243475 - RNA, 19 nt, Artificial Sequence
  Description of Artificial Sequence: Synthetic oligonucleotide
  Antisense strand to SEQ ID NO: 2243474
aacuucaaugucauugacu

SEQ ID NO: 2243476 - RNA, 19 nt, Artificial Sequence
  Description of Artificial Sequence: Synthetic oligonucleotide
  Sense strand starting at position 2715 of SEQ ID NO: 1884143
ugagaaguucuacgauaca

SEQ ID NO: 2243477 - RNA, 19 nt, Artificial Sequence
  Description of Artificial Sequence: Synthetic oligonucleotide
  Antisense strand to SEQ ID NO: 2243476
uguaucguagaacuucuca

SEQ ID NO: 2243478 - RNA, 19 nt, Artificial Sequence
  Description of Artificial Sequence: Synthetic oligonucleotide
  Sense strand starting at position 3000 of SEQ ID NO: 1884143
gcgcacuugcucuucuaga

SEQ ID NO: 2243479 - RNA, 19 nt, Artificial Sequence
  Description of Artificial Sequence: Synthetic oligonucleotide
  Antisense strand to SEQ ID NO: 2243478
ucuagaagagcaagugcgc

SEQ ID NO: 2243480 - RNA, 19 nt, Artificial Sequence
  Description of Artificial Sequence: Synthetic oligonucleotide
  Sense strand starting at position 3035 of SEQ ID NO: 1884143
uuccaugugccucauugau

SEQ ID NO: 2243481 - RNA, 19 nt, Artificial Sequence
  Description of Artificial Sequence: Synthetic oligonucleotide
  Antisense strand to SEQ ID NO: 2243480
aucaaugaggcacauggaa

SEQ ID NO: 2243482 - RNA, 19 nt, Artificial Sequence
  Description of Artificial Sequence: Synthetic oligonucleotide
  Sense strand starting at position 3067 of SEQ ID NO: 1884143
ccagaaagaggcugcuuua

SEQ ID NO: 2243483 - RNA, 19 nt, Artificial Sequence
  Description of Artificial Sequence: Synthetic oligonucleotide
  Antisense strand to SEQ ID NO: 2243482
uaaagcagccucuuucugg

SEQ ID NO: 2243484 - RNA, 19 nt, Artificial Sequence
  Description of Artificial Sequence: Synthetic oligonucleotide
  Sense strand starting at position 3076 of SEQ ID NO: 1884143
ggcugcuuuauguaagaca

SEQ ID NO: 2243485 - RNA, 19 nt, Artificial Sequence
  Description of Artificial Sequence: Synthetic oligonucleotide
  Antisense strand to SEQ ID NO: 2243484
ugucuuacauaaagcagcc

SEQ ID NO: 2243486 - RNA, 19 nt, Artificial Sequence
  Description of Artificial Sequence: Synthetic oligonucleotide
  Sense strand starting at position 3088 of SEQ ID NO: 1884143
uaagacauuugggaguagu

SEQ ID NO: 2243487 - RNA, 19 nt, Artificial Sequence
  Description of Artificial Sequence: Synthetic oligonucleotide
  Antisense strand to SEQ ID NO: 2243486
acuacucccaaaugucuua

SEQ ID NO: 2243488 - RNA, 19 nt, Artificial Sequence
  Description of Artificial Sequence: Synthetic oligonucleotide
  Sense strand starting at position 3545 of SEQ ID NO: 1884143
acuagaaguuuccuuugau

SEQ ID NO: 2243489 - RNA, 19 nt, Artificial Sequence
  Description of Artificial Sequence: Synthetic oligonucleotide
  Antisense strand to SEQ ID NO: 2243488
aucaaaggaaacuucuagu

SEQ ID NO: 2243490 - RNA, 19 nt, Artificial Sequence
  Description of Artificial Sequence: Synthetic oligonucleotide
  Sense strand starting at position 3546 of SEQ ID NO: 1884143
cuagaaguuuccuuugaug

SEQ ID NO: 2243491 - RNA, 19 nt, Artificial Sequence
  Description of Artificial Sequence: Synthetic oligonucleotide
  Antisense strand to SEQ ID NO: 2243490
caucaaaggaaacuucuag

SEQ ID NO: 2243492 - RNA, 19 nt, Artificial Sequence
  Description of Artificial Sequence: Synthetic oligonucleotide
  Sense strand starting at position 3567 of SEQ ID NO: 1884143
aaggguaucuucuugaacu

SEQ ID NO: 2243493 - RNA, 19 nt, Artificial Sequence
  Description of Artificial Sequence: Synthetic oligonucleotide
  Antisense strand to SEQ ID NO: 2243492
aguucaagaagauacccuu

SEQ ID NO: 2243494 - RNA, 19 nt, Artificial Sequence
  Description of Artificial Sequence: Synthetic oligonucleotide
  Sense strand starting at position 3569 of SEQ ID NO: 1884143
ggguaucuucuugaacuca

SEQ ID NO: 2243495 - RNA, 19 nt, Artificial Sequence
  Description of Artificial Sequence: Synthetic oligonucleotide
  Antisense strand to SEQ ID NO: 2243494
ugaguucaagaagauaccc

SEQ ID NO: 2243496 - RNA, 19 nt, Artificial Sequence
  Description of Artificial Sequence: Synthetic oligonucleotide
  Sense strand starting at position 3595 of SEQ ID NO: 1884143
gggauauguggguggguca

SEQ ID NO: 2243497 - RNA, 19 nt, Artificial Sequence
  Description of Artificial Sequence: Synthetic oligonucleotide
  Antisense strand to SEQ ID NO: 2243496
ugacccacccacauauccc

SEQ ID NO: 2243498 - RNA, 19 nt, Artificial Sequence
  Description of Artificial Sequence: Synthetic oligonucleotide
  Sense strand starting at position 3657 of SEQ ID NO: 1884143
cagcaacaggcuuggaauu

SEQ ID NO: 2243499 - RNA, 19 nt, Artificial Sequence
  Description of Artificial Sequence: Synthetic oligonucleotide
  Antisense strand to SEQ ID NO: 2243498
aauuccaagccuguugcug

SEQ ID NO: 2243500 - RNA, 19 nt, Artificial Sequence
  Description of Artificial Sequence: Synthetic oligonucleotide
  Sense strand starting at position 3674 of SEQ ID NO: 1884143
uuaacagcuggccaagaau

SEQ ID NO: 2243501 - RNA, 19 nt, Artificial Sequence
  Description of Artificial Sequence: Synthetic oligonucleotide
  Antisense strand to SEQ ID NO: 2243500
auucuuggccagcuguuaa

SEQ ID NO: 2243502 - RNA, 19 nt, Artificial Sequence
  Description of Artificial Sequence: Synthetic oligonucleotide
  Sense strand starting at position 3695 of SEQ ID NO: 1884143
aggacaucaucucugugau

SEQ ID NO: 2243503 - RNA, 19 nt, Artificial Sequence
  Description of Artificial Sequence: Synthetic oligonucleotide
  Antisense strand to SEQ ID NO: 2243502
aucacagagaugauguccu

SEQ ID NO: 2243504 - RNA, 19 nt, Artificial Sequence
  Description of Artificial Sequence: Synthetic oligonucleotide
  Sense strand starting at position 3696 of SEQ ID NO: 1884143
ggacaucaucucugugaug

SEQ ID NO: 2243505 - RNA, 19 nt, Artificial Sequence
  Description of Artificial Sequence: Synthetic oligonucleotide
  Antisense strand to SEQ ID NO: 2243504
caucacagagaugaugucc

SEQ ID NO: 2243506 - RNA, 19 nt, Artificial Sequence
  Description of Artificial Sequence: Synthetic oligonucleotide
  Sense strand starting at position 3697 of SEQ ID NO: 1884143
gacaucaucucugugaugu

SEQ ID NO: 2243507 - RNA, 19 nt, Artificial Sequence
  Description of Artificial Sequence: Synthetic oligonucleotide
  Antisense strand to SEQ ID NO: 2243506
acaucacagagaugauguc

SEQ ID NO: 2243508 - RNA, 19 nt, Artificial Sequence
  Description of Artificial Sequence: Synthetic oligonucleotide
  Sense strand starting at position 70 of SEQ ID NO: 1884144
acaucagucuuucuguaua

SEQ ID NO: 2243509 - RNA, 19 nt, Artificial Sequence
  Description of Artificial Sequence: Synthetic oligonucleotide
  Antisense strand to SEQ ID NO: 2243508
uauacagaaagacugaugu

SEQ ID NO: 2243510 - RNA, 19 nt, Artificial Sequence
  Description of Artificial Sequence: Synthetic oligonucleotide
  Sense strand starting at position 72 of SEQ ID NO: 1884144
aucagucuuucuguauaag

SEQ ID NO: 2243511 - RNA, 19 nt, Artificial Sequence
  Description of Artificial Sequence: Synthetic oligonucleotide
  Antisense strand to SEQ ID NO: 2243510
cuuauacagaaagacugau

SEQ ID NO: 2243512 - RNA, 19 nt, Artificial Sequence
  Description of Artificial Sequence: Synthetic oligonucleotide
  Sense strand starting at position 101 of SEQ ID NO: 1884144
cagagccuucucugauuga

SEQ ID NO: 2243513 - RNA, 19 nt, Artificial Sequence
  Description of Artificial Sequence: Synthetic oligonucleotide
  Antisense strand to SEQ ID NO: 2243512
ucaaucagagaaggcucug

SEQ ID NO: 2243514 - RNA, 19 nt, Artificial Sequence
  Description of Artificial Sequence: Synthetic oligonucleotide
  Sense strand starting at position 104 of SEQ ID NO: 1884144
agccuucucugauugaauc

SEQ ID NO: 2243515 - RNA, 19 nt, Artificial Sequence
  Description of Artificial Sequence: Synthetic oligonucleotide
  Antisense strand to SEQ ID NO: 2243514
gauucaaucagagaaggcu

SEQ ID NO: 2243516 - RNA, 19 nt, Artificial Sequence
  Description of Artificial Sequence: Synthetic oligonucleotide
  Sense strand starting at position 105 of SEQ ID NO: 1884144
gccuucucugauugaauca

SEQ ID NO: 2243517 - RNA, 19 nt, Artificial Sequence
  Description of Artificial Sequence: Synthetic oligonucleotide
  Antisense strand to SEQ ID NO: 2243516
ugauucaaucagagaaggc

SEQ ID NO: 2243518 - RNA, 19 nt, Artificial Sequence
  Description of Artificial Sequence: Synthetic oligonucleotide
  Sense strand starting at position 293 of SEQ ID NO: 1884144
ggucaacauuaucugcauu

SEQ ID NO: 2243519 - RNA, 19 nt, Artificial Sequence
  Description of Artificial Sequence: Synthetic oligonucleotide
  Antisense strand to SEQ ID NO: 2243518
aaugcagauaauguugacc

SEQ ID NO: 2243520 - RNA, 19 nt, Artificial Sequence
  Description of Artificial Sequence: Synthetic oligonucleotide
  Sense strand starting at position 425 of SEQ ID NO: 1884144
aauacuuuccuagguacga

SEQ ID NO: 2243521 - RNA, 19 nt, Artificial Sequence
  Description of Artificial Sequence: Synthetic oligonucleotide
  Antisense strand to SEQ ID NO: 2243520
ucguaccuaggaaaguauu

SEQ ID NO: 2243522 - RNA, 19 nt, Artificial Sequence
  Description of Artificial Sequence: Synthetic oligonucleotide
  Sense strand starting at position 426 of SEQ ID NO: 1884144
auacuuuccuagguacgaa

SEQ ID NO: 2243523 - RNA, 19 nt, Artificial Sequence
  Description of Artificial Sequence: Synthetic oligonucleotide
  Antisense strand to SEQ ID NO: 2243522
uucguaccuaggaaaguau

SEQ ID NO: 2243524 - RNA, 19 nt, Artificial Sequence
  Description of Artificial Sequence: Synthetic oligonucleotide
  Sense strand starting at position 604 of SEQ ID NO: 1884144
aucucugcauaguuugaau

SEQ ID NO: 2243525 - RNA, 19 nt, Artificial Sequence
  Description of Artificial Sequence: Synthetic oligonucleotide
  Antisense strand to SEQ ID NO: 2243524
auucaaacuaugcagagau

SEQ ID NO: 2243526 - RNA, 19 nt, Artificial Sequence
  Description of Artificial Sequence: Synthetic oligonucleotide
  Sense strand starting at position 606 of SEQ ID NO: 1884144
cucugcauaguuugaauuu

SEQ ID NO: 2243527 - RNA, 19 nt, Artificial Sequence
  Description of Artificial Sequence: Synthetic oligonucleotide
  Antisense strand to SEQ ID NO: 2243526
aaauucaaacuaugcagag

SEQ ID NO: 2243528 - RNA, 19 nt, Artificial Sequence
  Description of Artificial Sequence: Synthetic oligonucleotide
  Sense strand starting at position 696 of SEQ ID NO: 1884144
cugaaagcgaauuggucua

SEQ ID NO: 2243529 - RNA, 19 nt, Artificial Sequence
  Description of Artificial Sequence: Synthetic oligonucleotide
  Antisense strand to SEQ ID NO: 2243528
uagaccaauucgcuuucag

SEQ ID NO: 2243530 - RNA, 19 nt, Artificial Sequence
  Description of Artificial Sequence: Synthetic oligonucleotide
  Sense strand starting at position 698 of SEQ ID NO: 1884144
gaaagcgaauuggucuaaa

SEQ ID NO: 2243531 - RNA, 19 nt, Artificial Sequence
  Description of Artificial Sequence: Synthetic oligonucleotide
  Antisense strand to SEQ ID NO: 2243530
uuuagaccaauucgcuuuc

SEQ ID NO: 2243532 - RNA, 19 nt, Artificial Sequence
  Description of Artificial Sequence: Synthetic oligonucleotide
  Sense strand starting at position 701 of SEQ ID NO: 1884144
agcgaauuggucuaaauuc

SEQ ID NO: 2243533 - RNA, 19 nt, Artificial Sequence
  Description of Artificial Sequence: Synthetic oligonucleotide
  Antisense strand to SEQ ID NO: 2243532
gaauuuagaccaauucgcu

SEQ ID NO: 2243534 - RNA, 19 nt, Artificial Sequence
  Description of Artificial Sequence: Synthetic oligonucleotide
  Sense strand starting at position 1096 of SEQ ID NO: 1884144
acgugucauccugagagga

SEQ ID NO: 2243535 - RNA, 19 nt, Artificial Sequence
  Description of Artificial Sequence: Synthetic oligonucleotide
  Antisense strand to SEQ ID NO: 2243534
uccucucaggaugacacgu

SEQ ID NO: 2243536 - RNA, 19 nt, Artificial Sequence
  Description of Artificial Sequence: Synthetic oligonucleotide
  Sense strand starting at position 1109 of SEQ ID NO: 1884144
agaggaugcacacguuaga

SEQ ID NO: 2243537 - RNA, 19 nt, Artificial Sequence
  Description of Artificial Sequence: Synthetic oligonucleotide
  Antisense strand to SEQ ID NO: 2243536
ucuaacgugugcauccucu

SEQ ID NO: 2243538 - RNA, 19 nt, Artificial Sequence
  Description of Artificial Sequence: Synthetic oligonucleotide
  Sense strand starting at position 1169 of SEQ ID NO: 1884144
uuggaugucuccuuccaua

SEQ ID NO: 2243539 - RNA, 19 nt, Artificial Sequence
  Description of Artificial Sequence: Synthetic oligonucleotide
  Antisense strand to SEQ ID NO: 2243538
uauggaaggagacauccaa

SEQ ID NO: 2243540 - RNA, 19 nt, Artificial Sequence
  Description of Artificial Sequence: Synthetic oligonucleotide
  Sense strand starting at position 1622 of SEQ ID NO: 1884144
gcguucagucucgugugaa

SEQ ID NO: 2243541 - RNA, 19 nt, Artificial Sequence
  Description of Artificial Sequence: Synthetic oligonucleotide
  Antisense strand to SEQ ID NO: 2243540
uucacacgagacugaacgc

SEQ ID NO: 2243542 - RNA, 19 nt, Artificial Sequence
  Description of Artificial Sequence: Synthetic oligonucleotide
  Sense strand starting at position 1635 of SEQ ID NO: 1884144
ugugaacagaaucgcuaua

SEQ ID NO: 2243543 - RNA, 19 nt, Artificial Sequence
  Description of Artificial Sequence: Synthetic oligonucleotide
  Antisense strand to SEQ ID NO: 2243542
uauagcgauucuguucaca

SEQ ID NO: 2243544 - RNA, 19 nt, Artificial Sequence
  Description of Artificial Sequence: Synthetic oligonucleotide
  Sense strand starting at position 1637 of SEQ ID NO: 1884144
ugaacagaaucgcuauaga

SEQ ID NO: 2243545 - RNA, 19 nt, Artificial Sequence
  Description of Artificial Sequence: Synthetic oligonucleotide
  Antisense strand to SEQ ID NO: 2243544
ucuauagcgauucuguuca

SEQ ID NO: 2243546 - RNA, 19 nt, Artificial Sequence
  Description of Artificial Sequence: Synthetic oligonucleotide
  Sense strand starting at position 1640 of SEQ ID NO: 1884144
acagaaucgcuauagacga

SEQ ID NO: 2243547 - RNA, 19 nt, Artificial Sequence
  Description of Artificial Sequence: Synthetic oligonucleotide
  Antisense strand to SEQ ID NO: 2243546
ucgucuauagcgauucugu

SEQ ID NO: 2243548 - RNA, 19 nt, Artificial Sequence
  Description of Artificial Sequence: Synthetic oligonucleotide
  Sense strand starting at position 1719 of SEQ ID NO: 1884144
gggauugugcuuuaaguga

SEQ ID NO: 2243549 - RNA, 19 nt, Artificial Sequence
  Description of Artificial Sequence: Synthetic oligonucleotide
  Antisense strand to SEQ ID NO: 2243548
ucacuuaaagcacaauccc

SEQ ID NO: 2243550 - RNA, 19 nt, Artificial Sequence
  Description of Artificial Sequence: Synthetic oligonucleotide
  Sense strand starting at position 2042 of SEQ ID NO: 1884144
uccugagggugcuucagaa

SEQ ID NO: 2243551 - RNA, 19 nt, Artificial Sequence
  Description of Artificial Sequence: Synthetic oligonucleotide
  Antisense strand to SEQ ID NO: 2243550
uucugaagcacccucagga

SEQ ID NO: 2243552 - RNA, 19 nt, Artificial Sequence
  Description of Artificial Sequence: Synthetic oligonucleotide
  Sense strand starting at position 2090 of SEQ ID NO: 1884144
cucacauucccuugggaga

SEQ ID NO: 2243553 - RNA, 19 nt, Artificial Sequence
  Description of Artificial Sequence: Synthetic oligonucleotide
  Antisense strand to SEQ ID NO: 2243552
ucucccaagggaaugugag

SEQ ID NO: 2243554 - RNA, 19 nt, Artificial Sequence
  Description of Artificial Sequence: Synthetic oligonucleotide
  Sense strand starting at position 2116 of SEQ ID NO: 1884144
ucacuuuagcccuaguauc

SEQ ID NO: 2243555 - RNA, 19 nt, Artificial Sequence
  Description of Artificial Sequence: Synthetic oligonucleotide
  Antisense strand to SEQ ID NO: 2243554
gauacuagggcuaaaguga

SEQ ID NO: 2243556 - RNA, 19 nt, Artificial Sequence
  Description of Artificial Sequence: Synthetic oligonucleotide
  Sense strand starting at position 2672 of SEQ ID NO: 1884144
aguggaguuucucuaacaa

SEQ ID NO: 2243557 - RNA, 19 nt, Artificial Sequence
  Description of Artificial Sequence: Synthetic oligonucleotide
  Antisense strand to SEQ ID NO: 2243556
uuguuagagaaacuccacu

SEQ ID NO: 2243558 - RNA, 19 nt, Artificial Sequence
  Description of Artificial Sequence: Synthetic oligonucleotide
  Sense strand starting at position 2744 of SEQ ID NO: 1884144
augugaucuguccaaauaa

SEQ ID NO: 2243559 - RNA, 19 nt, Artificial Sequence
  Description of Artificial Sequence: Synthetic oligonucleotide
  Antisense strand to SEQ ID NO: 2243558
uuauuuggacagaucacau

SEQ ID NO: 2243560 - RNA, 19 nt, Artificial Sequence
  Description of Artificial Sequence: Synthetic oligonucleotide
  Sense strand starting at position 2782 of SEQ ID NO: 1884144
ggauaauaauaccuagcau

SEQ ID NO: 2243561 - RNA, 19 nt, Artificial Sequence
  Description of Artificial Sequence: Synthetic oligonucleotide
  Antisense strand to SEQ ID NO: 2243560
augcuagguauuauuaucc

SEQ ID NO: 2243562 - RNA, 19 nt, Artificial Sequence
  Description of Artificial Sequence: Synthetic oligonucleotide
  Sense strand starting at position 2795 of SEQ ID NO: 1884144
uagcauucuugagcacuga

SEQ ID NO: 2243563 - RNA, 19 nt, Artificial Sequence
  Description of Artificial Sequence: Synthetic oligonucleotide
  Antisense strand to SEQ ID NO: 2243562
ucagugcucaagaaugcua

SEQ ID NO: 2243564 - RNA, 19 nt, Artificial Sequence
  Description of Artificial Sequence: Synthetic oligonucleotide
  Sense strand starting at position 2808 of SEQ ID NO: 1884144
cacugacuguguuccagau

SEQ ID NO: 2243565 - RNA, 19 nt, Artificial Sequence
  Description of Artificial Sequence: Synthetic oligonucleotide
  Antisense strand to SEQ ID NO: 2243564
aucuggaacacagucagug

SEQ ID NO: 2243566 - RNA, 19 nt, Artificial Sequence
  Description of Artificial Sequence: Synthetic oligonucleotide
  Sense strand starting at position 2812 of SEQ ID NO: 1884144
gacuguguuccagauaaug

SEQ ID NO: 2243567 - RNA, 19 nt, Artificial Sequence
  Description of Artificial Sequence: Synthetic oligonucleotide
  Antisense strand to SEQ ID NO: 2243566
cauuaucuggaacacaguc

SEQ ID NO: 2243568 - RNA, 19 nt, Artificial Sequence
  Description of Artificial Sequence: Synthetic oligonucleotide
  Sense strand starting at position 2814 of SEQ ID NO: 1884144
cuguguuccagauaaugag

SEQ ID NO: 2243569 - RNA, 19 nt, Artificial Sequence
  Description of Artificial Sequence: Synthetic oligonucleotide
  Antisense strand to SEQ ID NO: 2243568
cucauuaucuggaacacag

SEQ ID NO: 2243570 - RNA, 19 nt, Artificial Sequence
  Description of Artificial Sequence: Synthetic oligonucleotide
  Sense strand starting at position 2820 of SEQ ID NO: 1884144
uccagauaaugagcuaaua

SEQ ID NO: 2243571 - RNA, 19 nt, Artificial Sequence
  Description of Artificial Sequence: Synthetic oligonucleotide
  Antisense strand to SEQ ID NO: 2243570
uauuagcucauuaucugga

SEQ ID NO: 2243572 - RNA, 19 nt, Artificial Sequence
  Description of Artificial Sequence: Synthetic oligonucleotide
  Sense strand starting at position 2861 of SEQ ID NO: 1884144
gccuucggagguuauuauu

SEQ ID NO: 2243573 - RNA, 19 nt, Artificial Sequence
  Description of Artificial Sequence: Synthetic oligonucleotide
  Antisense strand to SEQ ID NO: 2243572
aauaauaaccuccgaaggc

SEQ ID NO: 2243574 - RNA, 19 nt, Artificial Sequence
  Description of Artificial Sequence: Synthetic oligonucleotide
  Sense strand starting at position 2979 of SEQ ID NO: 1884144
guuuauagaccuuggaguu

SEQ ID NO: 2243575 - RNA, 19 nt, Artificial Sequence
  Description of Artificial Sequence: Synthetic oligonucleotide
  Antisense strand to SEQ ID NO: 2243574
aacuccaaggucuauaaac

SEQ ID NO: 2243576 - RNA, 19 nt, Artificial Sequence
  Description of Artificial Sequence: Synthetic oligonucleotide
  Sense strand starting at position 3021 of SEQ ID NO: 1884144
guaaacaugugacuauauu

SEQ ID NO: 2243577 - RNA, 19 nt, Artificial Sequence
  Description of Artificial Sequence: Synthetic oligonucleotide
  Antisense strand to SEQ ID NO: 2243576
aauauagucacauguuuac

SEQ ID NO: 2243578 - RNA, 19 nt, Artificial Sequence
  Description of Artificial Sequence: Synthetic oligonucleotide
  Sense strand starting at position 3149 of SEQ ID NO: 1884144
ugaggaagucccuguauua

SEQ ID NO: 2243579 - RNA, 19 nt, Artificial Sequence
  Description of Artificial Sequence: Synthetic oligonucleotide
  Antisense strand to SEQ ID NO: 2243578
uaauacagggacuuccuca

SEQ ID NO: 2243580 - RNA, 19 nt, Artificial Sequence
  Description of Artificial Sequence: Synthetic oligonucleotide
  Sense strand starting at position 3253 of SEQ ID NO: 1884144
guaaucaagucuccugacu

SEQ ID NO: 2243581 - RNA, 19 nt, Artificial Sequence
  Description of Artificial Sequence: Synthetic oligonucleotide
  Antisense strand to SEQ ID NO: 2243580
agucaggagacuugauuac

SEQ ID NO: 2243582 - RNA, 19 nt, Artificial Sequence
  Description of Artificial Sequence: Synthetic oligonucleotide
  Sense strand starting at position 3326 of SEQ ID NO: 1884144
gcuguuaugagaggugaug

SEQ ID NO: 2243583 - RNA, 19 nt, Artificial Sequence
  Description of Artificial Sequence: Synthetic oligonucleotide
  Antisense strand to SEQ ID NO: 2243582
caucaccucucauaacagc

SEQ ID NO: 2243584 - RNA, 19 nt, Artificial Sequence
  Description of Artificial Sequence: Synthetic oligonucleotide
  Sense strand starting at position 3404 of SEQ ID NO: 1884144
gacugugaucagggucaga

SEQ ID NO: 2243585 - RNA, 19 nt, Artificial Sequence
  Description of Artificial Sequence: Synthetic oligonucleotide
  Antisense strand to SEQ ID NO: 2243584
ucugacccugaucacaguc

SEQ ID NO: 2243586 - RNA, 19 nt, Artificial Sequence
  Description of Artificial Sequence: Synthetic oligonucleotide
  Sense strand starting at position 3537 of SEQ ID NO: 1884144
cugggccaucacugguaaa

SEQ ID NO: 2243587 - RNA, 19 nt, Artificial Sequence
  Description of Artificial Sequence: Synthetic oligonucleotide
  Antisense strand to SEQ ID NO: 2243586
uuuaccagugauggcccag

SEQ ID NO: 2243588 - RNA, 19 nt, Artificial Sequence
  Description of Artificial Sequence: Synthetic oligonucleotide
  Sense strand starting at position 90 of SEQ ID NO: 1884145
cgcucagaccugggacaau

SEQ ID NO: 2243589 - RNA, 19 nt, Artificial Sequence
  Description of Artificial Sequence: Synthetic oligonucleotide
  Antisense strand to SEQ ID NO: 2243588
auugucccaggucugagcg

SEQ ID NO: 2243590 - RNA, 19 nt, Artificial Sequence
  Description of Artificial Sequence: Synthetic oligonucleotide
  Sense strand starting at position 106 of SEQ ID NO: 1884145
aauggcaucugcuuuggau

SEQ ID NO: 2243591 - RNA, 19 nt, Artificial Sequence
  Description of Artificial Sequence: Synthetic oligonucleotide
  Antisense strand to SEQ ID NO: 2243590
auccaaagcagaugccauu

SEQ ID NO: 2243592 - RNA, 19 nt, Artificial Sequence
  Description of Artificial Sequence: Synthetic oligonucleotide
  Sense strand starting at position 108 of SEQ ID NO: 1884145
uggcaucugcuuuggauaa

SEQ ID NO: 2243593 - RNA, 19 nt, Artificial Sequence
  Description of Artificial Sequence: Synthetic oligonucleotide
  Antisense strand to SEQ ID NO: 2243592
uuauccaaagcagaugcca

SEQ ID NO: 2243594 - RNA, 19 nt, Artificial Sequence
  Description of Artificial Sequence: Synthetic oligonucleotide
  Sense strand starting at position 110 of SEQ ID NO: 1884145
gcaucugcuuuggauaaga

SEQ ID NO: 2243595 - RNA, 19 nt, Artificial Sequence
  Description of Artificial Sequence: Synthetic oligonucleotide
  Antisense strand to SEQ ID NO: 2243594
ucuuauccaaagcagaugc

SEQ ID NO: 2243596 - RNA, 19 nt, Artificial Sequence
  Description of Artificial Sequence: Synthetic oligonucleotide
  Sense strand starting at position 404 of SEQ ID NO: 1884145
ugaaguacuugagcaugaa

SEQ ID NO: 2243597 - RNA, 19 nt, Artificial Sequence
  Description of Artificial Sequence: Synthetic oligonucleotide
  Antisense strand to SEQ ID NO: 2243596
uucaugcucaaguacuuca

SEQ ID NO: 2243598 - RNA, 19 nt, Artificial Sequence
  Description of Artificial Sequence: Synthetic oligonucleotide
  Sense strand starting at position 505 of SEQ ID NO: 1884145
cgguugugcugcucguaga

SEQ ID NO: 2243599 - RNA, 19 nt, Artificial Sequence
  Description of Artificial Sequence: Synthetic oligonucleotide
  Antisense strand to SEQ ID NO: 2243598
ucuacgagcagcacaaccg

SEQ ID NO: 2243600 - RNA, 19 nt, Artificial Sequence
  Description of Artificial Sequence: Synthetic oligonucleotide
  Sense strand starting at position 506 of SEQ ID NO: 1884145
gguugugcugcucguagaa

SEQ ID NO: 2243601 - RNA, 19 nt, Artificial Sequence
  Description of Artificial Sequence: Synthetic oligonucleotide
  Antisense strand to SEQ ID NO: 2243600
uucuacgagcagcacaacc

SEQ ID NO: 2243602 - RNA, 19 nt, Artificial Sequence
  Description of Artificial Sequence: Synthetic oligonucleotide
  Sense strand starting at position 508 of SEQ ID NO: 1884145
uugugcugcucguagaaga

SEQ ID NO: 2243603 - RNA, 19 nt, Artificial Sequence
  Description of Artificial Sequence: Synthetic oligonucleotide
  Antisense strand to SEQ ID NO: 2243602
ucuucuacgagcagcacaa

SEQ ID NO: 2243604 - RNA, 19 nt, Artificial Sequence
  Description of Artificial Sequence: Synthetic oligonucleotide
  Sense strand starting at position 632 of SEQ ID NO: 1884145
gcuugaugaccgagcggau

SEQ ID NO: 2243605 - RNA, 19 nt, Artificial Sequence
  Description of Artificial Sequence: Synthetic oligonucleotide
  Antisense strand to SEQ ID NO: 2243604
auccgcucggucaucaagc

SEQ ID NO: 2243606 - RNA, 19 nt, Artificial Sequence
  Description of Artificial Sequence: Synthetic oligonucleotide
  Sense strand starting at position 1265 of SEQ ID NO: 1884145
gcuccaugucgauaaggaa

SEQ ID NO: 2243607 - RNA, 19 nt, Artificial Sequence
  Description of Artificial Sequence: Synthetic oligonucleotide
  Antisense strand to SEQ ID NO: 2243606
uuccuuaucgacauggagc

SEQ ID NO: 2243608 - RNA, 19 nt, Artificial Sequence
  Description of Artificial Sequence: Synthetic oligonucleotide
  Sense strand starting at position 1356 of SEQ ID NO: 1884145
gcgcucguccuggcugaaa

SEQ ID NO: 2243609 - RNA, 19 nt, Artificial Sequence
  Description of Artificial Sequence: Synthetic oligonucleotide
  Antisense strand to SEQ ID NO: 2243608
uuucagccaggacgagcgc

SEQ ID NO: 2243610 - RNA, 19 nt, Artificial Sequence
  Description of Artificial Sequence: Synthetic oligonucleotide
  Sense strand starting at position 1415 of SEQ ID NO: 1884145
cugucuugacgcgguugua

SEQ ID NO: 2243611 - RNA, 19 nt, Artificial Sequence
  Description of Artificial Sequence: Synthetic oligonucleotide
  Antisense strand to SEQ ID NO: 2243610
uacaaccgcgucaagacag

SEQ ID NO: 2243612 - RNA, 19 nt, Artificial Sequence
  Description of Artificial Sequence: Synthetic oligonucleotide
  Sense strand starting at position 1417 of SEQ ID NO: 1884145
gucuugacgcgguuguaga

SEQ ID NO: 2243613 - RNA, 19 nt, Artificial Sequence
  Description of Artificial Sequence: Synthetic oligonucleotide
  Antisense strand to SEQ ID NO: 2243612
ucuacaaccgcgucaagac

SEQ ID NO: 2243614 - RNA, 19 nt, Artificial Sequence
  Description of Artificial Sequence: Synthetic oligonucleotide
  Sense strand starting at position 1877 of SEQ ID NO: 1884145
uguaguccucuaggcagau

SEQ ID NO: 2243615 - RNA, 19 nt, Artificial Sequence
  Description of Artificial Sequence: Synthetic oligonucleotide
  Antisense strand to SEQ ID NO: 2243614
aucugccuagaggacuaca

SEQ ID NO: 2243616 - RNA, 19 nt, Artificial Sequence
  Description of Artificial Sequence: Synthetic oligonucleotide
  Sense strand starting at position 1889 of SEQ ID NO: 1884145
ggcagaugggcguguacau

SEQ ID NO: 2243617 - RNA, 19 nt, Artificial Sequence
  Description of Artificial Sequence: Synthetic oligonucleotide
  Antisense strand to SEQ ID NO: 2243616
auguacacgcccaucugcc

SEQ ID NO: 2243618 - RNA, 19 nt, Artificial Sequence
  Description of Artificial Sequence: Synthetic oligonucleotide
  Sense strand starting at position 1991 of SEQ ID NO: 1884145
cuugcgugucgugguugaa

SEQ ID NO: 2243619 - RNA, 19 nt, Artificial Sequence
  Description of Artificial Sequence: Synthetic oligonucleotide
  Antisense strand to SEQ ID NO: 2243618
uucaaccacgacacgcaag

SEQ ID NO: 2243620 - RNA, 19 nt, Artificial Sequence
  Description of Artificial Sequence: Synthetic oligonucleotide
  Sense strand starting at position 2003 of SEQ ID NO: 1884145
gguugaacugauugggcau

SEQ ID NO: 2243621 - RNA, 19 nt, Artificial Sequence
  Description of Artificial Sequence: Synthetic oligonucleotide
  Antisense strand to SEQ ID NO: 2243620
augcccaaucaguucaacc

SEQ ID NO: 2243622 - RNA, 19 nt, Artificial Sequence
  Description of Artificial Sequence: Synthetic oligonucleotide
  Sense strand starting at position 2006 of SEQ ID NO: 1884145
ugaacugauugggcaugua

SEQ ID NO: 2243623 - RNA, 19 nt, Artificial Sequence
  Description of Artificial Sequence: Synthetic oligonucleotide
  Antisense strand to SEQ ID NO: 2243622
uacaugcccaaucaguuca

SEQ ID NO: 2243624 - RNA, 19 nt, Artificial Sequence
  Description of Artificial Sequence: Synthetic oligonucleotide
  Sense strand starting at position 2018 of SEQ ID NO: 1884145
gcauguagguguaguugua

SEQ ID NO: 2243625 - RNA, 19 nt, Artificial Sequence
  Description of Artificial Sequence: Synthetic oligonucleotide
  Antisense strand to SEQ ID NO: 2243624
uacaacuacaccuacaugc

SEQ ID NO: 2243626 - RNA, 19 nt, Artificial Sequence
  Description of Artificial Sequence: Synthetic oligonucleotide
  Sense strand starting at position 2148 of SEQ ID NO: 1884145
ggucacuuccaacagguaa

SEQ ID NO: 2243627 - RNA, 19 nt, Artificial Sequence
  Description of Artificial Sequence: Synthetic oligonucleotide
  Antisense strand to SEQ ID NO: 2243626
uuaccuguuggaagugacc

SEQ ID NO: 2243628 - RNA, 19 nt, Artificial Sequence
  Description of Artificial Sequence: Synthetic oligonucleotide
  Sense strand starting at position 2631 of SEQ ID NO: 1884145
cgcggugcgcagucaagau

SEQ ID NO: 2243629 - RNA, 19 nt, Artificial Sequence
  Description of Artificial Sequence: Synthetic oligonucleotide
  Antisense strand to SEQ ID NO: 2243628
aucuugacugcgcaccgcg

SEQ ID NO: 2243630 - RNA, 19 nt, Artificial Sequence
  Description of Artificial Sequence: Synthetic oligonucleotide
  Sense strand starting at position 3220 of SEQ ID NO: 1884145
uugguaaccuugggauuga

SEQ ID NO: 2243631 - RNA, 19 nt, Artificial Sequence
  Description of Artificial Sequence: Synthetic oligonucleotide
  Antisense strand to SEQ ID NO: 2243630
ucaaucccaagguuaccaa

SEQ ID NO: 2243632 - RNA, 19 nt, Artificial Sequence
  Description of Artificial Sequence: Synthetic oligonucleotide
  Sense strand starting at position 3250 of SEQ ID NO: 1884145
gaguguuggccauggcugu

SEQ ID NO: 2243633 - RNA, 19 nt, Artificial Sequence
  Description of Artificial Sequence: Synthetic oligonucleotide
  Antisense strand to SEQ ID NO: 2243632
acagccauggccaacacuc

SEQ ID NO: 2243634 - RNA, 19 nt, Artificial Sequence
  Description of Artificial Sequence: Synthetic oligonucleotide
  Sense strand starting at position 3402 of SEQ ID NO: 1884145
ccgcaaaugugggugaucu

SEQ ID NO: 2243635 - RNA, 19 nt, Artificial Sequence
  Description of Artificial Sequence: Synthetic oligonucleotide
  Antisense strand to SEQ ID NO: 2243634
agaucacccacauuugcgg

SEQ ID NO: 2243636 - RNA, 19 nt, Artificial Sequence
  Description of Artificial Sequence: Synthetic oligonucleotide
  Sense strand starting at position 3403 of SEQ ID NO: 1884145
cgcaaaugugggugaucug

SEQ ID NO: 2243637 - RNA, 19 nt, Artificial Sequence
  Description of Artificial Sequence: Synthetic oligonucleotide
  Antisense strand to SEQ ID NO: 2243636
cagaucacccacauuugcg

SEQ ID NO: 2243638 - RNA, 19 nt, Artificial Sequence
  Description of Artificial Sequence: Synthetic oligonucleotide
  Sense strand starting at position 3541 of SEQ ID NO: 1884145
gguucucagaacgaugguu

SEQ ID NO: 2243639 - RNA, 19 nt, Artificial Sequence
  Description of Artificial Sequence: Synthetic oligonucleotide
  Antisense strand to SEQ ID NO: 2243638
aaccaucguucugagaacc

SEQ ID NO: 2243640 - RNA, 19 nt, Artificial Sequence
  Description of Artificial Sequence: Synthetic oligonucleotide
  Sense strand starting at position 3549 of SEQ ID NO: 1884145
gaacgaugguuucugagac

SEQ ID NO: 2243641 - RNA, 19 nt, Artificial Sequence
  Description of Artificial Sequence: Synthetic oligonucleotide
  Antisense strand to SEQ ID NO: 2243640
gucucagaaaccaucguuc

SEQ ID NO: 2243642 - RNA, 19 nt, Artificial Sequence
  Description of Artificial Sequence: Synthetic oligonucleotide
  Sense strand starting at position 3550 of SEQ ID NO: 1884145
aacgaugguuucugagacu

SEQ ID NO: 2243643 - RNA, 19 nt, Artificial Sequence
  Description of Artificial Sequence: Synthetic oligonucleotide
  Antisense strand to SEQ ID NO: 2243642
agucucagaaaccaucguu

SEQ ID NO: 2243644 - RNA, 19 nt, Artificial Sequence
  Description of Artificial Sequence: Synthetic oligonucleotide
  Sense strand starting at position 3557 of SEQ ID NO: 1884145
guuucugagacuuggagau

SEQ ID NO: 2243645 - RNA, 19 nt, Artificial Sequence
  Description of Artificial Sequence: Synthetic oligonucleotide
  Antisense strand to SEQ ID NO: 2243644
aucuccaagucucagaaac

SEQ ID NO: 2243646 - RNA, 19 nt, Artificial Sequence
  Description of Artificial Sequence: Synthetic oligonucleotide
  Sense strand starting at position 3559 of SEQ ID NO: 1884145
uucugagacuuggagaugu

SEQ ID NO: 2243647 - RNA, 19 nt, Artificial Sequence
  Description of Artificial Sequence: Synthetic oligonucleotide
  Antisense strand to SEQ ID NO: 2243646
acaucuccaagucucagaa

SEQ ID NO: 2243648 - RNA, 19 nt, Artificial Sequence
  Description of Artificial Sequence: Synthetic oligonucleotide
  Sense strand starting at position 3743 of SEQ ID NO: 1884145
uagagaguugggugaucau

SEQ ID NO: 2243649 - RNA, 19 nt, Artificial Sequence
  Description of Artificial Sequence: Synthetic oligonucleotide
  Antisense strand to SEQ ID NO: 2243648
augaucacccaacucucua

SEQ ID NO: 2243650 - RNA, 19 nt, Artificial Sequence
  Description of Artificial Sequence: Synthetic oligonucleotide
  Sense strand starting at position 3752 of SEQ ID NO: 1884145
gggugaucauagcacagau

SEQ ID NO: 2243651 - RNA, 19 nt, Artificial Sequence
  Description of Artificial Sequence: Synthetic oligonucleotide
  Antisense strand to SEQ ID NO: 2243650
aucugugcuaugaucaccc

SEQ ID NO: 2243652 - RNA, 19 nt, Artificial Sequence
  Description of Artificial Sequence: Synthetic oligonucleotide
  Sense strand starting at position 3780 of SEQ ID NO: 1884145
ggcuuugauaauuagguga

SEQ ID NO: 2243653 - RNA, 19 nt, Artificial Sequence
  Description of Artificial Sequence: Synthetic oligonucleotide
  Antisense strand to SEQ ID NO: 2243652
ucaccuaauuaucaaagcc

SEQ ID NO: 2243654 - RNA, 19 nt, Artificial Sequence
  Description of Artificial Sequence: Synthetic oligonucleotide
  Sense strand starting at position 3782 of SEQ ID NO: 1884145
cuuugauaauuaggugaga

SEQ ID NO: 2243655 - RNA, 19 nt, Artificial Sequence
  Description of Artificial Sequence: Synthetic oligonucleotide
  Antisense strand to SEQ ID NO: 2243654
ucucaccuaauuaucaaag

SEQ ID NO: 2243656 - RNA, 19 nt, Artificial Sequence
  Description of Artificial Sequence: Synthetic oligonucleotide
  Sense strand starting at position 3783 of SEQ ID NO: 1884145
uuugauaauuaggugagau

SEQ ID NO: 2243657 - RNA, 19 nt, Artificial Sequence
  Description of Artificial Sequence: Synthetic oligonucleotide
  Antisense strand to SEQ ID NO: 2243656
aucucaccuaauuaucaaa

SEQ ID NO: 2243658 - RNA, 19 nt, Artificial Sequence
  Description of Artificial Sequence: Synthetic oligonucleotide
  Sense strand starting at position 3823 of SEQ ID NO: 1884145
cgccgugcuuucuuaggaa

SEQ ID NO: 2243659 - RNA, 19 nt, Artificial Sequence
  Description of Artificial Sequence: Synthetic oligonucleotide
  Antisense strand to SEQ ID NO: 2243658
uuccuaagaaagcacggcg

SEQ ID NO: 2243660 - RNA, 19 nt, Artificial Sequence
  Description of Artificial Sequence: Synthetic oligonucleotide
  Sense strand starting at position 3877 of SEQ ID NO: 1884145
ccucgaaacuuauaaauag

SEQ ID NO: 2243661 - RNA, 19 nt, Artificial Sequence
  Description of Artificial Sequence: Synthetic oligonucleotide
  Antisense strand to SEQ ID NO: 2243660
cuauuuauaaguuucgagg

SEQ ID NO: 2243662 - RNA, 19 nt, Artificial Sequence
  Description of Artificial Sequence: Synthetic oligonucleotide
  Sense strand starting at position 71 of SEQ ID NO: 1884146
gcguccugugcucuaggaa

SEQ ID NO: 2243663 - RNA, 19 nt, Artificial Sequence
  Description of Artificial Sequence: Synthetic oligonucleotide
  Antisense strand to SEQ ID NO: 2243662
uuccuagagcacaggacgc

SEQ ID NO: 2243664 - RNA, 19 nt, Artificial Sequence
  Description of Artificial Sequence: Synthetic oligonucleotide
  Sense strand starting at position 660 of SEQ ID NO: 1884146
gugugugguccucagacuu

SEQ ID NO: 2243665 - RNA, 19 nt, Artificial Sequence
  Description of Artificial Sequence: Synthetic oligonucleotide
  Antisense strand to SEQ ID NO: 2243664
aagucugaggaccacacac

SEQ ID NO: 2243666 - RNA, 19 nt, Artificial Sequence
  Description of Artificial Sequence: Synthetic oligonucleotide
  Sense strand starting at position 701 of SEQ ID NO: 1884146
gucuguucuguggaaauuc

SEQ ID NO: 2243667 - RNA, 19 nt, Artificial Sequence
  Description of Artificial Sequence: Synthetic oligonucleotide
  Antisense strand to SEQ ID NO: 2243666
gaauuuccacagaacagac

SEQ ID NO: 2243668 - RNA, 19 nt, Artificial Sequence
  Description of Artificial Sequence: Synthetic oligonucleotide
  Sense strand starting at position 829 of SEQ ID NO: 1884146
ccagguucugugggaacca

SEQ ID NO: 2243669 - RNA, 19 nt, Artificial Sequence
  Description of Artificial Sequence: Synthetic oligonucleotide
  Antisense strand to SEQ ID NO: 2243668
ugguucccacagaaccugg

SEQ ID NO: 2243670 - RNA, 19 nt, Artificial Sequence
  Description of Artificial Sequence: Synthetic oligonucleotide
  Sense strand starting at position 875 of SEQ ID NO: 1884146
agaaguagaugcuuuguua

SEQ ID NO: 2243671 - RNA, 19 nt, Artificial Sequence
  Description of Artificial Sequence: Synthetic oligonucleotide
  Antisense strand to SEQ ID NO: 2243670
uaacaaagcaucuacuucu

SEQ ID NO: 2243672 - RNA, 19 nt, Artificial Sequence
  Description of Artificial Sequence: Synthetic oligonucleotide
  Sense strand starting at position 1024 of SEQ ID NO: 1884146
ccaugugcacuccagaauu

SEQ ID NO: 2243673 - RNA, 19 nt, Artificial Sequence
  Description of Artificial Sequence: Synthetic oligonucleotide
  Antisense strand to SEQ ID NO: 2243672
aauucuggagugcacaugg

SEQ ID NO: 2243674 - RNA, 19 nt, Artificial Sequence
  Description of Artificial Sequence: Synthetic oligonucleotide
  Sense strand starting at position 1051 of SEQ ID NO: 1884146
aucugaaagcagugggaaa

SEQ ID NO: 2243675 - RNA, 19 nt, Artificial Sequence
  Description of Artificial Sequence: Synthetic oligonucleotide
  Antisense strand to SEQ ID NO: 2243674
uuucccacugcuuucagau

SEQ ID NO: 2243676 - RNA, 19 nt, Artificial Sequence
  Description of Artificial Sequence: Synthetic oligonucleotide
  Sense strand starting at position 1092 of SEQ ID NO: 1884146
ccagaauugugacuuagaa

SEQ ID NO: 2243677 - RNA, 19 nt, Artificial Sequence
  Description of Artificial Sequence: Synthetic oligonucleotide
  Antisense strand to SEQ ID NO: 2243676
uucuaagucacaauucugg

SEQ ID NO: 2243678 - RNA, 19 nt, Artificial Sequence
  Description of Artificial Sequence: Synthetic oligonucleotide
  Sense strand starting at position 1191 of SEQ ID NO: 1884146
ccagaaagcugcccugaga

SEQ ID NO: 2243679 - RNA, 19 nt, Artificial Sequence
  Description of Artificial Sequence: Synthetic oligonucleotide
  Antisense strand to SEQ ID NO: 2243678
ucucagggcagcuuucugg

SEQ ID NO: 2243680 - RNA, 19 nt, Artificial Sequence
  Description of Artificial Sequence: Synthetic oligonucleotide
  Sense strand starting at position 1200 of SEQ ID NO: 1884146
ugcccugagaccugaaugu

SEQ ID NO: 2243681 - RNA, 19 nt, Artificial Sequence
  Description of Artificial Sequence: Synthetic oligonucleotide
  Antisense strand to SEQ ID NO: 2243680
acauucaggucucagggca

SEQ ID NO: 2243682 - RNA, 19 nt, Artificial Sequence
  Description of Artificial Sequence: Synthetic oligonucleotide
  Sense strand starting at position 1553 of SEQ ID NO: 1884146
gaaguucuagauugagacu

SEQ ID NO: 2243683 - RNA, 19 nt, Artificial Sequence
  Description of Artificial Sequence: Synthetic oligonucleotide
  Antisense strand to SEQ ID NO: 2243682
agucucaaucuagaacuuc

SEQ ID NO: 2243684 - RNA, 19 nt, Artificial Sequence
  Description of Artificial Sequence: Synthetic oligonucleotide
  Sense strand starting at position 1569 of SEQ ID NO: 1884146
acucuaagacaguguucca

SEQ ID NO: 2243685 - RNA, 19 nt, Artificial Sequence
  Description of Artificial Sequence: Synthetic oligonucleotide
  Antisense strand to SEQ ID NO: 2243684
uggaacacugucuuagagu

SEQ ID NO: 2243686 - RNA, 19 nt, Artificial Sequence
  Description of Artificial Sequence: Synthetic oligonucleotide
  Sense strand starting at position 1576 of SEQ ID NO: 1884146
gacaguguuccaggaagga

SEQ ID NO: 2243687 - RNA, 19 nt, Artificial Sequence
  Description of Artificial Sequence: Synthetic oligonucleotide
  Antisense strand to SEQ ID NO: 2243686
uccuuccuggaacacuguc

SEQ ID NO: 2243688 - RNA, 19 nt, Artificial Sequence
  Description of Artificial Sequence: Synthetic oligonucleotide
  Sense strand starting at position 1762 of SEQ ID NO: 1884146
ugagcucaccuagaguaga

SEQ ID NO: 2243689 - RNA, 19 nt, Artificial Sequence
  Description of Artificial Sequence: Synthetic oligonucleotide
  Antisense strand to SEQ ID NO: 2243688
ucuacucuaggugagcuca

SEQ ID NO: 2243690 - RNA, 19 nt, Artificial Sequence
  Description of Artificial Sequence: Synthetic oligonucleotide
  Sense strand starting at position 2094 of SEQ ID NO: 1884146
gaggcuuacugucugguca

SEQ ID NO: 2243691 - RNA, 19 nt, Artificial Sequence
  Description of Artificial Sequence: Synthetic oligonucleotide
  Antisense strand to SEQ ID NO: 2243690
ugaccagacaguaagccuc

SEQ ID NO: 2243692 - RNA, 19 nt, Artificial Sequence
  Description of Artificial Sequence: Synthetic oligonucleotide
  Sense strand starting at position 2101 of SEQ ID NO: 1884146
acugucuggucacuagacu

SEQ ID NO: 2243693 - RNA, 19 nt, Artificial Sequence
  Description of Artificial Sequence: Synthetic oligonucleotide
  Antisense strand to SEQ ID NO: 2243692
agucuagugaccagacagu

SEQ ID NO: 2243694 - RNA, 19 nt, Artificial Sequence
  Description of Artificial Sequence: Synthetic oligonucleotide
  Sense strand starting at position 2112 of SEQ ID NO: 1884146
acuagacuccaguggauga

SEQ ID NO: 2243695 - RNA, 19 nt, Artificial Sequence
  Description of Artificial Sequence: Synthetic oligonucleotide
  Antisense strand to SEQ ID NO: 2243694
ucauccacuggagucuagu

SEQ ID NO: 2243696 - RNA, 19 nt, Artificial Sequence
  Description of Artificial Sequence: Synthetic oligonucleotide
  Sense strand starting at position 2157 of SEQ ID NO: 1884146
guaagugccauuuguaagu

SEQ ID NO: 2243697 - RNA, 19 nt, Artificial Sequence
  Description of Artificial Sequence: Synthetic oligonucleotide
  Antisense strand to SEQ ID NO: 2243696
acuuacaaauggcacuuac

SEQ ID NO: 2243698 - RNA, 19 nt, Artificial Sequence
  Description of Artificial Sequence: Synthetic oligonucleotide
  Sense strand starting at position 2162 of SEQ ID NO: 1884146
ugccauuuguaaguaagca

SEQ ID NO: 2243699 - RNA, 19 nt, Artificial Sequence
  Description of Artificial Sequence: Synthetic oligonucleotide
  Antisense strand to SEQ ID NO: 2243698
ugcuuacuuacaaauggca

SEQ ID NO: 2243700 - RNA, 19 nt, Artificial Sequence
  Description of Artificial Sequence: Synthetic oligonucleotide
  Sense strand starting at position 2258 of SEQ ID NO: 1884146
ccugaauuaggucaccuuu

SEQ ID NO: 2243701 - RNA, 19 nt, Artificial Sequence
  Description of Artificial Sequence: Synthetic oligonucleotide
  Antisense strand to SEQ ID NO: 2243700
aaaggugaccuaauucagg

SEQ ID NO: 2243702 - RNA, 19 nt, Artificial Sequence
  Description of Artificial Sequence: Synthetic oligonucleotide
  Sense strand starting at position 2260 of SEQ ID NO: 1884146
ugaauuaggucaccuuuaa

SEQ ID NO: 2243703 - RNA, 19 nt, Artificial Sequence
  Description of Artificial Sequence: Synthetic oligonucleotide
  Antisense strand to SEQ ID NO: 2243702
uuaaaggugaccuaauuca

SEQ ID NO: 2243704 - RNA, 19 nt, Artificial Sequence
  Description of Artificial Sequence: Synthetic oligonucleotide
  Sense strand starting at position 2672 of SEQ ID NO: 1884146
gcagcuaaugacuaucaua

SEQ ID NO: 2243705 - RNA, 19 nt, Artificial Sequence
  Description of Artificial Sequence: Synthetic oligonucleotide
  Antisense strand to SEQ ID NO: 2243704
uaugauagucauuagcugc

SEQ ID NO: 2243706 - RNA, 19 nt, Artificial Sequence
  Description of Artificial Sequence: Synthetic oligonucleotide
  Sense strand starting at position 2751 of SEQ ID NO: 1884146
ucaguaagcguggacaaga

SEQ ID NO: 2243707 - RNA, 19 nt, Artificial Sequence
  Description of Artificial Sequence: Synthetic oligonucleotide
  Antisense strand to SEQ ID NO: 2243706
ucuuguccacgcuuacuga

SEQ ID NO: 2243708 - RNA, 19 nt, Artificial Sequence
  Description of Artificial Sequence: Synthetic oligonucleotide
  Sense strand starting at position 2789 of SEQ ID NO: 1884146
gagugaaauaggcagcgau

SEQ ID NO: 2243709 - RNA, 19 nt, Artificial Sequence
  Description of Artificial Sequence: Synthetic oligonucleotide
  Antisense strand to SEQ ID NO: 2243708
aucgcugccuauuucacuc

SEQ ID NO: 2243710 - RNA, 19 nt, Artificial Sequence
  Description of Artificial Sequence: Synthetic oligonucleotide
  Sense strand starting at position 2792 of SEQ ID NO: 1884146
ugaaauaggcagcgauaga

SEQ ID NO: 2243711 - RNA, 19 nt, Artificial Sequence
  Description of Artificial Sequence: Synthetic oligonucleotide
  Antisense strand to SEQ ID NO: 2243710
ucuaucgcugccuauuuca

SEQ ID NO: 2243712 - RNA, 19 nt, Artificial Sequence
  Description of Artificial Sequence: Synthetic oligonucleotide
  Sense strand starting at position 2793 of SEQ ID NO: 1884146
gaaauaggcagcgauagau

SEQ ID NO: 2243713 - RNA, 19 nt, Artificial Sequence
  Description of Artificial Sequence: Synthetic oligonucleotide
  Antisense strand to SEQ ID NO: 2243712
aucuaucgcugccuauuuc

SEQ ID NO: 2243714 - RNA, 19 nt, Artificial Sequence
  Description of Artificial Sequence: Synthetic oligonucleotide
  Sense strand starting at position 2821 of SEQ ID NO: 1884146
ccugguaggcuugggaaga

SEQ ID NO: 2243715 - RNA, 19 nt, Artificial Sequence
  Description of Artificial Sequence: Synthetic oligonucleotide
  Antisense strand to SEQ ID NO: 2243714
ucuucccaagccuaccagg

SEQ ID NO: 2243716 - RNA, 19 nt, Artificial Sequence
  Description of Artificial Sequence: Synthetic oligonucleotide
  Sense strand starting at position 2962 of SEQ ID NO: 1884146
gcaccaggauucuuuauua

SEQ ID NO: 2243717 - RNA, 19 nt, Artificial Sequence
  Description of Artificial Sequence: Synthetic oligonucleotide
  Antisense strand to SEQ ID NO: 2243716
uaauaaagaauccuggugc

SEQ ID NO: 2243718 - RNA, 19 nt, Artificial Sequence
  Description of Artificial Sequence: Synthetic oligonucleotide
  Sense strand starting at position 3011 of SEQ ID NO: 1884146
ccucaagggcagugaauau

SEQ ID NO: 2243719 - RNA, 19 nt, Artificial Sequence
  Description of Artificial Sequence: Synthetic oligonucleotide
  Antisense strand to SEQ ID NO: 2243718
auauucacugcccuugagg

SEQ ID NO: 2243720 - RNA, 19 nt, Artificial Sequence
  Description of Artificial Sequence: Synthetic oligonucleotide
  Sense strand starting at position 3085 of SEQ ID NO: 1884146
guacuauauguuuauugga

SEQ ID NO: 2243721 - RNA, 19 nt, Artificial Sequence
  Description of Artificial Sequence: Synthetic oligonucleotide
  Antisense strand to SEQ ID NO: 2243720
uccaauaaacauauaguac

SEQ ID NO: 2243722 - RNA, 19 nt, Artificial Sequence
  Description of Artificial Sequence: Synthetic oligonucleotide
  Sense strand starting at position 3087 of SEQ ID NO: 1884146
acuauauguuuauuggaag

SEQ ID NO: 2243723 - RNA, 19 nt, Artificial Sequence
  Description of Artificial Sequence: Synthetic oligonucleotide
  Antisense strand to SEQ ID NO: 2243722
cuuccaauaaacauauagu

SEQ ID NO: 2243724 - RNA, 19 nt, Artificial Sequence
  Description of Artificial Sequence: Synthetic oligonucleotide
  Sense strand starting at position 3284 of SEQ ID NO: 1884146
uuuagaguuucuucuuauc

SEQ ID NO: 2243725 - RNA, 19 nt, Artificial Sequence
  Description of Artificial Sequence: Synthetic oligonucleotide
  Antisense strand to SEQ ID NO: 2243724
gauaagaagaaacucuaaa

SEQ ID NO: 2243726 - RNA, 19 nt, Artificial Sequence
  Description of Artificial Sequence: Synthetic oligonucleotide
  Sense strand starting at position 3392 of SEQ ID NO: 1884146
gggaucuaaaucuguuggu

SEQ ID NO: 2243727 - RNA, 19 nt, Artificial Sequence
  Description of Artificial Sequence: Synthetic oligonucleotide
  Antisense strand to SEQ ID NO: 2243726
accaacagauuuagauccc

SEQ ID NO: 2243728 - RNA, 19 nt, Artificial Sequence
  Description of Artificial Sequence: Synthetic oligonucleotide
  Sense strand starting at position 3396 of SEQ ID NO: 1884146
ucuaaaucuguuggugauu

SEQ ID NO: 2243729 - RNA, 19 nt, Artificial Sequence
  Description of Artificial Sequence: Synthetic oligonucleotide
  Antisense strand to SEQ ID NO: 2243728
aaucaccaacagauuuaga

SEQ ID NO: 2243730 - RNA, 19 nt, Artificial Sequence
  Description of Artificial Sequence: Synthetic oligonucleotide
  Sense strand starting at position 3399 of SEQ ID NO: 1884146
aaaucuguuggugauugau

SEQ ID NO: 2243731 - RNA, 19 nt, Artificial Sequence
  Description of Artificial Sequence: Synthetic oligonucleotide
  Antisense strand to SEQ ID NO: 2243730
aucaaucaccaacagauuu

SEQ ID NO: 2243732 - RNA, 19 nt, Artificial Sequence
  Description of Artificial Sequence: Synthetic oligonucleotide
  Sense strand starting at position 3473 of SEQ ID NO: 1884146
uugugaguucacguuuguu

SEQ ID NO: 2243733 - RNA, 19 nt, Artificial Sequence
  Description of Artificial Sequence: Synthetic oligonucleotide
  Antisense strand to SEQ ID NO: 2243732
aacaaacgugaacucacaa

SEQ ID NO: 2243734 - RNA, 19 nt, Artificial Sequence
  Description of Artificial Sequence: Synthetic oligonucleotide
  Sense strand starting at position 3475 of SEQ ID NO: 1884146
gugaguucacguuuguuug

SEQ ID NO: 2243735 - RNA, 19 nt, Artificial Sequence
  Description of Artificial Sequence: Synthetic oligonucleotide
  Antisense strand to SEQ ID NO: 2243734
caaacaaacgugaacucac

SEQ ID NO: 2243736 - RNA, 19 nt, Artificial Sequence
  Description of Artificial Sequence: Synthetic oligonucleotide
  Sense strand starting at position 3486 of SEQ ID NO: 1884146
uuuguuugaucuuuaccuu

SEQ ID NO: 2243737 - RNA, 19 nt, Artificial Sequence
  Description of Artificial Sequence: Synthetic oligonucleotide
  Antisense strand to SEQ ID NO: 2243736
aagguaaagaucaaacaaa

SEQ ID NO: 2243738 - RNA, 19 nt, Artificial Sequence
  Description of Artificial Sequence: Synthetic oligonucleotide
  Sense strand starting at position 3487 of SEQ ID NO: 1884146
uuguuugaucuuuaccuuu

SEQ ID NO: 2243739 - RNA, 19 nt, Artificial Sequence
  Description of Artificial Sequence: Synthetic oligonucleotide
  Antisense strand to SEQ ID NO: 2243738
aaagguaaagaucaaacaa

SEQ ID NO: 2243740 - RNA, 19 nt, Artificial Sequence
  Description of Artificial Sequence: Synthetic oligonucleotide
  Sense strand starting at position 3637 of SEQ ID NO: 1884146
ggccgagugggcagaucau

SEQ ID NO: 2243741 - RNA, 19 nt, Artificial Sequence
  Description of Artificial Sequence: Synthetic oligonucleotide
  Antisense strand to SEQ ID NO: 2243740
augaucugcccacucggcc

SEQ ID NO: 2243742 - RNA, 19 nt, Artificial Sequence
  Description of Artificial Sequence: Synthetic oligonucleotide
  Sense strand starting at position 178 of SEQ ID NO: 1884147
cuugaaggcaucugagaca

SEQ ID NO: 2243743 - RNA, 19 nt, Artificial Sequence
  Description of Artificial Sequence: Synthetic oligonucleotide
  Antisense strand to SEQ ID NO: 2243742
ugucucagaugccuucaag

SEQ ID NO: 2243744 - RNA, 19 nt, Artificial Sequence
  Description of Artificial Sequence: Synthetic oligonucleotide
  Sense strand starting at position 185 of SEQ ID NO: 1884147
gcaucugagacaugcugau

SEQ ID NO: 2243745 - RNA, 19 nt, Artificial Sequence
  Description of Artificial Sequence: Synthetic oligonucleotide
  Antisense strand to SEQ ID NO: 2243744
aucagcaugucucagaugc

SEQ ID NO: 2243746 - RNA, 19 nt, Artificial Sequence
  Description of Artificial Sequence: Synthetic oligonucleotide
  Sense strand starting at position 765 of SEQ ID NO: 1884147
ugaggagacugcucucaca

SEQ ID NO: 2243747 - RNA, 19 nt, Artificial Sequence
  Description of Artificial Sequence: Synthetic oligonucleotide
  Antisense strand to SEQ ID NO: 2243746
ugugagagcagucuccuca

SEQ ID NO: 2243748 - RNA, 19 nt, Artificial Sequence
  Description of Artificial Sequence: Synthetic oligonucleotide
  Sense strand starting at position 845 of SEQ ID NO: 1884147
gcagcuugagugucuuagu

SEQ ID NO: 2243749 - RNA, 19 nt, Artificial Sequence
  Description of Artificial Sequence: Synthetic oligonucleotide
  Antisense strand to SEQ ID NO: 2243748
acuaagacacucaagcugc

SEQ ID NO: 2243750 - RNA, 19 nt, Artificial Sequence
  Description of Artificial Sequence: Synthetic oligonucleotide
  Sense strand starting at position 852 of SEQ ID NO: 1884147
gagugucuuagucagguuu

SEQ ID NO: 2243751 - RNA, 19 nt, Artificial Sequence
  Description of Artificial Sequence: Synthetic oligonucleotide
  Antisense strand to SEQ ID NO: 2243750
aaaccugacuaagacacuc

SEQ ID NO: 2243752 - RNA, 19 nt, Artificial Sequence
  Description of Artificial Sequence: Synthetic oligonucleotide
  Sense strand starting at position 905 of SEQ ID NO: 1884147
cuuucuccacagugacaua

SEQ ID NO: 2243753 - RNA, 19 nt, Artificial Sequence
  Description of Artificial Sequence: Synthetic oligonucleotide
  Antisense strand to SEQ ID NO: 2243752
uaugucacuguggagaaag

SEQ ID NO: 2243754 - RNA, 19 nt, Artificial Sequence
  Description of Artificial Sequence: Synthetic oligonucleotide
  Sense strand starting at position 971 of SEQ ID NO: 1884147
cuaagugcuggcugaggaa

SEQ ID NO: 2243755 - RNA, 19 nt, Artificial Sequence
  Description of Artificial Sequence: Synthetic oligonucleotide
  Antisense strand to SEQ ID NO: 2243754
uuccucagccagcacuuag

SEQ ID NO: 2243756 - RNA, 19 nt, Artificial Sequence
  Description of Artificial Sequence: Synthetic oligonucleotide
  Sense strand starting at position 1142 of SEQ ID NO: 1884147
guguuuauuaaaggagaug

SEQ ID NO: 2243757 - RNA, 19 nt, Artificial Sequence
  Description of Artificial Sequence: Synthetic oligonucleotide
  Antisense strand to SEQ ID NO: 2243756
caucuccuuuaauaaacac

SEQ ID NO: 2243758 - RNA, 19 nt, Artificial Sequence
  Description of Artificial Sequence: Synthetic oligonucleotide
  Sense strand starting at position 1184 of SEQ ID NO: 1884147
gauaguggagucugagaag

SEQ ID NO: 2243759 - RNA, 19 nt, Artificial Sequence
  Description of Artificial Sequence: Synthetic oligonucleotide
  Antisense strand to SEQ ID NO: 2243758
cuucucagacuccacuauc

SEQ ID NO: 2243760 - RNA, 19 nt, Artificial Sequence
  Description of Artificial Sequence: Synthetic oligonucleotide
  Sense strand starting at position 1236 of SEQ ID NO: 1884147
aggagagcugauggaguuu

SEQ ID NO: 2243761 - RNA, 19 nt, Artificial Sequence
  Description of Artificial Sequence: Synthetic oligonucleotide
  Antisense strand to SEQ ID NO: 2243760
aaacuccaucagcucuccu

SEQ ID NO: 2243762 - RNA, 19 nt, Artificial Sequence
  Description of Artificial Sequence: Synthetic oligonucleotide
  Sense strand starting at position 1276 of SEQ ID NO: 1884147
gcuugacaugcaugaagag

SEQ ID NO: 2243763 - RNA, 19 nt, Artificial Sequence
  Description of Artificial Sequence: Synthetic oligonucleotide
  Antisense strand to SEQ ID NO: 2243762
cucuucaugcaugucaagc

SEQ ID NO: 2243764 - RNA, 19 nt, Artificial Sequence
  Description of Artificial Sequence: Synthetic oligonucleotide
  Sense strand starting at position 1285 of SEQ ID NO: 1884147
gcaugaagagccuguacuu

SEQ ID NO: 2243765 - RNA, 19 nt, Artificial Sequence
  Description of Artificial Sequence: Synthetic oligonucleotide
  Antisense strand to SEQ ID NO: 2243764
aaguacaggcucuucaugc

SEQ ID NO: 2243766 - RNA, 19 nt, Artificial Sequence
  Description of Artificial Sequence: Synthetic oligonucleotide
  Sense strand starting at position 1503 of SEQ ID NO: 1884147
cagcauaaugucuggccaa

SEQ ID NO: 2243767 - RNA, 19 nt, Artificial Sequence
  Description of Artificial Sequence: Synthetic oligonucleotide
  Antisense strand to SEQ ID NO: 2243766
uuggccagacauuaugcug

SEQ ID NO: 2243768 - RNA, 19 nt, Artificial Sequence
  Description of Artificial Sequence: Synthetic oligonucleotide
  Sense strand starting at position 1569 of SEQ ID NO: 1884147
caaugugggcucugagauu

SEQ ID NO: 2243769 - RNA, 19 nt, Artificial Sequence
  Description of Artificial Sequence: Synthetic oligonucleotide
  Antisense strand to SEQ ID NO: 2243768
aaucucagagcccacauug

SEQ ID NO: 2243770 - RNA, 19 nt, Artificial Sequence
  Description of Artificial Sequence: Synthetic oligonucleotide
  Sense strand starting at position 1749 of SEQ ID NO: 1884147
gcuguacugccuuaacuga

SEQ ID NO: 2243771 - RNA, 19 nt, Artificial Sequence
  Description of Artificial Sequence: Synthetic oligonucleotide
  Antisense strand to SEQ ID NO: 2243770
ucaguuaaggcaguacagc

SEQ ID NO: 2243772 - RNA, 19 nt, Artificial Sequence
  Description of Artificial Sequence: Synthetic oligonucleotide
  Sense strand starting at position 1801 of SEQ ID NO: 1884147
guggaagugacaugaagac

SEQ ID NO: 2243773 - RNA, 19 nt, Artificial Sequence
  Description of Artificial Sequence: Synthetic oligonucleotide
  Antisense strand to SEQ ID NO: 2243772
gucuucaugucacuuccac

SEQ ID NO: 2243774 - RNA, 19 nt, Artificial Sequence
  Description of Artificial Sequence: Synthetic oligonucleotide
  Sense strand starting at position 1994 of SEQ ID NO: 1884147
ccucauggcuguuucugaa

SEQ ID NO: 2243775 - RNA, 19 nt, Artificial Sequence
  Description of Artificial Sequence: Synthetic oligonucleotide
  Antisense strand to SEQ ID NO: 2243774
uucagaaacagccaugagg

SEQ ID NO: 2243776 - RNA, 19 nt, Artificial Sequence
  Description of Artificial Sequence: Synthetic oligonucleotide
  Sense strand starting at position 2056 of SEQ ID NO: 1884147
ggcuuuguggcaggaaacu

SEQ ID NO: 2243777 - RNA, 19 nt, Artificial Sequence
  Description of Artificial Sequence: Synthetic oligonucleotide
  Antisense strand to SEQ ID NO: 2243776
aguuuccugccacaaagcc

SEQ ID NO: 2243778 - RNA, 19 nt, Artificial Sequence
  Description of Artificial Sequence: Synthetic oligonucleotide
  Sense strand starting at position 2168 of SEQ ID NO: 1884147
gggauagugugcucaggac

SEQ ID NO: 2243779 - RNA, 19 nt, Artificial Sequence
  Description of Artificial Sequence: Synthetic oligonucleotide
  Antisense strand to SEQ ID NO: 2243778
guccugagcacacuauccc

SEQ ID NO: 2243780 - RNA, 19 nt, Artificial Sequence
  Description of Artificial Sequence: Synthetic oligonucleotide
  Sense strand starting at position 2368 of SEQ ID NO: 1884147
ugagauuuguuggacugag

SEQ ID NO: 2243781 - RNA, 19 nt, Artificial Sequence
  Description of Artificial Sequence: Synthetic oligonucleotide
  Antisense strand to SEQ ID NO: 2243780
cucaguccaacaaaucuca

SEQ ID NO: 2243782 - RNA, 19 nt, Artificial Sequence
  Description of Artificial Sequence: Synthetic oligonucleotide
  Sense strand starting at position 2510 of SEQ ID NO: 1884147
aagaacagcccguguaauu

SEQ ID NO: 2243783 - RNA, 19 nt, Artificial Sequence
  Description of Artificial Sequence: Synthetic oligonucleotide
  Antisense strand to SEQ ID NO: 2243782
aauuacacgggcuguucuu

SEQ ID NO: 2243784 - RNA, 19 nt, Artificial Sequence
  Description of Artificial Sequence: Synthetic oligonucleotide
  Sense strand starting at position 2520 of SEQ ID NO: 1884147
cguguaauucuggaaggug

SEQ ID NO: 2243785 - RNA, 19 nt, Artificial Sequence
  Description of Artificial Sequence: Synthetic oligonucleotide
  Antisense strand to SEQ ID NO: 2243784
caccuuccagaauuacacg

SEQ ID NO: 2243786 - RNA, 19 nt, Artificial Sequence
  Description of Artificial Sequence: Synthetic oligonucleotide
  Sense strand starting at position 2521 of SEQ ID NO: 1884147
guguaauucuggaaggugg

SEQ ID NO: 2243787 - RNA, 19 nt, Artificial Sequence
  Description of Artificial Sequence: Synthetic oligonucleotide
  Antisense strand to SEQ ID NO: 2243786
ccaccuuccagaauuacac

SEQ ID NO: 2243788 - RNA, 19 nt, Artificial Sequence
  Description of Artificial Sequence: Synthetic oligonucleotide
  Sense strand starting at position 2523 of SEQ ID NO: 1884147
guaauucuggaagguggau

SEQ ID NO: 2243789 - RNA, 19 nt, Artificial Sequence
  Description of Artificial Sequence: Synthetic oligonucleotide
  Antisense strand to SEQ ID NO: 2243788
auccaccuuccagaauuac

SEQ ID NO: 2243790 - RNA, 19 nt, Artificial Sequence
  Description of Artificial Sequence: Synthetic oligonucleotide
  Sense strand starting at position 3127 of SEQ ID NO: 1884147
gguaaagugcucuagguca

SEQ ID NO: 2243791 - RNA, 19 nt, Artificial Sequence
  Description of Artificial Sequence: Synthetic oligonucleotide
  Antisense strand to SEQ ID NO: 2243790
ugaccuagagcacuuuacc

SEQ ID NO: 2243792 - RNA, 19 nt, Artificial Sequence
  Description of Artificial Sequence: Synthetic oligonucleotide
  Sense strand starting at position 3129 of SEQ ID NO: 1884147
uaaagugcucuaggucacu

SEQ ID NO: 2243793 - RNA, 19 nt, Artificial Sequence
  Description of Artificial Sequence: Synthetic oligonucleotide
  Antisense strand to SEQ ID NO: 2243792
agugaccuagagcacuuua

SEQ ID NO: 2243794 - RNA, 19 nt, Artificial Sequence
  Description of Artificial Sequence: Synthetic oligonucleotide
  Sense strand starting at position 3204 of SEQ ID NO: 1884147
cagggauucucugugucuu

SEQ ID NO: 2243795 - RNA, 19 nt, Artificial Sequence
  Description of Artificial Sequence: Synthetic oligonucleotide
  Antisense strand to SEQ ID NO: 2243794
aagacacagagaaucccug

SEQ ID NO: 2243796 - RNA, 19 nt, Artificial Sequence
  Description of Artificial Sequence: Synthetic oligonucleotide
  Sense strand starting at position 3205 of SEQ ID NO: 1884147
agggauucucugugucuuu

SEQ ID NO: 2243797 - RNA, 19 nt, Artificial Sequence
  Description of Artificial Sequence: Synthetic oligonucleotide
  Antisense strand to SEQ ID NO: 2243796
aaagacacagagaaucccu

SEQ ID NO: 2243798 - RNA, 19 nt, Artificial Sequence
  Description of Artificial Sequence: Synthetic oligonucleotide
  Sense strand starting at position 3206 of SEQ ID NO: 1884147
gggauucucugugucuuua

SEQ ID NO: 2243799 - RNA, 19 nt, Artificial Sequence
  Description of Artificial Sequence: Synthetic oligonucleotide
  Antisense strand to SEQ ID NO: 2243798
uaaagacacagagaauccc

SEQ ID NO: 2243800 - RNA, 19 nt, Artificial Sequence
  Description of Artificial Sequence: Synthetic oligonucleotide
  Sense strand starting at position 3208 of SEQ ID NO: 1884147
gauucucugugucuuuaag

SEQ ID NO: 2243801 - RNA, 19 nt, Artificial Sequence
  Description of Artificial Sequence: Synthetic oligonucleotide
  Antisense strand to SEQ ID NO: 2243800
cuuaaagacacagagaauc

SEQ ID NO: 2243802 - RNA, 19 nt, Artificial Sequence
  Description of Artificial Sequence: Synthetic oligonucleotide
  Sense strand starting at position 3339 of SEQ ID NO: 1884147
guaagcaacgucugacaca

SEQ ID NO: 2243803 - RNA, 19 nt, Artificial Sequence
  Description of Artificial Sequence: Synthetic oligonucleotide
  Antisense strand to SEQ ID NO: 2243802
ugugucagacguugcuuac

SEQ ID NO: 2243804 - RNA, 19 nt, Artificial Sequence
  Description of Artificial Sequence: Synthetic oligonucleotide
  Sense strand starting at position 3542 of SEQ ID NO: 1884147
uucccaauugcuuggaagu

SEQ ID NO: 2243805 - RNA, 19 nt, Artificial Sequence
  Description of Artificial Sequence: Synthetic oligonucleotide
  Antisense strand to SEQ ID NO: 2243804
acuuccaagcaauugggaa

SEQ ID NO: 2243806 - RNA, 19 nt, Artificial Sequence
  Description of Artificial Sequence: Synthetic oligonucleotide
  Sense strand starting at position 3543 of SEQ ID NO: 1884147
ucccaauugcuuggaaguu

SEQ ID NO: 2243807 - RNA, 19 nt, Artificial Sequence
  Description of Artificial Sequence: Synthetic oligonucleotide
  Antisense strand to SEQ ID NO: 2243806
aacuuccaagcaauuggga

SEQ ID NO: 2243808 - RNA, 19 nt, Artificial Sequence
  Description of Artificial Sequence: Synthetic oligonucleotide
  Sense strand starting at position 3549 of SEQ ID NO: 1884147
uugcuuggaaguuauggua

SEQ ID NO: 2243809 - RNA, 19 nt, Artificial Sequence
  Description of Artificial Sequence: Synthetic oligonucleotide
  Antisense strand to SEQ ID NO: 2243808
uaccauaacuuccaagcaa

SEQ ID NO: 2243810 - RNA, 19 nt, Artificial Sequence
  Description of Artificial Sequence: Synthetic oligonucleotide
  Sense strand starting at position 3556 of SEQ ID NO: 1884147
gaaguuaugguaggcugau

SEQ ID NO: 2243811 - RNA, 19 nt, Artificial Sequence
  Description of Artificial Sequence: Synthetic oligonucleotide
  Antisense strand to SEQ ID NO: 2243810
aucagccuaccauaacuuc

SEQ ID NO: 2243812 - RNA, 19 nt, Artificial Sequence
  Description of Artificial Sequence: Synthetic oligonucleotide
  Sense strand starting at position 3593 of SEQ ID NO: 1884147
acccaugucuaaucuggaa

SEQ ID NO: 2243813 - RNA, 19 nt, Artificial Sequence
  Description of Artificial Sequence: Synthetic oligonucleotide
  Antisense strand to SEQ ID NO: 2243812
uuccagauuagacaugggu

SEQ ID NO: 2243814 - RNA, 19 nt, Artificial Sequence
  Description of Artificial Sequence: Synthetic oligonucleotide
  Sense strand starting at position 3613 of SEQ ID NO: 1884147
cugugaauaucaccuguau

SEQ ID NO: 2243815 - RNA, 19 nt, Artificial Sequence
  Description of Artificial Sequence: Synthetic oligonucleotide
  Antisense strand to SEQ ID NO: 2243814
auacaggugauauucacag

SEQ ID NO: 2243816 - RNA, 19 nt, Artificial Sequence
  Description of Artificial Sequence: Synthetic oligonucleotide
  Sense strand starting at position 3669 of SEQ ID NO: 1884147
ggagcauguccugggucau

SEQ ID NO: 2243817 - RNA, 19 nt, Artificial Sequence
  Description of Artificial Sequence: Synthetic oligonucleotide
  Antisense strand to SEQ ID NO: 2243816
augacccaggacaugcucc

SEQ ID NO: 2243818 - RNA, 19 nt, Artificial Sequence
  Description of Artificial Sequence: Synthetic oligonucleotide
  Sense strand starting at position 3780 of SEQ ID NO: 1884147
gcaggcauuggagagacau

SEQ ID NO: 2243819 - RNA, 19 nt, Artificial Sequence
  Description of Artificial Sequence: Synthetic oligonucleotide
  Antisense strand to SEQ ID NO: 2243818
augucucuccaaugccugc

SEQ ID NO: 2243820 - RNA, 19 nt, Artificial Sequence
  Description of Artificial Sequence: Synthetic oligonucleotide
  Sense strand starting at position 3799 of SEQ ID NO: 1884147
ggcccagcucaggaaugau

SEQ ID NO: 2243821 - RNA, 19 nt, Artificial Sequence
  Description of Artificial Sequence: Synthetic oligonucleotide
  Antisense strand to SEQ ID NO: 2243820
aucauuccugagcugggcc

SEQ ID NO: 2243822 - RNA, 19 nt, Artificial Sequence
  Description of Artificial Sequence: Synthetic oligonucleotide
  Sense strand starting at position 2 of SEQ ID NO: 1884148
gugagcuuucucuaaagau

SEQ ID NO: 2243823 - RNA, 19 nt, Artificial Sequence
  Description of Artificial Sequence: Synthetic oligonucleotide
  Antisense strand to SEQ ID NO: 2243822
aucuuuagagaaagcucac

SEQ ID NO: 2243824 - RNA, 19 nt, Artificial Sequence
  Description of Artificial Sequence: Synthetic oligonucleotide
  Sense strand starting at position 38 of SEQ ID NO: 1884148
agagccuguaaaggauaau

SEQ ID NO: 2243825 - RNA, 19 nt, Artificial Sequence
  Description of Artificial Sequence: Synthetic oligonucleotide
  Antisense strand to SEQ ID NO: 2243824
auuauccuuuacaggcucu

SEQ ID NO: 2243826 - RNA, 19 nt, Artificial Sequence
  Description of Artificial Sequence: Synthetic oligonucleotide
  Sense strand starting at position 92 of SEQ ID NO: 1884148
uuaggaucuuggccaaauc

SEQ ID NO: 2243827 - RNA, 19 nt, Artificial Sequence
  Description of Artificial Sequence: Synthetic oligonucleotide
  Antisense strand to SEQ ID NO: 2243826
gauuuggccaagauccuaa

SEQ ID NO: 2243828 - RNA, 19 nt, Artificial Sequence
  Description of Artificial Sequence: Synthetic oligonucleotide
  Sense strand starting at position 155 of SEQ ID NO: 1884148
auuccacuuccaggaauga

SEQ ID NO: 2243829 - RNA, 19 nt, Artificial Sequence
  Description of Artificial Sequence: Synthetic oligonucleotide
  Antisense strand to SEQ ID NO: 2243828
ucauuccuggaaguggaau

SEQ ID NO: 2243830 - RNA, 19 nt, Artificial Sequence
  Description of Artificial Sequence: Synthetic oligonucleotide
  Sense strand starting at position 171 of SEQ ID NO: 1884148
ugaucacaugcaugaaaug

SEQ ID NO: 2243831 - RNA, 19 nt, Artificial Sequence
  Description of Artificial Sequence: Synthetic oligonucleotide
  Antisense strand to SEQ ID NO: 2243830
cauuucaugcaugugauca

SEQ ID NO: 2243832 - RNA, 19 nt, Artificial Sequence
  Description of Artificial Sequence: Synthetic oligonucleotide
  Sense strand starting at position 182 of SEQ ID NO: 1884148
augaaaugaugugcauaga

SEQ ID NO: 2243833 - RNA, 19 nt, Artificial Sequence
  Description of Artificial Sequence: Synthetic oligonucleotide
  Antisense strand to SEQ ID NO: 2243832
ucuaugcacaucauuucau

SEQ ID NO: 2243834 - RNA, 19 nt, Artificial Sequence
  Description of Artificial Sequence: Synthetic oligonucleotide
  Sense strand starting at position 358 of SEQ ID NO: 1884148
uauauucuacguggaauga

SEQ ID NO: 2243835 - RNA, 19 nt, Artificial Sequence
  Description of Artificial Sequence: Synthetic oligonucleotide
  Antisense strand to SEQ ID NO: 2243834
ucauuccacguagaauaua

SEQ ID NO: 2243836 - RNA, 19 nt, Artificial Sequence
  Description of Artificial Sequence: Synthetic oligonucleotide
  Sense strand starting at position 359 of SEQ ID NO: 1884148
auauucuacguggaaugau

SEQ ID NO: 2243837 - RNA, 19 nt, Artificial Sequence
  Description of Artificial Sequence: Synthetic oligonucleotide
  Antisense strand to SEQ ID NO: 2243836
aucauuccacguagaauau

SEQ ID NO: 2243838 - RNA, 19 nt, Artificial Sequence
  Description of Artificial Sequence: Synthetic oligonucleotide
  Sense strand starting at position 384 of SEQ ID NO: 1884148
aauuguuguuaaguggaaa

SEQ ID NO: 2243839 - RNA, 19 nt, Artificial Sequence
  Description of Artificial Sequence: Synthetic oligonucleotide
  Antisense strand to SEQ ID NO: 2243838
uuuccacuuaacaacaauu

SEQ ID NO: 2243840 - RNA, 19 nt, Artificial Sequence
  Description of Artificial Sequence: Synthetic oligonucleotide
  Sense strand starting at position 469 of SEQ ID NO: 1884148
uuguuuauauagucacaga

SEQ ID NO: 2243841 - RNA, 19 nt, Artificial Sequence
  Description of Artificial Sequence: Synthetic oligonucleotide
  Antisense strand to SEQ ID NO: 2243840
ucugugacuauauaaacaa

SEQ ID NO: 2243842 - RNA, 19 nt, Artificial Sequence
  Description of Artificial Sequence: Synthetic oligonucleotide
  Sense strand starting at position 514 of SEQ ID NO: 1884148
aauuauucuccaggaaggu

SEQ ID NO: 2243843 - RNA, 19 nt, Artificial Sequence
  Description of Artificial Sequence: Synthetic oligonucleotide
  Antisense strand to SEQ ID NO: 2243842
accuuccuggagaauaauu

SEQ ID NO: 2243844 - RNA, 19 nt, Artificial Sequence
  Description of Artificial Sequence: Synthetic oligonucleotide
  Sense strand starting at position 527 of SEQ ID NO: 1884148
gaagguaaacuggguguua

SEQ ID NO: 2243845 - RNA, 19 nt, Artificial Sequence
  Description of Artificial Sequence: Synthetic oligonucleotide
  Antisense strand to SEQ ID NO: 2243844
uaacacccaguuuaccuuc

SEQ ID NO: 2243846 - RNA, 19 nt, Artificial Sequence
  Description of Artificial Sequence: Synthetic oligonucleotide
  Sense strand starting at position 529 of SEQ ID NO: 1884148
agguaaacuggguguuaca

SEQ ID NO: 2243847 - RNA, 19 nt, Artificial Sequence
  Description of Artificial Sequence: Synthetic oligonucleotide
  Antisense strand to SEQ ID NO: 2243846
uguaacacccaguuuaccu

SEQ ID NO: 2243848 - RNA, 19 nt, Artificial Sequence
  Description of Artificial Sequence: Synthetic oligonucleotide
  Sense strand starting at position 601 of SEQ ID NO: 1884148
uagcuaugucaagcguauu

SEQ ID NO: 2243849 - RNA, 19 nt, Artificial Sequence
  Description of Artificial Sequence: Synthetic oligonucleotide
  Antisense strand to SEQ ID NO: 2243848
aauacgcuugacauagcua

SEQ ID NO: 2243850 - RNA, 19 nt, Artificial Sequence
  Description of Artificial Sequence: Synthetic oligonucleotide
  Sense strand starting at position 664 of SEQ ID NO: 1884148
acaagaaugccacauuguc

SEQ ID NO: 2243851 - RNA, 19 nt, Artificial Sequence
  Description of Artificial Sequence: Synthetic oligonucleotide
  Antisense strand to SEQ ID NO: 2243850
gacaauguggcauucuugu

SEQ ID NO: 2243852 - RNA, 19 nt, Artificial Sequence
  Description of Artificial Sequence: Synthetic oligonucleotide
  Sense strand starting at position 1392 of SEQ ID NO: 1884148
ucaacuauagcaugugaau

SEQ ID NO: 2243853 - RNA, 19 nt, Artificial Sequence
  Description of Artificial Sequence: Synthetic oligonucleotide
  Antisense strand to SEQ ID NO: 2243852
auucacaugcuauaguuga

SEQ ID NO: 2243854 - RNA, 19 nt, Artificial Sequence
  Description of Artificial Sequence: Synthetic oligonucleotide
  Sense strand starting at position 1453 of SEQ ID NO: 1884148
uuauuuaggucagaggauc

SEQ ID NO: 2243855 - RNA, 19 nt, Artificial Sequence
  Description of Artificial Sequence: Synthetic oligonucleotide
  Antisense strand to SEQ ID NO: 2243854
gauccucugaccuaaauaa

SEQ ID NO: 2243856 - RNA, 19 nt, Artificial Sequence
  Description of Artificial Sequence: Synthetic oligonucleotide
  Sense strand starting at position 1461 of SEQ ID NO: 1884148
gucagaggaucuccacaau

SEQ ID NO: 2243857 - RNA, 19 nt, Artificial Sequence
  Description of Artificial Sequence: Synthetic oligonucleotide
  Antisense strand to SEQ ID NO: 2243856
auuguggagauccucugac

SEQ ID NO: 2243858 - RNA, 19 nt, Artificial Sequence
  Description of Artificial Sequence: Synthetic oligonucleotide
  Sense strand starting at position 1600 of SEQ ID NO: 1884148
acaccuaagcuguaauguu

SEQ ID NO: 2243859 - RNA, 19 nt, Artificial Sequence
  Description of Artificial Sequence: Synthetic oligonucleotide
  Antisense strand to SEQ ID NO: 2243858
aacauuacagcuuaggugu

SEQ ID NO: 2243860 - RNA, 19 nt, Artificial Sequence
  Description of Artificial Sequence: Synthetic oligonucleotide
  Sense strand starting at position 1811 of SEQ ID NO: 1884148
auggacuuccuucgaggaa

SEQ ID NO: 2243861 - RNA, 19 nt, Artificial Sequence
  Description of Artificial Sequence: Synthetic oligonucleotide
  Antisense strand to SEQ ID NO: 2243860
uuccucgaaggaaguccau

SEQ ID NO: 2243862 - RNA, 19 nt, Artificial Sequence
  Description of Artificial Sequence: Synthetic oligonucleotide
  Sense strand starting at position 1856 of SEQ ID NO: 1884148
agcuauucccagcagauag

SEQ ID NO: 2243863 - RNA, 19 nt, Artificial Sequence
  Description of Artificial Sequence: Synthetic oligonucleotide
  Antisense strand to SEQ ID NO: 2243862
cuaucugcugggaauagcu

SEQ ID NO: 2243864 - RNA, 19 nt, Artificial Sequence
  Description of Artificial Sequence: Synthetic oligonucleotide
  Sense strand starting at position 2118 of SEQ ID NO: 1884148
guugucacaacggauuaca

SEQ ID NO: 2243865 - RNA, 19 nt, Artificial Sequence
  Description of Artificial Sequence: Synthetic oligonucleotide
  Antisense strand to SEQ ID NO: 2243864
uguaauccguugugacaac

SEQ ID NO: 2243866 - RNA, 19 nt, Artificial Sequence
  Description of Artificial Sequence: Synthetic oligonucleotide
  Sense strand starting at position 2121 of SEQ ID NO: 1884148
gucacaacggauuacauua

SEQ ID NO: 2243867 - RNA, 19 nt, Artificial Sequence
  Description of Artificial Sequence: Synthetic oligonucleotide
  Antisense strand to SEQ ID NO: 2243866
uaauguaauccguugugac

SEQ ID NO: 2243868 - RNA, 19 nt, Artificial Sequence
  Description of Artificial Sequence: Synthetic oligonucleotide
  Sense strand starting at position 2307 of SEQ ID NO: 1884148
cuaaauaccgaguacucau

SEQ ID NO: 2243869 - RNA, 19 nt, Artificial Sequence
  Description of Artificial Sequence: Synthetic oligonucleotide
  Antisense strand to SEQ ID NO: 2243868
augaguacucgguauuuag

SEQ ID NO: 2243870 - RNA, 19 nt, Artificial Sequence
  Description of Artificial Sequence: Synthetic oligonucleotide
  Sense strand starting at position 2314 of SEQ ID NO: 1884148
ccgaguacucauggacaca

SEQ ID NO: 2243871 - RNA, 19 nt, Artificial Sequence
  Description of Artificial Sequence: Synthetic oligonucleotide
  Antisense strand to SEQ ID NO: 2243870
uguguccaugaguacucgg

SEQ ID NO: 2243872 - RNA, 19 nt, Artificial Sequence
  Description of Artificial Sequence: Synthetic oligonucleotide
  Sense strand starting at position 2431 of SEQ ID NO: 1884148
gguugaugggauggaucau

SEQ ID NO: 2243873 - RNA, 19 nt, Artificial Sequence
  Description of Artificial Sequence: Synthetic oligonucleotide
  Antisense strand to SEQ ID NO: 2243872
augauccaucccaucaacc

SEQ ID NO: 2243874 - RNA, 19 nt, Artificial Sequence
  Description of Artificial Sequence: Synthetic oligonucleotide
  Sense strand starting at position 2474 of SEQ ID NO: 1884148
gcaauuuaccuagguaugu

SEQ ID NO: 2243875 - RNA, 19 nt, Artificial Sequence
  Description of Artificial Sequence: Synthetic oligonucleotide
  Antisense strand to SEQ ID NO: 2243874
acauaccuagguaaauugc

SEQ ID NO: 2243876 - RNA, 19 nt, Artificial Sequence
  Description of Artificial Sequence: Synthetic oligonucleotide
  Sense strand starting at position 2478 of SEQ ID NO: 1884148
uuuaccuagguauguaaca

SEQ ID NO: 2243877 - RNA, 19 nt, Artificial Sequence
  Description of Artificial Sequence: Synthetic oligonucleotide
  Antisense strand to SEQ ID NO: 2243876
uguuacauaccuagguaaa

SEQ ID NO: 2243878 - RNA, 19 nt, Artificial Sequence
  Description of Artificial Sequence: Synthetic oligonucleotide
  Sense strand starting at position 2479 of SEQ ID NO: 1884148
uuaccuagguauguaacaa

SEQ ID NO: 2243879 - RNA, 19 nt, Artificial Sequence
  Description of Artificial Sequence: Synthetic oligonucleotide
  Antisense strand to SEQ ID NO: 2243878
uuguuacauaccuagguaa

SEQ ID NO: 2243880 - RNA, 19 nt, Artificial Sequence
  Description of Artificial Sequence: Synthetic oligonucleotide
  Sense strand starting at position 3056 of SEQ ID NO: 1884148
cguugcuaaagggaugaau

SEQ ID NO: 2243881 - RNA, 19 nt, Artificial Sequence
  Description of Artificial Sequence: Synthetic oligonucleotide
  Antisense strand to SEQ ID NO: 2243880
auucaucccuuuagcaacg

SEQ ID NO: 2243882 - RNA, 19 nt, Artificial Sequence
  Description of Artificial Sequence: Synthetic oligonucleotide
  Sense strand starting at position 3058 of SEQ ID NO: 1884148
uugcuaaagggaugaaugu

SEQ ID NO: 2243883 - RNA, 19 nt, Artificial Sequence
  Description of Artificial Sequence: Synthetic oligonucleotide
  Antisense strand to SEQ ID NO: 2243882
acauucaucccuuuagcaa

SEQ ID NO: 2243884 - RNA, 19 nt, Artificial Sequence
  Description of Artificial Sequence: Synthetic oligonucleotide
  Sense strand starting at position 3067 of SEQ ID NO: 1884148
ggaugaauguaggcauuga

SEQ ID NO: 2243885 - RNA, 19 nt, Artificial Sequence
  Description of Artificial Sequence: Synthetic oligonucleotide
  Antisense strand to SEQ ID NO: 2243884
ucaaugccuacauucaucc

SEQ ID NO: 2243886 - RNA, 19 nt, Artificial Sequence
  Description of Artificial Sequence: Synthetic oligonucleotide
  Sense strand starting at position 3071 of SEQ ID NO: 1884148
gaauguaggcauugauaca

SEQ ID NO: 2243887 - RNA, 19 nt, Artificial Sequence
  Description of Artificial Sequence: Synthetic oligonucleotide
  Antisense strand to SEQ ID NO: 2243886
uguaucaaugccuacauuc

SEQ ID NO: 2243888 - RNA, 19 nt, Artificial Sequence
  Description of Artificial Sequence: Synthetic oligonucleotide
  Sense strand starting at position 3211 of SEQ ID NO: 1884148
accuccaauguguauguaa

SEQ ID NO: 2243889 - RNA, 19 nt, Artificial Sequence
  Description of Artificial Sequence: Synthetic oligonucleotide
  Antisense strand to SEQ ID NO: 2243888
uuacauacacauuggaggu

SEQ ID NO: 2243890 - RNA, 19 nt, Artificial Sequence
  Description of Artificial Sequence: Synthetic oligonucleotide
  Sense strand starting at position 3289 of SEQ ID NO: 1884148
aagucuggagcagguaaua

SEQ ID NO: 2243891 - RNA, 19 nt, Artificial Sequence
  Description of Artificial Sequence: Synthetic oligonucleotide
  Antisense strand to SEQ ID NO: 2243890
uauuaccugcuccagacuu

SEQ ID NO: 2243892 - RNA, 19 nt, Artificial Sequence
  Description of Artificial Sequence: Synthetic oligonucleotide
  Sense strand starting at position 3344 of SEQ ID NO: 1884148
uugugugguaauuaaauga

SEQ ID NO: 2243893 - RNA, 19 nt, Artificial Sequence
  Description of Artificial Sequence: Synthetic oligonucleotide
  Antisense strand to SEQ ID NO: 2243892
ucauuuaauuaccacacaa

SEQ ID NO: 2243894 - RNA, 19 nt, Artificial Sequence
  Description of Artificial Sequence: Synthetic oligonucleotide
  Sense strand starting at position 3718 of SEQ ID NO: 1884148
uggccaaaguuaucuuaaa

SEQ ID NO: 2243895 - RNA, 19 nt, Artificial Sequence
  Description of Artificial Sequence: Synthetic oligonucleotide
  Antisense strand to SEQ ID NO: 2243894
uuuaagauaacuuuggcca

SEQ ID NO: 2243896 - RNA, 19 nt, Artificial Sequence
  Description of Artificial Sequence: Synthetic oligonucleotide
  Sense strand starting at position 3719 of SEQ ID NO: 1884148
ggccaaaguuaucuuaaag

SEQ ID NO: 2243897 - RNA, 19 nt, Artificial Sequence
  Description of Artificial Sequence: Synthetic oligonucleotide
  Antisense strand to SEQ ID NO: 2243896
cuuuaagauaacuuuggcc

SEQ ID NO: 2243898 - RNA, 19 nt, Artificial Sequence
  Description of Artificial Sequence: Synthetic oligonucleotide
  Sense strand starting at position 3768 of SEQ ID NO: 1884148
uaguaauaagcauaaaggu

SEQ ID NO: 2243899 - RNA, 19 nt, Artificial Sequence
  Description of Artificial Sequence: Synthetic oligonucleotide
  Antisense strand to SEQ ID NO: 2243898
accuuuaugcuuauuacua

SEQ ID NO: 2243900 - RNA, 19 nt, Artificial Sequence
  Description of Artificial Sequence: Synthetic oligonucleotide
  Sense strand starting at position 3777 of SEQ ID NO: 1884148
gcauaaagguaucuuaaac

SEQ ID NO: 2243901 - RNA, 19 nt, Artificial Sequence
  Description of Artificial Sequence: Synthetic oligonucleotide
  Antisense strand to SEQ ID NO: 2243900
guuuaagauaccuuuaugc

SEQ ID NO: 2243902 - RNA, 19 nt, Artificial Sequence
  Description of Artificial Sequence: Synthetic oligonucleotide
  Sense strand starting at position 54 of SEQ ID NO: 1884149
ugucacaaauguuuacaaa

SEQ ID NO: 2243903 - RNA, 19 nt, Artificial Sequence
  Description of Artificial Sequence: Synthetic oligonucleotide
  Antisense strand to SEQ ID NO: 2243902
uuuguaaacauuugugaca

SEQ ID NO: 2243904 - RNA, 19 nt, Artificial Sequence
  Description of Artificial Sequence: Synthetic oligonucleotide
  Sense strand starting at position 1343 of SEQ ID NO: 1884149
gcauguugcauugaagaaa

SEQ ID NO: 2243905 - RNA, 19 nt, Artificial Sequence
  Description of Artificial Sequence: Synthetic oligonucleotide
  Antisense strand to SEQ ID NO: 2243904
uuucuucaaugcaacaugc

SEQ ID NO: 2243906 - RNA, 19 nt, Artificial Sequence
  Description of Artificial Sequence: Synthetic oligonucleotide
  Sense strand starting at position 1458 of SEQ ID NO: 1884149
guucauucuguagcguuua

SEQ ID NO: 2243907 - RNA, 19 nt, Artificial Sequence
  Description of Artificial Sequence: Synthetic oligonucleotide
  Antisense strand to SEQ ID NO: 2243906
uaaacgcuacagaaugaac

SEQ ID NO: 2243908 - RNA, 19 nt, Artificial Sequence
  Description of Artificial Sequence: Synthetic oligonucleotide
  Sense strand starting at position 1506 of SEQ ID NO: 1884149
gggacaaggccuuauguua

SEQ ID NO: 2243909 - RNA, 19 nt, Artificial Sequence
  Description of Artificial Sequence: Synthetic oligonucleotide
  Antisense strand to SEQ ID NO: 2243908
uaacauaaggccuuguccc

SEQ ID NO: 2243910 - RNA, 19 nt, Artificial Sequence
  Description of Artificial Sequence: Synthetic oligonucleotide
  Sense strand starting at position 1597 of SEQ ID NO: 1884149
ugaagauguucguuggaug

SEQ ID NO: 2243911 - RNA, 19 nt, Artificial Sequence
  Description of Artificial Sequence: Synthetic oligonucleotide
  Antisense strand to SEQ ID NO: 2243910
cauccaacgaacaucuuca

SEQ ID NO: 2243912 - RNA, 19 nt, Artificial Sequence
  Description of Artificial Sequence: Synthetic oligonucleotide
  Sense strand starting at position 1598 of SEQ ID NO: 1884149
gaagauguucguuggauga

SEQ ID NO: 2243913 - RNA, 19 nt, Artificial Sequence
  Description of Artificial Sequence: Synthetic oligonucleotide
  Antisense strand to SEQ ID NO: 2243912
ucauccaacgaacaucuuc

SEQ ID NO: 2243914 - RNA, 19 nt, Artificial Sequence
  Description of Artificial Sequence: Synthetic oligonucleotide
  Sense strand starting at position 1686 of SEQ ID NO: 1884149
guaggagagacccguggua

SEQ ID NO: 2243915 - RNA, 19 nt, Artificial Sequence
  Description of Artificial Sequence: Synthetic oligonucleotide
  Antisense strand to SEQ ID NO: 2243914
uaccacgggucucuccuac

SEQ ID NO: 2243916 - RNA, 19 nt, Artificial Sequence
  Description of Artificial Sequence: Synthetic oligonucleotide
  Sense strand starting at position 1688 of SEQ ID NO: 1884149
aggagagacccgugguaaa

SEQ ID NO: 2243917 - RNA, 19 nt, Artificial Sequence
  Description of Artificial Sequence: Synthetic oligonucleotide
  Antisense strand to SEQ ID NO: 2243916
uuuaccacgggucucuccu

SEQ ID NO: 2243918 - RNA, 19 nt, Artificial Sequence
  Description of Artificial Sequence: Synthetic oligonucleotide
  Sense strand starting at position 1709 of SEQ ID NO: 1884149
uuugcaucacaaggauaga

SEQ ID NO: 2243919 - RNA, 19 nt, Artificial Sequence
  Description of Artificial Sequence: Synthetic oligonucleotide
  Antisense strand to SEQ ID NO: 2243918
ucuauccuugugaugcaaa

SEQ ID NO: 2243920 - RNA, 19 nt, Artificial Sequence
  Description of Artificial Sequence: Synthetic oligonucleotide
  Sense strand starting at position 1786 of SEQ ID NO: 1884149
ugucaagaaaucugagagu

SEQ ID NO: 2243921 - RNA, 19 nt, Artificial Sequence
  Description of Artificial Sequence: Synthetic oligonucleotide
  Antisense strand to SEQ ID NO: 2243920
acucucagauuucuugaca

SEQ ID NO: 2243922 - RNA, 19 nt, Artificial Sequence
  Description of Artificial Sequence: Synthetic oligonucleotide
  Sense strand starting at position 1855 of SEQ ID NO: 1884149
uccugaugugauugauacu

SEQ ID NO: 2243923 - RNA, 19 nt, Artificial Sequence
  Description of Artificial Sequence: Synthetic oligonucleotide
  Antisense strand to SEQ ID NO: 2243922
aguaucaaucacaucagga

SEQ ID NO: 2243924 - RNA, 19 nt, Artificial Sequence
  Description of Artificial Sequence: Synthetic oligonucleotide
  Sense strand starting at position 1871 of SEQ ID NO: 1884149
acuuguuucgcguuagcaa

SEQ ID NO: 2243925 - RNA, 19 nt, Artificial Sequence
  Description of Artificial Sequence: Synthetic oligonucleotide
  Antisense strand to SEQ ID NO: 2243924
uugcuaacgcgaaacaagu

SEQ ID NO: 2243926 - RNA, 19 nt, Artificial Sequence
  Description of Artificial Sequence: Synthetic oligonucleotide
  Sense strand starting at position 2003 of SEQ ID NO: 1884149
accuaauaguacuugggua

SEQ ID NO: 2243927 - RNA, 19 nt, Artificial Sequence
  Description of Artificial Sequence: Synthetic oligonucleotide
  Antisense strand to SEQ ID NO: 2243926
uacccaaguacuauuaggu

SEQ ID NO: 2243928 - RNA, 19 nt, Artificial Sequence
  Description of Artificial Sequence: Synthetic oligonucleotide
  Sense strand starting at position 2005 of SEQ ID NO: 1884149
cuaauaguacuuggguaac

SEQ ID NO: 2243929 - RNA, 19 nt, Artificial Sequence
  Description of Artificial Sequence: Synthetic oligonucleotide
  Antisense strand to SEQ ID NO: 2243928
guuacccaaguacuauuag

SEQ ID NO: 2243930 - RNA, 19 nt, Artificial Sequence
  Description of Artificial Sequence: Synthetic oligonucleotide
  Sense strand starting at position 2007 of SEQ ID NO: 1884149
aauaguacuuggguaacaa

SEQ ID NO: 2243931 - RNA, 19 nt, Artificial Sequence
  Description of Artificial Sequence: Synthetic oligonucleotide
  Antisense strand to SEQ ID NO: 2243930
uuguuacccaaguacuauu

SEQ ID NO: 2243932 - RNA, 19 nt, Artificial Sequence
  Description of Artificial Sequence: Synthetic oligonucleotide
  Sense strand starting at position 2046 of SEQ ID NO: 1884149
guuaauccuucugucaaac

SEQ ID NO: 2243933 - RNA, 19 nt, Artificial Sequence
  Description of Artificial Sequence: Synthetic oligonucleotide
  Antisense strand to SEQ ID NO: 2243932
guuugacagaaggauuaac

SEQ ID NO: 2243934 - RNA, 19 nt, Artificial Sequence
  Description of Artificial Sequence: Synthetic oligonucleotide
  Sense strand starting at position 2441 of SEQ ID NO: 1884149
acagaaacguaaucacuca

SEQ ID NO: 2243935 - RNA, 19 nt, Artificial Sequence
  Description of Artificial Sequence: Synthetic oligonucleotide
  Antisense strand to SEQ ID NO: 2243934
ugagugauuacguuucugu

SEQ ID NO: 2243936 - RNA, 19 nt, Artificial Sequence
  Description of Artificial Sequence: Synthetic oligonucleotide
  Sense strand starting at position 2457 of SEQ ID NO: 1884149
ucacgucagcuuuaagaca

SEQ ID NO: 2243937 - RNA, 19 nt, Artificial Sequence
  Description of Artificial Sequence: Synthetic oligonucleotide
  Antisense strand to SEQ ID NO: 2243936
ugucuuaaagcugacguga

SEQ ID NO: 2243938 - RNA, 19 nt, Artificial Sequence
  Description of Artificial Sequence: Synthetic oligonucleotide
  Sense strand starting at position 2656 of SEQ ID NO: 1884149
gccagaagacagugucuau

SEQ ID NO: 2243939 - RNA, 19 nt, Artificial Sequence
  Description of Artificial Sequence: Synthetic oligonucleotide
  Antisense strand to SEQ ID NO: 2243938
auagacacugucuucuggc

SEQ ID NO: 2243940 - RNA, 19 nt, Artificial Sequence
  Description of Artificial Sequence: Synthetic oligonucleotide
  Sense strand starting at position 2666 of SEQ ID NO: 1884149
agugucuauccuuaaagaa

SEQ ID NO: 2243941 - RNA, 19 nt, Artificial Sequence
  Description of Artificial Sequence: Synthetic oligonucleotide
  Antisense strand to SEQ ID NO: 2243940
uucuuuaaggauagacacu

SEQ ID NO: 2243942 - RNA, 19 nt, Artificial Sequence
  Description of Artificial Sequence: Synthetic oligonucleotide
  Sense strand starting at position 2710 of SEQ ID NO: 1884149
uuauaagaguagucuggga

SEQ ID NO: 2243943 - RNA, 19 nt, Artificial Sequence
  Description of Artificial Sequence: Synthetic oligonucleotide
  Antisense strand to SEQ ID NO: 2243942
ucccagacuacucuuauaa

SEQ ID NO: 2243944 - RNA, 19 nt, Artificial Sequence
  Description of Artificial Sequence: Synthetic oligonucleotide
  Sense strand starting at position 2757 of SEQ ID NO: 1884149
guuaauucucuggguugau

SEQ ID NO: 2243945 - RNA, 19 nt, Artificial Sequence
  Description of Artificial Sequence: Synthetic oligonucleotide
  Antisense strand to SEQ ID NO: 2243944
aucaacccagagaauuaac

SEQ ID NO: 2243946 - RNA, 19 nt, Artificial Sequence
  Description of Artificial Sequence: Synthetic oligonucleotide
  Sense strand starting at position 2758 of SEQ ID NO: 1884149
uuaauucucuggguugauu

SEQ ID NO: 2243947 - RNA, 19 nt, Artificial Sequence
  Description of Artificial Sequence: Synthetic oligonucleotide
  Antisense strand to SEQ ID NO: 2243946
aaucaacccagagaauuaa

SEQ ID NO: 2243948 - RNA, 19 nt, Artificial Sequence
  Description of Artificial Sequence: Synthetic oligonucleotide
  Sense strand starting at position 2760 of SEQ ID NO: 1884149
aauucucuggguugauuau

SEQ ID NO: 2243949 - RNA, 19 nt, Artificial Sequence
  Description of Artificial Sequence: Synthetic oligonucleotide
  Antisense strand to SEQ ID NO: 2243948
auaaucaacccagagaauu

SEQ ID NO: 2243950 - RNA, 19 nt, Artificial Sequence
  Description of Artificial Sequence: Synthetic oligonucleotide
  Sense strand starting at position 2761 of SEQ ID NO: 1884149
auucucuggguugauuauu

SEQ ID NO: 2243951 - RNA, 19 nt, Artificial Sequence
  Description of Artificial Sequence: Synthetic oligonucleotide
  Antisense strand to SEQ ID NO: 2243950
aauaaucaacccagagaau

SEQ ID NO: 2243952 - RNA, 19 nt, Artificial Sequence
  Description of Artificial Sequence: Synthetic oligonucleotide
  Sense strand starting at position 2797 of SEQ ID NO: 1884149
uuucuauuaccugggagag

SEQ ID NO: 2243953 - RNA, 19 nt, Artificial Sequence
  Description of Artificial Sequence: Synthetic oligonucleotide
  Antisense strand to SEQ ID NO: 2243952
cucucccagguaauagaaa

SEQ ID NO: 2243954 - RNA, 19 nt, Artificial Sequence
  Description of Artificial Sequence: Synthetic oligonucleotide
  Sense strand starting at position 2798 of SEQ ID NO: 1884149
uucuauuaccugggagagu

SEQ ID NO: 2243955 - RNA, 19 nt, Artificial Sequence
  Description of Artificial Sequence: Synthetic oligonucleotide
  Antisense strand to SEQ ID NO: 2243954
acucucccagguaauagaa

SEQ ID NO: 2243956 - RNA, 19 nt, Artificial Sequence
  Description of Artificial Sequence: Synthetic oligonucleotide
  Sense strand starting at position 2811 of SEQ ID NO: 1884149
gagaguaacuaggcaauga

SEQ ID NO: 2243957 - RNA, 19 nt, Artificial Sequence
  Description of Artificial Sequence: Synthetic oligonucleotide
  Antisense strand to SEQ ID NO: 2243956
ucauugccuaguuacucuc

SEQ ID NO: 2243958 - RNA, 19 nt, Artificial Sequence
  Description of Artificial Sequence: Synthetic oligonucleotide
  Sense strand starting at position 2815 of SEQ ID NO: 1884149
guaacuaggcaaugaaaug

SEQ ID NO: 2243959 - RNA, 19 nt, Artificial Sequence
  Description of Artificial Sequence: Synthetic oligonucleotide
  Antisense strand to SEQ ID NO: 2243958
cauuucauugccuaguuac

SEQ ID NO: 2243960 - RNA, 19 nt, Artificial Sequence
  Description of Artificial Sequence: Synthetic oligonucleotide
  Sense strand starting at position 2827 of SEQ ID NO: 1884149
ugaaauguggucugaugaa

SEQ ID NO: 2243961 - RNA, 19 nt, Artificial Sequence
  Description of Artificial Sequence: Synthetic oligonucleotide
  Antisense strand to SEQ ID NO: 2243960
uucaucagaccacauuuca

SEQ ID NO: 2243962 - RNA, 19 nt, Artificial Sequence
  Description of Artificial Sequence: Synthetic oligonucleotide
  Sense strand starting at position 3570 of SEQ ID NO: 1884149
ggaggaucgcuugacguua

SEQ ID NO: 2243963 - RNA, 19 nt, Artificial Sequence
  Description of Artificial Sequence: Synthetic oligonucleotide
  Antisense strand to SEQ ID NO: 2243962
uaacgucaagcgauccucc

SEQ ID NO: 2243964 - RNA, 19 nt, Artificial Sequence
  Description of Artificial Sequence: Synthetic oligonucleotide
  Sense strand starting at position 3576 of SEQ ID NO: 1884149
ucgcuugacguuaggaguu

SEQ ID NO: 2243965 - RNA, 19 nt, Artificial Sequence
  Description of Artificial Sequence: Synthetic oligonucleotide
  Antisense strand to SEQ ID NO: 2243964
aacuccuaacgucaagcga

SEQ ID NO: 2243966 - RNA, 19 nt, Artificial Sequence
  Description of Artificial Sequence: Synthetic oligonucleotide
  Sense strand starting at position 3583 of SEQ ID NO: 1884149
acguuaggaguuugagaca

SEQ ID NO: 2243967 - RNA, 19 nt, Artificial Sequence
  Description of Artificial Sequence: Synthetic oligonucleotide
  Antisense strand to SEQ ID NO: 2243966
ugucucaaacuccuaacgu

SEQ ID NO: 2243968 - RNA, 19 nt, Artificial Sequence
  Description of Artificial Sequence: Synthetic oligonucleotide
  Sense strand starting at position 3816 of SEQ ID NO: 1884149
uuaacuauaggaggugauu

SEQ ID NO: 2243969 - RNA, 19 nt, Artificial Sequence
  Description of Artificial Sequence: Synthetic oligonucleotide
  Antisense strand to SEQ ID NO: 2243968
aaucaccuccuauaguuaa

SEQ ID NO: 2243970 - RNA, 19 nt, Artificial Sequence
  Description of Artificial Sequence: Synthetic oligonucleotide
  Sense strand starting at position 3853 of SEQ ID NO: 1884149
cuaugcauuucggcaucuu

SEQ ID NO: 2243971 - RNA, 19 nt, Artificial Sequence
  Description of Artificial Sequence: Synthetic oligonucleotide
  Antisense strand to SEQ ID NO: 2243970
aagaugccgaaaugcauag

SEQ ID NO: 2243972 - RNA, 19 nt, Artificial Sequence
  Description of Artificial Sequence: Synthetic oligonucleotide
  Sense strand starting at position 3854 of SEQ ID NO: 1884149
uaugcauuucggcaucuuu

SEQ ID NO: 2243973 - RNA, 19 nt, Artificial Sequence
  Description of Artificial Sequence: Synthetic oligonucleotide
  Antisense strand to SEQ ID NO: 2243972
aaagaugccgaaaugcaua

SEQ ID NO: 2243974 - RNA, 19 nt, Artificial Sequence
  Description of Artificial Sequence: Synthetic oligonucleotide
  Sense strand starting at position 3881 of SEQ ID NO: 1884149
uaaggcaguucucuacaga

SEQ ID NO: 2243975 - RNA, 19 nt, Artificial Sequence
  Description of Artificial Sequence: Synthetic oligonucleotide
  Antisense strand to SEQ ID NO: 2243974
ucuguagagaacugccuua

SEQ ID NO: 2243976 - RNA, 19 nt, Artificial Sequence
  Description of Artificial Sequence: Synthetic oligonucleotide
  Sense strand starting at position 3882 of SEQ ID NO: 1884149
aaggcaguucucuacagaa

SEQ ID NO: 2243977 - RNA, 19 nt, Artificial Sequence
  Description of Artificial Sequence: Synthetic oligonucleotide
  Antisense strand to SEQ ID NO: 2243976
uucuguagagaacugccuu

SEQ ID NO: 2243978 - RNA, 19 nt, Artificial Sequence
  Description of Artificial Sequence: Synthetic oligonucleotide
  Sense strand starting at position 3884 of SEQ ID NO: 1884149
ggcaguucucuacagaaga

SEQ ID NO: 2243979 - RNA, 19 nt, Artificial Sequence
  Description of Artificial Sequence: Synthetic oligonucleotide
  Antisense strand to SEQ ID NO: 2243978
ucuucuguagagaacugcc

SEQ ID NO: 2243980 - RNA, 19 nt, Artificial Sequence
  Description of Artificial Sequence: Synthetic oligonucleotide
  Sense strand starting at position 3911 of SEQ ID NO: 1884149
gccguugugcuuccugagu

SEQ ID NO: 2243981 - RNA, 19 nt, Artificial Sequence
  Description of Artificial Sequence: Synthetic oligonucleotide
  Antisense strand to SEQ ID NO: 2243980
acucaggaagcacaacggc

SEQ ID NO: 2243982 - RNA, 19 nt, Artificial Sequence
  Description of Artificial Sequence: Synthetic oligonucleotide
  Sense strand starting at position 2 of SEQ ID NO: 1884150
ugucuagcauguuuaauau

SEQ ID NO: 2243983 - RNA, 19 nt, Artificial Sequence
  Description of Artificial Sequence: Synthetic oligonucleotide
  Antisense strand to SEQ ID NO: 2243982
auauuaaacaugcuagaca

SEQ ID NO: 2243984 - RNA, 19 nt, Artificial Sequence
  Description of Artificial Sequence: Synthetic oligonucleotide
  Sense strand starting at position 100 of SEQ ID NO: 1884150
ugguucuccugucugauuu

SEQ ID NO: 2243985 - RNA, 19 nt, Artificial Sequence
  Description of Artificial Sequence: Synthetic oligonucleotide
  Antisense strand to SEQ ID NO: 2243984
aaaucagacaggagaacca

SEQ ID NO: 2243986 - RNA, 19 nt, Artificial Sequence
  Description of Artificial Sequence: Synthetic oligonucleotide
  Sense strand starting at position 874 of SEQ ID NO: 1884150
cacugaaagugauuaugau

SEQ ID NO: 2243987 - RNA, 19 nt, Artificial Sequence
  Description of Artificial Sequence: Synthetic oligonucleotide
  Antisense strand to SEQ ID NO: 2243986
aucauaaucacuuucagug

SEQ ID NO: 2243988 - RNA, 19 nt, Artificial Sequence
  Description of Artificial Sequence: Synthetic oligonucleotide
  Sense strand starting at position 878 of SEQ ID NO: 1884150
gaaagugauuaugaugaga

SEQ ID NO: 2243989 - RNA, 19 nt, Artificial Sequence
  Description of Artificial Sequence: Synthetic oligonucleotide
  Antisense strand to SEQ ID NO: 2243988
ucucaucauaaucacuuuc

SEQ ID NO: 2243990 - RNA, 19 nt, Artificial Sequence
  Description of Artificial Sequence: Synthetic oligonucleotide
  Sense strand starting at position 883 of SEQ ID NO: 1884150
ugauuaugaugagauuaug

SEQ ID NO: 2243991 - RNA, 19 nt, Artificial Sequence
  Description of Artificial Sequence: Synthetic oligonucleotide
  Antisense strand to SEQ ID NO: 2243990
cauaaucucaucauaauca

SEQ ID NO: 2243992 - RNA, 19 nt, Artificial Sequence
  Description of Artificial Sequence: Synthetic oligonucleotide
  Sense strand starting at position 889 of SEQ ID NO: 1884150
ugaugagauuaugcauuau

SEQ ID NO: 2243993 - RNA, 19 nt, Artificial Sequence
  Description of Artificial Sequence: Synthetic oligonucleotide
  Antisense strand to SEQ ID NO: 2243992
auaaugcauaaucucauca

SEQ ID NO: 2243994 - RNA, 19 nt, Artificial Sequence
  Description of Artificial Sequence: Synthetic oligonucleotide
  Sense strand starting at position 1003 of SEQ ID NO: 1884150
uaaauaugucacuguguga

SEQ ID NO: 2243995 - RNA, 19 nt, Artificial Sequence
  Description of Artificial Sequence: Synthetic oligonucleotide
  Antisense strand to SEQ ID NO: 2243994
ucacacagugacauauuua

SEQ ID NO: 2243996 - RNA, 19 nt, Artificial Sequence
  Description of Artificial Sequence: Synthetic oligonucleotide
  Sense strand starting at position 1006 of SEQ ID NO: 1884150
auaugucacugugugacau

SEQ ID NO: 2243997 - RNA, 19 nt, Artificial Sequence
  Description of Artificial Sequence: Synthetic oligonucleotide
  Antisense strand to SEQ ID NO: 2243996
augucacacagugacauau

SEQ ID NO: 2243998 - RNA, 19 nt, Artificial Sequence
  Description of Artificial Sequence: Synthetic oligonucleotide
  Sense strand starting at position 1007 of SEQ ID NO: 1884150
uaugucacugugugacaua

SEQ ID NO: 2243999 - RNA, 19 nt, Artificial Sequence
  Description of Artificial Sequence: Synthetic oligonucleotide
  Antisense strand to SEQ ID NO: 2243998
uaugucacacagugacaua

SEQ ID NO: 2244000 - RNA, 19 nt, Artificial Sequence
  Description of Artificial Sequence: Synthetic oligonucleotide
  Sense strand starting at position 1152 of SEQ ID NO: 1884150
guugaauuggcccagagua

SEQ ID NO: 2244001 - RNA, 19 nt, Artificial Sequence
  Description of Artificial Sequence: Synthetic oligonucleotide
  Antisense strand to SEQ ID NO: 2244000
uacucugggccaauucaac

SEQ ID NO: 2244002 - RNA, 19 nt, Artificial Sequence
  Description of Artificial Sequence: Synthetic oligonucleotide
  Sense strand starting at position 1154 of SEQ ID NO: 1884150
ugaauuggcccagaguaua

SEQ ID NO: 2244003 - RNA, 19 nt, Artificial Sequence
  Description of Artificial Sequence: Synthetic oligonucleotide
  Antisense strand to SEQ ID NO: 2244002
uauacucugggccaauuca

SEQ ID NO: 2244004 - RNA, 19 nt, Artificial Sequence
  Description of Artificial Sequence: Synthetic oligonucleotide
  Sense strand starting at position 1390 of SEQ ID NO: 1884150
aaggcaguuugauccaauu

SEQ ID NO: 2244005 - RNA, 19 nt, Artificial Sequence
  Description of Artificial Sequence: Synthetic oligonucleotide
  Antisense strand to SEQ ID NO: 2244004
aauuggaucaaacugccuu

SEQ ID NO: 2244006 - RNA, 19 nt, Artificial Sequence
  Description of Artificial Sequence: Synthetic oligonucleotide
  Sense strand starting at position 1815 of SEQ ID NO: 1884150
aaguccuaucaggaauguu

SEQ ID NO: 2244007 - RNA, 19 nt, Artificial Sequence
  Description of Artificial Sequence: Synthetic oligonucleotide
  Antisense strand to SEQ ID NO: 2244006
aacauuccugauaggacuu

SEQ ID NO: 2244008 - RNA, 19 nt, Artificial Sequence
  Description of Artificial Sequence: Synthetic oligonucleotide
  Sense strand starting at position 1823 of SEQ ID NO: 1884150
ucaggaauguucuugacca

SEQ ID NO: 2244009 - RNA, 19 nt, Artificial Sequence
  Description of Artificial Sequence: Synthetic oligonucleotide
  Antisense strand to SEQ ID NO: 2244008
uggucaagaacauuccuga

SEQ ID NO: 2244010 - RNA, 19 nt, Artificial Sequence
  Description of Artificial Sequence: Synthetic oligonucleotide
  Sense strand starting at position 2374 of SEQ ID NO: 1884150
gaauuagagagguggcauu

SEQ ID NO: 2244011 - RNA, 19 nt, Artificial Sequence
  Description of Artificial Sequence: Synthetic oligonucleotide
  Antisense strand to SEQ ID NO: 2244010
aaugccaccucucuaauuc

SEQ ID NO: 2244012 - RNA, 19 nt, Artificial Sequence
  Description of Artificial Sequence: Synthetic oligonucleotide
  Sense strand starting at position 2385 of SEQ ID NO: 1884150
guggcauuacuauagauuc

SEQ ID NO: 2244013 - RNA, 19 nt, Artificial Sequence
  Description of Artificial Sequence: Synthetic oligonucleotide
  Antisense strand to SEQ ID NO: 2244012
gaaucuauaguaaugccac

SEQ ID NO: 2244014 - RNA, 19 nt, Artificial Sequence
  Description of Artificial Sequence: Synthetic oligonucleotide
  Sense strand starting at position 2499 of SEQ ID NO: 1884150
ugaccaaguuugcugaaga

SEQ ID NO: 2244015 - RNA, 19 nt, Artificial Sequence
  Description of Artificial Sequence: Synthetic oligonucleotide
  Antisense strand to SEQ ID NO: 2244014
ucuucagcaaacuugguca

SEQ ID NO: 2244016 - RNA, 19 nt, Artificial Sequence
  Description of Artificial Sequence: Synthetic oligonucleotide
  Sense strand starting at position 2719 of SEQ ID NO: 1884150
cagguaaagauagguugua

SEQ ID NO: 2244017 - RNA, 19 nt, Artificial Sequence
  Description of Artificial Sequence: Synthetic oligonucleotide
  Antisense strand to SEQ ID NO: 2244016
uacaaccuaucuuuaccug

SEQ ID NO: 2244018 - RNA, 19 nt, Artificial Sequence
  Description of Artificial Sequence: Synthetic oligonucleotide
  Sense strand starting at position 2720 of SEQ ID NO: 1884150
agguaaagauagguuguau

SEQ ID NO: 2244019 - RNA, 19 nt, Artificial Sequence
  Description of Artificial Sequence: Synthetic oligonucleotide
  Antisense strand to SEQ ID NO: 2244018
auacaaccuaucuuuaccu

SEQ ID NO: 2244020 - RNA, 19 nt, Artificial Sequence
  Description of Artificial Sequence: Synthetic oligonucleotide
  Sense strand starting at position 2732 of SEQ ID NO: 1884150
guuguauaacauuacaugu

SEQ ID NO: 2244021 - RNA, 19 nt, Artificial Sequence
  Description of Artificial Sequence: Synthetic oligonucleotide
  Antisense strand to SEQ ID NO: 2244020
acauguaauguuauacaac

SEQ ID NO: 2244022 - RNA, 19 nt, Artificial Sequence
  Description of Artificial Sequence: Synthetic oligonucleotide
  Sense strand starting at position 3025 of SEQ ID NO: 1884150
uagagaucaucacuuuggu

SEQ ID NO: 2244023 - RNA, 19 nt, Artificial Sequence
  Description of Artificial Sequence: Synthetic oligonucleotide
  Antisense strand to SEQ ID NO: 2244022
accaaagugaugaucucua

SEQ ID NO: 2244024 - RNA, 19 nt, Artificial Sequence
  Description of Artificial Sequence: Synthetic oligonucleotide
  Sense strand starting at position 3261 of SEQ ID NO: 1884150
ugaaauaauugugcuuggu

SEQ ID NO: 2244025 - RNA, 19 nt, Artificial Sequence
  Description of Artificial Sequence: Synthetic oligonucleotide
  Antisense strand to SEQ ID NO: 2244024
accaagcacaauuauuuca

SEQ ID NO: 2244026 - RNA, 19 nt, Artificial Sequence
  Description of Artificial Sequence: Synthetic oligonucleotide
  Sense strand starting at position 3271 of SEQ ID NO: 1884150
gugcuugguccuuauuauc

SEQ ID NO: 2244027 - RNA, 19 nt, Artificial Sequence
  Description of Artificial Sequence: Synthetic oligonucleotide
  Antisense strand to SEQ ID NO: 2244026
gauaauaaggaccaagcac

SEQ ID NO: 2244028 - RNA, 19 nt, Artificial Sequence
  Description of Artificial Sequence: Synthetic oligonucleotide
  Sense strand starting at position 3276 of SEQ ID NO: 1884150
ugguccuuauuaucuugaa

SEQ ID NO: 2244029 - RNA, 19 nt, Artificial Sequence
  Description of Artificial Sequence: Synthetic oligonucleotide
  Antisense strand to SEQ ID NO: 2244028
uucaagauaauaaggacca

SEQ ID NO: 2244030 - RNA, 19 nt, Artificial Sequence
  Description of Artificial Sequence: Synthetic oligonucleotide
  Sense strand starting at position 3322 of SEQ ID NO: 1884150
caggacauuuaguagaaua

SEQ ID NO: 2244031 - RNA, 19 nt, Artificial Sequence
  Description of Artificial Sequence: Synthetic oligonucleotide
  Antisense strand to SEQ ID NO: 2244030
uauucuacuaaauguccug

SEQ ID NO: 2244032 - RNA, 19 nt, Artificial Sequence
  Description of Artificial Sequence: Synthetic oligonucleotide
  Sense strand starting at position 3367 of SEQ ID NO: 1884150
ucauuauguguuggagaca

SEQ ID NO: 2244033 - RNA, 19 nt, Artificial Sequence
  Description of Artificial Sequence: Synthetic oligonucleotide
  Antisense strand to SEQ ID NO: 2244032
ugucuccaacacauaauga

SEQ ID NO: 2244034 - RNA, 19 nt, Artificial Sequence
  Description of Artificial Sequence: Synthetic oligonucleotide
  Sense strand starting at position 3370 of SEQ ID NO: 1884150
uuauguguuggagacaauc

SEQ ID NO: 2244035 - RNA, 19 nt, Artificial Sequence
  Description of Artificial Sequence: Synthetic oligonucleotide
  Antisense strand to SEQ ID NO: 2244034
gauugucuccaacacauaa

SEQ ID NO: 2244036 - RNA, 19 nt, Artificial Sequence
  Description of Artificial Sequence: Synthetic oligonucleotide
  Sense strand starting at position 3372 of SEQ ID NO: 1884150
auguguuggagacaaucuu

SEQ ID NO: 2244037 - RNA, 19 nt, Artificial Sequence
  Description of Artificial Sequence: Synthetic oligonucleotide
  Antisense strand to SEQ ID NO: 2244036
aagauugucuccaacacau

SEQ ID NO: 2244038 - RNA, 19 nt, Artificial Sequence
  Description of Artificial Sequence: Synthetic oligonucleotide
  Sense strand starting at position 3457 of SEQ ID NO: 1884150
auaguaauacgauaguguc

SEQ ID NO: 2244039 - RNA, 19 nt, Artificial Sequence
  Description of Artificial Sequence: Synthetic oligonucleotide
  Antisense strand to SEQ ID NO: 2244038
gacacuaucguauuacuau

SEQ ID NO: 2244040 - RNA, 19 nt, Artificial Sequence
  Description of Artificial Sequence: Synthetic oligonucleotide
  Sense strand starting at position 3467 of SEQ ID NO: 1884150
gauagugucaugggccaaa

SEQ ID NO: 2244041 - RNA, 19 nt, Artificial Sequence
  Description of Artificial Sequence: Synthetic oligonucleotide
  Antisense strand to SEQ ID NO: 2244040
uuuggcccaugacacuauc

SEQ ID NO: 2244042 - RNA, 19 nt, Artificial Sequence
  Description of Artificial Sequence: Synthetic oligonucleotide
  Sense strand starting at position 3546 of SEQ ID NO: 1884150
uguaaauaauuguccugua

SEQ ID NO: 2244043 - RNA, 19 nt, Artificial Sequence
  Description of Artificial Sequence: Synthetic oligonucleotide
  Antisense strand to SEQ ID NO: 2244042
uacaggacaauuauuuaca

SEQ ID NO: 2244044 - RNA, 19 nt, Artificial Sequence
  Description of Artificial Sequence: Synthetic oligonucleotide
  Sense strand starting at position 3547 of SEQ ID NO: 1884150
guaaauaauuguccuguau

SEQ ID NO: 2244045 - RNA, 19 nt, Artificial Sequence
  Description of Artificial Sequence: Synthetic oligonucleotide
  Antisense strand to SEQ ID NO: 2244044
auacaggacaauuauuuac

SEQ ID NO: 2244046 - RNA, 19 nt, Artificial Sequence
  Description of Artificial Sequence: Synthetic oligonucleotide
  Sense strand starting at position 3551 of SEQ ID NO: 1884150
auaauuguccuguauaacc

SEQ ID NO: 2244047 - RNA, 19 nt, Artificial Sequence
  Description of Artificial Sequence: Synthetic oligonucleotide
  Antisense strand to SEQ ID NO: 2244046
gguuauacaggacaauuau

SEQ ID NO: 2244048 - RNA, 19 nt, Artificial Sequence
  Description of Artificial Sequence: Synthetic oligonucleotide
  Sense strand starting at position 3556 of SEQ ID NO: 1884150
uguccuguauaaccuaaga

SEQ ID NO: 2244049 - RNA, 19 nt, Artificial Sequence
  Description of Artificial Sequence: Synthetic oligonucleotide
  Antisense strand to SEQ ID NO: 2244048
ucuuagguuauacaggaca

SEQ ID NO: 2244050 - RNA, 19 nt, Artificial Sequence
  Description of Artificial Sequence: Synthetic oligonucleotide
  Sense strand starting at position 3622 of SEQ ID NO: 1884150
caaguaaugguagguaauu

SEQ ID NO: 2244051 - RNA, 19 nt, Artificial Sequence
  Description of Artificial Sequence: Synthetic oligonucleotide
  Antisense strand to SEQ ID NO: 2244050
aauuaccuaccauuacuug

SEQ ID NO: 2244052 - RNA, 19 nt, Artificial Sequence
  Description of Artificial Sequence: Synthetic oligonucleotide
  Sense strand starting at position 3701 of SEQ ID NO: 1884150
gagaguuaacaacguaaug

SEQ ID NO: 2244053 - RNA, 19 nt, Artificial Sequence
  Description of Artificial Sequence: Synthetic oligonucleotide
  Antisense strand to SEQ ID NO: 2244052
cauuacguuguuaacucuc

SEQ ID NO: 2244054 - RNA, 19 nt, Artificial Sequence
  Description of Artificial Sequence: Synthetic oligonucleotide
  Sense strand starting at position 3772 of SEQ ID NO: 1884150
ggagauaauucuguccuaa

SEQ ID NO: 2244055 - RNA, 19 nt, Artificial Sequence
  Description of Artificial Sequence: Synthetic oligonucleotide
  Antisense strand to SEQ ID NO: 2244054
uuaggacagaauuaucucc

SEQ ID NO: 2244056 - RNA, 19 nt, Artificial Sequence
  Description of Artificial Sequence: Synthetic oligonucleotide
  Sense strand starting at position 3774 of SEQ ID NO: 1884150
agauaauucuguccuaaga

SEQ ID NO: 2244057 - RNA, 19 nt, Artificial Sequence
  Description of Artificial Sequence: Synthetic oligonucleotide
  Antisense strand to SEQ ID NO: 2244056
ucuuaggacagaauuaucu

SEQ ID NO: 2244058 - RNA, 19 nt, Artificial Sequence
  Description of Artificial Sequence: Synthetic oligonucleotide
  Sense strand starting at position 3876 of SEQ ID NO: 1884150
ggacucuagucaucaaccu

SEQ ID NO: 2244059 - RNA, 19 nt, Artificial Sequence
  Description of Artificial Sequence: Synthetic oligonucleotide
  Antisense strand to SEQ ID NO: 2244058
agguugaugacuagagucc

SEQ ID NO: 2244060 - RNA, 19 nt, Artificial Sequence
  Description of Artificial Sequence: Synthetic oligonucleotide
  Sense strand starting at position 3957 of SEQ ID NO: 1884150
ccaguuagccugcagcaaa

SEQ ID NO: 2244061 - RNA, 19 nt, Artificial Sequence
  Description of Artificial Sequence: Synthetic oligonucleotide
  Antisense strand to SEQ ID NO: 2244060
uuugcugcaggcuaacugg

SEQ ID NO: 2244062 - RNA, 19 nt, Artificial Sequence
  Description of Artificial Sequence: Synthetic oligonucleotide
  Sense strand starting at position 20 of SEQ ID NO: 1884151
gggagaauuuguggaaaua

SEQ ID NO: 2244063 - RNA, 19 nt, Artificial Sequence
  Description of Artificial Sequence: Synthetic oligonucleotide
  Antisense strand to SEQ ID NO: 2244062
uauuuccacaaauucuccc

SEQ ID NO: 2244064 - RNA, 19 nt, Artificial Sequence
  Description of Artificial Sequence: Synthetic oligonucleotide
  Sense strand starting at position 31 of SEQ ID NO: 1884151
uggaaauauccacaugccu

SEQ ID NO: 2244065 - RNA, 19 nt, Artificial Sequence
  Description of Artificial Sequence: Synthetic oligonucleotide
  Antisense strand to SEQ ID NO: 2244064
aggcauguggauauuucca

SEQ ID NO: 2244066 - RNA, 19 nt, Artificial Sequence
  Description of Artificial Sequence: Synthetic oligonucleotide
  Sense strand starting at position 114 of SEQ ID NO: 1884151
ucucauagacagugaguua

SEQ ID NO: 2244067 - RNA, 19 nt, Artificial Sequence
  Description of Artificial Sequence: Synthetic oligonucleotide
  Antisense strand to SEQ ID NO: 2244066
uaacucacugucuaugaga

SEQ ID NO: 2244068 - RNA, 19 nt, Artificial Sequence
  Description of Artificial Sequence: Synthetic oligonucleotide
  Sense strand starting at position 117 of SEQ ID NO: 1884151
cauagacagugaguuagaa

SEQ ID NO: 2244069 - RNA, 19 nt, Artificial Sequence
  Description of Artificial Sequence: Synthetic oligonucleotide
  Antisense strand to SEQ ID NO: 2244068
uucuaacucacugucuaug

SEQ ID NO: 2244070 - RNA, 19 nt, Artificial Sequence
  Description of Artificial Sequence: Synthetic oligonucleotide
  Sense strand starting at position 216 of SEQ ID NO: 1884151
ggcuuuguuguuguagcua

SEQ ID NO: 2244071 - RNA, 19 nt, Artificial Sequence
  Description of Artificial Sequence: Synthetic oligonucleotide
  Antisense strand to SEQ ID NO: 2244070
uagcuacaacaacaaagcc

SEQ ID NO: 2244072 - RNA, 19 nt, Artificial Sequence
  Description of Artificial Sequence: Synthetic oligonucleotide
  Sense strand starting at position 330 of SEQ ID NO: 1884151
ggccacaguagugaugauu

SEQ ID NO: 2244073 - RNA, 19 nt, Artificial Sequence
  Description of Artificial Sequence: Synthetic oligonucleotide
  Antisense strand to SEQ ID NO: 2244072
aaucaucacuacuguggcc

SEQ ID NO: 2244074 - RNA, 19 nt, Artificial Sequence
  Description of Artificial Sequence: Synthetic oligonucleotide
  Sense strand starting at position 333 of SEQ ID NO: 1884151
cacaguagugaugauucua

SEQ ID NO: 2244075 - RNA, 19 nt, Artificial Sequence
  Description of Artificial Sequence: Synthetic oligonucleotide
  Antisense strand to SEQ ID NO: 2244074
uagaaucaucacuacugug

SEQ ID NO: 2244076 - RNA, 19 nt, Artificial Sequence
  Description of Artificial Sequence: Synthetic oligonucleotide
  Sense strand starting at position 352 of SEQ ID NO: 1884151
uuuccugagaggugagaau

SEQ ID NO: 2244077 - RNA, 19 nt, Artificial Sequence
  Description of Artificial Sequence: Synthetic oligonucleotide
  Antisense strand to SEQ ID NO: 2244076
auucucaccucucaggaaa

SEQ ID NO: 2244078 - RNA, 19 nt, Artificial Sequence
  Description of Artificial Sequence: Synthetic oligonucleotide
  Sense strand starting at position 381 of SEQ ID NO: 1884151
gaaugucugccauggauga

SEQ ID NO: 2244079 - RNA, 19 nt, Artificial Sequence
  Description of Artificial Sequence: Synthetic oligonucleotide
  Antisense strand to SEQ ID NO: 2244078
ucauccauggcagacauuc

SEQ ID NO: 2244080 - RNA, 19 nt, Artificial Sequence
  Description of Artificial Sequence: Synthetic oligonucleotide
  Sense strand starting at position 383 of SEQ ID NO: 1884151
augucugccauggaugaga

SEQ ID NO: 2244081 - RNA, 19 nt, Artificial Sequence
  Description of Artificial Sequence: Synthetic oligonucleotide
  Antisense strand to SEQ ID NO: 2244080
ucucauccauggcagacau

SEQ ID NO: 2244082 - RNA, 19 nt, Artificial Sequence
  Description of Artificial Sequence: Synthetic oligonucleotide
  Sense strand starting at position 385 of SEQ ID NO: 1884151
gucugccauggaugagaau

SEQ ID NO: 2244083 - RNA, 19 nt, Artificial Sequence
  Description of Artificial Sequence: Synthetic oligonucleotide
  Antisense strand to SEQ ID NO: 2244082
auucucauccauggcagac

SEQ ID NO: 2244084 - RNA, 19 nt, Artificial Sequence
  Description of Artificial Sequence: Synthetic oligonucleotide
  Sense strand starting at position 548 of SEQ ID NO: 1884151
guuuguguccuucuugcua

SEQ ID NO: 2244085 - RNA, 19 nt, Artificial Sequence
  Description of Artificial Sequence: Synthetic oligonucleotide
  Antisense strand to SEQ ID NO: 2244084
uagcaagaaggacacaaac

SEQ ID NO: 2244086 - RNA, 19 nt, Artificial Sequence
  Description of Artificial Sequence: Synthetic oligonucleotide
  Sense strand starting at position 620 of SEQ ID NO: 1884151
ugcugucuuggacauggaa

SEQ ID NO: 2244087 - RNA, 19 nt, Artificial Sequence
  Description of Artificial Sequence: Synthetic oligonucleotide
  Antisense strand to SEQ ID NO: 2244086
uuccauguccaagacagca

SEQ ID NO: 2244088 - RNA, 19 nt, Artificial Sequence
  Description of Artificial Sequence: Synthetic oligonucleotide
  Sense strand starting at position 794 of SEQ ID NO: 1884151
aagcuacacuuguuuggaa

SEQ ID NO: 2244089 - RNA, 19 nt, Artificial Sequence
  Description of Artificial Sequence: Synthetic oligonucleotide
  Antisense strand to SEQ ID NO: 2244088
uuccaaacaaguguagcuu

SEQ ID NO: 2244090 - RNA, 19 nt, Artificial Sequence
  Description of Artificial Sequence: Synthetic oligonucleotide
  Sense strand starting at position 830 of SEQ ID NO: 1884151
cagauuaauuguuuaaagg

SEQ ID NO: 2244091 - RNA, 19 nt, Artificial Sequence
  Description of Artificial Sequence: Synthetic oligonucleotide
  Antisense strand to SEQ ID NO: 2244090
ccuuuaaacaauuaaucug

SEQ ID NO: 2244092 - RNA, 19 nt, Artificial Sequence
  Description of Artificial Sequence: Synthetic oligonucleotide
  Sense strand starting at position 1316 of SEQ ID NO: 1884151
ugaguuuaugugcaauaaa

SEQ ID NO: 2244093 - RNA, 19 nt, Artificial Sequence
  Description of Artificial Sequence: Synthetic oligonucleotide
  Antisense strand to SEQ ID NO: 2244092
uuuauugcacauaaacuca

SEQ ID NO: 2244094 - RNA, 19 nt, Artificial Sequence
  Description of Artificial Sequence: Synthetic oligonucleotide
  Sense strand starting at position 1375 of SEQ ID NO: 1884151
auaauauucuugguagagg

SEQ ID NO: 2244095 - RNA, 19 nt, Artificial Sequence
  Description of Artificial Sequence: Synthetic oligonucleotide
  Antisense strand to SEQ ID NO: 2244094
ccucuaccaagaauauuau

SEQ ID NO: 2244096 - RNA, 19 nt, Artificial Sequence
  Description of Artificial Sequence: Synthetic oligonucleotide
  Sense strand starting at position 1593 of SEQ ID NO: 1884151
augcaaauuugucugcaug

SEQ ID NO: 2244097 - RNA, 19 nt, Artificial Sequence
  Description of Artificial Sequence: Synthetic oligonucleotide
  Antisense strand to SEQ ID NO: 2244096
caugcagacaaauuugcau

SEQ ID NO: 2244098 - RNA, 19 nt, Artificial Sequence
  Description of Artificial Sequence: Synthetic oligonucleotide
  Sense strand starting at position 1594 of SEQ ID NO: 1884151
ugcaaauuugucugcauga

SEQ ID NO: 2244099 - RNA, 19 nt, Artificial Sequence
  Description of Artificial Sequence: Synthetic oligonucleotide
  Antisense strand to SEQ ID NO: 2244098
ucaugcagacaaauuugca

SEQ ID NO: 2244100 - RNA, 19 nt, Artificial Sequence
  Description of Artificial Sequence: Synthetic oligonucleotide
  Sense strand starting at position 1595 of SEQ ID NO: 1884151
gcaaauuugucugcaugac

SEQ ID NO: 2244101 - RNA, 19 nt, Artificial Sequence
  Description of Artificial Sequence: Synthetic oligonucleotide
  Antisense strand to SEQ ID NO: 2244100
gucaugcagacaaauuugc

SEQ ID NO: 2244102 - RNA, 19 nt, Artificial Sequence
  Description of Artificial Sequence: Synthetic oligonucleotide
  Sense strand starting at position 1650 of SEQ ID NO: 1884151
acccauaguccuuacgauu

SEQ ID NO: 2244103 - RNA, 19 nt, Artificial Sequence
  Description of Artificial Sequence: Synthetic oligonucleotide
  Antisense strand to SEQ ID NO: 2244102
aaucguaaggacuaugggu

SEQ ID NO: 2244104 - RNA, 19 nt, Artificial Sequence
  Description of Artificial Sequence: Synthetic oligonucleotide
  Sense strand starting at position 1656 of SEQ ID NO: 1884151
aguccuuacgauuagaauu

SEQ ID NO: 2244105 - RNA, 19 nt, Artificial Sequence
  Description of Artificial Sequence: Synthetic oligonucleotide
  Antisense strand to SEQ ID NO: 2244104
aauucuaaucguaaggacu

SEQ ID NO: 2244106 - RNA, 19 nt, Artificial Sequence
  Description of Artificial Sequence: Synthetic oligonucleotide
  Sense strand starting at position 1667 of SEQ ID NO: 1884151
uuagaauugccuuagcaua

SEQ ID NO: 2244107 - RNA, 19 nt, Artificial Sequence
  Description of Artificial Sequence: Synthetic oligonucleotide
  Antisense strand to SEQ ID NO: 2244106
uaugcuaaggcaauucuaa

SEQ ID NO: 2244108 - RNA, 19 nt, Artificial Sequence
  Description of Artificial Sequence: Synthetic oligonucleotide
  Sense strand starting at position 1894 of SEQ ID NO: 1884151
ugagcaagacacugcuaau

SEQ ID NO: 2244109 - RNA, 19 nt, Artificial Sequence
  Description of Artificial Sequence: Synthetic oligonucleotide
  Antisense strand to SEQ ID NO: 2244108
auuagcagugucuugcuca

SEQ ID NO: 2244110 - RNA, 19 nt, Artificial Sequence
  Description of Artificial Sequence: Synthetic oligonucleotide
  Sense strand starting at position 2709 of SEQ ID NO: 1884151
gguaauauucgucaagaag

SEQ ID NO: 2244111 - RNA, 19 nt, Artificial Sequence
  Description of Artificial Sequence: Synthetic oligonucleotide
  Antisense strand to SEQ ID NO: 2244110
cuucuugacgaauauuacc

SEQ ID NO: 2244112 - RNA, 19 nt, Artificial Sequence
  Description of Artificial Sequence: Synthetic oligonucleotide
  Sense strand starting at position 2712 of SEQ ID NO: 1884151
aauauucgucaagaaguca

SEQ ID NO: 2244113 - RNA, 19 nt, Artificial Sequence
  Description of Artificial Sequence: Synthetic oligonucleotide
  Antisense strand to SEQ ID NO: 2244112
ugacuucuugacgaauauu

SEQ ID NO: 2244114 - RNA, 19 nt, Artificial Sequence
  Description of Artificial Sequence: Synthetic oligonucleotide
  Sense strand starting at position 2717 of SEQ ID NO: 1884151
ucgucaagaagucaagauu

SEQ ID NO: 2244115 - RNA, 19 nt, Artificial Sequence
  Description of Artificial Sequence: Synthetic oligonucleotide
  Antisense strand to SEQ ID NO: 2244114
aaucuugacuucuugacga

SEQ ID NO: 2244116 - RNA, 19 nt, Artificial Sequence
  Description of Artificial Sequence: Synthetic oligonucleotide
  Sense strand starting at position 2891 of SEQ ID NO: 1884151
aucagucccuagcuagaaa

SEQ ID NO: 2244117 - RNA, 19 nt, Artificial Sequence
  Description of Artificial Sequence: Synthetic oligonucleotide
  Antisense strand to SEQ ID NO: 2244116
uuucuagcuagggacugau

SEQ ID NO: 2244118 - RNA, 19 nt, Artificial Sequence
  Description of Artificial Sequence: Synthetic oligonucleotide
  Sense strand starting at position 2948 of SEQ ID NO: 1884151
ucugaaguaguauaaucau

SEQ ID NO: 2244119 - RNA, 19 nt, Artificial Sequence
  Description of Artificial Sequence: Synthetic oligonucleotide
  Antisense strand to SEQ ID NO: 2244118
augauuauacuacuucaga

SEQ ID NO: 2244120 - RNA, 19 nt, Artificial Sequence
  Description of Artificial Sequence: Synthetic oligonucleotide
  Sense strand starting at position 2997 of SEQ ID NO: 1884151
auaagauguaugugagcaa

SEQ ID NO: 2244121 - RNA, 19 nt, Artificial Sequence
  Description of Artificial Sequence: Synthetic oligonucleotide
  Antisense strand to SEQ ID NO: 2244120
uugcucacauacaucuuau

SEQ ID NO: 2244122 - RNA, 19 nt, Artificial Sequence
  Description of Artificial Sequence: Synthetic oligonucleotide
  Sense strand starting at position 3063 of SEQ ID NO: 1884151
cgaauaauguuucccugaa

SEQ ID NO: 2244123 - RNA, 19 nt, Artificial Sequence
  Description of Artificial Sequence: Synthetic oligonucleotide
  Antisense strand to SEQ ID NO: 2244122
uucagggaaacauuauucg

SEQ ID NO: 2244124 - RNA, 19 nt, Artificial Sequence
  Description of Artificial Sequence: Synthetic oligonucleotide
  Sense strand starting at position 3067 of SEQ ID NO: 1884151
uaauguuucccugaaaggu

SEQ ID NO: 2244125 - RNA, 19 nt, Artificial Sequence
  Description of Artificial Sequence: Synthetic oligonucleotide
  Antisense strand to SEQ ID NO: 2244124
accuuucagggaaacauua

SEQ ID NO: 2244126 - RNA, 19 nt, Artificial Sequence
  Description of Artificial Sequence: Synthetic oligonucleotide
  Sense strand starting at position 3145 of SEQ ID NO: 1884151
acuauugaauugucaguau

SEQ ID NO: 2244127 - RNA, 19 nt, Artificial Sequence
  Description of Artificial Sequence: Synthetic oligonucleotide
  Antisense strand to SEQ ID NO: 2244126
auacugacaauucaauagu

SEQ ID NO: 2244128 - RNA, 19 nt, Artificial Sequence
  Description of Artificial Sequence: Synthetic oligonucleotide
  Sense strand starting at position 3148 of SEQ ID NO: 1884151
auugaauugucaguauacu

SEQ ID NO: 2244129 - RNA, 19 nt, Artificial Sequence
  Description of Artificial Sequence: Synthetic oligonucleotide
  Antisense strand to SEQ ID NO: 2244128
aguauacugacaauucaau

SEQ ID NO: 2244130 - RNA, 19 nt, Artificial Sequence
  Description of Artificial Sequence: Synthetic oligonucleotide
  Sense strand starting at position 3149 of SEQ ID NO: 1884151
uugaauugucaguauacuc

SEQ ID NO: 2244131 - RNA, 19 nt, Artificial Sequence
  Description of Artificial Sequence: Synthetic oligonucleotide
  Antisense strand to SEQ ID NO: 2244130
gaguauacugacaauucaa

SEQ ID NO: 2244132 - RNA, 19 nt, Artificial Sequence
  Description of Artificial Sequence: Synthetic oligonucleotide
  Sense strand starting at position 3240 of SEQ ID NO: 1884151
gguaaugucugaccugaag

SEQ ID NO: 2244133 - RNA, 19 nt, Artificial Sequence
  Description of Artificial Sequence: Synthetic oligonucleotide
  Antisense strand to SEQ ID NO: 2244132
cuucaggucagacauuacc

SEQ ID NO: 2244134 - RNA, 19 nt, Artificial Sequence
  Description of Artificial Sequence: Synthetic oligonucleotide
  Sense strand starting at position 3335 of SEQ ID NO: 1884151
aggaacauguaggcucaua

SEQ ID NO: 2244135 - RNA, 19 nt, Artificial Sequence
  Description of Artificial Sequence: Synthetic oligonucleotide
  Antisense strand to SEQ ID NO: 2244134
uaugagccuacauguuccu

SEQ ID NO: 2244136 - RNA, 19 nt, Artificial Sequence
  Description of Artificial Sequence: Synthetic oligonucleotide
  Sense strand starting at position 3364 of SEQ ID NO: 1884151
caaguaaaggaauguuucu

SEQ ID NO: 2244137 - RNA, 19 nt, Artificial Sequence
  Description of Artificial Sequence: Synthetic oligonucleotide
  Antisense strand to SEQ ID NO: 2244136
agaaacauuccuuuacuug

SEQ ID NO: 2244138 - RNA, 19 nt, Artificial Sequence
  Description of Artificial Sequence: Synthetic oligonucleotide
  Sense strand starting at position 3919 of SEQ ID NO: 1884151
agcuaaauauugguuuaac

SEQ ID NO: 2244139 - RNA, 19 nt, Artificial Sequence
  Description of Artificial Sequence: Synthetic oligonucleotide
  Antisense strand to SEQ ID NO: 2244138
guuaaaccaauauuuagcu

SEQ ID NO: 2244140 - RNA, 19 nt, Artificial Sequence
  Description of Artificial Sequence: Synthetic oligonucleotide
  Sense strand starting at position 3920 of SEQ ID NO: 1884151
gcuaaauauugguuuaaca

SEQ ID NO: 2244141 - RNA, 19 nt, Artificial Sequence
  Description of Artificial Sequence: Synthetic oligonucleotide
  Antisense strand to SEQ ID NO: 2244140
uguuaaaccaauauuuagc

SEQ ID NO: 2244142 - RNA, 19 nt, Artificial Sequence
  Description of Artificial Sequence: Synthetic oligonucleotide
  Sense strand starting at position 10 of SEQ ID NO: 1884152
ccucacacagaugguaaau

SEQ ID NO: 2244143 - RNA, 19 nt, Artificial Sequence
  Description of Artificial Sequence: Synthetic oligonucleotide
  Antisense strand to SEQ ID NO: 2244142
auuuaccaucugugugagg

SEQ ID NO: 2244144 - RNA, 19 nt, Artificial Sequence
  Description of Artificial Sequence: Synthetic oligonucleotide
  Sense strand starting at position 53 of SEQ ID NO: 1884152
cugcauuucccugaaucgu

SEQ ID NO: 2244145 - RNA, 19 nt, Artificial Sequence
  Description of Artificial Sequence: Synthetic oligonucleotide
  Antisense strand to SEQ ID NO: 2244144
acgauucagggaaaugcag

SEQ ID NO: 2244146 - RNA, 19 nt, Artificial Sequence
  Description of Artificial Sequence: Synthetic oligonucleotide
  Sense strand starting at position 104 of SEQ ID NO: 1884152
aagguuaucuacuuaagga

SEQ ID NO: 2244147 - RNA, 19 nt, Artificial Sequence
  Description of Artificial Sequence: Synthetic oligonucleotide
  Antisense strand to SEQ ID NO: 2244146
uccuuaaguagauaaccuu

SEQ ID NO: 2244148 - RNA, 19 nt, Artificial Sequence
  Description of Artificial Sequence: Synthetic oligonucleotide
  Sense strand starting at position 143 of SEQ ID NO: 1884152
cgcaguaguauugauuaca

SEQ ID NO: 2244149 - RNA, 19 nt, Artificial Sequence
  Description of Artificial Sequence: Synthetic oligonucleotide
  Antisense strand to SEQ ID NO: 2244148
uguaaucaauacuacugcg

SEQ ID NO: 2244150 - RNA, 19 nt, Artificial Sequence
  Description of Artificial Sequence: Synthetic oligonucleotide
  Sense strand starting at position 174 of SEQ ID NO: 1884152
ggaauugcaauaugguaca

SEQ ID NO: 2244151 - RNA, 19 nt, Artificial Sequence
  Description of Artificial Sequence: Synthetic oligonucleotide
  Antisense strand to SEQ ID NO: 2244150
uguaccauauugcaauucc

SEQ ID NO: 2244152 - RNA, 19 nt, Artificial Sequence
  Description of Artificial Sequence: Synthetic oligonucleotide
  Sense strand starting at position 217 of SEQ ID NO: 1884152
guguaagcucaucacuaau

SEQ ID NO: 2244153 - RNA, 19 nt, Artificial Sequence
  Description of Artificial Sequence: Synthetic oligonucleotide
  Antisense strand to SEQ ID NO: 2244152
auuagugaugagcuuacac

SEQ ID NO: 2244154 - RNA, 19 nt, Artificial Sequence
  Description of Artificial Sequence: Synthetic oligonucleotide
  Sense strand starting at position 269 of SEQ ID NO: 1884152
gaggcagaauaguuacuau

SEQ ID NO: 2244155 - RNA, 19 nt, Artificial Sequence
  Description of Artificial Sequence: Synthetic oligonucleotide
  Antisense strand to SEQ ID NO: 2244154
auaguaacuauucugccuc

SEQ ID NO: 2244156 - RNA, 19 nt, Artificial Sequence
  Description of Artificial Sequence: Synthetic oligonucleotide
  Sense strand starting at position 272 of SEQ ID NO: 1884152
gcagaauaguuacuaugua

SEQ ID NO: 2244157 - RNA, 19 nt, Artificial Sequence
  Description of Artificial Sequence: Synthetic oligonucleotide
  Antisense strand to SEQ ID NO: 2244156
uacauaguaacuauucugc

SEQ ID NO: 2244158 - RNA, 19 nt, Artificial Sequence
  Description of Artificial Sequence: Synthetic oligonucleotide
  Sense strand starting at position 341 of SEQ ID NO: 1884152
auauccuugcaguaguuua

SEQ ID NO: 2244159 - RNA, 19 nt, Artificial Sequence
  Description of Artificial Sequence: Synthetic oligonucleotide
  Antisense strand to SEQ ID NO: 2244158
uaaacuacugcaaggauau

SEQ ID NO: 2244160 - RNA, 19 nt, Artificial Sequence
  Description of Artificial Sequence: Synthetic oligonucleotide
  Sense strand starting at position 986 of SEQ ID NO: 1884152
gcauucgugugcauggaga

SEQ ID NO: 2244161 - RNA, 19 nt, Artificial Sequence
  Description of Artificial Sequence: Synthetic oligonucleotide
  Antisense strand to SEQ ID NO: 2244160
ucuccaugcacacgaaugc

SEQ ID NO: 2244162 - RNA, 19 nt, Artificial Sequence
  Description of Artificial Sequence: Synthetic oligonucleotide
  Sense strand starting at position 1174 of SEQ ID NO: 1884152
auggaaugugauugcugga

SEQ ID NO: 2244163 - RNA, 19 nt, Artificial Sequence
  Description of Artificial Sequence: Synthetic oligonucleotide
  Antisense strand to SEQ ID NO: 2244162
uccagcaaucacauuccau

SEQ ID NO: 2244164 - RNA, 19 nt, Artificial Sequence
  Description of Artificial Sequence: Synthetic oligonucleotide
  Sense strand starting at position 1276 of SEQ ID NO: 1884152
uuaaauggcuguuugggaa

SEQ ID NO: 2244165 - RNA, 19 nt, Artificial Sequence
  Description of Artificial Sequence: Synthetic oligonucleotide
  Antisense strand to SEQ ID NO: 2244164
uucccaaacagccauuuaa

SEQ ID NO: 2244166 - RNA, 19 nt, Artificial Sequence
  Description of Artificial Sequence: Synthetic oligonucleotide
  Sense strand starting at position 1353 of SEQ ID NO: 1884152
ggagaugcuucugugugaa

SEQ ID NO: 2244167 - RNA, 19 nt, Artificial Sequence
  Description of Artificial Sequence: Synthetic oligonucleotide
  Antisense strand to SEQ ID NO: 2244166
uucacacagaagcaucucc

SEQ ID NO: 2244168 - RNA, 19 nt, Artificial Sequence
  Description of Artificial Sequence: Synthetic oligonucleotide
  Sense strand starting at position 1435 of SEQ ID NO: 1884152
gacagaaugugauccgucu

SEQ ID NO: 2244169 - RNA, 19 nt, Artificial Sequence
  Description of Artificial Sequence: Synthetic oligonucleotide
  Antisense strand to SEQ ID NO: 2244168
agacggaucacauucuguc

SEQ ID NO: 2244170 - RNA, 19 nt, Artificial Sequence
  Description of Artificial Sequence: Synthetic oligonucleotide
  Sense strand starting at position 1437 of SEQ ID NO: 1884152
cagaaugugauccgucuga

SEQ ID NO: 2244171 - RNA, 19 nt, Artificial Sequence
  Description of Artificial Sequence: Synthetic oligonucleotide
  Antisense strand to SEQ ID NO: 2244170
ucagacggaucacauucug

SEQ ID NO: 2244172 - RNA, 19 nt, Artificial Sequence
  Description of Artificial Sequence: Synthetic oligonucleotide
  Sense strand starting at position 1443 of SEQ ID NO: 1884152
gugauccgucugaguugga

SEQ ID NO: 2244173 - RNA, 19 nt, Artificial Sequence
  Description of Artificial Sequence: Synthetic oligonucleotide
  Antisense strand to SEQ ID NO: 2244172
uccaacucagacggaucac

SEQ ID NO: 2244174 - RNA, 19 nt, Artificial Sequence
  Description of Artificial Sequence: Synthetic oligonucleotide
  Sense strand starting at position 1577 of SEQ ID NO: 1884152
accugagauguuugaugua

SEQ ID NO: 2244175 - RNA, 19 nt, Artificial Sequence
  Description of Artificial Sequence: Synthetic oligonucleotide
  Antisense strand to SEQ ID NO: 2244174
uacaucaaacaucucaggu

SEQ ID NO: 2244176 - RNA, 19 nt, Artificial Sequence
  Description of Artificial Sequence: Synthetic oligonucleotide
  Sense strand starting at position 1586 of SEQ ID NO: 1884152
guuugauguaacugugaaa

SEQ ID NO: 2244177 - RNA, 19 nt, Artificial Sequence
  Description of Artificial Sequence: Synthetic oligonucleotide
  Antisense strand to SEQ ID NO: 2244176
uuucacaguuacaucaaac

SEQ ID NO: 2244178 - RNA, 19 nt, Artificial Sequence
  Description of Artificial Sequence: Synthetic oligonucleotide
  Sense strand starting at position 1856 of SEQ ID NO: 1884152
cuuugucagccauggaaau

SEQ ID NO: 2244179 - RNA, 19 nt, Artificial Sequence
  Description of Artificial Sequence: Synthetic oligonucleotide
  Antisense strand to SEQ ID NO: 2244178
auuuccauggcugacaaag

SEQ ID NO: 2244180 - RNA, 19 nt, Artificial Sequence
  Description of Artificial Sequence: Synthetic oligonucleotide
  Sense strand starting at position 1857 of SEQ ID NO: 1884152
uuugucagccauggaaauc

SEQ ID NO: 2244181 - RNA, 19 nt, Artificial Sequence
  Description of Artificial Sequence: Synthetic oligonucleotide
  Antisense strand to SEQ ID NO: 2244180
gauuuccauggcugacaaa

SEQ ID NO: 2244182 - RNA, 19 nt, Artificial Sequence
  Description of Artificial Sequence: Synthetic oligonucleotide
  Sense strand starting at position 1893 of SEQ ID NO: 1884152
ugaaucuuagguuggugaa

SEQ ID NO: 2244183 - RNA, 19 nt, Artificial Sequence
  Description of Artificial Sequence: Synthetic oligonucleotide
  Antisense strand to SEQ ID NO: 2244182
uucaccaaccuaagauuca

SEQ ID NO: 2244184 - RNA, 19 nt, Artificial Sequence
  Description of Artificial Sequence: Synthetic oligonucleotide
  Sense strand starting at position 1894 of SEQ ID NO: 1884152
gaaucuuagguuggugaaa

SEQ ID NO: 2244185 - RNA, 19 nt, Artificial Sequence
  Description of Artificial Sequence: Synthetic oligonucleotide
  Antisense strand to SEQ ID NO: 2244184
uuucaccaaccuaagauuc

SEQ ID NO: 2244186 - RNA, 19 nt, Artificial Sequence
  Description of Artificial Sequence: Synthetic oligonucleotide
  Sense strand starting at position 1997 of SEQ ID NO: 1884152
auauauucuuacgugugaa

SEQ ID NO: 2244187 - RNA, 19 nt, Artificial Sequence
  Description of Artificial Sequence: Synthetic oligonucleotide
  Antisense strand to SEQ ID NO: 2244186
uucacacguaagaauauau

SEQ ID NO: 2244188 - RNA, 19 nt, Artificial Sequence
  Description of Artificial Sequence: Synthetic oligonucleotide
  Sense strand starting at position 2010 of SEQ ID NO: 1884152
ugugaaaguauuuguagcu

SEQ ID NO: 2244189 - RNA, 19 nt, Artificial Sequence
  Description of Artificial Sequence: Synthetic oligonucleotide
  Antisense strand to SEQ ID NO: 2244188
agcuacaaauacuuucaca

SEQ ID NO: 2244190 - RNA, 19 nt, Artificial Sequence
  Description of Artificial Sequence: Synthetic oligonucleotide
  Sense strand starting at position 2011 of SEQ ID NO: 1884152
gugaaaguauuuguagcuu

SEQ ID NO: 2244191 - RNA, 19 nt, Artificial Sequence
  Description of Artificial Sequence: Synthetic oligonucleotide
  Antisense strand to SEQ ID NO: 2244190
aagcuacaaauacuuucac

SEQ ID NO: 2244192 - RNA, 19 nt, Artificial Sequence
  Description of Artificial Sequence: Synthetic oligonucleotide
  Sense strand starting at position 2169 of SEQ ID NO: 1884152
ccagaagaguuaguaaucu

SEQ ID NO: 2244193 - RNA, 19 nt, Artificial Sequence
  Description of Artificial Sequence: Synthetic oligonucleotide
  Antisense strand to SEQ ID NO: 2244192
agauuacuaacucuucugg

SEQ ID NO: 2244194 - RNA, 19 nt, Artificial Sequence
  Description of Artificial Sequence: Synthetic oligonucleotide
  Sense strand starting at position 2173 of SEQ ID NO: 1884152
aagaguuaguaaucugaca

SEQ ID NO: 2244195 - RNA, 19 nt, Artificial Sequence
  Description of Artificial Sequence: Synthetic oligonucleotide
  Antisense strand to SEQ ID NO: 2244194
ugucagauuacuaacucuu

SEQ ID NO: 2244196 - RNA, 19 nt, Artificial Sequence
  Description of Artificial Sequence: Synthetic oligonucleotide
  Sense strand starting at position 2278 of SEQ ID NO: 1884152
cggcaucuugcaggaaaga

SEQ ID NO: 2244197 - RNA, 19 nt, Artificial Sequence
  Description of Artificial Sequence: Synthetic oligonucleotide
  Antisense strand to SEQ ID NO: 2244196
ucuuuccugcaagaugccg

SEQ ID NO: 2244198 - RNA, 19 nt, Artificial Sequence
  Description of Artificial Sequence: Synthetic oligonucleotide
  Sense strand starting at position 2362 of SEQ ID NO: 1884152
ggucauguucgucuagcca

SEQ ID NO: 2244199 - RNA, 19 nt, Artificial Sequence
  Description of Artificial Sequence: Synthetic oligonucleotide
  Antisense strand to SEQ ID NO: 2244198
uggcuagacgaacaugacc

SEQ ID NO: 2244200 - RNA, 19 nt, Artificial Sequence
  Description of Artificial Sequence: Synthetic oligonucleotide
  Sense strand starting at position 2752 of SEQ ID NO: 1884152
uagaauugaugacuuggua

SEQ ID NO: 2244201 - RNA, 19 nt, Artificial Sequence
  Description of Artificial Sequence: Synthetic oligonucleotide
  Antisense strand to SEQ ID NO: 2244200
uaccaagucaucaauucua

SEQ ID NO: 2244202 - RNA, 19 nt, Artificial Sequence
  Description of Artificial Sequence: Synthetic oligonucleotide
  Sense strand starting at position 2755 of SEQ ID NO: 1884152
aauugaugacuugguaaug

SEQ ID NO: 2244203 - RNA, 19 nt, Artificial Sequence
  Description of Artificial Sequence: Synthetic oligonucleotide
  Antisense strand to SEQ ID NO: 2244202
cauuaccaagucaucaauu

SEQ ID NO: 2244204 - RNA, 19 nt, Artificial Sequence
  Description of Artificial Sequence: Synthetic oligonucleotide
  Sense strand starting at position 2756 of SEQ ID NO: 1884152
auugaugacuugguaaugu

SEQ ID NO: 2244205 - RNA, 19 nt, Artificial Sequence
  Description of Artificial Sequence: Synthetic oligonucleotide
  Antisense strand to SEQ ID NO: 2244204
acauuaccaagucaucaau

SEQ ID NO: 2244206 - RNA, 19 nt, Artificial Sequence
  Description of Artificial Sequence: Synthetic oligonucleotide
  Sense strand starting at position 2862 of SEQ ID NO: 1884152
ggagaucaagacugucuua

SEQ ID NO: 2244207 - RNA, 19 nt, Artificial Sequence
  Description of Artificial Sequence: Synthetic oligonucleotide
  Antisense strand to SEQ ID NO: 2244206
uaagacagucuugaucucc

SEQ ID NO: 2244208 - RNA, 19 nt, Artificial Sequence
  Description of Artificial Sequence: Synthetic oligonucleotide
  Sense strand starting at position 3288 of SEQ ID NO: 1884152
ugcucaacgcuuuauagaa

SEQ ID NO: 2244209 - RNA, 19 nt, Artificial Sequence
  Description of Artificial Sequence: Synthetic oligonucleotide
  Antisense strand to SEQ ID NO: 2244208
uucuauaaagcguugagca

SEQ ID NO: 2244210 - RNA, 19 nt, Artificial Sequence
  Description of Artificial Sequence: Synthetic oligonucleotide
  Sense strand starting at position 3321 of SEQ ID NO: 1884152
acacuaguuccaugaugau

SEQ ID NO: 2244211 - RNA, 19 nt, Artificial Sequence
  Description of Artificial Sequence: Synthetic oligonucleotide
  Antisense strand to SEQ ID NO: 2244210
aucaucauggaacuagugu

SEQ ID NO: 2244212 - RNA, 19 nt, Artificial Sequence
  Description of Artificial Sequence: Synthetic oligonucleotide
  Sense strand starting at position 3327 of SEQ ID NO: 1884152
guuccaugaugauugaaga

SEQ ID NO: 2244213 - RNA, 19 nt, Artificial Sequence
  Description of Artificial Sequence: Synthetic oligonucleotide
  Antisense strand to SEQ ID NO: 2244212
ucuucaaucaucauggaac

SEQ ID NO: 2244214 - RNA, 19 nt, Artificial Sequence
  Description of Artificial Sequence: Synthetic oligonucleotide
  Sense strand starting at position 3523 of SEQ ID NO: 1884152
gcacguguucgugcaucca

SEQ ID NO: 2244215 - RNA, 19 nt, Artificial Sequence
  Description of Artificial Sequence: Synthetic oligonucleotide
  Antisense strand to SEQ ID NO: 2244214
uggaugcacgaacacgugc

SEQ ID NO: 2244216 - RNA, 19 nt, Artificial Sequence
  Description of Artificial Sequence: Synthetic oligonucleotide
  Sense strand starting at position 3533 of SEQ ID NO: 1884152
gugcauccaggugagaauu

SEQ ID NO: 2244217 - RNA, 19 nt, Artificial Sequence
  Description of Artificial Sequence: Synthetic oligonucleotide
  Antisense strand to SEQ ID NO: 2244216
aauucucaccuggaugcac

SEQ ID NO: 2244218 - RNA, 19 nt, Artificial Sequence
  Description of Artificial Sequence: Synthetic oligonucleotide
  Sense strand starting at position 3839 of SEQ ID NO: 1884152
ugaugaugcuaggcuacaa

SEQ ID NO: 2244219 - RNA, 19 nt, Artificial Sequence
  Description of Artificial Sequence: Synthetic oligonucleotide
  Antisense strand to SEQ ID NO: 2244218
uuguagccuagcaucauca

SEQ ID NO: 2244220 - RNA, 19 nt, Artificial Sequence
  Description of Artificial Sequence: Synthetic oligonucleotide
  Sense strand starting at position 3905 of SEQ ID NO: 1884152
aaguguuaagaagguuaug

SEQ ID NO: 2244221 - RNA, 19 nt, Artificial Sequence
  Description of Artificial Sequence: Synthetic oligonucleotide
  Antisense strand to SEQ ID NO: 2244220
cauaaccuucuuaacacuu

SEQ ID NO: 2244222 - RNA, 19 nt, Artificial Sequence
  Description of Artificial Sequence: Synthetic oligonucleotide
  Sense strand starting at position 21 of SEQ ID NO: 1884153
acaaaucagcgacaucacu

SEQ ID NO: 2244223 - RNA, 19 nt, Artificial Sequence
  Description of Artificial Sequence: Synthetic oligonucleotide
  Antisense strand to SEQ ID NO: 2244222
agugaugucgcugauuugu

SEQ ID NO: 2244224 - RNA, 19 nt, Artificial Sequence
  Description of Artificial Sequence: Synthetic oligonucleotide
  Sense strand starting at position 77 of SEQ ID NO: 1884153
agcauuauccauugaugcu

SEQ ID NO: 2244225 - RNA, 19 nt, Artificial Sequence
  Description of Artificial Sequence: Synthetic oligonucleotide
  Antisense strand to SEQ ID NO: 2244224
agcaucaauggauaaugcu

SEQ ID NO: 2244226 - RNA, 19 nt, Artificial Sequence
  Description of Artificial Sequence: Synthetic oligonucleotide
  Sense strand starting at position 83 of SEQ ID NO: 1884153
auccauugaugcugcuuaa

SEQ ID NO: 2244227 - RNA, 19 nt, Artificial Sequence
  Description of Artificial Sequence: Synthetic oligonucleotide
  Antisense strand to SEQ ID NO: 2244226
uuaagcagcaucaauggau

SEQ ID NO: 2244228 - RNA, 19 nt, Artificial Sequence
  Description of Artificial Sequence: Synthetic oligonucleotide
  Sense strand starting at position 542 of SEQ ID NO: 1884153
auggccaaguguuagauaa

SEQ ID NO: 2244229 - RNA, 19 nt, Artificial Sequence
  Description of Artificial Sequence: Synthetic oligonucleotide
  Antisense strand to SEQ ID NO: 2244228
uuaucuaacacuuggccau

SEQ ID NO: 2244230 - RNA, 19 nt, Artificial Sequence
  Description of Artificial Sequence: Synthetic oligonucleotide
  Sense strand starting at position 544 of SEQ ID NO: 1884153
ggccaaguguuagauaauu

SEQ ID NO: 2244231 - RNA, 19 nt, Artificial Sequence
  Description of Artificial Sequence: Synthetic oligonucleotide
  Antisense strand to SEQ ID NO: 2244230
aauuaucuaacacuuggcc

SEQ ID NO: 2244232 - RNA, 19 nt, Artificial Sequence
  Description of Artificial Sequence: Synthetic oligonucleotide
  Sense strand starting at position 550 of SEQ ID NO: 1884153
guguuagauaauuaaggcu

SEQ ID NO: 2244233 - RNA, 19 nt, Artificial Sequence
  Description of Artificial Sequence: Synthetic oligonucleotide
  Antisense strand to SEQ ID NO: 2244232
agccuuaauuaucuaacac

SEQ ID NO: 2244234 - RNA, 19 nt, Artificial Sequence
  Description of Artificial Sequence: Synthetic oligonucleotide
  Sense strand starting at position 1183 of SEQ ID NO: 1884153
uguggacacgugugaauau

SEQ ID NO: 2244235 - RNA, 19 nt, Artificial Sequence
  Description of Artificial Sequence: Synthetic oligonucleotide
  Antisense strand to SEQ ID NO: 2244234
auauucacacguguccaca

SEQ ID NO: 2244236 - RNA, 19 nt, Artificial Sequence
  Description of Artificial Sequence: Synthetic oligonucleotide
  Sense strand starting at position 1190 of SEQ ID NO: 1884153
acgugugaauauguuccaa

SEQ ID NO: 2244237 - RNA, 19 nt, Artificial Sequence
  Description of Artificial Sequence: Synthetic oligonucleotide
  Antisense strand to SEQ ID NO: 2244236
uuggaacauauucacacgu

SEQ ID NO: 2244238 - RNA, 19 nt, Artificial Sequence
  Description of Artificial Sequence: Synthetic oligonucleotide
  Sense strand starting at position 1192 of SEQ ID NO: 1884153
gugugaauauguuccaauu

SEQ ID NO: 2244239 - RNA, 19 nt, Artificial Sequence
  Description of Artificial Sequence: Synthetic oligonucleotide
  Antisense strand to SEQ ID NO: 2244238
aauuggaacauauucacac

SEQ ID NO: 2244240 - RNA, 19 nt, Artificial Sequence
  Description of Artificial Sequence: Synthetic oligonucleotide
  Sense strand starting at position 1194 of SEQ ID NO: 1884153
gugaauauguuccaauuaa

SEQ ID NO: 2244241 - RNA, 19 nt, Artificial Sequence
  Description of Artificial Sequence: Synthetic oligonucleotide
  Antisense strand to SEQ ID NO: 2244240
uuaauuggaacauauucac

SEQ ID NO: 2244242 - RNA, 19 nt, Artificial Sequence
  Description of Artificial Sequence: Synthetic oligonucleotide
  Sense strand starting at position 1204 of SEQ ID NO: 1884153
uccaauuaacgugaugcua

SEQ ID NO: 2244243 - RNA, 19 nt, Artificial Sequence
  Description of Artificial Sequence: Synthetic oligonucleotide
  Antisense strand to SEQ ID NO: 2244242
uagcaucacguuaauugga

SEQ ID NO: 2244244 - RNA, 19 nt, Artificial Sequence
  Description of Artificial Sequence: Synthetic oligonucleotide
  Sense strand starting at position 1212 of SEQ ID NO: 1884153
acgugaugcuacguaauaa

SEQ ID NO: 2244245 - RNA, 19 nt, Artificial Sequence
  Description of Artificial Sequence: Synthetic oligonucleotide
  Antisense strand to SEQ ID NO: 2244244
uuauuacguagcaucacgu

SEQ ID NO: 2244246 - RNA, 19 nt, Artificial Sequence
  Description of Artificial Sequence: Synthetic oligonucleotide
  Sense strand starting at position 1213 of SEQ ID NO: 1884153
cgugaugcuacguaauaau

SEQ ID NO: 2244247 - RNA, 19 nt, Artificial Sequence
  Description of Artificial Sequence: Synthetic oligonucleotide
  Antisense strand to SEQ ID NO: 2244246
auuauuacguagcaucacg

SEQ ID NO: 2244248 - RNA, 19 nt, Artificial Sequence
  Description of Artificial Sequence: Synthetic oligonucleotide
  Sense strand starting at position 1223 of SEQ ID NO: 1884153
cguaauaaucaacaacguu

SEQ ID NO: 2244249 - RNA, 19 nt, Artificial Sequence
  Description of Artificial Sequence: Synthetic oligonucleotide
  Antisense strand to SEQ ID NO: 2244248
aacguuguugauuauuacg

SEQ ID NO: 2244250 - RNA, 19 nt, Artificial Sequence
  Description of Artificial Sequence: Synthetic oligonucleotide
  Sense strand starting at position 1387 of SEQ ID NO: 1884153
cuuggaagaucucaaggca

SEQ ID NO: 2244251 - RNA, 19 nt, Artificial Sequence
  Description of Artificial Sequence: Synthetic oligonucleotide
  Antisense strand to SEQ ID NO: 2244250
ugccuugagaucuuccaag

SEQ ID NO: 2244252 - RNA, 19 nt, Artificial Sequence
  Description of Artificial Sequence: Synthetic oligonucleotide
  Sense strand starting at position 1410 of SEQ ID NO: 1884153
cucguucuuugaggucaua

SEQ ID NO: 2244253 - RNA, 19 nt, Artificial Sequence
  Description of Artificial Sequence: Synthetic oligonucleotide
  Antisense strand to SEQ ID NO: 2244252
uaugaccucaaagaacgag

SEQ ID NO: 2244254 - RNA, 19 nt, Artificial Sequence
  Description of Artificial Sequence: Synthetic oligonucleotide
  Sense strand starting at position 1651 of SEQ ID NO: 1884153
uggguuccaugccuuagau

SEQ ID NO: 2244255 - RNA, 19 nt, Artificial Sequence
  Description of Artificial Sequence: Synthetic oligonucleotide
  Antisense strand to SEQ ID NO: 2244254
aucuaaggcauggaaccca

SEQ ID NO: 2244256 - RNA, 19 nt, Artificial Sequence
  Description of Artificial Sequence: Synthetic oligonucleotide
  Sense strand starting at position 1750 of SEQ ID NO: 1884153
gucaguacccagggagaaa

SEQ ID NO: 2244257 - RNA, 19 nt, Artificial Sequence
  Description of Artificial Sequence: Synthetic oligonucleotide
  Antisense strand to SEQ ID NO: 2244256
uuucucccuggguacugac

SEQ ID NO: 2244258 - RNA, 19 nt, Artificial Sequence
  Description of Artificial Sequence: Synthetic oligonucleotide
  Sense strand starting at position 1846 of SEQ ID NO: 1884153
ccaggcuacccaugaggaa

SEQ ID NO: 2244259 - RNA, 19 nt, Artificial Sequence
  Description of Artificial Sequence: Synthetic oligonucleotide
  Antisense strand to SEQ ID NO: 2244258
uuccucauggguagccugg

SEQ ID NO: 2244260 - RNA, 19 nt, Artificial Sequence
  Description of Artificial Sequence: Synthetic oligonucleotide
  Sense strand starting at position 1859 of SEQ ID NO: 1884153
gaggaaagcuaaguaaagu

SEQ ID NO: 2244261 - RNA, 19 nt, Artificial Sequence
  Description of Artificial Sequence: Synthetic oligonucleotide
  Antisense strand to SEQ ID NO: 2244260
acuuuacuuagcuuuccuc

SEQ ID NO: 2244262 - RNA, 19 nt, Artificial Sequence
  Description of Artificial Sequence: Synthetic oligonucleotide
  Sense strand starting at position 1868 of SEQ ID NO: 1884153
uaaguaaagucagauguac

SEQ ID NO: 2244263 - RNA, 19 nt, Artificial Sequence
  Description of Artificial Sequence: Synthetic oligonucleotide
  Antisense strand to SEQ ID NO: 2244262
guacaucugacuuuacuua

SEQ ID NO: 2244264 - RNA, 19 nt, Artificial Sequence
  Description of Artificial Sequence: Synthetic oligonucleotide
  Sense strand starting at position 1870 of SEQ ID NO: 1884153
aguaaagucagauguacuc

SEQ ID NO: 2244265 - RNA, 19 nt, Artificial Sequence
  Description of Artificial Sequence: Synthetic oligonucleotide
  Antisense strand to SEQ ID NO: 2244264
gaguacaucugacuuuacu

SEQ ID NO: 2244266 - RNA, 19 nt, Artificial Sequence
  Description of Artificial Sequence: Synthetic oligonucleotide
  Sense strand starting at position 1898 of SEQ ID NO: 1884153
gcggcaagugcuucuacau

SEQ ID NO: 2244267 - RNA, 19 nt, Artificial Sequence
  Description of Artificial Sequence: Synthetic oligonucleotide
  Antisense strand to SEQ ID NO: 2244266
auguagaagcacuugccgc

SEQ ID NO: 2244268 - RNA, 19 nt, Artificial Sequence
  Description of Artificial Sequence: Synthetic oligonucleotide
  Sense strand starting at position 2581 of SEQ ID NO: 1884153
ucgaaugcauuccagucua

SEQ ID NO: 2244269 - RNA, 19 nt, Artificial Sequence
  Description of Artificial Sequence: Synthetic oligonucleotide
  Antisense strand to SEQ ID NO: 2244268
uagacuggaaugcauucga

SEQ ID NO: 2244270 - RNA, 19 nt, Artificial Sequence
  Description of Artificial Sequence: Synthetic oligonucleotide
  Sense strand starting at position 2628 of SEQ ID NO: 1884153
ucaucuaaugcaugccaga

SEQ ID NO: 2244271 - RNA, 19 nt, Artificial Sequence
  Description of Artificial Sequence: Synthetic oligonucleotide
  Antisense strand to SEQ ID NO: 2244270
ucuggcaugcauuagauga

SEQ ID NO: 2244272 - RNA, 19 nt, Artificial Sequence
  Description of Artificial Sequence: Synthetic oligonucleotide
  Sense strand starting at position 2695 of SEQ ID NO: 1884153
gccaccaggugucuauuua

SEQ ID NO: 2244273 - RNA, 19 nt, Artificial Sequence
  Description of Artificial Sequence: Synthetic oligonucleotide
  Antisense strand to SEQ ID NO: 2244272
uaaauagacaccugguggc

SEQ ID NO: 2244274 - RNA, 19 nt, Artificial Sequence
  Description of Artificial Sequence: Synthetic oligonucleotide
  Sense strand starting at position 2783 of SEQ ID NO: 1884153
ugauaaauaucacugcugu

SEQ ID NO: 2244275 - RNA, 19 nt, Artificial Sequence
  Description of Artificial Sequence: Synthetic oligonucleotide
  Antisense strand to SEQ ID NO: 2244274
acagcagugauauuuauca

SEQ ID NO: 2244276 - RNA, 19 nt, Artificial Sequence
  Description of Artificial Sequence: Synthetic oligonucleotide
  Sense strand starting at position 2803 of SEQ ID NO: 1884153
agaccuucugcucacugau

SEQ ID NO: 2244277 - RNA, 19 nt, Artificial Sequence
  Description of Artificial Sequence: Synthetic oligonucleotide
  Antisense strand to SEQ ID NO: 2244276
aucagugagcagaaggucu

SEQ ID NO: 2244278 - RNA, 19 nt, Artificial Sequence
  Description of Artificial Sequence: Synthetic oligonucleotide
  Sense strand starting at position 3024 of SEQ ID NO: 1884153
aggcuaauuuaagaaagga

SEQ ID NO: 2244279 - RNA, 19 nt, Artificial Sequence
  Description of Artificial Sequence: Synthetic oligonucleotide
  Antisense strand to SEQ ID NO: 2244278
uccuuucuuaaauuagccu

SEQ ID NO: 2244280 - RNA, 19 nt, Artificial Sequence
  Description of Artificial Sequence: Synthetic oligonucleotide
  Sense strand starting at position 3049 of SEQ ID NO: 1884153
uauggacaucugugaacuc

SEQ ID NO: 2244281 - RNA, 19 nt, Artificial Sequence
  Description of Artificial Sequence: Synthetic oligonucleotide
  Antisense strand to SEQ ID NO: 2244280
gaguucacagauguccaua

SEQ ID NO: 2244282 - RNA, 19 nt, Artificial Sequence
  Description of Artificial Sequence: Synthetic oligonucleotide
  Sense strand starting at position 3512 of SEQ ID NO: 1884153
ggaucaugaugucagagau

SEQ ID NO: 2244283 - RNA, 19 nt, Artificial Sequence
  Description of Artificial Sequence: Synthetic oligonucleotide
  Antisense strand to SEQ ID NO: 2244282
aucucugacaucaugaucc

SEQ ID NO: 2244284 - RNA, 19 nt, Artificial Sequence
  Description of Artificial Sequence: Synthetic oligonucleotide
  Sense strand starting at position 3854 of SEQ ID NO: 1884153
ccuugaugucacuacucga

SEQ ID NO: 2244285 - RNA, 19 nt, Artificial Sequence
  Description of Artificial Sequence: Synthetic oligonucleotide
  Antisense strand to SEQ ID NO: 2244284
ucgaguagugacaucaagg

SEQ ID NO: 2244286 - RNA, 19 nt, Artificial Sequence
  Description of Artificial Sequence: Synthetic oligonucleotide
  Sense strand starting at position 3857 of SEQ ID NO: 1884153
ugaugucacuacucgaauc

SEQ ID NO: 2244287 - RNA, 19 nt, Artificial Sequence
  Description of Artificial Sequence: Synthetic oligonucleotide
  Antisense strand to SEQ ID NO: 2244286
gauucgaguagugacauca

SEQ ID NO: 2244288 - RNA, 19 nt, Artificial Sequence
  Description of Artificial Sequence: Synthetic oligonucleotide
  Sense strand starting at position 3898 of SEQ ID NO: 1884153
ccucguuauguccauguca

SEQ ID NO: 2244289 - RNA, 19 nt, Artificial Sequence
  Description of Artificial Sequence: Synthetic oligonucleotide
  Antisense strand to SEQ ID NO: 2244288
ugacauggacauaacgagg

SEQ ID NO: 2244290 - RNA, 19 nt, Artificial Sequence
  Description of Artificial Sequence: Synthetic oligonucleotide
  Sense strand starting at position 3900 of SEQ ID NO: 1884153
ucguuauguccaugucacu

SEQ ID NO: 2244291 - RNA, 19 nt, Artificial Sequence
  Description of Artificial Sequence: Synthetic oligonucleotide
  Antisense strand to SEQ ID NO: 2244290
agugacauggacauaacga

SEQ ID NO: 2244292 - RNA, 19 nt, Artificial Sequence
  Description of Artificial Sequence: Synthetic oligonucleotide
  Sense strand starting at position 3950 of SEQ ID NO: 1884153
agggaaucccucuggccau

SEQ ID NO: 2244293 - RNA, 19 nt, Artificial Sequence
  Description of Artificial Sequence: Synthetic oligonucleotide
  Antisense strand to SEQ ID NO: 2244292
auggccagagggauucccu

SEQ ID NO: 2244294 - RNA, 19 nt, Artificial Sequence
  Description of Artificial Sequence: Synthetic oligonucleotide
  Sense strand starting at position 433 of SEQ ID NO: 1884154
agcagucuucugcaacuga

SEQ ID NO: 2244295 - RNA, 19 nt, Artificial Sequence
  Description of Artificial Sequence: Synthetic oligonucleotide
  Antisense strand to SEQ ID NO: 2244294
ucaguugcagaagacugcu

SEQ ID NO: 2244296 - RNA, 19 nt, Artificial Sequence
  Description of Artificial Sequence: Synthetic oligonucleotide
  Sense strand starting at position 503 of SEQ ID NO: 1884154
ccaaucaggccagaguuaa

SEQ ID NO: 2244297 - RNA, 19 nt, Artificial Sequence
  Description of Artificial Sequence: Synthetic oligonucleotide
  Antisense strand to SEQ ID NO: 2244296
uuaacucuggccugauugg

SEQ ID NO: 2244298 - RNA, 19 nt, Artificial Sequence
  Description of Artificial Sequence: Synthetic oligonucleotide
  Sense strand starting at position 511 of SEQ ID NO: 1884154
gccagaguuaaagagcaau

SEQ ID NO: 2244299 - RNA, 19 nt, Artificial Sequence
  Description of Artificial Sequence: Synthetic oligonucleotide
  Antisense strand to SEQ ID NO: 2244298
auugcucuuuaacucuggc

SEQ ID NO: 2244300 - RNA, 19 nt, Artificial Sequence
  Description of Artificial Sequence: Synthetic oligonucleotide
  Sense strand starting at position 565 of SEQ ID NO: 1884154
gggacaugauucuaagagg

SEQ ID NO: 2244301 - RNA, 19 nt, Artificial Sequence
  Description of Artificial Sequence: Synthetic oligonucleotide
  Antisense strand to SEQ ID NO: 2244300
ccucuuagaaucauguccc

SEQ ID NO: 2244302 - RNA, 19 nt, Artificial Sequence
  Description of Artificial Sequence: Synthetic oligonucleotide
  Sense strand starting at position 568 of SEQ ID NO: 1884154
acaugauucuaagaggaua

SEQ ID NO: 2244303 - RNA, 19 nt, Artificial Sequence
  Description of Artificial Sequence: Synthetic oligonucleotide
  Antisense strand to SEQ ID NO: 2244302
uauccucuuagaaucaugu

SEQ ID NO: 2244304 - RNA, 19 nt, Artificial Sequence
  Description of Artificial Sequence: Synthetic oligonucleotide
  Sense strand starting at position 1316 of SEQ ID NO: 1884154
ggcagaacgagauggaauu

SEQ ID NO: 2244305 - RNA, 19 nt, Artificial Sequence
  Description of Artificial Sequence: Synthetic oligonucleotide
  Antisense strand to SEQ ID NO: 2244304
aauuccaucucguucugcc

SEQ ID NO: 2244306 - RNA, 19 nt, Artificial Sequence
  Description of Artificial Sequence: Synthetic oligonucleotide
  Sense strand starting at position 1418 of SEQ ID NO: 1884154
uguguuucugcguucuguu

SEQ ID NO: 2244307 - RNA, 19 nt, Artificial Sequence
  Description of Artificial Sequence: Synthetic oligonucleotide
  Antisense strand to SEQ ID NO: 2244306
aacagaacgcagaaacaca

SEQ ID NO: 2244308 - RNA, 19 nt, Artificial Sequence
  Description of Artificial Sequence: Synthetic oligonucleotide
  Sense strand starting at position 1533 of SEQ ID NO: 1884154
agcagauuccaaugaccuu

SEQ ID NO: 2244309 - RNA, 19 nt, Artificial Sequence
  Description of Artificial Sequence: Synthetic oligonucleotide
  Antisense strand to SEQ ID NO: 2244308
aaggucauuggaaucugcu

SEQ ID NO: 2244310 - RNA, 19 nt, Artificial Sequence
  Description of Artificial Sequence: Synthetic oligonucleotide
  Sense strand starting at position 1642 of SEQ ID NO: 1884154
cuacauucugagcaggacu

SEQ ID NO: 2244311 - RNA, 19 nt, Artificial Sequence
  Description of Artificial Sequence: Synthetic oligonucleotide
  Antisense strand to SEQ ID NO: 2244310
aguccugcucagaauguag

SEQ ID NO: 2244312 - RNA, 19 nt, Artificial Sequence
  Description of Artificial Sequence: Synthetic oligonucleotide
  Sense strand starting at position 1693 of SEQ ID NO: 1884154
ggaggaguuuccuucucuu

SEQ ID NO: 2244313 - RNA, 19 nt, Artificial Sequence
  Description of Artificial Sequence: Synthetic oligonucleotide
  Antisense strand to SEQ ID NO: 2244312
aagagaaggaaacuccucc

SEQ ID NO: 2244314 - RNA, 19 nt, Artificial Sequence
  Description of Artificial Sequence: Synthetic oligonucleotide
  Sense strand starting at position 1838 of SEQ ID NO: 1884154
augagacacugcuuuggaa

SEQ ID NO: 2244315 - RNA, 19 nt, Artificial Sequence
  Description of Artificial Sequence: Synthetic oligonucleotide
  Antisense strand to SEQ ID NO: 2244314
uuccaaagcagugucucau

SEQ ID NO: 2244316 - RNA, 19 nt, Artificial Sequence
  Description of Artificial Sequence: Synthetic oligonucleotide
  Sense strand starting at position 2067 of SEQ ID NO: 1884154
acagucaguccucauuacu

SEQ ID NO: 2244317 - RNA, 19 nt, Artificial Sequence
  Description of Artificial Sequence: Synthetic oligonucleotide
  Antisense strand to SEQ ID NO: 2244316
aguaaugaggacugacugu

SEQ ID NO: 2244318 - RNA, 19 nt, Artificial Sequence
  Description of Artificial Sequence: Synthetic oligonucleotide
  Sense strand starting at position 2124 of SEQ ID NO: 1884154
aucuguuugugacccucaa

SEQ ID NO: 2244319 - RNA, 19 nt, Artificial Sequence
  Description of Artificial Sequence: Synthetic oligonucleotide
  Antisense strand to SEQ ID NO: 2244318
uugagggucacaaacagau

SEQ ID NO: 2244320 - RNA, 19 nt, Artificial Sequence
  Description of Artificial Sequence: Synthetic oligonucleotide
  Sense strand starting at position 2128 of SEQ ID NO: 1884154
guuugugacccucaaauua

SEQ ID NO: 2244321 - RNA, 19 nt, Artificial Sequence
  Description of Artificial Sequence: Synthetic oligonucleotide
  Antisense strand to SEQ ID NO: 2244320
uaauuugagggucacaaac

SEQ ID NO: 2244322 - RNA, 19 nt, Artificial Sequence
  Description of Artificial Sequence: Synthetic oligonucleotide
  Sense strand starting at position 2151 of SEQ ID NO: 1884154
ucccaaauguuugcaguca

SEQ ID NO: 2244323 - RNA, 19 nt, Artificial Sequence
  Description of Artificial Sequence: Synthetic oligonucleotide
  Antisense strand to SEQ ID NO: 2244322
ugacugcaaacauuuggga

SEQ ID NO: 2244324 - RNA, 19 nt, Artificial Sequence
  Description of Artificial Sequence: Synthetic oligonucleotide
  Sense strand starting at position 2222 of SEQ ID NO: 1884154
ccagguggcgucuaacuaa

SEQ ID NO: 2244325 - RNA, 19 nt, Artificial Sequence
  Description of Artificial Sequence: Synthetic oligonucleotide
  Antisense strand to SEQ ID NO: 2244324
uuaguuagacgccaccugg

SEQ ID NO: 2244326 - RNA, 19 nt, Artificial Sequence
  Description of Artificial Sequence: Synthetic oligonucleotide
  Sense strand starting at position 2225 of SEQ ID NO: 1884154
gguggcgucuaacuaaaca

SEQ ID NO: 2244327 - RNA, 19 nt, Artificial Sequence
  Description of Artificial Sequence: Synthetic oligonucleotide
  Antisense strand to SEQ ID NO: 2244326
uguuuaguuagacgccacc

SEQ ID NO: 2244328 - RNA, 19 nt, Artificial Sequence
  Description of Artificial Sequence: Synthetic oligonucleotide
  Sense strand starting at position 2371 of SEQ ID NO: 1884154
gugugugagugacuucacu

SEQ ID NO: 2244329 - RNA, 19 nt, Artificial Sequence
  Description of Artificial Sequence: Synthetic oligonucleotide
  Antisense strand to SEQ ID NO: 2244328
agugaagucacucacacac

SEQ ID NO: 2244330 - RNA, 19 nt, Artificial Sequence
  Description of Artificial Sequence: Synthetic oligonucleotide
  Sense strand starting at position 2459 of SEQ ID NO: 1884154
agagaauugcuuugugaca

SEQ ID NO: 2244331 - RNA, 19 nt, Artificial Sequence
  Description of Artificial Sequence: Synthetic oligonucleotide
  Antisense strand to SEQ ID NO: 2244330
ugucacaaagcaauucucu

SEQ ID NO: 2244332 - RNA, 19 nt, Artificial Sequence
  Description of Artificial Sequence: Synthetic oligonucleotide
  Sense strand starting at position 2460 of SEQ ID NO: 1884154
gagaauugcuuugugacag

SEQ ID NO: 2244333 - RNA, 19 nt, Artificial Sequence
  Description of Artificial Sequence: Synthetic oligonucleotide
  Antisense strand to SEQ ID NO: 2244332
cugucacaaagcaauucuc

SEQ ID NO: 2244334 - RNA, 19 nt, Artificial Sequence
  Description of Artificial Sequence: Synthetic oligonucleotide
  Sense strand starting at position 2496 of SEQ ID NO: 1884154
ggaauauacuagucauguu

SEQ ID NO: 2244335 - RNA, 19 nt, Artificial Sequence
  Description of Artificial Sequence: Synthetic oligonucleotide
  Antisense strand to SEQ ID NO: 2244334
aacaugacuaguauauucc

SEQ ID NO: 2244336 - RNA, 19 nt, Artificial Sequence
  Description of Artificial Sequence: Synthetic oligonucleotide
  Sense strand starting at position 2788 of SEQ ID NO: 1884154
ugaaauggcccuuaaguau

SEQ ID NO: 2244337 - RNA, 19 nt, Artificial Sequence
  Description of Artificial Sequence: Synthetic oligonucleotide
  Antisense strand to SEQ ID NO: 2244336
auacuuaagggccauuuca

SEQ ID NO: 2244338 - RNA, 19 nt, Artificial Sequence
  Description of Artificial Sequence: Synthetic oligonucleotide
  Sense strand starting at position 2799 of SEQ ID NO: 1884154
uuaaguaugguguggaagu

SEQ ID NO: 2244339 - RNA, 19 nt, Artificial Sequence
  Description of Artificial Sequence: Synthetic oligonucleotide
  Antisense strand to SEQ ID NO: 2244338
acuuccacaccauacuuaa

SEQ ID NO: 2244340 - RNA, 19 nt, Artificial Sequence
  Description of Artificial Sequence: Synthetic oligonucleotide
  Sense strand starting at position 2823 of SEQ ID NO: 1884154
uuggcauuccuaggcucaa

SEQ ID NO: 2244341 - RNA, 19 nt, Artificial Sequence
  Description of Artificial Sequence: Synthetic oligonucleotide
  Antisense strand to SEQ ID NO: 2244340
uugagccuaggaaugccaa

SEQ ID NO: 2244342 - RNA, 19 nt, Artificial Sequence
  Description of Artificial Sequence: Synthetic oligonucleotide
  Sense strand starting at position 2836 of SEQ ID NO: 1884154
gcucaagaaggcugugaua

SEQ ID NO: 2244343 - RNA, 19 nt, Artificial Sequence
  Description of Artificial Sequence: Synthetic oligonucleotide
  Antisense strand to SEQ ID NO: 2244342
uaucacagccuucuugagc

SEQ ID NO: 2244344 - RNA, 19 nt, Artificial Sequence
  Description of Artificial Sequence: Synthetic oligonucleotide
  Sense strand starting at position 2838 of SEQ ID NO: 1884154
ucaagaaggcugugauaca

SEQ ID NO: 2244345 - RNA, 19 nt, Artificial Sequence
  Description of Artificial Sequence: Synthetic oligonucleotide
  Antisense strand to SEQ ID NO: 2244344
uguaucacagccuucuuga

SEQ ID NO: 2244346 - RNA, 19 nt, Artificial Sequence
  Description of Artificial Sequence: Synthetic oligonucleotide
  Sense strand starting at position 2966 of SEQ ID NO: 1884154
uuuguugauugguugauaa

SEQ ID NO: 2244347 - RNA, 19 nt, Artificial Sequence
  Description of Artificial Sequence: Synthetic oligonucleotide
  Antisense strand to SEQ ID NO: 2244346
uuaucaaccaaucaacaaa

SEQ ID NO: 2244348 - RNA, 19 nt, Artificial Sequence
  Description of Artificial Sequence: Synthetic oligonucleotide
  Sense strand starting at position 3168 of SEQ ID NO: 1884154
uaggacuuguaggaagaca

SEQ ID NO: 2244349 - RNA, 19 nt, Artificial Sequence
  Description of Artificial Sequence: Synthetic oligonucleotide
  Antisense strand to SEQ ID NO: 2244348
ugucuuccuacaaguccua

SEQ ID NO: 2244350 - RNA, 19 nt, Artificial Sequence
  Description of Artificial Sequence: Synthetic oligonucleotide
  Sense strand starting at position 3239 of SEQ ID NO: 1884154
gugagaacuugacaauuuc

SEQ ID NO: 2244351 - RNA, 19 nt, Artificial Sequence
  Description of Artificial Sequence: Synthetic oligonucleotide
  Antisense strand to SEQ ID NO: 2244350
gaaauugucaaguucucac

SEQ ID NO: 2244352 - RNA, 19 nt, Artificial Sequence
  Description of Artificial Sequence: Synthetic oligonucleotide
  Sense strand starting at position 3286 of SEQ ID NO: 1884154
agccaaucugggugacaga

SEQ ID NO: 2244353 - RNA, 19 nt, Artificial Sequence
  Description of Artificial Sequence: Synthetic oligonucleotide
  Antisense strand to SEQ ID NO: 2244352
ucugucacccagauuggcu

SEQ ID NO: 2244354 - RNA, 19 nt, Artificial Sequence
  Description of Artificial Sequence: Synthetic oligonucleotide
  Sense strand starting at position 3384 of SEQ ID NO: 1884154
ugagguggcuggucaugaa

SEQ ID NO: 2244355 - RNA, 19 nt, Artificial Sequence
  Description of Artificial Sequence: Synthetic oligonucleotide
  Antisense strand to SEQ ID NO: 2244354
uucaugaccagccaccuca

SEQ ID NO: 2244356 - RNA, 19 nt, Artificial Sequence
  Description of Artificial Sequence: Synthetic oligonucleotide
  Sense strand starting at position 3581 of SEQ ID NO: 1884154
guaugcuauuagucauuac

SEQ ID NO: 2244357 - RNA, 19 nt, Artificial Sequence
  Description of Artificial Sequence: Synthetic oligonucleotide
  Antisense strand to SEQ ID NO: 2244356
guaaugacuaauagcauac

SEQ ID NO: 2244358 - RNA, 19 nt, Artificial Sequence
  Description of Artificial Sequence: Synthetic oligonucleotide
  Sense strand starting at position 3584 of SEQ ID NO: 1884154
ugcuauuagucauuacucu

SEQ ID NO: 2244359 - RNA, 19 nt, Artificial Sequence
  Description of Artificial Sequence: Synthetic oligonucleotide
  Antisense strand to SEQ ID NO: 2244358
agaguaaugacuaauagca

SEQ ID NO: 2244360 - RNA, 19 nt, Artificial Sequence
  Description of Artificial Sequence: Synthetic oligonucleotide
  Sense strand starting at position 3588 of SEQ ID NO: 1884154
auuagucauuacucuggua

SEQ ID NO: 2244361 - RNA, 19 nt, Artificial Sequence
  Description of Artificial Sequence: Synthetic oligonucleotide
  Antisense strand to SEQ ID NO: 2244360
uaccagaguaaugacuaau

SEQ ID NO: 2244362 - RNA, 19 nt, Artificial Sequence
  Description of Artificial Sequence: Synthetic oligonucleotide
  Sense strand starting at position 3600 of SEQ ID NO: 1884154
ucugguaauaugugaaaug

SEQ ID NO: 2244363 - RNA, 19 nt, Artificial Sequence
  Description of Artificial Sequence: Synthetic oligonucleotide
  Antisense strand to SEQ ID NO: 2244362
cauuucacauauuaccaga

SEQ ID NO: 2244364 - RNA, 19 nt, Artificial Sequence
  Description of Artificial Sequence: Synthetic oligonucleotide
  Sense strand starting at position 3668 of SEQ ID NO: 1884154
guaugcgucuaauuuauug

SEQ ID NO: 2244365 - RNA, 19 nt, Artificial Sequence
  Description of Artificial Sequence: Synthetic oligonucleotide
  Antisense strand to SEQ ID NO: 2244364
caauaaauuagacgcauac

SEQ ID NO: 2244366 - RNA, 19 nt, Artificial Sequence
  Description of Artificial Sequence: Synthetic oligonucleotide
  Sense strand starting at position 3718 of SEQ ID NO: 1884154
aucugcucugauuggacua

SEQ ID NO: 2244367 - RNA, 19 nt, Artificial Sequence
  Description of Artificial Sequence: Synthetic oligonucleotide
  Antisense strand to SEQ ID NO: 2244366
uaguccaaucagagcagau

SEQ ID NO: 2244368 - RNA, 19 nt, Artificial Sequence
  Description of Artificial Sequence: Synthetic oligonucleotide
  Sense strand starting at position 3731 of SEQ ID NO: 1884154
ggacuaagauccuacauuu

SEQ ID NO: 2244369 - RNA, 19 nt, Artificial Sequence
  Description of Artificial Sequence: Synthetic oligonucleotide
  Antisense strand to SEQ ID NO: 2244368
aaauguaggaucuuagucc

SEQ ID NO: 2244370 - RNA, 19 nt, Artificial Sequence
  Description of Artificial Sequence: Synthetic oligonucleotide
  Sense strand starting at position 3757 of SEQ ID NO: 1884154
ugggaauauugcucaacuu

SEQ ID NO: 2244371 - RNA, 19 nt, Artificial Sequence
  Description of Artificial Sequence: Synthetic oligonucleotide
  Antisense strand to SEQ ID NO: 2244370
aaguugagcaauauuccca

SEQ ID NO: 2244372 - RNA, 19 nt, Artificial Sequence
  Description of Artificial Sequence: Synthetic oligonucleotide
  Sense strand starting at position 3903 of SEQ ID NO: 1884154
ucucgugugcucaggcgau

SEQ ID NO: 2244373 - RNA, 19 nt, Artificial Sequence
  Description of Artificial Sequence: Synthetic oligonucleotide
  Antisense strand to SEQ ID NO: 2244372
aucgccugagcacacgaga

SEQ ID NO: 2244374 - RNA, 19 nt, Artificial Sequence
  Description of Artificial Sequence: Synthetic oligonucleotide
  Sense strand starting at position 38 of SEQ ID NO: 1884155
auauucuacugcucaagga

SEQ ID NO: 2244375 - RNA, 19 nt, Artificial Sequence
  Description of Artificial Sequence: Synthetic oligonucleotide
  Antisense strand to SEQ ID NO: 2244374
uccuugagcaguagaauau

SEQ ID NO: 2244376 - RNA, 19 nt, Artificial Sequence
  Description of Artificial Sequence: Synthetic oligonucleotide
  Sense strand starting at position 101 of SEQ ID NO: 1884155
gggcauacauggguuaaga

SEQ ID NO: 2244377 - RNA, 19 nt, Artificial Sequence
  Description of Artificial Sequence: Synthetic oligonucleotide
  Antisense strand to SEQ ID NO: 2244376
ucuuaacccauguaugccc

SEQ ID NO: 2244378 - RNA, 19 nt, Artificial Sequence
  Description of Artificial Sequence: Synthetic oligonucleotide
  Sense strand starting at position 187 of SEQ ID NO: 1884155
guggacucuucucuggaca

SEQ ID NO: 2244379 - RNA, 19 nt, Artificial Sequence
  Description of Artificial Sequence: Synthetic oligonucleotide
  Antisense strand to SEQ ID NO: 2244378
uguccagagaagaguccac

SEQ ID NO: 2244380 - RNA, 19 nt, Artificial Sequence
  Description of Artificial Sequence: Synthetic oligonucleotide
  Sense strand starting at position 270 of SEQ ID NO: 1884155
gggaccauugccuaccuau

SEQ ID NO: 2244381 - RNA, 19 nt, Artificial Sequence
  Description of Artificial Sequence: Synthetic oligonucleotide
  Antisense strand to SEQ ID NO: 2244380
auagguaggcaaugguccc

SEQ ID NO: 2244382 - RNA, 19 nt, Artificial Sequence
  Description of Artificial Sequence: Synthetic oligonucleotide
  Sense strand starting at position 660 of SEQ ID NO: 1884155
augcauuuauaugcaugua

SEQ ID NO: 2244383 - RNA, 19 nt, Artificial Sequence
  Description of Artificial Sequence: Synthetic oligonucleotide
  Antisense strand to SEQ ID NO: 2244382
uacaugcauauaaaugcau

SEQ ID NO: 2244384 - RNA, 19 nt, Artificial Sequence
  Description of Artificial Sequence: Synthetic oligonucleotide
  Sense strand starting at position 948 of SEQ ID NO: 1884155
uuguaucccuaaguauaua

SEQ ID NO: 2244385 - RNA, 19 nt, Artificial Sequence
  Description of Artificial Sequence: Synthetic oligonucleotide
  Antisense strand to SEQ ID NO: 2244384
uauauacuuagggauacaa

SEQ ID NO: 2244386 - RNA, 19 nt, Artificial Sequence
  Description of Artificial Sequence: Synthetic oligonucleotide
  Sense strand starting at position 969 of SEQ ID NO: 1884155
aguauauaaugaucagcuu

SEQ ID NO: 2244387 - RNA, 19 nt, Artificial Sequence
  Description of Artificial Sequence: Synthetic oligonucleotide
  Antisense strand to SEQ ID NO: 2244386
aagcugaucauuauauacu

SEQ ID NO: 2244388 - RNA, 19 nt, Artificial Sequence
  Description of Artificial Sequence: Synthetic oligonucleotide
  Sense strand starting at position 970 of SEQ ID NO: 1884155
guauauaaugaucagcuuu

SEQ ID NO: 2244389 - RNA, 19 nt, Artificial Sequence
  Description of Artificial Sequence: Synthetic oligonucleotide
  Antisense strand to SEQ ID NO: 2244388
aaagcugaucauuauauac

SEQ ID NO: 2244390 - RNA, 19 nt, Artificial Sequence
  Description of Artificial Sequence: Synthetic oligonucleotide
  Sense strand starting at position 1124 of SEQ ID NO: 1884155
aaacguuaagaauggcuau

SEQ ID NO: 2244391 - RNA, 19 nt, Artificial Sequence
  Description of Artificial Sequence: Synthetic oligonucleotide
  Antisense strand to SEQ ID NO: 2244390
auagccauucuuaacguuu

SEQ ID NO: 2244392 - RNA, 19 nt, Artificial Sequence
  Description of Artificial Sequence: Synthetic oligonucleotide
  Sense strand starting at position 1127 of SEQ ID NO: 1884155
cguuaagaauggcuauuaa

SEQ ID NO: 2244393 - RNA, 19 nt, Artificial Sequence
  Description of Artificial Sequence: Synthetic oligonucleotide
  Antisense strand to SEQ ID NO: 2244392
uuaauagccauucuuaacg

SEQ ID NO: 2244394 - RNA, 19 nt, Artificial Sequence
  Description of Artificial Sequence: Synthetic oligonucleotide
  Sense strand starting at position 1286 of SEQ ID NO: 1884155
cucacacaccuuugaguuu

SEQ ID NO: 2244395 - RNA, 19 nt, Artificial Sequence
  Description of Artificial Sequence: Synthetic oligonucleotide
  Antisense strand to SEQ ID NO: 2244394
aaacucaaaggugugugag

SEQ ID NO: 2244396 - RNA, 19 nt, Artificial Sequence
  Description of Artificial Sequence: Synthetic oligonucleotide
  Sense strand starting at position 1765 of SEQ ID NO: 1884155
gggauucuagaguauggca

SEQ ID NO: 2244397 - RNA, 19 nt, Artificial Sequence
  Description of Artificial Sequence: Synthetic oligonucleotide
  Antisense strand to SEQ ID NO: 2244396
ugccauacucuagaauccc

SEQ ID NO: 2244398 - RNA, 19 nt, Artificial Sequence
  Description of Artificial Sequence: Synthetic oligonucleotide
  Sense strand starting at position 1868 of SEQ ID NO: 1884155
agaugucuguucuuuagaa

SEQ ID NO: 2244399 - RNA, 19 nt, Artificial Sequence
  Description of Artificial Sequence: Synthetic oligonucleotide
  Antisense strand to SEQ ID NO: 2244398
uucuaaagaacagacaucu

SEQ ID NO: 2244400 - RNA, 19 nt, Artificial Sequence
  Description of Artificial Sequence: Synthetic oligonucleotide
  Sense strand starting at position 1869 of SEQ ID NO: 1884155
gaugucuguucuuuagaau

SEQ ID NO: 2244401 - RNA, 19 nt, Artificial Sequence
  Description of Artificial Sequence: Synthetic oligonucleotide
  Antisense strand to SEQ ID NO: 2244400
auucuaaagaacagacauc

SEQ ID NO: 2244402 - RNA, 19 nt, Artificial Sequence
  Description of Artificial Sequence: Synthetic oligonucleotide
  Sense strand starting at position 1870 of SEQ ID NO: 1884155
augucuguucuuuagaaug

SEQ ID NO: 2244403 - RNA, 19 nt, Artificial Sequence
  Description of Artificial Sequence: Synthetic oligonucleotide
  Antisense strand to SEQ ID NO: 2244402
cauucuaaagaacagacau

SEQ ID NO: 2244404 - RNA, 19 nt, Artificial Sequence
  Description of Artificial Sequence: Synthetic oligonucleotide
  Sense strand starting at position 1897 of SEQ ID NO: 1884155
gauguauguuucuccauga

SEQ ID NO: 2244405 - RNA, 19 nt, Artificial Sequence
  Description of Artificial Sequence: Synthetic oligonucleotide
  Antisense strand to SEQ ID NO: 2244404
ucauggagaaacauacauc

SEQ ID NO: 2244406 - RNA, 19 nt, Artificial Sequence
  Description of Artificial Sequence: Synthetic oligonucleotide
  Sense strand starting at position 2167 of SEQ ID NO: 1884155
ggcugcaccgugucaaguu

SEQ ID NO: 2244407 - RNA, 19 nt, Artificial Sequence
  Description of Artificial Sequence: Synthetic oligonucleotide
  Antisense strand to SEQ ID NO: 2244406
aacuugacacggugcagcc

SEQ ID NO: 2244408 - RNA, 19 nt, Artificial Sequence
  Description of Artificial Sequence: Synthetic oligonucleotide
  Sense strand starting at position 2842 of SEQ ID NO: 1884155
gucacauaguucccugaga

SEQ ID NO: 2244409 - RNA, 19 nt, Artificial Sequence
  Description of Artificial Sequence: Synthetic oligonucleotide
  Antisense strand to SEQ ID NO: 2244408
ucucagggaacuaugugac

SEQ ID NO: 2244410 - RNA, 19 nt, Artificial Sequence
  Description of Artificial Sequence: Synthetic oligonucleotide
  Sense strand starting at position 2843 of SEQ ID NO: 1884155
ucacauaguucccugagaa

SEQ ID NO: 2244411 - RNA, 19 nt, Artificial Sequence
  Description of Artificial Sequence: Synthetic oligonucleotide
  Antisense strand to SEQ ID NO: 2244410
uucucagggaacuauguga

SEQ ID NO: 2244412 - RNA, 19 nt, Artificial Sequence
  Description of Artificial Sequence: Synthetic oligonucleotide
  Sense strand starting at position 2902 of SEQ ID NO: 1884155
gacugaagacagugaguuu

SEQ ID NO: 2244413 - RNA, 19 nt, Artificial Sequence
  Description of Artificial Sequence: Synthetic oligonucleotide
  Antisense strand to SEQ ID NO: 2244412
aaacucacugucuucaguc

SEQ ID NO: 2244414 - RNA, 19 nt, Artificial Sequence
  Description of Artificial Sequence: Synthetic oligonucleotide
  Sense strand starting at position 2957 of SEQ ID NO: 1884155
uuuauauagauacgugaga

SEQ ID NO: 2244415 - RNA, 19 nt, Artificial Sequence
  Description of Artificial Sequence: Synthetic oligonucleotide
  Antisense strand to SEQ ID NO: 2244414
ucucacguaucuauauaaa

SEQ ID NO: 2244416 - RNA, 19 nt, Artificial Sequence
  Description of Artificial Sequence: Synthetic oligonucleotide
  Sense strand starting at position 2958 of SEQ ID NO: 1884155
uuauauagauacgugagau

SEQ ID NO: 2244417 - RNA, 19 nt, Artificial Sequence
  Description of Artificial Sequence: Synthetic oligonucleotide
  Antisense strand to SEQ ID NO: 2244416
aucucacguaucuauauaa

SEQ ID NO: 2244418 - RNA, 19 nt, Artificial Sequence
  Description of Artificial Sequence: Synthetic oligonucleotide
  Sense strand starting at position 2964 of SEQ ID NO: 1884155
agauacgugagaugcauaa

SEQ ID NO: 2244419 - RNA, 19 nt, Artificial Sequence
  Description of Artificial Sequence: Synthetic oligonucleotide
  Antisense strand to SEQ ID NO: 2244418
uuaugcaucucacguaucu

SEQ ID NO: 2244420 - RNA, 19 nt, Artificial Sequence
  Description of Artificial Sequence: Synthetic oligonucleotide
  Sense strand starting at position 2966 of SEQ ID NO: 1884155
auacgugagaugcauaaag

SEQ ID NO: 2244421 - RNA, 19 nt, Artificial Sequence
  Description of Artificial Sequence: Synthetic oligonucleotide
  Antisense strand to SEQ ID NO: 2244420
cuuuaugcaucucacguau

SEQ ID NO: 2244422 - RNA, 19 nt, Artificial Sequence
  Description of Artificial Sequence: Synthetic oligonucleotide
  Sense strand starting at position 2968 of SEQ ID NO: 1884155
acgugagaugcauaaagua

SEQ ID NO: 2244423 - RNA, 19 nt, Artificial Sequence
  Description of Artificial Sequence: Synthetic oligonucleotide
  Antisense strand to SEQ ID NO: 2244422
uacuuuaugcaucucacgu

SEQ ID NO: 2244424 - RNA, 19 nt, Artificial Sequence
  Description of Artificial Sequence: Synthetic oligonucleotide
  Sense strand starting at position 3000 of SEQ ID NO: 1884155
gagcuuuggauucggaauu

SEQ ID NO: 2244425 - RNA, 19 nt, Artificial Sequence
  Description of Artificial Sequence: Synthetic oligonucleotide
  Antisense strand to SEQ ID NO: 2244424
aauuccgaauccaaagcuc

SEQ ID NO: 2244426 - RNA, 19 nt, Artificial Sequence
  Description of Artificial Sequence: Synthetic oligonucleotide
  Sense strand starting at position 3101 of SEQ ID NO: 1884155
acucacagugguggaauua

SEQ ID NO: 2244427 - RNA, 19 nt, Artificial Sequence
  Description of Artificial Sequence: Synthetic oligonucleotide
  Antisense strand to SEQ ID NO: 2244426
uaauuccaccacugugagu

SEQ ID NO: 2244428 - RNA, 19 nt, Artificial Sequence
  Description of Artificial Sequence: Synthetic oligonucleotide
  Sense strand starting at position 3194 of SEQ ID NO: 1884155
guuuguaacaguuagagag

SEQ ID NO: 2244429 - RNA, 19 nt, Artificial Sequence
  Description of Artificial Sequence: Synthetic oligonucleotide
  Antisense strand to SEQ ID NO: 2244428
cucucuaacuguuacaaac

SEQ ID NO: 2244430 - RNA, 19 nt, Artificial Sequence
  Description of Artificial Sequence: Synthetic oligonucleotide
  Sense strand starting at position 3245 of SEQ ID NO: 1884155
ucaccuauuucguuacuau

SEQ ID NO: 2244431 - RNA, 19 nt, Artificial Sequence
  Description of Artificial Sequence: Synthetic oligonucleotide
  Antisense strand to SEQ ID NO: 2244430
auaguaacgaaauagguga

SEQ ID NO: 2244432 - RNA, 19 nt, Artificial Sequence
  Description of Artificial Sequence: Synthetic oligonucleotide
  Sense strand starting at position 3285 of SEQ ID NO: 1884155
gagcaauguguccaacuga

SEQ ID NO: 2244433 - RNA, 19 nt, Artificial Sequence
  Description of Artificial Sequence: Synthetic oligonucleotide
  Antisense strand to SEQ ID NO: 2244432
ucaguuggacacauugcuc

SEQ ID NO: 2244434 - RNA, 19 nt, Artificial Sequence
  Description of Artificial Sequence: Synthetic oligonucleotide
  Sense strand starting at position 3299 of SEQ ID NO: 1884155
acugaauuccugggcaucu

SEQ ID NO: 2244435 - RNA, 19 nt, Artificial Sequence
  Description of Artificial Sequence: Synthetic oligonucleotide
  Antisense strand to SEQ ID NO: 2244434
agaugcccaggaauucagu

SEQ ID NO: 2244436 - RNA, 19 nt, Artificial Sequence
  Description of Artificial Sequence: Synthetic oligonucleotide
  Sense strand starting at position 3300 of SEQ ID NO: 1884155
cugaauuccugggcaucua

SEQ ID NO: 2244437 - RNA, 19 nt, Artificial Sequence
  Description of Artificial Sequence: Synthetic oligonucleotide
  Antisense strand to SEQ ID NO: 2244436
uagaugcccaggaauucag

SEQ ID NO: 2244438 - RNA, 19 nt, Artificial Sequence
  Description of Artificial Sequence: Synthetic oligonucleotide
  Sense strand starting at position 3301 of SEQ ID NO: 1884155
ugaauuccugggcaucuaa

SEQ ID NO: 2244439 - RNA, 19 nt, Artificial Sequence
  Description of Artificial Sequence: Synthetic oligonucleotide
  Antisense strand to SEQ ID NO: 2244438
uuagaugcccaggaauuca

SEQ ID NO: 2244440 - RNA, 19 nt, Artificial Sequence
  Description of Artificial Sequence: Synthetic oligonucleotide
  Sense strand starting at position 3437 of SEQ ID NO: 1884155
gguaaauauuguccuaaag

SEQ ID NO: 2244441 - RNA, 19 nt, Artificial Sequence
  Description of Artificial Sequence: Synthetic oligonucleotide
  Antisense strand to SEQ ID NO: 2244440
cuuuaggacaauauuuacc

SEQ ID NO: 2244442 - RNA, 19 nt, Artificial Sequence
  Description of Artificial Sequence: Synthetic oligonucleotide
  Sense strand starting at position 3446 of SEQ ID NO: 1884155
uguccuaaagacuguuauu

SEQ ID NO: 2244443 - RNA, 19 nt, Artificial Sequence
  Description of Artificial Sequence: Synthetic oligonucleotide
  Antisense strand to SEQ ID NO: 2244442
aauaacagucuuuaggaca

SEQ ID NO: 2244444 - RNA, 19 nt, Artificial Sequence
  Description of Artificial Sequence: Synthetic oligonucleotide
  Sense strand starting at position 3473 of SEQ ID NO: 1884155
aaugcuaaugaguacagua

SEQ ID NO: 2244445 - RNA, 19 nt, Artificial Sequence
  Description of Artificial Sequence: Synthetic oligonucleotide
  Antisense strand to SEQ ID NO: 2244444
uacuguacucauuagcauu

SEQ ID NO: 2244446 - RNA, 19 nt, Artificial Sequence
  Description of Artificial Sequence: Synthetic oligonucleotide
  Sense strand starting at position 3475 of SEQ ID NO: 1884155
ugcuaaugaguacaguaua

SEQ ID NO: 2244447 - RNA, 19 nt, Artificial Sequence
  Description of Artificial Sequence: Synthetic oligonucleotide
  Antisense strand to SEQ ID NO: 2244446
uauacuguacucauuagca

SEQ ID NO: 2244448 - RNA, 19 nt, Artificial Sequence
  Description of Artificial Sequence: Synthetic oligonucleotide
  Sense strand starting at position 3583 of SEQ ID NO: 1884155
uggagauggugcucacauu

SEQ ID NO: 2244449 - RNA, 19 nt, Artificial Sequence
  Description of Artificial Sequence: Synthetic oligonucleotide
  Antisense strand to SEQ ID NO: 2244448
aaugugagcaccaucucca

SEQ ID NO: 2244450 - RNA, 19 nt, Artificial Sequence
  Description of Artificial Sequence: Synthetic oligonucleotide
  Sense strand starting at position 3601 of SEQ ID NO: 1884155
uugaauauuuaggacacua

SEQ ID NO: 2244451 - RNA, 19 nt, Artificial Sequence
  Description of Artificial Sequence: Synthetic oligonucleotide
  Antisense strand to SEQ ID NO: 2244450
uaguguccuaaauauucaa

SEQ ID NO: 2244452 - RNA, 19 nt, Artificial Sequence
  Description of Artificial Sequence: Synthetic oligonucleotide
  Sense strand starting at position 3648 of SEQ ID NO: 1884155
agugucaucguauucguau

SEQ ID NO: 2244453 - RNA, 19 nt, Artificial Sequence
  Description of Artificial Sequence: Synthetic oligonucleotide
  Antisense strand to SEQ ID NO: 2244452
auacgaauacgaugacacu

SEQ ID NO: 2244454 - RNA, 19 nt, Artificial Sequence
  Description of Artificial Sequence: Synthetic oligonucleotide
  Sense strand starting at position 61 of SEQ ID NO: 1884156
uuugaaguggcucacucaa

SEQ ID NO: 2244455 - RNA, 19 nt, Artificial Sequence
  Description of Artificial Sequence: Synthetic oligonucleotide
  Antisense strand to SEQ ID NO: 2244454
uugagugagccacuucaaa

SEQ ID NO: 2244456 - RNA, 19 nt, Artificial Sequence
  Description of Artificial Sequence: Synthetic oligonucleotide
  Sense strand starting at position 446 of SEQ ID NO: 1884156
guugcuggacucuaucaga

SEQ ID NO: 2244457 - RNA, 19 nt, Artificial Sequence
  Description of Artificial Sequence: Synthetic oligonucleotide
  Antisense strand to SEQ ID NO: 2244456
ucugauagaguccagcaac

SEQ ID NO: 2244458 - RNA, 19 nt, Artificial Sequence
  Description of Artificial Sequence: Synthetic oligonucleotide
  Sense strand starting at position 522 of SEQ ID NO: 1884156
augagaguuaacuggcaug

SEQ ID NO: 2244459 - RNA, 19 nt, Artificial Sequence
  Description of Artificial Sequence: Synthetic oligonucleotide
  Antisense strand to SEQ ID NO: 2244458
caugccaguuaacucucau

SEQ ID NO: 2244460 - RNA, 19 nt, Artificial Sequence
  Description of Artificial Sequence: Synthetic oligonucleotide
  Sense strand starting at position 527 of SEQ ID NO: 1884156
aguuaacuggcaugagaag

SEQ ID NO: 2244461 - RNA, 19 nt, Artificial Sequence
  Description of Artificial Sequence: Synthetic oligonucleotide
  Antisense strand to SEQ ID NO: 2244460
cuucucaugccaguuaacu

SEQ ID NO: 2244462 - RNA, 19 nt, Artificial Sequence
  Description of Artificial Sequence: Synthetic oligonucleotide
  Sense strand starting at position 603 of SEQ ID NO: 1884156
uuaguauuaagaggaaagu

SEQ ID NO: 2244463 - RNA, 19 nt, Artificial Sequence
  Description of Artificial Sequence: Synthetic oligonucleotide
  Antisense strand to SEQ ID NO: 2244462
acuuuccucuuaauacuaa

SEQ ID NO: 2244464 - RNA, 19 nt, Artificial Sequence
  Description of Artificial Sequence: Synthetic oligonucleotide
  Sense strand starting at position 641 of SEQ ID NO: 1884156
ucacaagauuuauacagga

SEQ ID NO: 2244465 - RNA, 19 nt, Artificial Sequence
  Description of Artificial Sequence: Synthetic oligonucleotide
  Antisense strand to SEQ ID NO: 2244464
uccuguauaaaucuuguga

SEQ ID NO: 2244466 - RNA, 19 nt, Artificial Sequence
  Description of Artificial Sequence: Synthetic oligonucleotide
  Sense strand starting at position 768 of SEQ ID NO: 1884156
gagacagcugcugaauaua

SEQ ID NO: 2244467 - RNA, 19 nt, Artificial Sequence
  Description of Artificial Sequence: Synthetic oligonucleotide
  Antisense strand to SEQ ID NO: 2244466
uauauucagcagcugucuc

SEQ ID NO: 2244468 - RNA, 19 nt, Artificial Sequence
  Description of Artificial Sequence: Synthetic oligonucleotide
  Sense strand starting at position 771 of SEQ ID NO: 1884156
acagcugcugaauauaauu

SEQ ID NO: 2244469 - RNA, 19 nt, Artificial Sequence
  Description of Artificial Sequence: Synthetic oligonucleotide
  Antisense strand to SEQ ID NO: 2244468
aauuauauucagcagcugu

SEQ ID NO: 2244470 - RNA, 19 nt, Artificial Sequence
  Description of Artificial Sequence: Synthetic oligonucleotide
  Sense strand starting at position 776 of SEQ ID NO: 1884156
ugcugaauauaauucugga

SEQ ID NO: 2244471 - RNA, 19 nt, Artificial Sequence
  Description of Artificial Sequence: Synthetic oligonucleotide
  Antisense strand to SEQ ID NO: 2244470
uccagaauuauauucagca

SEQ ID NO: 2244472 - RNA, 19 nt, Artificial Sequence
  Description of Artificial Sequence: Synthetic oligonucleotide
  Sense strand starting at position 842 of SEQ ID NO: 1884156
uguaauugacuauggaaca

SEQ ID NO: 2244473 - RNA, 19 nt, Artificial Sequence
  Description of Artificial Sequence: Synthetic oligonucleotide
  Antisense strand to SEQ ID NO: 2244472
uguuccauagucaauuaca

SEQ ID NO: 2244474 - RNA, 19 nt, Artificial Sequence
  Description of Artificial Sequence: Synthetic oligonucleotide
  Sense strand starting at position 919 of SEQ ID NO: 1884156
gguucuuaccucugaagga

SEQ ID NO: 2244475 - RNA, 19 nt, Artificial Sequence
  Description of Artificial Sequence: Synthetic oligonucleotide
  Antisense strand to SEQ ID NO: 2244474
uccuucagagguaagaacc

SEQ ID NO: 2244476 - RNA, 19 nt, Artificial Sequence
  Description of Artificial Sequence: Synthetic oligonucleotide
  Sense strand starting at position 932 of SEQ ID NO: 1884156
gaaggagaacuguguuuaa

SEQ ID NO: 2244477 - RNA, 19 nt, Artificial Sequence
  Description of Artificial Sequence: Synthetic oligonucleotide
  Antisense strand to SEQ ID NO: 2244476
uuaaacacaguucuccuuc

SEQ ID NO: 2244478 - RNA, 19 nt, Artificial Sequence
  Description of Artificial Sequence: Synthetic oligonucleotide
  Sense strand starting at position 935 of SEQ ID NO: 1884156
ggagaacuguguuuaacug

SEQ ID NO: 2244479 - RNA, 19 nt, Artificial Sequence
  Description of Artificial Sequence: Synthetic oligonucleotide
  Antisense strand to SEQ ID NO: 2244478
caguuaaacacaguucucc

SEQ ID NO: 2244480 - RNA, 19 nt, Artificial Sequence
  Description of Artificial Sequence: Synthetic oligonucleotide
  Sense strand starting at position 936 of SEQ ID NO: 1884156
gagaacuguguuuaacugu

SEQ ID NO: 2244481 - RNA, 19 nt, Artificial Sequence
  Description of Artificial Sequence: Synthetic oligonucleotide
  Antisense strand to SEQ ID NO: 2244480
acaguuaaacacaguucuc

SEQ ID NO: 2244482 - RNA, 19 nt, Artificial Sequence
  Description of Artificial Sequence: Synthetic oligonucleotide
  Sense strand starting at position 1074 of SEQ ID NO: 1884156
auauuuaaaucggaacuca

SEQ ID NO: 2244483 - RNA, 19 nt, Artificial Sequence
  Description of Artificial Sequence: Synthetic oligonucleotide
  Antisense strand to SEQ ID NO: 2244482
ugaguuccgauuuaaauau

SEQ ID NO: 2244484 - RNA, 19 nt, Artificial Sequence
  Description of Artificial Sequence: Synthetic oligonucleotide
  Sense strand starting at position 1146 of SEQ ID NO: 1884156
acaguaacccacugagauu

SEQ ID NO: 2244485 - RNA, 19 nt, Artificial Sequence
  Description of Artificial Sequence: Synthetic oligonucleotide
  Antisense strand to SEQ ID NO: 2244484
aaucucaguggguuacugu

SEQ ID NO: 2244486 - RNA, 19 nt, Artificial Sequence
  Description of Artificial Sequence: Synthetic oligonucleotide
  Sense strand starting at position 1172 of SEQ ID NO: 1884156
agguaugucccacaacuuu

SEQ ID NO: 2244487 - RNA, 19 nt, Artificial Sequence
  Description of Artificial Sequence: Synthetic oligonucleotide
  Antisense strand to SEQ ID NO: 2244486
aaaguugugggacauaccu

SEQ ID NO: 2244488 - RNA, 19 nt, Artificial Sequence
  Description of Artificial Sequence: Synthetic oligonucleotide
  Sense strand starting at position 1261 of SEQ ID NO: 1884156
caaggauuacuguguauga

SEQ ID NO: 2244489 - RNA, 19 nt, Artificial Sequence
  Description of Artificial Sequence: Synthetic oligonucleotide
  Antisense strand to SEQ ID NO: 2244488
ucauacacaguaauccuug

SEQ ID NO: 2244490 - RNA, 19 nt, Artificial Sequence
  Description of Artificial Sequence: Synthetic oligonucleotide
  Sense strand starting at position 1262 of SEQ ID NO: 1884156
aaggauuacuguguaugau

SEQ ID NO: 2244491 - RNA, 19 nt, Artificial Sequence
  Description of Artificial Sequence: Synthetic oligonucleotide
  Antisense strand to SEQ ID NO: 2244490
aucauacacaguaauccuu

SEQ ID NO: 2244492 - RNA, 19 nt, Artificial Sequence
  Description of Artificial Sequence: Synthetic oligonucleotide
  Sense strand starting at position 1265 of SEQ ID NO: 1884156
gauuacuguguaugauaca

SEQ ID NO: 2244493 - RNA, 19 nt, Artificial Sequence
  Description of Artificial Sequence: Synthetic oligonucleotide
  Antisense strand to SEQ ID NO: 2244492
uguaucauacacaguaauc

SEQ ID NO: 2244494 - RNA, 19 nt, Artificial Sequence
  Description of Artificial Sequence: Synthetic oligonucleotide
  Sense strand starting at position 1432 of SEQ ID NO: 1884156
acgaaauagugacauuuaa

SEQ ID NO: 2244495 - RNA, 19 nt, Artificial Sequence
  Description of Artificial Sequence: Synthetic oligonucleotide
  Antisense strand to SEQ ID NO: 2244494
uuaaaugucacuauuucgu

SEQ ID NO: 2244496 - RNA, 19 nt, Artificial Sequence
  Description of Artificial Sequence: Synthetic oligonucleotide
  Sense strand starting at position 1606 of SEQ ID NO: 1884156
aaauguuagguugagcaga

SEQ ID NO: 2244497 - RNA, 19 nt, Artificial Sequence
  Description of Artificial Sequence: Synthetic oligonucleotide
  Antisense strand to SEQ ID NO: 2244496
ucugcucaaccuaacauuu

SEQ ID NO: 2244498 - RNA, 19 nt, Artificial Sequence
  Description of Artificial Sequence: Synthetic oligonucleotide
  Sense strand starting at position 1655 of SEQ ID NO: 1884156
ccaggaaaugcaugacuca

SEQ ID NO: 2244499 - RNA, 19 nt, Artificial Sequence
  Description of Artificial Sequence: Synthetic oligonucleotide
  Antisense strand to SEQ ID NO: 2244498
ugagucaugcauuuccugg

SEQ ID NO: 2244500 - RNA, 19 nt, Artificial Sequence
  Description of Artificial Sequence: Synthetic oligonucleotide
  Sense strand starting at position 1755 of SEQ ID NO: 1884156
auuaaagaguccuuuauug

SEQ ID NO: 2244501 - RNA, 19 nt, Artificial Sequence
  Description of Artificial Sequence: Synthetic oligonucleotide
  Antisense strand to SEQ ID NO: 2244500
caauaaaggacucuuuaau

SEQ ID NO: 2244502 - RNA, 19 nt, Artificial Sequence
  Description of Artificial Sequence: Synthetic oligonucleotide
  Sense strand starting at position 1799 of SEQ ID NO: 1884156
cgccacaugagguauaaua

SEQ ID NO: 2244503 - RNA, 19 nt, Artificial Sequence
  Description of Artificial Sequence: Synthetic oligonucleotide
  Antisense strand to SEQ ID NO: 2244502
uauuauaccucauguggcg

SEQ ID NO: 2244504 - RNA, 19 nt, Artificial Sequence
  Description of Artificial Sequence: Synthetic oligonucleotide
  Sense strand starting at position 1822 of SEQ ID NO: 1884156
cuuauaaugucauugagag

SEQ ID NO: 2244505 - RNA, 19 nt, Artificial Sequence
  Description of Artificial Sequence: Synthetic oligonucleotide
  Antisense strand to SEQ ID NO: 2244504
cucucaaugacauuauaag

SEQ ID NO: 2244506 - RNA, 19 nt, Artificial Sequence
  Description of Artificial Sequence: Synthetic oligonucleotide
  Sense strand starting at position 1823 of SEQ ID NO: 1884156
uuauaaugucauugagagg

SEQ ID NO: 2244507 - RNA, 19 nt, Artificial Sequence
  Description of Artificial Sequence: Synthetic oligonucleotide
  Antisense strand to SEQ ID NO: 2244506
ccucucaaugacauuauaa

SEQ ID NO: 2244508 - RNA, 19 nt, Artificial Sequence
  Description of Artificial Sequence: Synthetic oligonucleotide
  Sense strand starting at position 1856 of SEQ ID NO: 1884156
augugcagagagcaauaua

SEQ ID NO: 2244509 - RNA, 19 nt, Artificial Sequence
  Description of Artificial Sequence: Synthetic oligonucleotide
  Antisense strand to SEQ ID NO: 2244508
uauauugcucucugcacau

SEQ ID NO: 2244510 - RNA, 19 nt, Artificial Sequence
  Description of Artificial Sequence: Synthetic oligonucleotide
  Sense strand starting at position 2394 of SEQ ID NO: 1884156
aagagauacuggcuaaagu

SEQ ID NO: 2244511 - RNA, 19 nt, Artificial Sequence
  Description of Artificial Sequence: Synthetic oligonucleotide
  Antisense strand to SEQ ID NO: 2244510
acuuuagccaguaucucuu

SEQ ID NO: 2244512 - RNA, 19 nt, Artificial Sequence
  Description of Artificial Sequence: Synthetic oligonucleotide
  Sense strand starting at position 2536 of SEQ ID NO: 1884156
uggaguaauggucauauuc

SEQ ID NO: 2244513 - RNA, 19 nt, Artificial Sequence
  Description of Artificial Sequence: Synthetic oligonucleotide
  Antisense strand to SEQ ID NO: 2244512
gaauaugaccauuacucca

SEQ ID NO: 2244514 - RNA, 19 nt, Artificial Sequence
  Description of Artificial Sequence: Synthetic oligonucleotide
  Sense strand starting at position 2658 of SEQ ID NO: 1884156
augaucuuugcauacagau

SEQ ID NO: 2244515 - RNA, 19 nt, Artificial Sequence
  Description of Artificial Sequence: Synthetic oligonucleotide
  Antisense strand to SEQ ID NO: 2244514
aucuguaugcaaagaucau

SEQ ID NO: 2244516 - RNA, 19 nt, Artificial Sequence
  Description of Artificial Sequence: Synthetic oligonucleotide
  Sense strand starting at position 2886 of SEQ ID NO: 1884156
auguuucuaccuuagauca

SEQ ID NO: 2244517 - RNA, 19 nt, Artificial Sequence
  Description of Artificial Sequence: Synthetic oligonucleotide
  Antisense strand to SEQ ID NO: 2244516
ugaucuaagguagaaacau

SEQ ID NO: 2244518 - RNA, 19 nt, Artificial Sequence
  Description of Artificial Sequence: Synthetic oligonucleotide
  Sense strand starting at position 3017 of SEQ ID NO: 1884156
agaaguaaguguguaauag

SEQ ID NO: 2244519 - RNA, 19 nt, Artificial Sequence
  Description of Artificial Sequence: Synthetic oligonucleotide
  Antisense strand to SEQ ID NO: 2244518
cuauuacacacuuacuucu

SEQ ID NO: 2244520 - RNA, 19 nt, Artificial Sequence
  Description of Artificial Sequence: Synthetic oligonucleotide
  Sense strand starting at position 3064 of SEQ ID NO: 1884156
gagugcuuucuacauaaag

SEQ ID NO: 2244521 - RNA, 19 nt, Artificial Sequence
  Description of Artificial Sequence: Synthetic oligonucleotide
  Antisense strand to SEQ ID NO: 2244520
cuuuauguagaaagcacuc

SEQ ID NO: 2244522 - RNA, 19 nt, Artificial Sequence
  Description of Artificial Sequence: Synthetic oligonucleotide
  Sense strand starting at position 3231 of SEQ ID NO: 1884156
agaucacaagcuuagucau

SEQ ID NO: 2244523 - RNA, 19 nt, Artificial Sequence
  Description of Artificial Sequence: Synthetic oligonucleotide
  Antisense strand to SEQ ID NO: 2244522
augacuaagcuugugaucu

SEQ ID NO: 2244524 - RNA, 19 nt, Artificial Sequence
  Description of Artificial Sequence: Synthetic oligonucleotide
  Sense strand starting at position 3490 of SEQ ID NO: 1884156
guauacagggccuaauaua

SEQ ID NO: 2244525 - RNA, 19 nt, Artificial Sequence
  Description of Artificial Sequence: Synthetic oligonucleotide
  Antisense strand to SEQ ID NO: 2244524
uauauuaggcccuguauac

SEQ ID NO: 2244526 - RNA, 19 nt, Artificial Sequence
  Description of Artificial Sequence: Synthetic oligonucleotide
  Sense strand starting at position 3537 of SEQ ID NO: 1884156
aauaaugguuagguacaua

SEQ ID NO: 2244527 - RNA, 19 nt, Artificial Sequence
  Description of Artificial Sequence: Synthetic oligonucleotide
  Antisense strand to SEQ ID NO: 2244526
uauguaccuaaccauuauu

SEQ ID NO: 2244528 - RNA, 19 nt, Artificial Sequence
  Description of Artificial Sequence: Synthetic oligonucleotide
  Sense strand starting at position 3792 of SEQ ID NO: 1884156
guaagauaucaagguuaaa

SEQ ID NO: 2244529 - RNA, 19 nt, Artificial Sequence
  Description of Artificial Sequence: Synthetic oligonucleotide
  Antisense strand to SEQ ID NO: 2244528
uuuaaccuugauaucuuac

SEQ ID NO: 2244530 - RNA, 19 nt, Artificial Sequence
  Description of Artificial Sequence: Synthetic oligonucleotide
  Sense strand starting at position 3866 of SEQ ID NO: 1884156
guagauugaucagugaaua

SEQ ID NO: 2244531 - RNA, 19 nt, Artificial Sequence
  Description of Artificial Sequence: Synthetic oligonucleotide
  Antisense strand to SEQ ID NO: 2244530
uauucacugaucaaucuac

SEQ ID NO: 2244532 - RNA, 19 nt, Artificial Sequence
  Description of Artificial Sequence: Synthetic oligonucleotide
  Sense strand starting at position 3952 of SEQ ID NO: 1884156
augagucaccuacaagcuu

SEQ ID NO: 2244533 - RNA, 19 nt, Artificial Sequence
  Description of Artificial Sequence: Synthetic oligonucleotide
  Antisense strand to SEQ ID NO: 2244532
aagcuuguaggugacucau

SEQ ID NO: 2244534 - RNA, 19 nt, Artificial Sequence
  Description of Artificial Sequence: Synthetic oligonucleotide
  Sense strand starting at position 45 of SEQ ID NO: 1884157
agcuauguacagugacuau

SEQ ID NO: 2244535 - RNA, 19 nt, Artificial Sequence
  Description of Artificial Sequence: Synthetic oligonucleotide
  Antisense strand to SEQ ID NO: 2244534
auagucacuguacauagcu

SEQ ID NO: 2244536 - RNA, 19 nt, Artificial Sequence
  Description of Artificial Sequence: Synthetic oligonucleotide
  Sense strand starting at position 49 of SEQ ID NO: 1884157
auguacagugacuaucaua

SEQ ID NO: 2244537 - RNA, 19 nt, Artificial Sequence
  Description of Artificial Sequence: Synthetic oligonucleotide
  Antisense strand to SEQ ID NO: 2244536
uaugauagucacuguacau

SEQ ID NO: 2244538 - RNA, 19 nt, Artificial Sequence
  Description of Artificial Sequence: Synthetic oligonucleotide
  Sense strand starting at position 106 of SEQ ID NO: 1884157
guauaaauguuccuuguuu

SEQ ID NO: 2244539 - RNA, 19 nt, Artificial Sequence
  Description of Artificial Sequence: Synthetic oligonucleotide
  Antisense strand to SEQ ID NO: 2244538
aaacaaggaacauuuauac

SEQ ID NO: 2244540 - RNA, 19 nt, Artificial Sequence
  Description of Artificial Sequence: Synthetic oligonucleotide
  Sense strand starting at position 108 of SEQ ID NO: 1884157
auaaauguuccuuguuugu

SEQ ID NO: 2244541 - RNA, 19 nt, Artificial Sequence
  Description of Artificial Sequence: Synthetic oligonucleotide
  Antisense strand to SEQ ID NO: 2244540
acaaacaaggaacauuuau

SEQ ID NO: 2244542 - RNA, 19 nt, Artificial Sequence
  Description of Artificial Sequence: Synthetic oligonucleotide
  Sense strand starting at position 185 of SEQ ID NO: 1884157
gcaacugaccagugucacu

SEQ ID NO: 2244543 - RNA, 19 nt, Artificial Sequence
  Description of Artificial Sequence: Synthetic oligonucleotide
  Antisense strand to SEQ ID NO: 2244542
agugacacuggucaguugc

SEQ ID NO: 2244544 - RNA, 19 nt, Artificial Sequence
  Description of Artificial Sequence: Synthetic oligonucleotide
  Sense strand starting at position 223 of SEQ ID NO: 1884157
uccauuacuucucaggaug

SEQ ID NO: 2244545 - RNA, 19 nt, Artificial Sequence
  Description of Artificial Sequence: Synthetic oligonucleotide
  Antisense strand to SEQ ID NO: 2244544
cauccugagaaguaaugga

SEQ ID NO: 2244546 - RNA, 19 nt, Artificial Sequence
  Description of Artificial Sequence: Synthetic oligonucleotide
  Sense strand starting at position 414 of SEQ ID NO: 1884157
ucuucuuuagcagaggaca

SEQ ID NO: 2244547 - RNA, 19 nt, Artificial Sequence
  Description of Artificial Sequence: Synthetic oligonucleotide
  Antisense strand to SEQ ID NO: 2244546
uguccucugcuaaagaaga

SEQ ID NO: 2244548 - RNA, 19 nt, Artificial Sequence
  Description of Artificial Sequence: Synthetic oligonucleotide
  Sense strand starting at position 524 of SEQ ID NO: 1884157
aguuuagaauucccaagag

SEQ ID NO: 2244549 - RNA, 19 nt, Artificial Sequence
  Description of Artificial Sequence: Synthetic oligonucleotide
  Antisense strand to SEQ ID NO: 2244548
cucuugggaauucuaaacu

SEQ ID NO: 2244550 - RNA, 19 nt, Artificial Sequence
  Description of Artificial Sequence: Synthetic oligonucleotide
  Sense strand starting at position 741 of SEQ ID NO: 1884157
aaaggugcgcuuuaacuaa

SEQ ID NO: 2244551 - RNA, 19 nt, Artificial Sequence
  Description of Artificial Sequence: Synthetic oligonucleotide
  Antisense strand to SEQ ID NO: 2244550
uuaguuaaagcgcaccuuu

SEQ ID NO: 2244552 - RNA, 19 nt, Artificial Sequence
  Description of Artificial Sequence: Synthetic oligonucleotide
  Sense strand starting at position 745 of SEQ ID NO: 1884157
gugcgcuuuaacuaaagga

SEQ ID NO: 2244553 - RNA, 19 nt, Artificial Sequence
  Description of Artificial Sequence: Synthetic oligonucleotide
  Antisense strand to SEQ ID NO: 2244552
uccuuuaguuaaagcgcac

SEQ ID NO: 2244554 - RNA, 19 nt, Artificial Sequence
  Description of Artificial Sequence: Synthetic oligonucleotide
  Sense strand starting at position 1027 of SEQ ID NO: 1884157
gggcaacagcauugagaga

SEQ ID NO: 2244555 - RNA, 19 nt, Artificial Sequence
  Description of Artificial Sequence: Synthetic oligonucleotide
  Antisense strand to SEQ ID NO: 2244554
ucucucaaugcuguugccc

SEQ ID NO: 2244556 - RNA, 19 nt, Artificial Sequence
  Description of Artificial Sequence: Synthetic oligonucleotide
  Sense strand starting at position 1044 of SEQ ID NO: 1884157
gagacccauucucuagagu

SEQ ID NO: 2244557 - RNA, 19 nt, Artificial Sequence
  Description of Artificial Sequence: Synthetic oligonucleotide
  Antisense strand to SEQ ID NO: 2244556
acucuagagaaugggucuc

SEQ ID NO: 2244558 - RNA, 19 nt, Artificial Sequence
  Description of Artificial Sequence: Synthetic oligonucleotide
  Sense strand starting at position 1174 of SEQ ID NO: 1884157
auuugaagcugucauagaa

SEQ ID NO: 2244559 - RNA, 19 nt, Artificial Sequence
  Description of Artificial Sequence: Synthetic oligonucleotide
  Antisense strand to SEQ ID NO: 2244558
uucuaugacagcuucaaau

SEQ ID NO: 2244560 - RNA, 19 nt, Artificial Sequence
  Description of Artificial Sequence: Synthetic oligonucleotide
  Sense strand starting at position 1321 of SEQ ID NO: 1884157
auuaucuggcauugaauca

SEQ ID NO: 2244561 - RNA, 19 nt, Artificial Sequence
  Description of Artificial Sequence: Synthetic oligonucleotide
  Antisense strand to SEQ ID NO: 2244560
ugauucaaugccagauaau

SEQ ID NO: 2244562 - RNA, 19 nt, Artificial Sequence
  Description of Artificial Sequence: Synthetic oligonucleotide
  Sense strand starting at position 1417 of SEQ ID NO: 1884157
agaugugaugcagauguua

SEQ ID NO: 2244563 - RNA, 19 nt, Artificial Sequence
  Description of Artificial Sequence: Synthetic oligonucleotide
  Antisense strand to SEQ ID NO: 2244562
uaacaucugcaucacaucu

SEQ ID NO: 2244564 - RNA, 19 nt, Artificial Sequence
  Description of Artificial Sequence: Synthetic oligonucleotide
  Sense strand starting at position 1419 of SEQ ID NO: 1884157
augugaugcagauguuaaa

SEQ ID NO: 2244565 - RNA, 19 nt, Artificial Sequence
  Description of Artificial Sequence: Synthetic oligonucleotide
  Antisense strand to SEQ ID NO: 2244564
uuuaacaucugcaucacau

SEQ ID NO: 2244566 - RNA, 19 nt, Artificial Sequence
  Description of Artificial Sequence: Synthetic oligonucleotide
  Sense strand starting at position 1438 of SEQ ID NO: 1884157
auuaucagauagggacuua

SEQ ID NO: 2244567 - RNA, 19 nt, Artificial Sequence
  Description of Artificial Sequence: Synthetic oligonucleotide
  Antisense strand to SEQ ID NO: 2244566
uaagucccuaucugauaau

SEQ ID NO: 2244568 - RNA, 19 nt, Artificial Sequence
  Description of Artificial Sequence: Synthetic oligonucleotide
  Sense strand starting at position 1656 of SEQ ID NO: 1884157
acuugaagauaggugagua

SEQ ID NO: 2244569 - RNA, 19 nt, Artificial Sequence
  Description of Artificial Sequence: Synthetic oligonucleotide
  Antisense strand to SEQ ID NO: 2244568
uacucaccuaucuucaagu

SEQ ID NO: 2244570 - RNA, 19 nt, Artificial Sequence
  Description of Artificial Sequence: Synthetic oligonucleotide
  Sense strand starting at position 1720 of SEQ ID NO: 1884157
gcuauaggauaauaguaaa

SEQ ID NO: 2244571 - RNA, 19 nt, Artificial Sequence
  Description of Artificial Sequence: Synthetic oligonucleotide
  Antisense strand to SEQ ID NO: 2244570
uuuacuauuauccuauagc

SEQ ID NO: 2244572 - RNA, 19 nt, Artificial Sequence
  Description of Artificial Sequence: Synthetic oligonucleotide
  Sense strand starting at position 2119 of SEQ ID NO: 1884157
ccauuaaagcacugacaga

SEQ ID NO: 2244573 - RNA, 19 nt, Artificial Sequence
  Description of Artificial Sequence: Synthetic oligonucleotide
  Antisense strand to SEQ ID NO: 2244572
ucugucagugcuuuaaugg

SEQ ID NO: 2244574 - RNA, 19 nt, Artificial Sequence
  Description of Artificial Sequence: Synthetic oligonucleotide
  Sense strand starting at position 2165 of SEQ ID NO: 1884157
aagugaaaguaucugcuaa

SEQ ID NO: 2244575 - RNA, 19 nt, Artificial Sequence
  Description of Artificial Sequence: Synthetic oligonucleotide
  Antisense strand to SEQ ID NO: 2244574
uuagcagauacuuucacuu

SEQ ID NO: 2244576 - RNA, 19 nt, Artificial Sequence
  Description of Artificial Sequence: Synthetic oligonucleotide
  Sense strand starting at position 2996 of SEQ ID NO: 1884157
agacauacauaauguagau

SEQ ID NO: 2244577 - RNA, 19 nt, Artificial Sequence
  Description of Artificial Sequence: Synthetic oligonucleotide
  Antisense strand to SEQ ID NO: 2244576
aucuacauuauguaugucu

SEQ ID NO: 2244578 - RNA, 19 nt, Artificial Sequence
  Description of Artificial Sequence: Synthetic oligonucleotide
  Sense strand starting at position 3178 of SEQ ID NO: 1884157
accuacauaucuccuggua

SEQ ID NO: 2244579 - RNA, 19 nt, Artificial Sequence
  Description of Artificial Sequence: Synthetic oligonucleotide
  Antisense strand to SEQ ID NO: 2244578
uaccaggagauauguaggu

SEQ ID NO: 2244580 - RNA, 19 nt, Artificial Sequence
  Description of Artificial Sequence: Synthetic oligonucleotide
  Sense strand starting at position 3240 of SEQ ID NO: 1884157
cuguucuauuucuguggaa

SEQ ID NO: 2244581 - RNA, 19 nt, Artificial Sequence
  Description of Artificial Sequence: Synthetic oligonucleotide
  Antisense strand to SEQ ID NO: 2244580
uuccacagaaauagaacag

SEQ ID NO: 2244582 - RNA, 19 nt, Artificial Sequence
  Description of Artificial Sequence: Synthetic oligonucleotide
  Sense strand starting at position 3243 of SEQ ID NO: 1884157
uucuauuucuguggaacau

SEQ ID NO: 2244583 - RNA, 19 nt, Artificial Sequence
  Description of Artificial Sequence: Synthetic oligonucleotide
  Antisense strand to SEQ ID NO: 2244582
auguuccacagaaauagaa

SEQ ID NO: 2244584 - RNA, 19 nt, Artificial Sequence
  Description of Artificial Sequence: Synthetic oligonucleotide
  Sense strand starting at position 3419 of SEQ ID NO: 1884157
gauaauugcugucuaaaga

SEQ ID NO: 2244585 - RNA, 19 nt, Artificial Sequence
  Description of Artificial Sequence: Synthetic oligonucleotide
  Antisense strand to SEQ ID NO: 2244584
ucuuuagacagcaauuauc

SEQ ID NO: 2244586 - RNA, 19 nt, Artificial Sequence
  Description of Artificial Sequence: Synthetic oligonucleotide
  Sense strand starting at position 3420 of SEQ ID NO: 1884157
auaauugcugucuaaagaa

SEQ ID NO: 2244587 - RNA, 19 nt, Artificial Sequence
  Description of Artificial Sequence: Synthetic oligonucleotide
  Antisense strand to SEQ ID NO: 2244586
uucuuuagacagcaauuau

SEQ ID NO: 2244588 - RNA, 19 nt, Artificial Sequence
  Description of Artificial Sequence: Synthetic oligonucleotide
  Sense strand starting at position 3446 of SEQ ID NO: 1884157
uaccaaugaucaguagagu

SEQ ID NO: 2244589 - RNA, 19 nt, Artificial Sequence
  Description of Artificial Sequence: Synthetic oligonucleotide
  Antisense strand to SEQ ID NO: 2244588
acucuacugaucauuggua

SEQ ID NO: 2244590 - RNA, 19 nt, Artificial Sequence
  Description of Artificial Sequence: Synthetic oligonucleotide
  Sense strand starting at position 3522 of SEQ ID NO: 1884157
auggaagaguaccauugua

SEQ ID NO: 2244591 - RNA, 19 nt, Artificial Sequence
  Description of Artificial Sequence: Synthetic oligonucleotide
  Antisense strand to SEQ ID NO: 2244590
uacaaugguacucuuccau

SEQ ID NO: 2244592 - RNA, 19 nt, Artificial Sequence
  Description of Artificial Sequence: Synthetic oligonucleotide
  Sense strand starting at position 3527 of SEQ ID NO: 1884157
agaguaccauuguaagauu

SEQ ID NO: 2244593 - RNA, 19 nt, Artificial Sequence
  Description of Artificial Sequence: Synthetic oligonucleotide
  Antisense strand to SEQ ID NO: 2244592
aaucuuacaaugguacucu

SEQ ID NO: 2244594 - RNA, 19 nt, Artificial Sequence
  Description of Artificial Sequence: Synthetic oligonucleotide
  Sense strand starting at position 3562 of SEQ ID NO: 1884157
agcaauguauuaucugaag

SEQ ID NO: 2244595 - RNA, 19 nt, Artificial Sequence
  Description of Artificial Sequence: Synthetic oligonucleotide
  Antisense strand to SEQ ID NO: 2244594
cuucagauaauacauugcu

SEQ ID NO: 2244596 - RNA, 19 nt, Artificial Sequence
  Description of Artificial Sequence: Synthetic oligonucleotide
  Sense strand starting at position 3565 of SEQ ID NO: 1884157
aauguauuaucugaaggua

SEQ ID NO: 2244597 - RNA, 19 nt, Artificial Sequence
  Description of Artificial Sequence: Synthetic oligonucleotide
  Antisense strand to SEQ ID NO: 2244596
uaccuucagauaauacauu

SEQ ID NO: 2244598 - RNA, 19 nt, Artificial Sequence
  Description of Artificial Sequence: Synthetic oligonucleotide
  Sense strand starting at position 3568 of SEQ ID NO: 1884157
guauuaucugaagguaaac

SEQ ID NO: 2244599 - RNA, 19 nt, Artificial Sequence
  Description of Artificial Sequence: Synthetic oligonucleotide
  Antisense strand to SEQ ID NO: 2244598
guuuaccuucagauaauac

SEQ ID NO: 2244600 - RNA, 19 nt, Artificial Sequence
  Description of Artificial Sequence: Synthetic oligonucleotide
  Sense strand starting at position 3577 of SEQ ID NO: 1884157
gaagguaaacuguguuaaa

SEQ ID NO: 2244601 - RNA, 19 nt, Artificial Sequence
  Description of Artificial Sequence: Synthetic oligonucleotide
  Antisense strand to SEQ ID NO: 2244600
uuuaacacaguuuaccuuc

SEQ ID NO: 2244602 - RNA, 19 nt, Artificial Sequence
  Description of Artificial Sequence: Synthetic oligonucleotide
  Sense strand starting at position 3578 of SEQ ID NO: 1884157
aagguaaacuguguuaaau

SEQ ID NO: 2244603 - RNA, 19 nt, Artificial Sequence
  Description of Artificial Sequence: Synthetic oligonucleotide
  Antisense strand to SEQ ID NO: 2244602
auuuaacacaguuuaccuu

SEQ ID NO: 2244604 - RNA, 19 nt, Artificial Sequence
  Description of Artificial Sequence: Synthetic oligonucleotide
  Sense strand starting at position 3642 of SEQ ID NO: 1884157
ggaguaaacuuauaagcca

SEQ ID NO: 2244605 - RNA, 19 nt, Artificial Sequence
  Description of Artificial Sequence: Synthetic oligonucleotide
  Antisense strand to SEQ ID NO: 2244604
uggcuuauaaguuuacucc

SEQ ID NO: 2244606 - RNA, 19 nt, Artificial Sequence
  Description of Artificial Sequence: Synthetic oligonucleotide
  Sense strand starting at position 3650 of SEQ ID NO: 1884157
cuuauaagccaguggugga

SEQ ID NO: 2244607 - RNA, 19 nt, Artificial Sequence
  Description of Artificial Sequence: Synthetic oligonucleotide
  Antisense strand to SEQ ID NO: 2244606
uccaccacuggcuuauaag

SEQ ID NO: 2244608 - RNA, 19 nt, Artificial Sequence
  Description of Artificial Sequence: Synthetic oligonucleotide
  Sense strand starting at position 3657 of SEQ ID NO: 1884157
gccagugguggagaugaaa

SEQ ID NO: 2244609 - RNA, 19 nt, Artificial Sequence
  Description of Artificial Sequence: Synthetic oligonucleotide
  Antisense strand to SEQ ID NO: 2244608
uuucaucuccaccacuggc

SEQ ID NO: 2244610 - RNA, 19 nt, Artificial Sequence
  Description of Artificial Sequence: Synthetic oligonucleotide
  Sense strand starting at position 3846 of SEQ ID NO: 1884157
uaaucagacucguuaugaa

SEQ ID NO: 2244611 - RNA, 19 nt, Artificial Sequence
  Description of Artificial Sequence: Synthetic oligonucleotide
  Antisense strand to SEQ ID NO: 2244610
uucauaacgagucugauua

SEQ ID NO: 2244612 - RNA, 19 nt, Artificial Sequence
  Description of Artificial Sequence: Synthetic oligonucleotide
  Sense strand starting at position 3918 of SEQ ID NO: 1884157
agagacauauauuaacagu

SEQ ID NO: 2244613 - RNA, 19 nt, Artificial Sequence
  Description of Artificial Sequence: Synthetic oligonucleotide
  Antisense strand to SEQ ID NO: 2244612
acuguuaauauaugucucu

SEQ ID NO: 2244614 - RNA, 19 nt, Artificial Sequence
  Description of Artificial Sequence: Synthetic oligonucleotide
  Sense strand starting at position 382 of SEQ ID NO: 1884158
gcaaacuuugagugcaaag

SEQ ID NO: 2244615 - RNA, 19 nt, Artificial Sequence
  Description of Artificial Sequence: Synthetic oligonucleotide
  Antisense strand to SEQ ID NO: 2244614
cuuugcacucaaaguuugc

SEQ ID NO: 2244616 - RNA, 19 nt, Artificial Sequence
  Description of Artificial Sequence: Synthetic oligonucleotide
  Sense strand starting at position 384 of SEQ ID NO: 1884158
aaacuuugagugcaaaguu

SEQ ID NO: 2244617 - RNA, 19 nt, Artificial Sequence
  Description of Artificial Sequence: Synthetic oligonucleotide
  Antisense strand to SEQ ID NO: 2244616
aacuuugcacucaaaguuu

SEQ ID NO: 2244618 - RNA, 19 nt, Artificial Sequence
  Description of Artificial Sequence: Synthetic oligonucleotide
  Sense strand starting at position 407 of SEQ ID NO: 1884158
ugaugaagcucacuguuga

SEQ ID NO: 2244619 - RNA, 19 nt, Artificial Sequence
  Description of Artificial Sequence: Synthetic oligonucleotide
  Antisense strand to SEQ ID NO: 2244618
ucaacagugagcuucauca

SEQ ID NO: 2244620 - RNA, 19 nt, Artificial Sequence
  Description of Artificial Sequence: Synthetic oligonucleotide
  Sense strand starting at position 460 of SEQ ID NO: 1884158
ggaagucuugggugcaaca

SEQ ID NO: 2244621 - RNA, 19 nt, Artificial Sequence
  Description of Artificial Sequence: Synthetic oligonucleotide
  Antisense strand to SEQ ID NO: 2244620
uguugcacccaagacuucc

SEQ ID NO: 2244622 - RNA, 19 nt, Artificial Sequence
  Description of Artificial Sequence: Synthetic oligonucleotide
  Sense strand starting at position 462 of SEQ ID NO: 1884158
aagucuugggugcaacaau

SEQ ID NO: 2244623 - RNA, 19 nt, Artificial Sequence
  Description of Artificial Sequence: Synthetic oligonucleotide
  Antisense strand to SEQ ID NO: 2244622
auuguugcacccaagacuu

SEQ ID NO: 2244624 - RNA, 19 nt, Artificial Sequence
  Description of Artificial Sequence: Synthetic oligonucleotide
  Sense strand starting at position 514 of SEQ ID NO: 1884158
cuugcaauccugcagauga

SEQ ID NO: 2244625 - RNA, 19 nt, Artificial Sequence
  Description of Artificial Sequence: Synthetic oligonucleotide
  Antisense strand to SEQ ID NO: 2244624
ucaucugcaggauugcaag

SEQ ID NO: 2244626 - RNA, 19 nt, Artificial Sequence
  Description of Artificial Sequence: Synthetic oligonucleotide
  Sense strand starting at position 516 of SEQ ID NO: 1884158
ugcaauccugcagaugaca

SEQ ID NO: 2244627 - RNA, 19 nt, Artificial Sequence
  Description of Artificial Sequence: Synthetic oligonucleotide
  Antisense strand to SEQ ID NO: 2244626
ugucaucugcaggauugca

SEQ ID NO: 2244628 - RNA, 19 nt, Artificial Sequence
  Description of Artificial Sequence: Synthetic oligonucleotide
  Sense strand starting at position 580 of SEQ ID NO: 1884158
augauucuggcaugggauc

SEQ ID NO: 2244629 - RNA, 19 nt, Artificial Sequence
  Description of Artificial Sequence: Synthetic oligonucleotide
  Antisense strand to SEQ ID NO: 2244628
gaucccaugccagaaucau

SEQ ID NO: 2244630 - RNA, 19 nt, Artificial Sequence
  Description of Artificial Sequence: Synthetic oligonucleotide
  Sense strand starting at position 844 of SEQ ID NO: 1884158
uccuuucugacugguagga

SEQ ID NO: 2244631 - RNA, 19 nt, Artificial Sequence
  Description of Artificial Sequence: Synthetic oligonucleotide
  Antisense strand to SEQ ID NO: 2244630
uccuaccagucagaaagga

SEQ ID NO: 2244632 - RNA, 19 nt, Artificial Sequence
  Description of Artificial Sequence: Synthetic oligonucleotide
  Sense strand starting at position 848 of SEQ ID NO: 1884158
uucugacugguaggaugaa

SEQ ID NO: 2244633 - RNA, 19 nt, Artificial Sequence
  Description of Artificial Sequence: Synthetic oligonucleotide
  Antisense strand to SEQ ID NO: 2244632
uucauccuaccagucagaa

SEQ ID NO: 2244634 - RNA, 19 nt, Artificial Sequence
  Description of Artificial Sequence: Synthetic oligonucleotide
  Sense strand starting at position 1741 of SEQ ID NO: 1884158
cuacaugaguaguuucuca

SEQ ID NO: 2244635 - RNA, 19 nt, Artificial Sequence
  Description of Artificial Sequence: Synthetic oligonucleotide
  Antisense strand to SEQ ID NO: 2244634
ugagaaacuacucauguag

SEQ ID NO: 2244636 - RNA, 19 nt, Artificial Sequence
  Description of Artificial Sequence: Synthetic oligonucleotide
  Sense strand starting at position 1868 of SEQ ID NO: 1884158
uagugugaugguuaaagag

SEQ ID NO: 2244637 - RNA, 19 nt, Artificial Sequence
  Description of Artificial Sequence: Synthetic oligonucleotide
  Antisense strand to SEQ ID NO: 2244636
cucuuuaaccaucacacua

SEQ ID NO: 2244638 - RNA, 19 nt, Artificial Sequence
  Description of Artificial Sequence: Synthetic oligonucleotide
  Sense strand starting at position 2010 of SEQ ID NO: 1884158
ccucucugugcucuguuau

SEQ ID NO: 2244639 - RNA, 19 nt, Artificial Sequence
  Description of Artificial Sequence: Synthetic oligonucleotide
  Antisense strand to SEQ ID NO: 2244638
auaacagagcacagagagg

SEQ ID NO: 2244640 - RNA, 19 nt, Artificial Sequence
  Description of Artificial Sequence: Synthetic oligonucleotide
  Sense strand starting at position 2048 of SEQ ID NO: 1884158
gguuguugcgaagaauaaa

SEQ ID NO: 2244641 - RNA, 19 nt, Artificial Sequence
  Description of Artificial Sequence: Synthetic oligonucleotide
  Antisense strand to SEQ ID NO: 2244640
uuuauucuucgcaacaacc

SEQ ID NO: 2244642 - RNA, 19 nt, Artificial Sequence
  Description of Artificial Sequence: Synthetic oligonucleotide
  Sense strand starting at position 2051 of SEQ ID NO: 1884158
uguugcgaagaauaaauaa

SEQ ID NO: 2244643 - RNA, 19 nt, Artificial Sequence
  Description of Artificial Sequence: Synthetic oligonucleotide
  Antisense strand to SEQ ID NO: 2244642
uuauuuauucuucgcaaca

SEQ ID NO: 2244644 - RNA, 19 nt, Artificial Sequence
  Description of Artificial Sequence: Synthetic oligonucleotide
  Sense strand starting at position 2121 of SEQ ID NO: 1884158
uuugaaguugacuauguuu

SEQ ID NO: 2244645 - RNA, 19 nt, Artificial Sequence
  Description of Artificial Sequence: Synthetic oligonucleotide
  Antisense strand to SEQ ID NO: 2244644
aaacauagucaacuucaaa

SEQ ID NO: 2244646 - RNA, 19 nt, Artificial Sequence
  Description of Artificial Sequence: Synthetic oligonucleotide
  Sense strand starting at position 2212 of SEQ ID NO: 1884158
ugaucauuucuauguugca

SEQ ID NO: 2244647 - RNA, 19 nt, Artificial Sequence
  Description of Artificial Sequence: Synthetic oligonucleotide
  Antisense strand to SEQ ID NO: 2244646
ugcaacauagaaaugauca

SEQ ID NO: 2244648 - RNA, 19 nt, Artificial Sequence
  Description of Artificial Sequence: Synthetic oligonucleotide
  Sense strand starting at position 2251 of SEQ ID NO: 1884158
cagguaguaguugaucuaa

SEQ ID NO: 2244649 - RNA, 19 nt, Artificial Sequence
  Description of Artificial Sequence: Synthetic oligonucleotide
  Antisense strand to SEQ ID NO: 2244648
uuagaucaacuacuaccug

SEQ ID NO: 2244650 - RNA, 19 nt, Artificial Sequence
  Description of Artificial Sequence: Synthetic oligonucleotide
  Sense strand starting at position 2253 of SEQ ID NO: 1884158
gguaguaguugaucuaaug

SEQ ID NO: 2244651 - RNA, 19 nt, Artificial Sequence
  Description of Artificial Sequence: Synthetic oligonucleotide
  Antisense strand to SEQ ID NO: 2244650
cauuagaucaacuacuacc

SEQ ID NO: 2244652 - RNA, 19 nt, Artificial Sequence
  Description of Artificial Sequence: Synthetic oligonucleotide
  Sense strand starting at position 2621 of SEQ ID NO: 1884158
uuaauaugucaaggucaca

SEQ ID NO: 2244653 - RNA, 19 nt, Artificial Sequence
  Description of Artificial Sequence: Synthetic oligonucleotide
  Antisense strand to SEQ ID NO: 2244652
ugugaccuugacauauuaa

SEQ ID NO: 2244654 - RNA, 19 nt, Artificial Sequence
  Description of Artificial Sequence: Synthetic oligonucleotide
  Sense strand starting at position 2781 of SEQ ID NO: 1884158
gucagaaauucugucuuau

SEQ ID NO: 2244655 - RNA, 19 nt, Artificial Sequence
  Description of Artificial Sequence: Synthetic oligonucleotide
  Antisense strand to SEQ ID NO: 2244654
auaagacagaauuucugac

SEQ ID NO: 2244656 - RNA, 19 nt, Artificial Sequence
  Description of Artificial Sequence: Synthetic oligonucleotide
  Sense strand starting at position 2881 of SEQ ID NO: 1884158
acaugucauguagaguuaa

SEQ ID NO: 2244657 - RNA, 19 nt, Artificial Sequence
  Description of Artificial Sequence: Synthetic oligonucleotide
  Antisense strand to SEQ ID NO: 2244656
uuaacucuacaugacaugu

SEQ ID NO: 2244658 - RNA, 19 nt, Artificial Sequence
  Description of Artificial Sequence: Synthetic oligonucleotide
  Sense strand starting at position 2896 of SEQ ID NO: 1884158
uuaagugaauccuccaguu

SEQ ID NO: 2244659 - RNA, 19 nt, Artificial Sequence
  Description of Artificial Sequence: Synthetic oligonucleotide
  Antisense strand to SEQ ID NO: 2244658
aacuggaggauucacuuaa

SEQ ID NO: 2244660 - RNA, 19 nt, Artificial Sequence
  Description of Artificial Sequence: Synthetic oligonucleotide
  Sense strand starting at position 3304 of SEQ ID NO: 1884158
agaucuuaguuagaauuug

SEQ ID NO: 2244661 - RNA, 19 nt, Artificial Sequence
  Description of Artificial Sequence: Synthetic oligonucleotide
  Antisense strand to SEQ ID NO: 2244660
caaauucuaacuaagaucu

SEQ ID NO: 2244662 - RNA, 19 nt, Artificial Sequence
  Description of Artificial Sequence: Synthetic oligonucleotide
  Sense strand starting at position 3405 of SEQ ID NO: 1884158
auagcauuauuaucuggau

SEQ ID NO: 2244663 - RNA, 19 nt, Artificial Sequence
  Description of Artificial Sequence: Synthetic oligonucleotide
  Antisense strand to SEQ ID NO: 2244662
auccagauaauaaugcuau

SEQ ID NO: 2244664 - RNA, 19 nt, Artificial Sequence
  Description of Artificial Sequence: Synthetic oligonucleotide
  Sense strand starting at position 3500 of SEQ ID NO: 1884158
ccaaauaggucuuugugau

SEQ ID NO: 2244665 - RNA, 19 nt, Artificial Sequence
  Description of Artificial Sequence: Synthetic oligonucleotide
  Antisense strand to SEQ ID NO: 2244664
aucacaaagaccuauuugg

SEQ ID NO: 2244666 - RNA, 19 nt, Artificial Sequence
  Description of Artificial Sequence: Synthetic oligonucleotide
  Sense strand starting at position 3501 of SEQ ID NO: 1884158
caaauaggucuuugugaua

SEQ ID NO: 2244667 - RNA, 19 nt, Artificial Sequence
  Description of Artificial Sequence: Synthetic oligonucleotide
  Antisense strand to SEQ ID NO: 2244666
uaucacaaagaccuauuug

SEQ ID NO: 2244668 - RNA, 19 nt, Artificial Sequence
  Description of Artificial Sequence: Synthetic oligonucleotide
  Sense strand starting at position 3517 of SEQ ID NO: 1884158
auaggucaaccaugaguua

SEQ ID NO: 2244669 - RNA, 19 nt, Artificial Sequence
  Description of Artificial Sequence: Synthetic oligonucleotide
  Antisense strand to SEQ ID NO: 2244668
uaacucaugguugaccuau

SEQ ID NO: 2244670 - RNA, 19 nt, Artificial Sequence
  Description of Artificial Sequence: Synthetic oligonucleotide
  Sense strand starting at position 3520 of SEQ ID NO: 1884158
ggucaaccaugaguuaguu

SEQ ID NO: 2244671 - RNA, 19 nt, Artificial Sequence
  Description of Artificial Sequence: Synthetic oligonucleotide
  Antisense strand to SEQ ID NO: 2244670
aacuaacucaugguugacc

SEQ ID NO: 2244672 - RNA, 19 nt, Artificial Sequence
  Description of Artificial Sequence: Synthetic oligonucleotide
  Sense strand starting at position 3528 of SEQ ID NO: 1884158
augaguuaguucccaacuc

SEQ ID NO: 2244673 - RNA, 19 nt, Artificial Sequence
  Description of Artificial Sequence: Synthetic oligonucleotide
  Antisense strand to SEQ ID NO: 2244672
gaguugggaacuaacucau

SEQ ID NO: 2244674 - RNA, 19 nt, Artificial Sequence
  Description of Artificial Sequence: Synthetic oligonucleotide
  Sense strand starting at position 3658 of SEQ ID NO: 1884158
cuauguaaucuuggucaaa

SEQ ID NO: 2244675 - RNA, 19 nt, Artificial Sequence
  Description of Artificial Sequence: Synthetic oligonucleotide
  Antisense strand to SEQ ID NO: 2244674
uuugaccaagauuacauag

SEQ ID NO: 2244676 - RNA, 19 nt, Artificial Sequence
  Description of Artificial Sequence: Synthetic oligonucleotide
  Sense strand starting at position 3660 of SEQ ID NO: 1884158
auguaaucuuggucaaauc

SEQ ID NO: 2244677 - RNA, 19 nt, Artificial Sequence
  Description of Artificial Sequence: Synthetic oligonucleotide
  Antisense strand to SEQ ID NO: 2244676
gauuugaccaagauuacau

SEQ ID NO: 2244678 - RNA, 19 nt, Artificial Sequence
  Description of Artificial Sequence: Synthetic oligonucleotide
  Sense strand starting at position 3661 of SEQ ID NO: 1884158
uguaaucuuggucaaauca

SEQ ID NO: 2244679 - RNA, 19 nt, Artificial Sequence
  Description of Artificial Sequence: Synthetic oligonucleotide
  Antisense strand to SEQ ID NO: 2244678
ugauuugaccaagauuaca

SEQ ID NO: 2244680 - RNA, 19 nt, Artificial Sequence
  Description of Artificial Sequence: Synthetic oligonucleotide
  Sense strand starting at position 3671 of SEQ ID NO: 1884158
gucaaaucaccuuacuugu

SEQ ID NO: 2244681 - RNA, 19 nt, Artificial Sequence
  Description of Artificial Sequence: Synthetic oligonucleotide
  Antisense strand to SEQ ID NO: 2244680
acaaguaaggugauuugac

SEQ ID NO: 2244682 - RNA, 19 nt, Artificial Sequence
  Description of Artificial Sequence: Synthetic oligonucleotide
  Sense strand starting at position 3729 of SEQ ID NO: 1884158
cucugaagccucuaggauu

SEQ ID NO: 2244683 - RNA, 19 nt, Artificial Sequence
  Description of Artificial Sequence: Synthetic oligonucleotide
  Antisense strand to SEQ ID NO: 2244682
aauccuagaggcuucagag

SEQ ID NO: 2244684 - RNA, 19 nt, Artificial Sequence
  Description of Artificial Sequence: Synthetic oligonucleotide
  Sense strand starting at position 3753 of SEQ ID NO: 1884158
aauccauaugucugggacu

SEQ ID NO: 2244685 - RNA, 19 nt, Artificial Sequence
  Description of Artificial Sequence: Synthetic oligonucleotide
  Antisense strand to SEQ ID NO: 2244684
agucccagacauauggauu

SEQ ID NO: 2244686 - RNA, 19 nt, Artificial Sequence
  Description of Artificial Sequence: Synthetic oligonucleotide
  Sense strand starting at position 3755 of SEQ ID NO: 1884158
uccauaugucugggacuaa

SEQ ID NO: 2244687 - RNA, 19 nt, Artificial Sequence
  Description of Artificial Sequence: Synthetic oligonucleotide
  Antisense strand to SEQ ID NO: 2244686
uuagucccagacauaugga

SEQ ID NO: 2244688 - RNA, 19 nt, Artificial Sequence
  Description of Artificial Sequence: Synthetic oligonucleotide
  Sense strand starting at position 3775 of SEQ ID NO: 1884158
agauuaugucgaggaauua

SEQ ID NO: 2244689 - RNA, 19 nt, Artificial Sequence
  Description of Artificial Sequence: Synthetic oligonucleotide
  Antisense strand to SEQ ID NO: 2244688
uaauuccucgacauaaucu

SEQ ID NO: 2244690 - RNA, 19 nt, Artificial Sequence
  Description of Artificial Sequence: Synthetic oligonucleotide
  Sense strand starting at position 3790 of SEQ ID NO: 1884158
auuauuacccuugguuuga

SEQ ID NO: 2244691 - RNA, 19 nt, Artificial Sequence
  Description of Artificial Sequence: Synthetic oligonucleotide
  Antisense strand to SEQ ID NO: 2244690
ucaaaccaaggguaauaau

SEQ ID NO: 2244692 - RNA, 19 nt, Artificial Sequence
  Description of Artificial Sequence: Synthetic oligonucleotide
  Sense strand starting at position 3791 of SEQ ID NO: 1884158
uuauuacccuugguuugau

SEQ ID NO: 2244693 - RNA, 19 nt, Artificial Sequence
  Description of Artificial Sequence: Synthetic oligonucleotide
  Antisense strand to SEQ ID NO: 2244692
aucaaaccaaggguaauaa

SEQ ID NO: 2244694 - RNA, 19 nt, Artificial Sequence
  Description of Artificial Sequence: Synthetic oligonucleotide
  Sense strand starting at position 92 of SEQ ID NO: 1884159
uguaucagguauccuauau

SEQ ID NO: 2244695 - RNA, 19 nt, Artificial Sequence
  Description of Artificial Sequence: Synthetic oligonucleotide
  Antisense strand to SEQ ID NO: 2244694
auauaggauaccugauaca

SEQ ID NO: 2244696 - RNA, 19 nt, Artificial Sequence
  Description of Artificial Sequence: Synthetic oligonucleotide
  Sense strand starting at position 99 of SEQ ID NO: 1884159
gguauccuauauccugaau

SEQ ID NO: 2244697 - RNA, 19 nt, Artificial Sequence
  Description of Artificial Sequence: Synthetic oligonucleotide
  Antisense strand to SEQ ID NO: 2244696
auucaggauauaggauacc

SEQ ID NO: 2244698 - RNA, 19 nt, Artificial Sequence
  Description of Artificial Sequence: Synthetic oligonucleotide
  Sense strand starting at position 239 of SEQ ID NO: 1884159
agacuuaugucacuaagca

SEQ ID NO: 2244699 - RNA, 19 nt, Artificial Sequence
  Description of Artificial Sequence: Synthetic oligonucleotide
  Antisense strand to SEQ ID NO: 2244698
ugcuuagugacauaagucu

SEQ ID NO: 2244700 - RNA, 19 nt, Artificial Sequence
  Description of Artificial Sequence: Synthetic oligonucleotide
  Sense strand starting at position 637 of SEQ ID NO: 1884159
accucuuggccuuaaguaa

SEQ ID NO: 2244701 - RNA, 19 nt, Artificial Sequence
  Description of Artificial Sequence: Synthetic oligonucleotide
  Antisense strand to SEQ ID NO: 2244700
uuacuuaaggccaagaggu

SEQ ID NO: 2244702 - RNA, 19 nt, Artificial Sequence
  Description of Artificial Sequence: Synthetic oligonucleotide
  Sense strand starting at position 827 of SEQ ID NO: 1884159
cuggcaauacccugagaua

SEQ ID NO: 2244703 - RNA, 19 nt, Artificial Sequence
  Description of Artificial Sequence: Synthetic oligonucleotide
  Antisense strand to SEQ ID NO: 2244702
uaucucaggguauugccag

SEQ ID NO: 2244704 - RNA, 19 nt, Artificial Sequence
  Description of Artificial Sequence: Synthetic oligonucleotide
  Sense strand starting at position 898 of SEQ ID NO: 1884159
ggaguuacauuccugcaac

SEQ ID NO: 2244705 - RNA, 19 nt, Artificial Sequence
  Description of Artificial Sequence: Synthetic oligonucleotide
  Antisense strand to SEQ ID NO: 2244704
guugcaggaauguaacucc

SEQ ID NO: 2244706 - RNA, 19 nt, Artificial Sequence
  Description of Artificial Sequence: Synthetic oligonucleotide
  Sense strand starting at position 901 of SEQ ID NO: 1884159
guuacauuccugcaacuga

SEQ ID NO: 2244707 - RNA, 19 nt, Artificial Sequence
  Description of Artificial Sequence: Synthetic oligonucleotide
  Antisense strand to SEQ ID NO: 2244706
ucaguugcaggaauguaac

SEQ ID NO: 2244708 - RNA, 19 nt, Artificial Sequence
  Description of Artificial Sequence: Synthetic oligonucleotide
  Sense strand starting at position 1017 of SEQ ID NO: 1884159
agcuccauugagcagaauu

SEQ ID NO: 2244709 - RNA, 19 nt, Artificial Sequence
  Description of Artificial Sequence: Synthetic oligonucleotide
  Antisense strand to SEQ ID NO: 2244708
aauucugcucaauggagcu

SEQ ID NO: 2244710 - RNA, 19 nt, Artificial Sequence
  Description of Artificial Sequence: Synthetic oligonucleotide
  Sense strand starting at position 1147 of SEQ ID NO: 1884159
gggucagcagugugaauuu

SEQ ID NO: 2244711 - RNA, 19 nt, Artificial Sequence
  Description of Artificial Sequence: Synthetic oligonucleotide
  Antisense strand to SEQ ID NO: 2244710
aaauucacacugcugaccc

SEQ ID NO: 2244712 - RNA, 19 nt, Artificial Sequence
  Description of Artificial Sequence: Synthetic oligonucleotide
  Sense strand starting at position 1273 of SEQ ID NO: 1884159
ugcagaugggcuuaauuau

SEQ ID NO: 2244713 - RNA, 19 nt, Artificial Sequence
  Description of Artificial Sequence: Synthetic oligonucleotide
  Antisense strand to SEQ ID NO: 2244712
auaauuaagcccaucugca

SEQ ID NO: 2244714 - RNA, 19 nt, Artificial Sequence
  Description of Artificial Sequence: Synthetic oligonucleotide
  Sense strand starting at position 1512 of SEQ ID NO: 1884159
ucuccuagguuucugauau

SEQ ID NO: 2244715 - RNA, 19 nt, Artificial Sequence
  Description of Artificial Sequence: Synthetic oligonucleotide
  Antisense strand to SEQ ID NO: 2244714
auaucagaaaccuaggaga

SEQ ID NO: 2244716 - RNA, 19 nt, Artificial Sequence
  Description of Artificial Sequence: Synthetic oligonucleotide
  Sense strand starting at position 1519 of SEQ ID NO: 1884159
gguuucugauaucuccaaa

SEQ ID NO: 2244717 - RNA, 19 nt, Artificial Sequence
  Description of Artificial Sequence: Synthetic oligonucleotide
  Antisense strand to SEQ ID NO: 2244716
uuuggagauaucagaaacc

SEQ ID NO: 2244718 - RNA, 19 nt, Artificial Sequence
  Description of Artificial Sequence: Synthetic oligonucleotide
  Sense strand starting at position 1547 of SEQ ID NO: 1884159
cuauauaauucugcagaga

SEQ ID NO: 2244719 - RNA, 19 nt, Artificial Sequence
  Description of Artificial Sequence: Synthetic oligonucleotide
  Antisense strand to SEQ ID NO: 2244718
ucucugcagaauuauauag

SEQ ID NO: 2244720 - RNA, 19 nt, Artificial Sequence
  Description of Artificial Sequence: Synthetic oligonucleotide
  Sense strand starting at position 1662 of SEQ ID NO: 1884159
ugagaaauucuagguugug

SEQ ID NO: 2244721 - RNA, 19 nt, Artificial Sequence
  Description of Artificial Sequence: Synthetic oligonucleotide
  Antisense strand to SEQ ID NO: 2244720
cacaaccuagaauuucuca

SEQ ID NO: 2244722 - RNA, 19 nt, Artificial Sequence
  Description of Artificial Sequence: Synthetic oligonucleotide
  Sense strand starting at position 1663 of SEQ ID NO: 1884159
gagaaauucuagguugugu

SEQ ID NO: 2244723 - RNA, 19 nt, Artificial Sequence
  Description of Artificial Sequence: Synthetic oligonucleotide
  Antisense strand to SEQ ID NO: 2244722
acacaaccuagaauuucuc

SEQ ID NO: 2244724 - RNA, 19 nt, Artificial Sequence
  Description of Artificial Sequence: Synthetic oligonucleotide
  Sense strand starting at position 1832 of SEQ ID NO: 1884159
agaacuacucuauguaaug

SEQ ID NO: 2244725 - RNA, 19 nt, Artificial Sequence
  Description of Artificial Sequence: Synthetic oligonucleotide
  Antisense strand to SEQ ID NO: 2244724
cauuacauagaguaguucu

SEQ ID NO: 2244726 - RNA, 19 nt, Artificial Sequence
  Description of Artificial Sequence: Synthetic oligonucleotide
  Sense strand starting at position 2061 of SEQ ID NO: 1884159
cucugugcccugccgaaau

SEQ ID NO: 2244727 - RNA, 19 nt, Artificial Sequence
  Description of Artificial Sequence: Synthetic oligonucleotide
  Antisense strand to SEQ ID NO: 2244726
auuucggcagggcacagag

SEQ ID NO: 2244728 - RNA, 19 nt, Artificial Sequence
  Description of Artificial Sequence: Synthetic oligonucleotide
  Sense strand starting at position 2177 of SEQ ID NO: 1884159
ggaguucgaguuuagaacu

SEQ ID NO: 2244729 - RNA, 19 nt, Artificial Sequence
  Description of Artificial Sequence: Synthetic oligonucleotide
  Antisense strand to SEQ ID NO: 2244728
aguucuaaacucgaacucc

SEQ ID NO: 2244730 - RNA, 19 nt, Artificial Sequence
  Description of Artificial Sequence: Synthetic oligonucleotide
  Sense strand starting at position 2184 of SEQ ID NO: 1884159
gaguuuagaacucgggaag

SEQ ID NO: 2244731 - RNA, 19 nt, Artificial Sequence
  Description of Artificial Sequence: Synthetic oligonucleotide
  Antisense strand to SEQ ID NO: 2244730
cuucccgaguucuaaacuc

SEQ ID NO: 2244732 - RNA, 19 nt, Artificial Sequence
  Description of Artificial Sequence: Synthetic oligonucleotide
  Sense strand starting at position 2302 of SEQ ID NO: 1884159
gugcuuccggcuuugucaa

SEQ ID NO: 2244733 - RNA, 19 nt, Artificial Sequence
  Description of Artificial Sequence: Synthetic oligonucleotide
  Antisense strand to SEQ ID NO: 2244732
uugacaaagccggaagcac

SEQ ID NO: 2244734 - RNA, 19 nt, Artificial Sequence
  Description of Artificial Sequence: Synthetic oligonucleotide
  Sense strand starting at position 2366 of SEQ ID NO: 1884159
ggaagaaaugaguguuccu

SEQ ID NO: 2244735 - RNA, 19 nt, Artificial Sequence
  Description of Artificial Sequence: Synthetic oligonucleotide
  Antisense strand to SEQ ID NO: 2244734
aggaacacucauuucuucc

SEQ ID NO: 2244736 - RNA, 19 nt, Artificial Sequence
  Description of Artificial Sequence: Synthetic oligonucleotide
  Sense strand starting at position 2668 of SEQ ID NO: 1884159
cccauugucccggaaugaa

SEQ ID NO: 2244737 - RNA, 19 nt, Artificial Sequence
  Description of Artificial Sequence: Synthetic oligonucleotide
  Antisense strand to SEQ ID NO: 2244736
uucauuccgggacaauggg

SEQ ID NO: 2244738 - RNA, 19 nt, Artificial Sequence
  Description of Artificial Sequence: Synthetic oligonucleotide
  Sense strand starting at position 2812 of SEQ ID NO: 1884159
cacuguauuuccuagagag

SEQ ID NO: 2244739 - RNA, 19 nt, Artificial Sequence
  Description of Artificial Sequence: Synthetic oligonucleotide
  Antisense strand to SEQ ID NO: 2244738
cucucuaggaaauacagug

SEQ ID NO: 2244740 - RNA, 19 nt, Artificial Sequence
  Description of Artificial Sequence: Synthetic oligonucleotide
  Sense strand starting at position 2841 of SEQ ID NO: 1884159
agucacuugccauaucaag

SEQ ID NO: 2244741 - RNA, 19 nt, Artificial Sequence
  Description of Artificial Sequence: Synthetic oligonucleotide
  Antisense strand to SEQ ID NO: 2244740
cuugauauggcaagugacu

SEQ ID NO: 2244742 - RNA, 19 nt, Artificial Sequence
  Description of Artificial Sequence: Synthetic oligonucleotide
  Sense strand starting at position 2847 of SEQ ID NO: 1884159
uugccauaucaaggagaaa

SEQ ID NO: 2244743 - RNA, 19 nt, Artificial Sequence
  Description of Artificial Sequence: Synthetic oligonucleotide
  Antisense strand to SEQ ID NO: 2244742
uuucuccuugauauggcaa

SEQ ID NO: 2244744 - RNA, 19 nt, Artificial Sequence
  Description of Artificial Sequence: Synthetic oligonucleotide
  Sense strand starting at position 3097 of SEQ ID NO: 1884159
guggauguuuaagucaaug

SEQ ID NO: 2244745 - RNA, 19 nt, Artificial Sequence
  Description of Artificial Sequence: Synthetic oligonucleotide
  Antisense strand to SEQ ID NO: 2244744
cauugacuuaaacauccac

SEQ ID NO: 2244746 - RNA, 19 nt, Artificial Sequence
  Description of Artificial Sequence: Synthetic oligonucleotide
  Sense strand starting at position 3102 of SEQ ID NO: 1884159
uguuuaagucaaugaagau

SEQ ID NO: 2244747 - RNA, 19 nt, Artificial Sequence
  Description of Artificial Sequence: Synthetic oligonucleotide
  Antisense strand to SEQ ID NO: 2244746
aucuucauugacuuaaaca

SEQ ID NO: 2244748 - RNA, 19 nt, Artificial Sequence
  Description of Artificial Sequence: Synthetic oligonucleotide
  Sense strand starting at position 3311 of SEQ ID NO: 1884159
cucugaauacugugacuca

SEQ ID NO: 2244749 - RNA, 19 nt, Artificial Sequence
  Description of Artificial Sequence: Synthetic oligonucleotide
  Antisense strand to SEQ ID NO: 2244748
ugagucacaguauucagag

SEQ ID NO: 2244750 - RNA, 19 nt, Artificial Sequence
  Description of Artificial Sequence: Synthetic oligonucleotide
  Sense strand starting at position 3375 of SEQ ID NO: 1884159
cugggaaacuagucuauga

SEQ ID NO: 2244751 - RNA, 19 nt, Artificial Sequence
  Description of Artificial Sequence: Synthetic oligonucleotide
  Antisense strand to SEQ ID NO: 2244750
ucauagacuaguuucccag

SEQ ID NO: 2244752 - RNA, 19 nt, Artificial Sequence
  Description of Artificial Sequence: Synthetic oligonucleotide
  Sense strand starting at position 3436 of SEQ ID NO: 1884159
accuacgagccaugaaaga

SEQ ID NO: 2244753 - RNA, 19 nt, Artificial Sequence
  Description of Artificial Sequence: Synthetic oligonucleotide
  Antisense strand to SEQ ID NO: 2244752
ucuuucauggcucguaggu

SEQ ID NO: 2244754 - RNA, 19 nt, Artificial Sequence
  Description of Artificial Sequence: Synthetic oligonucleotide
  Sense strand starting at position 3470 of SEQ ID NO: 1884159
uugucaacucuccauagga

SEQ ID NO: 2244755 - RNA, 19 nt, Artificial Sequence
  Description of Artificial Sequence: Synthetic oligonucleotide
  Antisense strand to SEQ ID NO: 2244754
uccuauggagaguugacaa

SEQ ID NO: 2244756 - RNA, 19 nt, Artificial Sequence
  Description of Artificial Sequence: Synthetic oligonucleotide
  Sense strand starting at position 3694 of SEQ ID NO: 1884159
aauaaauugucugccagga

SEQ ID NO: 2244757 - RNA, 19 nt, Artificial Sequence
  Description of Artificial Sequence: Synthetic oligonucleotide
  Antisense strand to SEQ ID NO: 2244756
uccuggcagacaauuuauu

SEQ ID NO: 2244758 - RNA, 19 nt, Artificial Sequence
  Description of Artificial Sequence: Synthetic oligonucleotide
  Sense strand starting at position 3698 of SEQ ID NO: 1884159
aauugucugccaggaaaug

SEQ ID NO: 2244759 - RNA, 19 nt, Artificial Sequence
  Description of Artificial Sequence: Synthetic oligonucleotide
  Antisense strand to SEQ ID NO: 2244758
cauuuccuggcagacaauu

SEQ ID NO: 2244760 - RNA, 19 nt, Artificial Sequence
  Description of Artificial Sequence: Synthetic oligonucleotide
  Sense strand starting at position 3699 of SEQ ID NO: 1884159
auugucugccaggaaauga

SEQ ID NO: 2244761 - RNA, 19 nt, Artificial Sequence
  Description of Artificial Sequence: Synthetic oligonucleotide
  Antisense strand to SEQ ID NO: 2244760
ucauuuccuggcagacaau

SEQ ID NO: 2244762 - RNA, 19 nt, Artificial Sequence
  Description of Artificial Sequence: Synthetic oligonucleotide
  Sense strand starting at position 3771 of SEQ ID NO: 1884159
ucuugugaagguugaauca

SEQ ID NO: 2244763 - RNA, 19 nt, Artificial Sequence
  Description of Artificial Sequence: Synthetic oligonucleotide
  Antisense strand to SEQ ID NO: 2244762
ugauucaaccuucacaaga

SEQ ID NO: 2244764 - RNA, 19 nt, Artificial Sequence
  Description of Artificial Sequence: Synthetic oligonucleotide
  Sense strand starting at position 3778 of SEQ ID NO: 1884159
aagguugaaucaguguaaa

SEQ ID NO: 2244765 - RNA, 19 nt, Artificial Sequence
  Description of Artificial Sequence: Synthetic oligonucleotide
  Antisense strand to SEQ ID NO: 2244764
uuuacacugauucaaccuu

SEQ ID NO: 2244766 - RNA, 19 nt, Artificial Sequence
  Description of Artificial Sequence: Synthetic oligonucleotide
  Sense strand starting at position 3781 of SEQ ID NO: 1884159
guugaaucaguguaaagau

SEQ ID NO: 2244767 - RNA, 19 nt, Artificial Sequence
  Description of Artificial Sequence: Synthetic oligonucleotide
  Antisense strand to SEQ ID NO: 2244766
aucuuuacacugauucaac

SEQ ID NO: 2244768 - RNA, 19 nt, Artificial Sequence
  Description of Artificial Sequence: Synthetic oligonucleotide
  Sense strand starting at position 3892 of SEQ ID NO: 1884159
uuuguaccacuaugagauu

SEQ ID NO: 2244769 - RNA, 19 nt, Artificial Sequence
  Description of Artificial Sequence: Synthetic oligonucleotide
  Antisense strand to SEQ ID NO: 2244768
aaucucauagugguacaaa

SEQ ID NO: 2244770 - RNA, 19 nt, Artificial Sequence
  Description of Artificial Sequence: Synthetic oligonucleotide
  Sense strand starting at position 3898 of SEQ ID NO: 1884159
ccacuaugagauugcagaa

SEQ ID NO: 2244771 - RNA, 19 nt, Artificial Sequence
  Description of Artificial Sequence: Synthetic oligonucleotide
  Antisense strand to SEQ ID NO: 2244770
uucugcaaucucauagugg

SEQ ID NO: 2244772 - RNA, 19 nt, Artificial Sequence
  Description of Artificial Sequence: Synthetic oligonucleotide
  Sense strand starting at position 3911 of SEQ ID NO: 1884159
gcagaauucuacucuuaga

SEQ ID NO: 2244773 - RNA, 19 nt, Artificial Sequence
  Description of Artificial Sequence: Synthetic oligonucleotide
  Antisense strand to SEQ ID NO: 2244772
ucuaagaguagaauucugc

SEQ ID NO: 2244774 - RNA, 19 nt, Artificial Sequence
  Description of Artificial Sequence: Synthetic oligonucleotide
  Sense strand starting at position 131 of SEQ ID NO: 1884160
ggcuuauuccaggaauguu

SEQ ID NO: 2244775 - RNA, 19 nt, Artificial Sequence
  Description of Artificial Sequence: Synthetic oligonucleotide
  Antisense strand to SEQ ID NO: 2244774
aacauuccuggaauaagcc

SEQ ID NO: 2244776 - RNA, 19 nt, Artificial Sequence
  Description of Artificial Sequence: Synthetic oligonucleotide
  Sense strand starting at position 166 of SEQ ID NO: 1884160
aggucaaccugaucacacu

SEQ ID NO: 2244777 - RNA, 19 nt, Artificial Sequence
  Description of Artificial Sequence: Synthetic oligonucleotide
  Antisense strand to SEQ ID NO: 2244776
agugugaucagguugaccu

SEQ ID NO: 2244778 - RNA, 19 nt, Artificial Sequence
  Description of Artificial Sequence: Synthetic oligonucleotide
  Sense strand starting at position 440 of SEQ ID NO: 1884160
ugguaaaguauugagugau

SEQ ID NO: 2244779 - RNA, 19 nt, Artificial Sequence
  Description of Artificial Sequence: Synthetic oligonucleotide
  Antisense strand to SEQ ID NO: 2244778
aucacucaauacuuuacca

SEQ ID NO: 2244780 - RNA, 19 nt, Artificial Sequence
  Description of Artificial Sequence: Synthetic oligonucleotide
  Sense strand starting at position 443 of SEQ ID NO: 1884160
uaaaguauugagugaugaa

SEQ ID NO: 2244781 - RNA, 19 nt, Artificial Sequence
  Description of Artificial Sequence: Synthetic oligonucleotide
  Antisense strand to SEQ ID NO: 2244780
uucaucacucaauacuuua

SEQ ID NO: 2244782 - RNA, 19 nt, Artificial Sequence
  Description of Artificial Sequence: Synthetic oligonucleotide
  Sense strand starting at position 515 of SEQ ID NO: 1884160
gagacaggucucuguggaa

SEQ ID NO: 2244783 - RNA, 19 nt, Artificial Sequence
  Description of Artificial Sequence: Synthetic oligonucleotide
  Antisense strand to SEQ ID NO: 2244782
uuccacagagaccugucuc

SEQ ID NO: 2244784 - RNA, 19 nt, Artificial Sequence
  Description of Artificial Sequence: Synthetic oligonucleotide
  Sense strand starting at position 548 of SEQ ID NO: 1884160
ggaggaguucuguguggga

SEQ ID NO: 2244785 - RNA, 19 nt, Artificial Sequence
  Description of Artificial Sequence: Synthetic oligonucleotide
  Antisense strand to SEQ ID NO: 2244784
ucccacacagaacuccucc

SEQ ID NO: 2244786 - RNA, 19 nt, Artificial Sequence
  Description of Artificial Sequence: Synthetic oligonucleotide
  Sense strand starting at position 576 of SEQ ID NO: 1884160
gcugguuguugauuuauuc

SEQ ID NO: 2244787 - RNA, 19 nt, Artificial Sequence
  Description of Artificial Sequence: Synthetic oligonucleotide
  Antisense strand to SEQ ID NO: 2244786
gaauaaaucaacaaccagc

SEQ ID NO: 2244788 - RNA, 19 nt, Artificial Sequence
  Description of Artificial Sequence: Synthetic oligonucleotide
  Sense strand starting at position 807 of SEQ ID NO: 1884160
cugaguuaaugagugaauu

SEQ ID NO: 2244789 - RNA, 19 nt, Artificial Sequence
  Description of Artificial Sequence: Synthetic oligonucleotide
  Antisense strand to SEQ ID NO: 2244788
aauucacucauuaacucag

SEQ ID NO: 2244790 - RNA, 19 nt, Artificial Sequence
  Description of Artificial Sequence: Synthetic oligonucleotide
  Sense strand starting at position 838 of SEQ ID NO: 1884160
aucuuacugggaugucaag

SEQ ID NO: 2244791 - RNA, 19 nt, Artificial Sequence
  Description of Artificial Sequence: Synthetic oligonucleotide
  Antisense strand to SEQ ID NO: 2244790
cuugacaucccaguaagau

SEQ ID NO: 2244792 - RNA, 19 nt, Artificial Sequence
  Description of Artificial Sequence: Synthetic oligonucleotide
  Sense strand starting at position 880 of SEQ ID NO: 1884160
gaccgauggucacugggau

SEQ ID NO: 2244793 - RNA, 19 nt, Artificial Sequence
  Description of Artificial Sequence: Synthetic oligonucleotide
  Antisense strand to SEQ ID NO: 2244792
aucccagugaccaucgguc

SEQ ID NO: 2244794 - RNA, 19 nt, Artificial Sequence
  Description of Artificial Sequence: Synthetic oligonucleotide
  Sense strand starting at position 886 of SEQ ID NO: 1884160
uggucacugggaugauauc

SEQ ID NO: 2244795 - RNA, 19 nt, Artificial Sequence
  Description of Artificial Sequence: Synthetic oligonucleotide
  Antisense strand to SEQ ID NO: 2244794
gauaucaucccagugacca

SEQ ID NO: 2244796 - RNA, 19 nt, Artificial Sequence
  Description of Artificial Sequence: Synthetic oligonucleotide
  Sense strand starting at position 912 of SEQ ID NO: 1884160
acagaaauuugaugacaga

SEQ ID NO: 2244797 - RNA, 19 nt, Artificial Sequence
  Description of Artificial Sequence: Synthetic oligonucleotide
  Antisense strand to SEQ ID NO: 2244796
ucugucaucaaauuucugu

SEQ ID NO: 2244798 - RNA, 19 nt, Artificial Sequence
  Description of Artificial Sequence: Synthetic oligonucleotide
  Sense strand starting at position 1357 of SEQ ID NO: 1884160
gggauucuucauggaaugu

SEQ ID NO: 2244799 - RNA, 19 nt, Artificial Sequence
  Description of Artificial Sequence: Synthetic oligonucleotide
  Antisense strand to SEQ ID NO: 2244798
acauuccaugaagaauccc

SEQ ID NO: 2244800 - RNA, 19 nt, Artificial Sequence
  Description of Artificial Sequence: Synthetic oligonucleotide
  Sense strand starting at position 1420 of SEQ ID NO: 1884160
agagcuauuucucccugua

SEQ ID NO: 2244801 - RNA, 19 nt, Artificial Sequence
  Description of Artificial Sequence: Synthetic oligonucleotide
  Antisense strand to SEQ ID NO: 2244800
uacagggagaaauagcucu

SEQ ID NO: 2244802 - RNA, 19 nt, Artificial Sequence
  Description of Artificial Sequence: Synthetic oligonucleotide
  Sense strand starting at position 1485 of SEQ ID NO: 1884160
caguauuucugagugucuu

SEQ ID NO: 2244803 - RNA, 19 nt, Artificial Sequence
  Description of Artificial Sequence: Synthetic oligonucleotide
  Antisense strand to SEQ ID NO: 2244802
aagacacucagaaauacug

SEQ ID NO: 2244804 - RNA, 19 nt, Artificial Sequence
  Description of Artificial Sequence: Synthetic oligonucleotide
  Sense strand starting at position 1486 of SEQ ID NO: 1884160
aguauuucugagugucuuu

SEQ ID NO: 2244805 - RNA, 19 nt, Artificial Sequence
  Description of Artificial Sequence: Synthetic oligonucleotide
  Antisense strand to SEQ ID NO: 2244804
aaagacacucagaaauacu

SEQ ID NO: 2244806 - RNA, 19 nt, Artificial Sequence
  Description of Artificial Sequence: Synthetic oligonucleotide
  Sense strand starting at position 1633 of SEQ ID NO: 1884160
guuugaucuuaaccugaac

SEQ ID NO: 2244807 - RNA, 19 nt, Artificial Sequence
  Description of Artificial Sequence: Synthetic oligonucleotide
  Antisense strand to SEQ ID NO: 2244806
guucagguuaagaucaaac

SEQ ID NO: 2244808 - RNA, 19 nt, Artificial Sequence
  Description of Artificial Sequence: Synthetic oligonucleotide
  Sense strand starting at position 1744 of SEQ ID NO: 1884160
uccaguuuaguccauaaau

SEQ ID NO: 2244809 - RNA, 19 nt, Artificial Sequence
  Description of Artificial Sequence: Synthetic oligonucleotide
  Antisense strand to SEQ ID NO: 2244808
auuuauggacuaaacugga

SEQ ID NO: 2244810 - RNA, 19 nt, Artificial Sequence
  Description of Artificial Sequence: Synthetic oligonucleotide
  Sense strand starting at position 1755 of SEQ ID NO: 1884160
ccauaaaugcucuauagug

SEQ ID NO: 2244811 - RNA, 19 nt, Artificial Sequence
  Description of Artificial Sequence: Synthetic oligonucleotide
  Antisense strand to SEQ ID NO: 2244810
cacuauagagcauuuaugg

SEQ ID NO: 2244812 - RNA, 19 nt, Artificial Sequence
  Description of Artificial Sequence: Synthetic oligonucleotide
  Sense strand starting at position 2044 of SEQ ID NO: 1884160
uagagugcuacugagaguu

SEQ ID NO: 2244813 - RNA, 19 nt, Artificial Sequence
  Description of Artificial Sequence: Synthetic oligonucleotide
  Antisense strand to SEQ ID NO: 2244812
aacucucaguagcacucua

SEQ ID NO: 2244814 - RNA, 19 nt, Artificial Sequence
  Description of Artificial Sequence: Synthetic oligonucleotide
  Sense strand starting at position 2131 of SEQ ID NO: 1884160
ucuuuaauuugacauagag

SEQ ID NO: 2244815 - RNA, 19 nt, Artificial Sequence
  Description of Artificial Sequence: Synthetic oligonucleotide
  Antisense strand to SEQ ID NO: 2244814
cucuaugucaaauuaaaga

SEQ ID NO: 2244816 - RNA, 19 nt, Artificial Sequence
  Description of Artificial Sequence: Synthetic oligonucleotide
  Sense strand starting at position 2140 of SEQ ID NO: 1884160
ugacauagaguuugacaug

SEQ ID NO: 2244817 - RNA, 19 nt, Artificial Sequence
  Description of Artificial Sequence: Synthetic oligonucleotide
  Antisense strand to SEQ ID NO: 2244816
caugucaaacucuauguca

SEQ ID NO: 2244818 - RNA, 19 nt, Artificial Sequence
  Description of Artificial Sequence: Synthetic oligonucleotide
  Sense strand starting at position 2150 of SEQ ID NO: 1884160
uuugacauggaaugguaau

SEQ ID NO: 2244819 - RNA, 19 nt, Artificial Sequence
  Description of Artificial Sequence: Synthetic oligonucleotide
  Antisense strand to SEQ ID NO: 2244818
auuaccauuccaugucaaa

SEQ ID NO: 2244820 - RNA, 19 nt, Artificial Sequence
  Description of Artificial Sequence: Synthetic oligonucleotide
  Sense strand starting at position 2180 of SEQ ID NO: 1884160
gacugauguguuggugaaa

SEQ ID NO: 2244821 - RNA, 19 nt, Artificial Sequence
  Description of Artificial Sequence: Synthetic oligonucleotide
  Antisense strand to SEQ ID NO: 2244820
uuucaccaacacaucaguc

SEQ ID NO: 2244822 - RNA, 19 nt, Artificial Sequence
  Description of Artificial Sequence: Synthetic oligonucleotide
  Sense strand starting at position 2546 of SEQ ID NO: 1884160
aucccaaacugaguguuua

SEQ ID NO: 2244823 - RNA, 19 nt, Artificial Sequence
  Description of Artificial Sequence: Synthetic oligonucleotide
  Antisense strand to SEQ ID NO: 2244822
uaaacacucaguuugggau

SEQ ID NO: 2244824 - RNA, 19 nt, Artificial Sequence
  Description of Artificial Sequence: Synthetic oligonucleotide
  Sense strand starting at position 2654 of SEQ ID NO: 1884160
gagcguguccugcccuuua

SEQ ID NO: 2244825 - RNA, 19 nt, Artificial Sequence
  Description of Artificial Sequence: Synthetic oligonucleotide
  Antisense strand to SEQ ID NO: 2244824
uaaagggcaggacacgcuc

SEQ ID NO: 2244826 - RNA, 19 nt, Artificial Sequence
  Description of Artificial Sequence: Synthetic oligonucleotide
  Sense strand starting at position 2656 of SEQ ID NO: 1884160
gcguguccugcccuuuaua

SEQ ID NO: 2244827 - RNA, 19 nt, Artificial Sequence
  Description of Artificial Sequence: Synthetic oligonucleotide
  Antisense strand to SEQ ID NO: 2244826
uauaaagggcaggacacgc

SEQ ID NO: 2244828 - RNA, 19 nt, Artificial Sequence
  Description of Artificial Sequence: Synthetic oligonucleotide
  Sense strand starting at position 2659 of SEQ ID NO: 1884160
uguccugcccuuuauaaag

SEQ ID NO: 2244829 - RNA, 19 nt, Artificial Sequence
  Description of Artificial Sequence: Synthetic oligonucleotide
  Antisense strand to SEQ ID NO: 2244828
cuuuauaaagggcaggaca

SEQ ID NO: 2244830 - RNA, 19 nt, Artificial Sequence
  Description of Artificial Sequence: Synthetic oligonucleotide
  Sense strand starting at position 2941 of SEQ ID NO: 1884160
ugacuaacauaguugucaa

SEQ ID NO: 2244831 - RNA, 19 nt, Artificial Sequence
  Description of Artificial Sequence: Synthetic oligonucleotide
  Antisense strand to SEQ ID NO: 2244830
uugacaacuauguuaguca

SEQ ID NO: 2244832 - RNA, 19 nt, Artificial Sequence
  Description of Artificial Sequence: Synthetic oligonucleotide
  Sense strand starting at position 2994 of SEQ ID NO: 1884160
auaaguaagugaucucuuu

SEQ ID NO: 2244833 - RNA, 19 nt, Artificial Sequence
  Description of Artificial Sequence: Synthetic oligonucleotide
  Antisense strand to SEQ ID NO: 2244832
aaagagaucacuuacuuau

SEQ ID NO: 2244834 - RNA, 19 nt, Artificial Sequence
  Description of Artificial Sequence: Synthetic oligonucleotide
  Sense strand starting at position 3102 of SEQ ID NO: 1884160
acagaauuguacuuugaau

SEQ ID NO: 2244835 - RNA, 19 nt, Artificial Sequence
  Description of Artificial Sequence: Synthetic oligonucleotide
  Antisense strand to SEQ ID NO: 2244834
auucaaaguacaauucugu

SEQ ID NO: 2244836 - RNA, 19 nt, Artificial Sequence
  Description of Artificial Sequence: Synthetic oligonucleotide
  Sense strand starting at position 3104 of SEQ ID NO: 1884160
agaauuguacuuugaauca

SEQ ID NO: 2244837 - RNA, 19 nt, Artificial Sequence
  Description of Artificial Sequence: Synthetic oligonucleotide
  Antisense strand to SEQ ID NO: 2244836
ugauucaaaguacaauucu

SEQ ID NO: 2244838 - RNA, 19 nt, Artificial Sequence
  Description of Artificial Sequence: Synthetic oligonucleotide
  Sense strand starting at position 3115 of SEQ ID NO: 1884160
uugaaucauugagcacaga

SEQ ID NO: 2244839 - RNA, 19 nt, Artificial Sequence
  Description of Artificial Sequence: Synthetic oligonucleotide
  Antisense strand to SEQ ID NO: 2244838
ucugugcucaaugauucaa

SEQ ID NO: 2244840 - RNA, 19 nt, Artificial Sequence
  Description of Artificial Sequence: Synthetic oligonucleotide
  Sense strand starting at position 3126 of SEQ ID NO: 1884160
agcacagagcauuaaaucu

SEQ ID NO: 2244841 - RNA, 19 nt, Artificial Sequence
  Description of Artificial Sequence: Synthetic oligonucleotide
  Antisense strand to SEQ ID NO: 2244840
agauuuaaugcucugugcu

SEQ ID NO: 2244842 - RNA, 19 nt, Artificial Sequence
  Description of Artificial Sequence: Synthetic oligonucleotide
  Sense strand starting at position 3187 of SEQ ID NO: 1884160
uucugauugcuguaacuua

SEQ ID NO: 2244843 - RNA, 19 nt, Artificial Sequence
  Description of Artificial Sequence: Synthetic oligonucleotide
  Antisense strand to SEQ ID NO: 2244842
uaaguuacagcaaucagaa

SEQ ID NO: 2244844 - RNA, 19 nt, Artificial Sequence
  Description of Artificial Sequence: Synthetic oligonucleotide
  Sense strand starting at position 3209 of SEQ ID NO: 1884160
uuaguugacaagcacgaaa

SEQ ID NO: 2244845 - RNA, 19 nt, Artificial Sequence
  Description of Artificial Sequence: Synthetic oligonucleotide
  Antisense strand to SEQ ID NO: 2244844
uuucgugcuugucaacuaa

SEQ ID NO: 2244846 - RNA, 19 nt, Artificial Sequence
  Description of Artificial Sequence: Synthetic oligonucleotide
  Sense strand starting at position 3365 of SEQ ID NO: 1884160
aguuuacauccugaguauu

SEQ ID NO: 2244847 - RNA, 19 nt, Artificial Sequence
  Description of Artificial Sequence: Synthetic oligonucleotide
  Antisense strand to SEQ ID NO: 2244846
aauacucaggauguaaacu

SEQ ID NO: 2244848 - RNA, 19 nt, Artificial Sequence
  Description of Artificial Sequence: Synthetic oligonucleotide
  Sense strand starting at position 3756 of SEQ ID NO: 1884160
ggagaauccugaguguuca

SEQ ID NO: 2244849 - RNA, 19 nt, Artificial Sequence
  Description of Artificial Sequence: Synthetic oligonucleotide
  Antisense strand to SEQ ID NO: 2244848
ugaacacucaggauucucc

SEQ ID NO: 2244850 - RNA, 19 nt, Artificial Sequence
  Description of Artificial Sequence: Synthetic oligonucleotide
  Sense strand starting at position 3896 of SEQ ID NO: 1884160
gaggcagcucaggaguuaa

SEQ ID NO: 2244851 - RNA, 19 nt, Artificial Sequence
  Description of Artificial Sequence: Synthetic oligonucleotide
  Antisense strand to SEQ ID NO: 2244850
uuaacuccugagcugccuc

SEQ ID NO: 2244852 - RNA, 19 nt, Artificial Sequence
  Description of Artificial Sequence: Synthetic oligonucleotide
  Sense strand starting at position 3935 of SEQ ID NO: 1884160
agaggcugucauugagauu

SEQ ID NO: 2244853 - RNA, 19 nt, Artificial Sequence
  Description of Artificial Sequence: Synthetic oligonucleotide
  Antisense strand to SEQ ID NO: 2244852
aaucucaaugacagccucu

SEQ ID NO: 2244854 - RNA, 19 nt, Artificial Sequence
  Description of Artificial Sequence: Synthetic oligonucleotide
  Sense strand starting at position 207 of SEQ ID NO: 1884161
cagggagucucccauuuau

SEQ ID NO: 2244855 - RNA, 19 nt, Artificial Sequence
  Description of Artificial Sequence: Synthetic oligonucleotide
  Antisense strand to SEQ ID NO: 2244854
auaaaugggagacucccug

SEQ ID NO: 2244856 - RNA, 19 nt, Artificial Sequence
  Description of Artificial Sequence: Synthetic oligonucleotide
  Sense strand starting at position 259 of SEQ ID NO: 1884161
cuguuacuauugucugaag

SEQ ID NO: 2244857 - RNA, 19 nt, Artificial Sequence
  Description of Artificial Sequence: Synthetic oligonucleotide
  Antisense strand to SEQ ID NO: 2244856
cuucagacaauaguaacag

SEQ ID NO: 2244858 - RNA, 19 nt, Artificial Sequence
  Description of Artificial Sequence: Synthetic oligonucleotide
  Sense strand starting at position 260 of SEQ ID NO: 1884161
uguuacuauugucugaagu

SEQ ID NO: 2244859 - RNA, 19 nt, Artificial Sequence
  Description of Artificial Sequence: Synthetic oligonucleotide
  Antisense strand to SEQ ID NO: 2244858
acuucagacaauaguaaca

SEQ ID NO: 2244860 - RNA, 19 nt, Artificial Sequence
  Description of Artificial Sequence: Synthetic oligonucleotide
  Sense strand starting at position 261 of SEQ ID NO: 1884161
guuacuauugucugaaguu

SEQ ID NO: 2244861 - RNA, 19 nt, Artificial Sequence
  Description of Artificial Sequence: Synthetic oligonucleotide
  Antisense strand to SEQ ID NO: 2244860
aacuucagacaauaguaac

SEQ ID NO: 2244862 - RNA, 19 nt, Artificial Sequence
  Description of Artificial Sequence: Synthetic oligonucleotide
  Sense strand starting at position 276 of SEQ ID NO: 1884161
aguuuccuuccagagauau

SEQ ID NO: 2244863 - RNA, 19 nt, Artificial Sequence
  Description of Artificial Sequence: Synthetic oligonucleotide
  Antisense strand to SEQ ID NO: 2244862
auaucucuggaaggaaacu

SEQ ID NO: 2244864 - RNA, 19 nt, Artificial Sequence
  Description of Artificial Sequence: Synthetic oligonucleotide
  Sense strand starting at position 327 of SEQ ID NO: 1884161
accacuuuccaagggauau

SEQ ID NO: 2244865 - RNA, 19 nt, Artificial Sequence
  Description of Artificial Sequence: Synthetic oligonucleotide
  Antisense strand to SEQ ID NO: 2244864
auaucccuuggaaaguggu

SEQ ID NO: 2244866 - RNA, 19 nt, Artificial Sequence
  Description of Artificial Sequence: Synthetic oligonucleotide
  Sense strand starting at position 676 of SEQ ID NO: 1884161
gcuccuagcccugugugau

SEQ ID NO: 2244867 - RNA, 19 nt, Artificial Sequence
  Description of Artificial Sequence: Synthetic oligonucleotide
  Antisense strand to SEQ ID NO: 2244866
aucacacagggcuaggagc

SEQ ID NO: 2244868 - RNA, 19 nt, Artificial Sequence
  Description of Artificial Sequence: Synthetic oligonucleotide
  Sense strand starting at position 820 of SEQ ID NO: 1884161
ccuguuacccaggguuuaa

SEQ ID NO: 2244869 - RNA, 19 nt, Artificial Sequence
  Description of Artificial Sequence: Synthetic oligonucleotide
  Antisense strand to SEQ ID NO: 2244868
uuaaacccuggguaacagg

SEQ ID NO: 2244870 - RNA, 19 nt, Artificial Sequence
  Description of Artificial Sequence: Synthetic oligonucleotide
  Sense strand starting at position 1224 of SEQ ID NO: 1884161
uggugaugugacugggacu

SEQ ID NO: 2244871 - RNA, 19 nt, Artificial Sequence
  Description of Artificial Sequence: Synthetic oligonucleotide
  Antisense strand to SEQ ID NO: 2244870
agucccagucacaucacca

SEQ ID NO: 2244872 - RNA, 19 nt, Artificial Sequence
  Description of Artificial Sequence: Synthetic oligonucleotide
  Sense strand starting at position 1225 of SEQ ID NO: 1884161
ggugaugugacugggacua

SEQ ID NO: 2244873 - RNA, 19 nt, Artificial Sequence
  Description of Artificial Sequence: Synthetic oligonucleotide
  Antisense strand to SEQ ID NO: 2244872
uagucccagucacaucacc

SEQ ID NO: 2244874 - RNA, 19 nt, Artificial Sequence
  Description of Artificial Sequence: Synthetic oligonucleotide
  Sense strand starting at position 1439 of SEQ ID NO: 1884161
ggaggaauucucuggucaa

SEQ ID NO: 2244875 - RNA, 19 nt, Artificial Sequence
  Description of Artificial Sequence: Synthetic oligonucleotide
  Antisense strand to SEQ ID NO: 2244874
uugaccagagaauuccucc

SEQ ID NO: 2244876 - RNA, 19 nt, Artificial Sequence
  Description of Artificial Sequence: Synthetic oligonucleotide
  Sense strand starting at position 1442 of SEQ ID NO: 1884161
ggaauucucuggucaaaua

SEQ ID NO: 2244877 - RNA, 19 nt, Artificial Sequence
  Description of Artificial Sequence: Synthetic oligonucleotide
  Antisense strand to SEQ ID NO: 2244876
uauuugaccagagaauucc

SEQ ID NO: 2244878 - RNA, 19 nt, Artificial Sequence
  Description of Artificial Sequence: Synthetic oligonucleotide
  Sense strand starting at position 1614 of SEQ ID NO: 1884161
ugcuuugggaacuguucua

SEQ ID NO: 2244879 - RNA, 19 nt, Artificial Sequence
  Description of Artificial Sequence: Synthetic oligonucleotide
  Antisense strand to SEQ ID NO: 2244878
uagaacaguucccaaagca

SEQ ID NO: 2244880 - RNA, 19 nt, Artificial Sequence
  Description of Artificial Sequence: Synthetic oligonucleotide
  Sense strand starting at position 1691 of SEQ ID NO: 1884161
gcuuguuagaauugcagac

SEQ ID NO: 2244881 - RNA, 19 nt, Artificial Sequence
  Description of Artificial Sequence: Synthetic oligonucleotide
  Antisense strand to SEQ ID NO: 2244880
gucugcaauucuaacaagc

SEQ ID NO: 2244882 - RNA, 19 nt, Artificial Sequence
  Description of Artificial Sequence: Synthetic oligonucleotide
  Sense strand starting at position 1736 of SEQ ID NO: 1884161
aguuuagcaucugcauuua

SEQ ID NO: 2244883 - RNA, 19 nt, Artificial Sequence
  Description of Artificial Sequence: Synthetic oligonucleotide
  Antisense strand to SEQ ID NO: 2244882
uaaaugcagaugcuaaacu

SEQ ID NO: 2244884 - RNA, 19 nt, Artificial Sequence
  Description of Artificial Sequence: Synthetic oligonucleotide
  Sense strand starting at position 1753 of SEQ ID NO: 1884161
uauaauauaccugggugau

SEQ ID NO: 2244885 - RNA, 19 nt, Artificial Sequence
  Description of Artificial Sequence: Synthetic oligonucleotide
  Antisense strand to SEQ ID NO: 2244884
aucacccagguauauuaua

SEQ ID NO: 2244886 - RNA, 19 nt, Artificial Sequence
  Description of Artificial Sequence: Synthetic oligonucleotide
  Sense strand starting at position 1754 of SEQ ID NO: 1884161
auaauauaccugggugaua

SEQ ID NO: 2244887 - RNA, 19 nt, Artificial Sequence
  Description of Artificial Sequence: Synthetic oligonucleotide
  Antisense strand to SEQ ID NO: 2244886
uaucacccagguauauuau

SEQ ID NO: 2244888 - RNA, 19 nt, Artificial Sequence
  Description of Artificial Sequence: Synthetic oligonucleotide
  Sense strand starting at position 1755 of SEQ ID NO: 1884161
uaauauaccugggugauac

SEQ ID NO: 2244889 - RNA, 19 nt, Artificial Sequence
  Description of Artificial Sequence: Synthetic oligonucleotide
  Antisense strand to SEQ ID NO: 2244888
guaucacccagguauauua

SEQ ID NO: 2244890 - RNA, 19 nt, Artificial Sequence
  Description of Artificial Sequence: Synthetic oligonucleotide
  Sense strand starting at position 1756 of SEQ ID NO: 1884161
aauauaccugggugauaca

SEQ ID NO: 2244891 - RNA, 19 nt, Artificial Sequence
  Description of Artificial Sequence: Synthetic oligonucleotide
  Antisense strand to SEQ ID NO: 2244890
uguaucacccagguauauu

SEQ ID NO: 2244892 - RNA, 19 nt, Artificial Sequence
  Description of Artificial Sequence: Synthetic oligonucleotide
  Sense strand starting at position 2193 of SEQ ID NO: 1884161
gccauuaccuagccagaca

SEQ ID NO: 2244893 - RNA, 19 nt, Artificial Sequence
  Description of Artificial Sequence: Synthetic oligonucleotide
  Antisense strand to SEQ ID NO: 2244892
ugucuggcuagguaauggc

SEQ ID NO: 2244894 - RNA, 19 nt, Artificial Sequence
  Description of Artificial Sequence: Synthetic oligonucleotide
  Sense strand starting at position 2229 of SEQ ID NO: 1884161
cccuauucuuuagcuggaa

SEQ ID NO: 2244895 - RNA, 19 nt, Artificial Sequence
  Description of Artificial Sequence: Synthetic oligonucleotide
  Antisense strand to SEQ ID NO: 2244894
uuccagcuaaagaauaggg

SEQ ID NO: 2244896 - RNA, 19 nt, Artificial Sequence
  Description of Artificial Sequence: Synthetic oligonucleotide
  Sense strand starting at position 2230 of SEQ ID NO: 1884161
ccuauucuuuagcuggaaa

SEQ ID NO: 2244897 - RNA, 19 nt, Artificial Sequence
  Description of Artificial Sequence: Synthetic oligonucleotide
  Antisense strand to SEQ ID NO: 2244896
uuuccagcuaaagaauagg

SEQ ID NO: 2244898 - RNA, 19 nt, Artificial Sequence
  Description of Artificial Sequence: Synthetic oligonucleotide
  Sense strand starting at position 2265 of SEQ ID NO: 1884161
aaugccuguccauggaaua

SEQ ID NO: 2244899 - RNA, 19 nt, Artificial Sequence
  Description of Artificial Sequence: Synthetic oligonucleotide
  Antisense strand to SEQ ID NO: 2244898
uauuccauggacaggcauu

SEQ ID NO: 2244900 - RNA, 19 nt, Artificial Sequence
  Description of Artificial Sequence: Synthetic oligonucleotide
  Sense strand starting at position 2377 of SEQ ID NO: 1884161
cugagauaauagcuaaauc

SEQ ID NO: 2244901 - RNA, 19 nt, Artificial Sequence
  Description of Artificial Sequence: Synthetic oligonucleotide
  Antisense strand to SEQ ID NO: 2244900
gauuuagcuauuaucucag

SEQ ID NO: 2244902 - RNA, 19 nt, Artificial Sequence
  Description of Artificial Sequence: Synthetic oligonucleotide
  Sense strand starting at position 2397 of SEQ ID NO: 1884161
ucacuugcuguagauaguu

SEQ ID NO: 2244903 - RNA, 19 nt, Artificial Sequence
  Description of Artificial Sequence: Synthetic oligonucleotide
  Antisense strand to SEQ ID NO: 2244902
aacuaucuacagcaaguga

SEQ ID NO: 2244904 - RNA, 19 nt, Artificial Sequence
  Description of Artificial Sequence: Synthetic oligonucleotide
  Sense strand starting at position 2405 of SEQ ID NO: 1884161
uguagauaguugcugacuu

SEQ ID NO: 2244905 - RNA, 19 nt, Artificial Sequence
  Description of Artificial Sequence: Synthetic oligonucleotide
  Antisense strand to SEQ ID NO: 2244904
aagucagcaacuaucuaca

SEQ ID NO: 2244906 - RNA, 19 nt, Artificial Sequence
  Description of Artificial Sequence: Synthetic oligonucleotide
  Sense strand starting at position 2407 of SEQ ID NO: 1884161
uagauaguugcugacuuaa

SEQ ID NO: 2244907 - RNA, 19 nt, Artificial Sequence
  Description of Artificial Sequence: Synthetic oligonucleotide
  Antisense strand to SEQ ID NO: 2244906
uuaagucagcaacuaucua

SEQ ID NO: 2244908 - RNA, 19 nt, Artificial Sequence
  Description of Artificial Sequence: Synthetic oligonucleotide
  Sense strand starting at position 2409 of SEQ ID NO: 1884161
gauaguugcugacuuaaca

SEQ ID NO: 2244909 - RNA, 19 nt, Artificial Sequence
  Description of Artificial Sequence: Synthetic oligonucleotide
  Antisense strand to SEQ ID NO: 2244908
uguuaagucagcaacuauc

SEQ ID NO: 2244910 - RNA, 19 nt, Artificial Sequence
  Description of Artificial Sequence: Synthetic oligonucleotide
  Sense strand starting at position 2456 of SEQ ID NO: 1884161
ugguaaguaacccaucgua

SEQ ID NO: 2244911 - RNA, 19 nt, Artificial Sequence
  Description of Artificial Sequence: Synthetic oligonucleotide
  Antisense strand to SEQ ID NO: 2244910
uacgauggguuacuuacca

SEQ ID NO: 2244912 - RNA, 19 nt, Artificial Sequence
  Description of Artificial Sequence: Synthetic oligonucleotide
  Sense strand starting at position 2459 of SEQ ID NO: 1884161
uaaguaacccaucguaagu

SEQ ID NO: 2244913 - RNA, 19 nt, Artificial Sequence
  Description of Artificial Sequence: Synthetic oligonucleotide
  Antisense strand to SEQ ID NO: 2244912
acuuacgauggguuacuua

SEQ ID NO: 2244914 - RNA, 19 nt, Artificial Sequence
  Description of Artificial Sequence: Synthetic oligonucleotide
  Sense strand starting at position 2477 of SEQ ID NO: 1884161
uaagcaucuguagagguua

SEQ ID NO: 2244915 - RNA, 19 nt, Artificial Sequence
  Description of Artificial Sequence: Synthetic oligonucleotide
  Antisense strand to SEQ ID NO: 2244914
uaaccucuacagaugcuua

SEQ ID NO: 2244916 - RNA, 19 nt, Artificial Sequence
  Description of Artificial Sequence: Synthetic oligonucleotide
  Sense strand starting at position 2554 of SEQ ID NO: 1884161
uggaauguguggcuuaauu

SEQ ID NO: 2244917 - RNA, 19 nt, Artificial Sequence
  Description of Artificial Sequence: Synthetic oligonucleotide
  Antisense strand to SEQ ID NO: 2244916
aauuaagccacacauucca

SEQ ID NO: 2244918 - RNA, 19 nt, Artificial Sequence
  Description of Artificial Sequence: Synthetic oligonucleotide
  Sense strand starting at position 2556 of SEQ ID NO: 1884161
gaauguguggcuuaauuau

SEQ ID NO: 2244919 - RNA, 19 nt, Artificial Sequence
  Description of Artificial Sequence: Synthetic oligonucleotide
  Antisense strand to SEQ ID NO: 2244918
auaauuaagccacacauuc

SEQ ID NO: 2244920 - RNA, 19 nt, Artificial Sequence
  Description of Artificial Sequence: Synthetic oligonucleotide
  Sense strand starting at position 2818 of SEQ ID NO: 1884161
uugauuauuugggauccca

SEQ ID NO: 2244921 - RNA, 19 nt, Artificial Sequence
  Description of Artificial Sequence: Synthetic oligonucleotide
  Antisense strand to SEQ ID NO: 2244920
ugggaucccaaauaaucaa

SEQ ID NO: 2244922 - RNA, 19 nt, Artificial Sequence
  Description of Artificial Sequence: Synthetic oligonucleotide
  Sense strand starting at position 2874 of SEQ ID NO: 1884161
gccaccagaugguugaauu

SEQ ID NO: 2244923 - RNA, 19 nt, Artificial Sequence
  Description of Artificial Sequence: Synthetic oligonucleotide
  Antisense strand to SEQ ID NO: 2244922
aauucaaccaucugguggc

SEQ ID NO: 2244924 - RNA, 19 nt, Artificial Sequence
  Description of Artificial Sequence: Synthetic oligonucleotide
  Sense strand starting at position 2875 of SEQ ID NO: 1884161
ccaccagaugguugaauua

SEQ ID NO: 2244925 - RNA, 19 nt, Artificial Sequence
  Description of Artificial Sequence: Synthetic oligonucleotide
  Antisense strand to SEQ ID NO: 2244924
uaauucaaccaucuggugg

SEQ ID NO: 2244926 - RNA, 19 nt, Artificial Sequence
  Description of Artificial Sequence: Synthetic oligonucleotide
  Sense strand starting at position 2894 of SEQ ID NO: 1884161
gaaguacugugcccagaug

SEQ ID NO: 2244927 - RNA, 19 nt, Artificial Sequence
  Description of Artificial Sequence: Synthetic oligonucleotide
  Antisense strand to SEQ ID NO: 2244926
caucugggcacaguacuuc

SEQ ID NO: 2244928 - RNA, 19 nt, Artificial Sequence
  Description of Artificial Sequence: Synthetic oligonucleotide
  Sense strand starting at position 3132 of SEQ ID NO: 1884161
gggagcuaugaucauguca

SEQ ID NO: 2244929 - RNA, 19 nt, Artificial Sequence
  Description of Artificial Sequence: Synthetic oligonucleotide
  Antisense strand to SEQ ID NO: 2244928
ugacaugaucauagcuccc

SEQ ID NO: 2244930 - RNA, 19 nt, Artificial Sequence
  Description of Artificial Sequence: Synthetic oligonucleotide
  Sense strand starting at position 3316 of SEQ ID NO: 1884161
uggcaucccugauugagga

SEQ ID NO: 2244931 - RNA, 19 nt, Artificial Sequence
  Description of Artificial Sequence: Synthetic oligonucleotide
  Antisense strand to SEQ ID NO: 2244930
uccucaaucagggaugcca

SEQ ID NO: 2244932 - RNA, 19 nt, Artificial Sequence
  Description of Artificial Sequence: Synthetic oligonucleotide
  Sense strand starting at position 3317 of SEQ ID NO: 1884161
ggcaucccugauugaggaa

SEQ ID NO: 2244933 - RNA, 19 nt, Artificial Sequence
  Description of Artificial Sequence: Synthetic oligonucleotide
  Antisense strand to SEQ ID NO: 2244932
uuccucaaucagggaugcc

SEQ ID NO: 2244934 - RNA, 19 nt, Artificial Sequence
  Description of Artificial Sequence: Synthetic oligonucleotide
  Sense strand starting at position 82 of SEQ ID NO: 1884162
auugauauuccucaagguu

SEQ ID NO: 2244935 - RNA, 19 nt, Artificial Sequence
  Description of Artificial Sequence: Synthetic oligonucleotide
  Antisense strand to SEQ ID NO: 2244934
aaccuugaggaauaucaau

SEQ ID NO: 2244936 - RNA, 19 nt, Artificial Sequence
  Description of Artificial Sequence: Synthetic oligonucleotide
  Sense strand starting at position 203 of SEQ ID NO: 1884162
gcaccaguccuggauaucu

SEQ ID NO: 2244937 - RNA, 19 nt, Artificial Sequence
  Description of Artificial Sequence: Synthetic oligonucleotide
  Antisense strand to SEQ ID NO: 2244936
agauauccaggacuggugc

SEQ ID NO: 2244938 - RNA, 19 nt, Artificial Sequence
  Description of Artificial Sequence: Synthetic oligonucleotide
  Sense strand starting at position 233 of SEQ ID NO: 1884162
augugucccucagcauuua

SEQ ID NO: 2244939 - RNA, 19 nt, Artificial Sequence
  Description of Artificial Sequence: Synthetic oligonucleotide
  Antisense strand to SEQ ID NO: 2244938
uaaaugcugagggacacau

SEQ ID NO: 2244940 - RNA, 19 nt, Artificial Sequence
  Description of Artificial Sequence: Synthetic oligonucleotide
  Sense strand starting at position 234 of SEQ ID NO: 1884162
ugugucccucagcauuuau

SEQ ID NO: 2244941 - RNA, 19 nt, Artificial Sequence
  Description of Artificial Sequence: Synthetic oligonucleotide
  Antisense strand to SEQ ID NO: 2244940
auaaaugcugagggacaca

SEQ ID NO: 2244942 - RNA, 19 nt, Artificial Sequence
  Description of Artificial Sequence: Synthetic oligonucleotide
  Sense strand starting at position 261 of SEQ ID NO: 1884162
ucucccucugaguaacaga

SEQ ID NO: 2244943 - RNA, 19 nt, Artificial Sequence
  Description of Artificial Sequence: Synthetic oligonucleotide
  Antisense strand to SEQ ID NO: 2244942
ucuguuacucagagggaga

SEQ ID NO: 2244944 - RNA, 19 nt, Artificial Sequence
  Description of Artificial Sequence: Synthetic oligonucleotide
  Sense strand starting at position 361 of SEQ ID NO: 1884162
ggcuuauggccgagccagu

SEQ ID NO: 2244945 - RNA, 19 nt, Artificial Sequence
  Description of Artificial Sequence: Synthetic oligonucleotide
  Antisense strand to SEQ ID NO: 2244944
acuggcucggccauaagcc

SEQ ID NO: 2244946 - RNA, 19 nt, Artificial Sequence
  Description of Artificial Sequence: Synthetic oligonucleotide
  Sense strand starting at position 498 of SEQ ID NO: 1884162
uuuaguguuccaggcauuu

SEQ ID NO: 2244947 - RNA, 19 nt, Artificial Sequence
  Description of Artificial Sequence: Synthetic oligonucleotide
  Antisense strand to SEQ ID NO: 2244946
aaaugccuggaacacuaaa

SEQ ID NO: 2244948 - RNA, 19 nt, Artificial Sequence
  Description of Artificial Sequence: Synthetic oligonucleotide
  Sense strand starting at position 548 of SEQ ID NO: 1884162
gucauuuccucuccaguau

SEQ ID NO: 2244949 - RNA, 19 nt, Artificial Sequence
  Description of Artificial Sequence: Synthetic oligonucleotide
  Antisense strand to SEQ ID NO: 2244948
auacuggagaggaaaugac

SEQ ID NO: 2244950 - RNA, 19 nt, Artificial Sequence
  Description of Artificial Sequence: Synthetic oligonucleotide
  Sense strand starting at position 552 of SEQ ID NO: 1884162
uuuccucuccaguauagau

SEQ ID NO: 2244951 - RNA, 19 nt, Artificial Sequence
  Description of Artificial Sequence: Synthetic oligonucleotide
  Antisense strand to SEQ ID NO: 2244950
aucuauacuggagaggaaa

SEQ ID NO: 2244952 - RNA, 19 nt, Artificial Sequence
  Description of Artificial Sequence: Synthetic oligonucleotide
  Sense strand starting at position 581 of SEQ ID NO: 1884162
ggaucagagccauguacau

SEQ ID NO: 2244953 - RNA, 19 nt, Artificial Sequence
  Description of Artificial Sequence: Synthetic oligonucleotide
  Antisense strand to SEQ ID NO: 2244952
auguacauggcucugaucc

SEQ ID NO: 2244954 - RNA, 19 nt, Artificial Sequence
  Description of Artificial Sequence: Synthetic oligonucleotide
  Sense strand starting at position 810 of SEQ ID NO: 1884162
ugcagagcuagugauacau

SEQ ID NO: 2244955 - RNA, 19 nt, Artificial Sequence
  Description of Artificial Sequence: Synthetic oligonucleotide
  Antisense strand to SEQ ID NO: 2244954
auguaucacuagcucugca

SEQ ID NO: 2244956 - RNA, 19 nt, Artificial Sequence
  Description of Artificial Sequence: Synthetic oligonucleotide
  Sense strand starting at position 914 of SEQ ID NO: 1884162
ucauaauugccauaggagu

SEQ ID NO: 2244957 - RNA, 19 nt, Artificial Sequence
  Description of Artificial Sequence: Synthetic oligonucleotide
  Antisense strand to SEQ ID NO: 2244956
acuccuauggcaauuauga

SEQ ID NO: 2244958 - RNA, 19 nt, Artificial Sequence
  Description of Artificial Sequence: Synthetic oligonucleotide
  Sense strand starting at position 1010 of SEQ ID NO: 1884162
uguuuacauuuguugucaa

SEQ ID NO: 2244959 - RNA, 19 nt, Artificial Sequence
  Description of Artificial Sequence: Synthetic oligonucleotide
  Antisense strand to SEQ ID NO: 2244958
uugacaacaaauguaaaca

SEQ ID NO: 2244960 - RNA, 19 nt, Artificial Sequence
  Description of Artificial Sequence: Synthetic oligonucleotide
  Sense strand starting at position 1013 of SEQ ID NO: 1884162
uuacauuuguugucaaagc

SEQ ID NO: 2244961 - RNA, 19 nt, Artificial Sequence
  Description of Artificial Sequence: Synthetic oligonucleotide
  Antisense strand to SEQ ID NO: 2244960
gcuuugacaacaaauguaa

SEQ ID NO: 2244962 - RNA, 19 nt, Artificial Sequence
  Description of Artificial Sequence: Synthetic oligonucleotide
  Sense strand starting at position 1118 of SEQ ID NO: 1884162
cuugcuugcgccguaaaua

SEQ ID NO: 2244963 - RNA, 19 nt, Artificial Sequence
  Description of Artificial Sequence: Synthetic oligonucleotide
  Antisense strand to SEQ ID NO: 2244962
uauuuacggcgcaagcaag

SEQ ID NO: 2244964 - RNA, 19 nt, Artificial Sequence
  Description of Artificial Sequence: Synthetic oligonucleotide
  Sense strand starting at position 1528 of SEQ ID NO: 1884162
agucauaagccuuaugcaa

SEQ ID NO: 2244965 - RNA, 19 nt, Artificial Sequence
  Description of Artificial Sequence: Synthetic oligonucleotide
  Antisense strand to SEQ ID NO: 2244964
uugcauaaggcuuaugacu

SEQ ID NO: 2244966 - RNA, 19 nt, Artificial Sequence
  Description of Artificial Sequence: Synthetic oligonucleotide
  Sense strand starting at position 1691 of SEQ ID NO: 1884162
aagucauuccagcauguag

SEQ ID NO: 2244967 - RNA, 19 nt, Artificial Sequence
  Description of Artificial Sequence: Synthetic oligonucleotide
  Antisense strand to SEQ ID NO: 2244966
cuacaugcuggaaugacuu

SEQ ID NO: 2244968 - RNA, 19 nt, Artificial Sequence
  Description of Artificial Sequence: Synthetic oligonucleotide
  Sense strand starting at position 1714 of SEQ ID NO: 1884162
uguugagaaccuugguacu

SEQ ID NO: 2244969 - RNA, 19 nt, Artificial Sequence
  Description of Artificial Sequence: Synthetic oligonucleotide
  Antisense strand to SEQ ID NO: 2244968
aguaccaagguucucaaca

SEQ ID NO: 2244970 - RNA, 19 nt, Artificial Sequence
  Description of Artificial Sequence: Synthetic oligonucleotide
  Sense strand starting at position 1716 of SEQ ID NO: 1884162
uugagaaccuugguacuaa

SEQ ID NO: 2244971 - RNA, 19 nt, Artificial Sequence
  Description of Artificial Sequence: Synthetic oligonucleotide
  Antisense strand to SEQ ID NO: 2244970
uuaguaccaagguucucaa

SEQ ID NO: 2244972 - RNA, 19 nt, Artificial Sequence
  Description of Artificial Sequence: Synthetic oligonucleotide
  Sense strand starting at position 1756 of SEQ ID NO: 1884162
gucacuuguccucaccaaa

SEQ ID NO: 2244973 - RNA, 19 nt, Artificial Sequence
  Description of Artificial Sequence: Synthetic oligonucleotide
  Antisense strand to SEQ ID NO: 2244972
uuuggugaggacaagugac

SEQ ID NO: 2244974 - RNA, 19 nt, Artificial Sequence
  Description of Artificial Sequence: Synthetic oligonucleotide
  Sense strand starting at position 2067 of SEQ ID NO: 1884162
cagacaacugcaugugaca

SEQ ID NO: 2244975 - RNA, 19 nt, Artificial Sequence
  Description of Artificial Sequence: Synthetic oligonucleotide
  Antisense strand to SEQ ID NO: 2244974
ugucacaugcaguugucug

SEQ ID NO: 2244976 - RNA, 19 nt, Artificial Sequence
  Description of Artificial Sequence: Synthetic oligonucleotide
  Sense strand starting at position 2090 of SEQ ID NO: 1884162
gaaacacauguuggugauu

SEQ ID NO: 2244977 - RNA, 19 nt, Artificial Sequence
  Description of Artificial Sequence: Synthetic oligonucleotide
  Antisense strand to SEQ ID NO: 2244976
aaucaccaacauguguuuc

SEQ ID NO: 2244978 - RNA, 19 nt, Artificial Sequence
  Description of Artificial Sequence: Synthetic oligonucleotide
  Sense strand starting at position 2110 of SEQ ID NO: 1884162
ggguuucugugaccacaaa

SEQ ID NO: 2244979 - RNA, 19 nt, Artificial Sequence
  Description of Artificial Sequence: Synthetic oligonucleotide
  Antisense strand to SEQ ID NO: 2244978
uuuguggucacagaaaccc

SEQ ID NO: 2244980 - RNA, 19 nt, Artificial Sequence
  Description of Artificial Sequence: Synthetic oligonucleotide
  Sense strand starting at position 2264 of SEQ ID NO: 1884162
ucaguaucucucugaauag

SEQ ID NO: 2244981 - RNA, 19 nt, Artificial Sequence
  Description of Artificial Sequence: Synthetic oligonucleotide
  Antisense strand to SEQ ID NO: 2244980
cuauucagagagauacuga

SEQ ID NO: 2244982 - RNA, 19 nt, Artificial Sequence
  Description of Artificial Sequence: Synthetic oligonucleotide
  Sense strand starting at position 2605 of SEQ ID NO: 1884162
agauauaauugugucacuu

SEQ ID NO: 2244983 - RNA, 19 nt, Artificial Sequence
  Description of Artificial Sequence: Synthetic oligonucleotide
  Antisense strand to SEQ ID NO: 2244982
aagugacacaauuauaucu

SEQ ID NO: 2244984 - RNA, 19 nt, Artificial Sequence
  Description of Artificial Sequence: Synthetic oligonucleotide
  Sense strand starting at position 2715 of SEQ ID NO: 1884162
ccaguaugccuaggagaaa

SEQ ID NO: 2244985 - RNA, 19 nt, Artificial Sequence
  Description of Artificial Sequence: Synthetic oligonucleotide
  Antisense strand to SEQ ID NO: 2244984
uuucuccuaggcauacugg

SEQ ID NO: 2244986 - RNA, 19 nt, Artificial Sequence
  Description of Artificial Sequence: Synthetic oligonucleotide
  Sense strand starting at position 2793 of SEQ ID NO: 1884162
cauccugauuuggaugaua

SEQ ID NO: 2244987 - RNA, 19 nt, Artificial Sequence
  Description of Artificial Sequence: Synthetic oligonucleotide
  Antisense strand to SEQ ID NO: 2244986
uaucauccaaaucaggaug

SEQ ID NO: 2244988 - RNA, 19 nt, Artificial Sequence
  Description of Artificial Sequence: Synthetic oligonucleotide
  Sense strand starting at position 3128 of SEQ ID NO: 1884162
uacagaggguaaucaaguu

SEQ ID NO: 2244989 - RNA, 19 nt, Artificial Sequence
  Description of Artificial Sequence: Synthetic oligonucleotide
  Antisense strand to SEQ ID NO: 2244988
aacuugauuacccucugua

SEQ ID NO: 2244990 - RNA, 19 nt, Artificial Sequence
  Description of Artificial Sequence: Synthetic oligonucleotide
  Sense strand starting at position 3254 of SEQ ID NO: 1884162
agcagagaucugggugaug

SEQ ID NO: 2244991 - RNA, 19 nt, Artificial Sequence
  Description of Artificial Sequence: Synthetic oligonucleotide
  Antisense strand to SEQ ID NO: 2244990
caucacccagaucucugcu

SEQ ID NO: 2244992 - RNA, 19 nt, Artificial Sequence
  Description of Artificial Sequence: Synthetic oligonucleotide
  Sense strand starting at position 3256 of SEQ ID NO: 1884162
cagagaucugggugaugug

SEQ ID NO: 2244993 - RNA, 19 nt, Artificial Sequence
  Description of Artificial Sequence: Synthetic oligonucleotide
  Antisense strand to SEQ ID NO: 2244992
cacaucacccagaucucug

SEQ ID NO: 2244994 - RNA, 19 nt, Artificial Sequence
  Description of Artificial Sequence: Synthetic oligonucleotide
  Sense strand starting at position 3371 of SEQ ID NO: 1884162
ugcugagaccuugaucuca

SEQ ID NO: 2244995 - RNA, 19 nt, Artificial Sequence
  Description of Artificial Sequence: Synthetic oligonucleotide
  Antisense strand to SEQ ID NO: 2244994
ugagaucaaggucucagca

SEQ ID NO: 2244996 - RNA, 19 nt, Artificial Sequence
  Description of Artificial Sequence: Synthetic oligonucleotide
  Sense strand starting at position 3373 of SEQ ID NO: 1884162
cugagaccuugaucucaga

SEQ ID NO: 2244997 - RNA, 19 nt, Artificial Sequence
  Description of Artificial Sequence: Synthetic oligonucleotide
  Antisense strand to SEQ ID NO: 2244996
ucugagaucaaggucucag

SEQ ID NO: 2244998 - RNA, 19 nt, Artificial Sequence
  Description of Artificial Sequence: Synthetic oligonucleotide
  Sense strand starting at position 3484 of SEQ ID NO: 1884162
agaaguaucuguuuaaaca

SEQ ID NO: 2244999 - RNA, 19 nt, Artificial Sequence
  Description of Artificial Sequence: Synthetic oligonucleotide
  Antisense strand to SEQ ID NO: 2244998
uguuuaaacagauacuucu

SEQ ID NO: 2245000 - RNA, 19 nt, Artificial Sequence
  Description of Artificial Sequence: Synthetic oligonucleotide
  Sense strand starting at position 3546 of SEQ ID NO: 1884162
ccaacagacuaugugagau

SEQ ID NO: 2245001 - RNA, 19 nt, Artificial Sequence
  Description of Artificial Sequence: Synthetic oligonucleotide
  Antisense strand to SEQ ID NO: 2245000
aucucacauagucuguugg

SEQ ID NO: 2245002 - RNA, 19 nt, Artificial Sequence
  Description of Artificial Sequence: Synthetic oligonucleotide
  Sense strand starting at position 3581 of SEQ ID NO: 1884162
cccauugugccuuagauca

SEQ ID NO: 2245003 - RNA, 19 nt, Artificial Sequence
  Description of Artificial Sequence: Synthetic oligonucleotide
  Antisense strand to SEQ ID NO: 2245002
ugaucuaaggcacaauggg

SEQ ID NO: 2245004 - RNA, 19 nt, Artificial Sequence
  Description of Artificial Sequence: Synthetic oligonucleotide
  Sense strand starting at position 3586 of SEQ ID NO: 1884162
ugugccuuagaucaaugaa

SEQ ID NO: 2245005 - RNA, 19 nt, Artificial Sequence
  Description of Artificial Sequence: Synthetic oligonucleotide
  Antisense strand to SEQ ID NO: 2245004
uucauugaucuaaggcaca

SEQ ID NO: 2245006 - RNA, 19 nt, Artificial Sequence
  Description of Artificial Sequence: Synthetic oligonucleotide
  Sense strand starting at position 3589 of SEQ ID NO: 1884162
gccuuagaucaaugaaagc

SEQ ID NO: 2245007 - RNA, 19 nt, Artificial Sequence
  Description of Artificial Sequence: Synthetic oligonucleotide
  Antisense strand to SEQ ID NO: 2245006
gcuuucauugaucuaaggc

SEQ ID NO: 2245008 - RNA, 19 nt, Artificial Sequence
  Description of Artificial Sequence: Synthetic oligonucleotide
  Sense strand starting at position 3661 of SEQ ID NO: 1884162
acuauauaaguuuaggcaa

SEQ ID NO: 2245009 - RNA, 19 nt, Artificial Sequence
  Description of Artificial Sequence: Synthetic oligonucleotide
  Antisense strand to SEQ ID NO: 2245008
uugccuaaacuuauauagu

SEQ ID NO: 2245010 - RNA, 19 nt, Artificial Sequence
  Description of Artificial Sequence: Synthetic oligonucleotide
  Sense strand starting at position 3664 of SEQ ID NO: 1884162
auauaaguuuaggcaagua

SEQ ID NO: 2245011 - RNA, 19 nt, Artificial Sequence
  Description of Artificial Sequence: Synthetic oligonucleotide
  Antisense strand to SEQ ID NO: 2245010
uacuugccuaaacuuauau

SEQ ID NO: 2245012 - RNA, 19 nt, Artificial Sequence
  Description of Artificial Sequence: Synthetic oligonucleotide
  Sense strand starting at position 3771 of SEQ ID NO: 1884162
gcaagccuccucgaacaaa

SEQ ID NO: 2245013 - RNA, 19 nt, Artificial Sequence
  Description of Artificial Sequence: Synthetic oligonucleotide
  Antisense strand to SEQ ID NO: 2245012
uuuguucgaggaggcuugc

SEQ ID NO: 2245014 - RNA, 19 nt, Artificial Sequence
  Description of Artificial Sequence: Synthetic oligonucleotide
  Sense strand starting at position 5 of SEQ ID NO: 1884163
ccuguauacguggaauuaa

SEQ ID NO: 2245015 - RNA, 19 nt, Artificial Sequence
  Description of Artificial Sequence: Synthetic oligonucleotide
  Antisense strand to SEQ ID NO: 2245014
uuaauuccacguauacagg

SEQ ID NO: 2245016 - RNA, 19 nt, Artificial Sequence
  Description of Artificial Sequence: Synthetic oligonucleotide
  Sense strand starting at position 42 of SEQ ID NO: 1884163
ggugaagguauccagcuuu

SEQ ID NO: 2245017 - RNA, 19 nt, Artificial Sequence
  Description of Artificial Sequence: Synthetic oligonucleotide
  Antisense strand to SEQ ID NO: 2245016
aaagcuggauaccuucacc

SEQ ID NO: 2245018 - RNA, 19 nt, Artificial Sequence
  Description of Artificial Sequence: Synthetic oligonucleotide
  Sense strand starting at position 505 of SEQ ID NO: 1884163
auaggauagguaugguauu

SEQ ID NO: 2245019 - RNA, 19 nt, Artificial Sequence
  Description of Artificial Sequence: Synthetic oligonucleotide
  Antisense strand to SEQ ID NO: 2245018
aauaccauaccuauccuau

SEQ ID NO: 2245020 - RNA, 19 nt, Artificial Sequence
  Description of Artificial Sequence: Synthetic oligonucleotide
  Sense strand starting at position 521 of SEQ ID NO: 1884163
auugaaaucccucagguuu

SEQ ID NO: 2245021 - RNA, 19 nt, Artificial Sequence
  Description of Artificial Sequence: Synthetic oligonucleotide
  Antisense strand to SEQ ID NO: 2245020
aaaccugagggauuucaau

SEQ ID NO: 2245022 - RNA, 19 nt, Artificial Sequence
  Description of Artificial Sequence: Synthetic oligonucleotide
  Sense strand starting at position 823 of SEQ ID NO: 1884163
ccugguguucuauaacuuc

SEQ ID NO: 2245023 - RNA, 19 nt, Artificial Sequence
  Description of Artificial Sequence: Synthetic oligonucleotide
  Antisense strand to SEQ ID NO: 2245022
gaaguuauagaacaccagg

SEQ ID NO: 2245024 - RNA, 19 nt, Artificial Sequence
  Description of Artificial Sequence: Synthetic oligonucleotide
  Sense strand starting at position 874 of SEQ ID NO: 1884163
uugggaaauucucugauac

SEQ ID NO: 2245025 - RNA, 19 nt, Artificial Sequence
  Description of Artificial Sequence: Synthetic oligonucleotide
  Antisense strand to SEQ ID NO: 2245024
guaucagagaauuucccaa

SEQ ID NO: 2245026 - RNA, 19 nt, Artificial Sequence
  Description of Artificial Sequence: Synthetic oligonucleotide
  Sense strand starting at position 875 of SEQ ID NO: 1884163
ugggaaauucucugauacu

SEQ ID NO: 2245027 - RNA, 19 nt, Artificial Sequence
  Description of Artificial Sequence: Synthetic oligonucleotide
  Antisense strand to SEQ ID NO: 2245026
aguaucagagaauuuccca

SEQ ID NO: 2245028 - RNA, 19 nt, Artificial Sequence
  Description of Artificial Sequence: Synthetic oligonucleotide
  Sense strand starting at position 1064 of SEQ ID NO: 1884163
ugucucuaggcucacuaau

SEQ ID NO: 2245029 - RNA, 19 nt, Artificial Sequence
  Description of Artificial Sequence: Synthetic oligonucleotide
  Antisense strand to SEQ ID NO: 2245028
auuagugagccuagagaca

SEQ ID NO: 2245030 - RNA, 19 nt, Artificial Sequence
  Description of Artificial Sequence: Synthetic oligonucleotide
  Sense strand starting at position 1309 of SEQ ID NO: 1884163
auaucuaucucucugggau

SEQ ID NO: 2245031 - RNA, 19 nt, Artificial Sequence
  Description of Artificial Sequence: Synthetic oligonucleotide
  Antisense strand to SEQ ID NO: 2245030
aucccagagagauagauau

SEQ ID NO: 2245032 - RNA, 19 nt, Artificial Sequence
  Description of Artificial Sequence: Synthetic oligonucleotide
  Sense strand starting at position 1312 of SEQ ID NO: 1884163
ucuaucucucugggauuga

SEQ ID NO: 2245033 - RNA, 19 nt, Artificial Sequence
  Description of Artificial Sequence: Synthetic oligonucleotide
  Antisense strand to SEQ ID NO: 2245032
ucaaucccagagagauaga

SEQ ID NO: 2245034 - RNA, 19 nt, Artificial Sequence
  Description of Artificial Sequence: Synthetic oligonucleotide
  Sense strand starting at position 1322 of SEQ ID NO: 1884163
ugggauugaucccugguac

SEQ ID NO: 2245035 - RNA, 19 nt, Artificial Sequence
  Description of Artificial Sequence: Synthetic oligonucleotide
  Antisense strand to SEQ ID NO: 2245034
guaccagggaucaauccca

SEQ ID NO: 2245036 - RNA, 19 nt, Artificial Sequence
  Description of Artificial Sequence: Synthetic oligonucleotide
  Sense strand starting at position 1323 of SEQ ID NO: 1884163
gggauugaucccugguacc

SEQ ID NO: 2245037 - RNA, 19 nt, Artificial Sequence
  Description of Artificial Sequence: Synthetic oligonucleotide
  Antisense strand to SEQ ID NO: 2245036
gguaccagggaucaauccc

SEQ ID NO: 2245038 - RNA, 19 nt, Artificial Sequence
  Description of Artificial Sequence: Synthetic oligonucleotide
  Sense strand starting at position 1380 of SEQ ID NO: 1884163
gauguuggcacuuguagaa

SEQ ID NO: 2245039 - RNA, 19 nt, Artificial Sequence
  Description of Artificial Sequence: Synthetic oligonucleotide
  Antisense strand to SEQ ID NO: 2245038
uucuacaagugccaacauc

SEQ ID NO: 2245040 - RNA, 19 nt, Artificial Sequence
  Description of Artificial Sequence: Synthetic oligonucleotide
  Sense strand starting at position 1404 of SEQ ID NO: 1884163
uuggcaucugggcauuaaa

SEQ ID NO: 2245041 - RNA, 19 nt, Artificial Sequence
  Description of Artificial Sequence: Synthetic oligonucleotide
  Antisense strand to SEQ ID NO: 2245040
uuuaaugcccagaugccaa

SEQ ID NO: 2245042 - RNA, 19 nt, Artificial Sequence
  Description of Artificial Sequence: Synthetic oligonucleotide
  Sense strand starting at position 1411 of SEQ ID NO: 1884163
cugggcauuaaagaguuau

SEQ ID NO: 2245043 - RNA, 19 nt, Artificial Sequence
  Description of Artificial Sequence: Synthetic oligonucleotide
  Antisense strand to SEQ ID NO: 2245042
auaacucuuuaaugcccag

SEQ ID NO: 2245044 - RNA, 19 nt, Artificial Sequence
  Description of Artificial Sequence: Synthetic oligonucleotide
  Sense strand starting at position 1458 of SEQ ID NO: 1884163
cuuauuugugccugucuuu

SEQ ID NO: 2245045 - RNA, 19 nt, Artificial Sequence
  Description of Artificial Sequence: Synthetic oligonucleotide
  Antisense strand to SEQ ID NO: 2245044
aaagacaggcacaaauaag

SEQ ID NO: 2245046 - RNA, 19 nt, Artificial Sequence
  Description of Artificial Sequence: Synthetic oligonucleotide
  Sense strand starting at position 1522 of SEQ ID NO: 1884163
ccaauaauacgguggguuu

SEQ ID NO: 2245047 - RNA, 19 nt, Artificial Sequence
  Description of Artificial Sequence: Synthetic oligonucleotide
  Antisense strand to SEQ ID NO: 2245046
aaacccaccguauuauugg

SEQ ID NO: 2245048 - RNA, 19 nt, Artificial Sequence
  Description of Artificial Sequence: Synthetic oligonucleotide
  Sense strand starting at position 1566 of SEQ ID NO: 1884163
ggugguuguggguaagauc

SEQ ID NO: 2245049 - RNA, 19 nt, Artificial Sequence
  Description of Artificial Sequence: Synthetic oligonucleotide
  Antisense strand to SEQ ID NO: 2245048
gaucuuacccacaaccacc

SEQ ID NO: 2245050 - RNA, 19 nt, Artificial Sequence
  Description of Artificial Sequence: Synthetic oligonucleotide
  Sense strand starting at position 1584 of SEQ ID NO: 1884163
ccagaagaaugcucuggau

SEQ ID NO: 2245051 - RNA, 19 nt, Artificial Sequence
  Description of Artificial Sequence: Synthetic oligonucleotide
  Antisense strand to SEQ ID NO: 2245050
auccagagcauucuucugg

SEQ ID NO: 2245052 - RNA, 19 nt, Artificial Sequence
  Description of Artificial Sequence: Synthetic oligonucleotide
  Sense strand starting at position 1586 of SEQ ID NO: 1884163
agaagaaugcucuggauua

SEQ ID NO: 2245053 - RNA, 19 nt, Artificial Sequence
  Description of Artificial Sequence: Synthetic oligonucleotide
  Antisense strand to SEQ ID NO: 2245052
uaauccagagcauucuucu

SEQ ID NO: 2245054 - RNA, 19 nt, Artificial Sequence
  Description of Artificial Sequence: Synthetic oligonucleotide
  Sense strand starting at position 1693 of SEQ ID NO: 1884163
gguguagugaugcaaucac

SEQ ID NO: 2245055 - RNA, 19 nt, Artificial Sequence
  Description of Artificial Sequence: Synthetic oligonucleotide
  Antisense strand to SEQ ID NO: 2245054
gugauugcaucacuacacc

SEQ ID NO: 2245056 - RNA, 19 nt, Artificial Sequence
  Description of Artificial Sequence: Synthetic oligonucleotide
  Sense strand starting at position 1871 of SEQ ID NO: 1884163
uuagaaacuuaugugaugu

SEQ ID NO: 2245057 - RNA, 19 nt, Artificial Sequence
  Description of Artificial Sequence: Synthetic oligonucleotide
  Antisense strand to SEQ ID NO: 2245056
acaucacauaaguuucuaa

SEQ ID NO: 2245058 - RNA, 19 nt, Artificial Sequence
  Description of Artificial Sequence: Synthetic oligonucleotide
  Sense strand starting at position 2406 of SEQ ID NO: 1884163
agcuuuauucuccacugua

SEQ ID NO: 2245059 - RNA, 19 nt, Artificial Sequence
  Description of Artificial Sequence: Synthetic oligonucleotide
  Antisense strand to SEQ ID NO: 2245058
uacaguggagaauaaagcu

SEQ ID NO: 2245060 - RNA, 19 nt, Artificial Sequence
  Description of Artificial Sequence: Synthetic oligonucleotide
  Sense strand starting at position 2537 of SEQ ID NO: 1884163
gguggugucagugauucua

SEQ ID NO: 2245061 - RNA, 19 nt, Artificial Sequence
  Description of Artificial Sequence: Synthetic oligonucleotide
  Antisense strand to SEQ ID NO: 2245060
uagaaucacugacaccacc

SEQ ID NO: 2245062 - RNA, 19 nt, Artificial Sequence
  Description of Artificial Sequence: Synthetic oligonucleotide
  Sense strand starting at position 2539 of SEQ ID NO: 1884163
uggugucagugauucuaaa

SEQ ID NO: 2245063 - RNA, 19 nt, Artificial Sequence
  Description of Artificial Sequence: Synthetic oligonucleotide
  Antisense strand to SEQ ID NO: 2245062
uuuagaaucacugacacca

SEQ ID NO: 2245064 - RNA, 19 nt, Artificial Sequence
  Description of Artificial Sequence: Synthetic oligonucleotide
  Sense strand starting at position 2595 of SEQ ID NO: 1884163
auccaaguacugugaauau

SEQ ID NO: 2245065 - RNA, 19 nt, Artificial Sequence
  Description of Artificial Sequence: Synthetic oligonucleotide
  Antisense strand to SEQ ID NO: 2245064
auauucacaguacuuggau

SEQ ID NO: 2245066 - RNA, 19 nt, Artificial Sequence
  Description of Artificial Sequence: Synthetic oligonucleotide
  Sense strand starting at position 2678 of SEQ ID NO: 1884163
uguacagauaguuguuaag

SEQ ID NO: 2245067 - RNA, 19 nt, Artificial Sequence
  Description of Artificial Sequence: Synthetic oligonucleotide
  Antisense strand to SEQ ID NO: 2245066
cuuaacaacuaucuguaca

SEQ ID NO: 2245068 - RNA, 19 nt, Artificial Sequence
  Description of Artificial Sequence: Synthetic oligonucleotide
  Sense strand starting at position 2680 of SEQ ID NO: 1884163
uacagauaguuguuaagau

SEQ ID NO: 2245069 - RNA, 19 nt, Artificial Sequence
  Description of Artificial Sequence: Synthetic oligonucleotide
  Antisense strand to SEQ ID NO: 2245068
aucuuaacaacuaucugua

SEQ ID NO: 2245070 - RNA, 19 nt, Artificial Sequence
  Description of Artificial Sequence: Synthetic oligonucleotide
  Sense strand starting at position 2688 of SEQ ID NO: 1884163
guuguuaagauuugguguu

SEQ ID NO: 2245071 - RNA, 19 nt, Artificial Sequence
  Description of Artificial Sequence: Synthetic oligonucleotide
  Antisense strand to SEQ ID NO: 2245070
aacaccaaaucuuaacaac

SEQ ID NO: 2245072 - RNA, 19 nt, Artificial Sequence
  Description of Artificial Sequence: Synthetic oligonucleotide
  Sense strand starting at position 2852 of SEQ ID NO: 1884163
cugccagguggaugucaaa

SEQ ID NO: 2245073 - RNA, 19 nt, Artificial Sequence
  Description of Artificial Sequence: Synthetic oligonucleotide
  Antisense strand to SEQ ID NO: 2245072
uuugacauccaccuggcag

SEQ ID NO: 2245074 - RNA, 19 nt, Artificial Sequence
  Description of Artificial Sequence: Synthetic oligonucleotide
  Sense strand starting at position 2905 of SEQ ID NO: 1884163
aagggaggcuccucauuau

SEQ ID NO: 2245075 - RNA, 19 nt, Artificial Sequence
  Description of Artificial Sequence: Synthetic oligonucleotide
  Antisense strand to SEQ ID NO: 2245074
auaaugaggagccucccuu

SEQ ID NO: 2245076 - RNA, 19 nt, Artificial Sequence
  Description of Artificial Sequence: Synthetic oligonucleotide
  Sense strand starting at position 3062 of SEQ ID NO: 1884163
gcaggagcacauuagaguu

SEQ ID NO: 2245077 - RNA, 19 nt, Artificial Sequence
  Description of Artificial Sequence: Synthetic oligonucleotide
  Antisense strand to SEQ ID NO: 2245076
aacucuaaugugcuccugc

SEQ ID NO: 2245078 - RNA, 19 nt, Artificial Sequence
  Description of Artificial Sequence: Synthetic oligonucleotide
  Sense strand starting at position 3076 of SEQ ID NO: 1884163
gaguuucaugaggguaagu

SEQ ID NO: 2245079 - RNA, 19 nt, Artificial Sequence
  Description of Artificial Sequence: Synthetic oligonucleotide
  Antisense strand to SEQ ID NO: 2245078
acuuacccucaugaaacuc

SEQ ID NO: 2245080 - RNA, 19 nt, Artificial Sequence
  Description of Artificial Sequence: Synthetic oligonucleotide
  Sense strand starting at position 3199 of SEQ ID NO: 1884163
cuagauugguccuuuauug

SEQ ID NO: 2245081 - RNA, 19 nt, Artificial Sequence
  Description of Artificial Sequence: Synthetic oligonucleotide
  Antisense strand to SEQ ID NO: 2245080
caauaaaggaccaaucuag

SEQ ID NO: 2245082 - RNA, 19 nt, Artificial Sequence
  Description of Artificial Sequence: Synthetic oligonucleotide
  Sense strand starting at position 3217 of SEQ ID NO: 1884163
guucuccuuggcuagagaa

SEQ ID NO: 2245083 - RNA, 19 nt, Artificial Sequence
  Description of Artificial Sequence: Synthetic oligonucleotide
  Antisense strand to SEQ ID NO: 2245082
uucucuagccaaggagaac

SEQ ID NO: 2245084 - RNA, 19 nt, Artificial Sequence
  Description of Artificial Sequence: Synthetic oligonucleotide
  Sense strand starting at position 3271 of SEQ ID NO: 1884163
cauugagauuuccagguuu

SEQ ID NO: 2245085 - RNA, 19 nt, Artificial Sequence
  Description of Artificial Sequence: Synthetic oligonucleotide
  Antisense strand to SEQ ID NO: 2245084
aaaccuggaaaucucaaug

SEQ ID NO: 2245086 - RNA, 19 nt, Artificial Sequence
  Description of Artificial Sequence: Synthetic oligonucleotide
  Sense strand starting at position 3391 of SEQ ID NO: 1884163
accucugagucuucuuaca

SEQ ID NO: 2245087 - RNA, 19 nt, Artificial Sequence
  Description of Artificial Sequence: Synthetic oligonucleotide
  Antisense strand to SEQ ID NO: 2245086
uguaagaagacucagaggu

SEQ ID NO: 2245088 - RNA, 19 nt, Artificial Sequence
  Description of Artificial Sequence: Synthetic oligonucleotide
  Sense strand starting at position 3393 of SEQ ID NO: 1884163
cucugagucuucuuacaug

SEQ ID NO: 2245089 - RNA, 19 nt, Artificial Sequence
  Description of Artificial Sequence: Synthetic oligonucleotide
  Antisense strand to SEQ ID NO: 2245088
cauguaagaagacucagag

SEQ ID NO: 2245090 - RNA, 19 nt, Artificial Sequence
  Description of Artificial Sequence: Synthetic oligonucleotide
  Sense strand starting at position 3591 of SEQ ID NO: 1884163
uuuguauggccauaguaac

SEQ ID NO: 2245091 - RNA, 19 nt, Artificial Sequence
  Description of Artificial Sequence: Synthetic oligonucleotide
  Antisense strand to SEQ ID NO: 2245090
guuacuauggccauacaaa

SEQ ID NO: 2245092 - RNA, 19 nt, Artificial Sequence
  Description of Artificial Sequence: Synthetic oligonucleotide
  Sense strand starting at position 3712 of SEQ ID NO: 1884163
gaaggucaauaggaaugaa

SEQ ID NO: 2245093 - RNA, 19 nt, Artificial Sequence
  Description of Artificial Sequence: Synthetic oligonucleotide
  Antisense strand to SEQ ID NO: 2245092
uucauuccuauugaccuuc

SEQ ID NO: 2245094 - RNA, 19 nt, Artificial Sequence
  Description of Artificial Sequence: Synthetic oligonucleotide
  Sense strand starting at position 97 of SEQ ID NO: 1884164
agugcacugcuguagacaa

SEQ ID NO: 2245095 - RNA, 19 nt, Artificial Sequence
  Description of Artificial Sequence: Synthetic oligonucleotide
  Antisense strand to SEQ ID NO: 2245094
uugucuacagcagugcacu

SEQ ID NO: 2245096 - RNA, 19 nt, Artificial Sequence
  Description of Artificial Sequence: Synthetic oligonucleotide
  Sense strand starting at position 99 of SEQ ID NO: 1884164
ugcacugcuguagacaaua

SEQ ID NO: 2245097 - RNA, 19 nt, Artificial Sequence
  Description of Artificial Sequence: Synthetic oligonucleotide
  Antisense strand to SEQ ID NO: 2245096
uauugucuacagcagugca

SEQ ID NO: 2245098 - RNA, 19 nt, Artificial Sequence
  Description of Artificial Sequence: Synthetic oligonucleotide
  Sense strand starting at position 130 of SEQ ID NO: 1884164
aguguugcuguguucuaau

SEQ ID NO: 2245099 - RNA, 19 nt, Artificial Sequence
  Description of Artificial Sequence: Synthetic oligonucleotide
  Antisense strand to SEQ ID NO: 2245098
auuagaacacagcaacacu

SEQ ID NO: 2245100 - RNA, 19 nt, Artificial Sequence
  Description of Artificial Sequence: Synthetic oligonucleotide
  Sense strand starting at position 157 of SEQ ID NO: 1884164
cuuuaaaggcacugaaauu

SEQ ID NO: 2245101 - RNA, 19 nt, Artificial Sequence
  Description of Artificial Sequence: Synthetic oligonucleotide
  Antisense strand to SEQ ID NO: 2245100
aauuucagugccuuuaaag

SEQ ID NO: 2245102 - RNA, 19 nt, Artificial Sequence
  Description of Artificial Sequence: Synthetic oligonucleotide
  Sense strand starting at position 487 of SEQ ID NO: 1884164
auuucuacaugucacgaaa

SEQ ID NO: 2245103 - RNA, 19 nt, Artificial Sequence
  Description of Artificial Sequence: Synthetic oligonucleotide
  Antisense strand to SEQ ID NO: 2245102
uuucgugacauguagaaau

SEQ ID NO: 2245104 - RNA, 19 nt, Artificial Sequence
  Description of Artificial Sequence: Synthetic oligonucleotide
  Sense strand starting at position 490 of SEQ ID NO: 1884164
ucuacaugucacgaaauau

SEQ ID NO: 2245105 - RNA, 19 nt, Artificial Sequence
  Description of Artificial Sequence: Synthetic oligonucleotide
  Antisense strand to SEQ ID NO: 2245104
auauuucgugacauguaga

SEQ ID NO: 2245106 - RNA, 19 nt, Artificial Sequence
  Description of Artificial Sequence: Synthetic oligonucleotide
  Sense strand starting at position 615 of SEQ ID NO: 1884164
uggugacuguccucuaaga

SEQ ID NO: 2245107 - RNA, 19 nt, Artificial Sequence
  Description of Artificial Sequence: Synthetic oligonucleotide
  Antisense strand to SEQ ID NO: 2245106
ucuuagaggacagucacca

SEQ ID NO: 2245108 - RNA, 19 nt, Artificial Sequence
  Description of Artificial Sequence: Synthetic oligonucleotide
  Sense strand starting at position 617 of SEQ ID NO: 1884164
gugacuguccucuaagaua

SEQ ID NO: 2245109 - RNA, 19 nt, Artificial Sequence
  Description of Artificial Sequence: Synthetic oligonucleotide
  Antisense strand to SEQ ID NO: 2245108
uaucuuagaggacagucac

SEQ ID NO: 2245110 - RNA, 19 nt, Artificial Sequence
  Description of Artificial Sequence: Synthetic oligonucleotide
  Sense strand starting at position 697 of SEQ ID NO: 1884164
ucaggucucacuuggagau

SEQ ID NO: 2245111 - RNA, 19 nt, Artificial Sequence
  Description of Artificial Sequence: Synthetic oligonucleotide
  Antisense strand to SEQ ID NO: 2245110
aucuccaagugagaccuga

SEQ ID NO: 2245112 - RNA, 19 nt, Artificial Sequence
  Description of Artificial Sequence: Synthetic oligonucleotide
  Sense strand starting at position 698 of SEQ ID NO: 1884164
caggucucacuuggagauu

SEQ ID NO: 2245113 - RNA, 19 nt, Artificial Sequence
  Description of Artificial Sequence: Synthetic oligonucleotide
  Antisense strand to SEQ ID NO: 2245112
aaucuccaagugagaccug

SEQ ID NO: 2245114 - RNA, 19 nt, Artificial Sequence
  Description of Artificial Sequence: Synthetic oligonucleotide
  Sense strand starting at position 710 of SEQ ID NO: 1884164
ggagauugucagcagagcu

SEQ ID NO: 2245115 - RNA, 19 nt, Artificial Sequence
  Description of Artificial Sequence: Synthetic oligonucleotide
  Antisense strand to SEQ ID NO: 2245114
agcucugcugacaaucucc

SEQ ID NO: 2245116 - RNA, 19 nt, Artificial Sequence
  Description of Artificial Sequence: Synthetic oligonucleotide
  Sense strand starting at position 1013 of SEQ ID NO: 1884164
ugaucaacugugcaaccau

SEQ ID NO: 2245117 - RNA, 19 nt, Artificial Sequence
  Description of Artificial Sequence: Synthetic oligonucleotide
  Antisense strand to SEQ ID NO: 2245116
augguugcacaguugauca

SEQ ID NO: 2245118 - RNA, 19 nt, Artificial Sequence
  Description of Artificial Sequence: Synthetic oligonucleotide
  Sense strand starting at position 1074 of SEQ ID NO: 1884164
ucccuuagugucuaacauc

SEQ ID NO: 2245119 - RNA, 19 nt, Artificial Sequence
  Description of Artificial Sequence: Synthetic oligonucleotide
  Antisense strand to SEQ ID NO: 2245118
gauguuagacacuaaggga

SEQ ID NO: 2245120 - RNA, 19 nt, Artificial Sequence
  Description of Artificial Sequence: Synthetic oligonucleotide
  Sense strand starting at position 1108 of SEQ ID NO: 1884164
caguaaaucccuugaggac

SEQ ID NO: 2245121 - RNA, 19 nt, Artificial Sequence
  Description of Artificial Sequence: Synthetic oligonucleotide
  Antisense strand to SEQ ID NO: 2245120
guccucaagggauuuacug

SEQ ID NO: 2245122 - RNA, 19 nt, Artificial Sequence
  Description of Artificial Sequence: Synthetic oligonucleotide
  Sense strand starting at position 1183 of SEQ ID NO: 1884164
agugcuggauacucaguaa

SEQ ID NO: 2245123 - RNA, 19 nt, Artificial Sequence
  Description of Artificial Sequence: Synthetic oligonucleotide
  Antisense strand to SEQ ID NO: 2245122
uuacugaguauccagcacu

SEQ ID NO: 2245124 - RNA, 19 nt, Artificial Sequence
  Description of Artificial Sequence: Synthetic oligonucleotide
  Sense strand starting at position 1186 of SEQ ID NO: 1884164
gcuggauacucaguaaagg

SEQ ID NO: 2245125 - RNA, 19 nt, Artificial Sequence
  Description of Artificial Sequence: Synthetic oligonucleotide
  Antisense strand to SEQ ID NO: 2245124
ccuuuacugaguauccagc

SEQ ID NO: 2245126 - RNA, 19 nt, Artificial Sequence
  Description of Artificial Sequence: Synthetic oligonucleotide
  Sense strand starting at position 2248 of SEQ ID NO: 1884164
agucaacagagaugaguua

SEQ ID NO: 2245127 - RNA, 19 nt, Artificial Sequence
  Description of Artificial Sequence: Synthetic oligonucleotide
  Antisense strand to SEQ ID NO: 2245126
uaacucaucucuguugacu

SEQ ID NO: 2245128 - RNA, 19 nt, Artificial Sequence
  Description of Artificial Sequence: Synthetic oligonucleotide
  Sense strand starting at position 2327 of SEQ ID NO: 1884164
gagaaagcuuuacuuuguu

SEQ ID NO: 2245129 - RNA, 19 nt, Artificial Sequence
  Description of Artificial Sequence: Synthetic oligonucleotide
  Antisense strand to SEQ ID NO: 2245128
aacaaaguaaagcuuucuc

SEQ ID NO: 2245130 - RNA, 19 nt, Artificial Sequence
  Description of Artificial Sequence: Synthetic oligonucleotide
  Sense strand starting at position 2368 of SEQ ID NO: 1884164
ccuucuggaagaggucauu

SEQ ID NO: 2245131 - RNA, 19 nt, Artificial Sequence
  Description of Artificial Sequence: Synthetic oligonucleotide
  Antisense strand to SEQ ID NO: 2245130
aaugaccucuuccagaagg

SEQ ID NO: 2245132 - RNA, 19 nt, Artificial Sequence
  Description of Artificial Sequence: Synthetic oligonucleotide
  Sense strand starting at position 2374 of SEQ ID NO: 1884164
ggaagaggucauugagugu

SEQ ID NO: 2245133 - RNA, 19 nt, Artificial Sequence
  Description of Artificial Sequence: Synthetic oligonucleotide
  Antisense strand to SEQ ID NO: 2245132
acacucaaugaccucuucc

SEQ ID NO: 2245134 - RNA, 19 nt, Artificial Sequence
  Description of Artificial Sequence: Synthetic oligonucleotide
  Sense strand starting at position 2378 of SEQ ID NO: 1884164
gaggucauugaguguggaa

SEQ ID NO: 2245135 - RNA, 19 nt, Artificial Sequence
  Description of Artificial Sequence: Synthetic oligonucleotide
  Antisense strand to SEQ ID NO: 2245134
uuccacacucaaugaccuc

SEQ ID NO: 2245136 - RNA, 19 nt, Artificial Sequence
  Description of Artificial Sequence: Synthetic oligonucleotide
  Sense strand starting at position 2699 of SEQ ID NO: 1884164
auagcagccucuuuggaaa

SEQ ID NO: 2245137 - RNA, 19 nt, Artificial Sequence
  Description of Artificial Sequence: Synthetic oligonucleotide
  Antisense strand to SEQ ID NO: 2245136
uuuccaaagaggcugcuau

SEQ ID NO: 2245138 - RNA, 19 nt, Artificial Sequence
  Description of Artificial Sequence: Synthetic oligonucleotide
  Sense strand starting at position 2722 of SEQ ID NO: 1884164
gaggucuccaguugaaaga

SEQ ID NO: 2245139 - RNA, 19 nt, Artificial Sequence
  Description of Artificial Sequence: Synthetic oligonucleotide
  Antisense strand to SEQ ID NO: 2245138
ucuuucaacuggagaccuc

SEQ ID NO: 2245140 - RNA, 19 nt, Artificial Sequence
  Description of Artificial Sequence: Synthetic oligonucleotide
  Sense strand starting at position 2758 of SEQ ID NO: 1884164
guuugagauuuggcauguc

SEQ ID NO: 2245141 - RNA, 19 nt, Artificial Sequence
  Description of Artificial Sequence: Synthetic oligonucleotide
  Antisense strand to SEQ ID NO: 2245140
gacaugccaaaucucaaac

SEQ ID NO: 2245142 - RNA, 19 nt, Artificial Sequence
  Description of Artificial Sequence: Synthetic oligonucleotide
  Sense strand starting at position 2818 of SEQ ID NO: 1884164
gcaugacugcuggcuuguu

SEQ ID NO: 2245143 - RNA, 19 nt, Artificial Sequence
  Description of Artificial Sequence: Synthetic oligonucleotide
  Antisense strand to SEQ ID NO: 2245142
aacaagccagcagucaugc

SEQ ID NO: 2245144 - RNA, 19 nt, Artificial Sequence
  Description of Artificial Sequence: Synthetic oligonucleotide
  Sense strand starting at position 2884 of SEQ ID NO: 1884164
ugauccagugucgggaauu

SEQ ID NO: 2245145 - RNA, 19 nt, Artificial Sequence
  Description of Artificial Sequence: Synthetic oligonucleotide
  Antisense strand to SEQ ID NO: 2245144
aauucccgacacuggauca

SEQ ID NO: 2245146 - RNA, 19 nt, Artificial Sequence
  Description of Artificial Sequence: Synthetic oligonucleotide
  Sense strand starting at position 2894 of SEQ ID NO: 1884164
ucgggaauuucugcagcau

SEQ ID NO: 2245147 - RNA, 19 nt, Artificial Sequence
  Description of Artificial Sequence: Synthetic oligonucleotide
  Antisense strand to SEQ ID NO: 2245146
augcugcagaaauucccga

SEQ ID NO: 2245148 - RNA, 19 nt, Artificial Sequence
  Description of Artificial Sequence: Synthetic oligonucleotide
  Sense strand starting at position 2977 of SEQ ID NO: 1884164
gaguuauuuccacggccug

SEQ ID NO: 2245149 - RNA, 19 nt, Artificial Sequence
  Description of Artificial Sequence: Synthetic oligonucleotide
  Antisense strand to SEQ ID NO: 2245148
caggccguggaaauaacuc

SEQ ID NO: 2245150 - RNA, 19 nt, Artificial Sequence
  Description of Artificial Sequence: Synthetic oligonucleotide
  Sense strand starting at position 3102 of SEQ ID NO: 1884164
gggccaucauuacuuaaca

SEQ ID NO: 2245151 - RNA, 19 nt, Artificial Sequence
  Description of Artificial Sequence: Synthetic oligonucleotide
  Antisense strand to SEQ ID NO: 2245150
uguuaaguaaugauggccc

SEQ ID NO: 2245152 - RNA, 19 nt, Artificial Sequence
  Description of Artificial Sequence: Synthetic oligonucleotide
  Sense strand starting at position 3118 of SEQ ID NO: 1884164
acacacuuugcuuaaggau

SEQ ID NO: 2245153 - RNA, 19 nt, Artificial Sequence
  Description of Artificial Sequence: Synthetic oligonucleotide
  Antisense strand to SEQ ID NO: 2245152
auccuuaagcaaagugugu

SEQ ID NO: 2245154 - RNA, 19 nt, Artificial Sequence
  Description of Artificial Sequence: Synthetic oligonucleotide
  Sense strand starting at position 3124 of SEQ ID NO: 1884164
uuugcuuaaggaugagaaa

SEQ ID NO: 2245155 - RNA, 19 nt, Artificial Sequence
  Description of Artificial Sequence: Synthetic oligonucleotide
  Antisense strand to SEQ ID NO: 2245154
uuucucauccuuaagcaaa

SEQ ID NO: 2245156 - RNA, 19 nt, Artificial Sequence
  Description of Artificial Sequence: Synthetic oligonucleotide
  Sense strand starting at position 3250 of SEQ ID NO: 1884164
agugccauuuccuccagau

SEQ ID NO: 2245157 - RNA, 19 nt, Artificial Sequence
  Description of Artificial Sequence: Synthetic oligonucleotide
  Antisense strand to SEQ ID NO: 2245156
aucuggaggaaauggcacu

SEQ ID NO: 2245158 - RNA, 19 nt, Artificial Sequence
  Description of Artificial Sequence: Synthetic oligonucleotide
  Sense strand starting at position 3262 of SEQ ID NO: 1884164
uccagauguccucagcaca

SEQ ID NO: 2245159 - RNA, 19 nt, Artificial Sequence
  Description of Artificial Sequence: Synthetic oligonucleotide
  Antisense strand to SEQ ID NO: 2245158
ugugcugaggacaucugga

SEQ ID NO: 2245160 - RNA, 19 nt, Artificial Sequence
  Description of Artificial Sequence: Synthetic oligonucleotide
  Sense strand starting at position 3349 of SEQ ID NO: 1884164
guaacauuguccuucugga

SEQ ID NO: 2245161 - RNA, 19 nt, Artificial Sequence
  Description of Artificial Sequence: Synthetic oligonucleotide
  Antisense strand to SEQ ID NO: 2245160
uccagaaggacaauguuac

SEQ ID NO: 2245162 - RNA, 19 nt, Artificial Sequence
  Description of Artificial Sequence: Synthetic oligonucleotide
  Sense strand starting at position 3562 of SEQ ID NO: 1884164
agaagagugaacugucauc

SEQ ID NO: 2245163 - RNA, 19 nt, Artificial Sequence
  Description of Artificial Sequence: Synthetic oligonucleotide
  Antisense strand to SEQ ID NO: 2245162
gaugacaguucacucuucu

SEQ ID NO: 2245164 - RNA, 19 nt, Artificial Sequence
  Description of Artificial Sequence: Synthetic oligonucleotide
  Sense strand starting at position 3567 of SEQ ID NO: 1884164
agugaacugucaucuccuu

SEQ ID NO: 2245165 - RNA, 19 nt, Artificial Sequence
  Description of Artificial Sequence: Synthetic oligonucleotide
  Antisense strand to SEQ ID NO: 2245164
aaggagaugacaguucacu

SEQ ID NO: 2245166 - RNA, 19 nt, Artificial Sequence
  Description of Artificial Sequence: Synthetic oligonucleotide
  Sense strand starting at position 3597 of SEQ ID NO: 1884164
agagcugcugagcgauuua

SEQ ID NO: 2245167 - RNA, 19 nt, Artificial Sequence
  Description of Artificial Sequence: Synthetic oligonucleotide
  Antisense strand to SEQ ID NO: 2245166
uaaaucgcucagcagcucu

SEQ ID NO: 2245168 - RNA, 19 nt, Artificial Sequence
  Description of Artificial Sequence: Synthetic oligonucleotide
  Sense strand starting at position 3626 of SEQ ID NO: 1884164
ucccgaggugguuauauga

SEQ ID NO: 2245169 - RNA, 19 nt, Artificial Sequence
  Description of Artificial Sequence: Synthetic oligonucleotide
  Antisense strand to SEQ ID NO: 2245168
ucauauaaccaccucggga

SEQ ID NO: 2245170 - RNA, 19 nt, Artificial Sequence
  Description of Artificial Sequence: Synthetic oligonucleotide
  Sense strand starting at position 3633 of SEQ ID NO: 1884164
gugguuauaugaccucuaa

SEQ ID NO: 2245171 - RNA, 19 nt, Artificial Sequence
  Description of Artificial Sequence: Synthetic oligonucleotide
  Antisense strand to SEQ ID NO: 2245170
uuagaggucauauaaccac

SEQ ID NO: 2245172 - RNA, 19 nt, Artificial Sequence
  Description of Artificial Sequence: Synthetic oligonucleotide
  Sense strand starting at position 3716 of SEQ ID NO: 1884164
gagcuaggagauggguauu

SEQ ID NO: 2245173 - RNA, 19 nt, Artificial Sequence
  Description of Artificial Sequence: Synthetic oligonucleotide
  Antisense strand to SEQ ID NO: 2245172
aauacccaucuccuagcuc

SEQ ID NO: 2245174 - RNA, 19 nt, Artificial Sequence
  Description of Artificial Sequence: Synthetic oligonucleotide
  Sense strand starting at position 162 of SEQ ID NO: 1884165
ucguaccuugucuauagaa

SEQ ID NO: 2245175 - RNA, 19 nt, Artificial Sequence
  Description of Artificial Sequence: Synthetic oligonucleotide
  Antisense strand to SEQ ID NO: 2245174
uucuauagacaagguacga

SEQ ID NO: 2245176 - RNA, 19 nt, Artificial Sequence
  Description of Artificial Sequence: Synthetic oligonucleotide
  Sense strand starting at position 164 of SEQ ID NO: 1884165
guaccuugucuauagaaug

SEQ ID NO: 2245177 - RNA, 19 nt, Artificial Sequence
  Description of Artificial Sequence: Synthetic oligonucleotide
  Antisense strand to SEQ ID NO: 2245176
cauucuauagacaagguac

SEQ ID NO: 2245178 - RNA, 19 nt, Artificial Sequence
  Description of Artificial Sequence: Synthetic oligonucleotide
  Sense strand starting at position 217 of SEQ ID NO: 1884165
ugaccucacaguugugaag

SEQ ID NO: 2245179 - RNA, 19 nt, Artificial Sequence
  Description of Artificial Sequence: Synthetic oligonucleotide
  Antisense strand to SEQ ID NO: 2245178
cuucacaacugugagguca

SEQ ID NO: 2245180 - RNA, 19 nt, Artificial Sequence
  Description of Artificial Sequence: Synthetic oligonucleotide
  Sense strand starting at position 266 of SEQ ID NO: 1884165
ugggaagguuagaggucau

SEQ ID NO: 2245181 - RNA, 19 nt, Artificial Sequence
  Description of Artificial Sequence: Synthetic oligonucleotide
  Antisense strand to SEQ ID NO: 2245180
augaccucuaaccuuccca

SEQ ID NO: 2245182 - RNA, 19 nt, Artificial Sequence
  Description of Artificial Sequence: Synthetic oligonucleotide
  Sense strand starting at position 330 of SEQ ID NO: 1884165
gcuggaguucaaggagaug

SEQ ID NO: 2245183 - RNA, 19 nt, Artificial Sequence
  Description of Artificial Sequence: Synthetic oligonucleotide
  Antisense strand to SEQ ID NO: 2245182
caucuccuugaacuccagc

SEQ ID NO: 2245184 - RNA, 19 nt, Artificial Sequence
  Description of Artificial Sequence: Synthetic oligonucleotide
  Sense strand starting at position 663 of SEQ ID NO: 1884165
aggaaauggcacugaguau

SEQ ID NO: 2245185 - RNA, 19 nt, Artificial Sequence
  Description of Artificial Sequence: Synthetic oligonucleotide
  Antisense strand to SEQ ID NO: 2245184
auacucagugccauuuccu

SEQ ID NO: 2245186 - RNA, 19 nt, Artificial Sequence
  Description of Artificial Sequence: Synthetic oligonucleotide
  Sense strand starting at position 818 of SEQ ID NO: 1884165
uggcccuucccucaucaga

SEQ ID NO: 2245187 - RNA, 19 nt, Artificial Sequence
  Description of Artificial Sequence: Synthetic oligonucleotide
  Antisense strand to SEQ ID NO: 2245186
ucugaugagggaagggcca

SEQ ID NO: 2245188 - RNA, 19 nt, Artificial Sequence
  Description of Artificial Sequence: Synthetic oligonucleotide
  Sense strand starting at position 926 of SEQ ID NO: 1884165
gggacaggccguggaaaua

SEQ ID NO: 2245189 - RNA, 19 nt, Artificial Sequence
  Description of Artificial Sequence: Synthetic oligonucleotide
  Antisense strand to SEQ ID NO: 2245188
uauuuccacggccuguccc

SEQ ID NO: 2245190 - RNA, 19 nt, Artificial Sequence
  Description of Artificial Sequence: Synthetic oligonucleotide
  Sense strand starting at position 1018 of SEQ ID NO: 1884165
gcagaaauucccgacacug

SEQ ID NO: 2245191 - RNA, 19 nt, Artificial Sequence
  Description of Artificial Sequence: Synthetic oligonucleotide
  Antisense strand to SEQ ID NO: 2245190
cagugucgggaauuucugc

SEQ ID NO: 2245192 - RNA, 19 nt, Artificial Sequence
  Description of Artificial Sequence: Synthetic oligonucleotide
  Sense strand starting at position 1197 of SEQ ID NO: 1884165
agaccucgguguuuccaaa

SEQ ID NO: 2245193 - RNA, 19 nt, Artificial Sequence
  Description of Artificial Sequence: Synthetic oligonucleotide
  Antisense strand to SEQ ID NO: 2245192
uuuggaaacaccgaggucu

SEQ ID NO: 2245194 - RNA, 19 nt, Artificial Sequence
  Description of Artificial Sequence: Synthetic oligonucleotide
  Sense strand starting at position 1215 of SEQ ID NO: 1884165
agaggcugcuauccacaua

SEQ ID NO: 2245195 - RNA, 19 nt, Artificial Sequence
  Description of Artificial Sequence: Synthetic oligonucleotide
  Antisense strand to SEQ ID NO: 2245194
uauguggauagcagccucu

SEQ ID NO: 2245196 - RNA, 19 nt, Artificial Sequence
  Description of Artificial Sequence: Synthetic oligonucleotide
  Sense strand starting at position 1258 of SEQ ID NO: 1884165
ggucauaaucucuauugcu

SEQ ID NO: 2245197 - RNA, 19 nt, Artificial Sequence
  Description of Artificial Sequence: Synthetic oligonucleotide
  Antisense strand to SEQ ID NO: 2245196
agcaauagagauuaugacc

SEQ ID NO: 2245198 - RNA, 19 nt, Artificial Sequence
  Description of Artificial Sequence: Synthetic oligonucleotide
  Sense strand starting at position 1300 of SEQ ID NO: 1884165
gguucuuuaugagcacaaa

SEQ ID NO: 2245199 - RNA, 19 nt, Artificial Sequence
  Description of Artificial Sequence: Synthetic oligonucleotide
  Antisense strand to SEQ ID NO: 2245198
uuugugcucauaaagaacc

SEQ ID NO: 2245200 - RNA, 19 nt, Artificial Sequence
  Description of Artificial Sequence: Synthetic oligonucleotide
  Sense strand starting at position 1301 of SEQ ID NO: 1884165
guucuuuaugagcacaaac

SEQ ID NO: 2245201 - RNA, 19 nt, Artificial Sequence
  Description of Artificial Sequence: Synthetic oligonucleotide
  Antisense strand to SEQ ID NO: 2245200
guuugugcucauaaagaac

SEQ ID NO: 2245202 - RNA, 19 nt, Artificial Sequence
  Description of Artificial Sequence: Synthetic oligonucleotide
  Sense strand starting at position 1494 of SEQ ID NO: 1884165
guagaagccuuaucaaagg

SEQ ID NO: 2245203 - RNA, 19 nt, Artificial Sequence
  Description of Artificial Sequence: Synthetic oligonucleotide
  Antisense strand to SEQ ID NO: 2245202
ccuuugauaaggcuucuac

SEQ ID NO: 2245204 - RNA, 19 nt, Artificial Sequence
  Description of Artificial Sequence: Synthetic oligonucleotide
  Sense strand starting at position 1630 of SEQ ID NO: 1884165
ugugucuucuggguuauuu

SEQ ID NO: 2245205 - RNA, 19 nt, Artificial Sequence
  Description of Artificial Sequence: Synthetic oligonucleotide
  Antisense strand to SEQ ID NO: 2245204
aaauaacccagaagacaca

SEQ ID NO: 2245206 - RNA, 19 nt, Artificial Sequence
  Description of Artificial Sequence: Synthetic oligonucleotide
  Sense strand starting at position 1657 of SEQ ID NO: 1884165
gguaacucaucucuguuga

SEQ ID NO: 2245207 - RNA, 19 nt, Artificial Sequence
  Description of Artificial Sequence: Synthetic oligonucleotide
  Antisense strand to SEQ ID NO: 2245206
ucaacagagaugaguuacc

SEQ ID NO: 2245208 - RNA, 19 nt, Artificial Sequence
  Description of Artificial Sequence: Synthetic oligonucleotide
  Sense strand starting at position 1873 of SEQ ID NO: 1884165
cggaguaagcgucucuguu

SEQ ID NO: 2245209 - RNA, 19 nt, Artificial Sequence
  Description of Artificial Sequence: Synthetic oligonucleotide
  Antisense strand to SEQ ID NO: 2245208
aacagagacgcuuacuccg

SEQ ID NO: 2245210 - RNA, 19 nt, Artificial Sequence
  Description of Artificial Sequence: Synthetic oligonucleotide
  Sense strand starting at position 2063 of SEQ ID NO: 1884165
ugagguuuguuaucuacuc

SEQ ID NO: 2245211 - RNA, 19 nt, Artificial Sequence
  Description of Artificial Sequence: Synthetic oligonucleotide
  Antisense strand to SEQ ID NO: 2245210
gaguagauaacaaaccuca

SEQ ID NO: 2245212 - RNA, 19 nt, Artificial Sequence
  Description of Artificial Sequence: Synthetic oligonucleotide
  Sense strand starting at position 2064 of SEQ ID NO: 1884165
gagguuuguuaucuacucu

SEQ ID NO: 2245213 - RNA, 19 nt, Artificial Sequence
  Description of Artificial Sequence: Synthetic oligonucleotide
  Antisense strand to SEQ ID NO: 2245212
agaguagauaacaaaccuc

SEQ ID NO: 2245214 - RNA, 19 nt, Artificial Sequence
  Description of Artificial Sequence: Synthetic oligonucleotide
  Sense strand starting at position 2070 of SEQ ID NO: 1884165
uguuaucuacucugaaagu

SEQ ID NO: 2245215 - RNA, 19 nt, Artificial Sequence
  Description of Artificial Sequence: Synthetic oligonucleotide
  Antisense strand to SEQ ID NO: 2245214
acuuucagaguagauaaca

SEQ ID NO: 2245216 - RNA, 19 nt, Artificial Sequence
  Description of Artificial Sequence: Synthetic oligonucleotide
  Sense strand starting at position 2152 of SEQ ID NO: 1884165
gcaugcagugaacaauaau

SEQ ID NO: 2245217 - RNA, 19 nt, Artificial Sequence
  Description of Artificial Sequence: Synthetic oligonucleotide
  Antisense strand to SEQ ID NO: 2245216
auuauuguucacugcaugc

SEQ ID NO: 2245218 - RNA, 19 nt, Artificial Sequence
  Description of Artificial Sequence: Synthetic oligonucleotide
  Sense strand starting at position 2688 of SEQ ID NO: 1884165
augucaugagaaugucaug

SEQ ID NO: 2245219 - RNA, 19 nt, Artificial Sequence
  Description of Artificial Sequence: Synthetic oligonucleotide
  Antisense strand to SEQ ID NO: 2245218
caugacauucucaugacau

SEQ ID NO: 2245220 - RNA, 19 nt, Artificial Sequence
  Description of Artificial Sequence: Synthetic oligonucleotide
  Sense strand starting at position 2697 of SEQ ID NO: 1884165
gaaugucaugugcaaguca

SEQ ID NO: 2245221 - RNA, 19 nt, Artificial Sequence
  Description of Artificial Sequence: Synthetic oligonucleotide
  Antisense strand to SEQ ID NO: 2245220
ugacuugcacaugacauuc

SEQ ID NO: 2245222 - RNA, 19 nt, Artificial Sequence
  Description of Artificial Sequence: Synthetic oligonucleotide
  Sense strand starting at position 2904 of SEQ ID NO: 1884165
aguugaucaucacuaaugu

SEQ ID NO: 2245223 - RNA, 19 nt, Artificial Sequence
  Description of Artificial Sequence: Synthetic oligonucleotide
  Antisense strand to SEQ ID NO: 2245222
acauuagugaugaucaacu

SEQ ID NO: 2245224 - RNA, 19 nt, Artificial Sequence
  Description of Artificial Sequence: Synthetic oligonucleotide
  Sense strand starting at position 2970 of SEQ ID NO: 1884165
ccacaugaugcucaaaggu

SEQ ID NO: 2245225 - RNA, 19 nt, Artificial Sequence
  Description of Artificial Sequence: Synthetic oligonucleotide
  Antisense strand to SEQ ID NO: 2245224
accuuugagcaucaugugg

SEQ ID NO: 2245226 - RNA, 19 nt, Artificial Sequence
  Description of Artificial Sequence: Synthetic oligonucleotide
  Sense strand starting at position 2996 of SEQ ID NO: 1884165
acaggaaaugcucauugua

SEQ ID NO: 2245227 - RNA, 19 nt, Artificial Sequence
  Description of Artificial Sequence: Synthetic oligonucleotide
  Antisense strand to SEQ ID NO: 2245226
uacaaugagcauuuccugu

SEQ ID NO: 2245228 - RNA, 19 nt, Artificial Sequence
  Description of Artificial Sequence: Synthetic oligonucleotide
  Sense strand starting at position 3042 of SEQ ID NO: 1884165
uccaguuagggaugcucaa

SEQ ID NO: 2245229 - RNA, 19 nt, Artificial Sequence
  Description of Artificial Sequence: Synthetic oligonucleotide
  Antisense strand to SEQ ID NO: 2245228
uugagcaucccuaacugga

SEQ ID NO: 2245230 - RNA, 19 nt, Artificial Sequence
  Description of Artificial Sequence: Synthetic oligonucleotide
  Sense strand starting at position 3203 of SEQ ID NO: 1884165
gcugacaaucuccaaguga

SEQ ID NO: 2245231 - RNA, 19 nt, Artificial Sequence
  Description of Artificial Sequence: Synthetic oligonucleotide
  Antisense strand to SEQ ID NO: 2245230
ucacuuggagauugucagc

SEQ ID NO: 2245232 - RNA, 19 nt, Artificial Sequence
  Description of Artificial Sequence: Synthetic oligonucleotide
  Sense strand starting at position 3218 of SEQ ID NO: 1884165
gugagaccugaaggauagu

SEQ ID NO: 2245233 - RNA, 19 nt, Artificial Sequence
  Description of Artificial Sequence: Synthetic oligonucleotide
  Antisense strand to SEQ ID NO: 2245232
acuauccuucaggucucac

SEQ ID NO: 2245234 - RNA, 19 nt, Artificial Sequence
  Description of Artificial Sequence: Synthetic oligonucleotide
  Sense strand starting at position 3420 of SEQ ID NO: 1884165
uuucgugacauguagaaau

SEQ ID NO: 2245235 - RNA, 19 nt, Artificial Sequence
  Description of Artificial Sequence: Synthetic oligonucleotide
  Antisense strand to SEQ ID NO: 2245234
auuucuacaugucacgaaa

SEQ ID NO: 2245236 - RNA, 19 nt, Artificial Sequence
  Description of Artificial Sequence: Synthetic oligonucleotide
  Sense strand starting at position 3422 of SEQ ID NO: 1884165
ucgugacauguagaaauua

SEQ ID NO: 2245237 - RNA, 19 nt, Artificial Sequence
  Description of Artificial Sequence: Synthetic oligonucleotide
  Antisense strand to SEQ ID NO: 2245236
uaauuucuacaugucacga

SEQ ID NO: 2245238 - RNA, 19 nt, Artificial Sequence
  Description of Artificial Sequence: Synthetic oligonucleotide
  Sense strand starting at position 3430 of SEQ ID NO: 1884165
uguagaaauuacgugaaau

SEQ ID NO: 2245239 - RNA, 19 nt, Artificial Sequence
  Description of Artificial Sequence: Synthetic oligonucleotide
  Antisense strand to SEQ ID NO: 2245238
auuucacguaauuucuaca

SEQ ID NO: 2245240 - RNA, 19 nt, Artificial Sequence
  Description of Artificial Sequence: Synthetic oligonucleotide
  Sense strand starting at position 3431 of SEQ ID NO: 1884165
guagaaauuacgugaaauu

SEQ ID NO: 2245241 - RNA, 19 nt, Artificial Sequence
  Description of Artificial Sequence: Synthetic oligonucleotide
  Antisense strand to SEQ ID NO: 2245240
aauuucacguaauuucuac

SEQ ID NO: 2245242 - RNA, 19 nt, Artificial Sequence
  Description of Artificial Sequence: Synthetic oligonucleotide
  Sense strand starting at position 3666 of SEQ ID NO: 1884165
cagagaucacgcuacuaca

SEQ ID NO: 2245243 - RNA, 19 nt, Artificial Sequence
  Description of Artificial Sequence: Synthetic oligonucleotide
  Antisense strand to SEQ ID NO: 2245242
uguaguagcgugaucucug

SEQ ID NO: 2245244 - RNA, 19 nt, Artificial Sequence
  Description of Artificial Sequence: Synthetic oligonucleotide
  Sense strand starting at position 3803 of SEQ ID NO: 1884165
guagauauugucuacagca

SEQ ID NO: 2245245 - RNA, 19 nt, Artificial Sequence
  Description of Artificial Sequence: Synthetic oligonucleotide
  Antisense strand to SEQ ID NO: 2245244
ugcuguagacaauaucuac

SEQ ID NO: 2245246 - RNA, 19 nt, Artificial Sequence
  Description of Artificial Sequence: Synthetic oligonucleotide
  Sense strand starting at position 3805 of SEQ ID NO: 1884165
agauauugucuacagcagu

SEQ ID NO: 2245247 - RNA, 19 nt, Artificial Sequence
  Description of Artificial Sequence: Synthetic oligonucleotide
  Antisense strand to SEQ ID NO: 2245246
acugcuguagacaauaucu

SEQ ID NO: 2245248 - RNA, 19 nt, Artificial Sequence
  Description of Artificial Sequence: Synthetic oligonucleotide
  Sense strand starting at position 3935 of SEQ ID NO: 1884165
gagagaaagcguugugaga

SEQ ID NO: 2245249 - RNA, 19 nt, Artificial Sequence
  Description of Artificial Sequence: Synthetic oligonucleotide
  Antisense strand to SEQ ID NO: 2245248
ucucacaacgcuuucucuc

SEQ ID NO: 2245250 - RNA, 19 nt, Artificial Sequence
  Description of Artificial Sequence: Synthetic oligonucleotide
  Sense strand starting at position 3973 of SEQ ID NO: 1884165
aguauaaacugucugaaag

SEQ ID NO: 2245251 - RNA, 19 nt, Artificial Sequence
  Description of Artificial Sequence: Synthetic oligonucleotide
  Antisense strand to SEQ ID NO: 2245250
cuuucagacaguuuauacu

SEQ ID NO: 2245252 - RNA, 19 nt, Artificial Sequence
  Description of Artificial Sequence: Synthetic oligonucleotide
  Sense strand starting at position 3974 of SEQ ID NO: 1884165
guauaaacugucugaaagg

SEQ ID NO: 2245253 - RNA, 19 nt, Artificial Sequence
  Description of Artificial Sequence: Synthetic oligonucleotide
  Antisense strand to SEQ ID NO: 2245252
ccuuucagacaguuuauac

SEQ ID NO: 2245254 - RNA, 19 nt, Artificial Sequence
  Description of Artificial Sequence: Synthetic oligonucleotide
  Sense strand starting at position 134 of SEQ ID NO: 1884166
ccaguaaggauauggguua

SEQ ID NO: 2245255 - RNA, 19 nt, Artificial Sequence
  Description of Artificial Sequence: Synthetic oligonucleotide
  Antisense strand to SEQ ID NO: 2245254
uaacccauauccuuacugg

SEQ ID NO: 2245256 - RNA, 19 nt, Artificial Sequence
  Description of Artificial Sequence: Synthetic oligonucleotide
  Sense strand starting at position 135 of SEQ ID NO: 1884166
caguaaggauauggguuau

SEQ ID NO: 2245257 - RNA, 19 nt, Artificial Sequence
  Description of Artificial Sequence: Synthetic oligonucleotide
  Antisense strand to SEQ ID NO: 2245256
auaacccauauccuuacug

SEQ ID NO: 2245258 - RNA, 19 nt, Artificial Sequence
  Description of Artificial Sequence: Synthetic oligonucleotide
  Sense strand starting at position 145 of SEQ ID NO: 1884166
auggguuauuuccauacca

SEQ ID NO: 2245259 - RNA, 19 nt, Artificial Sequence
  Description of Artificial Sequence: Synthetic oligonucleotide
  Antisense strand to SEQ ID NO: 2245258
ugguauggaaauaacccau

SEQ ID NO: 2245260 - RNA, 19 nt, Artificial Sequence
  Description of Artificial Sequence: Synthetic oligonucleotide
  Sense strand starting at position 224 of SEQ ID NO: 1884166
aagguacagugcuagugau

SEQ ID NO: 2245261 - RNA, 19 nt, Artificial Sequence
  Description of Artificial Sequence: Synthetic oligonucleotide
  Antisense strand to SEQ ID NO: 2245260
aucacuagcacuguaccuu

SEQ ID NO: 2245262 - RNA, 19 nt, Artificial Sequence
  Description of Artificial Sequence: Synthetic oligonucleotide
  Sense strand starting at position 310 of SEQ ID NO: 1884166
agcugcaaauguuaacaua

SEQ ID NO: 2245263 - RNA, 19 nt, Artificial Sequence
  Description of Artificial Sequence: Synthetic oligonucleotide
  Antisense strand to SEQ ID NO: 2245262
uauguuaacauuugcagcu

SEQ ID NO: 2245264 - RNA, 19 nt, Artificial Sequence
  Description of Artificial Sequence: Synthetic oligonucleotide
  Sense strand starting at position 348 of SEQ ID NO: 1884166
ugaguagaagccuaucuac

SEQ ID NO: 2245265 - RNA, 19 nt, Artificial Sequence
  Description of Artificial Sequence: Synthetic oligonucleotide
  Antisense strand to SEQ ID NO: 2245264
guagauaggcuucuacuca

SEQ ID NO: 2245266 - RNA, 19 nt, Artificial Sequence
  Description of Artificial Sequence: Synthetic oligonucleotide
  Sense strand starting at position 458 of SEQ ID NO: 1884166
guaagaauucugcaacgaa

SEQ ID NO: 2245267 - RNA, 19 nt, Artificial Sequence
  Description of Artificial Sequence: Synthetic oligonucleotide
  Antisense strand to SEQ ID NO: 2245266
uucguugcagaauucuuac

SEQ ID NO: 2245268 - RNA, 19 nt, Artificial Sequence
  Description of Artificial Sequence: Synthetic oligonucleotide
  Sense strand starting at position 461 of SEQ ID NO: 1884166
agaauucugcaacgaagac

SEQ ID NO: 2245269 - RNA, 19 nt, Artificial Sequence
  Description of Artificial Sequence: Synthetic oligonucleotide
  Antisense strand to SEQ ID NO: 2245268
gucuucguugcagaauucu

SEQ ID NO: 2245270 - RNA, 19 nt, Artificial Sequence
  Description of Artificial Sequence: Synthetic oligonucleotide
  Sense strand starting at position 660 of SEQ ID NO: 1884166
agaaauguuuccuaaccag

SEQ ID NO: 2245271 - RNA, 19 nt, Artificial Sequence
  Description of Artificial Sequence: Synthetic oligonucleotide
  Antisense strand to SEQ ID NO: 2245270
cugguuaggaaacauuucu

SEQ ID NO: 2245272 - RNA, 19 nt, Artificial Sequence
  Description of Artificial Sequence: Synthetic oligonucleotide
  Sense strand starting at position 679 of SEQ ID NO: 1884166
ucugaauuaucugaaauga

SEQ ID NO: 2245273 - RNA, 19 nt, Artificial Sequence
  Description of Artificial Sequence: Synthetic oligonucleotide
  Antisense strand to SEQ ID NO: 2245272
ucauuucagauaauucaga

SEQ ID NO: 2245274 - RNA, 19 nt, Artificial Sequence
  Description of Artificial Sequence: Synthetic oligonucleotide
  Sense strand starting at position 801 of SEQ ID NO: 1884166
agggcugaaaggugaaauu

SEQ ID NO: 2245275 - RNA, 19 nt, Artificial Sequence
  Description of Artificial Sequence: Synthetic oligonucleotide
  Antisense strand to SEQ ID NO: 2245274
aauuucaccuuucagcccu

SEQ ID NO: 2245276 - RNA, 19 nt, Artificial Sequence
  Description of Artificial Sequence: Synthetic oligonucleotide
  Sense strand starting at position 810 of SEQ ID NO: 1884166
aggugaaauucucacuuaa

SEQ ID NO: 2245277 - RNA, 19 nt, Artificial Sequence
  Description of Artificial Sequence: Synthetic oligonucleotide
  Antisense strand to SEQ ID NO: 2245276
uuaagugagaauuucaccu

SEQ ID NO: 2245278 - RNA, 19 nt, Artificial Sequence
  Description of Artificial Sequence: Synthetic oligonucleotide
  Sense strand starting at position 1021 of SEQ ID NO: 1884166
ggccgagaccuccaauuag

SEQ ID NO: 2245279 - RNA, 19 nt, Artificial Sequence
  Description of Artificial Sequence: Synthetic oligonucleotide
  Antisense strand to SEQ ID NO: 2245278
cuaauuggaggucucggcc

SEQ ID NO: 2245280 - RNA, 19 nt, Artificial Sequence
  Description of Artificial Sequence: Synthetic oligonucleotide
  Sense strand starting at position 1051 of SEQ ID NO: 1884166
gugcauggcacucauaaag

SEQ ID NO: 2245281 - RNA, 19 nt, Artificial Sequence
  Description of Artificial Sequence: Synthetic oligonucleotide
  Antisense strand to SEQ ID NO: 2245280
cuuuaugagugccaugcac

SEQ ID NO: 2245282 - RNA, 19 nt, Artificial Sequence
  Description of Artificial Sequence: Synthetic oligonucleotide
  Sense strand starting at position 1608 of SEQ ID NO: 1884166
gguagugccugccugagau

SEQ ID NO: 2245283 - RNA, 19 nt, Artificial Sequence
  Description of Artificial Sequence: Synthetic oligonucleotide
  Antisense strand to SEQ ID NO: 2245282
aucucaggcaggcacuacc

SEQ ID NO: 2245284 - RNA, 19 nt, Artificial Sequence
  Description of Artificial Sequence: Synthetic oligonucleotide
  Sense strand starting at position 1612 of SEQ ID NO: 1884166
gugccugccugagauggaa

SEQ ID NO: 2245285 - RNA, 19 nt, Artificial Sequence
  Description of Artificial Sequence: Synthetic oligonucleotide
  Antisense strand to SEQ ID NO: 2245284
uuccaucucaggcaggcac

SEQ ID NO: 2245286 - RNA, 19 nt, Artificial Sequence
  Description of Artificial Sequence: Synthetic oligonucleotide
  Sense strand starting at position 1654 of SEQ ID NO: 1884166
ggcugucaccuuuguuauu

SEQ ID NO: 2245287 - RNA, 19 nt, Artificial Sequence
  Description of Artificial Sequence: Synthetic oligonucleotide
  Antisense strand to SEQ ID NO: 2245286
aauaacaaaggugacagcc

SEQ ID NO: 2245288 - RNA, 19 nt, Artificial Sequence
  Description of Artificial Sequence: Synthetic oligonucleotide
  Sense strand starting at position 1655 of SEQ ID NO: 1884166
gcugucaccuuuguuauuu

SEQ ID NO: 2245289 - RNA, 19 nt, Artificial Sequence
  Description of Artificial Sequence: Synthetic oligonucleotide
  Antisense strand to SEQ ID NO: 2245288
aaauaacaaaggugacagc

SEQ ID NO: 2245290 - RNA, 19 nt, Artificial Sequence
  Description of Artificial Sequence: Synthetic oligonucleotide
  Sense strand starting at position 1663 of SEQ ID NO: 1884166
cuuuguuauuuggacaacu

SEQ ID NO: 2245291 - RNA, 19 nt, Artificial Sequence
  Description of Artificial Sequence: Synthetic oligonucleotide
  Antisense strand to SEQ ID NO: 2245290
aguuguccaaauaacaaag

SEQ ID NO: 2245292 - RNA, 19 nt, Artificial Sequence
  Description of Artificial Sequence: Synthetic oligonucleotide
  Sense strand starting at position 1859 of SEQ ID NO: 1884166
cugcccauauucuaggaaa

SEQ ID NO: 2245293 - RNA, 19 nt, Artificial Sequence
  Description of Artificial Sequence: Synthetic oligonucleotide
  Antisense strand to SEQ ID NO: 2245292
uuuccuagaauaugggcag

SEQ ID NO: 2245294 - RNA, 19 nt, Artificial Sequence
  Description of Artificial Sequence: Synthetic oligonucleotide
  Sense strand starting at position 1861 of SEQ ID NO: 1884166
gcccauauucuaggaaaga

SEQ ID NO: 2245295 - RNA, 19 nt, Artificial Sequence
  Description of Artificial Sequence: Synthetic oligonucleotide
  Antisense strand to SEQ ID NO: 2245294
ucuuuccuagaauaugggc

SEQ ID NO: 2245296 - RNA, 19 nt, Artificial Sequence
  Description of Artificial Sequence: Synthetic oligonucleotide
  Sense strand starting at position 1862 of SEQ ID NO: 1884166
cccauauucuaggaaagaa

SEQ ID NO: 2245297 - RNA, 19 nt, Artificial Sequence
  Description of Artificial Sequence: Synthetic oligonucleotide
  Antisense strand to SEQ ID NO: 2245296
uucuuuccuagaauauggg

SEQ ID NO: 2245298 - RNA, 19 nt, Artificial Sequence
  Description of Artificial Sequence: Synthetic oligonucleotide
  Sense strand starting at position 1955 of SEQ ID NO: 1884166
ccuguaggcuuugcagaau

SEQ ID NO: 2245299 - RNA, 19 nt, Artificial Sequence
  Description of Artificial Sequence: Synthetic oligonucleotide
  Antisense strand to SEQ ID NO: 2245298
auucugcaaagccuacagg

SEQ ID NO: 2245300 - RNA, 19 nt, Artificial Sequence
  Description of Artificial Sequence: Synthetic oligonucleotide
  Sense strand starting at position 1958 of SEQ ID NO: 1884166
guaggcuuugcagaaucca

SEQ ID NO: 2245301 - RNA, 19 nt, Artificial Sequence
  Description of Artificial Sequence: Synthetic oligonucleotide
  Antisense strand to SEQ ID NO: 2245300
uggauucugcaaagccuac

SEQ ID NO: 2245302 - RNA, 19 nt, Artificial Sequence
  Description of Artificial Sequence: Synthetic oligonucleotide
  Sense strand starting at position 2117 of SEQ ID NO: 1884166
acccauguucuauggcuga

SEQ ID NO: 2245303 - RNA, 19 nt, Artificial Sequence
  Description of Artificial Sequence: Synthetic oligonucleotide
  Antisense strand to SEQ ID NO: 2245302
ucagccauagaacaugggu

SEQ ID NO: 2245304 - RNA, 19 nt, Artificial Sequence
  Description of Artificial Sequence: Synthetic oligonucleotide
  Sense strand starting at position 2120 of SEQ ID NO: 1884166
cauguucuauggcugacaa

SEQ ID NO: 2245305 - RNA, 19 nt, Artificial Sequence
  Description of Artificial Sequence: Synthetic oligonucleotide
  Antisense strand to SEQ ID NO: 2245304
uugucagccauagaacaug

SEQ ID NO: 2245306 - RNA, 19 nt, Artificial Sequence
  Description of Artificial Sequence: Synthetic oligonucleotide
  Sense strand starting at position 2121 of SEQ ID NO: 1884166
auguucuauggcugacaaa

SEQ ID NO: 2245307 - RNA, 19 nt, Artificial Sequence
  Description of Artificial Sequence: Synthetic oligonucleotide
  Antisense strand to SEQ ID NO: 2245306
uuugucagccauagaacau

SEQ ID NO: 2245308 - RNA, 19 nt, Artificial Sequence
  Description of Artificial Sequence: Synthetic oligonucleotide
  Sense strand starting at position 2122 of SEQ ID NO: 1884166
uguucuauggcugacaaag

SEQ ID NO: 2245309 - RNA, 19 nt, Artificial Sequence
  Description of Artificial Sequence: Synthetic oligonucleotide
  Antisense strand to SEQ ID NO: 2245308
cuuugucagccauagaaca

SEQ ID NO: 2245310 - RNA, 19 nt, Artificial Sequence
  Description of Artificial Sequence: Synthetic oligonucleotide
  Sense strand starting at position 2124 of SEQ ID NO: 1884166
uucuauggcugacaaaguu

SEQ ID NO: 2245311 - RNA, 19 nt, Artificial Sequence
  Description of Artificial Sequence: Synthetic oligonucleotide
  Antisense strand to SEQ ID NO: 2245310
aacuuugucagccauagaa

SEQ ID NO: 2245312 - RNA, 19 nt, Artificial Sequence
  Description of Artificial Sequence: Synthetic oligonucleotide
  Sense strand starting at position 2300 of SEQ ID NO: 1884166
caggaaggcugcuucuuua

SEQ ID NO: 2245313 - RNA, 19 nt, Artificial Sequence
  Description of Artificial Sequence: Synthetic oligonucleotide
  Antisense strand to SEQ ID NO: 2245312
uaaagaagcagccuuccug

SEQ ID NO: 2245314 - RNA, 19 nt, Artificial Sequence
  Description of Artificial Sequence: Synthetic oligonucleotide
  Sense strand starting at position 2304 of SEQ ID NO: 1884166
aaggcugcuucuuuaagga

SEQ ID NO: 2245315 - RNA, 19 nt, Artificial Sequence
  Description of Artificial Sequence: Synthetic oligonucleotide
  Antisense strand to SEQ ID NO: 2245314
uccuuaaagaagcagccuu

SEQ ID NO: 2245316 - RNA, 19 nt, Artificial Sequence
  Description of Artificial Sequence: Synthetic oligonucleotide
  Sense strand starting at position 2320 of SEQ ID NO: 1884166
ggaggucccugaucccauu

SEQ ID NO: 2245317 - RNA, 19 nt, Artificial Sequence
  Description of Artificial Sequence: Synthetic oligonucleotide
  Antisense strand to SEQ ID NO: 2245316
aaugggaucagggaccucc

SEQ ID NO: 2245318 - RNA, 19 nt, Artificial Sequence
  Description of Artificial Sequence: Synthetic oligonucleotide
  Sense strand starting at position 2415 of SEQ ID NO: 1884166
aguacuucucugggacaga

SEQ ID NO: 2245319 - RNA, 19 nt, Artificial Sequence
  Description of Artificial Sequence: Synthetic oligonucleotide
  Antisense strand to SEQ ID NO: 2245318
ucugucccagagaaguacu

SEQ ID NO: 2245320 - RNA, 19 nt, Artificial Sequence
  Description of Artificial Sequence: Synthetic oligonucleotide
  Sense strand starting at position 2416 of SEQ ID NO: 1884166
guacuucucugggacagag

SEQ ID NO: 2245321 - RNA, 19 nt, Artificial Sequence
  Description of Artificial Sequence: Synthetic oligonucleotide
  Antisense strand to SEQ ID NO: 2245320
cucugucccagagaaguac

SEQ ID NO: 2245322 - RNA, 19 nt, Artificial Sequence
  Description of Artificial Sequence: Synthetic oligonucleotide
  Sense strand starting at position 2724 of SEQ ID NO: 1884166
gugugcucccuuuccucua

SEQ ID NO: 2245323 - RNA, 19 nt, Artificial Sequence
  Description of Artificial Sequence: Synthetic oligonucleotide
  Antisense strand to SEQ ID NO: 2245322
uagaggaaagggagcacac

SEQ ID NO: 2245324 - RNA, 19 nt, Artificial Sequence
  Description of Artificial Sequence: Synthetic oligonucleotide
  Sense strand starting at position 2790 of SEQ ID NO: 1884166
ugagauggcugagaugaua

SEQ ID NO: 2245325 - RNA, 19 nt, Artificial Sequence
  Description of Artificial Sequence: Synthetic oligonucleotide
  Antisense strand to SEQ ID NO: 2245324
uaucaucucagccaucuca

SEQ ID NO: 2245326 - RNA, 19 nt, Artificial Sequence
  Description of Artificial Sequence: Synthetic oligonucleotide
  Sense strand starting at position 2809 of SEQ ID NO: 1884166
gaaauaggauuccaaaugu

SEQ ID NO: 2245327 - RNA, 19 nt, Artificial Sequence
  Description of Artificial Sequence: Synthetic oligonucleotide
  Antisense strand to SEQ ID NO: 2245326
acauuuggaauccuauuuc

SEQ ID NO: 2245328 - RNA, 19 nt, Artificial Sequence
  Description of Artificial Sequence: Synthetic oligonucleotide
  Sense strand starting at position 2816 of SEQ ID NO: 1884166
gauuccaaauguggaucua

SEQ ID NO: 2245329 - RNA, 19 nt, Artificial Sequence
  Description of Artificial Sequence: Synthetic oligonucleotide
  Antisense strand to SEQ ID NO: 2245328
uagauccacauuuggaauc

SEQ ID NO: 2245330 - RNA, 19 nt, Artificial Sequence
  Description of Artificial Sequence: Synthetic oligonucleotide
  Sense strand starting at position 3049 of SEQ ID NO: 1884166
gagcuugaagaaugucauu

SEQ ID NO: 2245331 - RNA, 19 nt, Artificial Sequence
  Description of Artificial Sequence: Synthetic oligonucleotide
  Antisense strand to SEQ ID NO: 2245330
aaugacauucuucaagcuc

SEQ ID NO: 2245332 - RNA, 19 nt, Artificial Sequence
  Description of Artificial Sequence: Synthetic oligonucleotide
  Sense strand starting at position 3054 of SEQ ID NO: 1884166
ugaagaaugucauucugaa

SEQ ID NO: 2245333 - RNA, 19 nt, Artificial Sequence
  Description of Artificial Sequence: Synthetic oligonucleotide
  Antisense strand to SEQ ID NO: 2245332
uucagaaugacauucuuca

SEQ ID NO: 2245334 - RNA, 19 nt, Artificial Sequence
  Description of Artificial Sequence: Synthetic oligonucleotide
  Sense strand starting at position 6 of SEQ ID NO: 1884167
ucaagugauucuuaugcag

SEQ ID NO: 2245335 - RNA, 19 nt, Artificial Sequence
  Description of Artificial Sequence: Synthetic oligonucleotide
  Antisense strand to SEQ ID NO: 2245334
cugcauaagaaucacuuga

SEQ ID NO: 2245336 - RNA, 19 nt, Artificial Sequence
  Description of Artificial Sequence: Synthetic oligonucleotide
  Sense strand starting at position 10 of SEQ ID NO: 1884167
gugauucuuaugcagcaga

SEQ ID NO: 2245337 - RNA, 19 nt, Artificial Sequence
  Description of Artificial Sequence: Synthetic oligonucleotide
  Antisense strand to SEQ ID NO: 2245336
ucugcugcauaagaaucac

SEQ ID NO: 2245338 - RNA, 19 nt, Artificial Sequence
  Description of Artificial Sequence: Synthetic oligonucleotide
  Sense strand starting at position 276 of SEQ ID NO: 1884167
uuuaaauuagcaugcauag

SEQ ID NO: 2245339 - RNA, 19 nt, Artificial Sequence
  Description of Artificial Sequence: Synthetic oligonucleotide
  Antisense strand to SEQ ID NO: 2245338
cuaugcaugcuaauuuaaa

SEQ ID NO: 2245340 - RNA, 19 nt, Artificial Sequence
  Description of Artificial Sequence: Synthetic oligonucleotide
  Sense strand starting at position 509 of SEQ ID NO: 1884167
auuggauguaauugauuag

SEQ ID NO: 2245341 - RNA, 19 nt, Artificial Sequence
  Description of Artificial Sequence: Synthetic oligonucleotide
  Antisense strand to SEQ ID NO: 2245340
cuaaucaauuacauccaau

SEQ ID NO: 2245342 - RNA, 19 nt, Artificial Sequence
  Description of Artificial Sequence: Synthetic oligonucleotide
  Sense strand starting at position 512 of SEQ ID NO: 1884167
ggauguaauugauuagauu

SEQ ID NO: 2245343 - RNA, 19 nt, Artificial Sequence
  Description of Artificial Sequence: Synthetic oligonucleotide
  Antisense strand to SEQ ID NO: 2245342
aaucuaaucaauuacaucc

SEQ ID NO: 2245344 - RNA, 19 nt, Artificial Sequence
  Description of Artificial Sequence: Synthetic oligonucleotide
  Sense strand starting at position 634 of SEQ ID NO: 1884167
cuacuuuguccuggagucu

SEQ ID NO: 2245345 - RNA, 19 nt, Artificial Sequence
  Description of Artificial Sequence: Synthetic oligonucleotide
  Antisense strand to SEQ ID NO: 2245344
agacuccaggacaaaguag

SEQ ID NO: 2245346 - RNA, 19 nt, Artificial Sequence
  Description of Artificial Sequence: Synthetic oligonucleotide
  Sense strand starting at position 635 of SEQ ID NO: 1884167
uacuuuguccuggagucuu

SEQ ID NO: 2245347 - RNA, 19 nt, Artificial Sequence
  Description of Artificial Sequence: Synthetic oligonucleotide
  Antisense strand to SEQ ID NO: 2245346
aagacuccaggacaaagua

SEQ ID NO: 2245348 - RNA, 19 nt, Artificial Sequence
  Description of Artificial Sequence: Synthetic oligonucleotide
  Sense strand starting at position 646 of SEQ ID NO: 1884167
ggagucuugugcccauauu

SEQ ID NO: 2245349 - RNA, 19 nt, Artificial Sequence
  Description of Artificial Sequence: Synthetic oligonucleotide
  Antisense strand to SEQ ID NO: 2245348
aauaugggcacaagacucc

SEQ ID NO: 2245350 - RNA, 19 nt, Artificial Sequence
  Description of Artificial Sequence: Synthetic oligonucleotide
  Sense strand starting at position 657 of SEQ ID NO: 1884167
cccauauugcauggccuua

SEQ ID NO: 2245351 - RNA, 19 nt, Artificial Sequence
  Description of Artificial Sequence: Synthetic oligonucleotide
  Antisense strand to SEQ ID NO: 2245350
uaaggccaugcaauauggg

SEQ ID NO: 2245352 - RNA, 19 nt, Artificial Sequence
  Description of Artificial Sequence: Synthetic oligonucleotide
  Sense strand starting at position 662 of SEQ ID NO: 1884167
auugcauggccuuaaauac

SEQ ID NO: 2245353 - RNA, 19 nt, Artificial Sequence
  Description of Artificial Sequence: Synthetic oligonucleotide
  Antisense strand to SEQ ID NO: 2245352
guauuuaaggccaugcaau

SEQ ID NO: 2245354 - RNA, 19 nt, Artificial Sequence
  Description of Artificial Sequence: Synthetic oligonucleotide
  Sense strand starting at position 713 of SEQ ID NO: 1884167
agccaaaucuggcuuauua

SEQ ID NO: 2245355 - RNA, 19 nt, Artificial Sequence
  Description of Artificial Sequence: Synthetic oligonucleotide
  Antisense strand to SEQ ID NO: 2245354
uaauaagccagauuuggcu

SEQ ID NO: 2245356 - RNA, 19 nt, Artificial Sequence
  Description of Artificial Sequence: Synthetic oligonucleotide
  Sense strand starting at position 723 of SEQ ID NO: 1884167
ggcuuauuauacuuauguu

SEQ ID NO: 2245357 - RNA, 19 nt, Artificial Sequence
  Description of Artificial Sequence: Synthetic oligonucleotide
  Antisense strand to SEQ ID NO: 2245356
aacauaaguauaauaagcc

SEQ ID NO: 2245358 - RNA, 19 nt, Artificial Sequence
  Description of Artificial Sequence: Synthetic oligonucleotide
  Sense strand starting at position 786 of SEQ ID NO: 1884167
ugggaaucauguugauccu

SEQ ID NO: 2245359 - RNA, 19 nt, Artificial Sequence
  Description of Artificial Sequence: Synthetic oligonucleotide
  Antisense strand to SEQ ID NO: 2245358
aggaucaacaugauuccca

SEQ ID NO: 2245360 - RNA, 19 nt, Artificial Sequence
  Description of Artificial Sequence: Synthetic oligonucleotide
  Sense strand starting at position 850 of SEQ ID NO: 1884167
ggagaauacuuaggaaucu

SEQ ID NO: 2245361 - RNA, 19 nt, Artificial Sequence
  Description of Artificial Sequence: Synthetic oligonucleotide
  Antisense strand to SEQ ID NO: 2245360
agauuccuaaguauucucc

SEQ ID NO: 2245362 - RNA, 19 nt, Artificial Sequence
  Description of Artificial Sequence: Synthetic oligonucleotide
  Sense strand starting at position 859 of SEQ ID NO: 1884167
uuaggaaucuuguaggcca

SEQ ID NO: 2245363 - RNA, 19 nt, Artificial Sequence
  Description of Artificial Sequence: Synthetic oligonucleotide
  Antisense strand to SEQ ID NO: 2245362
uggccuacaagauuccuaa

SEQ ID NO: 2245364 - RNA, 19 nt, Artificial Sequence
  Description of Artificial Sequence: Synthetic oligonucleotide
  Sense strand starting at position 1321 of SEQ ID NO: 1884167
aggcaaacuccguguccaa

SEQ ID NO: 2245365 - RNA, 19 nt, Artificial Sequence
  Description of Artificial Sequence: Synthetic oligonucleotide
  Antisense strand to SEQ ID NO: 2245364
uuggacacggaguuugccu

SEQ ID NO: 2245366 - RNA, 19 nt, Artificial Sequence
  Description of Artificial Sequence: Synthetic oligonucleotide
  Sense strand starting at position 1855 of SEQ ID NO: 1884167
caagacucuugccugggaa

SEQ ID NO: 2245367 - RNA, 19 nt, Artificial Sequence
  Description of Artificial Sequence: Synthetic oligonucleotide
  Antisense strand to SEQ ID NO: 2245366
uucccaggcaagagucuug

SEQ ID NO: 2245368 - RNA, 19 nt, Artificial Sequence
  Description of Artificial Sequence: Synthetic oligonucleotide
  Sense strand starting at position 1856 of SEQ ID NO: 1884167
aagacucuugccugggaag

SEQ ID NO: 2245369 - RNA, 19 nt, Artificial Sequence
  Description of Artificial Sequence: Synthetic oligonucleotide
  Antisense strand to SEQ ID NO: 2245368
cuucccaggcaagagucuu

SEQ ID NO: 2245370 - RNA, 19 nt, Artificial Sequence
  Description of Artificial Sequence: Synthetic oligonucleotide
  Sense strand starting at position 1857 of SEQ ID NO: 1884167
agacucuugccugggaaga

SEQ ID NO: 2245371 - RNA, 19 nt, Artificial Sequence
  Description of Artificial Sequence: Synthetic oligonucleotide
  Antisense strand to SEQ ID NO: 2245370
ucuucccaggcaagagucu

SEQ ID NO: 2245372 - RNA, 19 nt, Artificial Sequence
  Description of Artificial Sequence: Synthetic oligonucleotide
  Sense strand starting at position 1858 of SEQ ID NO: 1884167
gacucuugccugggaagag

SEQ ID NO: 2245373 - RNA, 19 nt, Artificial Sequence
  Description of Artificial Sequence: Synthetic oligonucleotide
  Antisense strand to SEQ ID NO: 2245372
cucuucccaggcaagaguc

SEQ ID NO: 2245374 - RNA, 19 nt, Artificial Sequence
  Description of Artificial Sequence: Synthetic oligonucleotide
  Sense strand starting at position 1859 of SEQ ID NO: 1884167
acucuugccugggaagagu

SEQ ID NO: 2245375 - RNA, 19 nt, Artificial Sequence
  Description of Artificial Sequence: Synthetic oligonucleotide
  Antisense strand to SEQ ID NO: 2245374
acucuucccaggcaagagu

SEQ ID NO: 2245376 - RNA, 19 nt, Artificial Sequence
  Description of Artificial Sequence: Synthetic oligonucleotide
  Sense strand starting at position 1897 of SEQ ID NO: 1884167
accgucucuguugacagau

SEQ ID NO: 2245377 - RNA, 19 nt, Artificial Sequence
  Description of Artificial Sequence: Synthetic oligonucleotide
  Antisense strand to SEQ ID NO: 2245376
aucugucaacagagacggu

SEQ ID NO: 2245378 - RNA, 19 nt, Artificial Sequence
  Description of Artificial Sequence: Synthetic oligonucleotide
  Sense strand starting at position 1903 of SEQ ID NO: 1884167
ucuguugacagaugugcuu

SEQ ID NO: 2245379 - RNA, 19 nt, Artificial Sequence
  Description of Artificial Sequence: Synthetic oligonucleotide
  Antisense strand to SEQ ID NO: 2245378
aagcacaucugucaacaga

SEQ ID NO: 2245380 - RNA, 19 nt, Artificial Sequence
  Description of Artificial Sequence: Synthetic oligonucleotide
  Sense strand starting at position 2121 of SEQ ID NO: 1884167
uccuguguaucgucuccaa

SEQ ID NO: 2245381 - RNA, 19 nt, Artificial Sequence
  Description of Artificial Sequence: Synthetic oligonucleotide
  Antisense strand to SEQ ID NO: 2245380
uuggagacgauacacagga

SEQ ID NO: 2245382 - RNA, 19 nt, Artificial Sequence
  Description of Artificial Sequence: Synthetic oligonucleotide
  Sense strand starting at position 2162 of SEQ ID NO: 1884167
caggccacugggugauaua

SEQ ID NO: 2245383 - RNA, 19 nt, Artificial Sequence
  Description of Artificial Sequence: Synthetic oligonucleotide
  Antisense strand to SEQ ID NO: 2245382
uauaucacccaguggccug

SEQ ID NO: 2245384 - RNA, 19 nt, Artificial Sequence
  Description of Artificial Sequence: Synthetic oligonucleotide
  Sense strand starting at position 2293 of SEQ ID NO: 1884167
ccagaaucaggcugggagu

SEQ ID NO: 2245385 - RNA, 19 nt, Artificial Sequence
  Description of Artificial Sequence: Synthetic oligonucleotide
  Antisense strand to SEQ ID NO: 2245384
acucccagccugauucugg

SEQ ID NO: 2245386 - RNA, 19 nt, Artificial Sequence
  Description of Artificial Sequence: Synthetic oligonucleotide
  Sense strand starting at position 2677 of SEQ ID NO: 1884167
acaugagaguggugagcaa

SEQ ID NO: 2245387 - RNA, 19 nt, Artificial Sequence
  Description of Artificial Sequence: Synthetic oligonucleotide
  Antisense strand to SEQ ID NO: 2245386
uugcucaccacucucaugu

SEQ ID NO: 2245388 - RNA, 19 nt, Artificial Sequence
  Description of Artificial Sequence: Synthetic oligonucleotide
  Sense strand starting at position 2872 of SEQ ID NO: 1884167
ccacucaugugugcaucaa

SEQ ID NO: 2245389 - RNA, 19 nt, Artificial Sequence
  Description of Artificial Sequence: Synthetic oligonucleotide
  Antisense strand to SEQ ID NO: 2245388
uugaugcacacaugagugg

SEQ ID NO: 2245390 - RNA, 19 nt, Artificial Sequence
  Description of Artificial Sequence: Synthetic oligonucleotide
  Sense strand starting at position 3022 of SEQ ID NO: 1884167
cuauaugugucugugcaca

SEQ ID NO: 2245391 - RNA, 19 nt, Artificial Sequence
  Description of Artificial Sequence: Synthetic oligonucleotide
  Antisense strand to SEQ ID NO: 2245390
ugugcacagacacauauag

SEQ ID NO: 2245392 - RNA, 19 nt, Artificial Sequence
  Description of Artificial Sequence: Synthetic oligonucleotide
  Sense strand starting at position 3082 of SEQ ID NO: 1884167
gcacaugugugagcauaca

SEQ ID NO: 2245393 - RNA, 19 nt, Artificial Sequence
  Description of Artificial Sequence: Synthetic oligonucleotide
  Antisense strand to SEQ ID NO: 2245392
uguaugcucacacaugugc

SEQ ID NO: 2245394 - RNA, 19 nt, Artificial Sequence
  Description of Artificial Sequence: Synthetic oligonucleotide
  Sense strand starting at position 3215 of SEQ ID NO: 1884167
gagauucugucccucugga

SEQ ID NO: 2245395 - RNA, 19 nt, Artificial Sequence
  Description of Artificial Sequence: Synthetic oligonucleotide
  Antisense strand to SEQ ID NO: 2245394
uccagagggacagaaucuc

SEQ ID NO: 2245396 - RNA, 19 nt, Artificial Sequence
  Description of Artificial Sequence: Synthetic oligonucleotide
  Sense strand starting at position 3304 of SEQ ID NO: 1884167
ucccacuucuaguuauaga

SEQ ID NO: 2245397 - RNA, 19 nt, Artificial Sequence
  Description of Artificial Sequence: Synthetic oligonucleotide
  Antisense strand to SEQ ID NO: 2245396
ucuauaacuagaaguggga

SEQ ID NO: 2245398 - RNA, 19 nt, Artificial Sequence
  Description of Artificial Sequence: Synthetic oligonucleotide
  Sense strand starting at position 3484 of SEQ ID NO: 1884167
ccacgacugucucuuccaa

SEQ ID NO: 2245399 - RNA, 19 nt, Artificial Sequence
  Description of Artificial Sequence: Synthetic oligonucleotide
  Antisense strand to SEQ ID NO: 2245398
uuggaagagacagucgugg

SEQ ID NO: 2245400 - RNA, 19 nt, Artificial Sequence
  Description of Artificial Sequence: Synthetic oligonucleotide
  Sense strand starting at position 3512 of SEQ ID NO: 1884167
uggcuucuuugugcucaua

SEQ ID NO: 2245401 - RNA, 19 nt, Artificial Sequence
  Description of Artificial Sequence: Synthetic oligonucleotide
  Antisense strand to SEQ ID NO: 2245400
uaugagcacaaagaagcca

SEQ ID NO: 2245402 - RNA, 19 nt, Artificial Sequence
  Description of Artificial Sequence: Synthetic oligonucleotide
  Sense strand starting at position 3515 of SEQ ID NO: 1884167
cuucuuugugcucauagga

SEQ ID NO: 2245403 - RNA, 19 nt, Artificial Sequence
  Description of Artificial Sequence: Synthetic oligonucleotide
  Antisense strand to SEQ ID NO: 2245402
uccuaugagcacaaagaag

SEQ ID NO: 2245404 - RNA, 19 nt, Artificial Sequence
  Description of Artificial Sequence: Synthetic oligonucleotide
  Sense strand starting at position 3609 of SEQ ID NO: 1884167
ucagcuaugccguuaggca

SEQ ID NO: 2245405 - RNA, 19 nt, Artificial Sequence
  Description of Artificial Sequence: Synthetic oligonucleotide
  Antisense strand to SEQ ID NO: 2245404
ugccuaacggcauagcuga

SEQ ID NO: 2245406 - RNA, 19 nt, Artificial Sequence
  Description of Artificial Sequence: Synthetic oligonucleotide
  Sense strand starting at position 3610 of SEQ ID NO: 1884167
cagcuaugccguuaggcau

SEQ ID NO: 2245407 - RNA, 19 nt, Artificial Sequence
  Description of Artificial Sequence: Synthetic oligonucleotide
  Antisense strand to SEQ ID NO: 2245406
augccuaacggcauagcug

SEQ ID NO: 2245408 - RNA, 19 nt, Artificial Sequence
  Description of Artificial Sequence: Synthetic oligonucleotide
  Sense strand starting at position 3616 of SEQ ID NO: 1884167
ugccguuaggcauaaggga

SEQ ID NO: 2245409 - RNA, 19 nt, Artificial Sequence
  Description of Artificial Sequence: Synthetic oligonucleotide
  Antisense strand to SEQ ID NO: 2245408
ucccuuaugccuaacggca

SEQ ID NO: 2245410 - RNA, 19 nt, Artificial Sequence
  Description of Artificial Sequence: Synthetic oligonucleotide
  Sense strand starting at position 3629 of SEQ ID NO: 1884167
aagggagguccucaggcau

SEQ ID NO: 2245411 - RNA, 19 nt, Artificial Sequence
  Description of Artificial Sequence: Synthetic oligonucleotide
  Antisense strand to SEQ ID NO: 2245410
augccugaggaccucccuu

SEQ ID NO: 2245412 - RNA, 19 nt, Artificial Sequence
  Description of Artificial Sequence: Synthetic oligonucleotide
  Sense strand starting at position 3837 of SEQ ID NO: 1884167
aggccaugcucagcaaagu

SEQ ID NO: 2245413 - RNA, 19 nt, Artificial Sequence
  Description of Artificial Sequence: Synthetic oligonucleotide
  Antisense strand to SEQ ID NO: 2245412
acuuugcugagcauggccu

SEQ ID NO: 2245414 - RNA, 19 nt, Artificial Sequence
  Description of Artificial Sequence: Synthetic oligonucleotide
  Sense strand starting at position 124 of SEQ ID NO: 1884168
ggcccauuaauaggguauu

SEQ ID NO: 2245415 - RNA, 19 nt, Artificial Sequence
  Description of Artificial Sequence: Synthetic oligonucleotide
  Antisense strand to SEQ ID NO: 2245414
aauacccuauuaaugggcc

SEQ ID NO: 2245416 - RNA, 19 nt, Artificial Sequence
  Description of Artificial Sequence: Synthetic oligonucleotide
  Sense strand starting at position 324 of SEQ ID NO: 1884168
aucugcuaagugugcuaua

SEQ ID NO: 2245417 - RNA, 19 nt, Artificial Sequence
  Description of Artificial Sequence: Synthetic oligonucleotide
  Antisense strand to SEQ ID NO: 2245416
uauagcacacuuagcagau

SEQ ID NO: 2245418 - RNA, 19 nt, Artificial Sequence
  Description of Artificial Sequence: Synthetic oligonucleotide
  Sense strand starting at position 325 of SEQ ID NO: 1884168
ucugcuaagugugcuauau

SEQ ID NO: 2245419 - RNA, 19 nt, Artificial Sequence
  Description of Artificial Sequence: Synthetic oligonucleotide
  Antisense strand to SEQ ID NO: 2245418
auauagcacacuuagcaga

SEQ ID NO: 2245420 - RNA, 19 nt, Artificial Sequence
  Description of Artificial Sequence: Synthetic oligonucleotide
  Sense strand starting at position 329 of SEQ ID NO: 1884168
cuaagugugcuauaugacu

SEQ ID NO: 2245421 - RNA, 19 nt, Artificial Sequence
  Description of Artificial Sequence: Synthetic oligonucleotide
  Antisense strand to SEQ ID NO: 2245420
agucauauagcacacuuag

SEQ ID NO: 2245422 - RNA, 19 nt, Artificial Sequence
  Description of Artificial Sequence: Synthetic oligonucleotide
  Sense strand starting at position 335 of SEQ ID NO: 1884168
gugcuauaugacuaauacu

SEQ ID NO: 2245423 - RNA, 19 nt, Artificial Sequence
  Description of Artificial Sequence: Synthetic oligonucleotide
  Antisense strand to SEQ ID NO: 2245422
aguauuagucauauagcac

SEQ ID NO: 2245424 - RNA, 19 nt, Artificial Sequence
  Description of Artificial Sequence: Synthetic oligonucleotide
  Sense strand starting at position 440 of SEQ ID NO: 1884168
gaugcaaagugguugaaug

SEQ ID NO: 2245425 - RNA, 19 nt, Artificial Sequence
  Description of Artificial Sequence: Synthetic oligonucleotide
  Antisense strand to SEQ ID NO: 2245424
cauucaaccacuuugcauc

SEQ ID NO: 2245426 - RNA, 19 nt, Artificial Sequence
  Description of Artificial Sequence: Synthetic oligonucleotide
  Sense strand starting at position 477 of SEQ ID NO: 1884168
gcuggaaucuaguuugaau

SEQ ID NO: 2245427 - RNA, 19 nt, Artificial Sequence
  Description of Artificial Sequence: Synthetic oligonucleotide
  Antisense strand to SEQ ID NO: 2245426
auucaaacuagauuccagc

SEQ ID NO: 2245428 - RNA, 19 nt, Artificial Sequence
  Description of Artificial Sequence: Synthetic oligonucleotide
  Sense strand starting at position 479 of SEQ ID NO: 1884168
uggaaucuaguuugaaucu

SEQ ID NO: 2245429 - RNA, 19 nt, Artificial Sequence
  Description of Artificial Sequence: Synthetic oligonucleotide
  Antisense strand to SEQ ID NO: 2245428
agauucaaacuagauucca

SEQ ID NO: 2245430 - RNA, 19 nt, Artificial Sequence
  Description of Artificial Sequence: Synthetic oligonucleotide
  Sense strand starting at position 480 of SEQ ID NO: 1884168
ggaaucuaguuugaaucua

SEQ ID NO: 2245431 - RNA, 19 nt, Artificial Sequence
  Description of Artificial Sequence: Synthetic oligonucleotide
  Antisense strand to SEQ ID NO: 2245430
uagauucaaacuagauucc

SEQ ID NO: 2245432 - RNA, 19 nt, Artificial Sequence
  Description of Artificial Sequence: Synthetic oligonucleotide
  Sense strand starting at position 488 of SEQ ID NO: 1884168
guuugaaucuaaggagacu

SEQ ID NO: 2245433 - RNA, 19 nt, Artificial Sequence
  Description of Artificial Sequence: Synthetic oligonucleotide
  Antisense strand to SEQ ID NO: 2245432
agucuccuuagauucaaac

SEQ ID NO: 2245434 - RNA, 19 nt, Artificial Sequence
  Description of Artificial Sequence: Synthetic oligonucleotide
  Sense strand starting at position 738 of SEQ ID NO: 1884168
gugugauauugguagagau

SEQ ID NO: 2245435 - RNA, 19 nt, Artificial Sequence
  Description of Artificial Sequence: Synthetic oligonucleotide
  Antisense strand to SEQ ID NO: 2245434
aucucuaccaauaucacac

SEQ ID NO: 2245436 - RNA, 19 nt, Artificial Sequence
  Description of Artificial Sequence: Synthetic oligonucleotide
  Sense strand starting at position 851 of SEQ ID NO: 1884168
agccaccaugccugacaua

SEQ ID NO: 2245437 - RNA, 19 nt, Artificial Sequence
  Description of Artificial Sequence: Synthetic oligonucleotide
  Antisense strand to SEQ ID NO: 2245436
uaugucaggcaugguggcu

SEQ ID NO: 2245438 - RNA, 19 nt, Artificial Sequence
  Description of Artificial Sequence: Synthetic oligonucleotide
  Sense strand starting at position 852 of SEQ ID NO: 1884168
gccaccaugccugacauaa

SEQ ID NO: 2245439 - RNA, 19 nt, Artificial Sequence
  Description of Artificial Sequence: Synthetic oligonucleotide
  Antisense strand to SEQ ID NO: 2245438
uuaugucaggcaugguggc

SEQ ID NO: 2245440 - RNA, 19 nt, Artificial Sequence
  Description of Artificial Sequence: Synthetic oligonucleotide
  Sense strand starting at position 1197 of SEQ ID NO: 1884168
cucuuauucucguuguucu

SEQ ID NO: 2245441 - RNA, 19 nt, Artificial Sequence
  Description of Artificial Sequence: Synthetic oligonucleotide
  Antisense strand to SEQ ID NO: 2245440
agaacaacgagaauaagag

SEQ ID NO: 2245442 - RNA, 19 nt, Artificial Sequence
  Description of Artificial Sequence: Synthetic oligonucleotide
  Sense strand starting at position 1525 of SEQ ID NO: 1884168
gcucaugguucugagagag

SEQ ID NO: 2245443 - RNA, 19 nt, Artificial Sequence
  Description of Artificial Sequence: Synthetic oligonucleotide
  Antisense strand to SEQ ID NO: 2245442
cucucucagaaccaugagc

SEQ ID NO: 2245444 - RNA, 19 nt, Artificial Sequence
  Description of Artificial Sequence: Synthetic oligonucleotide
  Sense strand starting at position 1537 of SEQ ID NO: 1884168
gagagagcacgugguugau

SEQ ID NO: 2245445 - RNA, 19 nt, Artificial Sequence
  Description of Artificial Sequence: Synthetic oligonucleotide
  Antisense strand to SEQ ID NO: 2245444
aucaaccacgugcucucuc

SEQ ID NO: 2245446 - RNA, 19 nt, Artificial Sequence
  Description of Artificial Sequence: Synthetic oligonucleotide
  Sense strand starting at position 1841 of SEQ ID NO: 1884168
ugacucaagccuugauugu

SEQ ID NO: 2245447 - RNA, 19 nt, Artificial Sequence
  Description of Artificial Sequence: Synthetic oligonucleotide
  Antisense strand to SEQ ID NO: 2245446
acaaucaaggcuugaguca

SEQ ID NO: 2245448 - RNA, 19 nt, Artificial Sequence
  Description of Artificial Sequence: Synthetic oligonucleotide
  Sense strand starting at position 1842 of SEQ ID NO: 1884168
gacucaagccuugauuguu

SEQ ID NO: 2245449 - RNA, 19 nt, Artificial Sequence
  Description of Artificial Sequence: Synthetic oligonucleotide
  Antisense strand to SEQ ID NO: 2245448
aacaaucaaggcuugaguc

SEQ ID NO: 2245450 - RNA, 19 nt, Artificial Sequence
  Description of Artificial Sequence: Synthetic oligonucleotide
  Sense strand starting at position 2009 of SEQ ID NO: 1884168
gggccucuggguuaacaaa

SEQ ID NO: 2245451 - RNA, 19 nt, Artificial Sequence
  Description of Artificial Sequence: Synthetic oligonucleotide
  Antisense strand to SEQ ID NO: 2245450
uuuguuaacccagaggccc

SEQ ID NO: 2245452 - RNA, 19 nt, Artificial Sequence
  Description of Artificial Sequence: Synthetic oligonucleotide
  Sense strand starting at position 2712 of SEQ ID NO: 1884168
uuagauguugaguauauuc

SEQ ID NO: 2245453 - RNA, 19 nt, Artificial Sequence
  Description of Artificial Sequence: Synthetic oligonucleotide
  Antisense strand to SEQ ID NO: 2245452
gaauauacucaacaucuaa

SEQ ID NO: 2245454 - RNA, 19 nt, Artificial Sequence
  Description of Artificial Sequence: Synthetic oligonucleotide
  Sense strand starting at position 2751 of SEQ ID NO: 1884168
guuccaacaucugcaagaa

SEQ ID NO: 2245455 - RNA, 19 nt, Artificial Sequence
  Description of Artificial Sequence: Synthetic oligonucleotide
  Antisense strand to SEQ ID NO: 2245454
uucuugcagauguuggaac

SEQ ID NO: 2245456 - RNA, 19 nt, Artificial Sequence
  Description of Artificial Sequence: Synthetic oligonucleotide
  Sense strand starting at position 2826 of SEQ ID NO: 1884168
gcgucaucuuccucccaca

SEQ ID NO: 2245457 - RNA, 19 nt, Artificial Sequence
  Description of Artificial Sequence: Synthetic oligonucleotide
  Antisense strand to SEQ ID NO: 2245456
ugugggaggaagaugacgc

SEQ ID NO: 2245458 - RNA, 19 nt, Artificial Sequence
  Description of Artificial Sequence: Synthetic oligonucleotide
  Sense strand starting at position 2899 of SEQ ID NO: 1884168
gccuuuauggacugccaua

SEQ ID NO: 2245459 - RNA, 19 nt, Artificial Sequence
  Description of Artificial Sequence: Synthetic oligonucleotide
  Antisense strand to SEQ ID NO: 2245458
uauggcaguccauaaaggc

SEQ ID NO: 2245460 - RNA, 19 nt, Artificial Sequence
  Description of Artificial Sequence: Synthetic oligonucleotide
  Sense strand starting at position 3027 of SEQ ID NO: 1884168
uaggguuaggcucaauaua

SEQ ID NO: 2245461 - RNA, 19 nt, Artificial Sequence
  Description of Artificial Sequence: Synthetic oligonucleotide
  Antisense strand to SEQ ID NO: 2245460
uauauugagccuaacccua

SEQ ID NO: 2245462 - RNA, 19 nt, Artificial Sequence
  Description of Artificial Sequence: Synthetic oligonucleotide
  Sense strand starting at position 3041 of SEQ ID NO: 1884168
auauacaacuuggucagua

SEQ ID NO: 2245463 - RNA, 19 nt, Artificial Sequence
  Description of Artificial Sequence: Synthetic oligonucleotide
  Antisense strand to SEQ ID NO: 2245462
uacugaccaaguuguauau

SEQ ID NO: 2245464 - RNA, 19 nt, Artificial Sequence
  Description of Artificial Sequence: Synthetic oligonucleotide
  Sense strand starting at position 3046 of SEQ ID NO: 1884168
caacuuggucaguaaaggu

SEQ ID NO: 2245465 - RNA, 19 nt, Artificial Sequence
  Description of Artificial Sequence: Synthetic oligonucleotide
  Antisense strand to SEQ ID NO: 2245464
accuuuacugaccaaguug

SEQ ID NO: 2245466 - RNA, 19 nt, Artificial Sequence
  Description of Artificial Sequence: Synthetic oligonucleotide
  Sense strand starting at position 3212 of SEQ ID NO: 1884168
cuguuugaauguuuauuga

SEQ ID NO: 2245467 - RNA, 19 nt, Artificial Sequence
  Description of Artificial Sequence: Synthetic oligonucleotide
  Antisense strand to SEQ ID NO: 2245466
ucaauaaacauucaaacag

SEQ ID NO: 2245468 - RNA, 19 nt, Artificial Sequence
  Description of Artificial Sequence: Synthetic oligonucleotide
  Sense strand starting at position 3227 of SEQ ID NO: 1884168
uugagugcuucgccaguua

SEQ ID NO: 2245469 - RNA, 19 nt, Artificial Sequence
  Description of Artificial Sequence: Synthetic oligonucleotide
  Antisense strand to SEQ ID NO: 2245468
uaacuggcgaagcacucaa

SEQ ID NO: 2245470 - RNA, 19 nt, Artificial Sequence
  Description of Artificial Sequence: Synthetic oligonucleotide
  Sense strand starting at position 3230 of SEQ ID NO: 1884168
agugcuucgccaguuacca

SEQ ID NO: 2245471 - RNA, 19 nt, Artificial Sequence
  Description of Artificial Sequence: Synthetic oligonucleotide
  Antisense strand to SEQ ID NO: 2245470
ugguaacuggcgaagcacu

SEQ ID NO: 2245472 - RNA, 19 nt, Artificial Sequence
  Description of Artificial Sequence: Synthetic oligonucleotide
  Sense strand starting at position 3231 of SEQ ID NO: 1884168
gugcuucgccaguuaccau

SEQ ID NO: 2245473 - RNA, 19 nt, Artificial Sequence
  Description of Artificial Sequence: Synthetic oligonucleotide
  Antisense strand to SEQ ID NO: 2245472
augguaacuggcgaagcac

SEQ ID NO: 2245474 - RNA, 19 nt, Artificial Sequence
  Description of Artificial Sequence: Synthetic oligonucleotide
  Sense strand starting at position 3284 of SEQ ID NO: 1884168
augagacaguuacuaugau

SEQ ID NO: 2245475 - RNA, 19 nt, Artificial Sequence
  Description of Artificial Sequence: Synthetic oligonucleotide
  Antisense strand to SEQ ID NO: 2245474
aucauaguaacugucucau

SEQ ID NO: 2245476 - RNA, 19 nt, Artificial Sequence
  Description of Artificial Sequence: Synthetic oligonucleotide
  Sense strand starting at position 3317 of SEQ ID NO: 1884168
guauuagaguuacuauuag

SEQ ID NO: 2245477 - RNA, 19 nt, Artificial Sequence
  Description of Artificial Sequence: Synthetic oligonucleotide
  Antisense strand to SEQ ID NO: 2245476
cuaauaguaacucuaauac

SEQ ID NO: 2245478 - RNA, 19 nt, Artificial Sequence
  Description of Artificial Sequence: Synthetic oligonucleotide
  Sense strand starting at position 3321 of SEQ ID NO: 1884168
uagaguuacuauuagagua

SEQ ID NO: 2245479 - RNA, 19 nt, Artificial Sequence
  Description of Artificial Sequence: Synthetic oligonucleotide
  Antisense strand to SEQ ID NO: 2245478
uacucuaauaguaacucua

SEQ ID NO: 2245480 - RNA, 19 nt, Artificial Sequence
  Description of Artificial Sequence: Synthetic oligonucleotide
  Sense strand starting at position 3323 of SEQ ID NO: 1884168
gaguuacuauuagaguauu

SEQ ID NO: 2245481 - RNA, 19 nt, Artificial Sequence
  Description of Artificial Sequence: Synthetic oligonucleotide
  Antisense strand to SEQ ID NO: 2245480
aauacucuaauaguaacuc

SEQ ID NO: 2245482 - RNA, 19 nt, Artificial Sequence
  Description of Artificial Sequence: Synthetic oligonucleotide
  Sense strand starting at position 3329 of SEQ ID NO: 1884168
cuauuagaguauuagaguu

SEQ ID NO: 2245483 - RNA, 19 nt, Artificial Sequence
  Description of Artificial Sequence: Synthetic oligonucleotide
  Antisense strand to SEQ ID NO: 2245482
aacucuaauacucuaauag

SEQ ID NO: 2245484 - RNA, 19 nt, Artificial Sequence
  Description of Artificial Sequence: Synthetic oligonucleotide
  Sense strand starting at position 3354 of SEQ ID NO: 1884168
auuaguauuagagguuaag

SEQ ID NO: 2245485 - RNA, 19 nt, Artificial Sequence
  Description of Artificial Sequence: Synthetic oligonucleotide
  Antisense strand to SEQ ID NO: 2245484
cuuaaccucuaauacuaau

SEQ ID NO: 2245486 - RNA, 19 nt, Artificial Sequence
  Description of Artificial Sequence: Synthetic oligonucleotide
  Sense strand starting at position 3406 of SEQ ID NO: 1884168
uuugaauacccaggucuau

SEQ ID NO: 2245487 - RNA, 19 nt, Artificial Sequence
  Description of Artificial Sequence: Synthetic oligonucleotide
  Antisense strand to SEQ ID NO: 2245486
auagaccuggguauucaaa

SEQ ID NO: 2245488 - RNA, 19 nt, Artificial Sequence
  Description of Artificial Sequence: Synthetic oligonucleotide
  Sense strand starting at position 3527 of SEQ ID NO: 1884168
guccacaacucagaaggua

SEQ ID NO: 2245489 - RNA, 19 nt, Artificial Sequence
  Description of Artificial Sequence: Synthetic oligonucleotide
  Antisense strand to SEQ ID NO: 2245488
uaccuucugaguuguggac

SEQ ID NO: 2245490 - RNA, 19 nt, Artificial Sequence
  Description of Artificial Sequence: Synthetic oligonucleotide
  Sense strand starting at position 3571 of SEQ ID NO: 1884168
ccuguugcucucugcugaa

SEQ ID NO: 2245491 - RNA, 19 nt, Artificial Sequence
  Description of Artificial Sequence: Synthetic oligonucleotide
  Antisense strand to SEQ ID NO: 2245490
uucagcagagagcaacagg

SEQ ID NO: 2245492 - RNA, 19 nt, Artificial Sequence
  Description of Artificial Sequence: Synthetic oligonucleotide
  Sense strand starting at position 3744 of SEQ ID NO: 1884168
ggacuuugucaaggccaca

SEQ ID NO: 2245493 - RNA, 19 nt, Artificial Sequence
  Description of Artificial Sequence: Synthetic oligonucleotide
  Antisense strand to SEQ ID NO: 2245492
uguggccuugacaaagucc

SEQ ID NO: 2245494 - RNA, 19 nt, Artificial Sequence
  Description of Artificial Sequence: Synthetic oligonucleotide
  Sense strand starting at position 6 of SEQ ID NO: 1884169
ugucaaggaaaucgacaau

SEQ ID NO: 2245495 - RNA, 19 nt, Artificial Sequence
  Description of Artificial Sequence: Synthetic oligonucleotide
  Antisense strand to SEQ ID NO: 2245494
auugucgauuuccuugaca

SEQ ID NO: 2245496 - RNA, 19 nt, Artificial Sequence
  Description of Artificial Sequence: Synthetic oligonucleotide
  Sense strand starting at position 222 of SEQ ID NO: 1884169
agagcuguucaugagagug

SEQ ID NO: 2245497 - RNA, 19 nt, Artificial Sequence
  Description of Artificial Sequence: Synthetic oligonucleotide
  Antisense strand to SEQ ID NO: 2245496
cacucucaugaacagcucu

SEQ ID NO: 2245498 - RNA, 19 nt, Artificial Sequence
  Description of Artificial Sequence: Synthetic oligonucleotide
  Sense strand starting at position 227 of SEQ ID NO: 1884169
uguucaugagagugcagaa

SEQ ID NO: 2245499 - RNA, 19 nt, Artificial Sequence
  Description of Artificial Sequence: Synthetic oligonucleotide
  Antisense strand to SEQ ID NO: 2245498
uucugcacucucaugaaca

SEQ ID NO: 2245500 - RNA, 19 nt, Artificial Sequence
  Description of Artificial Sequence: Synthetic oligonucleotide
  Sense strand starting at position 259 of SEQ ID NO: 1884169
ggguuucugaccugagacu

SEQ ID NO: 2245501 - RNA, 19 nt, Artificial Sequence
  Description of Artificial Sequence: Synthetic oligonucleotide
  Antisense strand to SEQ ID NO: 2245500
agucucaggucagaaaccc

SEQ ID NO: 2245502 - RNA, 19 nt, Artificial Sequence
  Description of Artificial Sequence: Synthetic oligonucleotide
  Sense strand starting at position 305 of SEQ ID NO: 1884169
guuagcacccggucuguua

SEQ ID NO: 2245503 - RNA, 19 nt, Artificial Sequence
  Description of Artificial Sequence: Synthetic oligonucleotide
  Antisense strand to SEQ ID NO: 2245502
uaacagaccgggugcuaac

SEQ ID NO: 2245504 - RNA, 19 nt, Artificial Sequence
  Description of Artificial Sequence: Synthetic oligonucleotide
  Sense strand starting at position 316 of SEQ ID NO: 1884169
gucuguuaucaagggaaug

SEQ ID NO: 2245505 - RNA, 19 nt, Artificial Sequence
  Description of Artificial Sequence: Synthetic oligonucleotide
  Antisense strand to SEQ ID NO: 2245504
cauucccuugauaacagac

SEQ ID NO: 2245506 - RNA, 19 nt, Artificial Sequence
  Description of Artificial Sequence: Synthetic oligonucleotide
  Sense strand starting at position 317 of SEQ ID NO: 1884169
ucuguuaucaagggaauga

SEQ ID NO: 2245507 - RNA, 19 nt, Artificial Sequence
  Description of Artificial Sequence: Synthetic oligonucleotide
  Antisense strand to SEQ ID NO: 2245506
ucauucccuugauaacaga

SEQ ID NO: 2245508 - RNA, 19 nt, Artificial Sequence
  Description of Artificial Sequence: Synthetic oligonucleotide
  Sense strand starting at position 657 of SEQ ID NO: 1884169
agcaauucuuccuuuggaa

SEQ ID NO: 2245509 - RNA, 19 nt, Artificial Sequence
  Description of Artificial Sequence: Synthetic oligonucleotide
  Antisense strand to SEQ ID NO: 2245508
uuccaaaggaagaauugcu

SEQ ID NO: 2245510 - RNA, 19 nt, Artificial Sequence
  Description of Artificial Sequence: Synthetic oligonucleotide
  Sense strand starting at position 887 of SEQ ID NO: 1884169
gcaauagaagucuaucguu

SEQ ID NO: 2245511 - RNA, 19 nt, Artificial Sequence
  Description of Artificial Sequence: Synthetic oligonucleotide
  Antisense strand to SEQ ID NO: 2245510
aacgauagacuucuauugc

SEQ ID NO: 2245512 - RNA, 19 nt, Artificial Sequence
  Description of Artificial Sequence: Synthetic oligonucleotide
  Sense strand starting at position 921 of SEQ ID NO: 1884169
guacauuaacucuacaugu

SEQ ID NO: 2245513 - RNA, 19 nt, Artificial Sequence
  Description of Artificial Sequence: Synthetic oligonucleotide
  Antisense strand to SEQ ID NO: 2245512
acauguagaguuaauguac

SEQ ID NO: 2245514 - RNA, 19 nt, Artificial Sequence
  Description of Artificial Sequence: Synthetic oligonucleotide
  Sense strand starting at position 1467 of SEQ ID NO: 1884169
acacuugugcuuugggaga

SEQ ID NO: 2245515 - RNA, 19 nt, Artificial Sequence
  Description of Artificial Sequence: Synthetic oligonucleotide
  Antisense strand to SEQ ID NO: 2245514
ucucccaaagcacaagugu

SEQ ID NO: 2245516 - RNA, 19 nt, Artificial Sequence
  Description of Artificial Sequence: Synthetic oligonucleotide
  Sense strand starting at position 1472 of SEQ ID NO: 1884169
ugugcuuugggagaagauc

SEQ ID NO: 2245517 - RNA, 19 nt, Artificial Sequence
  Description of Artificial Sequence: Synthetic oligonucleotide
  Antisense strand to SEQ ID NO: 2245516
gaucuucucccaaagcaca

SEQ ID NO: 2245518 - RNA, 19 nt, Artificial Sequence
  Description of Artificial Sequence: Synthetic oligonucleotide
  Sense strand starting at position 1691 of SEQ ID NO: 1884169
cuacuaauucuguguauaa

SEQ ID NO: 2245519 - RNA, 19 nt, Artificial Sequence
  Description of Artificial Sequence: Synthetic oligonucleotide
  Antisense strand to SEQ ID NO: 2245518
uuauacacagaauuaguag

SEQ ID NO: 2245520 - RNA, 19 nt, Artificial Sequence
  Description of Artificial Sequence: Synthetic oligonucleotide
  Sense strand starting at position 1693 of SEQ ID NO: 1884169
acuaauucuguguauaagu

SEQ ID NO: 2245521 - RNA, 19 nt, Artificial Sequence
  Description of Artificial Sequence: Synthetic oligonucleotide
  Antisense strand to SEQ ID NO: 2245520
acuuauacacagaauuagu

SEQ ID NO: 2245522 - RNA, 19 nt, Artificial Sequence
  Description of Artificial Sequence: Synthetic oligonucleotide
  Sense strand starting at position 1760 of SEQ ID NO: 1884169
cucauagagccaggaaauu

SEQ ID NO: 2245523 - RNA, 19 nt, Artificial Sequence
  Description of Artificial Sequence: Synthetic oligonucleotide
  Antisense strand to SEQ ID NO: 2245522
aauuuccuggcucuaugag

SEQ ID NO: 2245524 - RNA, 19 nt, Artificial Sequence
  Description of Artificial Sequence: Synthetic oligonucleotide
  Sense strand starting at position 1854 of SEQ ID NO: 1884169
ggaaauauguccuaaauuu

SEQ ID NO: 2245525 - RNA, 19 nt, Artificial Sequence
  Description of Artificial Sequence: Synthetic oligonucleotide
  Antisense strand to SEQ ID NO: 2245524
aaauuuaggacauauuucc

SEQ ID NO: 2245526 - RNA, 19 nt, Artificial Sequence
  Description of Artificial Sequence: Synthetic oligonucleotide
  Sense strand starting at position 2031 of SEQ ID NO: 1884169
gccguagacagagauaagu

SEQ ID NO: 2245527 - RNA, 19 nt, Artificial Sequence
  Description of Artificial Sequence: Synthetic oligonucleotide
  Antisense strand to SEQ ID NO: 2245526
acuuaucucugucuacggc

SEQ ID NO: 2245528 - RNA, 19 nt, Artificial Sequence
  Description of Artificial Sequence: Synthetic oligonucleotide
  Sense strand starting at position 2291 of SEQ ID NO: 1884169
aaugucaugccaggauauu

SEQ ID NO: 2245529 - RNA, 19 nt, Artificial Sequence
  Description of Artificial Sequence: Synthetic oligonucleotide
  Antisense strand to SEQ ID NO: 2245528
aauauccuggcaugacauu

SEQ ID NO: 2245530 - RNA, 19 nt, Artificial Sequence
  Description of Artificial Sequence: Synthetic oligonucleotide
  Sense strand starting at position 2353 of SEQ ID NO: 1884169
agguauguuagagagguau

SEQ ID NO: 2245531 - RNA, 19 nt, Artificial Sequence
  Description of Artificial Sequence: Synthetic oligonucleotide
  Antisense strand to SEQ ID NO: 2245530
auaccucucuaacauaccu

SEQ ID NO: 2245532 - RNA, 19 nt, Artificial Sequence
  Description of Artificial Sequence: Synthetic oligonucleotide
  Sense strand starting at position 2357 of SEQ ID NO: 1884169
auguuagagagguauguaa

SEQ ID NO: 2245533 - RNA, 19 nt, Artificial Sequence
  Description of Artificial Sequence: Synthetic oligonucleotide
  Antisense strand to SEQ ID NO: 2245532
uuacauaccucucuaacau

SEQ ID NO: 2245534 - RNA, 19 nt, Artificial Sequence
  Description of Artificial Sequence: Synthetic oligonucleotide
  Sense strand starting at position 2399 of SEQ ID NO: 1884169
acucaucucccugagguuu

SEQ ID NO: 2245535 - RNA, 19 nt, Artificial Sequence
  Description of Artificial Sequence: Synthetic oligonucleotide
  Antisense strand to SEQ ID NO: 2245534
aaaccucagggagaugagu

SEQ ID NO: 2245536 - RNA, 19 nt, Artificial Sequence
  Description of Artificial Sequence: Synthetic oligonucleotide
  Sense strand starting at position 2669 of SEQ ID NO: 1884169
ggcccuacucucugaugaa

SEQ ID NO: 2245537 - RNA, 19 nt, Artificial Sequence
  Description of Artificial Sequence: Synthetic oligonucleotide
  Antisense strand to SEQ ID NO: 2245536
uucaucagagaguagggcc

SEQ ID NO: 2245538 - RNA, 19 nt, Artificial Sequence
  Description of Artificial Sequence: Synthetic oligonucleotide
  Sense strand starting at position 2681 of SEQ ID NO: 1884169
ugaugaaugcaugggcaga

SEQ ID NO: 2245539 - RNA, 19 nt, Artificial Sequence
  Description of Artificial Sequence: Synthetic oligonucleotide
  Antisense strand to SEQ ID NO: 2245538
ucugcccaugcauucauca

SEQ ID NO: 2245540 - RNA, 19 nt, Artificial Sequence
  Description of Artificial Sequence: Synthetic oligonucleotide
  Sense strand starting at position 2873 of SEQ ID NO: 1884169
cugagacucugagcacuuu

SEQ ID NO: 2245541 - RNA, 19 nt, Artificial Sequence
  Description of Artificial Sequence: Synthetic oligonucleotide
  Antisense strand to SEQ ID NO: 2245540
aaagugcucagagucucag

SEQ ID NO: 2245542 - RNA, 19 nt, Artificial Sequence
  Description of Artificial Sequence: Synthetic oligonucleotide
  Sense strand starting at position 3095 of SEQ ID NO: 1884169
ugcuguaaaccuugggaaa

SEQ ID NO: 2245543 - RNA, 19 nt, Artificial Sequence
  Description of Artificial Sequence: Synthetic oligonucleotide
  Antisense strand to SEQ ID NO: 2245542
uuucccaagguuuacagca

SEQ ID NO: 2245544 - RNA, 19 nt, Artificial Sequence
  Description of Artificial Sequence: Synthetic oligonucleotide
  Sense strand starting at position 3096 of SEQ ID NO: 1884169
gcuguaaaccuugggaaag

SEQ ID NO: 2245545 - RNA, 19 nt, Artificial Sequence
  Description of Artificial Sequence: Synthetic oligonucleotide
  Antisense strand to SEQ ID NO: 2245544
cuuucccaagguuuacagc

SEQ ID NO: 2245546 - RNA, 19 nt, Artificial Sequence
  Description of Artificial Sequence: Synthetic oligonucleotide
  Sense strand starting at position 3205 of SEQ ID NO: 1884169
cucaguucuccgcaggaac

SEQ ID NO: 2245547 - RNA, 19 nt, Artificial Sequence
  Description of Artificial Sequence: Synthetic oligonucleotide
  Antisense strand to SEQ ID NO: 2245546
guuccugcggagaacugag

SEQ ID NO: 2245548 - RNA, 19 nt, Artificial Sequence
  Description of Artificial Sequence: Synthetic oligonucleotide
  Sense strand starting at position 3266 of SEQ ID NO: 1884169
aaacuuagucuugaguuga

SEQ ID NO: 2245549 - RNA, 19 nt, Artificial Sequence
  Description of Artificial Sequence: Synthetic oligonucleotide
  Antisense strand to SEQ ID NO: 2245548
ucaacucaagacuaaguuu

SEQ ID NO: 2245550 - RNA, 19 nt, Artificial Sequence
  Description of Artificial Sequence: Synthetic oligonucleotide
  Sense strand starting at position 3276 of SEQ ID NO: 1884169
uugaguugaagugaucuga

SEQ ID NO: 2245551 - RNA, 19 nt, Artificial Sequence
  Description of Artificial Sequence: Synthetic oligonucleotide
  Antisense strand to SEQ ID NO: 2245550
ucagaucacuucaacucaa

SEQ ID NO: 2245552 - RNA, 19 nt, Artificial Sequence
  Description of Artificial Sequence: Synthetic oligonucleotide
  Sense strand starting at position 3371 of SEQ ID NO: 1884169
agggaaaugucacugugga

SEQ ID NO: 2245553 - RNA, 19 nt, Artificial Sequence
  Description of Artificial Sequence: Synthetic oligonucleotide
  Antisense strand to SEQ ID NO: 2245552
uccacagugacauuucccu

SEQ ID NO: 2245554 - RNA, 19 nt, Artificial Sequence
  Description of Artificial Sequence: Synthetic oligonucleotide
  Sense strand starting at position 3372 of SEQ ID NO: 1884169
gggaaaugucacuguggau

SEQ ID NO: 2245555 - RNA, 19 nt, Artificial Sequence
  Description of Artificial Sequence: Synthetic oligonucleotide
  Antisense strand to SEQ ID NO: 2245554
auccacagugacauuuccc

SEQ ID NO: 2245556 - RNA, 19 nt, Artificial Sequence
  Description of Artificial Sequence: Synthetic oligonucleotide
  Sense strand starting at position 3378 of SEQ ID NO: 1884169
ugucacuguggaugacauu

SEQ ID NO: 2245557 - RNA, 19 nt, Artificial Sequence
  Description of Artificial Sequence: Synthetic oligonucleotide
  Antisense strand to SEQ ID NO: 2245556
aaugucauccacagugaca

SEQ ID NO: 2245558 - RNA, 19 nt, Artificial Sequence
  Description of Artificial Sequence: Synthetic oligonucleotide
  Sense strand starting at position 3379 of SEQ ID NO: 1884169
gucacuguggaugacauua

SEQ ID NO: 2245559 - RNA, 19 nt, Artificial Sequence
  Description of Artificial Sequence: Synthetic oligonucleotide
  Antisense strand to SEQ ID NO: 2245558
uaaugucauccacagugac

SEQ ID NO: 2245560 - RNA, 19 nt, Artificial Sequence
  Description of Artificial Sequence: Synthetic oligonucleotide
  Sense strand starting at position 3464 of SEQ ID NO: 1884169
aaacguuuccuuggacuga

SEQ ID NO: 2245561 - RNA, 19 nt, Artificial Sequence
  Description of Artificial Sequence: Synthetic oligonucleotide
  Antisense strand to SEQ ID NO: 2245560
ucaguccaaggaaacguuu

SEQ ID NO: 2245562 - RNA, 19 nt, Artificial Sequence
  Description of Artificial Sequence: Synthetic oligonucleotide
  Sense strand starting at position 3468 of SEQ ID NO: 1884169
guuuccuuggacugaauaa

SEQ ID NO: 2245563 - RNA, 19 nt, Artificial Sequence
  Description of Artificial Sequence: Synthetic oligonucleotide
  Antisense strand to SEQ ID NO: 2245562
uuauucaguccaaggaaac

SEQ ID NO: 2245564 - RNA, 19 nt, Artificial Sequence
  Description of Artificial Sequence: Synthetic oligonucleotide
  Sense strand starting at position 3490 of SEQ ID NO: 1884169
agaugauguuaaucucauu

SEQ ID NO: 2245565 - RNA, 19 nt, Artificial Sequence
  Description of Artificial Sequence: Synthetic oligonucleotide
  Antisense strand to SEQ ID NO: 2245564
aaugagauuaacaucaucu

SEQ ID NO: 2245566 - RNA, 19 nt, Artificial Sequence
  Description of Artificial Sequence: Synthetic oligonucleotide
  Sense strand starting at position 3509 of SEQ ID NO: 1884169
cggguuucucgagagacac

SEQ ID NO: 2245567 - RNA, 19 nt, Artificial Sequence
  Description of Artificial Sequence: Synthetic oligonucleotide
  Antisense strand to SEQ ID NO: 2245566
gugucucucgagaaacccg

SEQ ID NO: 2245568 - RNA, 19 nt, Artificial Sequence
  Description of Artificial Sequence: Synthetic oligonucleotide
  Sense strand starting at position 3715 of SEQ ID NO: 1884169
gagcaagaacaaugcugaa

SEQ ID NO: 2245569 - RNA, 19 nt, Artificial Sequence
  Description of Artificial Sequence: Synthetic oligonucleotide
  Antisense strand to SEQ ID NO: 2245568
uucagcauuguucuugcuc

SEQ ID NO: 2245570 - RNA, 19 nt, Artificial Sequence
  Description of Artificial Sequence: Synthetic oligonucleotide
  Sense strand starting at position 3906 of SEQ ID NO: 1884169
cugauauggugagucaaag

SEQ ID NO: 2245571 - RNA, 19 nt, Artificial Sequence
  Description of Artificial Sequence: Synthetic oligonucleotide
  Antisense strand to SEQ ID NO: 2245570
cuuugacucaccauaucag

SEQ ID NO: 2245572 - RNA, 19 nt, Artificial Sequence
  Description of Artificial Sequence: Synthetic oligonucleotide
  Sense strand starting at position 3935 of SEQ ID NO: 1884169
guggguuacggagaaccau

SEQ ID NO: 2245573 - RNA, 19 nt, Artificial Sequence
  Description of Artificial Sequence: Synthetic oligonucleotide
  Antisense strand to SEQ ID NO: 2245572
augguucuccguaacccac

SEQ ID NO: 2245574 - RNA, 19 nt, Artificial Sequence
  Description of Artificial Sequence: Synthetic oligonucleotide
  Sense strand starting at position 32 of SEQ ID NO: 1884170
aggugauggacacguuuau

SEQ ID NO: 2245575 - RNA, 19 nt, Artificial Sequence
  Description of Artificial Sequence: Synthetic oligonucleotide
  Antisense strand to SEQ ID NO: 2245574
auaaacguguccaucaccu

SEQ ID NO: 2245576 - RNA, 19 nt, Artificial Sequence
  Description of Artificial Sequence: Synthetic oligonucleotide
  Sense strand starting at position 41 of SEQ ID NO: 1884170
acacguuuaucaccuggau

SEQ ID NO: 2245577 - RNA, 19 nt, Artificial Sequence
  Description of Artificial Sequence: Synthetic oligonucleotide
  Antisense strand to SEQ ID NO: 2245576
auccaggugauaaacgugu

SEQ ID NO: 2245578 - RNA, 19 nt, Artificial Sequence
  Description of Artificial Sequence: Synthetic oligonucleotide
  Sense strand starting at position 43 of SEQ ID NO: 1884170
acguuuaucaccuggauug

SEQ ID NO: 2245579 - RNA, 19 nt, Artificial Sequence
  Description of Artificial Sequence: Synthetic oligonucleotide
  Antisense strand to SEQ ID NO: 2245578
caauccaggugauaaacgu

SEQ ID NO: 2245580 - RNA, 19 nt, Artificial Sequence
  Description of Artificial Sequence: Synthetic oligonucleotide
  Sense strand starting at position 57 of SEQ ID NO: 1884170
gauuguggagaugguaaau

SEQ ID NO: 2245581 - RNA, 19 nt, Artificial Sequence
  Description of Artificial Sequence: Synthetic oligonucleotide
  Antisense strand to SEQ ID NO: 2245580
auuuaccaucuccacaauc

SEQ ID NO: 2245582 - RNA, 19 nt, Artificial Sequence
  Description of Artificial Sequence: Synthetic oligonucleotide
  Sense strand starting at position 109 of SEQ ID NO: 1884170
gagccauaugagugaaugu

SEQ ID NO: 2245583 - RNA, 19 nt, Artificial Sequence
  Description of Artificial Sequence: Synthetic oligonucleotide
  Antisense strand to SEQ ID NO: 2245582
acauucacucauauggcuc

SEQ ID NO: 2245584 - RNA, 19 nt, Artificial Sequence
  Description of Artificial Sequence: Synthetic oligonucleotide
  Sense strand starting at position 110 of SEQ ID NO: 1884170
agccauaugagugaauguu

SEQ ID NO: 2245585 - RNA, 19 nt, Artificial Sequence
  Description of Artificial Sequence: Synthetic oligonucleotide
  Antisense strand to SEQ ID NO: 2245584
aacauucacucauauggcu

SEQ ID NO: 2245586 - RNA, 19 nt, Artificial Sequence
  Description of Artificial Sequence: Synthetic oligonucleotide
  Sense strand starting at position 118 of SEQ ID NO: 1884170
gagugaauguuucucacuu

SEQ ID NO: 2245587 - RNA, 19 nt, Artificial Sequence
  Description of Artificial Sequence: Synthetic oligonucleotide
  Antisense strand to SEQ ID NO: 2245586
aagugagaaacauucacuc

SEQ ID NO: 2245588 - RNA, 19 nt, Artificial Sequence
  Description of Artificial Sequence: Synthetic oligonucleotide
  Sense strand starting at position 119 of SEQ ID NO: 1884170
agugaauguuucucacuuu

SEQ ID NO: 2245589 - RNA, 19 nt, Artificial Sequence
  Description of Artificial Sequence: Synthetic oligonucleotide
  Antisense strand to SEQ ID NO: 2245588
aaagugagaaacauucacu

SEQ ID NO: 2245590 - RNA, 19 nt, Artificial Sequence
  Description of Artificial Sequence: Synthetic oligonucleotide
  Sense strand starting at position 122 of SEQ ID NO: 1884170
gaauguuucucacuuugug

SEQ ID NO: 2245591 - RNA, 19 nt, Artificial Sequence
  Description of Artificial Sequence: Synthetic oligonucleotide
  Antisense strand to SEQ ID NO: 2245590
cacaaagugagaaacauuc

SEQ ID NO: 2245592 - RNA, 19 nt, Artificial Sequence
  Description of Artificial Sequence: Synthetic oligonucleotide
  Sense strand starting at position 292 of SEQ ID NO: 1884170
cauugauuauaugcagguu

SEQ ID NO: 2245593 - RNA, 19 nt, Artificial Sequence
  Description of Artificial Sequence: Synthetic oligonucleotide
  Antisense strand to SEQ ID NO: 2245592
aaccugcauauaaucaaug

SEQ ID NO: 2245594 - RNA, 19 nt, Artificial Sequence
  Description of Artificial Sequence: Synthetic oligonucleotide
  Sense strand starting at position 359 of SEQ ID NO: 1884170
ucaagagaugaccgcugau

SEQ ID NO: 2245595 - RNA, 19 nt, Artificial Sequence
  Description of Artificial Sequence: Synthetic oligonucleotide
  Antisense strand to SEQ ID NO: 2245594
aucagcggucaucucuuga

SEQ ID NO: 2245596 - RNA, 19 nt, Artificial Sequence
  Description of Artificial Sequence: Synthetic oligonucleotide
  Sense strand starting at position 579 of SEQ ID NO: 1884170
acuugcagaguuugaugua

SEQ ID NO: 2245597 - RNA, 19 nt, Artificial Sequence
  Description of Artificial Sequence: Synthetic oligonucleotide
  Antisense strand to SEQ ID NO: 2245596
uacaucaaacucugcaagu

SEQ ID NO: 2245598 - RNA, 19 nt, Artificial Sequence
  Description of Artificial Sequence: Synthetic oligonucleotide
  Sense strand starting at position 594 of SEQ ID NO: 1884170
uguagcaucaaagggaaua

SEQ ID NO: 2245599 - RNA, 19 nt, Artificial Sequence
  Description of Artificial Sequence: Synthetic oligonucleotide
  Antisense strand to SEQ ID NO: 2245598
uauucccuuugaugcuaca

SEQ ID NO: 2245600 - RNA, 19 nt, Artificial Sequence
  Description of Artificial Sequence: Synthetic oligonucleotide
  Sense strand starting at position 595 of SEQ ID NO: 1884170
guagcaucaaagggaauau

SEQ ID NO: 2245601 - RNA, 19 nt, Artificial Sequence
  Description of Artificial Sequence: Synthetic oligonucleotide
  Antisense strand to SEQ ID NO: 2245600
auauucccuuugaugcuac

SEQ ID NO: 2245602 - RNA, 19 nt, Artificial Sequence
  Description of Artificial Sequence: Synthetic oligonucleotide
  Sense strand starting at position 660 of SEQ ID NO: 1884170
uacagaugugccugagguu

SEQ ID NO: 2245603 - RNA, 19 nt, Artificial Sequence
  Description of Artificial Sequence: Synthetic oligonucleotide
  Antisense strand to SEQ ID NO: 2245602
aaccucaggcacaucugua

SEQ ID NO: 2245604 - RNA, 19 nt, Artificial Sequence
  Description of Artificial Sequence: Synthetic oligonucleotide
  Sense strand starting at position 1282 of SEQ ID NO: 1884170
aagcaaaggucuuugaggu

SEQ ID NO: 2245605 - RNA, 19 nt, Artificial Sequence
  Description of Artificial Sequence: Synthetic oligonucleotide
  Antisense strand to SEQ ID NO: 2245604
accucaaagaccuuugcuu

SEQ ID NO: 2245606 - RNA, 19 nt, Artificial Sequence
  Description of Artificial Sequence: Synthetic oligonucleotide
  Sense strand starting at position 1292 of SEQ ID NO: 1884170
cuuugagguccuuaauaau

SEQ ID NO: 2245607 - RNA, 19 nt, Artificial Sequence
  Description of Artificial Sequence: Synthetic oligonucleotide
  Antisense strand to SEQ ID NO: 2245606
auuauuaaggaccucaaag

SEQ ID NO: 2245608 - RNA, 19 nt, Artificial Sequence
  Description of Artificial Sequence: Synthetic oligonucleotide
  Sense strand starting at position 1298 of SEQ ID NO: 1884170
gguccuuaauaauuguuaa

SEQ ID NO: 2245609 - RNA, 19 nt, Artificial Sequence
  Description of Artificial Sequence: Synthetic oligonucleotide
  Antisense strand to SEQ ID NO: 2245608
uuaacaauuauuaaggacc

SEQ ID NO: 2245610 - RNA, 19 nt, Artificial Sequence
  Description of Artificial Sequence: Synthetic oligonucleotide
  Sense strand starting at position 1301 of SEQ ID NO: 1884170
ccuuaauaauuguuaagag

SEQ ID NO: 2245611 - RNA, 19 nt, Artificial Sequence
  Description of Artificial Sequence: Synthetic oligonucleotide
  Antisense strand to SEQ ID NO: 2245610
cucuuaacaauuauuaagg

SEQ ID NO: 2245612 - RNA, 19 nt, Artificial Sequence
  Description of Artificial Sequence: Synthetic oligonucleotide
  Sense strand starting at position 1308 of SEQ ID NO: 1884170
aauuguuaagagcgugaag

SEQ ID NO: 2245613 - RNA, 19 nt, Artificial Sequence
  Description of Artificial Sequence: Synthetic oligonucleotide
  Antisense strand to SEQ ID NO: 2245612
cuucacgcucuuaacaauu

SEQ ID NO: 2245614 - RNA, 19 nt, Artificial Sequence
  Description of Artificial Sequence: Synthetic oligonucleotide
  Sense strand starting at position 1413 of SEQ ID NO: 1884170
uuaccuuauucuuugaguu

SEQ ID NO: 2245615 - RNA, 19 nt, Artificial Sequence
  Description of Artificial Sequence: Synthetic oligonucleotide
  Antisense strand to SEQ ID NO: 2245614
aacucaaagaauaagguaa

SEQ ID NO: 2245616 - RNA, 19 nt, Artificial Sequence
  Description of Artificial Sequence: Synthetic oligonucleotide
  Sense strand starting at position 1425 of SEQ ID NO: 1884170
uugaguuccuguuugaaca

SEQ ID NO: 2245617 - RNA, 19 nt, Artificial Sequence
  Description of Artificial Sequence: Synthetic oligonucleotide
  Antisense strand to SEQ ID NO: 2245616
uguucaaacaggaacucaa

SEQ ID NO: 2245618 - RNA, 19 nt, Artificial Sequence
  Description of Artificial Sequence: Synthetic oligonucleotide
  Sense strand starting at position 1426 of SEQ ID NO: 1884170
ugaguuccuguuugaacaa

SEQ ID NO: 2245619 - RNA, 19 nt, Artificial Sequence
  Description of Artificial Sequence: Synthetic oligonucleotide
  Antisense strand to SEQ ID NO: 2245618
uuguucaaacaggaacuca

SEQ ID NO: 2245620 - RNA, 19 nt, Artificial Sequence
  Description of Artificial Sequence: Synthetic oligonucleotide
  Sense strand starting at position 1474 of SEQ ID NO: 1884170
caaugucuggccuagagca

SEQ ID NO: 2245621 - RNA, 19 nt, Artificial Sequence
  Description of Artificial Sequence: Synthetic oligonucleotide
  Antisense strand to SEQ ID NO: 2245620
ugcucuaggccagacauug

SEQ ID NO: 2245622 - RNA, 19 nt, Artificial Sequence
  Description of Artificial Sequence: Synthetic oligonucleotide
  Sense strand starting at position 1525 of SEQ ID NO: 1884170
agggccuuaugagcagaau

SEQ ID NO: 2245623 - RNA, 19 nt, Artificial Sequence
  Description of Artificial Sequence: Synthetic oligonucleotide
  Antisense strand to SEQ ID NO: 2245622
auucugcucauaaggcccu

SEQ ID NO: 2245624 - RNA, 19 nt, Artificial Sequence
  Description of Artificial Sequence: Synthetic oligonucleotide
  Sense strand starting at position 1526 of SEQ ID NO: 1884170
gggccuuaugagcagaaua

SEQ ID NO: 2245625 - RNA, 19 nt, Artificial Sequence
  Description of Artificial Sequence: Synthetic oligonucleotide
  Antisense strand to SEQ ID NO: 2245624
uauucugcucauaaggccc

SEQ ID NO: 2245626 - RNA, 19 nt, Artificial Sequence
  Description of Artificial Sequence: Synthetic oligonucleotide
  Sense strand starting at position 1528 of SEQ ID NO: 1884170
gccuuaugagcagaauauu

SEQ ID NO: 2245627 - RNA, 19 nt, Artificial Sequence
  Description of Artificial Sequence: Synthetic oligonucleotide
  Antisense strand to SEQ ID NO: 2245626
aauauucugcucauaaggc

SEQ ID NO: 2245628 - RNA, 19 nt, Artificial Sequence
  Description of Artificial Sequence: Synthetic oligonucleotide
  Sense strand starting at position 1559 of SEQ ID NO: 1884170
cgggugugagguuagaaga

SEQ ID NO: 2245629 - RNA, 19 nt, Artificial Sequence
  Description of Artificial Sequence: Synthetic oligonucleotide
  Antisense strand to SEQ ID NO: 2245628
ucuucuaaccucacacccg

SEQ ID NO: 2245630 - RNA, 19 nt, Artificial Sequence
  Description of Artificial Sequence: Synthetic oligonucleotide
  Sense strand starting at position 1637 of SEQ ID NO: 1884170
uugagauucuggucucaaa

SEQ ID NO: 2245631 - RNA, 19 nt, Artificial Sequence
  Description of Artificial Sequence: Synthetic oligonucleotide
  Antisense strand to SEQ ID NO: 2245630
uuugagaccagaaucucaa

SEQ ID NO: 2245632 - RNA, 19 nt, Artificial Sequence
  Description of Artificial Sequence: Synthetic oligonucleotide
  Sense strand starting at position 2210 of SEQ ID NO: 1884170
uuaagagauguguggccaa

SEQ ID NO: 2245633 - RNA, 19 nt, Artificial Sequence
  Description of Artificial Sequence: Synthetic oligonucleotide
  Antisense strand to SEQ ID NO: 2245632
uuggccacacaucucuuaa

SEQ ID NO: 2245634 - RNA, 19 nt, Artificial Sequence
  Description of Artificial Sequence: Synthetic oligonucleotide
  Sense strand starting at position 2222 of SEQ ID NO: 1884170
uggccaagagcucacaaau

SEQ ID NO: 2245635 - RNA, 19 nt, Artificial Sequence
  Description of Artificial Sequence: Synthetic oligonucleotide
  Antisense strand to SEQ ID NO: 2245634
auuugugagcucuuggcca

SEQ ID NO: 2245636 - RNA, 19 nt, Artificial Sequence
  Description of Artificial Sequence: Synthetic oligonucleotide
  Sense strand starting at position 2233 of SEQ ID NO: 1884170
ucacaaauacagugucuaa

SEQ ID NO: 2245637 - RNA, 19 nt, Artificial Sequence
  Description of Artificial Sequence: Synthetic oligonucleotide
  Antisense strand to SEQ ID NO: 2245636
uuagacacuguauuuguga

SEQ ID NO: 2245638 - RNA, 19 nt, Artificial Sequence
  Description of Artificial Sequence: Synthetic oligonucleotide
  Sense strand starting at position 2268 of SEQ ID NO: 1884170
uggagacuuugcccuugaa

SEQ ID NO: 2245639 - RNA, 19 nt, Artificial Sequence
  Description of Artificial Sequence: Synthetic oligonucleotide
  Antisense strand to SEQ ID NO: 2245638
uucaagggcaaagucucca

SEQ ID NO: 2245640 - RNA, 19 nt, Artificial Sequence
  Description of Artificial Sequence: Synthetic oligonucleotide
  Sense strand starting at position 2271 of SEQ ID NO: 1884170
agacuuugcccuugaaucu

SEQ ID NO: 2245641 - RNA, 19 nt, Artificial Sequence
  Description of Artificial Sequence: Synthetic oligonucleotide
  Antisense strand to SEQ ID NO: 2245640
agauucaagggcaaagucu

SEQ ID NO: 2245642 - RNA, 19 nt, Artificial Sequence
  Description of Artificial Sequence: Synthetic oligonucleotide
  Sense strand starting at position 2785 of SEQ ID NO: 1884170
augcuauuacgcuacuauu

SEQ ID NO: 2245643 - RNA, 19 nt, Artificial Sequence
  Description of Artificial Sequence: Synthetic oligonucleotide
  Antisense strand to SEQ ID NO: 2245642
aauaguagcguaauagcau

SEQ ID NO: 2245644 - RNA, 19 nt, Artificial Sequence
  Description of Artificial Sequence: Synthetic oligonucleotide
  Sense strand starting at position 2828 of SEQ ID NO: 1884170
ucuauuaguuucucuugga

SEQ ID NO: 2245645 - RNA, 19 nt, Artificial Sequence
  Description of Artificial Sequence: Synthetic oligonucleotide
  Antisense strand to SEQ ID NO: 2245644
uccaagagaaacuaauaga

SEQ ID NO: 2245646 - RNA, 19 nt, Artificial Sequence
  Description of Artificial Sequence: Synthetic oligonucleotide
  Sense strand starting at position 2829 of SEQ ID NO: 1884170
cuauuaguuucucuuggag

SEQ ID NO: 2245647 - RNA, 19 nt, Artificial Sequence
  Description of Artificial Sequence: Synthetic oligonucleotide
  Antisense strand to SEQ ID NO: 2245646
cuccaagagaaacuaauag

SEQ ID NO: 2245648 - RNA, 19 nt, Artificial Sequence
  Description of Artificial Sequence: Synthetic oligonucleotide
  Sense strand starting at position 2832 of SEQ ID NO: 1884170
uuaguuucucuuggagcaa

SEQ ID NO: 2245649 - RNA, 19 nt, Artificial Sequence
  Description of Artificial Sequence: Synthetic oligonucleotide
  Antisense strand to SEQ ID NO: 2245648
uugcuccaagagaaacuaa

SEQ ID NO: 2245650 - RNA, 19 nt, Artificial Sequence
  Description of Artificial Sequence: Synthetic oligonucleotide
  Sense strand starting at position 2871 of SEQ ID NO: 1884170
uuguauugaugcccuauau

SEQ ID NO: 2245651 - RNA, 19 nt, Artificial Sequence
  Description of Artificial Sequence: Synthetic oligonucleotide
  Antisense strand to SEQ ID NO: 2245650
auauagggcaucaauacaa

SEQ ID NO: 2245652 - RNA, 19 nt, Artificial Sequence
  Description of Artificial Sequence: Synthetic oligonucleotide
  Sense strand starting at position 3723 of SEQ ID NO: 1884170
aguuuaggauguuucuagu

SEQ ID NO: 2245653 - RNA, 19 nt, Artificial Sequence
  Description of Artificial Sequence: Synthetic oligonucleotide
  Antisense strand to SEQ ID NO: 2245652
acuagaaacauccuaaacu

SEQ ID NO: 2245654 - RNA, 19 nt, Artificial Sequence
  Description of Artificial Sequence: Synthetic oligonucleotide
  Sense strand starting at position 9 of SEQ ID NO: 1884171
ggaagcaugucccuaugaa

SEQ ID NO: 2245655 - RNA, 19 nt, Artificial Sequence
  Description of Artificial Sequence: Synthetic oligonucleotide
  Antisense strand to SEQ ID NO: 2245654
uucauagggacaugcuucc

SEQ ID NO: 2245656 - RNA, 19 nt, Artificial Sequence
  Description of Artificial Sequence: Synthetic oligonucleotide
  Sense strand starting at position 10 of SEQ ID NO: 1884171
gaagcaugucccuaugaau

SEQ ID NO: 2245657 - RNA, 19 nt, Artificial Sequence
  Description of Artificial Sequence: Synthetic oligonucleotide
  Antisense strand to SEQ ID NO: 2245656
auucauagggacaugcuuc

SEQ ID NO: 2245658 - RNA, 19 nt, Artificial Sequence
  Description of Artificial Sequence: Synthetic oligonucleotide
  Sense strand starting at position 176 of SEQ ID NO: 1884171
ggcuuucccgaacaaggau

SEQ ID NO: 2245659 - RNA, 19 nt, Artificial Sequence
  Description of Artificial Sequence: Synthetic oligonucleotide
  Antisense strand to SEQ ID NO: 2245658
auccuuguucgggaaagcc

SEQ ID NO: 2245660 - RNA, 19 nt, Artificial Sequence
  Description of Artificial Sequence: Synthetic oligonucleotide
  Sense strand starting at position 292 of SEQ ID NO: 1884171
cucagauuccugcacccga

SEQ ID NO: 2245661 - RNA, 19 nt, Artificial Sequence
  Description of Artificial Sequence: Synthetic oligonucleotide
  Antisense strand to SEQ ID NO: 2245660
ucgggugcaggaaucugag

SEQ ID NO: 2245662 - RNA, 19 nt, Artificial Sequence
  Description of Artificial Sequence: Synthetic oligonucleotide
  Sense strand starting at position 364 of SEQ ID NO: 1884171
cucgaaugguguucuagau

SEQ ID NO: 2245663 - RNA, 19 nt, Artificial Sequence
  Description of Artificial Sequence: Synthetic oligonucleotide
  Antisense strand to SEQ ID NO: 2245662
aucuagaacaccauucgag

SEQ ID NO: 2245664 - RNA, 19 nt, Artificial Sequence
  Description of Artificial Sequence: Synthetic oligonucleotide
  Sense strand starting at position 368 of SEQ ID NO: 1884171
aaugguguucuagauuguu

SEQ ID NO: 2245665 - RNA, 19 nt, Artificial Sequence
  Description of Artificial Sequence: Synthetic oligonucleotide
  Antisense strand to SEQ ID NO: 2245664
aacaaucuagaacaccauu

SEQ ID NO: 2245666 - RNA, 19 nt, Artificial Sequence
  Description of Artificial Sequence: Synthetic oligonucleotide
  Sense strand starting at position 410 of SEQ ID NO: 1884171
ggugcuucucacgacucau

SEQ ID NO: 2245667 - RNA, 19 nt, Artificial Sequence
  Description of Artificial Sequence: Synthetic oligonucleotide
  Antisense strand to SEQ ID NO: 2245666
augagucgugagaagcacc

SEQ ID NO: 2245668 - RNA, 19 nt, Artificial Sequence
  Description of Artificial Sequence: Synthetic oligonucleotide
  Sense strand starting at position 577 of SEQ ID NO: 1884171
uccugugagaccugcagaa

SEQ ID NO: 2245669 - RNA, 19 nt, Artificial Sequence
  Description of Artificial Sequence: Synthetic oligonucleotide
  Antisense strand to SEQ ID NO: 2245668
uucugcaggucucacagga

SEQ ID NO: 2245670 - RNA, 19 nt, Artificial Sequence
  Description of Artificial Sequence: Synthetic oligonucleotide
  Sense strand starting at position 1040 of SEQ ID NO: 1884171
uccugcaacccugagaagu

SEQ ID NO: 2245671 - RNA, 19 nt, Artificial Sequence
  Description of Artificial Sequence: Synthetic oligonucleotide
  Antisense strand to SEQ ID NO: 2245670
acuucucaggguugcagga

SEQ ID NO: 2245672 - RNA, 19 nt, Artificial Sequence
  Description of Artificial Sequence: Synthetic oligonucleotide
  Sense strand starting at position 1050 of SEQ ID NO: 1884171
cugagaaguuugcucuuug

SEQ ID NO: 2245673 - RNA, 19 nt, Artificial Sequence
  Description of Artificial Sequence: Synthetic oligonucleotide
  Antisense strand to SEQ ID NO: 2245672
caaagagcaaacuucucag

SEQ ID NO: 2245674 - RNA, 19 nt, Artificial Sequence
  Description of Artificial Sequence: Synthetic oligonucleotide
  Sense strand starting at position 1179 of SEQ ID NO: 1884171
cgaggugaccuucaagucu

SEQ ID NO: 2245675 - RNA, 19 nt, Artificial Sequence
  Description of Artificial Sequence: Synthetic oligonucleotide
  Antisense strand to SEQ ID NO: 2245674
agacuugaaggucaccucg

SEQ ID NO: 2245676 - RNA, 19 nt, Artificial Sequence
  Description of Artificial Sequence: Synthetic oligonucleotide
  Sense strand starting at position 1262 of SEQ ID NO: 1884171
ucugaauugccagacuuag

SEQ ID NO: 2245677 - RNA, 19 nt, Artificial Sequence
  Description of Artificial Sequence: Synthetic oligonucleotide
  Antisense strand to SEQ ID NO: 2245676
cuaagucuggcaauucaga

SEQ ID NO: 2245678 - RNA, 19 nt, Artificial Sequence
  Description of Artificial Sequence: Synthetic oligonucleotide
  Sense strand starting at position 1668 of SEQ ID NO: 1884171
agcuaaacugguuaucaca

SEQ ID NO: 2245679 - RNA, 19 nt, Artificial Sequence
  Description of Artificial Sequence: Synthetic oligonucleotide
  Antisense strand to SEQ ID NO: 2245678
ugugauaaccaguuuagcu

SEQ ID NO: 2245680 - RNA, 19 nt, Artificial Sequence
  Description of Artificial Sequence: Synthetic oligonucleotide
  Sense strand starting at position 1688 of SEQ ID NO: 1884171
cugaacugauaguuucuga

SEQ ID NO: 2245681 - RNA, 19 nt, Artificial Sequence
  Description of Artificial Sequence: Synthetic oligonucleotide
  Antisense strand to SEQ ID NO: 2245680
ucagaaacuaucaguucag

SEQ ID NO: 2245682 - RNA, 19 nt, Artificial Sequence
  Description of Artificial Sequence: Synthetic oligonucleotide
  Sense strand starting at position 1930 of SEQ ID NO: 1884171
gaagcaaggucucucaguu

SEQ ID NO: 2245683 - RNA, 19 nt, Artificial Sequence
  Description of Artificial Sequence: Synthetic oligonucleotide
  Antisense strand to SEQ ID NO: 2245682
aacugagagaccuugcuuc

SEQ ID NO: 2245684 - RNA, 19 nt, Artificial Sequence
  Description of Artificial Sequence: Synthetic oligonucleotide
  Sense strand starting at position 1956 of SEQ ID NO: 1884171
gagugauuucugcgauucc

SEQ ID NO: 2245685 - RNA, 19 nt, Artificial Sequence
  Description of Artificial Sequence: Synthetic oligonucleotide
  Antisense strand to SEQ ID NO: 2245684
ggaaucgcagaaaucacuc

SEQ ID NO: 2245686 - RNA, 19 nt, Artificial Sequence
  Description of Artificial Sequence: Synthetic oligonucleotide
  Sense strand starting at position 2054 of SEQ ID NO: 1884171
cugucacacucucuggaua

SEQ ID NO: 2245687 - RNA, 19 nt, Artificial Sequence
  Description of Artificial Sequence: Synthetic oligonucleotide
  Antisense strand to SEQ ID NO: 2245686
uauccagagagugugacag

SEQ ID NO: 2245688 - RNA, 19 nt, Artificial Sequence
  Description of Artificial Sequence: Synthetic oligonucleotide
  Sense strand starting at position 2121 of SEQ ID NO: 1884171
uguugagaauuguucagug

SEQ ID NO: 2245689 - RNA, 19 nt, Artificial Sequence
  Description of Artificial Sequence: Synthetic oligonucleotide
  Antisense strand to SEQ ID NO: 2245688
cacugaacaauucucaaca

SEQ ID NO: 2245690 - RNA, 19 nt, Artificial Sequence
  Description of Artificial Sequence: Synthetic oligonucleotide
  Sense strand starting at position 2174 of SEQ ID NO: 1884171
augcuugucgcguuuacuu

SEQ ID NO: 2245691 - RNA, 19 nt, Artificial Sequence
  Description of Artificial Sequence: Synthetic oligonucleotide
  Antisense strand to SEQ ID NO: 2245690
aaguaaacgcgacaagcau

SEQ ID NO: 2245692 - RNA, 19 nt, Artificial Sequence
  Description of Artificial Sequence: Synthetic oligonucleotide
  Sense strand starting at position 2234 of SEQ ID NO: 1884171
ugcucuaggcauuauugua

SEQ ID NO: 2245693 - RNA, 19 nt, Artificial Sequence
  Description of Artificial Sequence: Synthetic oligonucleotide
  Antisense strand to SEQ ID NO: 2245692
uacaauaaugccuagagca

SEQ ID NO: 2245694 - RNA, 19 nt, Artificial Sequence
  Description of Artificial Sequence: Synthetic oligonucleotide
  Sense strand starting at position 2329 of SEQ ID NO: 1884171
gucaucccugcauggaauu

SEQ ID NO: 2245695 - RNA, 19 nt, Artificial Sequence
  Description of Artificial Sequence: Synthetic oligonucleotide
  Antisense strand to SEQ ID NO: 2245694
aauuccaugcagggaugac

SEQ ID NO: 2245696 - RNA, 19 nt, Artificial Sequence
  Description of Artificial Sequence: Synthetic oligonucleotide
  Sense strand starting at position 2587 of SEQ ID NO: 1884171
gcugcaucuccacagguaa

SEQ ID NO: 2245697 - RNA, 19 nt, Artificial Sequence
  Description of Artificial Sequence: Synthetic oligonucleotide
  Antisense strand to SEQ ID NO: 2245696
uuaccuguggagaugcagc

SEQ ID NO: 2245698 - RNA, 19 nt, Artificial Sequence
  Description of Artificial Sequence: Synthetic oligonucleotide
  Sense strand starting at position 2621 of SEQ ID NO: 1884171
uggguuugauccucaacau

SEQ ID NO: 2245699 - RNA, 19 nt, Artificial Sequence
  Description of Artificial Sequence: Synthetic oligonucleotide
  Antisense strand to SEQ ID NO: 2245698
auguugaggaucaaaccca

SEQ ID NO: 2245700 - RNA, 19 nt, Artificial Sequence
  Description of Artificial Sequence: Synthetic oligonucleotide
  Sense strand starting at position 2759 of SEQ ID NO: 1884171
uccugagucccagggauua

SEQ ID NO: 2245701 - RNA, 19 nt, Artificial Sequence
  Description of Artificial Sequence: Synthetic oligonucleotide
  Antisense strand to SEQ ID NO: 2245700
uaaucccugggacucagga

SEQ ID NO: 2245702 - RNA, 19 nt, Artificial Sequence
  Description of Artificial Sequence: Synthetic oligonucleotide
  Sense strand starting at position 2796 of SEQ ID NO: 1884171
ccuggcuaccucugagauu

SEQ ID NO: 2245703 - RNA, 19 nt, Artificial Sequence
  Description of Artificial Sequence: Synthetic oligonucleotide
  Antisense strand to SEQ ID NO: 2245702
aaucucagagguagccagg

SEQ ID NO: 2245704 - RNA, 19 nt, Artificial Sequence
  Description of Artificial Sequence: Synthetic oligonucleotide
  Sense strand starting at position 2807 of SEQ ID NO: 1884171
cugagauucuuggucaguu

SEQ ID NO: 2245705 - RNA, 19 nt, Artificial Sequence
  Description of Artificial Sequence: Synthetic oligonucleotide
  Antisense strand to SEQ ID NO: 2245704
aacugaccaagaaucucag

SEQ ID NO: 2245706 - RNA, 19 nt, Artificial Sequence
  Description of Artificial Sequence: Synthetic oligonucleotide
  Sense strand starting at position 2808 of SEQ ID NO: 1884171
ugagauucuuggucaguuu

SEQ ID NO: 2245707 - RNA, 19 nt, Artificial Sequence
  Description of Artificial Sequence: Synthetic oligonucleotide
  Antisense strand to SEQ ID NO: 2245706
aaacugaccaagaaucuca

SEQ ID NO: 2245708 - RNA, 19 nt, Artificial Sequence
  Description of Artificial Sequence: Synthetic oligonucleotide
  Sense strand starting at position 2887 of SEQ ID NO: 1884171
ugagacuagcccugggauu

SEQ ID NO: 2245709 - RNA, 19 nt, Artificial Sequence
  Description of Artificial Sequence: Synthetic oligonucleotide
  Antisense strand to SEQ ID NO: 2245708
aaucccagggcuagucuca

SEQ ID NO: 2245710 - RNA, 19 nt, Artificial Sequence
  Description of Artificial Sequence: Synthetic oligonucleotide
  Sense strand starting at position 3197 of SEQ ID NO: 1884171
ugaauccauuccuuuggaa

SEQ ID NO: 2245711 - RNA, 19 nt, Artificial Sequence
  Description of Artificial Sequence: Synthetic oligonucleotide
  Antisense strand to SEQ ID NO: 2245710
uuccaaaggaauggauuca

SEQ ID NO: 2245712 - RNA, 19 nt, Artificial Sequence
  Description of Artificial Sequence: Synthetic oligonucleotide
  Sense strand starting at position 3460 of SEQ ID NO: 1884171
aucagaaucaugggcaugu

SEQ ID NO: 2245713 - RNA, 19 nt, Artificial Sequence
  Description of Artificial Sequence: Synthetic oligonucleotide
  Antisense strand to SEQ ID NO: 2245712
acaugcccaugauucugau

SEQ ID NO: 2245714 - RNA, 19 nt, Artificial Sequence
  Description of Artificial Sequence: Synthetic oligonucleotide
  Sense strand starting at position 3464 of SEQ ID NO: 1884171
gaaucaugggcaugugcau

SEQ ID NO: 2245715 - RNA, 19 nt, Artificial Sequence
  Description of Artificial Sequence: Synthetic oligonucleotide
  Antisense strand to SEQ ID NO: 2245714
augcacaugcccaugauuc

SEQ ID NO: 2245716 - RNA, 19 nt, Artificial Sequence
  Description of Artificial Sequence: Synthetic oligonucleotide
  Sense strand starting at position 3471 of SEQ ID NO: 1884171
gggcaugugcaugagucuu

SEQ ID NO: 2245717 - RNA, 19 nt, Artificial Sequence
  Description of Artificial Sequence: Synthetic oligonucleotide
  Antisense strand to SEQ ID NO: 2245716
aagacucaugcacaugccc

SEQ ID NO: 2245718 - RNA, 19 nt, Artificial Sequence
  Description of Artificial Sequence: Synthetic oligonucleotide
  Sense strand starting at position 3479 of SEQ ID NO: 1884171
gcaugagucuuauuuccuu

SEQ ID NO: 2245719 - RNA, 19 nt, Artificial Sequence
  Description of Artificial Sequence: Synthetic oligonucleotide
  Antisense strand to SEQ ID NO: 2245718
aaggaaauaagacucaugc

SEQ ID NO: 2245720 - RNA, 19 nt, Artificial Sequence
  Description of Artificial Sequence: Synthetic oligonucleotide
  Sense strand starting at position 3487 of SEQ ID NO: 1884171
cuuauuuccuuggaaacug

SEQ ID NO: 2245721 - RNA, 19 nt, Artificial Sequence
  Description of Artificial Sequence: Synthetic oligonucleotide
  Antisense strand to SEQ ID NO: 2245720
caguuuccaaggaaauaag

SEQ ID NO: 2245722 - RNA, 19 nt, Artificial Sequence
  Description of Artificial Sequence: Synthetic oligonucleotide
  Sense strand starting at position 3567 of SEQ ID NO: 1884171
gcaggaggucagugguuga

SEQ ID NO: 2245723 - RNA, 19 nt, Artificial Sequence
  Description of Artificial Sequence: Synthetic oligonucleotide
  Antisense strand to SEQ ID NO: 2245722
ucaaccacugaccuccugc

SEQ ID NO: 2245724 - RNA, 19 nt, Artificial Sequence
  Description of Artificial Sequence: Synthetic oligonucleotide
  Sense strand starting at position 3696 of SEQ ID NO: 1884171
auuuacuguuuggacuaua

SEQ ID NO: 2245725 - RNA, 19 nt, Artificial Sequence
  Description of Artificial Sequence: Synthetic oligonucleotide
  Antisense strand to SEQ ID NO: 2245724
uauaguccaaacaguaaau

SEQ ID NO: 2245726 - RNA, 19 nt, Artificial Sequence
  Description of Artificial Sequence: Synthetic oligonucleotide
  Sense strand starting at position 3800 of SEQ ID NO: 1884171
uaaacagauucggucucuu

SEQ ID NO: 2245727 - RNA, 19 nt, Artificial Sequence
  Description of Artificial Sequence: Synthetic oligonucleotide
  Antisense strand to SEQ ID NO: 2245726
aagagaccgaaucuguuua

SEQ ID NO: 2245728 - RNA, 19 nt, Artificial Sequence
  Description of Artificial Sequence: Synthetic oligonucleotide
  Sense strand starting at position 3804 of SEQ ID NO: 1884171
cagauucggucucuuacuu

SEQ ID NO: 2245729 - RNA, 19 nt, Artificial Sequence
  Description of Artificial Sequence: Synthetic oligonucleotide
  Antisense strand to SEQ ID NO: 2245728
aaguaagagaccgaaucug

SEQ ID NO: 2245730 - RNA, 19 nt, Artificial Sequence
  Description of Artificial Sequence: Synthetic oligonucleotide
  Sense strand starting at position 3879 of SEQ ID NO: 1884171
aguagauucccaugacaga

SEQ ID NO: 2245731 - RNA, 19 nt, Artificial Sequence
  Description of Artificial Sequence: Synthetic oligonucleotide
  Antisense strand to SEQ ID NO: 2245730
ucugucaugggaaucuacu

SEQ ID NO: 2245732 - RNA, 19 nt, Artificial Sequence
  Description of Artificial Sequence: Synthetic oligonucleotide
  Sense strand starting at position 3970 of SEQ ID NO: 1884171
cacaguugugagcaaggaa

SEQ ID NO: 2245733 - RNA, 19 nt, Artificial Sequence
  Description of Artificial Sequence: Synthetic oligonucleotide
  Antisense strand to SEQ ID NO: 2245732
uuccuugcucacaacugug

SEQ ID NO: 2245734 - RNA, 19 nt, Artificial Sequence
  Description of Artificial Sequence: Synthetic oligonucleotide
  Sense strand starting at position 73 of SEQ ID NO: 1884172
ccagaaucucuggguggga

SEQ ID NO: 2245735 - RNA, 19 nt, Artificial Sequence
  Description of Artificial Sequence: Synthetic oligonucleotide
  Antisense strand to SEQ ID NO: 2245734
ucccacccagagauucugg

SEQ ID NO: 2245736 - RNA, 19 nt, Artificial Sequence
  Description of Artificial Sequence: Synthetic oligonucleotide
  Sense strand starting at position 331 of SEQ ID NO: 1884172
uucuuagucccagaacaug

SEQ ID NO: 2245737 - RNA, 19 nt, Artificial Sequence
  Description of Artificial Sequence: Synthetic oligonucleotide
  Antisense strand to SEQ ID NO: 2245736
cauguucugggacuaagaa

SEQ ID NO: 2245738 - RNA, 19 nt, Artificial Sequence
  Description of Artificial Sequence: Synthetic oligonucleotide
  Sense strand starting at position 445 of SEQ ID NO: 1884172
ccgaaagacuguucuaacu

SEQ ID NO: 2245739 - RNA, 19 nt, Artificial Sequence
  Description of Artificial Sequence: Synthetic oligonucleotide
  Antisense strand to SEQ ID NO: 2245738
aguuagaacagucuuucgg

SEQ ID NO: 2245740 - RNA, 19 nt, Artificial Sequence
  Description of Artificial Sequence: Synthetic oligonucleotide
  Sense strand starting at position 499 of SEQ ID NO: 1884172
gugcuaugggaccacuuau

SEQ ID NO: 2245741 - RNA, 19 nt, Artificial Sequence
  Description of Artificial Sequence: Synthetic oligonucleotide
  Antisense strand to SEQ ID NO: 2245740
auaaguggucccauagcac

SEQ ID NO: 2245742 - RNA, 19 nt, Artificial Sequence
  Description of Artificial Sequence: Synthetic oligonucleotide
  Sense strand starting at position 510 of SEQ ID NO: 1884172
ccacuuaucugaucugaag

SEQ ID NO: 2245743 - RNA, 19 nt, Artificial Sequence
  Description of Artificial Sequence: Synthetic oligonucleotide
  Antisense strand to SEQ ID NO: 2245742
cuucagaucagauaagugg

SEQ ID NO: 2245744 - RNA, 19 nt, Artificial Sequence
  Description of Artificial Sequence: Synthetic oligonucleotide
  Sense strand starting at position 522 of SEQ ID NO: 1884172
ucugaaguauagucaauac

SEQ ID NO: 2245745 - RNA, 19 nt, Artificial Sequence
  Description of Artificial Sequence: Synthetic oligonucleotide
  Antisense strand to SEQ ID NO: 2245744
guauugacuauacuucaga

SEQ ID NO: 2245746 - RNA, 19 nt, Artificial Sequence
  Description of Artificial Sequence: Synthetic oligonucleotide
  Sense strand starting at position 779 of SEQ ID NO: 1884172
agacauuggucauccaaga

SEQ ID NO: 2245747 - RNA, 19 nt, Artificial Sequence
  Description of Artificial Sequence: Synthetic oligonucleotide
  Antisense strand to SEQ ID NO: 2245746
ucuuggaugaccaaugucu

SEQ ID NO: 2245748 - RNA, 19 nt, Artificial Sequence
  Description of Artificial Sequence: Synthetic oligonucleotide
  Sense strand starting at position 1015 of SEQ ID NO: 1884172
cuucuaaaucguuauuagg

SEQ ID NO: 2245749 - RNA, 19 nt, Artificial Sequence
  Description of Artificial Sequence: Synthetic oligonucleotide
  Antisense strand to SEQ ID NO: 2245748
ccuaauaacgauuuagaag

SEQ ID NO: 2245750 - RNA, 19 nt, Artificial Sequence
  Description of Artificial Sequence: Synthetic oligonucleotide
  Sense strand starting at position 1017 of SEQ ID NO: 1884172
ucuaaaucguuauuaggga

SEQ ID NO: 2245751 - RNA, 19 nt, Artificial Sequence
  Description of Artificial Sequence: Synthetic oligonucleotide
  Antisense strand to SEQ ID NO: 2245750
ucccuaauaacgauuuaga

SEQ ID NO: 2245752 - RNA, 19 nt, Artificial Sequence
  Description of Artificial Sequence: Synthetic oligonucleotide
  Sense strand starting at position 1068 of SEQ ID NO: 1884172
guagaaauguguuuaaacu

SEQ ID NO: 2245753 - RNA, 19 nt, Artificial Sequence
  Description of Artificial Sequence: Synthetic oligonucleotide
  Antisense strand to SEQ ID NO: 2245752
aguuuaaacacauuucuac

SEQ ID NO: 2245754 - RNA, 19 nt, Artificial Sequence
  Description of Artificial Sequence: Synthetic oligonucleotide
  Sense strand starting at position 1132 of SEQ ID NO: 1884172
ccaguucuaggagagguuu

SEQ ID NO: 2245755 - RNA, 19 nt, Artificial Sequence
  Description of Artificial Sequence: Synthetic oligonucleotide
  Antisense strand to SEQ ID NO: 2245754
aaaccucuccuagaacugg

SEQ ID NO: 2245756 - RNA, 19 nt, Artificial Sequence
  Description of Artificial Sequence: Synthetic oligonucleotide
  Sense strand starting at position 1134 of SEQ ID NO: 1884172
aguucuaggagagguuuaa

SEQ ID NO: 2245757 - RNA, 19 nt, Artificial Sequence
  Description of Artificial Sequence: Synthetic oligonucleotide
  Antisense strand to SEQ ID NO: 2245756
uuaaaccucuccuagaacu

SEQ ID NO: 2245758 - RNA, 19 nt, Artificial Sequence
  Description of Artificial Sequence: Synthetic oligonucleotide
  Sense strand starting at position 1174 of SEQ ID NO: 1884172
uacuauauagaaugagguu

SEQ ID NO: 2245759 - RNA, 19 nt, Artificial Sequence
  Description of Artificial Sequence: Synthetic oligonucleotide
  Antisense strand to SEQ ID NO: 2245758
aaccucauucuauauagua

SEQ ID NO: 2245760 - RNA, 19 nt, Artificial Sequence
  Description of Artificial Sequence: Synthetic oligonucleotide
  Sense strand starting at position 1308 of SEQ ID NO: 1884172
gggcucaucagacaugagu

SEQ ID NO: 2245761 - RNA, 19 nt, Artificial Sequence
  Description of Artificial Sequence: Synthetic oligonucleotide
  Antisense strand to SEQ ID NO: 2245760
acucaugucugaugagccc

SEQ ID NO: 2245762 - RNA, 19 nt, Artificial Sequence
  Description of Artificial Sequence: Synthetic oligonucleotide
  Sense strand starting at position 1352 of SEQ ID NO: 1884172
agccaugugacucaggcua

SEQ ID NO: 2245763 - RNA, 19 nt, Artificial Sequence
  Description of Artificial Sequence: Synthetic oligonucleotide
  Antisense strand to SEQ ID NO: 2245762
uagccugagucacauggcu

SEQ ID NO: 2245764 - RNA, 19 nt, Artificial Sequence
  Description of Artificial Sequence: Synthetic oligonucleotide
  Sense strand starting at position 1357 of SEQ ID NO: 1884172
ugugacucaggcuaauuau

SEQ ID NO: 2245765 - RNA, 19 nt, Artificial Sequence
  Description of Artificial Sequence: Synthetic oligonucleotide
  Antisense strand to SEQ ID NO: 2245764
auaauuagccugagucaca

SEQ ID NO: 2245766 - RNA, 19 nt, Artificial Sequence
  Description of Artificial Sequence: Synthetic oligonucleotide
  Sense strand starting at position 1396 of SEQ ID NO: 1884172
acuuuaagguuguucuaag

SEQ ID NO: 2245767 - RNA, 19 nt, Artificial Sequence
  Description of Artificial Sequence: Synthetic oligonucleotide
  Antisense strand to SEQ ID NO: 2245766
cuuagaacaaccuuaaagu

SEQ ID NO: 2245768 - RNA, 19 nt, Artificial Sequence
  Description of Artificial Sequence: Synthetic oligonucleotide
  Sense strand starting at position 1690 of SEQ ID NO: 1884172
uugguaucuacgugaaaga

SEQ ID NO: 2245769 - RNA, 19 nt, Artificial Sequence
  Description of Artificial Sequence: Synthetic oligonucleotide
  Antisense strand to SEQ ID NO: 2245768
ucuuucacguagauaccaa

SEQ ID NO: 2245770 - RNA, 19 nt, Artificial Sequence
  Description of Artificial Sequence: Synthetic oligonucleotide
  Sense strand starting at position 1691 of SEQ ID NO: 1884172
ugguaucuacgugaaagau

SEQ ID NO: 2245771 - RNA, 19 nt, Artificial Sequence
  Description of Artificial Sequence: Synthetic oligonucleotide
  Antisense strand to SEQ ID NO: 2245770
aucuuucacguagauacca

SEQ ID NO: 2245772 - RNA, 19 nt, Artificial Sequence
  Description of Artificial Sequence: Synthetic oligonucleotide
  Sense strand starting at position 1699 of SEQ ID NO: 1884172
acgugaaagauuuggcagu

SEQ ID NO: 2245773 - RNA, 19 nt, Artificial Sequence
  Description of Artificial Sequence: Synthetic oligonucleotide
  Antisense strand to SEQ ID NO: 2245772
acugccaaaucuuucacgu

SEQ ID NO: 2245774 - RNA, 19 nt, Artificial Sequence
  Description of Artificial Sequence: Synthetic oligonucleotide
  Sense strand starting at position 1739 of SEQ ID NO: 1884172
cuggauuauuagguuauau

SEQ ID NO: 2245775 - RNA, 19 nt, Artificial Sequence
  Description of Artificial Sequence: Synthetic oligonucleotide
  Antisense strand to SEQ ID NO: 2245774
auauaaccuaauaauccag

SEQ ID NO: 2245776 - RNA, 19 nt, Artificial Sequence
  Description of Artificial Sequence: Synthetic oligonucleotide
  Sense strand starting at position 1816 of SEQ ID NO: 1884172
agaaaugcuguccacgaca

SEQ ID NO: 2245777 - RNA, 19 nt, Artificial Sequence
  Description of Artificial Sequence: Synthetic oligonucleotide
  Antisense strand to SEQ ID NO: 2245776
ugucguggacagcauuucu

SEQ ID NO: 2245778 - RNA, 19 nt, Artificial Sequence
  Description of Artificial Sequence: Synthetic oligonucleotide
  Sense strand starting at position 1818 of SEQ ID NO: 1884172
aaaugcuguccacgacaaa

SEQ ID NO: 2245779 - RNA, 19 nt, Artificial Sequence
  Description of Artificial Sequence: Synthetic oligonucleotide
  Antisense strand to SEQ ID NO: 2245778
uuugucguggacagcauuu

SEQ ID NO: 2245780 - RNA, 19 nt, Artificial Sequence
  Description of Artificial Sequence: Synthetic oligonucleotide
  Sense strand starting at position 2272 of SEQ ID NO: 1884172
guggcuuugcaauauaaug

SEQ ID NO: 2245781 - RNA, 19 nt, Artificial Sequence
  Description of Artificial Sequence: Synthetic oligonucleotide
  Antisense strand to SEQ ID NO: 2245780
cauuauauugcaaagccac

SEQ ID NO: 2245782 - RNA, 19 nt, Artificial Sequence
  Description of Artificial Sequence: Synthetic oligonucleotide
  Sense strand starting at position 2303 of SEQ ID NO: 1884172
aauggucaagccugaaaga

SEQ ID NO: 2245783 - RNA, 19 nt, Artificial Sequence
  Description of Artificial Sequence: Synthetic oligonucleotide
  Antisense strand to SEQ ID NO: 2245782
ucuuucaggcuugaccauu

SEQ ID NO: 2245784 - RNA, 19 nt, Artificial Sequence
  Description of Artificial Sequence: Synthetic oligonucleotide
  Sense strand starting at position 2690 of SEQ ID NO: 1884172
ccaggaagaugauaaugaa

SEQ ID NO: 2245785 - RNA, 19 nt, Artificial Sequence
  Description of Artificial Sequence: Synthetic oligonucleotide
  Antisense strand to SEQ ID NO: 2245784
uucauuaucaucuuccugg

SEQ ID NO: 2245786 - RNA, 19 nt, Artificial Sequence
  Description of Artificial Sequence: Synthetic oligonucleotide
  Sense strand starting at position 2768 of SEQ ID NO: 1884172
uugcuuuggagguaaauaa

SEQ ID NO: 2245787 - RNA, 19 nt, Artificial Sequence
  Description of Artificial Sequence: Synthetic oligonucleotide
  Antisense strand to SEQ ID NO: 2245786
uuauuuaccuccaaagcaa

SEQ ID NO: 2245788 - RNA, 19 nt, Artificial Sequence
  Description of Artificial Sequence: Synthetic oligonucleotide
  Sense strand starting at position 2896 of SEQ ID NO: 1884172
ccucguaucacagagaaug

SEQ ID NO: 2245789 - RNA, 19 nt, Artificial Sequence
  Description of Artificial Sequence: Synthetic oligonucleotide
  Antisense strand to SEQ ID NO: 2245788
cauucucugugauacgagg

SEQ ID NO: 2245790 - RNA, 19 nt, Artificial Sequence
  Description of Artificial Sequence: Synthetic oligonucleotide
  Sense strand starting at position 3167 of SEQ ID NO: 1884172
ucuggcucccaagaauuau

SEQ ID NO: 2245791 - RNA, 19 nt, Artificial Sequence
  Description of Artificial Sequence: Synthetic oligonucleotide
  Antisense strand to SEQ ID NO: 2245790
auaauucuugggagccaga

SEQ ID NO: 2245792 - RNA, 19 nt, Artificial Sequence
  Description of Artificial Sequence: Synthetic oligonucleotide
  Sense strand starting at position 3223 of SEQ ID NO: 1884172
guagguugaaagcauacuu

SEQ ID NO: 2245793 - RNA, 19 nt, Artificial Sequence
  Description of Artificial Sequence: Synthetic oligonucleotide
  Antisense strand to SEQ ID NO: 2245792
aaguaugcuuucaaccuac

SEQ ID NO: 2245794 - RNA, 19 nt, Artificial Sequence
  Description of Artificial Sequence: Synthetic oligonucleotide
  Sense strand starting at position 3324 of SEQ ID NO: 1884172
cucucaaagugaucacagu

SEQ ID NO: 2245795 - RNA, 19 nt, Artificial Sequence
  Description of Artificial Sequence: Synthetic oligonucleotide
  Antisense strand to SEQ ID NO: 2245794
acugugaucacuuugagag

SEQ ID NO: 2245796 - RNA, 19 nt, Artificial Sequence
  Description of Artificial Sequence: Synthetic oligonucleotide
  Sense strand starting at position 3325 of SEQ ID NO: 1884172
ucucaaagugaucacagua

SEQ ID NO: 2245797 - RNA, 19 nt, Artificial Sequence
  Description of Artificial Sequence: Synthetic oligonucleotide
  Antisense strand to SEQ ID NO: 2245796
uacugugaucacuuugaga

SEQ ID NO: 2245798 - RNA, 19 nt, Artificial Sequence
  Description of Artificial Sequence: Synthetic oligonucleotide
  Sense strand starting at position 3526 of SEQ ID NO: 1884172
ggacuugauccgcaaaggu

SEQ ID NO: 2245799 - RNA, 19 nt, Artificial Sequence
  Description of Artificial Sequence: Synthetic oligonucleotide
  Antisense strand to SEQ ID NO: 2245798
accuuugcggaucaagucc

SEQ ID NO: 2245800 - RNA, 19 nt, Artificial Sequence
  Description of Artificial Sequence: Synthetic oligonucleotide
  Sense strand starting at position 3536 of SEQ ID NO: 1884172
cgcaaaggugacuauguaa

SEQ ID NO: 2245801 - RNA, 19 nt, Artificial Sequence
  Description of Artificial Sequence: Synthetic oligonucleotide
  Antisense strand to SEQ ID NO: 2245800
uuacauagucaccuuugcg

SEQ ID NO: 2245802 - RNA, 19 nt, Artificial Sequence
  Description of Artificial Sequence: Synthetic oligonucleotide
  Sense strand starting at position 3551 of SEQ ID NO: 1884172
guaauaagcccacaguaca

SEQ ID NO: 2245803 - RNA, 19 nt, Artificial Sequence
  Description of Artificial Sequence: Synthetic oligonucleotide
  Antisense strand to SEQ ID NO: 2245802
uguacugugggcuuauuac

SEQ ID NO: 2245804 - RNA, 19 nt, Artificial Sequence
  Description of Artificial Sequence: Synthetic oligonucleotide
  Sense strand starting at position 3604 of SEQ ID NO: 1884172
ugacucaugugauugaaua

SEQ ID NO: 2245805 - RNA, 19 nt, Artificial Sequence
  Description of Artificial Sequence: Synthetic oligonucleotide
  Antisense strand to SEQ ID NO: 2245804
uauucaaucacaugaguca

SEQ ID NO: 2245806 - RNA, 19 nt, Artificial Sequence
  Description of Artificial Sequence: Synthetic oligonucleotide
  Sense strand starting at position 3605 of SEQ ID NO: 1884172
gacucaugugauugaauaa

SEQ ID NO: 2245807 - RNA, 19 nt, Artificial Sequence
  Description of Artificial Sequence: Synthetic oligonucleotide
  Antisense strand to SEQ ID NO: 2245806
uuauucaaucacaugaguc

SEQ ID NO: 2245808 - RNA, 19 nt, Artificial Sequence
  Description of Artificial Sequence: Synthetic oligonucleotide
  Sense strand starting at position 3677 of SEQ ID NO: 1884172
ccauuucugaggugccagu

SEQ ID NO: 2245809 - RNA, 19 nt, Artificial Sequence
  Description of Artificial Sequence: Synthetic oligonucleotide
  Antisense strand to SEQ ID NO: 2245808
acuggcaccucagaaaugg

SEQ ID NO: 2245810 - RNA, 19 nt, Artificial Sequence
  Description of Artificial Sequence: Synthetic oligonucleotide
  Sense strand starting at position 3684 of SEQ ID NO: 1884172
ugaggugccaguuacagua

SEQ ID NO: 2245811 - RNA, 19 nt, Artificial Sequence
  Description of Artificial Sequence: Synthetic oligonucleotide
  Antisense strand to SEQ ID NO: 2245810
uacuguaacuggcaccuca

SEQ ID NO: 2245812 - RNA, 19 nt, Artificial Sequence
  Description of Artificial Sequence: Synthetic oligonucleotide
  Sense strand starting at position 3813 of SEQ ID NO: 1884172
aguaucuuacuagaauugu

SEQ ID NO: 2245813 - RNA, 19 nt, Artificial Sequence
  Description of Artificial Sequence: Synthetic oligonucleotide
  Antisense strand to SEQ ID NO: 2245812
acaauucuaguaagauacu

SEQ ID NO: 2245814 - RNA, 19 nt, Artificial Sequence
  Description of Artificial Sequence: Synthetic oligonucleotide
  Sense strand starting at position 12 of SEQ ID NO: 1884173
uccuuugcugcgugcagau

SEQ ID NO: 2245815 - RNA, 19 nt, Artificial Sequence
  Description of Artificial Sequence: Synthetic oligonucleotide
  Antisense strand to SEQ ID NO: 2245814
aucugcacgcagcaaagga

SEQ ID NO: 2245816 - RNA, 19 nt, Artificial Sequence
  Description of Artificial Sequence: Synthetic oligonucleotide
  Sense strand starting at position 22 of SEQ ID NO: 1884173
cgugcagauccuuggcuuu

SEQ ID NO: 2245817 - RNA, 19 nt, Artificial Sequence
  Description of Artificial Sequence: Synthetic oligonucleotide
  Antisense strand to SEQ ID NO: 2245816
aaagccaaggaucugcacg

SEQ ID NO: 2245818 - RNA, 19 nt, Artificial Sequence
  Description of Artificial Sequence: Synthetic oligonucleotide
  Sense strand starting at position 180 of SEQ ID NO: 1884173
ccuggcuuugacugagaca

SEQ ID NO: 2245819 - RNA, 19 nt, Artificial Sequence
  Description of Artificial Sequence: Synthetic oligonucleotide
  Antisense strand to SEQ ID NO: 2245818
ugucucagucaaagccagg

SEQ ID NO: 2245820 - RNA, 19 nt, Artificial Sequence
  Description of Artificial Sequence: Synthetic oligonucleotide
  Sense strand starting at position 183 of SEQ ID NO: 1884173
ggcuuugacugagacaacu

SEQ ID NO: 2245821 - RNA, 19 nt, Artificial Sequence
  Description of Artificial Sequence: Synthetic oligonucleotide
  Antisense strand to SEQ ID NO: 2245820
aguugucucagucaaagcc

SEQ ID NO: 2245822 - RNA, 19 nt, Artificial Sequence
  Description of Artificial Sequence: Synthetic oligonucleotide
  Sense strand starting at position 246 of SEQ ID NO: 1884173
acuagcacuucccgcaaua

SEQ ID NO: 2245823 - RNA, 19 nt, Artificial Sequence
  Description of Artificial Sequence: Synthetic oligonucleotide
  Antisense strand to SEQ ID NO: 2245822
uauugcgggaagugcuagu

SEQ ID NO: 2245824 - RNA, 19 nt, Artificial Sequence
  Description of Artificial Sequence: Synthetic oligonucleotide
  Sense strand starting at position 368 of SEQ ID NO: 1884173
cagugaaauuuccggcaau

SEQ ID NO: 2245825 - RNA, 19 nt, Artificial Sequence
  Description of Artificial Sequence: Synthetic oligonucleotide
  Antisense strand to SEQ ID NO: 2245824
auugccggaaauuucacug

SEQ ID NO: 2245826 - RNA, 19 nt, Artificial Sequence
  Description of Artificial Sequence: Synthetic oligonucleotide
  Sense strand starting at position 369 of SEQ ID NO: 1884173
agugaaauuuccggcaauc

SEQ ID NO: 2245827 - RNA, 19 nt, Artificial Sequence
  Description of Artificial Sequence: Synthetic oligonucleotide
  Antisense strand to SEQ ID NO: 2245826
gauugccggaaauuucacu

SEQ ID NO: 2245828 - RNA, 19 nt, Artificial Sequence
  Description of Artificial Sequence: Synthetic oligonucleotide
  Sense strand starting at position 453 of SEQ ID NO: 1884173
ccggcagcuucuccaauuu

SEQ ID NO: 2245829 - RNA, 19 nt, Artificial Sequence
  Description of Artificial Sequence: Synthetic oligonucleotide
  Antisense strand to SEQ ID NO: 2245828
aaauuggagaagcugccgg

SEQ ID NO: 2245830 - RNA, 19 nt, Artificial Sequence
  Description of Artificial Sequence: Synthetic oligonucleotide
  Sense strand starting at position 716 of SEQ ID NO: 1884173
augagaaggccucgcuauu

SEQ ID NO: 2245831 - RNA, 19 nt, Artificial Sequence
  Description of Artificial Sequence: Synthetic oligonucleotide
  Antisense strand to SEQ ID NO: 2245830
aauagcgaggccuucucau

SEQ ID NO: 2245832 - RNA, 19 nt, Artificial Sequence
  Description of Artificial Sequence: Synthetic oligonucleotide
  Sense strand starting at position 1101 of SEQ ID NO: 1884173
gcgccuccuuugcuuuaaa

SEQ ID NO: 2245833 - RNA, 19 nt, Artificial Sequence
  Description of Artificial Sequence: Synthetic oligonucleotide
  Antisense strand to SEQ ID NO: 2245832
uuuaaagcaaaggaggcgc

SEQ ID NO: 2245834 - RNA, 19 nt, Artificial Sequence
  Description of Artificial Sequence: Synthetic oligonucleotide
  Sense strand starting at position 1415 of SEQ ID NO: 1884173
uggcuaaccucgugaugac

SEQ ID NO: 2245835 - RNA, 19 nt, Artificial Sequence
  Description of Artificial Sequence: Synthetic oligonucleotide
  Antisense strand to SEQ ID NO: 2245834
gucaucacgagguuagcca

SEQ ID NO: 2245836 - RNA, 19 nt, Artificial Sequence
  Description of Artificial Sequence: Synthetic oligonucleotide
  Sense strand starting at position 1416 of SEQ ID NO: 1884173
ggcuaaccucgugaugacu

SEQ ID NO: 2245837 - RNA, 19 nt, Artificial Sequence
  Description of Artificial Sequence: Synthetic oligonucleotide
  Antisense strand to SEQ ID NO: 2245836
agucaucacgagguuagcc

SEQ ID NO: 2245838 - RNA, 19 nt, Artificial Sequence
  Description of Artificial Sequence: Synthetic oligonucleotide
  Sense strand starting at position 1425 of SEQ ID NO: 1884173
cgugaugacuucgcuagga

SEQ ID NO: 2245839 - RNA, 19 nt, Artificial Sequence
  Description of Artificial Sequence: Synthetic oligonucleotide
  Antisense strand to SEQ ID NO: 2245838
uccuagcgaagucaucacg

SEQ ID NO: 2245840 - RNA, 19 nt, Artificial Sequence
  Description of Artificial Sequence: Synthetic oligonucleotide
  Sense strand starting at position 1427 of SEQ ID NO: 1884173
ugaugacuucgcuaggaaa

SEQ ID NO: 2245841 - RNA, 19 nt, Artificial Sequence
  Description of Artificial Sequence: Synthetic oligonucleotide
  Antisense strand to SEQ ID NO: 2245840
uuuccuagcgaagucauca

SEQ ID NO: 2245842 - RNA, 19 nt, Artificial Sequence
  Description of Artificial Sequence: Synthetic oligonucleotide
  Sense strand starting at position 1505 of SEQ ID NO: 1884173
aagggugucuuguacaaau

SEQ ID NO: 2245843 - RNA, 19 nt, Artificial Sequence
  Description of Artificial Sequence: Synthetic oligonucleotide
  Antisense strand to SEQ ID NO: 2245842
auuuguacaagacacccuu

SEQ ID NO: 2245844 - RNA, 19 nt, Artificial Sequence
  Description of Artificial Sequence: Synthetic oligonucleotide
  Sense strand starting at position 1507 of SEQ ID NO: 1884173
gggugucuuguacaaauaa

SEQ ID NO: 2245845 - RNA, 19 nt, Artificial Sequence
  Description of Artificial Sequence: Synthetic oligonucleotide
  Antisense strand to SEQ ID NO: 2245844
uuauuuguacaagacaccc

SEQ ID NO: 2245846 - RNA, 19 nt, Artificial Sequence
  Description of Artificial Sequence: Synthetic oligonucleotide
  Sense strand starting at position 1576 of SEQ ID NO: 1884173
acgcgagucuugacuguag

SEQ ID NO: 2245847 - RNA, 19 nt, Artificial Sequence
  Description of Artificial Sequence: Synthetic oligonucleotide
  Antisense strand to SEQ ID NO: 2245846
cuacagucaagacucgcgu

SEQ ID NO: 2245848 - RNA, 19 nt, Artificial Sequence
  Description of Artificial Sequence: Synthetic oligonucleotide
  Sense strand starting at position 1578 of SEQ ID NO: 1884173
gcgagucuugacuguagaa

SEQ ID NO: 2245849 - RNA, 19 nt, Artificial Sequence
  Description of Artificial Sequence: Synthetic oligonucleotide
  Antisense strand to SEQ ID NO: 2245848
uucuacagucaagacucgc

SEQ ID NO: 2245850 - RNA, 19 nt, Artificial Sequence
  Description of Artificial Sequence: Synthetic oligonucleotide
  Sense strand starting at position 2422 of SEQ ID NO: 1884173
auaggaagauucugggaga

SEQ ID NO: 2245851 - RNA, 19 nt, Artificial Sequence
  Description of Artificial Sequence: Synthetic oligonucleotide
  Antisense strand to SEQ ID NO: 2245850
ucucccagaaucuuccuau

SEQ ID NO: 2245852 - RNA, 19 nt, Artificial Sequence
  Description of Artificial Sequence: Synthetic oligonucleotide
  Sense strand starting at position 2425 of SEQ ID NO: 1884173
ggaagauucugggagagaa

SEQ ID NO: 2245853 - RNA, 19 nt, Artificial Sequence
  Description of Artificial Sequence: Synthetic oligonucleotide
  Antisense strand to SEQ ID NO: 2245852
uucucucccagaaucuucc

SEQ ID NO: 2245854 - RNA, 19 nt, Artificial Sequence
  Description of Artificial Sequence: Synthetic oligonucleotide
  Sense strand starting at position 2711 of SEQ ID NO: 1884173
uuagucuucugcugugauu

SEQ ID NO: 2245855 - RNA, 19 nt, Artificial Sequence
  Description of Artificial Sequence: Synthetic oligonucleotide
  Antisense strand to SEQ ID NO: 2245854
aaucacagcagaagacuaa

SEQ ID NO: 2245856 - RNA, 19 nt, Artificial Sequence
  Description of Artificial Sequence: Synthetic oligonucleotide
  Sense strand starting at position 2713 of SEQ ID NO: 1884173
agucuucugcugugauuga

SEQ ID NO: 2245857 - RNA, 19 nt, Artificial Sequence
  Description of Artificial Sequence: Synthetic oligonucleotide
  Antisense strand to SEQ ID NO: 2245856
ucaaucacagcagaagacu

SEQ ID NO: 2245858 - RNA, 19 nt, Artificial Sequence
  Description of Artificial Sequence: Synthetic oligonucleotide
  Sense strand starting at position 2714 of SEQ ID NO: 1884173
gucuucugcugugauugaa

SEQ ID NO: 2245859 - RNA, 19 nt, Artificial Sequence
  Description of Artificial Sequence: Synthetic oligonucleotide
  Antisense strand to SEQ ID NO: 2245858
uucaaucacagcagaagac

SEQ ID NO: 2245860 - RNA, 19 nt, Artificial Sequence
  Description of Artificial Sequence: Synthetic oligonucleotide
  Sense strand starting at position 2717 of SEQ ID NO: 1884173
uucugcugugauugaagaa

SEQ ID NO: 2245861 - RNA, 19 nt, Artificial Sequence
  Description of Artificial Sequence: Synthetic oligonucleotide
  Antisense strand to SEQ ID NO: 2245860
uucuucaaucacagcagaa

SEQ ID NO: 2245862 - RNA, 19 nt, Artificial Sequence
  Description of Artificial Sequence: Synthetic oligonucleotide
  Sense strand starting at position 2718 of SEQ ID NO: 1884173
ucugcugugauugaagaac

SEQ ID NO: 2245863 - RNA, 19 nt, Artificial Sequence
  Description of Artificial Sequence: Synthetic oligonucleotide
  Antisense strand to SEQ ID NO: 2245862
guucuucaaucacagcaga

SEQ ID NO: 2245864 - RNA, 19 nt, Artificial Sequence
  Description of Artificial Sequence: Synthetic oligonucleotide
  Sense strand starting at position 2774 of SEQ ID NO: 1884173
gaguaugccucucccagau

SEQ ID NO: 2245865 - RNA, 19 nt, Artificial Sequence
  Description of Artificial Sequence: Synthetic oligonucleotide
  Antisense strand to SEQ ID NO: 2245864
aucugggagaggcauacuc

SEQ ID NO: 2245866 - RNA, 19 nt, Artificial Sequence
  Description of Artificial Sequence: Synthetic oligonucleotide
  Sense strand starting at position 2807 of SEQ ID NO: 1884173
agaggcucguuugggaauu

SEQ ID NO: 2245867 - RNA, 19 nt, Artificial Sequence
  Description of Artificial Sequence: Synthetic oligonucleotide
  Antisense strand to SEQ ID NO: 2245866
aauucccaaacgagccucu

SEQ ID NO: 2245868 - RNA, 19 nt, Artificial Sequence
  Description of Artificial Sequence: Synthetic oligonucleotide
  Sense strand starting at position 2836 of SEQ ID NO: 1884173
gccucugcgggugaaugau

SEQ ID NO: 2245869 - RNA, 19 nt, Artificial Sequence
  Description of Artificial Sequence: Synthetic oligonucleotide
  Antisense strand to SEQ ID NO: 2245868
aucauucacccgcagaggc

SEQ ID NO: 2245870 - RNA, 19 nt, Artificial Sequence
  Description of Artificial Sequence: Synthetic oligonucleotide
  Sense strand starting at position 2846 of SEQ ID NO: 1884173
gugaaugauucccgguugu

SEQ ID NO: 2245871 - RNA, 19 nt, Artificial Sequence
  Description of Artificial Sequence: Synthetic oligonucleotide
  Antisense strand to SEQ ID NO: 2245870
acaaccgggaaucauucac

SEQ ID NO: 2245872 - RNA, 19 nt, Artificial Sequence
  Description of Artificial Sequence: Synthetic oligonucleotide
  Sense strand starting at position 2850 of SEQ ID NO: 1884173
augauucccgguuguaguu

SEQ ID NO: 2245873 - RNA, 19 nt, Artificial Sequence
  Description of Artificial Sequence: Synthetic oligonucleotide
  Antisense strand to SEQ ID NO: 2245872
aacuacaaccgggaaucau

SEQ ID NO: 2245874 - RNA, 19 nt, Artificial Sequence
  Description of Artificial Sequence: Synthetic oligonucleotide
  Sense strand starting at position 3077 of SEQ ID NO: 1884173
acucucagccaguaaguaa

SEQ ID NO: 2245875 - RNA, 19 nt, Artificial Sequence
  Description of Artificial Sequence: Synthetic oligonucleotide
  Antisense strand to SEQ ID NO: 2245874
uuacuuacuggcugagagu

SEQ ID NO: 2245876 - RNA, 19 nt, Artificial Sequence
  Description of Artificial Sequence: Synthetic oligonucleotide
  Sense strand starting at position 3495 of SEQ ID NO: 1884173
cccggaguucccugggagu

SEQ ID NO: 2245877 - RNA, 19 nt, Artificial Sequence
  Description of Artificial Sequence: Synthetic oligonucleotide
  Antisense strand to SEQ ID NO: 2245876
acucccagggaacuccggg

SEQ ID NO: 2245878 - RNA, 19 nt, Artificial Sequence
  Description of Artificial Sequence: Synthetic oligonucleotide
  Sense strand starting at position 3536 of SEQ ID NO: 1884173
cgcgcauucucauguuaag

SEQ ID NO: 2245879 - RNA, 19 nt, Artificial Sequence
  Description of Artificial Sequence: Synthetic oligonucleotide
  Antisense strand to SEQ ID NO: 2245878
cuuaacaugagaaugcgcg

SEQ ID NO: 2245880 - RNA, 19 nt, Artificial Sequence
  Description of Artificial Sequence: Synthetic oligonucleotide
  Sense strand starting at position 3737 of SEQ ID NO: 1884173
ugagcucggugcagagaaa

SEQ ID NO: 2245881 - RNA, 19 nt, Artificial Sequence
  Description of Artificial Sequence: Synthetic oligonucleotide
  Antisense strand to SEQ ID NO: 2245880
uuucucugcaccgagcuca

SEQ ID NO: 2245882 - RNA, 19 nt, Artificial Sequence
  Description of Artificial Sequence: Synthetic oligonucleotide
  Sense strand starting at position 3797 of SEQ ID NO: 1884173
gcggacuucucuucgguca

SEQ ID NO: 2245883 - RNA, 19 nt, Artificial Sequence
  Description of Artificial Sequence: Synthetic oligonucleotide
  Antisense strand to SEQ ID NO: 2245882
ugaccgaagagaaguccgc

SEQ ID NO: 2245884 - RNA, 19 nt, Artificial Sequence
  Description of Artificial Sequence: Synthetic oligonucleotide
  Sense strand starting at position 3799 of SEQ ID NO: 1884173
ggacuucucuucggucacu

SEQ ID NO: 2245885 - RNA, 19 nt, Artificial Sequence
  Description of Artificial Sequence: Synthetic oligonucleotide
  Antisense strand to SEQ ID NO: 2245884
agugaccgaagagaagucc

SEQ ID NO: 2245886 - RNA, 19 nt, Artificial Sequence
  Description of Artificial Sequence: Synthetic oligonucleotide
  Sense strand starting at position 76 of SEQ ID NO: 1884174
ugcauauucuauuuaugug

SEQ ID NO: 2245887 - RNA, 19 nt, Artificial Sequence
  Description of Artificial Sequence: Synthetic oligonucleotide
  Antisense strand to SEQ ID NO: 2245886
cacauaaauagaauaugca

SEQ ID NO: 2245888 - RNA, 19 nt, Artificial Sequence
  Description of Artificial Sequence: Synthetic oligonucleotide
  Sense strand starting at position 125 of SEQ ID NO: 1884174
agaggaucuuccuccacua

SEQ ID NO: 2245889 - RNA, 19 nt, Artificial Sequence
  Description of Artificial Sequence: Synthetic oligonucleotide
  Antisense strand to SEQ ID NO: 2245888
uaguggaggaagauccucu

SEQ ID NO: 2245890 - RNA, 19 nt, Artificial Sequence
  Description of Artificial Sequence: Synthetic oligonucleotide
  Sense strand starting at position 197 of SEQ ID NO: 1884174
aggucucucccaugggaga

SEQ ID NO: 2245891 - RNA, 19 nt, Artificial Sequence
  Description of Artificial Sequence: Synthetic oligonucleotide
  Antisense strand to SEQ ID NO: 2245890
ucucccaugggagagaccu

SEQ ID NO: 2245892 - RNA, 19 nt, Artificial Sequence
  Description of Artificial Sequence: Synthetic oligonucleotide
  Sense strand starting at position 198 of SEQ ID NO: 1884174
ggucucucccaugggagaa

SEQ ID NO: 2245893 - RNA, 19 nt, Artificial Sequence
  Description of Artificial Sequence: Synthetic oligonucleotide
  Antisense strand to SEQ ID NO: 2245892
uucucccaugggagagacc

SEQ ID NO: 2245894 - RNA, 19 nt, Artificial Sequence
  Description of Artificial Sequence: Synthetic oligonucleotide
  Sense strand starting at position 199 of SEQ ID NO: 1884174
gucucucccaugggagaau

SEQ ID NO: 2245895 - RNA, 19 nt, Artificial Sequence
  Description of Artificial Sequence: Synthetic oligonucleotide
  Antisense strand to SEQ ID NO: 2245894
auucucccaugggagagac

SEQ ID NO: 2245896 - RNA, 19 nt, Artificial Sequence
  Description of Artificial Sequence: Synthetic oligonucleotide
  Sense strand starting at position 239 of SEQ ID NO: 1884174
uaguaaaggcaauguuuaa

SEQ ID NO: 2245897 - RNA, 19 nt, Artificial Sequence
  Description of Artificial Sequence: Synthetic oligonucleotide
  Antisense strand to SEQ ID NO: 2245896
uuaaacauugccuuuacua

SEQ ID NO: 2245898 - RNA, 19 nt, Artificial Sequence
  Description of Artificial Sequence: Synthetic oligonucleotide
  Sense strand starting at position 290 of SEQ ID NO: 1884174
ugcaaacugccaugauaag

SEQ ID NO: 2245899 - RNA, 19 nt, Artificial Sequence
  Description of Artificial Sequence: Synthetic oligonucleotide
  Antisense strand to SEQ ID NO: 2245898
cuuaucauggcaguuugca

SEQ ID NO: 2245900 - RNA, 19 nt, Artificial Sequence
  Description of Artificial Sequence: Synthetic oligonucleotide
  Sense strand starting at position 299 of SEQ ID NO: 1884174
ccaugauaagccugguauu

SEQ ID NO: 2245901 - RNA, 19 nt, Artificial Sequence
  Description of Artificial Sequence: Synthetic oligonucleotide
  Antisense strand to SEQ ID NO: 2245900
aauaccaggcuuaucaugg

SEQ ID NO: 2245902 - RNA, 19 nt, Artificial Sequence
  Description of Artificial Sequence: Synthetic oligonucleotide
  Sense strand starting at position 300 of SEQ ID NO: 1884174
caugauaagccugguauuc

SEQ ID NO: 2245903 - RNA, 19 nt, Artificial Sequence
  Description of Artificial Sequence: Synthetic oligonucleotide
  Antisense strand to SEQ ID NO: 2245902
gaauaccaggcuuaucaug

SEQ ID NO: 2245904 - RNA, 19 nt, Artificial Sequence
  Description of Artificial Sequence: Synthetic oligonucleotide
  Sense strand starting at position 402 of SEQ ID NO: 1884174
aggaaucuauaugaagaau

SEQ ID NO: 2245905 - RNA, 19 nt, Artificial Sequence
  Description of Artificial Sequence: Synthetic oligonucleotide
  Antisense strand to SEQ ID NO: 2245904
auucuucauauagauuccu

SEQ ID NO: 2245906 - RNA, 19 nt, Artificial Sequence
  Description of Artificial Sequence: Synthetic oligonucleotide
  Sense strand starting at position 792 of SEQ ID NO: 1884174
agacauucugaauggcagu

SEQ ID NO: 2245907 - RNA, 19 nt, Artificial Sequence
  Description of Artificial Sequence: Synthetic oligonucleotide
  Antisense strand to SEQ ID NO: 2245906
acugccauucagaaugucu

SEQ ID NO: 2245908 - RNA, 19 nt, Artificial Sequence
  Description of Artificial Sequence: Synthetic oligonucleotide
  Sense strand starting at position 927 of SEQ ID NO: 1884174
uugugaacacucugguuau

SEQ ID NO: 2245909 - RNA, 19 nt, Artificial Sequence
  Description of Artificial Sequence: Synthetic oligonucleotide
  Antisense strand to SEQ ID NO: 2245908
auaaccagaguguucacaa

SEQ ID NO: 2245910 - RNA, 19 nt, Artificial Sequence
  Description of Artificial Sequence: Synthetic oligonucleotide
  Sense strand starting at position 930 of SEQ ID NO: 1884174
ugaacacucugguuauagu

SEQ ID NO: 2245911 - RNA, 19 nt, Artificial Sequence
  Description of Artificial Sequence: Synthetic oligonucleotide
  Antisense strand to SEQ ID NO: 2245910
acuauaaccagaguguuca

SEQ ID NO: 2245912 - RNA, 19 nt, Artificial Sequence
  Description of Artificial Sequence: Synthetic oligonucleotide
  Sense strand starting at position 931 of SEQ ID NO: 1884174
gaacacucugguuauagua

SEQ ID NO: 2245913 - RNA, 19 nt, Artificial Sequence
  Description of Artificial Sequence: Synthetic oligonucleotide
  Antisense strand to SEQ ID NO: 2245912
uacuauaaccagaguguuc

SEQ ID NO: 2245914 - RNA, 19 nt, Artificial Sequence
  Description of Artificial Sequence: Synthetic oligonucleotide
  Sense strand starting at position 938 of SEQ ID NO: 1884174
cugguuauaguacaucaaa

SEQ ID NO: 2245915 - RNA, 19 nt, Artificial Sequence
  Description of Artificial Sequence: Synthetic oligonucleotide
  Antisense strand to SEQ ID NO: 2245914
uuugauguacuauaaccag

SEQ ID NO: 2245916 - RNA, 19 nt, Artificial Sequence
  Description of Artificial Sequence: Synthetic oligonucleotide
  Sense strand starting at position 1144 of SEQ ID NO: 1884174
aaacuuuguuaaguggcaa

SEQ ID NO: 2245917 - RNA, 19 nt, Artificial Sequence
  Description of Artificial Sequence: Synthetic oligonucleotide
  Antisense strand to SEQ ID NO: 2245916
uugccacuuaacaaaguuu

SEQ ID NO: 2245918 - RNA, 19 nt, Artificial Sequence
  Description of Artificial Sequence: Synthetic oligonucleotide
  Sense strand starting at position 1205 of SEQ ID NO: 1884174
aguugaguggcucauccaa

SEQ ID NO: 2245919 - RNA, 19 nt, Artificial Sequence
  Description of Artificial Sequence: Synthetic oligonucleotide
  Antisense strand to SEQ ID NO: 2245918
uuggaugagccacucaacu

SEQ ID NO: 2245920 - RNA, 19 nt, Artificial Sequence
  Description of Artificial Sequence: Synthetic oligonucleotide
  Sense strand starting at position 1207 of SEQ ID NO: 1884174
uugaguggcucauccaaca

SEQ ID NO: 2245921 - RNA, 19 nt, Artificial Sequence
  Description of Artificial Sequence: Synthetic oligonucleotide
  Antisense strand to SEQ ID NO: 2245920
uguuggaugagccacucaa

SEQ ID NO: 2245922 - RNA, 19 nt, Artificial Sequence
  Description of Artificial Sequence: Synthetic oligonucleotide
  Sense strand starting at position 2055 of SEQ ID NO: 1884174
cagaguaaugaaggguauu

SEQ ID NO: 2245923 - RNA, 19 nt, Artificial Sequence
  Description of Artificial Sequence: Synthetic oligonucleotide
  Antisense strand to SEQ ID NO: 2245922
aauacccuucauuacucug

SEQ ID NO: 2245924 - RNA, 19 nt, Artificial Sequence
  Description of Artificial Sequence: Synthetic oligonucleotide
  Sense strand starting at position 2099 of SEQ ID NO: 1884174
gacagucauuuagaacaga

SEQ ID NO: 2245925 - RNA, 19 nt, Artificial Sequence
  Description of Artificial Sequence: Synthetic oligonucleotide
  Antisense strand to SEQ ID NO: 2245924
ucuguucuaaaugacuguc

SEQ ID NO: 2245926 - RNA, 19 nt, Artificial Sequence
  Description of Artificial Sequence: Synthetic oligonucleotide
  Sense strand starting at position 2364 of SEQ ID NO: 1884174
caaggcauuuauuaaggua

SEQ ID NO: 2245927 - RNA, 19 nt, Artificial Sequence
  Description of Artificial Sequence: Synthetic oligonucleotide
  Antisense strand to SEQ ID NO: 2245926
uaccuuaauaaaugccuug

SEQ ID NO: 2245928 - RNA, 19 nt, Artificial Sequence
  Description of Artificial Sequence: Synthetic oligonucleotide
  Sense strand starting at position 2592 of SEQ ID NO: 1884174
gcacucugagacuaaguua

SEQ ID NO: 2245929 - RNA, 19 nt, Artificial Sequence
  Description of Artificial Sequence: Synthetic oligonucleotide
  Antisense strand to SEQ ID NO: 2245928
uaacuuagucucagagugc

SEQ ID NO: 2245930 - RNA, 19 nt, Artificial Sequence
  Description of Artificial Sequence: Synthetic oligonucleotide
  Sense strand starting at position 2621 of SEQ ID NO: 1884174
cuggaacaauuguuaccau

SEQ ID NO: 2245931 - RNA, 19 nt, Artificial Sequence
  Description of Artificial Sequence: Synthetic oligonucleotide
  Antisense strand to SEQ ID NO: 2245930
augguaacaauuguuccag

SEQ ID NO: 2245932 - RNA, 19 nt, Artificial Sequence
  Description of Artificial Sequence: Synthetic oligonucleotide
  Sense strand starting at position 2640 of SEQ ID NO: 1884174
guauguacuccucaaggua

SEQ ID NO: 2245933 - RNA, 19 nt, Artificial Sequence
  Description of Artificial Sequence: Synthetic oligonucleotide
  Antisense strand to SEQ ID NO: 2245932
uaccuugaggaguacauac

SEQ ID NO: 2245934 - RNA, 19 nt, Artificial Sequence
  Description of Artificial Sequence: Synthetic oligonucleotide
  Sense strand starting at position 2720 of SEQ ID NO: 1884174
acuauagucuugguaguaa

SEQ ID NO: 2245935 - RNA, 19 nt, Artificial Sequence
  Description of Artificial Sequence: Synthetic oligonucleotide
  Antisense strand to SEQ ID NO: 2245934
uuacuaccaagacuauagu

SEQ ID NO: 2245936 - RNA, 19 nt, Artificial Sequence
  Description of Artificial Sequence: Synthetic oligonucleotide
  Sense strand starting at position 2802 of SEQ ID NO: 1884174
uuaauagauuccuuuaacg

SEQ ID NO: 2245937 - RNA, 19 nt, Artificial Sequence
  Description of Artificial Sequence: Synthetic oligonucleotide
  Antisense strand to SEQ ID NO: 2245936
cguuaaaggaaucuauuaa

SEQ ID NO: 2245938 - RNA, 19 nt, Artificial Sequence
  Description of Artificial Sequence: Synthetic oligonucleotide
  Sense strand starting at position 2811 of SEQ ID NO: 1884174
uccuuuaacgucuaugaag

SEQ ID NO: 2245939 - RNA, 19 nt, Artificial Sequence
  Description of Artificial Sequence: Synthetic oligonucleotide
  Antisense strand to SEQ ID NO: 2245938
cuucauagacguuaaagga

SEQ ID NO: 2245940 - RNA, 19 nt, Artificial Sequence
  Description of Artificial Sequence: Synthetic oligonucleotide
  Sense strand starting at position 3385 of SEQ ID NO: 1884174
cuauauaggguuuaaguuu

SEQ ID NO: 2245941 - RNA, 19 nt, Artificial Sequence
  Description of Artificial Sequence: Synthetic oligonucleotide
  Antisense strand to SEQ ID NO: 2245940
aaacuuaaacccuauauag

SEQ ID NO: 2245942 - RNA, 19 nt, Artificial Sequence
  Description of Artificial Sequence: Synthetic oligonucleotide
  Sense strand starting at position 3440 of SEQ ID NO: 1884174
uuguaugacuaagcaaaca

SEQ ID NO: 2245943 - RNA, 19 nt, Artificial Sequence
  Description of Artificial Sequence: Synthetic oligonucleotide
  Antisense strand to SEQ ID NO: 2245942
uguuugcuuagucauacaa

SEQ ID NO: 2245944 - RNA, 19 nt, Artificial Sequence
  Description of Artificial Sequence: Synthetic oligonucleotide
  Sense strand starting at position 3534 of SEQ ID NO: 1884174
augaauugauauguagacu

SEQ ID NO: 2245945 - RNA, 19 nt, Artificial Sequence
  Description of Artificial Sequence: Synthetic oligonucleotide
  Antisense strand to SEQ ID NO: 2245944
agucuacauaucaauucau

SEQ ID NO: 2245946 - RNA, 19 nt, Artificial Sequence
  Description of Artificial Sequence: Synthetic oligonucleotide
  Sense strand starting at position 3540 of SEQ ID NO: 1884174
ugauauguagacuggaguu

SEQ ID NO: 2245947 - RNA, 19 nt, Artificial Sequence
  Description of Artificial Sequence: Synthetic oligonucleotide
  Antisense strand to SEQ ID NO: 2245946
aacuccagucuacauauca

SEQ ID NO: 2245948 - RNA, 19 nt, Artificial Sequence
  Description of Artificial Sequence: Synthetic oligonucleotide
  Sense strand starting at position 3550 of SEQ ID NO: 1884174
acuggaguuaggcauuauu

SEQ ID NO: 2245949 - RNA, 19 nt, Artificial Sequence
  Description of Artificial Sequence: Synthetic oligonucleotide
  Antisense strand to SEQ ID NO: 2245948
aauaaugccuaacuccagu

SEQ ID NO: 2245950 - RNA, 19 nt, Artificial Sequence
  Description of Artificial Sequence: Synthetic oligonucleotide
  Sense strand starting at position 3553 of SEQ ID NO: 1884174
ggaguuaggcauuauugcu

SEQ ID NO: 2245951 - RNA, 19 nt, Artificial Sequence
  Description of Artificial Sequence: Synthetic oligonucleotide
  Antisense strand to SEQ ID NO: 2245950
agcaauaaugccuaacucc

SEQ ID NO: 2245952 - RNA, 19 nt, Artificial Sequence
  Description of Artificial Sequence: Synthetic oligonucleotide
  Sense strand starting at position 3594 of SEQ ID NO: 1884174
gucagaaugcuaugacaga

SEQ ID NO: 2245953 - RNA, 19 nt, Artificial Sequence
  Description of Artificial Sequence: Synthetic oligonucleotide
  Antisense strand to SEQ ID NO: 2245952
ucugucauagcauucugac

SEQ ID NO: 2245954 - RNA, 19 nt, Artificial Sequence
  Description of Artificial Sequence: Synthetic oligonucleotide
  Sense strand starting at position 3657 of SEQ ID NO: 1884174
auacaagagguuuguucuu

SEQ ID NO: 2245955 - RNA, 19 nt, Artificial Sequence
  Description of Artificial Sequence: Synthetic oligonucleotide
  Antisense strand to SEQ ID NO: 2245954
aagaacaaaccucuuguau

SEQ ID NO: 2245956 - RNA, 19 nt, Artificial Sequence
  Description of Artificial Sequence: Synthetic oligonucleotide
  Sense strand starting at position 3686 of SEQ ID NO: 1884174
auuuaaaugcuuugguguu

SEQ ID NO: 2245957 - RNA, 19 nt, Artificial Sequence
  Description of Artificial Sequence: Synthetic oligonucleotide
  Antisense strand to SEQ ID NO: 2245956
aacaccaaagcauuuaaau

SEQ ID NO: 2245958 - RNA, 19 nt, Artificial Sequence
  Description of Artificial Sequence: Synthetic oligonucleotide
  Sense strand starting at position 3818 of SEQ ID NO: 1884174
ggaucugagugauuccaca

SEQ ID NO: 2245959 - RNA, 19 nt, Artificial Sequence
  Description of Artificial Sequence: Synthetic oligonucleotide
  Antisense strand to SEQ ID NO: 2245958
uguggaaucacucagaucc

SEQ ID NO: 2245960 - RNA, 19 nt, Artificial Sequence
  Description of Artificial Sequence: Synthetic oligonucleotide
  Sense strand starting at position 3899 of SEQ ID NO: 1884174
acucaugacccagguaauc

SEQ ID NO: 2245961 - RNA, 19 nt, Artificial Sequence
  Description of Artificial Sequence: Synthetic oligonucleotide
  Antisense strand to SEQ ID NO: 2245960
gauuaccugggucaugagu

SEQ ID NO: 2245962 - RNA, 19 nt, Artificial Sequence
  Description of Artificial Sequence: Synthetic oligonucleotide
  Sense strand starting at position 3910 of SEQ ID NO: 1884174
agguaaucacacuaauguu

SEQ ID NO: 2245963 - RNA, 19 nt, Artificial Sequence
  Description of Artificial Sequence: Synthetic oligonucleotide
  Antisense strand to SEQ ID NO: 2245962
aacauuagugugauuaccu

SEQ ID NO: 2245964 - RNA, 19 nt, Artificial Sequence
  Description of Artificial Sequence: Synthetic oligonucleotide
  Sense strand starting at position 3963 of SEQ ID NO: 1884174
uucuuacaaguguauucua

SEQ ID NO: 2245965 - RNA, 19 nt, Artificial Sequence
  Description of Artificial Sequence: Synthetic oligonucleotide
  Antisense strand to SEQ ID NO: 2245964
uagaauacacuuguaagaa

SEQ ID NO: 2245966 - RNA, 19 nt, Artificial Sequence
  Description of Artificial Sequence: Synthetic oligonucleotide
  Sense strand starting at position 11 of SEQ ID NO: 1884175
gucaaaucucaaugugaau

SEQ ID NO: 2245967 - RNA, 19 nt, Artificial Sequence
  Description of Artificial Sequence: Synthetic oligonucleotide
  Antisense strand to SEQ ID NO: 2245966
auucacauugagauuugac

SEQ ID NO: 2245968 - RNA, 19 nt, Artificial Sequence
  Description of Artificial Sequence: Synthetic oligonucleotide
  Sense strand starting at position 89 of SEQ ID NO: 1884175
gugaacugagucuacuauu

SEQ ID NO: 2245969 - RNA, 19 nt, Artificial Sequence
  Description of Artificial Sequence: Synthetic oligonucleotide
  Antisense strand to SEQ ID NO: 2245968
aauaguagacucaguucac

SEQ ID NO: 2245970 - RNA, 19 nt, Artificial Sequence
  Description of Artificial Sequence: Synthetic oligonucleotide
  Sense strand starting at position 107 of SEQ ID NO: 1884175
uccuauuacguguaggaac

SEQ ID NO: 2245971 - RNA, 19 nt, Artificial Sequence
  Description of Artificial Sequence: Synthetic oligonucleotide
  Antisense strand to SEQ ID NO: 2245970
guuccuacacguaauagga

SEQ ID NO: 2245972 - RNA, 19 nt, Artificial Sequence
  Description of Artificial Sequence: Synthetic oligonucleotide
  Sense strand starting at position 118 of SEQ ID NO: 1884175
guaggaacuaacuguugaa

SEQ ID NO: 2245973 - RNA, 19 nt, Artificial Sequence
  Description of Artificial Sequence: Synthetic oligonucleotide
  Antisense strand to SEQ ID NO: 2245972
uucaacaguuaguuccuac

SEQ ID NO: 2245974 - RNA, 19 nt, Artificial Sequence
  Description of Artificial Sequence: Synthetic oligonucleotide
  Sense strand starting at position 291 of SEQ ID NO: 1884175
acuucuuguguccauaaau

SEQ ID NO: 2245975 - RNA, 19 nt, Artificial Sequence
  Description of Artificial Sequence: Synthetic oligonucleotide
  Antisense strand to SEQ ID NO: 2245974
auuuauggacacaagaagu

SEQ ID NO: 2245976 - RNA, 19 nt, Artificial Sequence
  Description of Artificial Sequence: Synthetic oligonucleotide
  Sense strand starting at position 321 of SEQ ID NO: 1884175
gucuguucuacugaaagug

SEQ ID NO: 2245977 - RNA, 19 nt, Artificial Sequence
  Description of Artificial Sequence: Synthetic oligonucleotide
  Antisense strand to SEQ ID NO: 2245976
cacuuucaguagaacagac

SEQ ID NO: 2245978 - RNA, 19 nt, Artificial Sequence
  Description of Artificial Sequence: Synthetic oligonucleotide
  Sense strand starting at position 409 of SEQ ID NO: 1884175
acauuauuaugaguuccag

SEQ ID NO: 2245979 - RNA, 19 nt, Artificial Sequence
  Description of Artificial Sequence: Synthetic oligonucleotide
  Antisense strand to SEQ ID NO: 2245978
cuggaacucauaauaaugu

SEQ ID NO: 2245980 - RNA, 19 nt, Artificial Sequence
  Description of Artificial Sequence: Synthetic oligonucleotide
  Sense strand starting at position 522 of SEQ ID NO: 1884175
uucuguaaggccuauaauu

SEQ ID NO: 2245981 - RNA, 19 nt, Artificial Sequence
  Description of Artificial Sequence: Synthetic oligonucleotide
  Antisense strand to SEQ ID NO: 2245980
aauuauaggccuuacagaa

SEQ ID NO: 2245982 - RNA, 19 nt, Artificial Sequence
  Description of Artificial Sequence: Synthetic oligonucleotide
  Sense strand starting at position 548 of SEQ ID NO: 1884175
uugacaccucuguaaguau

SEQ ID NO: 2245983 - RNA, 19 nt, Artificial Sequence
  Description of Artificial Sequence: Synthetic oligonucleotide
  Antisense strand to SEQ ID NO: 2245982
auacuuacagaggugucaa

SEQ ID NO: 2245984 - RNA, 19 nt, Artificial Sequence
  Description of Artificial Sequence: Synthetic oligonucleotide
  Sense strand starting at position 927 of SEQ ID NO: 1884175
aucuguugauaaguuacua

SEQ ID NO: 2245985 - RNA, 19 nt, Artificial Sequence
  Description of Artificial Sequence: Synthetic oligonucleotide
  Antisense strand to SEQ ID NO: 2245984
uaguaacuuaucaacagau

SEQ ID NO: 2245986 - RNA, 19 nt, Artificial Sequence
  Description of Artificial Sequence: Synthetic oligonucleotide
  Sense strand starting at position 956 of SEQ ID NO: 1884175
acaccauuacuguaauguu

SEQ ID NO: 2245987 - RNA, 19 nt, Artificial Sequence
  Description of Artificial Sequence: Synthetic oligonucleotide
  Antisense strand to SEQ ID NO: 2245986
aacauuacaguaauggugu

SEQ ID NO: 2245988 - RNA, 19 nt, Artificial Sequence
  Description of Artificial Sequence: Synthetic oligonucleotide
  Sense strand starting at position 1047 of SEQ ID NO: 1884175
acucaagaugugcaucuau

SEQ ID NO: 2245989 - RNA, 19 nt, Artificial Sequence
  Description of Artificial Sequence: Synthetic oligonucleotide
  Antisense strand to SEQ ID NO: 2245988
auagaugcacaucuugagu

SEQ ID NO: 2245990 - RNA, 19 nt, Artificial Sequence
  Description of Artificial Sequence: Synthetic oligonucleotide
  Sense strand starting at position 1235 of SEQ ID NO: 1884175
acauuaauccagggagcag

SEQ ID NO: 2245991 - RNA, 19 nt, Artificial Sequence
  Description of Artificial Sequence: Synthetic oligonucleotide
  Antisense strand to SEQ ID NO: 2245990
cugcucccuggauuaaugu

SEQ ID NO: 2245992 - RNA, 19 nt, Artificial Sequence
  Description of Artificial Sequence: Synthetic oligonucleotide
  Sense strand starting at position 1309 of SEQ ID NO: 1884175
aaugaaagucuuuaugcag

SEQ ID NO: 2245993 - RNA, 19 nt, Artificial Sequence
  Description of Artificial Sequence: Synthetic oligonucleotide
  Antisense strand to SEQ ID NO: 2245992
cugcauaaagacuuucauu

SEQ ID NO: 2245994 - RNA, 19 nt, Artificial Sequence
  Description of Artificial Sequence: Synthetic oligonucleotide
  Sense strand starting at position 1365 of SEQ ID NO: 1884175
acuggcauugcuuacauau

SEQ ID NO: 2245995 - RNA, 19 nt, Artificial Sequence
  Description of Artificial Sequence: Synthetic oligonucleotide
  Antisense strand to SEQ ID NO: 2245994
auauguaagcaaugccagu

SEQ ID NO: 2245996 - RNA, 19 nt, Artificial Sequence
  Description of Artificial Sequence: Synthetic oligonucleotide
  Sense strand starting at position 1435 of SEQ ID NO: 1884175
ugagauaugcaacauguca

SEQ ID NO: 2245997 - RNA, 19 nt, Artificial Sequence
  Description of Artificial Sequence: Synthetic oligonucleotide
  Antisense strand to SEQ ID NO: 2245996
ugacauguugcauaucuca

SEQ ID NO: 2245998 - RNA, 19 nt, Artificial Sequence
  Description of Artificial Sequence: Synthetic oligonucleotide
  Sense strand starting at position 1456 of SEQ ID NO: 1884175
acuucuucuguugagauau

SEQ ID NO: 2245999 - RNA, 19 nt, Artificial Sequence
  Description of Artificial Sequence: Synthetic oligonucleotide
  Antisense strand to SEQ ID NO: 2245998
auaucucaacagaagaagu

SEQ ID NO: 2246000 - RNA, 19 nt, Artificial Sequence
  Description of Artificial Sequence: Synthetic oligonucleotide
  Sense strand starting at position 1569 of SEQ ID NO: 1884175
uuucgugucccgucauaug

SEQ ID NO: 2246001 - RNA, 19 nt, Artificial Sequence
  Description of Artificial Sequence: Synthetic oligonucleotide
  Antisense strand to SEQ ID NO: 2246000
cauaugacgggacacgaaa

SEQ ID NO: 2246002 - RNA, 19 nt, Artificial Sequence
  Description of Artificial Sequence: Synthetic oligonucleotide
  Sense strand starting at position 1625 of SEQ ID NO: 1884175
aguaaugaguucuuugaaa

SEQ ID NO: 2246003 - RNA, 19 nt, Artificial Sequence
  Description of Artificial Sequence: Synthetic oligonucleotide
  Antisense strand to SEQ ID NO: 2246002
uuucaaagaacucauuacu

SEQ ID NO: 2246004 - RNA, 19 nt, Artificial Sequence
  Description of Artificial Sequence: Synthetic oligonucleotide
  Sense strand starting at position 2117 of SEQ ID NO: 1884175
guuauuuauugauugacgu

SEQ ID NO: 2246005 - RNA, 19 nt, Artificial Sequence
  Description of Artificial Sequence: Synthetic oligonucleotide
  Antisense strand to SEQ ID NO: 2246004
acgucaaucaauaaauaac

SEQ ID NO: 2246006 - RNA, 19 nt, Artificial Sequence
  Description of Artificial Sequence: Synthetic oligonucleotide
  Sense strand starting at position 2130 of SEQ ID NO: 1884175
ugacguuuggaaugaacac

SEQ ID NO: 2246007 - RNA, 19 nt, Artificial Sequence
  Description of Artificial Sequence: Synthetic oligonucleotide
  Antisense strand to SEQ ID NO: 2246006
guguucauuccaaacguca

SEQ ID NO: 2246008 - RNA, 19 nt, Artificial Sequence
  Description of Artificial Sequence: Synthetic oligonucleotide
  Sense strand starting at position 2752 of SEQ ID NO: 1884175
gauugcuuaguauagauua

SEQ ID NO: 2246009 - RNA, 19 nt, Artificial Sequence
  Description of Artificial Sequence: Synthetic oligonucleotide
  Antisense strand to SEQ ID NO: 2246008
uaaucuauacuaagcaauc

SEQ ID NO: 2246010 - RNA, 19 nt, Artificial Sequence
  Description of Artificial Sequence: Synthetic oligonucleotide
  Sense strand starting at position 2824 of SEQ ID NO: 1884175
gacuuaaaugaugguuauu

SEQ ID NO: 2246011 - RNA, 19 nt, Artificial Sequence
  Description of Artificial Sequence: Synthetic oligonucleotide
  Antisense strand to SEQ ID NO: 2246010
aauaaccaucauuuaaguc

SEQ ID NO: 2246012 - RNA, 19 nt, Artificial Sequence
  Description of Artificial Sequence: Synthetic oligonucleotide
  Sense strand starting at position 2973 of SEQ ID NO: 1884175
ucguaaugccuacugugua

SEQ ID NO: 2246013 - RNA, 19 nt, Artificial Sequence
  Description of Artificial Sequence: Synthetic oligonucleotide
  Antisense strand to SEQ ID NO: 2246012
uacacaguaggcauuacga

SEQ ID NO: 2246014 - RNA, 19 nt, Artificial Sequence
  Description of Artificial Sequence: Synthetic oligonucleotide
  Sense strand starting at position 2989 of SEQ ID NO: 1884175
guaccagguacugaguaua

SEQ ID NO: 2246015 - RNA, 19 nt, Artificial Sequence
  Description of Artificial Sequence: Synthetic oligonucleotide
  Antisense strand to SEQ ID NO: 2246014
uauacucaguaccugguac

SEQ ID NO: 2246016 - RNA, 19 nt, Artificial Sequence
  Description of Artificial Sequence: Synthetic oligonucleotide
  Sense strand starting at position 3054 of SEQ ID NO: 1884175
cgaagagaucuuuauccuc

SEQ ID NO: 2246017 - RNA, 19 nt, Artificial Sequence
  Description of Artificial Sequence: Synthetic oligonucleotide
  Antisense strand to SEQ ID NO: 2246016
gaggauaaagaucucuucg

SEQ ID NO: 2246018 - RNA, 19 nt, Artificial Sequence
  Description of Artificial Sequence: Synthetic oligonucleotide
  Sense strand starting at position 3126 of SEQ ID NO: 1884175
gcuuauugugaucacauug

SEQ ID NO: 2246019 - RNA, 19 nt, Artificial Sequence
  Description of Artificial Sequence: Synthetic oligonucleotide
  Antisense strand to SEQ ID NO: 2246018
caaugugaucacaauaagc

SEQ ID NO: 2246020 - RNA, 19 nt, Artificial Sequence
  Description of Artificial Sequence: Synthetic oligonucleotide
  Sense strand starting at position 3131 of SEQ ID NO: 1884175
uugugaucacauuggaggu

SEQ ID NO: 2246021 - RNA, 19 nt, Artificial Sequence
  Description of Artificial Sequence: Synthetic oligonucleotide
  Antisense strand to SEQ ID NO: 2246020
accuccaaugugaucacaa

SEQ ID NO: 2246022 - RNA, 19 nt, Artificial Sequence
  Description of Artificial Sequence: Synthetic oligonucleotide
  Sense strand starting at position 3135 of SEQ ID NO: 1884175
gaucacauuggagguuuaa

SEQ ID NO: 2246023 - RNA, 19 nt, Artificial Sequence
  Description of Artificial Sequence: Synthetic oligonucleotide
  Antisense strand to SEQ ID NO: 2246022
uuaaaccuccaaugugauc

SEQ ID NO: 2246024 - RNA, 19 nt, Artificial Sequence
  Description of Artificial Sequence: Synthetic oligonucleotide
  Sense strand starting at position 3265 of SEQ ID NO: 1884175
ggaaaugaauuaucuguac

SEQ ID NO: 2246025 - RNA, 19 nt, Artificial Sequence
  Description of Artificial Sequence: Synthetic oligonucleotide
  Antisense strand to SEQ ID NO: 2246024
guacagauaauucauuucc

SEQ ID NO: 2246026 - RNA, 19 nt, Artificial Sequence
  Description of Artificial Sequence: Synthetic oligonucleotide
  Sense strand starting at position 3269 of SEQ ID NO: 1884175
augaauuaucuguacaggu

SEQ ID NO: 2246027 - RNA, 19 nt, Artificial Sequence
  Description of Artificial Sequence: Synthetic oligonucleotide
  Antisense strand to SEQ ID NO: 2246026
accuguacagauaauucau

SEQ ID NO: 2246028 - RNA, 19 nt, Artificial Sequence
  Description of Artificial Sequence: Synthetic oligonucleotide
  Sense strand starting at position 3271 of SEQ ID NO: 1884175
gaauuaucuguacagguua

SEQ ID NO: 2246029 - RNA, 19 nt, Artificial Sequence
  Description of Artificial Sequence: Synthetic oligonucleotide
  Antisense strand to SEQ ID NO: 2246028
uaaccuguacagauaauuc

SEQ ID NO: 2246030 - RNA, 19 nt, Artificial Sequence
  Description of Artificial Sequence: Synthetic oligonucleotide
  Sense strand starting at position 3284 of SEQ ID NO: 1884175
agguuauucucauuaccac

SEQ ID NO: 2246031 - RNA, 19 nt, Artificial Sequence
  Description of Artificial Sequence: Synthetic oligonucleotide
  Antisense strand to SEQ ID NO: 2246030
gugguaaugagaauaaccu

SEQ ID NO: 2246032 - RNA, 19 nt, Artificial Sequence
  Description of Artificial Sequence: Synthetic oligonucleotide
  Sense strand starting at position 3285 of SEQ ID NO: 1884175
gguuauucucauuaccaca

SEQ ID NO: 2246033 - RNA, 19 nt, Artificial Sequence
  Description of Artificial Sequence: Synthetic oligonucleotide
  Antisense strand to SEQ ID NO: 2246032
ugugguaaugagaauaacc

SEQ ID NO: 2246034 - RNA, 19 nt, Artificial Sequence
  Description of Artificial Sequence: Synthetic oligonucleotide
  Sense strand starting at position 3392 of SEQ ID NO: 1884175
ugcauauucuauuuaugug

SEQ ID NO: 2246035 - RNA, 19 nt, Artificial Sequence
  Description of Artificial Sequence: Synthetic oligonucleotide
  Antisense strand to SEQ ID NO: 2246034
cacauaaauagaauaugca

SEQ ID NO: 2246036 - RNA, 19 nt, Artificial Sequence
  Description of Artificial Sequence: Synthetic oligonucleotide
  Sense strand starting at position 3441 of SEQ ID NO: 1884175
agaggaucuuccuccacua

SEQ ID NO: 2246037 - RNA, 19 nt, Artificial Sequence
  Description of Artificial Sequence: Synthetic oligonucleotide
  Antisense strand to SEQ ID NO: 2246036
uaguggaggaagauccucu

SEQ ID NO: 2246038 - RNA, 19 nt, Artificial Sequence
  Description of Artificial Sequence: Synthetic oligonucleotide
  Sense strand starting at position 3513 of SEQ ID NO: 1884175
aggucucucccaugggaga

SEQ ID NO: 2246039 - RNA, 19 nt, Artificial Sequence
  Description of Artificial Sequence: Synthetic oligonucleotide
  Antisense strand to SEQ ID NO: 2246038
ucucccaugggagagaccu

SEQ ID NO: 2246040 - RNA, 19 nt, Artificial Sequence
  Description of Artificial Sequence: Synthetic oligonucleotide
  Sense strand starting at position 3514 of SEQ ID NO: 1884175
ggucucucccaugggagaa

SEQ ID NO: 2246041 - RNA, 19 nt, Artificial Sequence
  Description of Artificial Sequence: Synthetic oligonucleotide
  Antisense strand to SEQ ID NO: 2246040
uucucccaugggagagacc

SEQ ID NO: 2246042 - RNA, 19 nt, Artificial Sequence
  Description of Artificial Sequence: Synthetic oligonucleotide
  Sense strand starting at position 3515 of SEQ ID NO: 1884175
gucucucccaugggagaau

SEQ ID NO: 2246043 - RNA, 19 nt, Artificial Sequence
  Description of Artificial Sequence: Synthetic oligonucleotide
  Antisense strand to SEQ ID NO: 2246042
auucucccaugggagagac

SEQ ID NO: 2246044 - RNA, 19 nt, Artificial Sequence
  Description of Artificial Sequence: Synthetic oligonucleotide
  Sense strand starting at position 3606 of SEQ ID NO: 1884175
ugcaaacugccaugauaag

SEQ ID NO: 2246045 - RNA, 19 nt, Artificial Sequence
  Description of Artificial Sequence: Synthetic oligonucleotide
  Antisense strand to SEQ ID NO: 2246044
cuuaucauggcaguuugca

SEQ ID NO: 2246046 - RNA, 19 nt, Artificial Sequence
  Description of Artificial Sequence: Synthetic oligonucleotide
  Sense strand starting at position 244 of SEQ ID NO: 1884176
gacagcugauccucucuga

SEQ ID NO: 2246047 - RNA, 19 nt, Artificial Sequence
  Description of Artificial Sequence: Synthetic oligonucleotide
  Antisense strand to SEQ ID NO: 2246046
ucagagaggaucagcuguc

SEQ ID NO: 2246048 - RNA, 19 nt, Artificial Sequence
  Description of Artificial Sequence: Synthetic oligonucleotide
  Sense strand starting at position 359 of SEQ ID NO: 1884176
gaaguuacaucuucuggaa

SEQ ID NO: 2246049 - RNA, 19 nt, Artificial Sequence
  Description of Artificial Sequence: Synthetic oligonucleotide
  Antisense strand to SEQ ID NO: 2246048
uuccagaagauguaacuuc

SEQ ID NO: 2246050 - RNA, 19 nt, Artificial Sequence
  Description of Artificial Sequence: Synthetic oligonucleotide
  Sense strand starting at position 363 of SEQ ID NO: 1884176
uuacaucuucuggaaaguc

SEQ ID NO: 2246051 - RNA, 19 nt, Artificial Sequence
  Description of Artificial Sequence: Synthetic oligonucleotide
  Antisense strand to SEQ ID NO: 2246050
gacuuuccagaagauguaa

SEQ ID NO: 2246052 - RNA, 19 nt, Artificial Sequence
  Description of Artificial Sequence: Synthetic oligonucleotide
  Sense strand starting at position 386 of SEQ ID NO: 1884176
aguacagcauuauuaugaa

SEQ ID NO: 2246053 - RNA, 19 nt, Artificial Sequence
  Description of Artificial Sequence: Synthetic oligonucleotide
  Antisense strand to SEQ ID NO: 2246052
uucauaauaaugcuguacu

SEQ ID NO: 2246054 - RNA, 19 nt, Artificial Sequence
  Description of Artificial Sequence: Synthetic oligonucleotide
  Sense strand starting at position 402 of SEQ ID NO: 1884176
gaauauguccaucagugca

SEQ ID NO: 2246055 - RNA, 19 nt, Artificial Sequence
  Description of Artificial Sequence: Synthetic oligonucleotide
  Antisense strand to SEQ ID NO: 2246054
ugcacugauggacauauuc

SEQ ID NO: 2246056 - RNA, 19 nt, Artificial Sequence
  Description of Artificial Sequence: Synthetic oligonucleotide
  Sense strand starting at position 498 of SEQ ID NO: 1884176
agaaauauuugucagagca

SEQ ID NO: 2246057 - RNA, 19 nt, Artificial Sequence
  Description of Artificial Sequence: Synthetic oligonucleotide
  Antisense strand to SEQ ID NO: 2246056
ugcucugacaaauauuucu

SEQ ID NO: 2246058 - RNA, 19 nt, Artificial Sequence
  Description of Artificial Sequence: Synthetic oligonucleotide
  Sense strand starting at position 500 of SEQ ID NO: 1884176
aaauauuugucagagcagu

SEQ ID NO: 2246059 - RNA, 19 nt, Artificial Sequence
  Description of Artificial Sequence: Synthetic oligonucleotide
  Antisense strand to SEQ ID NO: 2246058
acugcucugacaaauauuu

SEQ ID NO: 2246060 - RNA, 19 nt, Artificial Sequence
  Description of Artificial Sequence: Synthetic oligonucleotide
  Sense strand starting at position 532 of SEQ ID NO: 1884176
uggcauuauugagucuuaa

SEQ ID NO: 2246061 - RNA, 19 nt, Artificial Sequence
  Description of Artificial Sequence: Synthetic oligonucleotide
  Antisense strand to SEQ ID NO: 2246060
uuaagacucaauaaugcca

SEQ ID NO: 2246062 - RNA, 19 nt, Artificial Sequence
  Description of Artificial Sequence: Synthetic oligonucleotide
  Sense strand starting at position 547 of SEQ ID NO: 1884176
uuaaucugugcgcuagcaa

SEQ ID NO: 2246063 - RNA, 19 nt, Artificial Sequence
  Description of Artificial Sequence: Synthetic oligonucleotide
  Antisense strand to SEQ ID NO: 2246062
uugcuagcgcacagauuaa

SEQ ID NO: 2246064 - RNA, 19 nt, Artificial Sequence
  Description of Artificial Sequence: Synthetic oligonucleotide
  Sense strand starting at position 614 of SEQ ID NO: 1884176
ugacucuuccguggagcuu

SEQ ID NO: 2246065 - RNA, 19 nt, Artificial Sequence
  Description of Artificial Sequence: Synthetic oligonucleotide
  Antisense strand to SEQ ID NO: 2246064
aagcuccacggaagaguca

SEQ ID NO: 2246066 - RNA, 19 nt, Artificial Sequence
  Description of Artificial Sequence: Synthetic oligonucleotide
  Sense strand starting at position 950 of SEQ ID NO: 1884176
gcucuucugguuuggacua

SEQ ID NO: 2246067 - RNA, 19 nt, Artificial Sequence
  Description of Artificial Sequence: Synthetic oligonucleotide
  Antisense strand to SEQ ID NO: 2246066
uaguccaaaccagaagagc

SEQ ID NO: 2246068 - RNA, 19 nt, Artificial Sequence
  Description of Artificial Sequence: Synthetic oligonucleotide
  Sense strand starting at position 957 of SEQ ID NO: 1884176
ugguuuggacuacgaguuu

SEQ ID NO: 2246069 - RNA, 19 nt, Artificial Sequence
  Description of Artificial Sequence: Synthetic oligonucleotide
  Antisense strand to SEQ ID NO: 2246068
aaacucguaguccaaacca

SEQ ID NO: 2246070 - RNA, 19 nt, Artificial Sequence
  Description of Artificial Sequence: Synthetic oligonucleotide
  Sense strand starting at position 963 of SEQ ID NO: 1884176
ggacuacgaguuuguaauu

SEQ ID NO: 2246071 - RNA, 19 nt, Artificial Sequence
  Description of Artificial Sequence: Synthetic oligonucleotide
  Antisense strand to SEQ ID NO: 2246070
aauuacaaacucguagucc

SEQ ID NO: 2246072 - RNA, 19 nt, Artificial Sequence
  Description of Artificial Sequence: Synthetic oligonucleotide
  Sense strand starting at position 976 of SEQ ID NO: 1884176
guaauugcuuuccuuaaug

SEQ ID NO: 2246073 - RNA, 19 nt, Artificial Sequence
  Description of Artificial Sequence: Synthetic oligonucleotide
  Antisense strand to SEQ ID NO: 2246072
cauuaaggaaagcaauuac

SEQ ID NO: 2246074 - RNA, 19 nt, Artificial Sequence
  Description of Artificial Sequence: Synthetic oligonucleotide
  Sense strand starting at position 1014 of SEQ ID NO: 1884176
agaucuuugcgguguugaa

SEQ ID NO: 2246075 - RNA, 19 nt, Artificial Sequence
  Description of Artificial Sequence: Synthetic oligonucleotide
  Antisense strand to SEQ ID NO: 2246074
uucaacaccgcaaagaucu

SEQ ID NO: 2246076 - RNA, 19 nt, Artificial Sequence
  Description of Artificial Sequence: Synthetic oligonucleotide
  Sense strand starting at position 2190 of SEQ ID NO: 1884176
cguguaucccaccgagaaa

SEQ ID NO: 2246077 - RNA, 19 nt, Artificial Sequence
  Description of Artificial Sequence: Synthetic oligonucleotide
  Antisense strand to SEQ ID NO: 2246076
uuucucggugggauacacg

SEQ ID NO: 2246078 - RNA, 19 nt, Artificial Sequence
  Description of Artificial Sequence: Synthetic oligonucleotide
  Sense strand starting at position 2191 of SEQ ID NO: 1884176
guguaucccaccgagaaag

SEQ ID NO: 2246079 - RNA, 19 nt, Artificial Sequence
  Description of Artificial Sequence: Synthetic oligonucleotide
  Antisense strand to SEQ ID NO: 2246078
cuuucucggugggauacac

SEQ ID NO: 2246080 - RNA, 19 nt, Artificial Sequence
  Description of Artificial Sequence: Synthetic oligonucleotide
  Sense strand starting at position 2206 of SEQ ID NO: 1884176
aaagucaacugccuggaua

SEQ ID NO: 2246081 - RNA, 19 nt, Artificial Sequence
  Description of Artificial Sequence: Synthetic oligonucleotide
  Antisense strand to SEQ ID NO: 2246080
uauccaggcaguugacuuu

SEQ ID NO: 2246082 - RNA, 19 nt, Artificial Sequence
  Description of Artificial Sequence: Synthetic oligonucleotide
  Sense strand starting at position 2398 of SEQ ID NO: 1884176
cacgcuuggcgauugugau

SEQ ID NO: 2246083 - RNA, 19 nt, Artificial Sequence
  Description of Artificial Sequence: Synthetic oligonucleotide
  Antisense strand to SEQ ID NO: 2246082
aucacaaucgccaagcgug

SEQ ID NO: 2246084 - RNA, 19 nt, Artificial Sequence
  Description of Artificial Sequence: Synthetic oligonucleotide
  Sense strand starting at position 2950 of SEQ ID NO: 1884176
aaauuugcgucugaagaua

SEQ ID NO: 2246085 - RNA, 19 nt, Artificial Sequence
  Description of Artificial Sequence: Synthetic oligonucleotide
  Antisense strand to SEQ ID NO: 2246084
uaucuucagacgcaaauuu

SEQ ID NO: 2246086 - RNA, 19 nt, Artificial Sequence
  Description of Artificial Sequence: Synthetic oligonucleotide
  Sense strand starting at position 2955 of SEQ ID NO: 1884176
ugcgucugaagauacaaau

SEQ ID NO: 2246087 - RNA, 19 nt, Artificial Sequence
  Description of Artificial Sequence: Synthetic oligonucleotide
  Antisense strand to SEQ ID NO: 2246086
auuuguaucuucagacgca

SEQ ID NO: 2246088 - RNA, 19 nt, Artificial Sequence
  Description of Artificial Sequence: Synthetic oligonucleotide
  Sense strand starting at position 3000 of SEQ ID NO: 1884176
gacagucaucccgggcaga

SEQ ID NO: 2246089 - RNA, 19 nt, Artificial Sequence
  Description of Artificial Sequence: Synthetic oligonucleotide
  Antisense strand to SEQ ID NO: 2246088
ucugcccgggaugacuguc

SEQ ID NO: 2246090 - RNA, 19 nt, Artificial Sequence
  Description of Artificial Sequence: Synthetic oligonucleotide
  Sense strand starting at position 3099 of SEQ ID NO: 1884176
cugacuucgggugaacaca

SEQ ID NO: 2246091 - RNA, 19 nt, Artificial Sequence
  Description of Artificial Sequence: Synthetic oligonucleotide
  Antisense strand to SEQ ID NO: 2246090
uguguucacccgaagucag

SEQ ID NO: 2246092 - RNA, 19 nt, Artificial Sequence
  Description of Artificial Sequence: Synthetic oligonucleotide
  Sense strand starting at position 3208 of SEQ ID NO: 1884176
auuaaccgagcucagaaau

SEQ ID NO: 2246093 - RNA, 19 nt, Artificial Sequence
  Description of Artificial Sequence: Synthetic oligonucleotide
  Antisense strand to SEQ ID NO: 2246092
auuucugagcucgguuaau

SEQ ID NO: 2246094 - RNA, 19 nt, Artificial Sequence
  Description of Artificial Sequence: Synthetic oligonucleotide
  Sense strand starting at position 3226 of SEQ ID NO: 1884176
ucguuucuggcugcucaaa

SEQ ID NO: 2246095 - RNA, 19 nt, Artificial Sequence
  Description of Artificial Sequence: Synthetic oligonucleotide
  Antisense strand to SEQ ID NO: 2246094
uuugagcagccagaaacga

SEQ ID NO: 2246096 - RNA, 19 nt, Artificial Sequence
  Description of Artificial Sequence: Synthetic oligonucleotide
  Sense strand starting at position 3228 of SEQ ID NO: 1884176
guuucuggcugcucaaaga

SEQ ID NO: 2246097 - RNA, 19 nt, Artificial Sequence
  Description of Artificial Sequence: Synthetic oligonucleotide
  Antisense strand to SEQ ID NO: 2246096
ucuuugagcagccagaaac

SEQ ID NO: 2246098 - RNA, 19 nt, Artificial Sequence
  Description of Artificial Sequence: Synthetic oligonucleotide
  Sense strand starting at position 3250 of SEQ ID NO: 1884176
gcuguuucgacagaaccuu

SEQ ID NO: 2246099 - RNA, 19 nt, Artificial Sequence
  Description of Artificial Sequence: Synthetic oligonucleotide
  Antisense strand to SEQ ID NO: 2246098
aagguucugucgaaacagc

SEQ ID NO: 2246100 - RNA, 19 nt, Artificial Sequence
  Description of Artificial Sequence: Synthetic oligonucleotide
  Sense strand starting at position 3256 of SEQ ID NO: 1884176
ucgacagaaccuugacagu

SEQ ID NO: 2246101 - RNA, 19 nt, Artificial Sequence
  Description of Artificial Sequence: Synthetic oligonucleotide
  Antisense strand to SEQ ID NO: 2246100
acugucaagguucugucga

SEQ ID NO: 2246102 - RNA, 19 nt, Artificial Sequence
  Description of Artificial Sequence: Synthetic oligonucleotide
  Sense strand starting at position 3453 of SEQ ID NO: 1884176
gcccauccuggugagaacu

SEQ ID NO: 2246103 - RNA, 19 nt, Artificial Sequence
  Description of Artificial Sequence: Synthetic oligonucleotide
  Antisense strand to SEQ ID NO: 2246102
aguucucaccaggaugggc

SEQ ID NO: 2246104 - RNA, 19 nt, Artificial Sequence
  Description of Artificial Sequence: Synthetic oligonucleotide
  Sense strand starting at position 3459 of SEQ ID NO: 1884176
ccuggugagaacuggcauu

SEQ ID NO: 2246105 - RNA, 19 nt, Artificial Sequence
  Description of Artificial Sequence: Synthetic oligonucleotide
  Antisense strand to SEQ ID NO: 2246104
aaugccaguucucaccagg

SEQ ID NO: 2246106 - RNA, 19 nt, Artificial Sequence
  Description of Artificial Sequence: Synthetic oligonucleotide
  Sense strand starting at position 3507 of SEQ ID NO: 1884176
uuuccaguauuggcauaaa

SEQ ID NO: 2246107 - RNA, 19 nt, Artificial Sequence
  Description of Artificial Sequence: Synthetic oligonucleotide
  Antisense strand to SEQ ID NO: 2246106
uuuaugccaauacuggaaa

SEQ ID NO: 2246108 - RNA, 19 nt, Artificial Sequence
  Description of Artificial Sequence: Synthetic oligonucleotide
  Sense strand starting at position 3526 of SEQ ID NO: 1884176
ggauguuuccauugugagg

SEQ ID NO: 2246109 - RNA, 19 nt, Artificial Sequence
  Description of Artificial Sequence: Synthetic oligonucleotide
  Antisense strand to SEQ ID NO: 2246108
ccucacaauggaaacaucc

SEQ ID NO: 2246110 - RNA, 19 nt, Artificial Sequence
  Description of Artificial Sequence: Synthetic oligonucleotide
  Sense strand starting at position 3535 of SEQ ID NO: 1884176
cauugugaggucugcaaga

SEQ ID NO: 2246111 - RNA, 19 nt, Artificial Sequence
  Description of Artificial Sequence: Synthetic oligonucleotide
  Antisense strand to SEQ ID NO: 2246110
ucuugcagaccucacaaug

SEQ ID NO: 2246112 - RNA, 19 nt, Artificial Sequence
  Description of Artificial Sequence: Synthetic oligonucleotide
  Sense strand starting at position 3537 of SEQ ID NO: 1884176
uugugaggucugcaagaug

SEQ ID NO: 2246113 - RNA, 19 nt, Artificial Sequence
  Description of Artificial Sequence: Synthetic oligonucleotide
  Antisense strand to SEQ ID NO: 2246112
caucuugcagaccucacaa

SEQ ID NO: 2246114 - RNA, 19 nt, Artificial Sequence
  Description of Artificial Sequence: Synthetic oligonucleotide
  Sense strand starting at position 3598 of SEQ ID NO: 1884176
uauuguaaugcguaaguau

SEQ ID NO: 2246115 - RNA, 19 nt, Artificial Sequence
  Description of Artificial Sequence: Synthetic oligonucleotide
  Antisense strand to SEQ ID NO: 2246114
auacuuacgcauuacaaua

SEQ ID NO: 2246116 - RNA, 19 nt, Artificial Sequence
  Description of Artificial Sequence: Synthetic oligonucleotide
  Sense strand starting at position 3718 of SEQ ID NO: 1884176
gggccaguuaccuguuuau

SEQ ID NO: 2246117 - RNA, 19 nt, Artificial Sequence
  Description of Artificial Sequence: Synthetic oligonucleotide
  Antisense strand to SEQ ID NO: 2246116
auaaacagguaacuggccc

SEQ ID NO: 2246118 - RNA, 19 nt, Artificial Sequence
  Description of Artificial Sequence: Synthetic oligonucleotide
  Sense strand starting at position 3721 of SEQ ID NO: 1884176
ccaguuaccuguuuauauc

SEQ ID NO: 2246119 - RNA, 19 nt, Artificial Sequence
  Description of Artificial Sequence: Synthetic oligonucleotide
  Antisense strand to SEQ ID NO: 2246118
gauauaaacagguaacugg

SEQ ID NO: 2246120 - RNA, 19 nt, Artificial Sequence
  Description of Artificial Sequence: Synthetic oligonucleotide
  Sense strand starting at position 3753 of SEQ ID NO: 1884176
ccauguacuuuguugacga

SEQ ID NO: 2246121 - RNA, 19 nt, Artificial Sequence
  Description of Artificial Sequence: Synthetic oligonucleotide
  Antisense strand to SEQ ID NO: 2246120
ucgucaacaaaguacaugg

SEQ ID NO: 2246122 - RNA, 19 nt, Artificial Sequence
  Description of Artificial Sequence: Synthetic oligonucleotide
  Sense strand starting at position 3800 of SEQ ID NO: 1884176
uuggguaacgucuaugcau

SEQ ID NO: 2246123 - RNA, 19 nt, Artificial Sequence
  Description of Artificial Sequence: Synthetic oligonucleotide
  Antisense strand to SEQ ID NO: 2246122
augcauagacguuacccaa

SEQ ID NO: 2246124 - RNA, 19 nt, Artificial Sequence
  Description of Artificial Sequence: Synthetic oligonucleotide
  Sense strand starting at position 3802 of SEQ ID NO: 1884176
ggguaacgucuaugcaucu

SEQ ID NO: 2246125 - RNA, 19 nt, Artificial Sequence
  Description of Artificial Sequence: Synthetic oligonucleotide
  Antisense strand to SEQ ID NO: 2246124
agaugcauagacguuaccc

SEQ ID NO: 2246126 - RNA, 19 nt, Artificial Sequence
  Description of Artificial Sequence: Synthetic oligonucleotide
  Sense strand starting at position 232 of SEQ ID NO: 1884177
gaggcagugagucaugacu

SEQ ID NO: 2246127 - RNA, 19 nt, Artificial Sequence
  Description of Artificial Sequence: Synthetic oligonucleotide
  Antisense strand to SEQ ID NO: 2246126
agucaugacucacugccuc

SEQ ID NO: 2246128 - RNA, 19 nt, Artificial Sequence
  Description of Artificial Sequence: Synthetic oligonucleotide
  Sense strand starting at position 556 of SEQ ID NO: 1884177
gacagcugauccucucuga

SEQ ID NO: 2246129 - RNA, 19 nt, Artificial Sequence
  Description of Artificial Sequence: Synthetic oligonucleotide
  Antisense strand to SEQ ID NO: 2246128
ucagagaggaucagcuguc

SEQ ID NO: 2246130 - RNA, 19 nt, Artificial Sequence
  Description of Artificial Sequence: Synthetic oligonucleotide
  Sense strand starting at position 671 of SEQ ID NO: 1884177
gaaguuacaucuucuggaa

SEQ ID NO: 2246131 - RNA, 19 nt, Artificial Sequence
  Description of Artificial Sequence: Synthetic oligonucleotide
  Antisense strand to SEQ ID NO: 2246130
uuccagaagauguaacuuc

SEQ ID NO: 2246132 - RNA, 19 nt, Artificial Sequence
  Description of Artificial Sequence: Synthetic oligonucleotide
  Sense strand starting at position 675 of SEQ ID NO: 1884177
uuacaucuucuggaaaguc

SEQ ID NO: 2246133 - RNA, 19 nt, Artificial Sequence
  Description of Artificial Sequence: Synthetic oligonucleotide
  Antisense strand to SEQ ID NO: 2246132
gacuuuccagaagauguaa

SEQ ID NO: 2246134 - RNA, 19 nt, Artificial Sequence
  Description of Artificial Sequence: Synthetic oligonucleotide
  Sense strand starting at position 698 of SEQ ID NO: 1884177
aguacagcauuauuaugaa

SEQ ID NO: 2246135 - RNA, 19 nt, Artificial Sequence
  Description of Artificial Sequence: Synthetic oligonucleotide
  Antisense strand to SEQ ID NO: 2246134
uucauaauaaugcuguacu

SEQ ID NO: 2246136 - RNA, 19 nt, Artificial Sequence
  Description of Artificial Sequence: Synthetic oligonucleotide
  Sense strand starting at position 714 of SEQ ID NO: 1884177
gaauauguccaucagugca

SEQ ID NO: 2246137 - RNA, 19 nt, Artificial Sequence
  Description of Artificial Sequence: Synthetic oligonucleotide
  Antisense strand to SEQ ID NO: 2246136
ugcacugauggacauauuc

SEQ ID NO: 2246138 - RNA, 19 nt, Artificial Sequence
  Description of Artificial Sequence: Synthetic oligonucleotide
  Sense strand starting at position 810 of SEQ ID NO: 1884177
agaaauauuugucagagca

SEQ ID NO: 2246139 - RNA, 19 nt, Artificial Sequence
  Description of Artificial Sequence: Synthetic oligonucleotide
  Antisense strand to SEQ ID NO: 2246138
ugcucugacaaauauuucu

SEQ ID NO: 2246140 - RNA, 19 nt, Artificial Sequence
  Description of Artificial Sequence: Synthetic oligonucleotide
  Sense strand starting at position 812 of SEQ ID NO: 1884177
aaauauuugucagagcagu

SEQ ID NO: 2246141 - RNA, 19 nt, Artificial Sequence
  Description of Artificial Sequence: Synthetic oligonucleotide
  Antisense strand to SEQ ID NO: 2246140
acugcucugacaaauauuu

SEQ ID NO: 2246142 - RNA, 19 nt, Artificial Sequence
  Description of Artificial Sequence: Synthetic oligonucleotide
  Sense strand starting at position 844 of SEQ ID NO: 1884177
uggcauuauugagucuuaa

SEQ ID NO: 2246143 - RNA, 19 nt, Artificial Sequence
  Description of Artificial Sequence: Synthetic oligonucleotide
  Antisense strand to SEQ ID NO: 2246142
uuaagacucaauaaugcca

SEQ ID NO: 2246144 - RNA, 19 nt, Artificial Sequence
  Description of Artificial Sequence: Synthetic oligonucleotide
  Sense strand starting at position 859 of SEQ ID NO: 1884177
uuaaucugugcgcuagcaa

SEQ ID NO: 2246145 - RNA, 19 nt, Artificial Sequence
  Description of Artificial Sequence: Synthetic oligonucleotide
  Antisense strand to SEQ ID NO: 2246144
uugcuagcgcacagauuaa

SEQ ID NO: 2246146 - RNA, 19 nt, Artificial Sequence
  Description of Artificial Sequence: Synthetic oligonucleotide
  Sense strand starting at position 887 of SEQ ID NO: 1884177
uucgcuucuuuguuauaac

SEQ ID NO: 2246147 - RNA, 19 nt, Artificial Sequence
  Description of Artificial Sequence: Synthetic oligonucleotide
  Antisense strand to SEQ ID NO: 2246146
guuauaacaaagaagcgaa

SEQ ID NO: 2246148 - RNA, 19 nt, Artificial Sequence
  Description of Artificial Sequence: Synthetic oligonucleotide
  Sense strand starting at position 926 of SEQ ID NO: 1884177
ugacucuuccguggagcuu

SEQ ID NO: 2246149 - RNA, 19 nt, Artificial Sequence
  Description of Artificial Sequence: Synthetic oligonucleotide
  Antisense strand to SEQ ID NO: 2246148
aagcuccacggaagaguca

SEQ ID NO: 2246150 - RNA, 19 nt, Artificial Sequence
  Description of Artificial Sequence: Synthetic oligonucleotide
  Sense strand starting at position 1130 of SEQ ID NO: 1884177
ccaggcuguguucgauuca

SEQ ID NO: 2246151 - RNA, 19 nt, Artificial Sequence
  Description of Artificial Sequence: Synthetic oligonucleotide
  Antisense strand to SEQ ID NO: 2246150
ugaaucgaacacagccugg

SEQ ID NO: 2246152 - RNA, 19 nt, Artificial Sequence
  Description of Artificial Sequence: Synthetic oligonucleotide
  Sense strand starting at position 1262 of SEQ ID NO: 1884177
gcucuucugguuuggacua

SEQ ID NO: 2246153 - RNA, 19 nt, Artificial Sequence
  Description of Artificial Sequence: Synthetic oligonucleotide
  Antisense strand to SEQ ID NO: 2246152
uaguccaaaccagaagagc

SEQ ID NO: 2246154 - RNA, 19 nt, Artificial Sequence
  Description of Artificial Sequence: Synthetic oligonucleotide
  Sense strand starting at position 1269 of SEQ ID NO: 1884177
ugguuuggacuacgaguuu

SEQ ID NO: 2246155 - RNA, 19 nt, Artificial Sequence
  Description of Artificial Sequence: Synthetic oligonucleotide
  Antisense strand to SEQ ID NO: 2246154
aaacucguaguccaaacca

SEQ ID NO: 2246156 - RNA, 19 nt, Artificial Sequence
  Description of Artificial Sequence: Synthetic oligonucleotide
  Sense strand starting at position 1275 of SEQ ID NO: 1884177
ggacuacgaguuuguaauu

SEQ ID NO: 2246157 - RNA, 19 nt, Artificial Sequence
  Description of Artificial Sequence: Synthetic oligonucleotide
  Antisense strand to SEQ ID NO: 2246156
aauuacaaacucguagucc

SEQ ID NO: 2246158 - RNA, 19 nt, Artificial Sequence
  Description of Artificial Sequence: Synthetic oligonucleotide
  Sense strand starting at position 1280 of SEQ ID NO: 1884177
acgaguuuguaauugcuuu

SEQ ID NO: 2246159 - RNA, 19 nt, Artificial Sequence
  Description of Artificial Sequence: Synthetic oligonucleotide
  Antisense strand to SEQ ID NO: 2246158
aaagcaauuacaaacucgu

SEQ ID NO: 2246160 - RNA, 19 nt, Artificial Sequence
  Description of Artificial Sequence: Synthetic oligonucleotide
  Sense strand starting at position 1288 of SEQ ID NO: 1884177
guaauugcuuuccuuaaug

SEQ ID NO: 2246161 - RNA, 19 nt, Artificial Sequence
  Description of Artificial Sequence: Synthetic oligonucleotide
  Antisense strand to SEQ ID NO: 2246160
cauuaaggaaagcaauuac

SEQ ID NO: 2246162 - RNA, 19 nt, Artificial Sequence
  Description of Artificial Sequence: Synthetic oligonucleotide
  Sense strand starting at position 1326 of SEQ ID NO: 1884177
agaucuuugcgguguugaa

SEQ ID NO: 2246163 - RNA, 19 nt, Artificial Sequence
  Description of Artificial Sequence: Synthetic oligonucleotide
  Antisense strand to SEQ ID NO: 2246162
uucaacaccgcaaagaucu

SEQ ID NO: 2246164 - RNA, 19 nt, Artificial Sequence
  Description of Artificial Sequence: Synthetic oligonucleotide
  Sense strand starting at position 2502 of SEQ ID NO: 1884177
cguguaucccaccgagaaa

SEQ ID NO: 2246165 - RNA, 19 nt, Artificial Sequence
  Description of Artificial Sequence: Synthetic oligonucleotide
  Antisense strand to SEQ ID NO: 2246164
uuucucggugggauacacg

SEQ ID NO: 2246166 - RNA, 19 nt, Artificial Sequence
  Description of Artificial Sequence: Synthetic oligonucleotide
  Sense strand starting at position 2503 of SEQ ID NO: 1884177
guguaucccaccgagaaag

SEQ ID NO: 2246167 - RNA, 19 nt, Artificial Sequence
  Description of Artificial Sequence: Synthetic oligonucleotide
  Antisense strand to SEQ ID NO: 2246166
cuuucucggugggauacac

SEQ ID NO: 2246168 - RNA, 19 nt, Artificial Sequence
  Description of Artificial Sequence: Synthetic oligonucleotide
  Sense strand starting at position 2518 of SEQ ID NO: 1884177
aaagucaacugccuggaua

SEQ ID NO: 2246169 - RNA, 19 nt, Artificial Sequence
  Description of Artificial Sequence: Synthetic oligonucleotide
  Antisense strand to SEQ ID NO: 2246168
uauccaggcaguugacuuu

SEQ ID NO: 2246170 - RNA, 19 nt, Artificial Sequence
  Description of Artificial Sequence: Synthetic oligonucleotide
  Sense strand starting at position 2710 of SEQ ID NO: 1884177
cacgcuuggcgauugugau

SEQ ID NO: 2246171 - RNA, 19 nt, Artificial Sequence
  Description of Artificial Sequence: Synthetic oligonucleotide
  Antisense strand to SEQ ID NO: 2246170
aucacaaucgccaagcgug

SEQ ID NO: 2246172 - RNA, 19 nt, Artificial Sequence
  Description of Artificial Sequence: Synthetic oligonucleotide
  Sense strand starting at position 3262 of SEQ ID NO: 1884177
aaauuugcgucugaagaua

SEQ ID NO: 2246173 - RNA, 19 nt, Artificial Sequence
  Description of Artificial Sequence: Synthetic oligonucleotide
  Antisense strand to SEQ ID NO: 2246172
uaucuucagacgcaaauuu

SEQ ID NO: 2246174 - RNA, 19 nt, Artificial Sequence
  Description of Artificial Sequence: Synthetic oligonucleotide
  Sense strand starting at position 3267 of SEQ ID NO: 1884177
ugcgucugaagauacaaau

SEQ ID NO: 2246175 - RNA, 19 nt, Artificial Sequence
  Description of Artificial Sequence: Synthetic oligonucleotide
  Antisense strand to SEQ ID NO: 2246174
auuuguaucuucagacgca

SEQ ID NO: 2246176 - RNA, 19 nt, Artificial Sequence
  Description of Artificial Sequence: Synthetic oligonucleotide
  Sense strand starting at position 3312 of SEQ ID NO: 1884177
gacagucaucccgggcaga

SEQ ID NO: 2246177 - RNA, 19 nt, Artificial Sequence
  Description of Artificial Sequence: Synthetic oligonucleotide
  Antisense strand to SEQ ID NO: 2246176
ucugcccgggaugacuguc

SEQ ID NO: 2246178 - RNA, 19 nt, Artificial Sequence
  Description of Artificial Sequence: Synthetic oligonucleotide
  Sense strand starting at position 3411 of SEQ ID NO: 1884177
cugacuucgggugaacaca

SEQ ID NO: 2246179 - RNA, 19 nt, Artificial Sequence
  Description of Artificial Sequence: Synthetic oligonucleotide
  Antisense strand to SEQ ID NO: 2246178
uguguucacccgaagucag

SEQ ID NO: 2246180 - RNA, 19 nt, Artificial Sequence
  Description of Artificial Sequence: Synthetic oligonucleotide
  Sense strand starting at position 3520 of SEQ ID NO: 1884177
auuaaccgagcucagaaau

SEQ ID NO: 2246181 - RNA, 19 nt, Artificial Sequence
  Description of Artificial Sequence: Synthetic oligonucleotide
  Antisense strand to SEQ ID NO: 2246180
auuucugagcucgguuaau

SEQ ID NO: 2246182 - RNA, 19 nt, Artificial Sequence
  Description of Artificial Sequence: Synthetic oligonucleotide
  Sense strand starting at position 3538 of SEQ ID NO: 1884177
ucguuucuggcugcucaaa

SEQ ID NO: 2246183 - RNA, 19 nt, Artificial Sequence
  Description of Artificial Sequence: Synthetic oligonucleotide
  Antisense strand to SEQ ID NO: 2246182
uuugagcagccagaaacga

SEQ ID NO: 2246184 - RNA, 19 nt, Artificial Sequence
  Description of Artificial Sequence: Synthetic oligonucleotide
  Sense strand starting at position 3540 of SEQ ID NO: 1884177
guuucuggcugcucaaaga

SEQ ID NO: 2246185 - RNA, 19 nt, Artificial Sequence
  Description of Artificial Sequence: Synthetic oligonucleotide
  Antisense strand to SEQ ID NO: 2246184
ucuuugagcagccagaaac

SEQ ID NO: 2246186 - RNA, 19 nt, Artificial Sequence
  Description of Artificial Sequence: Synthetic oligonucleotide
  Sense strand starting at position 3562 of SEQ ID NO: 1884177
gcuguuucgacagaaccuu

SEQ ID NO: 2246187 - RNA, 19 nt, Artificial Sequence
  Description of Artificial Sequence: Synthetic oligonucleotide
  Antisense strand to SEQ ID NO: 2246186
aagguucugucgaaacagc

SEQ ID NO: 2246188 - RNA, 19 nt, Artificial Sequence
  Description of Artificial Sequence: Synthetic oligonucleotide
  Sense strand starting at position 3568 of SEQ ID NO: 1884177
ucgacagaaccuugacagu

SEQ ID NO: 2246189 - RNA, 19 nt, Artificial Sequence
  Description of Artificial Sequence: Synthetic oligonucleotide
  Antisense strand to SEQ ID NO: 2246188
acugucaagguucugucga

SEQ ID NO: 2246190 - RNA, 19 nt, Artificial Sequence
  Description of Artificial Sequence: Synthetic oligonucleotide
  Sense strand starting at position 3765 of SEQ ID NO: 1884177
gcccauccuggugagaacu

SEQ ID NO: 2246191 - RNA, 19 nt, Artificial Sequence
  Description of Artificial Sequence: Synthetic oligonucleotide
  Antisense strand to SEQ ID NO: 2246190
aguucucaccaggaugggc

SEQ ID NO: 2246192 - RNA, 19 nt, Artificial Sequence
  Description of Artificial Sequence: Synthetic oligonucleotide
  Sense strand starting at position 3771 of SEQ ID NO: 1884177
ccuggugagaacuggcauu

SEQ ID NO: 2246193 - RNA, 19 nt, Artificial Sequence
  Description of Artificial Sequence: Synthetic oligonucleotide
  Antisense strand to SEQ ID NO: 2246192
aaugccaguucucaccagg

SEQ ID NO: 2246194 - RNA, 19 nt, Artificial Sequence
  Description of Artificial Sequence: Synthetic oligonucleotide
  Sense strand starting at position 3819 of SEQ ID NO: 1884177
uuuccaguauuggcauaaa

SEQ ID NO: 2246195 - RNA, 19 nt, Artificial Sequence
  Description of Artificial Sequence: Synthetic oligonucleotide
  Antisense strand to SEQ ID NO: 2246194
uuuaugccaauacuggaaa

SEQ ID NO: 2246196 - RNA, 19 nt, Artificial Sequence
  Description of Artificial Sequence: Synthetic oligonucleotide
  Sense strand starting at position 3838 of SEQ ID NO: 1884177
ggauguuuccauugugagg

SEQ ID NO: 2246197 - RNA, 19 nt, Artificial Sequence
  Description of Artificial Sequence: Synthetic oligonucleotide
  Antisense strand to SEQ ID NO: 2246196
ccucacaauggaaacaucc

SEQ ID NO: 2246198 - RNA, 19 nt, Artificial Sequence
  Description of Artificial Sequence: Synthetic oligonucleotide
  Sense strand starting at position 3847 of SEQ ID NO: 1884177
cauugugaggucugcaaga

SEQ ID NO: 2246199 - RNA, 19 nt, Artificial Sequence
  Description of Artificial Sequence: Synthetic oligonucleotide
  Antisense strand to SEQ ID NO: 2246198
ucuugcagaccucacaaug

SEQ ID NO: 2246200 - RNA, 19 nt, Artificial Sequence
  Description of Artificial Sequence: Synthetic oligonucleotide
  Sense strand starting at position 3849 of SEQ ID NO: 1884177
uugugaggucugcaagaug

SEQ ID NO: 2246201 - RNA, 19 nt, Artificial Sequence
  Description of Artificial Sequence: Synthetic oligonucleotide
  Antisense strand to SEQ ID NO: 2246200
caucuugcagaccucacaa

SEQ ID NO: 2246202 - RNA, 19 nt, Artificial Sequence
  Description of Artificial Sequence: Synthetic oligonucleotide
  Sense strand starting at position 3910 of SEQ ID NO: 1884177
uauuguaaugcguaaguau

SEQ ID NO: 2246203 - RNA, 19 nt, Artificial Sequence
  Description of Artificial Sequence: Synthetic oligonucleotide
  Antisense strand to SEQ ID NO: 2246202
auacuuacgcauuacaaua

SEQ ID NO: 2246204 - RNA, 19 nt, Artificial Sequence
  Description of Artificial Sequence: Synthetic oligonucleotide
  Sense strand starting at position 3919 of SEQ ID NO: 1884177
gcguaaguauugucaacac

SEQ ID NO: 2246205 - RNA, 19 nt, Artificial Sequence
  Description of Artificial Sequence: Synthetic oligonucleotide
  Antisense strand to SEQ ID NO: 2246204
guguugacaauacuuacgc

SEQ ID NO: 2246206 - RNA, 19 nt, Artificial Sequence
  Description of Artificial Sequence: Synthetic oligonucleotide
  Sense strand starting at position 84 of SEQ ID NO: 1884178
aggcaaucuguccacagau

SEQ ID NO: 2246207 - RNA, 19 nt, Artificial Sequence
  Description of Artificial Sequence: Synthetic oligonucleotide
  Antisense strand to SEQ ID NO: 2246206
aucuguggacagauugccu

SEQ ID NO: 2246208 - RNA, 19 nt, Artificial Sequence
  Description of Artificial Sequence: Synthetic oligonucleotide
  Sense strand starting at position 86 of SEQ ID NO: 1884178
gcaaucuguccacagauca

SEQ ID NO: 2246209 - RNA, 19 nt, Artificial Sequence
  Description of Artificial Sequence: Synthetic oligonucleotide
  Antisense strand to SEQ ID NO: 2246208
ugaucuguggacagauugc

SEQ ID NO: 2246210 - RNA, 19 nt, Artificial Sequence
  Description of Artificial Sequence: Synthetic oligonucleotide
  Sense strand starting at position 94 of SEQ ID NO: 1884178
uccacagaucaggguauua

SEQ ID NO: 2246211 - RNA, 19 nt, Artificial Sequence
  Description of Artificial Sequence: Synthetic oligonucleotide
  Antisense strand to SEQ ID NO: 2246210
uaauacccugaucugugga

SEQ ID NO: 2246212 - RNA, 19 nt, Artificial Sequence
  Description of Artificial Sequence: Synthetic oligonucleotide
  Sense strand starting at position 185 of SEQ ID NO: 1884178
uguugagaauaaguuaaag

SEQ ID NO: 2246213 - RNA, 19 nt, Artificial Sequence
  Description of Artificial Sequence: Synthetic oligonucleotide
  Antisense strand to SEQ ID NO: 2246212
cuuuaacuuauucucaaca

SEQ ID NO: 2246214 - RNA, 19 nt, Artificial Sequence
  Description of Artificial Sequence: Synthetic oligonucleotide
  Sense strand starting at position 325 of SEQ ID NO: 1884178
gggucucuucuauaaccaa

SEQ ID NO: 2246215 - RNA, 19 nt, Artificial Sequence
  Description of Artificial Sequence: Synthetic oligonucleotide
  Antisense strand to SEQ ID NO: 2246214
uugguuauagaagagaccc

SEQ ID NO: 2246216 - RNA, 19 nt, Artificial Sequence
  Description of Artificial Sequence: Synthetic oligonucleotide
  Sense strand starting at position 389 of SEQ ID NO: 1884178
auuccuuuggguuauaaua

SEQ ID NO: 2246217 - RNA, 19 nt, Artificial Sequence
  Description of Artificial Sequence: Synthetic oligonucleotide
  Antisense strand to SEQ ID NO: 2246216
uauuauaacccaaaggaau

SEQ ID NO: 2246218 - RNA, 19 nt, Artificial Sequence
  Description of Artificial Sequence: Synthetic oligonucleotide
  Sense strand starting at position 536 of SEQ ID NO: 1884178
uauuuagagcugugucacu

SEQ ID NO: 2246219 - RNA, 19 nt, Artificial Sequence
  Description of Artificial Sequence: Synthetic oligonucleotide
  Antisense strand to SEQ ID NO: 2246218
agugacacagcucuaaaua

SEQ ID NO: 2246220 - RNA, 19 nt, Artificial Sequence
  Description of Artificial Sequence: Synthetic oligonucleotide
  Sense strand starting at position 649 of SEQ ID NO: 1884178
cuucuaugggcccaacaga

SEQ ID NO: 2246221 - RNA, 19 nt, Artificial Sequence
  Description of Artificial Sequence: Synthetic oligonucleotide
  Antisense strand to SEQ ID NO: 2246220
ucuguugggcccauagaag

SEQ ID NO: 2246222 - RNA, 19 nt, Artificial Sequence
  Description of Artificial Sequence: Synthetic oligonucleotide
  Sense strand starting at position 666 of SEQ ID NO: 1884178
gaugauaagcugcaggauu

SEQ ID NO: 2246223 - RNA, 19 nt, Artificial Sequence
  Description of Artificial Sequence: Synthetic oligonucleotide
  Antisense strand to SEQ ID NO: 2246222
aauccugcagcuuaucauc

SEQ ID NO: 2246224 - RNA, 19 nt, Artificial Sequence
  Description of Artificial Sequence: Synthetic oligonucleotide
  Sense strand starting at position 700 of SEQ ID NO: 1884178
ggaugacugcucuacucaa

SEQ ID NO: 2246225 - RNA, 19 nt, Artificial Sequence
  Description of Artificial Sequence: Synthetic oligonucleotide
  Antisense strand to SEQ ID NO: 2246224
uugaguagagcagucaucc

SEQ ID NO: 2246226 - RNA, 19 nt, Artificial Sequence
  Description of Artificial Sequence: Synthetic oligonucleotide
  Sense strand starting at position 1182 of SEQ ID NO: 1884178
gagucacugguuuaaauau

SEQ ID NO: 2246227 - RNA, 19 nt, Artificial Sequence
  Description of Artificial Sequence: Synthetic oligonucleotide
  Antisense strand to SEQ ID NO: 2246226
auauuuaaaccagugacuc

SEQ ID NO: 2246228 - RNA, 19 nt, Artificial Sequence
  Description of Artificial Sequence: Synthetic oligonucleotide
  Sense strand starting at position 1360 of SEQ ID NO: 1884178
aguuucuaagacuggauga

SEQ ID NO: 2246229 - RNA, 19 nt, Artificial Sequence
  Description of Artificial Sequence: Synthetic oligonucleotide
  Antisense strand to SEQ ID NO: 2246228
ucauccagucuuagaaacu

SEQ ID NO: 2246230 - RNA, 19 nt, Artificial Sequence
  Description of Artificial Sequence: Synthetic oligonucleotide
  Sense strand starting at position 1361 of SEQ ID NO: 1884178
guuucuaagacuggaugau

SEQ ID NO: 2246231 - RNA, 19 nt, Artificial Sequence
  Description of Artificial Sequence: Synthetic oligonucleotide
  Antisense strand to SEQ ID NO: 2246230
aucauccagucuuagaaac

SEQ ID NO: 2246232 - RNA, 19 nt, Artificial Sequence
  Description of Artificial Sequence: Synthetic oligonucleotide
  Sense strand starting at position 2218 of SEQ ID NO: 1884178
acccuauugcaugggaaua

SEQ ID NO: 2246233 - RNA, 19 nt, Artificial Sequence
  Description of Artificial Sequence: Synthetic oligonucleotide
  Antisense strand to SEQ ID NO: 2246232
uauucccaugcaauagggu

SEQ ID NO: 2246234 - RNA, 19 nt, Artificial Sequence
  Description of Artificial Sequence: Synthetic oligonucleotide
  Sense strand starting at position 2231 of SEQ ID NO: 1884178
ggaauaaguucaguaugga

SEQ ID NO: 2246235 - RNA, 19 nt, Artificial Sequence
  Description of Artificial Sequence: Synthetic oligonucleotide
  Antisense strand to SEQ ID NO: 2246234
uccauacugaacuuauucc

SEQ ID NO: 2246236 - RNA, 19 nt, Artificial Sequence
  Description of Artificial Sequence: Synthetic oligonucleotide
  Sense strand starting at position 2276 of SEQ ID NO: 1884178
agaaauucuuauucgauag

SEQ ID NO: 2246237 - RNA, 19 nt, Artificial Sequence
  Description of Artificial Sequence: Synthetic oligonucleotide
  Antisense strand to SEQ ID NO: 2246236
cuaucgaauaagaauuucu

SEQ ID NO: 2246238 - RNA, 19 nt, Artificial Sequence
  Description of Artificial Sequence: Synthetic oligonucleotide
  Sense strand starting at position 2287 of SEQ ID NO: 1884178
uucgauagggcugaaucaa

SEQ ID NO: 2246239 - RNA, 19 nt, Artificial Sequence
  Description of Artificial Sequence: Synthetic oligonucleotide
  Antisense strand to SEQ ID NO: 2246238
uugauucagcccuaucgaa

SEQ ID NO: 2246240 - RNA, 19 nt, Artificial Sequence
  Description of Artificial Sequence: Synthetic oligonucleotide
  Sense strand starting at position 2425 of SEQ ID NO: 1884178
uuaagacuagcaggguaaa

SEQ ID NO: 2246241 - RNA, 19 nt, Artificial Sequence
  Description of Artificial Sequence: Synthetic oligonucleotide
  Antisense strand to SEQ ID NO: 2246240
uuuacccugcuagucuuaa

SEQ ID NO: 2246242 - RNA, 19 nt, Artificial Sequence
  Description of Artificial Sequence: Synthetic oligonucleotide
  Sense strand starting at position 2426 of SEQ ID NO: 1884178
uaagacuagcaggguaaau

SEQ ID NO: 2246243 - RNA, 19 nt, Artificial Sequence
  Description of Artificial Sequence: Synthetic oligonucleotide
  Antisense strand to SEQ ID NO: 2246242
auuuacccugcuagucuua

SEQ ID NO: 2246244 - RNA, 19 nt, Artificial Sequence
  Description of Artificial Sequence: Synthetic oligonucleotide
  Sense strand starting at position 2580 of SEQ ID NO: 1884178
ugauuaucuguguacuaga

SEQ ID NO: 2246245 - RNA, 19 nt, Artificial Sequence
  Description of Artificial Sequence: Synthetic oligonucleotide
  Antisense strand to SEQ ID NO: 2246244
ucuaguacacagauaauca

SEQ ID NO: 2246246 - RNA, 19 nt, Artificial Sequence
  Description of Artificial Sequence: Synthetic oligonucleotide
  Sense strand starting at position 2613 of SEQ ID NO: 1884178
ggugauuucuguucucuau

SEQ ID NO: 2246247 - RNA, 19 nt, Artificial Sequence
  Description of Artificial Sequence: Synthetic oligonucleotide
  Antisense strand to SEQ ID NO: 2246246
auagagaacagaaaucacc

SEQ ID NO: 2246248 - RNA, 19 nt, Artificial Sequence
  Description of Artificial Sequence: Synthetic oligonucleotide
  Sense strand starting at position 2689 of SEQ ID NO: 1884178
gguccuucucuagacugaa

SEQ ID NO: 2246249 - RNA, 19 nt, Artificial Sequence
  Description of Artificial Sequence: Synthetic oligonucleotide
  Antisense strand to SEQ ID NO: 2246248
uucagucuagagaaggacc

SEQ ID NO: 2246250 - RNA, 19 nt, Artificial Sequence
  Description of Artificial Sequence: Synthetic oligonucleotide
  Sense strand starting at position 2974 of SEQ ID NO: 1884178
cuauaauaugaugguagua

SEQ ID NO: 2246251 - RNA, 19 nt, Artificial Sequence
  Description of Artificial Sequence: Synthetic oligonucleotide
  Antisense strand to SEQ ID NO: 2246250
uacuaccaucauauuauag

SEQ ID NO: 2246252 - RNA, 19 nt, Artificial Sequence
  Description of Artificial Sequence: Synthetic oligonucleotide
  Sense strand starting at position 3053 of SEQ ID NO: 1884178
gucacuauucuagauacuu

SEQ ID NO: 2246253 - RNA, 19 nt, Artificial Sequence
  Description of Artificial Sequence: Synthetic oligonucleotide
  Antisense strand to SEQ ID NO: 2246252
aaguaucuagaauagugac

SEQ ID NO: 2246254 - RNA, 19 nt, Artificial Sequence
  Description of Artificial Sequence: Synthetic oligonucleotide
  Sense strand starting at position 3058 of SEQ ID NO: 1884178
uauucuagauacuugggua

SEQ ID NO: 2246255 - RNA, 19 nt, Artificial Sequence
  Description of Artificial Sequence: Synthetic oligonucleotide
  Antisense strand to SEQ ID NO: 2246254
uacccaaguaucuagaaua

SEQ ID NO: 2246256 - RNA, 19 nt, Artificial Sequence
  Description of Artificial Sequence: Synthetic oligonucleotide
  Sense strand starting at position 3062 of SEQ ID NO: 1884178
cuagauacuuggguaauaa

SEQ ID NO: 2246257 - RNA, 19 nt, Artificial Sequence
  Description of Artificial Sequence: Synthetic oligonucleotide
  Antisense strand to SEQ ID NO: 2246256
uuauuacccaaguaucuag

SEQ ID NO: 2246258 - RNA, 19 nt, Artificial Sequence
  Description of Artificial Sequence: Synthetic oligonucleotide
  Sense strand starting at position 3104 of SEQ ID NO: 1884178
uaaagagaccauuguguaa

SEQ ID NO: 2246259 - RNA, 19 nt, Artificial Sequence
  Description of Artificial Sequence: Synthetic oligonucleotide
  Antisense strand to SEQ ID NO: 2246258
uuacacaauggucucuuua

SEQ ID NO: 2246260 - RNA, 19 nt, Artificial Sequence
  Description of Artificial Sequence: Synthetic oligonucleotide
  Sense strand starting at position 3108 of SEQ ID NO: 1884178
gagaccauuguguaaaggu

SEQ ID NO: 2246261 - RNA, 19 nt, Artificial Sequence
  Description of Artificial Sequence: Synthetic oligonucleotide
  Antisense strand to SEQ ID NO: 2246260
accuuuacacaauggucuc

SEQ ID NO: 2246262 - RNA, 19 nt, Artificial Sequence
  Description of Artificial Sequence: Synthetic oligonucleotide
  Sense strand starting at position 3187 of SEQ ID NO: 1884178
uaauaagugcuacaggagu

SEQ ID NO: 2246263 - RNA, 19 nt, Artificial Sequence
  Description of Artificial Sequence: Synthetic oligonucleotide
  Antisense strand to SEQ ID NO: 2246262
acuccuguagcacuuauua

SEQ ID NO: 2246264 - RNA, 19 nt, Artificial Sequence
  Description of Artificial Sequence: Synthetic oligonucleotide
  Sense strand starting at position 3270 of SEQ ID NO: 1884178
agagguuuaagauguuaug

SEQ ID NO: 2246265 - RNA, 19 nt, Artificial Sequence
  Description of Artificial Sequence: Synthetic oligonucleotide
  Antisense strand to SEQ ID NO: 2246264
cauaacaucuuaaaccucu

SEQ ID NO: 2246266 - RNA, 19 nt, Artificial Sequence
  Description of Artificial Sequence: Synthetic oligonucleotide
  Sense strand starting at position 3378 of SEQ ID NO: 1884178
cgggcugugcguaaagaug

SEQ ID NO: 2246267 - RNA, 19 nt, Artificial Sequence
  Description of Artificial Sequence: Synthetic oligonucleotide
  Antisense strand to SEQ ID NO: 2246266
caucuuuacgcacagcccg

SEQ ID NO: 2246268 - RNA, 19 nt, Artificial Sequence
  Description of Artificial Sequence: Synthetic oligonucleotide
  Sense strand starting at position 3407 of SEQ ID NO: 1884178
auguacucaauaggugaga

SEQ ID NO: 2246269 - RNA, 19 nt, Artificial Sequence
  Description of Artificial Sequence: Synthetic oligonucleotide
  Antisense strand to SEQ ID NO: 2246268
ucucaccuauugaguacau

SEQ ID NO: 2246270 - RNA, 19 nt, Artificial Sequence
  Description of Artificial Sequence: Synthetic oligonucleotide
  Sense strand starting at position 3409 of SEQ ID NO: 1884178
guacucaauaggugagaga

SEQ ID NO: 2246271 - RNA, 19 nt, Artificial Sequence
  Description of Artificial Sequence: Synthetic oligonucleotide
  Antisense strand to SEQ ID NO: 2246270
ucucucaccuauugaguac

SEQ ID NO: 2246272 - RNA, 19 nt, Artificial Sequence
  Description of Artificial Sequence: Synthetic oligonucleotide
  Sense strand starting at position 3460 of SEQ ID NO: 1884178
gugacugguguuuaagaug

SEQ ID NO: 2246273 - RNA, 19 nt, Artificial Sequence
  Description of Artificial Sequence: Synthetic oligonucleotide
  Antisense strand to SEQ ID NO: 2246272
caucuuaaacaccagucac

SEQ ID NO: 2246274 - RNA, 19 nt, Artificial Sequence
  Description of Artificial Sequence: Synthetic oligonucleotide
  Sense strand starting at position 3468 of SEQ ID NO: 1884178
uguuuaagaugguugaaag

SEQ ID NO: 2246275 - RNA, 19 nt, Artificial Sequence
  Description of Artificial Sequence: Synthetic oligonucleotide
  Antisense strand to SEQ ID NO: 2246274
cuuucaaccaucuuaaaca

SEQ ID NO: 2246276 - RNA, 19 nt, Artificial Sequence
  Description of Artificial Sequence: Synthetic oligonucleotide
  Sense strand starting at position 3469 of SEQ ID NO: 1884178
guuuaagaugguugaaaga

SEQ ID NO: 2246277 - RNA, 19 nt, Artificial Sequence
  Description of Artificial Sequence: Synthetic oligonucleotide
  Antisense strand to SEQ ID NO: 2246276
ucuuucaaccaucuuaaac

SEQ ID NO: 2246278 - RNA, 19 nt, Artificial Sequence
  Description of Artificial Sequence: Synthetic oligonucleotide
  Sense strand starting at position 3524 of SEQ ID NO: 1884178
acaagaacuuugccuaaag

SEQ ID NO: 2246279 - RNA, 19 nt, Artificial Sequence
  Description of Artificial Sequence: Synthetic oligonucleotide
  Antisense strand to SEQ ID NO: 2246278
cuuuaggcaaaguucuugu

SEQ ID NO: 2246280 - RNA, 19 nt, Artificial Sequence
  Description of Artificial Sequence: Synthetic oligonucleotide
  Sense strand starting at position 3705 of SEQ ID NO: 1884178
gguggaagaacaugcaaau

SEQ ID NO: 2246281 - RNA, 19 nt, Artificial Sequence
  Description of Artificial Sequence: Synthetic oligonucleotide
  Antisense strand to SEQ ID NO: 2246280
auuugcauguucuuccacc

SEQ ID NO: 2246282 - RNA, 19 nt, Artificial Sequence
  Description of Artificial Sequence: Synthetic oligonucleotide
  Sense strand starting at position 3742 of SEQ ID NO: 1884178
guuggaaauguuggacaaa

SEQ ID NO: 2246283 - RNA, 19 nt, Artificial Sequence
  Description of Artificial Sequence: Synthetic oligonucleotide
  Antisense strand to SEQ ID NO: 2246282
uuuguccaacauuuccaac

SEQ ID NO: 2246284 - RNA, 19 nt, Artificial Sequence
  Description of Artificial Sequence: Synthetic oligonucleotide
  Sense strand starting at position 3822 of SEQ ID NO: 1884178
aagcuaugggagugaauga

SEQ ID NO: 2246285 - RNA, 19 nt, Artificial Sequence
  Description of Artificial Sequence: Synthetic oligonucleotide
  Antisense strand to SEQ ID NO: 2246284
ucauucacucccauagcuu

SEQ ID NO: 2246286 - RNA, 19 nt, Artificial Sequence
  Description of Artificial Sequence: Synthetic oligonucleotide
  Sense strand starting at position 184 of SEQ ID NO: 1884179
aucaucuuguugccaagaa

SEQ ID NO: 2246287 - RNA, 19 nt, Artificial Sequence
  Description of Artificial Sequence: Synthetic oligonucleotide
  Antisense strand to SEQ ID NO: 2246286
uucuuggcaacaagaugau

SEQ ID NO: 2246288 - RNA, 19 nt, Artificial Sequence
  Description of Artificial Sequence: Synthetic oligonucleotide
  Sense strand starting at position 188 of SEQ ID NO: 1884179
ucuuguugccaagaacaaa

SEQ ID NO: 2246289 - RNA, 19 nt, Artificial Sequence
  Description of Artificial Sequence: Synthetic oligonucleotide
  Antisense strand to SEQ ID NO: 2246288
uuuguucuuggcaacaaga

SEQ ID NO: 2246290 - RNA, 19 nt, Artificial Sequence
  Description of Artificial Sequence: Synthetic oligonucleotide
  Sense strand starting at position 296 of SEQ ID NO: 1884179
ggcaguaggagcuauugaa

SEQ ID NO: 2246291 - RNA, 19 nt, Artificial Sequence
  Description of Artificial Sequence: Synthetic oligonucleotide
  Antisense strand to SEQ ID NO: 2246290
uucaauagcuccuacugcc

SEQ ID NO: 2246292 - RNA, 19 nt, Artificial Sequence
  Description of Artificial Sequence: Synthetic oligonucleotide
  Sense strand starting at position 300 of SEQ ID NO: 1884179
guaggagcuauugaaaguu

SEQ ID NO: 2246293 - RNA, 19 nt, Artificial Sequence
  Description of Artificial Sequence: Synthetic oligonucleotide
  Antisense strand to SEQ ID NO: 2246292
aacuuucaauagcuccuac

SEQ ID NO: 2246294 - RNA, 19 nt, Artificial Sequence
  Description of Artificial Sequence: Synthetic oligonucleotide
  Sense strand starting at position 396 of SEQ ID NO: 1884179
uuaugaaggaagugaaguu

SEQ ID NO: 2246295 - RNA, 19 nt, Artificial Sequence
  Description of Artificial Sequence: Synthetic oligonucleotide
  Antisense strand to SEQ ID NO: 2246294
aacuucacuuccuucauaa

SEQ ID NO: 2246296 - RNA, 19 nt, Artificial Sequence
  Description of Artificial Sequence: Synthetic oligonucleotide
  Sense strand starting at position 427 of SEQ ID NO: 1884179
gaugcugaagccugaacua

SEQ ID NO: 2246297 - RNA, 19 nt, Artificial Sequence
  Description of Artificial Sequence: Synthetic oligonucleotide
  Antisense strand to SEQ ID NO: 2246296
uaguucaggcuucagcauc

SEQ ID NO: 2246298 - RNA, 19 nt, Artificial Sequence
  Description of Artificial Sequence: Synthetic oligonucleotide
  Sense strand starting at position 466 of SEQ ID NO: 1884179
aaggaacacguuugaaaca

SEQ ID NO: 2246299 - RNA, 19 nt, Artificial Sequence
  Description of Artificial Sequence: Synthetic oligonucleotide
  Antisense strand to SEQ ID NO: 2246298
uguuucaaacguguuccuu

SEQ ID NO: 2246300 - RNA, 19 nt, Artificial Sequence
  Description of Artificial Sequence: Synthetic oligonucleotide
  Sense strand starting at position 838 of SEQ ID NO: 1884179
cugauaacugaaugaugca

SEQ ID NO: 2246301 - RNA, 19 nt, Artificial Sequence
  Description of Artificial Sequence: Synthetic oligonucleotide
  Antisense strand to SEQ ID NO: 2246300
ugcaucauucaguuaucag

SEQ ID NO: 2246302 - RNA, 19 nt, Artificial Sequence
  Description of Artificial Sequence: Synthetic oligonucleotide
  Sense strand starting at position 917 of SEQ ID NO: 1884179
ggagaauggugaucccauc

SEQ ID NO: 2246303 - RNA, 19 nt, Artificial Sequence
  Description of Artificial Sequence: Synthetic oligonucleotide
  Antisense strand to SEQ ID NO: 2246302
gaugggaucaccauucucc

SEQ ID NO: 2246304 - RNA, 19 nt, Artificial Sequence
  Description of Artificial Sequence: Synthetic oligonucleotide
  Sense strand starting at position 1001 of SEQ ID NO: 1884179
ucagaagagcccugagaua

SEQ ID NO: 2246305 - RNA, 19 nt, Artificial Sequence
  Description of Artificial Sequence: Synthetic oligonucleotide
  Antisense strand to SEQ ID NO: 2246304
uaucucagggcucuucuga

SEQ ID NO: 2246306 - RNA, 19 nt, Artificial Sequence
  Description of Artificial Sequence: Synthetic oligonucleotide
  Sense strand starting at position 1104 of SEQ ID NO: 1884179
gugggugucacuuaaacca

SEQ ID NO: 2246307 - RNA, 19 nt, Artificial Sequence
  Description of Artificial Sequence: Synthetic oligonucleotide
  Antisense strand to SEQ ID NO: 2246306
ugguuuaagugacacccac

SEQ ID NO: 2246308 - RNA, 19 nt, Artificial Sequence
  Description of Artificial Sequence: Synthetic oligonucleotide
  Sense strand starting at position 1111 of SEQ ID NO: 1884179
ucacuuaaaccaugagagu

SEQ ID NO: 2246309 - RNA, 19 nt, Artificial Sequence
  Description of Artificial Sequence: Synthetic oligonucleotide
  Antisense strand to SEQ ID NO: 2246308
acucucaugguuuaaguga

SEQ ID NO: 2246310 - RNA, 19 nt, Artificial Sequence
  Description of Artificial Sequence: Synthetic oligonucleotide
  Sense strand starting at position 1117 of SEQ ID NO: 1884179
aaaccaugagagugguuga

SEQ ID NO: 2246311 - RNA, 19 nt, Artificial Sequence
  Description of Artificial Sequence: Synthetic oligonucleotide
  Antisense strand to SEQ ID NO: 2246310
ucaaccacucucaugguuu

SEQ ID NO: 2246312 - RNA, 19 nt, Artificial Sequence
  Description of Artificial Sequence: Synthetic oligonucleotide
  Sense strand starting at position 1120 of SEQ ID NO: 1884179
ccaugagagugguugaaau

SEQ ID NO: 2246313 - RNA, 19 nt, Artificial Sequence
  Description of Artificial Sequence: Synthetic oligonucleotide
  Antisense strand to SEQ ID NO: 2246312
auuucaaccacucucaugg

SEQ ID NO: 2246314 - RNA, 19 nt, Artificial Sequence
  Description of Artificial Sequence: Synthetic oligonucleotide
  Sense strand starting at position 1235 of SEQ ID NO: 1884179
aguuuagagguaugauaug

SEQ ID NO: 2246315 - RNA, 19 nt, Artificial Sequence
  Description of Artificial Sequence: Synthetic oligonucleotide
  Antisense strand to SEQ ID NO: 2246314
cauaucauaccucuaaacu

SEQ ID NO: 2246316 - RNA, 19 nt, Artificial Sequence
  Description of Artificial Sequence: Synthetic oligonucleotide
  Sense strand starting at position 1240 of SEQ ID NO: 1884179
agagguaugauauggcaca

SEQ ID NO: 2246317 - RNA, 19 nt, Artificial Sequence
  Description of Artificial Sequence: Synthetic oligonucleotide
  Antisense strand to SEQ ID NO: 2246316
ugugccauaucauaccucu

SEQ ID NO: 2246318 - RNA, 19 nt, Artificial Sequence
  Description of Artificial Sequence: Synthetic oligonucleotide
  Sense strand starting at position 1269 of SEQ ID NO: 1884179
ucucuaagggccuacgaau

SEQ ID NO: 2246319 - RNA, 19 nt, Artificial Sequence
  Description of Artificial Sequence: Synthetic oligonucleotide
  Antisense strand to SEQ ID NO: 2246318
auucguaggcccuuagaga

SEQ ID NO: 2246320 - RNA, 19 nt, Artificial Sequence
  Description of Artificial Sequence: Synthetic oligonucleotide
  Sense strand starting at position 1280 of SEQ ID NO: 1884179
cuacgaauugccuggagag

SEQ ID NO: 2246321 - RNA, 19 nt, Artificial Sequence
  Description of Artificial Sequence: Synthetic oligonucleotide
  Antisense strand to SEQ ID NO: 2246320
cucuccaggcaauucguag

SEQ ID NO: 2246322 - RNA, 19 nt, Artificial Sequence
  Description of Artificial Sequence: Synthetic oligonucleotide
  Sense strand starting at position 1459 of SEQ ID NO: 1884179
uccuuccuucuuuggaaga

SEQ ID NO: 2246323 - RNA, 19 nt, Artificial Sequence
  Description of Artificial Sequence: Synthetic oligonucleotide
  Antisense strand to SEQ ID NO: 2246322
ucuuccaaagaaggaagga

SEQ ID NO: 2246324 - RNA, 19 nt, Artificial Sequence
  Description of Artificial Sequence: Synthetic oligonucleotide
  Sense strand starting at position 2220 of SEQ ID NO: 1884179
auguacuguuucccaaaga

SEQ ID NO: 2246325 - RNA, 19 nt, Artificial Sequence
  Description of Artificial Sequence: Synthetic oligonucleotide
  Antisense strand to SEQ ID NO: 2246324
ucuuugggaaacaguacau

SEQ ID NO: 2246326 - RNA, 19 nt, Artificial Sequence
  Description of Artificial Sequence: Synthetic oligonucleotide
  Sense strand starting at position 2548 of SEQ ID NO: 1884179
ccagguauccuuuaugucu

SEQ ID NO: 2246327 - RNA, 19 nt, Artificial Sequence
  Description of Artificial Sequence: Synthetic oligonucleotide
  Antisense strand to SEQ ID NO: 2246326
agacauaaaggauaccugg

SEQ ID NO: 2246328 - RNA, 19 nt, Artificial Sequence
  Description of Artificial Sequence: Synthetic oligonucleotide
  Sense strand starting at position 2561 of SEQ ID NO: 1884179
augucucuugaggguaacu

SEQ ID NO: 2246329 - RNA, 19 nt, Artificial Sequence
  Description of Artificial Sequence: Synthetic oligonucleotide
  Antisense strand to SEQ ID NO: 2246328
aguuacccucaagagacau

SEQ ID NO: 2246330 - RNA, 19 nt, Artificial Sequence
  Description of Artificial Sequence: Synthetic oligonucleotide
  Sense strand starting at position 2563 of SEQ ID NO: 1884179
gucucuugaggguaacuuu

SEQ ID NO: 2246331 - RNA, 19 nt, Artificial Sequence
  Description of Artificial Sequence: Synthetic oligonucleotide
  Antisense strand to SEQ ID NO: 2246330
aaaguuacccucaagagac

SEQ ID NO: 2246332 - RNA, 19 nt, Artificial Sequence
  Description of Artificial Sequence: Synthetic oligonucleotide
  Sense strand starting at position 2616 of SEQ ID NO: 1884179
acugaaauuugggaaagcu

SEQ ID NO: 2246333 - RNA, 19 nt, Artificial Sequence
  Description of Artificial Sequence: Synthetic oligonucleotide
  Antisense strand to SEQ ID NO: 2246332
agcuuucccaaauuucagu

SEQ ID NO: 2246334 - RNA, 19 nt, Artificial Sequence
  Description of Artificial Sequence: Synthetic oligonucleotide
  Sense strand starting at position 2625 of SEQ ID NO: 1884179
ugggaaagcuuauugccaa

SEQ ID NO: 2246335 - RNA, 19 nt, Artificial Sequence
  Description of Artificial Sequence: Synthetic oligonucleotide
  Antisense strand to SEQ ID NO: 2246334
uuggcaauaagcuuuccca

SEQ ID NO: 2246336 - RNA, 19 nt, Artificial Sequence
  Description of Artificial Sequence: Synthetic oligonucleotide
  Sense strand starting at position 2711 of SEQ ID NO: 1884179
gaagcaguggguuaaguaa

SEQ ID NO: 2246337 - RNA, 19 nt, Artificial Sequence
  Description of Artificial Sequence: Synthetic oligonucleotide
  Antisense strand to SEQ ID NO: 2246336
uuacuuaacccacugcuuc

SEQ ID NO: 2246338 - RNA, 19 nt, Artificial Sequence
  Description of Artificial Sequence: Synthetic oligonucleotide
  Sense strand starting at position 2719 of SEQ ID NO: 1884179
ggguuaaguaaaugaugac

SEQ ID NO: 2246339 - RNA, 19 nt, Artificial Sequence
  Description of Artificial Sequence: Synthetic oligonucleotide
  Antisense strand to SEQ ID NO: 2246338
gucaucauuuacuuaaccc

SEQ ID NO: 2246340 - RNA, 19 nt, Artificial Sequence
  Description of Artificial Sequence: Synthetic oligonucleotide
  Sense strand starting at position 2819 of SEQ ID NO: 1884179
agagcaaauuguguaauau

SEQ ID NO: 2246341 - RNA, 19 nt, Artificial Sequence
  Description of Artificial Sequence: Synthetic oligonucleotide
  Antisense strand to SEQ ID NO: 2246340
auauuacacaauuugcucu

SEQ ID NO: 2246342 - RNA, 19 nt, Artificial Sequence
  Description of Artificial Sequence: Synthetic oligonucleotide
  Sense strand starting at position 2820 of SEQ ID NO: 1884179
gagcaaauuguguaauaug

SEQ ID NO: 2246343 - RNA, 19 nt, Artificial Sequence
  Description of Artificial Sequence: Synthetic oligonucleotide
  Antisense strand to SEQ ID NO: 2246342
cauauuacacaauuugcuc

SEQ ID NO: 2246344 - RNA, 19 nt, Artificial Sequence
  Description of Artificial Sequence: Synthetic oligonucleotide
  Sense strand starting at position 2829 of SEQ ID NO: 1884179
guguaauauguauaguaug

SEQ ID NO: 2246345 - RNA, 19 nt, Artificial Sequence
  Description of Artificial Sequence: Synthetic oligonucleotide
  Antisense strand to SEQ ID NO: 2246344
cauacuauacauauuacac

SEQ ID NO: 2246346 - RNA, 19 nt, Artificial Sequence
  Description of Artificial Sequence: Synthetic oligonucleotide
  Sense strand starting at position 2855 of SEQ ID NO: 1884179
uugcauuuagagugcuaca

SEQ ID NO: 2246347 - RNA, 19 nt, Artificial Sequence
  Description of Artificial Sequence: Synthetic oligonucleotide
  Antisense strand to SEQ ID NO: 2246346
uguagcacucuaaaugcaa

SEQ ID NO: 2246348 - RNA, 19 nt, Artificial Sequence
  Description of Artificial Sequence: Synthetic oligonucleotide
  Sense strand starting at position 2953 of SEQ ID NO: 1884179
guauuuagucaaugccuac

SEQ ID NO: 2246349 - RNA, 19 nt, Artificial Sequence
  Description of Artificial Sequence: Synthetic oligonucleotide
  Antisense strand to SEQ ID NO: 2246348
guaggcauugacuaaauac

SEQ ID NO: 2246350 - RNA, 19 nt, Artificial Sequence
  Description of Artificial Sequence: Synthetic oligonucleotide
  Sense strand starting at position 2988 of SEQ ID NO: 1884179
uucuaaguacuaggauaca

SEQ ID NO: 2246351 - RNA, 19 nt, Artificial Sequence
  Description of Artificial Sequence: Synthetic oligonucleotide
  Antisense strand to SEQ ID NO: 2246350
uguauccuaguacuuagaa

SEQ ID NO: 2246352 - RNA, 19 nt, Artificial Sequence
  Description of Artificial Sequence: Synthetic oligonucleotide
  Sense strand starting at position 3010 of SEQ ID NO: 1884179
gggaacaaguccucugucu

SEQ ID NO: 2246353 - RNA, 19 nt, Artificial Sequence
  Description of Artificial Sequence: Synthetic oligonucleotide
  Antisense strand to SEQ ID NO: 2246352
agacagaggacuuguuccc

SEQ ID NO: 2246354 - RNA, 19 nt, Artificial Sequence
  Description of Artificial Sequence: Synthetic oligonucleotide
  Sense strand starting at position 3272 of SEQ ID NO: 1884179
gugguuccauaccuugaua

SEQ ID NO: 2246355 - RNA, 19 nt, Artificial Sequence
  Description of Artificial Sequence: Synthetic oligonucleotide
  Antisense strand to SEQ ID NO: 2246354
uaucaagguauggaaccac

SEQ ID NO: 2246356 - RNA, 19 nt, Artificial Sequence
  Description of Artificial Sequence: Synthetic oligonucleotide
  Sense strand starting at position 3274 of SEQ ID NO: 1884179
gguuccauaccuugauauc

SEQ ID NO: 2246357 - RNA, 19 nt, Artificial Sequence
  Description of Artificial Sequence: Synthetic oligonucleotide
  Antisense strand to SEQ ID NO: 2246356
gauaucaagguauggaacc

SEQ ID NO: 2246358 - RNA, 19 nt, Artificial Sequence
  Description of Artificial Sequence: Synthetic oligonucleotide
  Sense strand starting at position 3275 of SEQ ID NO: 1884179
guuccauaccuugauaucu

SEQ ID NO: 2246359 - RNA, 19 nt, Artificial Sequence
  Description of Artificial Sequence: Synthetic oligonucleotide
  Antisense strand to SEQ ID NO: 2246358
agauaucaagguauggaac

SEQ ID NO: 2246360 - RNA, 19 nt, Artificial Sequence
  Description of Artificial Sequence: Synthetic oligonucleotide
  Sense strand starting at position 3389 of SEQ ID NO: 1884179
gggcuaccucuggagaauu

SEQ ID NO: 2246361 - RNA, 19 nt, Artificial Sequence
  Description of Artificial Sequence: Synthetic oligonucleotide
  Antisense strand to SEQ ID NO: 2246360
aauucuccagagguagccc

SEQ ID NO: 2246362 - RNA, 19 nt, Artificial Sequence
  Description of Artificial Sequence: Synthetic oligonucleotide
  Sense strand starting at position 3942 of SEQ ID NO: 1884179
agauaauugauacgugauu

SEQ ID NO: 2246363 - RNA, 19 nt, Artificial Sequence
  Description of Artificial Sequence: Synthetic oligonucleotide
  Antisense strand to SEQ ID NO: 2246362
aaucacguaucaauuaucu

SEQ ID NO: 2246364 - RNA, 19 nt, Artificial Sequence
  Description of Artificial Sequence: Synthetic oligonucleotide
  Sense strand starting at position 3943 of SEQ ID NO: 1884179
gauaauugauacgugauug

SEQ ID NO: 2246365 - RNA, 19 nt, Artificial Sequence
  Description of Artificial Sequence: Synthetic oligonucleotide
  Antisense strand to SEQ ID NO: 2246364
caaucacguaucaauuauc

SEQ ID NO: 2246366 - RNA, 19 nt, Artificial Sequence
  Description of Artificial Sequence: Synthetic oligonucleotide
  Sense strand starting at position 80 of SEQ ID NO: 1884180
ucaguauuacagugaaugg

SEQ ID NO: 2246367 - RNA, 19 nt, Artificial Sequence
  Description of Artificial Sequence: Synthetic oligonucleotide
  Antisense strand to SEQ ID NO: 2246366
ccauucacuguaauacuga

SEQ ID NO: 2246368 - RNA, 19 nt, Artificial Sequence
  Description of Artificial Sequence: Synthetic oligonucleotide
  Sense strand starting at position 90 of SEQ ID NO: 1884180
agugaauggucaguagaua

SEQ ID NO: 2246369 - RNA, 19 nt, Artificial Sequence
  Description of Artificial Sequence: Synthetic oligonucleotide
  Antisense strand to SEQ ID NO: 2246368
uaucuacugaccauucacu

SEQ ID NO: 2246370 - RNA, 19 nt, Artificial Sequence
  Description of Artificial Sequence: Synthetic oligonucleotide
  Sense strand starting at position 91 of SEQ ID NO: 1884180
gugaauggucaguagauaa

SEQ ID NO: 2246371 - RNA, 19 nt, Artificial Sequence
  Description of Artificial Sequence: Synthetic oligonucleotide
  Antisense strand to SEQ ID NO: 2246370
uuaucuacugaccauucac

SEQ ID NO: 2246372 - RNA, 19 nt, Artificial Sequence
  Description of Artificial Sequence: Synthetic oligonucleotide
  Sense strand starting at position 572 of SEQ ID NO: 1884180
uaguauuaucaugaggcau

SEQ ID NO: 2246373 - RNA, 19 nt, Artificial Sequence
  Description of Artificial Sequence: Synthetic oligonucleotide
  Antisense strand to SEQ ID NO: 2246372
augccucaugauaauacua

SEQ ID NO: 2246374 - RNA, 19 nt, Artificial Sequence
  Description of Artificial Sequence: Synthetic oligonucleotide
  Sense strand starting at position 694 of SEQ ID NO: 1884180
aauggauaucugugcauca

SEQ ID NO: 2246375 - RNA, 19 nt, Artificial Sequence
  Description of Artificial Sequence: Synthetic oligonucleotide
  Antisense strand to SEQ ID NO: 2246374
ugaugcacagauauccauu

SEQ ID NO: 2246376 - RNA, 19 nt, Artificial Sequence
  Description of Artificial Sequence: Synthetic oligonucleotide
  Sense strand starting at position 696 of SEQ ID NO: 1884180
uggauaucugugcaucaca

SEQ ID NO: 2246377 - RNA, 19 nt, Artificial Sequence
  Description of Artificial Sequence: Synthetic oligonucleotide
  Antisense strand to SEQ ID NO: 2246376
ugugaugcacagauaucca

SEQ ID NO: 2246378 - RNA, 19 nt, Artificial Sequence
  Description of Artificial Sequence: Synthetic oligonucleotide
  Sense strand starting at position 779 of SEQ ID NO: 1884180
auauuaguugcaggagaca

SEQ ID NO: 2246379 - RNA, 19 nt, Artificial Sequence
  Description of Artificial Sequence: Synthetic oligonucleotide
  Antisense strand to SEQ ID NO: 2246378
ugucuccugcaacuaauau

SEQ ID NO: 2246380 - RNA, 19 nt, Artificial Sequence
  Description of Artificial Sequence: Synthetic oligonucleotide
  Sense strand starting at position 874 of SEQ ID NO: 1884180
uguuacauaucauuguguu

SEQ ID NO: 2246381 - RNA, 19 nt, Artificial Sequence
  Description of Artificial Sequence: Synthetic oligonucleotide
  Antisense strand to SEQ ID NO: 2246380
aacacaaugauauguaaca

SEQ ID NO: 2246382 - RNA, 19 nt, Artificial Sequence
  Description of Artificial Sequence: Synthetic oligonucleotide
  Sense strand starting at position 959 of SEQ ID NO: 1884180
uuggauuaauaguuucuga

SEQ ID NO: 2246383 - RNA, 19 nt, Artificial Sequence
  Description of Artificial Sequence: Synthetic oligonucleotide
  Antisense strand to SEQ ID NO: 2246382
ucagaaacuauuaauccaa

SEQ ID NO: 2246384 - RNA, 19 nt, Artificial Sequence
  Description of Artificial Sequence: Synthetic oligonucleotide
  Sense strand starting at position 1141 of SEQ ID NO: 1884180
uaugguaggucucucaguu

SEQ ID NO: 2246385 - RNA, 19 nt, Artificial Sequence
  Description of Artificial Sequence: Synthetic oligonucleotide
  Antisense strand to SEQ ID NO: 2246384
aacugagagaccuaccaua

SEQ ID NO: 2246386 - RNA, 19 nt, Artificial Sequence
  Description of Artificial Sequence: Synthetic oligonucleotide
  Sense strand starting at position 1284 of SEQ ID NO: 1884180
caagauaagcuccagugua

SEQ ID NO: 2246387 - RNA, 19 nt, Artificial Sequence
  Description of Artificial Sequence: Synthetic oligonucleotide
  Antisense strand to SEQ ID NO: 2246386
uacacuggagcuuaucuug

SEQ ID NO: 2246388 - RNA, 19 nt, Artificial Sequence
  Description of Artificial Sequence: Synthetic oligonucleotide
  Sense strand starting at position 1364 of SEQ ID NO: 1884180
cgucuuaugaugcaagaau

SEQ ID NO: 2246389 - RNA, 19 nt, Artificial Sequence
  Description of Artificial Sequence: Synthetic oligonucleotide
  Antisense strand to SEQ ID NO: 2246388
auucuugcaucauaagacg

SEQ ID NO: 2246390 - RNA, 19 nt, Artificial Sequence
  Description of Artificial Sequence: Synthetic oligonucleotide
  Sense strand starting at position 1403 of SEQ ID NO: 1884180
uuggaugacuugcuuauca

SEQ ID NO: 2246391 - RNA, 19 nt, Artificial Sequence
  Description of Artificial Sequence: Synthetic oligonucleotide
  Antisense strand to SEQ ID NO: 2246390
ugauaagcaagucauccaa

SEQ ID NO: 2246392 - RNA, 19 nt, Artificial Sequence
  Description of Artificial Sequence: Synthetic oligonucleotide
  Sense strand starting at position 1407 of SEQ ID NO: 1884180
augacuugcuuaucagaga

SEQ ID NO: 2246393 - RNA, 19 nt, Artificial Sequence
  Description of Artificial Sequence: Synthetic oligonucleotide
  Antisense strand to SEQ ID NO: 2246392
ucucugauaagcaagucau

SEQ ID NO: 2246394 - RNA, 19 nt, Artificial Sequence
  Description of Artificial Sequence: Synthetic oligonucleotide
  Sense strand starting at position 1418 of SEQ ID NO: 1884180
aucagagacuuggaacaaa

SEQ ID NO: 2246395 - RNA, 19 nt, Artificial Sequence
  Description of Artificial Sequence: Synthetic oligonucleotide
  Antisense strand to SEQ ID NO: 2246394
uuuguuccaagucucugau

SEQ ID NO: 2246396 - RNA, 19 nt, Artificial Sequence
  Description of Artificial Sequence: Synthetic oligonucleotide
  Sense strand starting at position 1462 of SEQ ID NO: 1884180
uucugugaucuuuggagga

SEQ ID NO: 2246397 - RNA, 19 nt, Artificial Sequence
  Description of Artificial Sequence: Synthetic oligonucleotide
  Antisense strand to SEQ ID NO: 2246396
uccuccaaagaucacagaa

SEQ ID NO: 2246398 - RNA, 19 nt, Artificial Sequence
  Description of Artificial Sequence: Synthetic oligonucleotide
  Sense strand starting at position 1499 of SEQ ID NO: 1884180
guauguuguccuugggaua

SEQ ID NO: 2246399 - RNA, 19 nt, Artificial Sequence
  Description of Artificial Sequence: Synthetic oligonucleotide
  Antisense strand to SEQ ID NO: 2246398
uaucccaaggacaacauac

SEQ ID NO: 2246400 - RNA, 19 nt, Artificial Sequence
  Description of Artificial Sequence: Synthetic oligonucleotide
  Sense strand starting at position 1500 of SEQ ID NO: 1884180
uauguuguccuugggauac

SEQ ID NO: 2246401 - RNA, 19 nt, Artificial Sequence
  Description of Artificial Sequence: Synthetic oligonucleotide
  Antisense strand to SEQ ID NO: 2246400
guaucccaaggacaacaua

SEQ ID NO: 2246402 - RNA, 19 nt, Artificial Sequence
  Description of Artificial Sequence: Synthetic oligonucleotide
  Sense strand starting at position 1550 of SEQ ID NO: 1884180
uugugcuuacaguagagau

SEQ ID NO: 2246403 - RNA, 19 nt, Artificial Sequence
  Description of Artificial Sequence: Synthetic oligonucleotide
  Antisense strand to SEQ ID NO: 2246402
aucucuacuguaagcacaa

SEQ ID NO: 2246404 - RNA, 19 nt, Artificial Sequence
  Description of Artificial Sequence: Synthetic oligonucleotide
  Sense strand starting at position 1563 of SEQ ID NO: 1884180
agagauggcucuucuccua

SEQ ID NO: 2246405 - RNA, 19 nt, Artificial Sequence
  Description of Artificial Sequence: Synthetic oligonucleotide
  Antisense strand to SEQ ID NO: 2246404
uaggagaagagccaucucu

SEQ ID NO: 2246406 - RNA, 19 nt, Artificial Sequence
  Description of Artificial Sequence: Synthetic oligonucleotide
  Sense strand starting at position 1733 of SEQ ID NO: 1884180
uguauacauuuaugagaca

SEQ ID NO: 2246407 - RNA, 19 nt, Artificial Sequence
  Description of Artificial Sequence: Synthetic oligonucleotide
  Antisense strand to SEQ ID NO: 2246406
ugucucauaaauguauaca

SEQ ID NO: 2246408 - RNA, 19 nt, Artificial Sequence
  Description of Artificial Sequence: Synthetic oligonucleotide
  Sense strand starting at position 1892 of SEQ ID NO: 1884180
ggagcaagguaaguuguaa

SEQ ID NO: 2246409 - RNA, 19 nt, Artificial Sequence
  Description of Artificial Sequence: Synthetic oligonucleotide
  Antisense strand to SEQ ID NO: 2246408
uuacaacuuaccuugcucc

SEQ ID NO: 2246410 - RNA, 19 nt, Artificial Sequence
  Description of Artificial Sequence: Synthetic oligonucleotide
  Sense strand starting at position 2006 of SEQ ID NO: 1884180
acaggaguguucucuaguu

SEQ ID NO: 2246411 - RNA, 19 nt, Artificial Sequence
  Description of Artificial Sequence: Synthetic oligonucleotide
  Antisense strand to SEQ ID NO: 2246410
aacuagagaacacuccugu

SEQ ID NO: 2246412 - RNA, 19 nt, Artificial Sequence
  Description of Artificial Sequence: Synthetic oligonucleotide
  Sense strand starting at position 2036 of SEQ ID NO: 1884180
ggcccuggguugcuuaaga

SEQ ID NO: 2246413 - RNA, 19 nt, Artificial Sequence
  Description of Artificial Sequence: Synthetic oligonucleotide
  Antisense strand to SEQ ID NO: 2246412
ucuuaagcaacccagggcc

SEQ ID NO: 2246414 - RNA, 19 nt, Artificial Sequence
  Description of Artificial Sequence: Synthetic oligonucleotide
  Sense strand starting at position 2056 of SEQ ID NO: 1884180
agaagaauauuguuuccag

SEQ ID NO: 2246415 - RNA, 19 nt, Artificial Sequence
  Description of Artificial Sequence: Synthetic oligonucleotide
  Antisense strand to SEQ ID NO: 2246414
cuggaaacaauauucuucu

SEQ ID NO: 2246416 - RNA, 19 nt, Artificial Sequence
  Description of Artificial Sequence: Synthetic oligonucleotide
  Sense strand starting at position 2057 of SEQ ID NO: 1884180
gaagaauauuguuuccagg

SEQ ID NO: 2246417 - RNA, 19 nt, Artificial Sequence
  Description of Artificial Sequence: Synthetic oligonucleotide
  Antisense strand to SEQ ID NO: 2246416
ccuggaaacaauauucuuc

SEQ ID NO: 2246418 - RNA, 19 nt, Artificial Sequence
  Description of Artificial Sequence: Synthetic oligonucleotide
  Sense strand starting at position 2059 of SEQ ID NO: 1884180
agaauauuguuuccagggu

SEQ ID NO: 2246419 - RNA, 19 nt, Artificial Sequence
  Description of Artificial Sequence: Synthetic oligonucleotide
  Antisense strand to SEQ ID NO: 2246418
acccuggaaacaauauucu

SEQ ID NO: 2246420 - RNA, 19 nt, Artificial Sequence
  Description of Artificial Sequence: Synthetic oligonucleotide
  Sense strand starting at position 2063 of SEQ ID NO: 1884180
uauuguuuccaggguaugu

SEQ ID NO: 2246421 - RNA, 19 nt, Artificial Sequence
  Description of Artificial Sequence: Synthetic oligonucleotide
  Antisense strand to SEQ ID NO: 2246420
acauacccuggaaacaaua

SEQ ID NO: 2246422 - RNA, 19 nt, Artificial Sequence
  Description of Artificial Sequence: Synthetic oligonucleotide
  Sense strand starting at position 3168 of SEQ ID NO: 1884180
auugauuucuagcuguauu

SEQ ID NO: 2246423 - RNA, 19 nt, Artificial Sequence
  Description of Artificial Sequence: Synthetic oligonucleotide
  Antisense strand to SEQ ID NO: 2246422
aauacagcuagaaaucaau

SEQ ID NO: 2246424 - RNA, 19 nt, Artificial Sequence
  Description of Artificial Sequence: Synthetic oligonucleotide
  Sense strand starting at position 3402 of SEQ ID NO: 1884180
cucugucuacucugucuaa

SEQ ID NO: 2246425 - RNA, 19 nt, Artificial Sequence
  Description of Artificial Sequence: Synthetic oligonucleotide
  Antisense strand to SEQ ID NO: 2246424
uuagacagaguagacagag

SEQ ID NO: 2246426 - RNA, 19 nt, Artificial Sequence
  Description of Artificial Sequence: Synthetic oligonucleotide
  Sense strand starting at position 3403 of SEQ ID NO: 1884180
ucugucuacucugucuaaa

SEQ ID NO: 2246427 - RNA, 19 nt, Artificial Sequence
  Description of Artificial Sequence: Synthetic oligonucleotide
  Antisense strand to SEQ ID NO: 2246426
uuuagacagaguagacaga

SEQ ID NO: 2246428 - RNA, 19 nt, Artificial Sequence
  Description of Artificial Sequence: Synthetic oligonucleotide
  Sense strand starting at position 3405 of SEQ ID NO: 1884180
ugucuacucugucuaaauu

SEQ ID NO: 2246429 - RNA, 19 nt, Artificial Sequence
  Description of Artificial Sequence: Synthetic oligonucleotide
  Antisense strand to SEQ ID NO: 2246428
aauuuagacagaguagaca

SEQ ID NO: 2246430 - RNA, 19 nt, Artificial Sequence
  Description of Artificial Sequence: Synthetic oligonucleotide
  Sense strand starting at position 3406 of SEQ ID NO: 1884180
gucuacucugucuaaauua

SEQ ID NO: 2246431 - RNA, 19 nt, Artificial Sequence
  Description of Artificial Sequence: Synthetic oligonucleotide
  Antisense strand to SEQ ID NO: 2246430
uaauuuagacagaguagac

SEQ ID NO: 2246432 - RNA, 19 nt, Artificial Sequence
  Description of Artificial Sequence: Synthetic oligonucleotide
  Sense strand starting at position 3424 of SEQ ID NO: 1884180
auucccuuccuaugguauu

SEQ ID NO: 2246433 - RNA, 19 nt, Artificial Sequence
  Description of Artificial Sequence: Synthetic oligonucleotide
  Antisense strand to SEQ ID NO: 2246432
aauaccauaggaagggaau

SEQ ID NO: 2246434 - RNA, 19 nt, Artificial Sequence
  Description of Artificial Sequence: Synthetic oligonucleotide
  Sense strand starting at position 3498 of SEQ ID NO: 1884180
acauuuacuugugaccuua

SEQ ID NO: 2246435 - RNA, 19 nt, Artificial Sequence
  Description of Artificial Sequence: Synthetic oligonucleotide
  Antisense strand to SEQ ID NO: 2246434
uaaggucacaaguaaaugu

SEQ ID NO: 2246436 - RNA, 19 nt, Artificial Sequence
  Description of Artificial Sequence: Synthetic oligonucleotide
  Sense strand starting at position 3526 of SEQ ID NO: 1884180
uugucaucuggacguuaug

SEQ ID NO: 2246437 - RNA, 19 nt, Artificial Sequence
  Description of Artificial Sequence: Synthetic oligonucleotide
  Antisense strand to SEQ ID NO: 2246436
cauaacguccagaugacaa

SEQ ID NO: 2246438 - RNA, 19 nt, Artificial Sequence
  Description of Artificial Sequence: Synthetic oligonucleotide
  Sense strand starting at position 3538 of SEQ ID NO: 1884180
cguuauguuccaggagagu

SEQ ID NO: 2246439 - RNA, 19 nt, Artificial Sequence
  Description of Artificial Sequence: Synthetic oligonucleotide
  Antisense strand to SEQ ID NO: 2246438
acucuccuggaacauaacg

SEQ ID NO: 2246440 - RNA, 19 nt, Artificial Sequence
  Description of Artificial Sequence: Synthetic oligonucleotide
  Sense strand starting at position 3921 of SEQ ID NO: 1884180
caugguugugaccaugcua

SEQ ID NO: 2246441 - RNA, 19 nt, Artificial Sequence
  Description of Artificial Sequence: Synthetic oligonucleotide
  Antisense strand to SEQ ID NO: 2246440
uagcauggucacaaccaug

SEQ ID NO: 2246442 - RNA, 19 nt, Artificial Sequence
  Description of Artificial Sequence: Synthetic oligonucleotide
  Sense strand starting at position 3944 of SEQ ID NO: 1884180
gcgggucuccacugauaac

SEQ ID NO: 2246443 - RNA, 19 nt, Artificial Sequence
  Description of Artificial Sequence: Synthetic oligonucleotide
  Antisense strand to SEQ ID NO: 2246442
guuaucaguggagacccgc

SEQ ID NO: 2246444 - RNA, 19 nt, Artificial Sequence
  Description of Artificial Sequence: Synthetic oligonucleotide
  Sense strand starting at position 3945 of SEQ ID NO: 1884180
cgggucuccacugauaacu

SEQ ID NO: 2246445 - RNA, 19 nt, Artificial Sequence
  Description of Artificial Sequence: Synthetic oligonucleotide
  Antisense strand to SEQ ID NO: 2246444
aguuaucaguggagacccg

SEQ ID NO: 2246446 - RNA, 19 nt, Artificial Sequence
  Description of Artificial Sequence: Synthetic oligonucleotide
  Sense strand starting at position 30 of SEQ ID NO: 1884181
cugauagcucuuugcauug

SEQ ID NO: 2246447 - RNA, 19 nt, Artificial Sequence
  Description of Artificial Sequence: Synthetic oligonucleotide
  Antisense strand to SEQ ID NO: 2246446
caaugcaaagagcuaucag

SEQ ID NO: 2246448 - RNA, 19 nt, Artificial Sequence
  Description of Artificial Sequence: Synthetic oligonucleotide
  Sense strand starting at position 82 of SEQ ID NO: 1884181
uggauuuagucucaagagu

SEQ ID NO: 2246449 - RNA, 19 nt, Artificial Sequence
  Description of Artificial Sequence: Synthetic oligonucleotide
  Antisense strand to SEQ ID NO: 2246448
acucuugagacuaaaucca

SEQ ID NO: 2246450 - RNA, 19 nt, Artificial Sequence
  Description of Artificial Sequence: Synthetic oligonucleotide
  Sense strand starting at position 147 of SEQ ID NO: 1884181
cuuucaguuggacgagaau

SEQ ID NO: 2246451 - RNA, 19 nt, Artificial Sequence
  Description of Artificial Sequence: Synthetic oligonucleotide
  Antisense strand to SEQ ID NO: 2246450
auucucguccaacugaaag

SEQ ID NO: 2246452 - RNA, 19 nt, Artificial Sequence
  Description of Artificial Sequence: Synthetic oligonucleotide
  Sense strand starting at position 153 of SEQ ID NO: 1884181
guuggacgagaaugcuauu

SEQ ID NO: 2246453 - RNA, 19 nt, Artificial Sequence
  Description of Artificial Sequence: Synthetic oligonucleotide
  Antisense strand to SEQ ID NO: 2246452
aauagcauucucguccaac

SEQ ID NO: 2246454 - RNA, 19 nt, Artificial Sequence
  Description of Artificial Sequence: Synthetic oligonucleotide
  Sense strand starting at position 257 of SEQ ID NO: 1884181
gcuuuccugccagauuaua

SEQ ID NO: 2246455 - RNA, 19 nt, Artificial Sequence
  Description of Artificial Sequence: Synthetic oligonucleotide
  Antisense strand to SEQ ID NO: 2246454
uauaaucuggcaggaaagc

SEQ ID NO: 2246456 - RNA, 19 nt, Artificial Sequence
  Description of Artificial Sequence: Synthetic oligonucleotide
  Sense strand starting at position 287 of SEQ ID NO: 1884181
ucaacuugggcucauuaau

SEQ ID NO: 2246457 - RNA, 19 nt, Artificial Sequence
  Description of Artificial Sequence: Synthetic oligonucleotide
  Antisense strand to SEQ ID NO: 2246456
auuaaugagcccaaguuga

SEQ ID NO: 2246458 - RNA, 19 nt, Artificial Sequence
  Description of Artificial Sequence: Synthetic oligonucleotide
  Sense strand starting at position 296 of SEQ ID NO: 1884181
gcucauuaauaagcugaau

SEQ ID NO: 2246459 - RNA, 19 nt, Artificial Sequence
  Description of Artificial Sequence: Synthetic oligonucleotide
  Antisense strand to SEQ ID NO: 2246458
auucagcuuauuaaugagc

SEQ ID NO: 2246460 - RNA, 19 nt, Artificial Sequence
  Description of Artificial Sequence: Synthetic oligonucleotide
  Sense strand starting at position 389 of SEQ ID NO: 1884181
agggaaauccauugcuaaa

SEQ ID NO: 2246461 - RNA, 19 nt, Artificial Sequence
  Description of Artificial Sequence: Synthetic oligonucleotide
  Antisense strand to SEQ ID NO: 2246460
uuuagcaauggauuucccu

SEQ ID NO: 2246462 - RNA, 19 nt, Artificial Sequence
  Description of Artificial Sequence: Synthetic oligonucleotide
  Sense strand starting at position 467 of SEQ ID NO: 1884181
uaaauuccuguugguauga

SEQ ID NO: 2246463 - RNA, 19 nt, Artificial Sequence
  Description of Artificial Sequence: Synthetic oligonucleotide
  Antisense strand to SEQ ID NO: 2246462
ucauaccaacaggaauuua

SEQ ID NO: 2246464 - RNA, 19 nt, Artificial Sequence
  Description of Artificial Sequence: Synthetic oligonucleotide
  Sense strand starting at position 527 of SEQ ID NO: 1884181
guaaguaguggauguucuu

SEQ ID NO: 2246465 - RNA, 19 nt, Artificial Sequence
  Description of Artificial Sequence: Synthetic oligonucleotide
  Antisense strand to SEQ ID NO: 2246464
aagaacauccacuacuuac

SEQ ID NO: 2246466 - RNA, 19 nt, Artificial Sequence
  Description of Artificial Sequence: Synthetic oligonucleotide
  Sense strand starting at position 549 of SEQ ID NO: 1884181
uucuaauuacugugauuga

SEQ ID NO: 2246467 - RNA, 19 nt, Artificial Sequence
  Description of Artificial Sequence: Synthetic oligonucleotide
  Antisense strand to SEQ ID NO: 2246466
ucaaucacaguaauuagaa

SEQ ID NO: 2246468 - RNA, 19 nt, Artificial Sequence
  Description of Artificial Sequence: Synthetic oligonucleotide
  Sense strand starting at position 617 of SEQ ID NO: 1884181
gcugacgacuuacuguaaa

SEQ ID NO: 2246469 - RNA, 19 nt, Artificial Sequence
  Description of Artificial Sequence: Synthetic oligonucleotide
  Antisense strand to SEQ ID NO: 2246468
uuuacaguaagucgucagc

SEQ ID NO: 2246470 - RNA, 19 nt, Artificial Sequence
  Description of Artificial Sequence: Synthetic oligonucleotide
  Sense strand starting at position 629 of SEQ ID NO: 1884181
cuguaaagauaauugcaua

SEQ ID NO: 2246471 - RNA, 19 nt, Artificial Sequence
  Description of Artificial Sequence: Synthetic oligonucleotide
  Antisense strand to SEQ ID NO: 2246470
uaugcaauuaucuuuacag

SEQ ID NO: 2246472 - RNA, 19 nt, Artificial Sequence
  Description of Artificial Sequence: Synthetic oligonucleotide
  Sense strand starting at position 660 of SEQ ID NO: 1884181
cuuacuuuacagugugaag

SEQ ID NO: 2246473 - RNA, 19 nt, Artificial Sequence
  Description of Artificial Sequence: Synthetic oligonucleotide
  Antisense strand to SEQ ID NO: 2246472
cuucacacuguaaaguaag

SEQ ID NO: 2246474 - RNA, 19 nt, Artificial Sequence
  Description of Artificial Sequence: Synthetic oligonucleotide
  Sense strand starting at position 712 of SEQ ID NO: 1884181
acacauuauuuagguuaca

SEQ ID NO: 2246475 - RNA, 19 nt, Artificial Sequence
  Description of Artificial Sequence: Synthetic oligonucleotide
  Antisense strand to SEQ ID NO: 2246474
uguaaccuaaauaaugugu

SEQ ID NO: 2246476 - RNA, 19 nt, Artificial Sequence
  Description of Artificial Sequence: Synthetic oligonucleotide
  Sense strand starting at position 717 of SEQ ID NO: 1884181
uuauuuagguuacauggua

SEQ ID NO: 2246477 - RNA, 19 nt, Artificial Sequence
  Description of Artificial Sequence: Synthetic oligonucleotide
  Antisense strand to SEQ ID NO: 2246476
uaccauguaaccuaaauaa

SEQ ID NO: 2246478 - RNA, 19 nt, Artificial Sequence
  Description of Artificial Sequence: Synthetic oligonucleotide
  Sense strand starting at position 763 of SEQ ID NO: 1884181
uuuacuuaacagugaguga

SEQ ID NO: 2246479 - RNA, 19 nt, Artificial Sequence
  Description of Artificial Sequence: Synthetic oligonucleotide
  Antisense strand to SEQ ID NO: 2246478
ucacucacuguuaaguaaa

SEQ ID NO: 2246480 - RNA, 19 nt, Artificial Sequence
  Description of Artificial Sequence: Synthetic oligonucleotide
  Sense strand starting at position 834 of SEQ ID NO: 1884181
ggugccuuacacuguauau

SEQ ID NO: 2246481 - RNA, 19 nt, Artificial Sequence
  Description of Artificial Sequence: Synthetic oligonucleotide
  Antisense strand to SEQ ID NO: 2246480
auauacaguguaaggcacc

SEQ ID NO: 2246482 - RNA, 19 nt, Artificial Sequence
  Description of Artificial Sequence: Synthetic oligonucleotide
  Sense strand starting at position 853 of SEQ ID NO: 1884181
gucagauuccuguauugau

SEQ ID NO: 2246483 - RNA, 19 nt, Artificial Sequence
  Description of Artificial Sequence: Synthetic oligonucleotide
  Antisense strand to SEQ ID NO: 2246482
aucaauacaggaaucugac

SEQ ID NO: 2246484 - RNA, 19 nt, Artificial Sequence
  Description of Artificial Sequence: Synthetic oligonucleotide
  Sense strand starting at position 1014 of SEQ ID NO: 1884181
gaaguaagaucuccuggua

SEQ ID NO: 2246485 - RNA, 19 nt, Artificial Sequence
  Description of Artificial Sequence: Synthetic oligonucleotide
  Antisense strand to SEQ ID NO: 2246484
uaccaggagaucuuacuuc

SEQ ID NO: 2246486 - RNA, 19 nt, Artificial Sequence
  Description of Artificial Sequence: Synthetic oligonucleotide
  Sense strand starting at position 1017 of SEQ ID NO: 1884181
guaagaucuccugguaaag

SEQ ID NO: 2246487 - RNA, 19 nt, Artificial Sequence
  Description of Artificial Sequence: Synthetic oligonucleotide
  Antisense strand to SEQ ID NO: 2246486
cuuuaccaggagaucuuac

SEQ ID NO: 2246488 - RNA, 19 nt, Artificial Sequence
  Description of Artificial Sequence: Synthetic oligonucleotide
  Sense strand starting at position 1071 of SEQ ID NO: 1884181
aagggagucucuucuaauu

SEQ ID NO: 2246489 - RNA, 19 nt, Artificial Sequence
  Description of Artificial Sequence: Synthetic oligonucleotide
  Antisense strand to SEQ ID NO: 2246488
aauuagaagagacucccuu

SEQ ID NO: 2246490 - RNA, 19 nt, Artificial Sequence
  Description of Artificial Sequence: Synthetic oligonucleotide
  Sense strand starting at position 1088 of SEQ ID NO: 1884181
uugccuuugggaggaaaca

SEQ ID NO: 2246491 - RNA, 19 nt, Artificial Sequence
  Description of Artificial Sequence: Synthetic oligonucleotide
  Antisense strand to SEQ ID NO: 2246490
uguuuccucccaaaggcaa

SEQ ID NO: 2246492 - RNA, 19 nt, Artificial Sequence
  Description of Artificial Sequence: Synthetic oligonucleotide
  Sense strand starting at position 1113 of SEQ ID NO: 1884181
agauaauuggcaugcugau

SEQ ID NO: 2246493 - RNA, 19 nt, Artificial Sequence
  Description of Artificial Sequence: Synthetic oligonucleotide
  Antisense strand to SEQ ID NO: 2246492
aucagcaugccaauuaucu

SEQ ID NO: 2246494 - RNA, 19 nt, Artificial Sequence
  Description of Artificial Sequence: Synthetic oligonucleotide
  Sense strand starting at position 1151 of SEQ ID NO: 1884181
ugucuuguaacagagguaa

SEQ ID NO: 2246495 - RNA, 19 nt, Artificial Sequence
  Description of Artificial Sequence: Synthetic oligonucleotide
  Antisense strand to SEQ ID NO: 2246494
uuaccucuguuacaagaca

SEQ ID NO: 2246496 - RNA, 19 nt, Artificial Sequence
  Description of Artificial Sequence: Synthetic oligonucleotide
  Sense strand starting at position 1385 of SEQ ID NO: 1884181
cgccucugccugucacuua

SEQ ID NO: 2246497 - RNA, 19 nt, Artificial Sequence
  Description of Artificial Sequence: Synthetic oligonucleotide
  Antisense strand to SEQ ID NO: 2246496
uaagugacaggcagaggcg

SEQ ID NO: 2246498 - RNA, 19 nt, Artificial Sequence
  Description of Artificial Sequence: Synthetic oligonucleotide
  Sense strand starting at position 1395 of SEQ ID NO: 1884181
ugucacuuaccguugcgaa

SEQ ID NO: 2246499 - RNA, 19 nt, Artificial Sequence
  Description of Artificial Sequence: Synthetic oligonucleotide
  Antisense strand to SEQ ID NO: 2246498
uucgcaacgguaagugaca

SEQ ID NO: 2246500 - RNA, 19 nt, Artificial Sequence
  Description of Artificial Sequence: Synthetic oligonucleotide
  Sense strand starting at position 1545 of SEQ ID NO: 1884181
gagaaucuaagcgauccga

SEQ ID NO: 2246501 - RNA, 19 nt, Artificial Sequence
  Description of Artificial Sequence: Synthetic oligonucleotide
  Antisense strand to SEQ ID NO: 2246500
ucggaucgcuuagauucuc

SEQ ID NO: 2246502 - RNA, 19 nt, Artificial Sequence
  Description of Artificial Sequence: Synthetic oligonucleotide
  Sense strand starting at position 1577 of SEQ ID NO: 1884181
cgccuagagcuguacaauc

SEQ ID NO: 2246503 - RNA, 19 nt, Artificial Sequence
  Description of Artificial Sequence: Synthetic oligonucleotide
  Antisense strand to SEQ ID NO: 2246502
gauuguacagcucuaggcg

SEQ ID NO: 2246504 - RNA, 19 nt, Artificial Sequence
  Description of Artificial Sequence: Synthetic oligonucleotide
  Sense strand starting at position 1723 of SEQ ID NO: 1884181
acuuguuccucuuccagga

SEQ ID NO: 2246505 - RNA, 19 nt, Artificial Sequence
  Description of Artificial Sequence: Synthetic oligonucleotide
  Antisense strand to SEQ ID NO: 2246504
uccuggaagaggaacaagu

SEQ ID NO: 2246506 - RNA, 19 nt, Artificial Sequence
  Description of Artificial Sequence: Synthetic oligonucleotide
  Sense strand starting at position 2084 of SEQ ID NO: 1884181
ccuguaauugccugacagg

SEQ ID NO: 2246507 - RNA, 19 nt, Artificial Sequence
  Description of Artificial Sequence: Synthetic oligonucleotide
  Antisense strand to SEQ ID NO: 2246506
ccugucaggcaauuacagg

SEQ ID NO: 2246508 - RNA, 19 nt, Artificial Sequence
  Description of Artificial Sequence: Synthetic oligonucleotide
  Sense strand starting at position 2085 of SEQ ID NO: 1884181
cuguaauugccugacagga

SEQ ID NO: 2246509 - RNA, 19 nt, Artificial Sequence
  Description of Artificial Sequence: Synthetic oligonucleotide
  Antisense strand to SEQ ID NO: 2246508
uccugucaggcaauuacag

SEQ ID NO: 2246510 - RNA, 19 nt, Artificial Sequence
  Description of Artificial Sequence: Synthetic oligonucleotide
  Sense strand starting at position 2172 of SEQ ID NO: 1884181
gcagggaucuccgcgggaa

SEQ ID NO: 2246511 - RNA, 19 nt, Artificial Sequence
  Description of Artificial Sequence: Synthetic oligonucleotide
  Antisense strand to SEQ ID NO: 2246510
uucccgcggagaucccugc

SEQ ID NO: 2246512 - RNA, 19 nt, Artificial Sequence
  Description of Artificial Sequence: Synthetic oligonucleotide
  Sense strand starting at position 3097 of SEQ ID NO: 1884181
caggaagcguuuguagaug

SEQ ID NO: 2246513 - RNA, 19 nt, Artificial Sequence
  Description of Artificial Sequence: Synthetic oligonucleotide
  Antisense strand to SEQ ID NO: 2246512
caucuacaaacgcuuccug

SEQ ID NO: 2246514 - RNA, 19 nt, Artificial Sequence
  Description of Artificial Sequence: Synthetic oligonucleotide
  Sense strand starting at position 3124 of SEQ ID NO: 1884181
aaggacauuucugggaaga

SEQ ID NO: 2246515 - RNA, 19 nt, Artificial Sequence
  Description of Artificial Sequence: Synthetic oligonucleotide
  Antisense strand to SEQ ID NO: 2246514
ucuucccagaaauguccuu

SEQ ID NO: 2246516 - RNA, 19 nt, Artificial Sequence
  Description of Artificial Sequence: Synthetic oligonucleotide
  Sense strand starting at position 3204 of SEQ ID NO: 1884181
gggaguuuguggguaaggu

SEQ ID NO: 2246517 - RNA, 19 nt, Artificial Sequence
  Description of Artificial Sequence: Synthetic oligonucleotide
  Antisense strand to SEQ ID NO: 2246516
accuuacccacaaacuccc

SEQ ID NO: 2246518 - RNA, 19 nt, Artificial Sequence
  Description of Artificial Sequence: Synthetic oligonucleotide
  Sense strand starting at position 3689 of SEQ ID NO: 1884181
cugggaguuaaaugccuaa

SEQ ID NO: 2246519 - RNA, 19 nt, Artificial Sequence
  Description of Artificial Sequence: Synthetic oligonucleotide
  Antisense strand to SEQ ID NO: 2246518
uuaggcauuuaacucccag

SEQ ID NO: 2246520 - RNA, 19 nt, Artificial Sequence
  Description of Artificial Sequence: Synthetic oligonucleotide
  Sense strand starting at position 3692 of SEQ ID NO: 1884181
ggaguuaaaugccuaaguu

SEQ ID NO: 2246521 - RNA, 19 nt, Artificial Sequence
  Description of Artificial Sequence: Synthetic oligonucleotide
  Antisense strand to SEQ ID NO: 2246520
aacuuaggcauuuaacucc

SEQ ID NO: 2246522 - RNA, 19 nt, Artificial Sequence
  Description of Artificial Sequence: Synthetic oligonucleotide
  Sense strand starting at position 3693 of SEQ ID NO: 1884181
gaguuaaaugccuaaguug

SEQ ID NO: 2246523 - RNA, 19 nt, Artificial Sequence
  Description of Artificial Sequence: Synthetic oligonucleotide
  Antisense strand to SEQ ID NO: 2246522
caacuuaggcauuuaacuc

SEQ ID NO: 2246524 - RNA, 19 nt, Artificial Sequence
  Description of Artificial Sequence: Synthetic oligonucleotide
  Sense strand starting at position 3924 of SEQ ID NO: 1884181
gcggcaucaucagauuuag

SEQ ID NO: 2246525 - RNA, 19 nt, Artificial Sequence
  Description of Artificial Sequence: Synthetic oligonucleotide
  Antisense strand to SEQ ID NO: 2246524
cuaaaucugaugaugccgc

SEQ ID NO: 2246526 - RNA, 19 nt, Artificial Sequence
  Description of Artificial Sequence: Synthetic oligonucleotide
  Sense strand starting at position 499 of SEQ ID NO: 1884182
auaguaguuccugagacua

SEQ ID NO: 2246527 - RNA, 19 nt, Artificial Sequence
  Description of Artificial Sequence: Synthetic oligonucleotide
  Antisense strand to SEQ ID NO: 2246526
uagucucaggaacuacuau

SEQ ID NO: 2246528 - RNA, 19 nt, Artificial Sequence
  Description of Artificial Sequence: Synthetic oligonucleotide
  Sense strand starting at position 507 of SEQ ID NO: 1884182
uccugagacuaacugguua

SEQ ID NO: 2246529 - RNA, 19 nt, Artificial Sequence
  Description of Artificial Sequence: Synthetic oligonucleotide
  Antisense strand to SEQ ID NO: 2246528
uaaccaguuagucucagga

SEQ ID NO: 2246530 - RNA, 19 nt, Artificial Sequence
  Description of Artificial Sequence: Synthetic oligonucleotide
  Sense strand starting at position 676 of SEQ ID NO: 1884182
agauuaucauggcugcuga

SEQ ID NO: 2246531 - RNA, 19 nt, Artificial Sequence
  Description of Artificial Sequence: Synthetic oligonucleotide
  Antisense strand to SEQ ID NO: 2246530
ucagcagccaugauaaucu

SEQ ID NO: 2246532 - RNA, 19 nt, Artificial Sequence
  Description of Artificial Sequence: Synthetic oligonucleotide
  Sense strand starting at position 734 of SEQ ID NO: 1884182
aaguacaauguuugauaga

SEQ ID NO: 2246533 - RNA, 19 nt, Artificial Sequence
  Description of Artificial Sequence: Synthetic oligonucleotide
  Antisense strand to SEQ ID NO: 2246532
ucuaucaaacauuguacuu

SEQ ID NO: 2246534 - RNA, 19 nt, Artificial Sequence
  Description of Artificial Sequence: Synthetic oligonucleotide
  Sense strand starting at position 793 of SEQ ID NO: 1884182
gaggcaaggugcuuuaaca

SEQ ID NO: 2246535 - RNA, 19 nt, Artificial Sequence
  Description of Artificial Sequence: Synthetic oligonucleotide
  Antisense strand to SEQ ID NO: 2246534
uguuaaagcaccuugccuc

SEQ ID NO: 2246536 - RNA, 19 nt, Artificial Sequence
  Description of Artificial Sequence: Synthetic oligonucleotide
  Sense strand starting at position 801 of SEQ ID NO: 1884182
gugcuuuaacauuaagagu

SEQ ID NO: 2246537 - RNA, 19 nt, Artificial Sequence
  Description of Artificial Sequence: Synthetic oligonucleotide
  Antisense strand to SEQ ID NO: 2246536
acucuuaauguuaaagcac

SEQ ID NO: 2246538 - RNA, 19 nt, Artificial Sequence
  Description of Artificial Sequence: Synthetic oligonucleotide
  Sense strand starting at position 812 of SEQ ID NO: 1884182
uuaagaguuucuuugaacu

SEQ ID NO: 2246539 - RNA, 19 nt, Artificial Sequence
  Description of Artificial Sequence: Synthetic oligonucleotide
  Antisense strand to SEQ ID NO: 2246538
aguucaaagaaacucuuaa

SEQ ID NO: 2246540 - RNA, 19 nt, Artificial Sequence
  Description of Artificial Sequence: Synthetic oligonucleotide
  Sense strand starting at position 893 of SEQ ID NO: 1884182
aguacuacagcgugacaaa

SEQ ID NO: 2246541 - RNA, 19 nt, Artificial Sequence
  Description of Artificial Sequence: Synthetic oligonucleotide
  Antisense strand to SEQ ID NO: 2246540
uuugucacgcuguaguacu

SEQ ID NO: 2246542 - RNA, 19 nt, Artificial Sequence
  Description of Artificial Sequence: Synthetic oligonucleotide
  Sense strand starting at position 1045 of SEQ ID NO: 1884182
uuacuuccaccgugaagag

SEQ ID NO: 2246543 - RNA, 19 nt, Artificial Sequence
  Description of Artificial Sequence: Synthetic oligonucleotide
  Antisense strand to SEQ ID NO: 2246542
cucuucacgguggaaguaa

SEQ ID NO: 2246544 - RNA, 19 nt, Artificial Sequence
  Description of Artificial Sequence: Synthetic oligonucleotide
  Sense strand starting at position 1073 of SEQ ID NO: 1884182
ccuaguauuuaagagaccu

SEQ ID NO: 2246545 - RNA, 19 nt, Artificial Sequence
  Description of Artificial Sequence: Synthetic oligonucleotide
  Antisense strand to SEQ ID NO: 2246544
aggucucuuaaauacuagg

SEQ ID NO: 2246546 - RNA, 19 nt, Artificial Sequence
  Description of Artificial Sequence: Synthetic oligonucleotide
  Sense strand starting at position 1357 of SEQ ID NO: 1884182
gggcgaccaagugauacuu

SEQ ID NO: 2246547 - RNA, 19 nt, Artificial Sequence
  Description of Artificial Sequence: Synthetic oligonucleotide
  Antisense strand to SEQ ID NO: 2246546
aaguaucacuuggucgccc

SEQ ID NO: 2246548 - RNA, 19 nt, Artificial Sequence
  Description of Artificial Sequence: Synthetic oligonucleotide
  Sense strand starting at position 1367 of SEQ ID NO: 1884182
gugauacuucgccuguguu

SEQ ID NO: 2246549 - RNA, 19 nt, Artificial Sequence
  Description of Artificial Sequence: Synthetic oligonucleotide
  Antisense strand to SEQ ID NO: 2246548
aacacaggcgaaguaucac

SEQ ID NO: 2246550 - RNA, 19 nt, Artificial Sequence
  Description of Artificial Sequence: Synthetic oligonucleotide
  Sense strand starting at position 1379 of SEQ ID NO: 1884182
cuguguuuagaguccguuu

SEQ ID NO: 2246551 - RNA, 19 nt, Artificial Sequence
  Description of Artificial Sequence: Synthetic oligonucleotide
  Antisense strand to SEQ ID NO: 2246550
aaacggacucuaaacacag

SEQ ID NO: 2246552 - RNA, 19 nt, Artificial Sequence
  Description of Artificial Sequence: Synthetic oligonucleotide
  Sense strand starting at position 1454 of SEQ ID NO: 1884182
ggaauacagcuuugaaggu

SEQ ID NO: 2246553 - RNA, 19 nt, Artificial Sequence
  Description of Artificial Sequence: Synthetic oligonucleotide
  Antisense strand to SEQ ID NO: 2246552
accuucaaagcuguauucc

SEQ ID NO: 2246554 - RNA, 19 nt, Artificial Sequence
  Description of Artificial Sequence: Synthetic oligonucleotide
  Sense strand starting at position 1609 of SEQ ID NO: 1884182
augagcugugguuacugau

SEQ ID NO: 2246555 - RNA, 19 nt, Artificial Sequence
  Description of Artificial Sequence: Synthetic oligonucleotide
  Antisense strand to SEQ ID NO: 2246554
aucaguaaccacagcucau

SEQ ID NO: 2246556 - RNA, 19 nt, Artificial Sequence
  Description of Artificial Sequence: Synthetic oligonucleotide
  Sense strand starting at position 1625 of SEQ ID NO: 1884182
gauguagcuccacaguuau

SEQ ID NO: 2246557 - RNA, 19 nt, Artificial Sequence
  Description of Artificial Sequence: Synthetic oligonucleotide
  Antisense strand to SEQ ID NO: 2246556
auaacuguggagcuacauc

SEQ ID NO: 2246558 - RNA, 19 nt, Artificial Sequence
  Description of Artificial Sequence: Synthetic oligonucleotide
  Sense strand starting at position 1655 of SEQ ID NO: 1884182
augguuauaucccugguuu

SEQ ID NO: 2246559 - RNA, 19 nt, Artificial Sequence
  Description of Artificial Sequence: Synthetic oligonucleotide
  Antisense strand to SEQ ID NO: 2246558
aaaccagggauauaaccau

SEQ ID NO: 2246560 - RNA, 19 nt, Artificial Sequence
  Description of Artificial Sequence: Synthetic oligonucleotide
  Sense strand starting at position 1740 of SEQ ID NO: 1884182
gaucaugccucccugugaa

SEQ ID NO: 2246561 - RNA, 19 nt, Artificial Sequence
  Description of Artificial Sequence: Synthetic oligonucleotide
  Antisense strand to SEQ ID NO: 2246560
uucacagggaggcaugauc

SEQ ID NO: 2246562 - RNA, 19 nt, Artificial Sequence
  Description of Artificial Sequence: Synthetic oligonucleotide
  Sense strand starting at position 2004 of SEQ ID NO: 1884182
gcaaguuaaccaugauugu

SEQ ID NO: 2246563 - RNA, 19 nt, Artificial Sequence
  Description of Artificial Sequence: Synthetic oligonucleotide
  Antisense strand to SEQ ID NO: 2246562
acaaucaugguuaacuugc

SEQ ID NO: 2246564 - RNA, 19 nt, Artificial Sequence
  Description of Artificial Sequence: Synthetic oligonucleotide
  Sense strand starting at position 2007 of SEQ ID NO: 1884182
aguuaaccaugauugucaa

SEQ ID NO: 2246565 - RNA, 19 nt, Artificial Sequence
  Description of Artificial Sequence: Synthetic oligonucleotide
  Antisense strand to SEQ ID NO: 2246564
uugacaaucaugguuaacu

SEQ ID NO: 2246566 - RNA, 19 nt, Artificial Sequence
  Description of Artificial Sequence: Synthetic oligonucleotide
  Sense strand starting at position 2008 of SEQ ID NO: 1884182
guuaaccaugauugucaaa

SEQ ID NO: 2246567 - RNA, 19 nt, Artificial Sequence
  Description of Artificial Sequence: Synthetic oligonucleotide
  Antisense strand to SEQ ID NO: 2246566
uuugacaaucaugguuaac

SEQ ID NO: 2246568 - RNA, 19 nt, Artificial Sequence
  Description of Artificial Sequence: Synthetic oligonucleotide
  Sense strand starting at position 2060 of SEQ ID NO: 1884182
acuacuguauccuuggaga

SEQ ID NO: 2246569 - RNA, 19 nt, Artificial Sequence
  Description of Artificial Sequence: Synthetic oligonucleotide
  Antisense strand to SEQ ID NO: 2246568
ucuccaaggauacaguagu

SEQ ID NO: 2246570 - RNA, 19 nt, Artificial Sequence
  Description of Artificial Sequence: Synthetic oligonucleotide
  Sense strand starting at position 2062 of SEQ ID NO: 1884182
uacuguauccuuggagaaa

SEQ ID NO: 2246571 - RNA, 19 nt, Artificial Sequence
  Description of Artificial Sequence: Synthetic oligonucleotide
  Antisense strand to SEQ ID NO: 2246570
uuucuccaaggauacagua

SEQ ID NO: 2246572 - RNA, 19 nt, Artificial Sequence
  Description of Artificial Sequence: Synthetic oligonucleotide
  Sense strand starting at position 2073 of SEQ ID NO: 1884182
uggagaaaguagguuagua

SEQ ID NO: 2246573 - RNA, 19 nt, Artificial Sequence
  Description of Artificial Sequence: Synthetic oligonucleotide
  Antisense strand to SEQ ID NO: 2246572
uacuaaccuacuuucucca

SEQ ID NO: 2246574 - RNA, 19 nt, Artificial Sequence
  Description of Artificial Sequence: Synthetic oligonucleotide
  Sense strand starting at position 2075 of SEQ ID NO: 1884182
gagaaaguagguuaguauu

SEQ ID NO: 2246575 - RNA, 19 nt, Artificial Sequence
  Description of Artificial Sequence: Synthetic oligonucleotide
  Antisense strand to SEQ ID NO: 2246574
aauacuaaccuacuuucuc

SEQ ID NO: 2246576 - RNA, 19 nt, Artificial Sequence
  Description of Artificial Sequence: Synthetic oligonucleotide
  Sense strand starting at position 2214 of SEQ ID NO: 1884182
uuaguauaucucuaguucu

SEQ ID NO: 2246577 - RNA, 19 nt, Artificial Sequence
  Description of Artificial Sequence: Synthetic oligonucleotide
  Antisense strand to SEQ ID NO: 2246576
agaacuagagauauacuaa

SEQ ID NO: 2246578 - RNA, 19 nt, Artificial Sequence
  Description of Artificial Sequence: Synthetic oligonucleotide
  Sense strand starting at position 2293 of SEQ ID NO: 1884182
ugggacucuguauagguau

SEQ ID NO: 2246579 - RNA, 19 nt, Artificial Sequence
  Description of Artificial Sequence: Synthetic oligonucleotide
  Antisense strand to SEQ ID NO: 2246578
auaccuauacagaguccca

SEQ ID NO: 2246580 - RNA, 19 nt, Artificial Sequence
  Description of Artificial Sequence: Synthetic oligonucleotide
  Sense strand starting at position 2296 of SEQ ID NO: 1884182
gacucuguauagguaugua

SEQ ID NO: 2246581 - RNA, 19 nt, Artificial Sequence
  Description of Artificial Sequence: Synthetic oligonucleotide
  Antisense strand to SEQ ID NO: 2246580
uacauaccuauacagaguc

SEQ ID NO: 2246582 - RNA, 19 nt, Artificial Sequence
  Description of Artificial Sequence: Synthetic oligonucleotide
  Sense strand starting at position 2299 of SEQ ID NO: 1884182
ucuguauagguauguauag

SEQ ID NO: 2246583 - RNA, 19 nt, Artificial Sequence
  Description of Artificial Sequence: Synthetic oligonucleotide
  Antisense strand to SEQ ID NO: 2246582
cuauacauaccuauacaga

SEQ ID NO: 2246584 - RNA, 19 nt, Artificial Sequence
  Description of Artificial Sequence: Synthetic oligonucleotide
  Sense strand starting at position 2300 of SEQ ID NO: 1884182
cuguauagguauguauaga

SEQ ID NO: 2246585 - RNA, 19 nt, Artificial Sequence
  Description of Artificial Sequence: Synthetic oligonucleotide
  Antisense strand to SEQ ID NO: 2246584
ucuauacauaccuauacag

SEQ ID NO: 2246586 - RNA, 19 nt, Artificial Sequence
  Description of Artificial Sequence: Synthetic oligonucleotide
  Sense strand starting at position 2301 of SEQ ID NO: 1884182
uguauagguauguauagau

SEQ ID NO: 2246587 - RNA, 19 nt, Artificial Sequence
  Description of Artificial Sequence: Synthetic oligonucleotide
  Antisense strand to SEQ ID NO: 2246586
aucuauacauaccuauaca

SEQ ID NO: 2246588 - RNA, 19 nt, Artificial Sequence
  Description of Artificial Sequence: Synthetic oligonucleotide
  Sense strand starting at position 2382 of SEQ ID NO: 1884182
aguagucuccuagaagugu

SEQ ID NO: 2246589 - RNA, 19 nt, Artificial Sequence
  Description of Artificial Sequence: Synthetic oligonucleotide
  Antisense strand to SEQ ID NO: 2246588
acacuucuaggagacuacu

SEQ ID NO: 2246590 - RNA, 19 nt, Artificial Sequence
  Description of Artificial Sequence: Synthetic oligonucleotide
  Sense strand starting at position 3232 of SEQ ID NO: 1884182
ugaaguuacuugccuauga

SEQ ID NO: 2246591 - RNA, 19 nt, Artificial Sequence
  Description of Artificial Sequence: Synthetic oligonucleotide
  Antisense strand to SEQ ID NO: 2246590
ucauaggcaaguaacuuca

SEQ ID NO: 2246592 - RNA, 19 nt, Artificial Sequence
  Description of Artificial Sequence: Synthetic oligonucleotide
  Sense strand starting at position 3234 of SEQ ID NO: 1884182
aaguuacuugccuaugaga

SEQ ID NO: 2246593 - RNA, 19 nt, Artificial Sequence
  Description of Artificial Sequence: Synthetic oligonucleotide
  Antisense strand to SEQ ID NO: 2246592
ucucauaggcaaguaacuu

SEQ ID NO: 2246594 - RNA, 19 nt, Artificial Sequence
  Description of Artificial Sequence: Synthetic oligonucleotide
  Sense strand starting at position 3279 of SEQ ID NO: 1884182
ggaguugcucugucgcuca

SEQ ID NO: 2246595 - RNA, 19 nt, Artificial Sequence
  Description of Artificial Sequence: Synthetic oligonucleotide
  Antisense strand to SEQ ID NO: 2246594
ugagcgacagagcaacucc

SEQ ID NO: 2246596 - RNA, 19 nt, Artificial Sequence
  Description of Artificial Sequence: Synthetic oligonucleotide
  Sense strand starting at position 3660 of SEQ ID NO: 1884182
guccucauguaacuuacau

SEQ ID NO: 2246597 - RNA, 19 nt, Artificial Sequence
  Description of Artificial Sequence: Synthetic oligonucleotide
  Antisense strand to SEQ ID NO: 2246596
auguaaguuacaugaggac

SEQ ID NO: 2246598 - RNA, 19 nt, Artificial Sequence
  Description of Artificial Sequence: Synthetic oligonucleotide
  Sense strand starting at position 3711 of SEQ ID NO: 1884182
augugucgugguuauaaag

SEQ ID NO: 2246599 - RNA, 19 nt, Artificial Sequence
  Description of Artificial Sequence: Synthetic oligonucleotide
  Antisense strand to SEQ ID NO: 2246598
cuuuauaaccacgacacau

SEQ ID NO: 2246600 - RNA, 19 nt, Artificial Sequence
  Description of Artificial Sequence: Synthetic oligonucleotide
  Sense strand starting at position 3787 of SEQ ID NO: 1884182
gauggucagccucauuguu

SEQ ID NO: 2246601 - RNA, 19 nt, Artificial Sequence
  Description of Artificial Sequence: Synthetic oligonucleotide
  Antisense strand to SEQ ID NO: 2246600
aacaaugaggcugaccauc

SEQ ID NO: 2246602 - RNA, 19 nt, Artificial Sequence
  Description of Artificial Sequence: Synthetic oligonucleotide
  Sense strand starting at position 3792 of SEQ ID NO: 1884182
ucagccucauuguuaagau

SEQ ID NO: 2246603 - RNA, 19 nt, Artificial Sequence
  Description of Artificial Sequence: Synthetic oligonucleotide
  Antisense strand to SEQ ID NO: 2246602
aucuuaacaaugaggcuga

SEQ ID NO: 2246604 - RNA, 19 nt, Artificial Sequence
  Description of Artificial Sequence: Synthetic oligonucleotide
  Sense strand starting at position 3867 of SEQ ID NO: 1884182
gaaagagauuuguagacag

SEQ ID NO: 2246605 - RNA, 19 nt, Artificial Sequence
  Description of Artificial Sequence: Synthetic oligonucleotide
  Antisense strand to SEQ ID NO: 2246604
cugucuacaaaucucuuuc

SEQ ID NO: 2246606 - RNA, 19 nt, Artificial Sequence
  Description of Artificial Sequence: Synthetic oligonucleotide
  Sense strand starting at position 133 of SEQ ID NO: 1884183
cagaguuccagauggaguu

SEQ ID NO: 2246607 - RNA, 19 nt, Artificial Sequence
  Description of Artificial Sequence: Synthetic oligonucleotide
  Antisense strand to SEQ ID NO: 2246606
aacuccaucuggaacucug

SEQ ID NO: 2246608 - RNA, 19 nt, Artificial Sequence
  Description of Artificial Sequence: Synthetic oligonucleotide
  Sense strand starting at position 234 of SEQ ID NO: 1884183
uguugaucccaagaccacu

SEQ ID NO: 2246609 - RNA, 19 nt, Artificial Sequence
  Description of Artificial Sequence: Synthetic oligonucleotide
  Antisense strand to SEQ ID NO: 2246608
aguggucuugggaucaaca

SEQ ID NO: 2246610 - RNA, 19 nt, Artificial Sequence
  Description of Artificial Sequence: Synthetic oligonucleotide
  Sense strand starting at position 370 of SEQ ID NO: 1884183
auacauaaagcaugugaaa

SEQ ID NO: 2246611 - RNA, 19 nt, Artificial Sequence
  Description of Artificial Sequence: Synthetic oligonucleotide
  Antisense strand to SEQ ID NO: 2246610
uuucacaugcuuuauguau

SEQ ID NO: 2246612 - RNA, 19 nt, Artificial Sequence
  Description of Artificial Sequence: Synthetic oligonucleotide
  Sense strand starting at position 550 of SEQ ID NO: 1884183
cuggcuuuaggugaugaga

SEQ ID NO: 2246613 - RNA, 19 nt, Artificial Sequence
  Description of Artificial Sequence: Synthetic oligonucleotide
  Antisense strand to SEQ ID NO: 2246612
ucucaucaccuaaagccag

SEQ ID NO: 2246614 - RNA, 19 nt, Artificial Sequence
  Description of Artificial Sequence: Synthetic oligonucleotide
  Sense strand starting at position 591 of SEQ ID NO: 1884183
cugacauauuuguugcuau

SEQ ID NO: 2246615 - RNA, 19 nt, Artificial Sequence
  Description of Artificial Sequence: Synthetic oligonucleotide
  Antisense strand to SEQ ID NO: 2246614
auagcaacaaauaugucag

SEQ ID NO: 2246616 - RNA, 19 nt, Artificial Sequence
  Description of Artificial Sequence: Synthetic oligonucleotide
  Sense strand starting at position 617 of SEQ ID NO: 1884183
cccacauucuugucagaga

SEQ ID NO: 2246617 - RNA, 19 nt, Artificial Sequence
  Description of Artificial Sequence: Synthetic oligonucleotide
  Antisense strand to SEQ ID NO: 2246616
ucucugacaagaauguggg

SEQ ID NO: 2246618 - RNA, 19 nt, Artificial Sequence
  Description of Artificial Sequence: Synthetic oligonucleotide
  Sense strand starting at position 637 of SEQ ID NO: 1884183
gcugucucuguguuugcaa

SEQ ID NO: 2246619 - RNA, 19 nt, Artificial Sequence
  Description of Artificial Sequence: Synthetic oligonucleotide
  Antisense strand to SEQ ID NO: 2246618
uugcaaacacagagacagc

SEQ ID NO: 2246620 - RNA, 19 nt, Artificial Sequence
  Description of Artificial Sequence: Synthetic oligonucleotide
  Sense strand starting at position 652 of SEQ ID NO: 1884183
gcaaccugacuauaagcau

SEQ ID NO: 2246621 - RNA, 19 nt, Artificial Sequence
  Description of Artificial Sequence: Synthetic oligonucleotide
  Antisense strand to SEQ ID NO: 2246620
augcuuauagucagguugc

SEQ ID NO: 2246622 - RNA, 19 nt, Artificial Sequence
  Description of Artificial Sequence: Synthetic oligonucleotide
  Sense strand starting at position 714 of SEQ ID NO: 1884183
guaggugugaauuauugua

SEQ ID NO: 2246623 - RNA, 19 nt, Artificial Sequence
  Description of Artificial Sequence: Synthetic oligonucleotide
  Antisense strand to SEQ ID NO: 2246622
uacaauaauucacaccuac

SEQ ID NO: 2246624 - RNA, 19 nt, Artificial Sequence
  Description of Artificial Sequence: Synthetic oligonucleotide
  Sense strand starting at position 750 of SEQ ID NO: 1884183
uuacauacaugucccgaua

SEQ ID NO: 2246625 - RNA, 19 nt, Artificial Sequence
  Description of Artificial Sequence: Synthetic oligonucleotide
  Antisense strand to SEQ ID NO: 2246624
uaucgggacauguauguaa

SEQ ID NO: 2246626 - RNA, 19 nt, Artificial Sequence
  Description of Artificial Sequence: Synthetic oligonucleotide
  Sense strand starting at position 753 of SEQ ID NO: 1884183
cauacaugucccgauaaag

SEQ ID NO: 2246627 - RNA, 19 nt, Artificial Sequence
  Description of Artificial Sequence: Synthetic oligonucleotide
  Antisense strand to SEQ ID NO: 2246626
cuuuaucgggacauguaug

SEQ ID NO: 2246628 - RNA, 19 nt, Artificial Sequence
  Description of Artificial Sequence: Synthetic oligonucleotide
  Sense strand starting at position 1184 of SEQ ID NO: 1884183
aggcuaugguuguuaagga

SEQ ID NO: 2246629 - RNA, 19 nt, Artificial Sequence
  Description of Artificial Sequence: Synthetic oligonucleotide
  Antisense strand to SEQ ID NO: 2246628
uccuuaacaaccauagccu

SEQ ID NO: 2246630 - RNA, 19 nt, Artificial Sequence
  Description of Artificial Sequence: Synthetic oligonucleotide
  Sense strand starting at position 1192 of SEQ ID NO: 1884183
guuguuaaggaagauguca

SEQ ID NO: 2246631 - RNA, 19 nt, Artificial Sequence
  Description of Artificial Sequence: Synthetic oligonucleotide
  Antisense strand to SEQ ID NO: 2246630
ugacaucuuccuuaacaac

SEQ ID NO: 2246632 - RNA, 19 nt, Artificial Sequence
  Description of Artificial Sequence: Synthetic oligonucleotide
  Sense strand starting at position 1194 of SEQ ID NO: 1884183
uguuaaggaagaugucauu

SEQ ID NO: 2246633 - RNA, 19 nt, Artificial Sequence
  Description of Artificial Sequence: Synthetic oligonucleotide
  Antisense strand to SEQ ID NO: 2246632
aaugacaucuuccuuaaca

SEQ ID NO: 2246634 - RNA, 19 nt, Artificial Sequence
  Description of Artificial Sequence: Synthetic oligonucleotide
  Sense strand starting at position 1274 of SEQ ID NO: 1884183
auauauacagcauaugagu

SEQ ID NO: 2246635 - RNA, 19 nt, Artificial Sequence
  Description of Artificial Sequence: Synthetic oligonucleotide
  Antisense strand to SEQ ID NO: 2246634
acucauaugcuguauauau

SEQ ID NO: 2246636 - RNA, 19 nt, Artificial Sequence
  Description of Artificial Sequence: Synthetic oligonucleotide
  Sense strand starting at position 1282 of SEQ ID NO: 1884183
agcauaugaguauauucuu

SEQ ID NO: 2246637 - RNA, 19 nt, Artificial Sequence
  Description of Artificial Sequence: Synthetic oligonucleotide
  Antisense strand to SEQ ID NO: 2246636
aagaauauacucauaugcu

SEQ ID NO: 2246638 - RNA, 19 nt, Artificial Sequence
  Description of Artificial Sequence: Synthetic oligonucleotide
  Sense strand starting at position 1288 of SEQ ID NO: 1884183
ugaguauauucuucuucua

SEQ ID NO: 2246639 - RNA, 19 nt, Artificial Sequence
  Description of Artificial Sequence: Synthetic oligonucleotide
  Antisense strand to SEQ ID NO: 2246638
uagaagaagaauauacuca

SEQ ID NO: 2246640 - RNA, 19 nt, Artificial Sequence
  Description of Artificial Sequence: Synthetic oligonucleotide
  Sense strand starting at position 1340 of SEQ ID NO: 1884183
cccguauuugucuauuauu

SEQ ID NO: 2246641 - RNA, 19 nt, Artificial Sequence
  Description of Artificial Sequence: Synthetic oligonucleotide
  Antisense strand to SEQ ID NO: 2246640
aauaauagacaaauacggg

SEQ ID NO: 2246642 - RNA, 19 nt, Artificial Sequence
  Description of Artificial Sequence: Synthetic oligonucleotide
  Sense strand starting at position 1483 of SEQ ID NO: 1884183
aggccuuuggcucacauga

SEQ ID NO: 2246643 - RNA, 19 nt, Artificial Sequence
  Description of Artificial Sequence: Synthetic oligonucleotide
  Antisense strand to SEQ ID NO: 2246642
ucaugugagccaaaggccu

SEQ ID NO: 2246644 - RNA, 19 nt, Artificial Sequence
  Description of Artificial Sequence: Synthetic oligonucleotide
  Sense strand starting at position 1597 of SEQ ID NO: 1884183
uggcauaaagcucaaguuu

SEQ ID NO: 2246645 - RNA, 19 nt, Artificial Sequence
  Description of Artificial Sequence: Synthetic oligonucleotide
  Antisense strand to SEQ ID NO: 2246644
aaacuugagcuuuaugcca

SEQ ID NO: 2246646 - RNA, 19 nt, Artificial Sequence
  Description of Artificial Sequence: Synthetic oligonucleotide
  Sense strand starting at position 1656 of SEQ ID NO: 1884183
ccagcuuccagaggaagau

SEQ ID NO: 2246647 - RNA, 19 nt, Artificial Sequence
  Description of Artificial Sequence: Synthetic oligonucleotide
  Antisense strand to SEQ ID NO: 2246646
aucuuccucuggaagcugg

SEQ ID NO: 2246648 - RNA, 19 nt, Artificial Sequence
  Description of Artificial Sequence: Synthetic oligonucleotide
  Sense strand starting at position 1770 of SEQ ID NO: 1884183
aaauguuccugacugagga

SEQ ID NO: 2246649 - RNA, 19 nt, Artificial Sequence
  Description of Artificial Sequence: Synthetic oligonucleotide
  Antisense strand to SEQ ID NO: 2246648
uccucagucaggaacauuu

SEQ ID NO: 2246650 - RNA, 19 nt, Artificial Sequence
  Description of Artificial Sequence: Synthetic oligonucleotide
  Sense strand starting at position 1954 of SEQ ID NO: 1884183
cuacaaauugcaggauauu

SEQ ID NO: 2246651 - RNA, 19 nt, Artificial Sequence
  Description of Artificial Sequence: Synthetic oligonucleotide
  Antisense strand to SEQ ID NO: 2246650
aauauccugcaauuuguag

SEQ ID NO: 2246652 - RNA, 19 nt, Artificial Sequence
  Description of Artificial Sequence: Synthetic oligonucleotide
  Sense strand starting at position 1989 of SEQ ID NO: 1884183
uggauaauuucguuucccu

SEQ ID NO: 2246653 - RNA, 19 nt, Artificial Sequence
  Description of Artificial Sequence: Synthetic oligonucleotide
  Antisense strand to SEQ ID NO: 2246652
agggaaacgaaauuaucca

SEQ ID NO: 2246654 - RNA, 19 nt, Artificial Sequence
  Description of Artificial Sequence: Synthetic oligonucleotide
  Sense strand starting at position 2018 of SEQ ID NO: 1884183
uuuccaucugguuaagaug

SEQ ID NO: 2246655 - RNA, 19 nt, Artificial Sequence
  Description of Artificial Sequence: Synthetic oligonucleotide
  Antisense strand to SEQ ID NO: 2246654
caucuuaaccagauggaaa

SEQ ID NO: 2246656 - RNA, 19 nt, Artificial Sequence
  Description of Artificial Sequence: Synthetic oligonucleotide
  Sense strand starting at position 2176 of SEQ ID NO: 1884183
uuucguuaaacuuaggaga

SEQ ID NO: 2246657 - RNA, 19 nt, Artificial Sequence
  Description of Artificial Sequence: Synthetic oligonucleotide
  Antisense strand to SEQ ID NO: 2246656
ucuccuaaguuuaacgaaa

SEQ ID NO: 2246658 - RNA, 19 nt, Artificial Sequence
  Description of Artificial Sequence: Synthetic oligonucleotide
  Sense strand starting at position 2395 of SEQ ID NO: 1884183
accugacgugaugaaguuu

SEQ ID NO: 2246659 - RNA, 19 nt, Artificial Sequence
  Description of Artificial Sequence: Synthetic oligonucleotide
  Antisense strand to SEQ ID NO: 2246658
aaacuucaucacgucaggu

SEQ ID NO: 2246660 - RNA, 19 nt, Artificial Sequence
  Description of Artificial Sequence: Synthetic oligonucleotide
  Sense strand starting at position 2401 of SEQ ID NO: 1884183
cgugaugaaguuuagagaa

SEQ ID NO: 2246661 - RNA, 19 nt, Artificial Sequence
  Description of Artificial Sequence: Synthetic oligonucleotide
  Antisense strand to SEQ ID NO: 2246660
uucucuaaacuucaucacg

SEQ ID NO: 2246662 - RNA, 19 nt, Artificial Sequence
  Description of Artificial Sequence: Synthetic oligonucleotide
  Sense strand starting at position 2860 of SEQ ID NO: 1884183
uugguuguaaauugagaga

SEQ ID NO: 2246663 - RNA, 19 nt, Artificial Sequence
  Description of Artificial Sequence: Synthetic oligonucleotide
  Antisense strand to SEQ ID NO: 2246662
ucucucaauuuacaaccaa

SEQ ID NO: 2246664 - RNA, 19 nt, Artificial Sequence
  Description of Artificial Sequence: Synthetic oligonucleotide
  Sense strand starting at position 2922 of SEQ ID NO: 1884183
gaggacaucuuccuaacga

SEQ ID NO: 2246665 - RNA, 19 nt, Artificial Sequence
  Description of Artificial Sequence: Synthetic oligonucleotide
  Antisense strand to SEQ ID NO: 2246664
ucguuaggaagauguccuc

SEQ ID NO: 2246666 - RNA, 19 nt, Artificial Sequence
  Description of Artificial Sequence: Synthetic oligonucleotide
  Sense strand starting at position 3242 of SEQ ID NO: 1884183
uggcaaguuccuuaaucuc

SEQ ID NO: 2246667 - RNA, 19 nt, Artificial Sequence
  Description of Artificial Sequence: Synthetic oligonucleotide
  Antisense strand to SEQ ID NO: 2246666
gagauuaaggaacuugcca

SEQ ID NO: 2246668 - RNA, 19 nt, Artificial Sequence
  Description of Artificial Sequence: Synthetic oligonucleotide
  Sense strand starting at position 3270 of SEQ ID NO: 1884183
aggaguauuugcuacagaa

SEQ ID NO: 2246669 - RNA, 19 nt, Artificial Sequence
  Description of Artificial Sequence: Synthetic oligonucleotide
  Antisense strand to SEQ ID NO: 2246668
uucuguagcaaauacuccu

SEQ ID NO: 2246670 - RNA, 19 nt, Artificial Sequence
  Description of Artificial Sequence: Synthetic oligonucleotide
  Sense strand starting at position 3354 of SEQ ID NO: 1884183
aaaugauucugcucggaga

SEQ ID NO: 2246671 - RNA, 19 nt, Artificial Sequence
  Description of Artificial Sequence: Synthetic oligonucleotide
  Antisense strand to SEQ ID NO: 2246670
ucuccgagcagaaucauuu

SEQ ID NO: 2246672 - RNA, 19 nt, Artificial Sequence
  Description of Artificial Sequence: Synthetic oligonucleotide
  Sense strand starting at position 3355 of SEQ ID NO: 1884183
aaugauucugcucggagag

SEQ ID NO: 2246673 - RNA, 19 nt, Artificial Sequence
  Description of Artificial Sequence: Synthetic oligonucleotide
  Antisense strand to SEQ ID NO: 2246672
cucuccgagcagaaucauu

SEQ ID NO: 2246674 - RNA, 19 nt, Artificial Sequence
  Description of Artificial Sequence: Synthetic oligonucleotide
  Sense strand starting at position 3677 of SEQ ID NO: 1884183
uagggcuguggugacaauu

SEQ ID NO: 2246675 - RNA, 19 nt, Artificial Sequence
  Description of Artificial Sequence: Synthetic oligonucleotide
  Antisense strand to SEQ ID NO: 2246674
aauugucaccacagcccua

SEQ ID NO: 2246676 - RNA, 19 nt, Artificial Sequence
  Description of Artificial Sequence: Synthetic oligonucleotide
  Sense strand starting at position 3686 of SEQ ID NO: 1884183
ggugacaauuaaguaggau

SEQ ID NO: 2246677 - RNA, 19 nt, Artificial Sequence
  Description of Artificial Sequence: Synthetic oligonucleotide
  Antisense strand to SEQ ID NO: 2246676
auccuacuuaauugucacc

SEQ ID NO: 2246678 - RNA, 19 nt, Artificial Sequence
  Description of Artificial Sequence: Synthetic oligonucleotide
  Sense strand starting at position 3689 of SEQ ID NO: 1884183
gacaauuaaguaggauguu

SEQ ID NO: 2246679 - RNA, 19 nt, Artificial Sequence
  Description of Artificial Sequence: Synthetic oligonucleotide
  Antisense strand to SEQ ID NO: 2246678
aacauccuacuuaauuguc

SEQ ID NO: 2246680 - RNA, 19 nt, Artificial Sequence
  Description of Artificial Sequence: Synthetic oligonucleotide
  Sense strand starting at position 3757 of SEQ ID NO: 1884183
auuaguugucaucacugua

SEQ ID NO: 2246681 - RNA, 19 nt, Artificial Sequence
  Description of Artificial Sequence: Synthetic oligonucleotide
  Antisense strand to SEQ ID NO: 2246680
uacagugaugacaacuaau

SEQ ID NO: 2246682 - RNA, 19 nt, Artificial Sequence
  Description of Artificial Sequence: Synthetic oligonucleotide
  Sense strand starting at position 3762 of SEQ ID NO: 1884183
uugucaucacuguaauuau

SEQ ID NO: 2246683 - RNA, 19 nt, Artificial Sequence
  Description of Artificial Sequence: Synthetic oligonucleotide
  Antisense strand to SEQ ID NO: 2246682
auaauuacagugaugacaa

SEQ ID NO: 2246684 - RNA, 19 nt, Artificial Sequence
  Description of Artificial Sequence: Synthetic oligonucleotide
  Sense strand starting at position 3881 of SEQ ID NO: 1884183
aacagcuuaugguuagaga

SEQ ID NO: 2246685 - RNA, 19 nt, Artificial Sequence
  Description of Artificial Sequence: Synthetic oligonucleotide
  Antisense strand to SEQ ID NO: 2246684
ucucuaaccauaagcuguu

SEQ ID NO: 2246686 - RNA, 19 nt, Artificial Sequence
  Description of Artificial Sequence: Synthetic oligonucleotide
  Sense strand starting at position 26 of SEQ ID NO: 1884184
aguucucuuggauauguaa

SEQ ID NO: 2246687 - RNA, 19 nt, Artificial Sequence
  Description of Artificial Sequence: Synthetic oligonucleotide
  Antisense strand to SEQ ID NO: 2246686
uuacauauccaagagaacu

SEQ ID NO: 2246688 - RNA, 19 nt, Artificial Sequence
  Description of Artificial Sequence: Synthetic oligonucleotide
  Sense strand starting at position 29 of SEQ ID NO: 1884184
ucucuuggauauguaauga

SEQ ID NO: 2246689 - RNA, 19 nt, Artificial Sequence
  Description of Artificial Sequence: Synthetic oligonucleotide
  Antisense strand to SEQ ID NO: 2246688
ucauuacauauccaagaga

SEQ ID NO: 2246690 - RNA, 19 nt, Artificial Sequence
  Description of Artificial Sequence: Synthetic oligonucleotide
  Sense strand starting at position 33 of SEQ ID NO: 1884184
uuggauauguaaugacauc

SEQ ID NO: 2246691 - RNA, 19 nt, Artificial Sequence
  Description of Artificial Sequence: Synthetic oligonucleotide
  Antisense strand to SEQ ID NO: 2246690
gaugucauuacauauccaa

SEQ ID NO: 2246692 - RNA, 19 nt, Artificial Sequence
  Description of Artificial Sequence: Synthetic oligonucleotide
  Sense strand starting at position 86 of SEQ ID NO: 1884184
ccaacuaugucaucaggag

SEQ ID NO: 2246693 - RNA, 19 nt, Artificial Sequence
  Description of Artificial Sequence: Synthetic oligonucleotide
  Antisense strand to SEQ ID NO: 2246692
cuccugaugacauaguugg

SEQ ID NO: 2246694 - RNA, 19 nt, Artificial Sequence
  Description of Artificial Sequence: Synthetic oligonucleotide
  Sense strand starting at position 87 of SEQ ID NO: 1884184
caacuaugucaucaggagu

SEQ ID NO: 2246695 - RNA, 19 nt, Artificial Sequence
  Description of Artificial Sequence: Synthetic oligonucleotide
  Antisense strand to SEQ ID NO: 2246694
acuccugaugacauaguug

SEQ ID NO: 2246696 - RNA, 19 nt, Artificial Sequence
  Description of Artificial Sequence: Synthetic oligonucleotide
  Sense strand starting at position 93 of SEQ ID NO: 1884184
ugucaucaggagugaaauc

SEQ ID NO: 2246697 - RNA, 19 nt, Artificial Sequence
  Description of Artificial Sequence: Synthetic oligonucleotide
  Antisense strand to SEQ ID NO: 2246696
gauuucacuccugaugaca

SEQ ID NO: 2246698 - RNA, 19 nt, Artificial Sequence
  Description of Artificial Sequence: Synthetic oligonucleotide
  Sense strand starting at position 219 of SEQ ID NO: 1884184
gcaguuaaguaguuucuuu

SEQ ID NO: 2246699 - RNA, 19 nt, Artificial Sequence
  Description of Artificial Sequence: Synthetic oligonucleotide
  Antisense strand to SEQ ID NO: 2246698
aaagaaacuacuuaacugc

SEQ ID NO: 2246700 - RNA, 19 nt, Artificial Sequence
  Description of Artificial Sequence: Synthetic oligonucleotide
  Sense strand starting at position 624 of SEQ ID NO: 1884184
aguaauggaugccaagaaa

SEQ ID NO: 2246701 - RNA, 19 nt, Artificial Sequence
  Description of Artificial Sequence: Synthetic oligonucleotide
  Antisense strand to SEQ ID NO: 2246700
uuucuuggcauccauuacu

SEQ ID NO: 2246702 - RNA, 19 nt, Artificial Sequence
  Description of Artificial Sequence: Synthetic oligonucleotide
  Sense strand starting at position 3262 of SEQ ID NO: 1884184
ugaauuauuuaguggguuu

SEQ ID NO: 2246703 - RNA, 19 nt, Artificial Sequence
  Description of Artificial Sequence: Synthetic oligonucleotide
  Antisense strand to SEQ ID NO: 2246702
aaacccacuaaauaauuca

SEQ ID NO: 2246704 - RNA, 19 nt, Artificial Sequence
  Description of Artificial Sequence: Synthetic oligonucleotide
  Sense strand starting at position 3761 of SEQ ID NO: 1884184
ugggauuacuuauaacuau

SEQ ID NO: 2246705 - RNA, 19 nt, Artificial Sequence
  Description of Artificial Sequence: Synthetic oligonucleotide
  Antisense strand to SEQ ID NO: 2246704
auaguuauaaguaauccca

SEQ ID NO: 2246706 - RNA, 19 nt, Artificial Sequence
  Description of Artificial Sequence: Synthetic oligonucleotide
  Sense strand starting at position 3864 of SEQ ID NO: 1884184
uuaugucucuaacaggaau

SEQ ID NO: 2246707 - RNA, 19 nt, Artificial Sequence
  Description of Artificial Sequence: Synthetic oligonucleotide
  Antisense strand to SEQ ID NO: 2246706
auuccuguuagagacauaa

SEQ ID NO: 2246708 - RNA, 19 nt, Artificial Sequence
  Description of Artificial Sequence: Synthetic oligonucleotide
  Sense strand starting at position 9 of SEQ ID NO: 1884185
gcuguaaaugcccaggagu

SEQ ID NO: 2246709 - RNA, 19 nt, Artificial Sequence
  Description of Artificial Sequence: Synthetic oligonucleotide
  Antisense strand to SEQ ID NO: 2246708
acuccugggcauuuacagc

SEQ ID NO: 2246710 - RNA, 19 nt, Artificial Sequence
  Description of Artificial Sequence: Synthetic oligonucleotide
  Sense strand starting at position 11 of SEQ ID NO: 1884185
uguaaaugcccaggaguga

SEQ ID NO: 2246711 - RNA, 19 nt, Artificial Sequence
  Description of Artificial Sequence: Synthetic oligonucleotide
  Antisense strand to SEQ ID NO: 2246710
ucacuccugggcauuuaca

SEQ ID NO: 2246712 - RNA, 19 nt, Artificial Sequence
  Description of Artificial Sequence: Synthetic oligonucleotide
  Sense strand starting at position 141 of SEQ ID NO: 1884185
ccaguuauguaguuucuuu

SEQ ID NO: 2246713 - RNA, 19 nt, Artificial Sequence
  Description of Artificial Sequence: Synthetic oligonucleotide
  Antisense strand to SEQ ID NO: 2246712
aaagaaacuacauaacugg

SEQ ID NO: 2246714 - RNA, 19 nt, Artificial Sequence
  Description of Artificial Sequence: Synthetic oligonucleotide
  Sense strand starting at position 546 of SEQ ID NO: 1884185
agugauggaugccaagaaa

SEQ ID NO: 2246715 - RNA, 19 nt, Artificial Sequence
  Description of Artificial Sequence: Synthetic oligonucleotide
  Antisense strand to SEQ ID NO: 2246714
uuucuuggcauccaucacu

SEQ ID NO: 2246716 - RNA, 19 nt, Artificial Sequence
  Description of Artificial Sequence: Synthetic oligonucleotide
  Sense strand starting at position 681 of SEQ ID NO: 1884185
gagugaaacucaccaguuc

SEQ ID NO: 2246717 - RNA, 19 nt, Artificial Sequence
  Description of Artificial Sequence: Synthetic oligonucleotide
  Antisense strand to SEQ ID NO: 2246716
gaacuggugaguuucacuc

SEQ ID NO: 2246718 - RNA, 19 nt, Artificial Sequence
  Description of Artificial Sequence: Synthetic oligonucleotide
  Sense strand starting at position 3681 of SEQ ID NO: 1884185
ugggauuacuuauaacugu

SEQ ID NO: 2246719 - RNA, 19 nt, Artificial Sequence
  Description of Artificial Sequence: Synthetic oligonucleotide
  Antisense strand to SEQ ID NO: 2246718
acaguuauaaguaauccca

SEQ ID NO: 2246720 - RNA, 19 nt, Artificial Sequence
  Description of Artificial Sequence: Synthetic oligonucleotide
  Sense strand starting at position 3729 of SEQ ID NO: 1884185
aauauacuuugcugaaggu

SEQ ID NO: 2246721 - RNA, 19 nt, Artificial Sequence
  Description of Artificial Sequence: Synthetic oligonucleotide
  Antisense strand to SEQ ID NO: 2246720
accuucagcaaaguauauu

SEQ ID NO: 2246722 - RNA, 19 nt, Artificial Sequence
  Description of Artificial Sequence: Synthetic oligonucleotide
  Sense strand starting at position 3730 of SEQ ID NO: 1884185
auauacuuugcugaaggua

SEQ ID NO: 2246723 - RNA, 19 nt, Artificial Sequence
  Description of Artificial Sequence: Synthetic oligonucleotide
  Antisense strand to SEQ ID NO: 2246722
uaccuucagcaaaguauau

SEQ ID NO: 2246724 - RNA, 19 nt, Artificial Sequence
  Description of Artificial Sequence: Synthetic oligonucleotide
  Sense strand starting at position 2076 of SEQ ID NO: 1884186
uugugcugguguuaaauau

SEQ ID NO: 2246725 - RNA, 19 nt, Artificial Sequence
  Description of Artificial Sequence: Synthetic oligonucleotide
  Antisense strand to SEQ ID NO: 2246724
auauuuaacaccagcacaa

SEQ ID NO: 2246726 - RNA, 19 nt, Artificial Sequence
  Description of Artificial Sequence: Synthetic oligonucleotide
  Sense strand starting at position 2326 of SEQ ID NO: 1884186
cguucuugcugucuggaau

SEQ ID NO: 2246727 - RNA, 19 nt, Artificial Sequence
  Description of Artificial Sequence: Synthetic oligonucleotide
  Antisense strand to SEQ ID NO: 2246726
auuccagacagcaagaacg

SEQ ID NO: 2246728 - RNA, 19 nt, Artificial Sequence
  Description of Artificial Sequence: Synthetic oligonucleotide
  Sense strand starting at position 2327 of SEQ ID NO: 1884186
guucuugcugucuggaauc

SEQ ID NO: 2246729 - RNA, 19 nt, Artificial Sequence
  Description of Artificial Sequence: Synthetic oligonucleotide
  Antisense strand to SEQ ID NO: 2246728
gauuccagacagcaagaac

SEQ ID NO: 2246730 - RNA, 19 nt, Artificial Sequence
  Description of Artificial Sequence: Synthetic oligonucleotide
  Sense strand starting at position 2337 of SEQ ID NO: 1884186
ucuggaauccagugucauc

SEQ ID NO: 2246731 - RNA, 19 nt, Artificial Sequence
  Description of Artificial Sequence: Synthetic oligonucleotide
  Antisense strand to SEQ ID NO: 2246730
gaugacacuggauuccaga

SEQ ID NO: 2246732 - RNA, 19 nt, Artificial Sequence
  Description of Artificial Sequence: Synthetic oligonucleotide
  Sense strand starting at position 3500 of SEQ ID NO: 1884186
aaggguaauuugugaagac

SEQ ID NO: 2246733 - RNA, 19 nt, Artificial Sequence
  Description of Artificial Sequence: Synthetic oligonucleotide
  Antisense strand to SEQ ID NO: 2246732
gucuucacaaauuacccuu

SEQ ID NO: 2246734 - RNA, 19 nt, Artificial Sequence
  Description of Artificial Sequence: Synthetic oligonucleotide
  Sense strand starting at position 105 of SEQ ID NO: 1884187
ggagccaccugaucuaaau

SEQ ID NO: 2246735 - RNA, 19 nt, Artificial Sequence
  Description of Artificial Sequence: Synthetic oligonucleotide
  Antisense strand to SEQ ID NO: 2246734
auuuagaucagguggcucc

SEQ ID NO: 2246736 - RNA, 19 nt, Artificial Sequence
  Description of Artificial Sequence: Synthetic oligonucleotide
  Sense strand starting at position 154 of SEQ ID NO: 1884187
uguagucuuggauaaguca

SEQ ID NO: 2246737 - RNA, 19 nt, Artificial Sequence
  Description of Artificial Sequence: Synthetic oligonucleotide
  Antisense strand to SEQ ID NO: 2246736
ugacuuauccaagacuaca

SEQ ID NO: 2246738 - RNA, 19 nt, Artificial Sequence
  Description of Artificial Sequence: Synthetic oligonucleotide
  Sense strand starting at position 161 of SEQ ID NO: 1884187
uuggauaagucacucaaac

SEQ ID NO: 2246739 - RNA, 19 nt, Artificial Sequence
  Description of Artificial Sequence: Synthetic oligonucleotide
  Antisense strand to SEQ ID NO: 2246738
guuugagugacuuauccaa

SEQ ID NO: 2246740 - RNA, 19 nt, Artificial Sequence
  Description of Artificial Sequence: Synthetic oligonucleotide
  Sense strand starting at position 277 of SEQ ID NO: 1884187
aagggaauaccguaauguc

SEQ ID NO: 2246741 - RNA, 19 nt, Artificial Sequence
  Description of Artificial Sequence: Synthetic oligonucleotide
  Antisense strand to SEQ ID NO: 2246740
gacauuacgguauucccuu

SEQ ID NO: 2246742 - RNA, 19 nt, Artificial Sequence
  Description of Artificial Sequence: Synthetic oligonucleotide
  Sense strand starting at position 397 of SEQ ID NO: 1884187
auaggaaaguucuugugga

SEQ ID NO: 2246743 - RNA, 19 nt, Artificial Sequence
  Description of Artificial Sequence: Synthetic oligonucleotide
  Antisense strand to SEQ ID NO: 2246742
uccacaagaacuuuccuau

SEQ ID NO: 2246744 - RNA, 19 nt, Artificial Sequence
  Description of Artificial Sequence: Synthetic oligonucleotide
  Sense strand starting at position 405 of SEQ ID NO: 1884187
guucuuguggaauggaauu

SEQ ID NO: 2246745 - RNA, 19 nt, Artificial Sequence
  Description of Artificial Sequence: Synthetic oligonucleotide
  Antisense strand to SEQ ID NO: 2246744
aauuccauuccacaagaac

SEQ ID NO: 2246746 - RNA, 19 nt, Artificial Sequence
  Description of Artificial Sequence: Synthetic oligonucleotide
  Sense strand starting at position 417 of SEQ ID NO: 1884187
uggaauugcaagcaugagu

SEQ ID NO: 2246747 - RNA, 19 nt, Artificial Sequence
  Description of Artificial Sequence: Synthetic oligonucleotide
  Antisense strand to SEQ ID NO: 2246746
acucaugcuugcaauucca

SEQ ID NO: 2246748 - RNA, 19 nt, Artificial Sequence
  Description of Artificial Sequence: Synthetic oligonucleotide
  Sense strand starting at position 424 of SEQ ID NO: 1884187
gcaagcaugaguuagugau

SEQ ID NO: 2246749 - RNA, 19 nt, Artificial Sequence
  Description of Artificial Sequence: Synthetic oligonucleotide
  Antisense strand to SEQ ID NO: 2246748
aucacuaacucaugcuugc

SEQ ID NO: 2246750 - RNA, 19 nt, Artificial Sequence
  Description of Artificial Sequence: Synthetic oligonucleotide
  Sense strand starting at position 428 of SEQ ID NO: 1884187
gcaugaguuagugauaguc

SEQ ID NO: 2246751 - RNA, 19 nt, Artificial Sequence
  Description of Artificial Sequence: Synthetic oligonucleotide
  Antisense strand to SEQ ID NO: 2246750
gacuaucacuaacucaugc

SEQ ID NO: 2246752 - RNA, 19 nt, Artificial Sequence
  Description of Artificial Sequence: Synthetic oligonucleotide
  Sense strand starting at position 434 of SEQ ID NO: 1884187
guuagugauagucaaagua

SEQ ID NO: 2246753 - RNA, 19 nt, Artificial Sequence
  Description of Artificial Sequence: Synthetic oligonucleotide
  Antisense strand to SEQ ID NO: 2246752
uacuuugacuaucacuaac

SEQ ID NO: 2246754 - RNA, 19 nt, Artificial Sequence
  Description of Artificial Sequence: Synthetic oligonucleotide
  Sense strand starting at position 626 of SEQ ID NO: 1884187
aggugugcuggguauaaga

SEQ ID NO: 2246755 - RNA, 19 nt, Artificial Sequence
  Description of Artificial Sequence: Synthetic oligonucleotide
  Antisense strand to SEQ ID NO: 2246754
ucuuauacccagcacaccu

SEQ ID NO: 2246756 - RNA, 19 nt, Artificial Sequence
  Description of Artificial Sequence: Synthetic oligonucleotide
  Sense strand starting at position 672 of SEQ ID NO: 1884187
ggagcacuauuauuccuau

SEQ ID NO: 2246757 - RNA, 19 nt, Artificial Sequence
  Description of Artificial Sequence: Synthetic oligonucleotide
  Antisense strand to SEQ ID NO: 2246756
auaggaauaauagugcucc

SEQ ID NO: 2246758 - RNA, 19 nt, Artificial Sequence
  Description of Artificial Sequence: Synthetic oligonucleotide
  Sense strand starting at position 686 of SEQ ID NO: 1884187
ccuauauuauaccugugga

SEQ ID NO: 2246759 - RNA, 19 nt, Artificial Sequence
  Description of Artificial Sequence: Synthetic oligonucleotide
  Antisense strand to SEQ ID NO: 2246758
uccacagguauaauauagg

SEQ ID NO: 2246760 - RNA, 19 nt, Artificial Sequence
  Description of Artificial Sequence: Synthetic oligonucleotide
  Sense strand starting at position 689 of SEQ ID NO: 1884187
auauuauaccuguggaaac

SEQ ID NO: 2246761 - RNA, 19 nt, Artificial Sequence
  Description of Artificial Sequence: Synthetic oligonucleotide
  Antisense strand to SEQ ID NO: 2246760
guuuccacagguauaauau

SEQ ID NO: 2246762 - RNA, 19 nt, Artificial Sequence
  Description of Artificial Sequence: Synthetic oligonucleotide
  Sense strand starting at position 743 of SEQ ID NO: 1884187
agugguagagaucagguua

SEQ ID NO: 2246763 - RNA, 19 nt, Artificial Sequence
  Description of Artificial Sequence: Synthetic oligonucleotide
  Antisense strand to SEQ ID NO: 2246762
uaaccugaucucuaccacu

SEQ ID NO: 2246764 - RNA, 19 nt, Artificial Sequence
  Description of Artificial Sequence: Synthetic oligonucleotide
  Sense strand starting at position 1365 of SEQ ID NO: 1884187
agcaaauauuaggugagaa

SEQ ID NO: 2246765 - RNA, 19 nt, Artificial Sequence
  Description of Artificial Sequence: Synthetic oligonucleotide
  Antisense strand to SEQ ID NO: 2246764
uucucaccuaauauuugcu

SEQ ID NO: 2246766 - RNA, 19 nt, Artificial Sequence
  Description of Artificial Sequence: Synthetic oligonucleotide
  Sense strand starting at position 1366 of SEQ ID NO: 1884187
gcaaauauuaggugagaag

SEQ ID NO: 2246767 - RNA, 19 nt, Artificial Sequence
  Description of Artificial Sequence: Synthetic oligonucleotide
  Antisense strand to SEQ ID NO: 2246766
cuucucaccuaauauuugc

SEQ ID NO: 2246768 - RNA, 19 nt, Artificial Sequence
  Description of Artificial Sequence: Synthetic oligonucleotide
  Sense strand starting at position 1546 of SEQ ID NO: 1884187
caggaaccuucuucguaca

SEQ ID NO: 2246769 - RNA, 19 nt, Artificial Sequence
  Description of Artificial Sequence: Synthetic oligonucleotide
  Antisense strand to SEQ ID NO: 2246768
uguacgaagaagguuccug

SEQ ID NO: 2246770 - RNA, 19 nt, Artificial Sequence
  Description of Artificial Sequence: Synthetic oligonucleotide
  Sense strand starting at position 1719 of SEQ ID NO: 1884187
caguccaucccucgggaaa

SEQ ID NO: 2246771 - RNA, 19 nt, Artificial Sequence
  Description of Artificial Sequence: Synthetic oligonucleotide
  Antisense strand to SEQ ID NO: 2246770
uuucccgagggauggacug

SEQ ID NO: 2246772 - RNA, 19 nt, Artificial Sequence
  Description of Artificial Sequence: Synthetic oligonucleotide
  Sense strand starting at position 2184 of SEQ ID NO: 1884187
gcucucuagaccuggagga

SEQ ID NO: 2246773 - RNA, 19 nt, Artificial Sequence
  Description of Artificial Sequence: Synthetic oligonucleotide
  Antisense strand to SEQ ID NO: 2246772
uccuccaggucuagagagc

SEQ ID NO: 2246774 - RNA, 19 nt, Artificial Sequence
  Description of Artificial Sequence: Synthetic oligonucleotide
  Sense strand starting at position 2268 of SEQ ID NO: 1884187
gugaaugaguugcuaauaa

SEQ ID NO: 2246775 - RNA, 19 nt, Artificial Sequence
  Description of Artificial Sequence: Synthetic oligonucleotide
  Antisense strand to SEQ ID NO: 2246774
uuauuagcaacucauucac

SEQ ID NO: 2246776 - RNA, 19 nt, Artificial Sequence
  Description of Artificial Sequence: Synthetic oligonucleotide
  Sense strand starting at position 2364 of SEQ ID NO: 1884187
gagcgacucaagugacaga

SEQ ID NO: 2246777 - RNA, 19 nt, Artificial Sequence
  Description of Artificial Sequence: Synthetic oligonucleotide
  Antisense strand to SEQ ID NO: 2246776
ucugucacuugagucgcuc

SEQ ID NO: 2246778 - RNA, 19 nt, Artificial Sequence
  Description of Artificial Sequence: Synthetic oligonucleotide
  Sense strand starting at position 2471 of SEQ ID NO: 1884187
aggagagucccaggcagaa

SEQ ID NO: 2246779 - RNA, 19 nt, Artificial Sequence
  Description of Artificial Sequence: Synthetic oligonucleotide
  Antisense strand to SEQ ID NO: 2246778
uucugccugggacucuccu

SEQ ID NO: 2246780 - RNA, 19 nt, Artificial Sequence
  Description of Artificial Sequence: Synthetic oligonucleotide
  Sense strand starting at position 2689 of SEQ ID NO: 1884187
gggagagaugcaugaugua

SEQ ID NO: 2246781 - RNA, 19 nt, Artificial Sequence
  Description of Artificial Sequence: Synthetic oligonucleotide
  Antisense strand to SEQ ID NO: 2246780
uacaucaugcaucucuccc

SEQ ID NO: 2246782 - RNA, 19 nt, Artificial Sequence
  Description of Artificial Sequence: Synthetic oligonucleotide
  Sense strand starting at position 2949 of SEQ ID NO: 1884187
ggguuugaggcuugacuaa

SEQ ID NO: 2246783 - RNA, 19 nt, Artificial Sequence
  Description of Artificial Sequence: Synthetic oligonucleotide
  Antisense strand to SEQ ID NO: 2246782
uuagucaagccucaaaccc

SEQ ID NO: 2246784 - RNA, 19 nt, Artificial Sequence
  Description of Artificial Sequence: Synthetic oligonucleotide
  Sense strand starting at position 2987 of SEQ ID NO: 1884187
agcuuaggcagguaauacu

SEQ ID NO: 2246785 - RNA, 19 nt, Artificial Sequence
  Description of Artificial Sequence: Synthetic oligonucleotide
  Antisense strand to SEQ ID NO: 2246784
aguauuaccugccuaagcu

SEQ ID NO: 2246786 - RNA, 19 nt, Artificial Sequence
  Description of Artificial Sequence: Synthetic oligonucleotide
  Sense strand starting at position 3063 of SEQ ID NO: 1884187
caaguaggcgacuggauaa

SEQ ID NO: 2246787 - RNA, 19 nt, Artificial Sequence
  Description of Artificial Sequence: Synthetic oligonucleotide
  Antisense strand to SEQ ID NO: 2246786
uuauccagucgccuacuug

SEQ ID NO: 2246788 - RNA, 19 nt, Artificial Sequence
  Description of Artificial Sequence: Synthetic oligonucleotide
  Sense strand starting at position 3098 of SEQ ID NO: 1884187
aagacauccguuugggagu

SEQ ID NO: 2246789 - RNA, 19 nt, Artificial Sequence
  Description of Artificial Sequence: Synthetic oligonucleotide
  Antisense strand to SEQ ID NO: 2246788
acucccaaacggaugucuu

SEQ ID NO: 2246790 - RNA, 19 nt, Artificial Sequence
  Description of Artificial Sequence: Synthetic oligonucleotide
  Sense strand starting at position 3312 of SEQ ID NO: 1884187
ggaguagauguugguuaau

SEQ ID NO: 2246791 - RNA, 19 nt, Artificial Sequence
  Description of Artificial Sequence: Synthetic oligonucleotide
  Antisense strand to SEQ ID NO: 2246790
auuaaccaacaucuacucc

SEQ ID NO: 2246792 - RNA, 19 nt, Artificial Sequence
  Description of Artificial Sequence: Synthetic oligonucleotide
  Sense strand starting at position 3314 of SEQ ID NO: 1884187
aguagauguugguuaauug

SEQ ID NO: 2246793 - RNA, 19 nt, Artificial Sequence
  Description of Artificial Sequence: Synthetic oligonucleotide
  Antisense strand to SEQ ID NO: 2246792
caauuaaccaacaucuacu

SEQ ID NO: 2246794 - RNA, 19 nt, Artificial Sequence
  Description of Artificial Sequence: Synthetic oligonucleotide
  Sense strand starting at position 3402 of SEQ ID NO: 1884187
gcugguggccuugacaaga

SEQ ID NO: 2246795 - RNA, 19 nt, Artificial Sequence
  Description of Artificial Sequence: Synthetic oligonucleotide
  Antisense strand to SEQ ID NO: 2246794
ucuugucaaggccaccagc

SEQ ID NO: 2246796 - RNA, 19 nt, Artificial Sequence
  Description of Artificial Sequence: Synthetic oligonucleotide
  Sense strand starting at position 3441 of SEQ ID NO: 1884187
agaccagauugccuuuaau

SEQ ID NO: 2246797 - RNA, 19 nt, Artificial Sequence
  Description of Artificial Sequence: Synthetic oligonucleotide
  Antisense strand to SEQ ID NO: 2246796
auuaaaggcaaucuggucu

SEQ ID NO: 2246798 - RNA, 19 nt, Artificial Sequence
  Description of Artificial Sequence: Synthetic oligonucleotide
  Sense strand starting at position 3444 of SEQ ID NO: 1884187
ccagauugccuuuaaucag

SEQ ID NO: 2246799 - RNA, 19 nt, Artificial Sequence
  Description of Artificial Sequence: Synthetic oligonucleotide
  Antisense strand to SEQ ID NO: 2246798
cugauuaaaggcaaucugg

SEQ ID NO: 2246800 - RNA, 19 nt, Artificial Sequence
  Description of Artificial Sequence: Synthetic oligonucleotide
  Sense strand starting at position 3553 of SEQ ID NO: 1884187
cagagacucugacuugauu

SEQ ID NO: 2246801 - RNA, 19 nt, Artificial Sequence
  Description of Artificial Sequence: Synthetic oligonucleotide
  Antisense strand to SEQ ID NO: 2246800
aaucaagucagagucucug

SEQ ID NO: 2246802 - RNA, 19 nt, Artificial Sequence
  Description of Artificial Sequence: Synthetic oligonucleotide
  Sense strand starting at position 3562 of SEQ ID NO: 1884187
ugacuugauugaucagagu

SEQ ID NO: 2246803 - RNA, 19 nt, Artificial Sequence
  Description of Artificial Sequence: Synthetic oligonucleotide
  Antisense strand to SEQ ID NO: 2246802
acucugaucaaucaaguca

SEQ ID NO: 2246804 - RNA, 19 nt, Artificial Sequence
  Description of Artificial Sequence: Synthetic oligonucleotide
  Sense strand starting at position 3568 of SEQ ID NO: 1884187
gauugaucagagugaggca

SEQ ID NO: 2246805 - RNA, 19 nt, Artificial Sequence
  Description of Artificial Sequence: Synthetic oligonucleotide
  Antisense strand to SEQ ID NO: 2246804
ugccucacucugaucaauc

SEQ ID NO: 2246806 - RNA, 19 nt, Artificial Sequence
  Description of Artificial Sequence: Synthetic oligonucleotide
  Sense strand starting at position 3795 of SEQ ID NO: 1884187
uagagagaccucuguuuag

SEQ ID NO: 2246807 - RNA, 19 nt, Artificial Sequence
  Description of Artificial Sequence: Synthetic oligonucleotide
  Antisense strand to SEQ ID NO: 2246806
cuaaacagaggucucucua

SEQ ID NO: 2246808 - RNA, 19 nt, Artificial Sequence
  Description of Artificial Sequence: Synthetic oligonucleotide
  Sense strand starting at position 3840 of SEQ ID NO: 1884187
cauggucuuaggcaaguga

SEQ ID NO: 2246809 - RNA, 19 nt, Artificial Sequence
  Description of Artificial Sequence: Synthetic oligonucleotide
  Antisense strand to SEQ ID NO: 2246808
ucacuugccuaagaccaug

SEQ ID NO: 2246810 - RNA, 19 nt, Artificial Sequence
  Description of Artificial Sequence: Synthetic oligonucleotide
  Sense strand starting at position 3844 of SEQ ID NO: 1884187
gucuuaggcaagugaaaua

SEQ ID NO: 2246811 - RNA, 19 nt, Artificial Sequence
  Description of Artificial Sequence: Synthetic oligonucleotide
  Antisense strand to SEQ ID NO: 2246810
uauuucacuugccuaagac

SEQ ID NO: 2246812 - RNA, 19 nt, Artificial Sequence
  Description of Artificial Sequence: Synthetic oligonucleotide
  Sense strand starting at position 3969 of SEQ ID NO: 1884187
ccuugacuggcguagaauc

SEQ ID NO: 2246813 - RNA, 19 nt, Artificial Sequence
  Description of Artificial Sequence: Synthetic oligonucleotide
  Antisense strand to SEQ ID NO: 2246812
gauucuacgccagucaagg

SEQ ID NO: 2246814 - RNA, 19 nt, Artificial Sequence
  Description of Artificial Sequence: Synthetic oligonucleotide
  Sense strand starting at position 1266 of SEQ ID NO: 1884188
ggaggucccuuuccuagaa

SEQ ID NO: 2246815 - RNA, 19 nt, Artificial Sequence
  Description of Artificial Sequence: Synthetic oligonucleotide
  Antisense strand to SEQ ID NO: 2246814
uucuaggaaagggaccucc

SEQ ID NO: 2246816 - RNA, 19 nt, Artificial Sequence
  Description of Artificial Sequence: Synthetic oligonucleotide
  Sense strand starting at position 1588 of SEQ ID NO: 1884188
gcggugaacucuggcggau

SEQ ID NO: 2246817 - RNA, 19 nt, Artificial Sequence
  Description of Artificial Sequence: Synthetic oligonucleotide
  Antisense strand to SEQ ID NO: 2246816
auccgccagaguucaccgc

SEQ ID NO: 2246818 - RNA, 19 nt, Artificial Sequence
  Description of Artificial Sequence: Synthetic oligonucleotide
  Sense strand starting at position 1590 of SEQ ID NO: 1884188
ggugaacucuggcggauua

SEQ ID NO: 2246819 - RNA, 19 nt, Artificial Sequence
  Description of Artificial Sequence: Synthetic oligonucleotide
  Antisense strand to SEQ ID NO: 2246818
uaauccgccagaguucacc

SEQ ID NO: 2246820 - RNA, 19 nt, Artificial Sequence
  Description of Artificial Sequence: Synthetic oligonucleotide
  Sense strand starting at position 1591 of SEQ ID NO: 1884188
gugaacucuggcggauuaa

SEQ ID NO: 2246821 - RNA, 19 nt, Artificial Sequence
  Description of Artificial Sequence: Synthetic oligonucleotide
  Antisense strand to SEQ ID NO: 2246820
uuaauccgccagaguucac

SEQ ID NO: 2246822 - RNA, 19 nt, Artificial Sequence
  Description of Artificial Sequence: Synthetic oligonucleotide
  Sense strand starting at position 1592 of SEQ ID NO: 1884188
ugaacucuggcggauuaag

SEQ ID NO: 2246823 - RNA, 19 nt, Artificial Sequence
  Description of Artificial Sequence: Synthetic oligonucleotide
  Antisense strand to SEQ ID NO: 2246822
cuuaauccgccagaguuca

SEQ ID NO: 2246824 - RNA, 19 nt, Artificial Sequence
  Description of Artificial Sequence: Synthetic oligonucleotide
  Sense strand starting at position 2381 of SEQ ID NO: 1884188
gggccagugucuccuccaa

SEQ ID NO: 2246825 - RNA, 19 nt, Artificial Sequence
  Description of Artificial Sequence: Synthetic oligonucleotide
  Antisense strand to SEQ ID NO: 2246824
uuggaggagacacuggccc

SEQ ID NO: 2246826 - RNA, 19 nt, Artificial Sequence
  Description of Artificial Sequence: Synthetic oligonucleotide
  Sense strand starting at position 2385 of SEQ ID NO: 1884188
cagugucuccuccaaggga

SEQ ID NO: 2246827 - RNA, 19 nt, Artificial Sequence
  Description of Artificial Sequence: Synthetic oligonucleotide
  Antisense strand to SEQ ID NO: 2246826
ucccuuggaggagacacug

SEQ ID NO: 2246828 - RNA, 19 nt, Artificial Sequence
  Description of Artificial Sequence: Synthetic oligonucleotide
  Sense strand starting at position 2629 of SEQ ID NO: 1884188
aaaguacacucgcaaagua

SEQ ID NO: 2246829 - RNA, 19 nt, Artificial Sequence
  Description of Artificial Sequence: Synthetic oligonucleotide
  Antisense strand to SEQ ID NO: 2246828
uacuuugcgaguguacuuu

SEQ ID NO: 2246830 - RNA, 19 nt, Artificial Sequence
  Description of Artificial Sequence: Synthetic oligonucleotide
  Sense strand starting at position 2716 of SEQ ID NO: 1884188
acgccuguguuucuggaga

SEQ ID NO: 2246831 - RNA, 19 nt, Artificial Sequence
  Description of Artificial Sequence: Synthetic oligonucleotide
  Antisense strand to SEQ ID NO: 2246830
ucuccagaaacacaggcgu

SEQ ID NO: 2246832 - RNA, 19 nt, Artificial Sequence
  Description of Artificial Sequence: Synthetic oligonucleotide
  Sense strand starting at position 2718 of SEQ ID NO: 1884188
gccuguguuucuggagaau

SEQ ID NO: 2246833 - RNA, 19 nt, Artificial Sequence
  Description of Artificial Sequence: Synthetic oligonucleotide
  Antisense strand to SEQ ID NO: 2246832
auucuccagaaacacaggc

SEQ ID NO: 2246834 - RNA, 19 nt, Artificial Sequence
  Description of Artificial Sequence: Synthetic oligonucleotide
  Sense strand starting at position 2905 of SEQ ID NO: 1884188
ccuccugagccgugucuua

SEQ ID NO: 2246835 - RNA, 19 nt, Artificial Sequence
  Description of Artificial Sequence: Synthetic oligonucleotide
  Antisense strand to SEQ ID NO: 2246834
uaagacacggcucaggagg

SEQ ID NO: 2246836 - RNA, 19 nt, Artificial Sequence
  Description of Artificial Sequence: Synthetic oligonucleotide
  Sense strand starting at position 2907 of SEQ ID NO: 1884188
uccugagccgugucuuacu

SEQ ID NO: 2246837 - RNA, 19 nt, Artificial Sequence
  Description of Artificial Sequence: Synthetic oligonucleotide
  Antisense strand to SEQ ID NO: 2246836
aguaagacacggcucagga

SEQ ID NO: 2246838 - RNA, 19 nt, Artificial Sequence
  Description of Artificial Sequence: Synthetic oligonucleotide
  Sense strand starting at position 2916 of SEQ ID NO: 1884188
gugucuuacuuuccuuuga

SEQ ID NO: 2246839 - RNA, 19 nt, Artificial Sequence
  Description of Artificial Sequence: Synthetic oligonucleotide
  Antisense strand to SEQ ID NO: 2246838
ucaaaggaaaguaagacac

SEQ ID NO: 2246840 - RNA, 19 nt, Artificial Sequence
  Description of Artificial Sequence: Synthetic oligonucleotide
  Sense strand starting at position 2917 of SEQ ID NO: 1884188
ugucuuacuuuccuuugau

SEQ ID NO: 2246841 - RNA, 19 nt, Artificial Sequence
  Description of Artificial Sequence: Synthetic oligonucleotide
  Antisense strand to SEQ ID NO: 2246840
aucaaaggaaaguaagaca

SEQ ID NO: 2246842 - RNA, 19 nt, Artificial Sequence
  Description of Artificial Sequence: Synthetic oligonucleotide
  Sense strand starting at position 2918 of SEQ ID NO: 1884188
gucuuacuuuccuuugauu

SEQ ID NO: 2246843 - RNA, 19 nt, Artificial Sequence
  Description of Artificial Sequence: Synthetic oligonucleotide
  Antisense strand to SEQ ID NO: 2246842
aaucaaaggaaaguaagac

SEQ ID NO: 2246844 - RNA, 19 nt, Artificial Sequence
  Description of Artificial Sequence: Synthetic oligonucleotide
  Sense strand starting at position 3345 of SEQ ID NO: 1884188
ugagcaggcuucucucuua

SEQ ID NO: 2246845 - RNA, 19 nt, Artificial Sequence
  Description of Artificial Sequence: Synthetic oligonucleotide
  Antisense strand to SEQ ID NO: 2246844
uaagagagaagccugcuca

SEQ ID NO: 2246846 - RNA, 19 nt, Artificial Sequence
  Description of Artificial Sequence: Synthetic oligonucleotide
  Sense strand starting at position 3518 of SEQ ID NO: 1884188
gguucugaauuccacagau

SEQ ID NO: 2246847 - RNA, 19 nt, Artificial Sequence
  Description of Artificial Sequence: Synthetic oligonucleotide
  Antisense strand to SEQ ID NO: 2246846
aucuguggaauucagaacc

SEQ ID NO: 2246848 - RNA, 19 nt, Artificial Sequence
  Description of Artificial Sequence: Synthetic oligonucleotide
  Sense strand starting at position 3580 of SEQ ID NO: 1884188
ccuaguggcuccgugugaa

SEQ ID NO: 2246849 - RNA, 19 nt, Artificial Sequence
  Description of Artificial Sequence: Synthetic oligonucleotide
  Antisense strand to SEQ ID NO: 2246848
uucacacggagccacuagg

SEQ ID NO: 2246850 - RNA, 19 nt, Artificial Sequence
  Description of Artificial Sequence: Synthetic oligonucleotide
  Sense strand starting at position 3583 of SEQ ID NO: 1884188
aguggcuccgugugaaauc

SEQ ID NO: 2246851 - RNA, 19 nt, Artificial Sequence
  Description of Artificial Sequence: Synthetic oligonucleotide
  Antisense strand to SEQ ID NO: 2246850
gauuucacacggagccacu

SEQ ID NO: 2246852 - RNA, 19 nt, Artificial Sequence
  Description of Artificial Sequence: Synthetic oligonucleotide
  Sense strand starting at position 3976 of SEQ ID NO: 1884188
gggacagccucugcaagau

SEQ ID NO: 2246853 - RNA, 19 nt, Artificial Sequence
  Description of Artificial Sequence: Synthetic oligonucleotide
  Antisense strand to SEQ ID NO: 2246852
aucuugcagaggcuguccc

SEQ ID NO: 2246854 - RNA, 19 nt, Artificial Sequence
  Description of Artificial Sequence: Synthetic oligonucleotide
  Sense strand starting at position 12 of SEQ ID NO: 1884189
ugcccuuuagccugaacaa

SEQ ID NO: 2246855 - RNA, 19 nt, Artificial Sequence
  Description of Artificial Sequence: Synthetic oligonucleotide
  Antisense strand to SEQ ID NO: 2246854
uuguucaggcuaaagggca

SEQ ID NO: 2246856 - RNA, 19 nt, Artificial Sequence
  Description of Artificial Sequence: Synthetic oligonucleotide
  Sense strand starting at position 13 of SEQ ID NO: 1884189
gcccuuuagccugaacaac

SEQ ID NO: 2246857 - RNA, 19 nt, Artificial Sequence
  Description of Artificial Sequence: Synthetic oligonucleotide
  Antisense strand to SEQ ID NO: 2246856
guuguucaggcuaaagggc

SEQ ID NO: 2246858 - RNA, 19 nt, Artificial Sequence
  Description of Artificial Sequence: Synthetic oligonucleotide
  Sense strand starting at position 80 of SEQ ID NO: 1884189
ugagaucuaugagauggau

SEQ ID NO: 2246859 - RNA, 19 nt, Artificial Sequence
  Description of Artificial Sequence: Synthetic oligonucleotide
  Antisense strand to SEQ ID NO: 2246858
auccaucucauagaucuca

SEQ ID NO: 2246860 - RNA, 19 nt, Artificial Sequence
  Description of Artificial Sequence: Synthetic oligonucleotide
  Sense strand starting at position 160 of SEQ ID NO: 1884189
gacuguugugucuaaggca

SEQ ID NO: 2246861 - RNA, 19 nt, Artificial Sequence
  Description of Artificial Sequence: Synthetic oligonucleotide
  Antisense strand to SEQ ID NO: 2246860
ugccuuagacacaacaguc

SEQ ID NO: 2246862 - RNA, 19 nt, Artificial Sequence
  Description of Artificial Sequence: Synthetic oligonucleotide
  Sense strand starting at position 176 of SEQ ID NO: 1884189
gcacuaguaaguggccaaa

SEQ ID NO: 2246863 - RNA, 19 nt, Artificial Sequence
  Description of Artificial Sequence: Synthetic oligonucleotide
  Antisense strand to SEQ ID NO: 2246862
uuuggccacuuacuagugc

SEQ ID NO: 2246864 - RNA, 19 nt, Artificial Sequence
  Description of Artificial Sequence: Synthetic oligonucleotide
  Sense strand starting at position 178 of SEQ ID NO: 1884189
acuaguaaguggccaaaua

SEQ ID NO: 2246865 - RNA, 19 nt, Artificial Sequence
  Description of Artificial Sequence: Synthetic oligonucleotide
  Antisense strand to SEQ ID NO: 2246864
uauuuggccacuuacuagu

SEQ ID NO: 2246866 - RNA, 19 nt, Artificial Sequence
  Description of Artificial Sequence: Synthetic oligonucleotide
  Sense strand starting at position 179 of SEQ ID NO: 1884189
cuaguaaguggccaaauau

SEQ ID NO: 2246867 - RNA, 19 nt, Artificial Sequence
  Description of Artificial Sequence: Synthetic oligonucleotide
  Antisense strand to SEQ ID NO: 2246866
auauuuggccacuuacuag

SEQ ID NO: 2246868 - RNA, 19 nt, Artificial Sequence
  Description of Artificial Sequence: Synthetic oligonucleotide
  Sense strand starting at position 204 of SEQ ID NO: 1884189
gaaccuagaucagugugau

SEQ ID NO: 2246869 - RNA, 19 nt, Artificial Sequence
  Description of Artificial Sequence: Synthetic oligonucleotide
  Antisense strand to SEQ ID NO: 2246868
aucacacugaucuagguuc

SEQ ID NO: 2246870 - RNA, 19 nt, Artificial Sequence
  Description of Artificial Sequence: Synthetic oligonucleotide
  Sense strand starting at position 205 of SEQ ID NO: 1884189
aaccuagaucagugugaug

SEQ ID NO: 2246871 - RNA, 19 nt, Artificial Sequence
  Description of Artificial Sequence: Synthetic oligonucleotide
  Antisense strand to SEQ ID NO: 2246870
caucacacugaucuagguu

SEQ ID NO: 2246872 - RNA, 19 nt, Artificial Sequence
  Description of Artificial Sequence: Synthetic oligonucleotide
  Sense strand starting at position 207 of SEQ ID NO: 1884189
ccuagaucagugugauguc

SEQ ID NO: 2246873 - RNA, 19 nt, Artificial Sequence
  Description of Artificial Sequence: Synthetic oligonucleotide
  Antisense strand to SEQ ID NO: 2246872
gacaucacacugaucuagg

SEQ ID NO: 2246874 - RNA, 19 nt, Artificial Sequence
  Description of Artificial Sequence: Synthetic oligonucleotide
  Sense strand starting at position 217 of SEQ ID NO: 1884189
ugugauguccuauguacuc

SEQ ID NO: 2246875 - RNA, 19 nt, Artificial Sequence
  Description of Artificial Sequence: Synthetic oligonucleotide
  Antisense strand to SEQ ID NO: 2246874
gaguacauaggacaucaca

SEQ ID NO: 2246876 - RNA, 19 nt, Artificial Sequence
  Description of Artificial Sequence: Synthetic oligonucleotide
  Sense strand starting at position 224 of SEQ ID NO: 1884189
uccuauguacucugguuau

SEQ ID NO: 2246877 - RNA, 19 nt, Artificial Sequence
  Description of Artificial Sequence: Synthetic oligonucleotide
  Antisense strand to SEQ ID NO: 2246876
auaaccagaguacauagga

SEQ ID NO: 2246878 - RNA, 19 nt, Artificial Sequence
  Description of Artificial Sequence: Synthetic oligonucleotide
  Sense strand starting at position 228 of SEQ ID NO: 1884189
auguacucugguuauuacu

SEQ ID NO: 2246879 - RNA, 19 nt, Artificial Sequence
  Description of Artificial Sequence: Synthetic oligonucleotide
  Antisense strand to SEQ ID NO: 2246878
aguaauaaccagaguacau

SEQ ID NO: 2246880 - RNA, 19 nt, Artificial Sequence
  Description of Artificial Sequence: Synthetic oligonucleotide
  Sense strand starting at position 230 of SEQ ID NO: 1884189
guacucugguuauuacuga

SEQ ID NO: 2246881 - RNA, 19 nt, Artificial Sequence
  Description of Artificial Sequence: Synthetic oligonucleotide
  Antisense strand to SEQ ID NO: 2246880
ucaguaauaaccagaguac

SEQ ID NO: 2246882 - RNA, 19 nt, Artificial Sequence
  Description of Artificial Sequence: Synthetic oligonucleotide
  Sense strand starting at position 710 of SEQ ID NO: 1884189
guaguauacucucccaaug

SEQ ID NO: 2246883 - RNA, 19 nt, Artificial Sequence
  Description of Artificial Sequence: Synthetic oligonucleotide
  Antisense strand to SEQ ID NO: 2246882
cauugggagaguauacuac

SEQ ID NO: 2246884 - RNA, 19 nt, Artificial Sequence
  Description of Artificial Sequence: Synthetic oligonucleotide
  Sense strand starting at position 759 of SEQ ID NO: 1884189
caguaauuguuguugugga

SEQ ID NO: 2246885 - RNA, 19 nt, Artificial Sequence
  Description of Artificial Sequence: Synthetic oligonucleotide
  Antisense strand to SEQ ID NO: 2246884
uccacaacaacaauuacug

SEQ ID NO: 2246886 - RNA, 19 nt, Artificial Sequence
  Description of Artificial Sequence: Synthetic oligonucleotide
  Sense strand starting at position 775 of SEQ ID NO: 1884189
ggauccaaguaucuaugua

SEQ ID NO: 2246887 - RNA, 19 nt, Artificial Sequence
  Description of Artificial Sequence: Synthetic oligonucleotide
  Antisense strand to SEQ ID NO: 2246886
uacauagauacuuggaucc

SEQ ID NO: 2246888 - RNA, 19 nt, Artificial Sequence
  Description of Artificial Sequence: Synthetic oligonucleotide
  Sense strand starting at position 779 of SEQ ID NO: 1884189
ccaaguaucuauguaagaa

SEQ ID NO: 2246889 - RNA, 19 nt, Artificial Sequence
  Description of Artificial Sequence: Synthetic oligonucleotide
  Antisense strand to SEQ ID NO: 2246888
uucuuacauagauacuugg

SEQ ID NO: 2246890 - RNA, 19 nt, Artificial Sequence
  Description of Artificial Sequence: Synthetic oligonucleotide
  Sense strand starting at position 818 of SEQ ID NO: 1884189
guuguugucaucguuguca

SEQ ID NO: 2246891 - RNA, 19 nt, Artificial Sequence
  Description of Artificial Sequence: Synthetic oligonucleotide
  Antisense strand to SEQ ID NO: 2246890
ugacaacgaugacaacaac

SEQ ID NO: 2246892 - RNA, 19 nt, Artificial Sequence
  Description of Artificial Sequence: Synthetic oligonucleotide
  Sense strand starting at position 841 of SEQ ID NO: 1884189
cuuaauuacuggcuagaaa

SEQ ID NO: 2246893 - RNA, 19 nt, Artificial Sequence
  Description of Artificial Sequence: Synthetic oligonucleotide
  Antisense strand to SEQ ID NO: 2246892
uuucuagccaguaauuaag

SEQ ID NO: 2246894 - RNA, 19 nt, Artificial Sequence
  Description of Artificial Sequence: Synthetic oligonucleotide
  Sense strand starting at position 844 of SEQ ID NO: 1884189
aauuacuggcuagaaaugu

SEQ ID NO: 2246895 - RNA, 19 nt, Artificial Sequence
  Description of Artificial Sequence: Synthetic oligonucleotide
  Antisense strand to SEQ ID NO: 2246894
acauuucuagccaguaauu

SEQ ID NO: 2246896 - RNA, 19 nt, Artificial Sequence
  Description of Artificial Sequence: Synthetic oligonucleotide
  Sense strand starting at position 852 of SEQ ID NO: 1884189
gcuagaaaugucuagugcu

SEQ ID NO: 2246897 - RNA, 19 nt, Artificial Sequence
  Description of Artificial Sequence: Synthetic oligonucleotide
  Antisense strand to SEQ ID NO: 2246896
agcacuagacauuucuagc

SEQ ID NO: 2246898 - RNA, 19 nt, Artificial Sequence
  Description of Artificial Sequence: Synthetic oligonucleotide
  Sense strand starting at position 892 of SEQ ID NO: 1884189
gagccuuucccauggcuga

SEQ ID NO: 2246899 - RNA, 19 nt, Artificial Sequence
  Description of Artificial Sequence: Synthetic oligonucleotide
  Antisense strand to SEQ ID NO: 2246898
ucagccaugggaaaggcuc

SEQ ID NO: 2246900 - RNA, 19 nt, Artificial Sequence
  Description of Artificial Sequence: Synthetic oligonucleotide
  Sense strand starting at position 991 of SEQ ID NO: 1884189
ggucaauguccuggaguaa

SEQ ID NO: 2246901 - RNA, 19 nt, Artificial Sequence
  Description of Artificial Sequence: Synthetic oligonucleotide
  Antisense strand to SEQ ID NO: 2246900
uuacuccaggacauugacc

SEQ ID NO: 2246902 - RNA, 19 nt, Artificial Sequence
  Description of Artificial Sequence: Synthetic oligonucleotide
  Sense strand starting at position 992 of SEQ ID NO: 1884189
gucaauguccuggaguaag

SEQ ID NO: 2246903 - RNA, 19 nt, Artificial Sequence
  Description of Artificial Sequence: Synthetic oligonucleotide
  Antisense strand to SEQ ID NO: 2246902
cuuacuccaggacauugac

SEQ ID NO: 2246904 - RNA, 19 nt, Artificial Sequence
  Description of Artificial Sequence: Synthetic oligonucleotide
  Sense strand starting at position 1088 of SEQ ID NO: 1884189
agggcaauguuuccuagga

SEQ ID NO: 2246905 - RNA, 19 nt, Artificial Sequence
  Description of Artificial Sequence: Synthetic oligonucleotide
  Antisense strand to SEQ ID NO: 2246904
uccuaggaaacauugcccu

SEQ ID NO: 2246906 - RNA, 19 nt, Artificial Sequence
  Description of Artificial Sequence: Synthetic oligonucleotide
  Sense strand starting at position 1089 of SEQ ID NO: 1884189
gggcaauguuuccuaggag

SEQ ID NO: 2246907 - RNA, 19 nt, Artificial Sequence
  Description of Artificial Sequence: Synthetic oligonucleotide
  Antisense strand to SEQ ID NO: 2246906
cuccuaggaaacauugccc

SEQ ID NO: 2246908 - RNA, 19 nt, Artificial Sequence
  Description of Artificial Sequence: Synthetic oligonucleotide
  Sense strand starting at position 1092 of SEQ ID NO: 1884189
caauguuuccuaggagaaa

SEQ ID NO: 2246909 - RNA, 19 nt, Artificial Sequence
  Description of Artificial Sequence: Synthetic oligonucleotide
  Antisense strand to SEQ ID NO: 2246908
uuucuccuaggaaacauug

SEQ ID NO: 2246910 - RNA, 19 nt, Artificial Sequence
  Description of Artificial Sequence: Synthetic oligonucleotide
  Sense strand starting at position 1244 of SEQ ID NO: 1884189
cucuuaagugcucaaguuc

SEQ ID NO: 2246911 - RNA, 19 nt, Artificial Sequence
  Description of Artificial Sequence: Synthetic oligonucleotide
  Antisense strand to SEQ ID NO: 2246910
gaacuugagcacuuaagag

SEQ ID NO: 2246912 - RNA, 19 nt, Artificial Sequence
  Description of Artificial Sequence: Synthetic oligonucleotide
  Sense strand starting at position 1280 of SEQ ID NO: 1884189
gcuugauugcuuucacgug

SEQ ID NO: 2246913 - RNA, 19 nt, Artificial Sequence
  Description of Artificial Sequence: Synthetic oligonucleotide
  Antisense strand to SEQ ID NO: 2246912
cacgugaaagcaaucaagc

SEQ ID NO: 2246914 - RNA, 19 nt, Artificial Sequence
  Description of Artificial Sequence: Synthetic oligonucleotide
  Sense strand starting at position 1669 of SEQ ID NO: 1884189
ucagaauugcgauguuuaa

SEQ ID NO: 2246915 - RNA, 19 nt, Artificial Sequence
  Description of Artificial Sequence: Synthetic oligonucleotide
  Antisense strand to SEQ ID NO: 2246914
uuaaacaucgcaauucuga

SEQ ID NO: 2246916 - RNA, 19 nt, Artificial Sequence
  Description of Artificial Sequence: Synthetic oligonucleotide
  Sense strand starting at position 1805 of SEQ ID NO: 1884189
gacuauuaauucuugcguu

SEQ ID NO: 2246917 - RNA, 19 nt, Artificial Sequence
  Description of Artificial Sequence: Synthetic oligonucleotide
  Antisense strand to SEQ ID NO: 2246916
aacgcaagaauuaauaguc

SEQ ID NO: 2246918 - RNA, 19 nt, Artificial Sequence
  Description of Artificial Sequence: Synthetic oligonucleotide
  Sense strand starting at position 2019 of SEQ ID NO: 1884189
caguucgaggaaugggauu

SEQ ID NO: 2246919 - RNA, 19 nt, Artificial Sequence
  Description of Artificial Sequence: Synthetic oligonucleotide
  Antisense strand to SEQ ID NO: 2246918
aaucccauuccucgaacug

SEQ ID NO: 2246920 - RNA, 19 nt, Artificial Sequence
  Description of Artificial Sequence: Synthetic oligonucleotide
  Sense strand starting at position 2021 of SEQ ID NO: 1884189
guucgaggaaugggauuaa

SEQ ID NO: 2246921 - RNA, 19 nt, Artificial Sequence
  Description of Artificial Sequence: Synthetic oligonucleotide
  Antisense strand to SEQ ID NO: 2246920
uuaaucccauuccucgaac

SEQ ID NO: 2246922 - RNA, 19 nt, Artificial Sequence
  Description of Artificial Sequence: Synthetic oligonucleotide
  Sense strand starting at position 3622 of SEQ ID NO: 1884189
uggaagagucgcggaauga

SEQ ID NO: 2246923 - RNA, 19 nt, Artificial Sequence
  Description of Artificial Sequence: Synthetic oligonucleotide
  Antisense strand to SEQ ID NO: 2246922
ucauuccgcgacucuucca

SEQ ID NO: 2246924 - RNA, 19 nt, Artificial Sequence
  Description of Artificial Sequence: Synthetic oligonucleotide
  Sense strand starting at position 3623 of SEQ ID NO: 1884189
ggaagagucgcggaaugaa

SEQ ID NO: 2246925 - RNA, 19 nt, Artificial Sequence
  Description of Artificial Sequence: Synthetic oligonucleotide
  Antisense strand to SEQ ID NO: 2246924
uucauuccgcgacucuucc

SEQ ID NO: 2246926 - RNA, 19 nt, Artificial Sequence
  Description of Artificial Sequence: Synthetic oligonucleotide
  Sense strand starting at position 3785 of SEQ ID NO: 1884189
uccucuacugugugucaga

SEQ ID NO: 2246927 - RNA, 19 nt, Artificial Sequence
  Description of Artificial Sequence: Synthetic oligonucleotide
  Antisense strand to SEQ ID NO: 2246926
ucugacacacaguagagga

SEQ ID NO: 2246928 - RNA, 19 nt, Artificial Sequence
  Description of Artificial Sequence: Synthetic oligonucleotide
  Sense strand starting at position 3786 of SEQ ID NO: 1884189
ccucuacugugugucagaa

SEQ ID NO: 2246929 - RNA, 19 nt, Artificial Sequence
  Description of Artificial Sequence: Synthetic oligonucleotide
  Antisense strand to SEQ ID NO: 2246928
uucugacacacaguagagg

SEQ ID NO: 2246930 - RNA, 19 nt, Artificial Sequence
  Description of Artificial Sequence: Synthetic oligonucleotide
  Sense strand starting at position 3894 of SEQ ID NO: 1884189
auauuuccuuuguaguaga

SEQ ID NO: 2246931 - RNA, 19 nt, Artificial Sequence
  Description of Artificial Sequence: Synthetic oligonucleotide
  Antisense strand to SEQ ID NO: 2246930
ucuacuacaaaggaaauau

SEQ ID NO: 2246932 - RNA, 19 nt, Artificial Sequence
  Description of Artificial Sequence: Synthetic oligonucleotide
  Sense strand starting at position 3945 of SEQ ID NO: 1884189
ugcaguauuucccauuugu

SEQ ID NO: 2246933 - RNA, 19 nt, Artificial Sequence
  Description of Artificial Sequence: Synthetic oligonucleotide
  Antisense strand to SEQ ID NO: 2246932
acaaaugggaaauacugca

SEQ ID NO: 2246934 - RNA, 19 nt, Artificial Sequence
  Description of Artificial Sequence: Synthetic oligonucleotide
  Sense strand starting at position 109 of SEQ ID NO: 1884190
auguuuaugccaugaacuc

SEQ ID NO: 2246935 - RNA, 19 nt, Artificial Sequence
  Description of Artificial Sequence: Synthetic oligonucleotide
  Antisense strand to SEQ ID NO: 2246934
gaguucauggcauaaacau

SEQ ID NO: 2246936 - RNA, 19 nt, Artificial Sequence
  Description of Artificial Sequence: Synthetic oligonucleotide
  Sense strand starting at position 623 of SEQ ID NO: 1884190
cccggaugccagugauucu

SEQ ID NO: 2246937 - RNA, 19 nt, Artificial Sequence
  Description of Artificial Sequence: Synthetic oligonucleotide
  Antisense strand to SEQ ID NO: 2246936
agaaucacuggcauccggg

SEQ ID NO: 2246938 - RNA, 19 nt, Artificial Sequence
  Description of Artificial Sequence: Synthetic oligonucleotide
  Sense strand starting at position 1067 of SEQ ID NO: 1884190
aggccaaguuucucucauu

SEQ ID NO: 2246939 - RNA, 19 nt, Artificial Sequence
  Description of Artificial Sequence: Synthetic oligonucleotide
  Antisense strand to SEQ ID NO: 2246938
aaugagagaaacuuggccu

SEQ ID NO: 2246940 - RNA, 19 nt, Artificial Sequence
  Description of Artificial Sequence: Synthetic oligonucleotide
  Sense strand starting at position 1068 of SEQ ID NO: 1884190
ggccaaguuucucucauuc

SEQ ID NO: 2246941 - RNA, 19 nt, Artificial Sequence
  Description of Artificial Sequence: Synthetic oligonucleotide
  Antisense strand to SEQ ID NO: 2246940
gaaugagagaaacuuggcc

SEQ ID NO: 2246942 - RNA, 19 nt, Artificial Sequence
  Description of Artificial Sequence: Synthetic oligonucleotide
  Sense strand starting at position 1149 of SEQ ID NO: 1884190
ccagaaucugcacaaguga

SEQ ID NO: 2246943 - RNA, 19 nt, Artificial Sequence
  Description of Artificial Sequence: Synthetic oligonucleotide
  Antisense strand to SEQ ID NO: 2246942
ucacuugugcagauucugg

SEQ ID NO: 2246944 - RNA, 19 nt, Artificial Sequence
  Description of Artificial Sequence: Synthetic oligonucleotide
  Sense strand starting at position 1400 of SEQ ID NO: 1884190
uggaccucagagugaugau

SEQ ID NO: 2246945 - RNA, 19 nt, Artificial Sequence
  Description of Artificial Sequence: Synthetic oligonucleotide
  Antisense strand to SEQ ID NO: 2246944
aucaucacucugaggucca

SEQ ID NO: 2246946 - RNA, 19 nt, Artificial Sequence
  Description of Artificial Sequence: Synthetic oligonucleotide
  Sense strand starting at position 1618 of SEQ ID NO: 1884190
gccucugccugcucggaaa

SEQ ID NO: 2246947 - RNA, 19 nt, Artificial Sequence
  Description of Artificial Sequence: Synthetic oligonucleotide
  Antisense strand to SEQ ID NO: 2246946
uuuccgagcaggcagaggc

SEQ ID NO: 2246948 - RNA, 19 nt, Artificial Sequence
  Description of Artificial Sequence: Synthetic oligonucleotide
  Sense strand starting at position 2592 of SEQ ID NO: 1884190
ccgugugauugacccuuga

SEQ ID NO: 2246949 - RNA, 19 nt, Artificial Sequence
  Description of Artificial Sequence: Synthetic oligonucleotide
  Antisense strand to SEQ ID NO: 2246948
ucaagggucaaucacacgg

SEQ ID NO: 2246950 - RNA, 19 nt, Artificial Sequence
  Description of Artificial Sequence: Synthetic oligonucleotide
  Sense strand starting at position 2596 of SEQ ID NO: 1884190
gugauugacccuugauuaa

SEQ ID NO: 2246951 - RNA, 19 nt, Artificial Sequence
  Description of Artificial Sequence: Synthetic oligonucleotide
  Antisense strand to SEQ ID NO: 2246950
uuaaucaagggucaaucac

SEQ ID NO: 2246952 - RNA, 19 nt, Artificial Sequence
  Description of Artificial Sequence: Synthetic oligonucleotide
  Sense strand starting at position 2603 of SEQ ID NO: 1884190
acccuugauuaagaguaga

SEQ ID NO: 2246953 - RNA, 19 nt, Artificial Sequence
  Description of Artificial Sequence: Synthetic oligonucleotide
  Antisense strand to SEQ ID NO: 2246952
ucuacucuuaaucaagggu

SEQ ID NO: 2246954 - RNA, 19 nt, Artificial Sequence
  Description of Artificial Sequence: Synthetic oligonucleotide
  Sense strand starting at position 2621 of SEQ ID NO: 1884190
agccgagcuuugggaguaa

SEQ ID NO: 2246955 - RNA, 19 nt, Artificial Sequence
  Description of Artificial Sequence: Synthetic oligonucleotide
  Antisense strand to SEQ ID NO: 2246954
uuacucccaaagcucggcu

SEQ ID NO: 2246956 - RNA, 19 nt, Artificial Sequence
  Description of Artificial Sequence: Synthetic oligonucleotide
  Sense strand starting at position 2625 of SEQ ID NO: 1884190
gagcuuugggaguaaaugu

SEQ ID NO: 2246957 - RNA, 19 nt, Artificial Sequence
  Description of Artificial Sequence: Synthetic oligonucleotide
  Antisense strand to SEQ ID NO: 2246956
acauuuacucccaaagcuc

SEQ ID NO: 2246958 - RNA, 19 nt, Artificial Sequence
  Description of Artificial Sequence: Synthetic oligonucleotide
  Sense strand starting at position 2673 of SEQ ID NO: 1884190
uuuaguacacagcgacaua

SEQ ID NO: 2246959 - RNA, 19 nt, Artificial Sequence
  Description of Artificial Sequence: Synthetic oligonucleotide
  Antisense strand to SEQ ID NO: 2246958
uaugucgcuguguacuaaa

SEQ ID NO: 2246960 - RNA, 19 nt, Artificial Sequence
  Description of Artificial Sequence: Synthetic oligonucleotide
  Sense strand starting at position 2709 of SEQ ID NO: 1884190
gccgucagggcagaauauu

SEQ ID NO: 2246961 - RNA, 19 nt, Artificial Sequence
  Description of Artificial Sequence: Synthetic oligonucleotide
  Antisense strand to SEQ ID NO: 2246960
aauauucugcccugacggc

SEQ ID NO: 2246962 - RNA, 19 nt, Artificial Sequence
  Description of Artificial Sequence: Synthetic oligonucleotide
  Sense strand starting at position 2728 of SEQ ID NO: 1884190
caguaauauuguuuguaag

SEQ ID NO: 2246963 - RNA, 19 nt, Artificial Sequence
  Description of Artificial Sequence: Synthetic oligonucleotide
  Antisense strand to SEQ ID NO: 2246962
cuuacaaacaauauuacug

SEQ ID NO: 2246964 - RNA, 19 nt, Artificial Sequence
  Description of Artificial Sequence: Synthetic oligonucleotide
  Sense strand starting at position 2730 of SEQ ID NO: 1884190
guaauauuguuuguaagug

SEQ ID NO: 2246965 - RNA, 19 nt, Artificial Sequence
  Description of Artificial Sequence: Synthetic oligonucleotide
  Antisense strand to SEQ ID NO: 2246964
cacuuacaaacaauauuac

SEQ ID NO: 2246966 - RNA, 19 nt, Artificial Sequence
  Description of Artificial Sequence: Synthetic oligonucleotide
  Sense strand starting at position 2734 of SEQ ID NO: 1884190
uauuguuuguaagugagaa

SEQ ID NO: 2246967 - RNA, 19 nt, Artificial Sequence
  Description of Artificial Sequence: Synthetic oligonucleotide
  Antisense strand to SEQ ID NO: 2246966
uucucacuuacaaacaaua

SEQ ID NO: 2246968 - RNA, 19 nt, Artificial Sequence
  Description of Artificial Sequence: Synthetic oligonucleotide
  Sense strand starting at position 2735 of SEQ ID NO: 1884190
auuguuuguaagugagaaa

SEQ ID NO: 2246969 - RNA, 19 nt, Artificial Sequence
  Description of Artificial Sequence: Synthetic oligonucleotide
  Antisense strand to SEQ ID NO: 2246968
uuucucacuuacaaacaau

SEQ ID NO: 2246970 - RNA, 19 nt, Artificial Sequence
  Description of Artificial Sequence: Synthetic oligonucleotide
  Sense strand starting at position 2736 of SEQ ID NO: 1884190
uuguuuguaagugagaaau

SEQ ID NO: 2246971 - RNA, 19 nt, Artificial Sequence
  Description of Artificial Sequence: Synthetic oligonucleotide
  Antisense strand to SEQ ID NO: 2246970
auuucucacuuacaaacaa

SEQ ID NO: 2246972 - RNA, 19 nt, Artificial Sequence
  Description of Artificial Sequence: Synthetic oligonucleotide
  Sense strand starting at position 2738 of SEQ ID NO: 1884190
guuuguaagugagaaauaa

SEQ ID NO: 2246973 - RNA, 19 nt, Artificial Sequence
  Description of Artificial Sequence: Synthetic oligonucleotide
  Antisense strand to SEQ ID NO: 2246972
uuauuucucacuuacaaac

SEQ ID NO: 2246974 - RNA, 19 nt, Artificial Sequence
  Description of Artificial Sequence: Synthetic oligonucleotide
  Sense strand starting at position 2846 of SEQ ID NO: 1884190
agguaagaauuauagaaac

SEQ ID NO: 2246975 - RNA, 19 nt, Artificial Sequence
  Description of Artificial Sequence: Synthetic oligonucleotide
  Antisense strand to SEQ ID NO: 2246974
guuucuauaauucuuaccu

SEQ ID NO: 2246976 - RNA, 19 nt, Artificial Sequence
  Description of Artificial Sequence: Synthetic oligonucleotide
  Sense strand starting at position 2916 of SEQ ID NO: 1884190
ucuccucggucuugugaaa

SEQ ID NO: 2246977 - RNA, 19 nt, Artificial Sequence
  Description of Artificial Sequence: Synthetic oligonucleotide
  Antisense strand to SEQ ID NO: 2246976
uuucacaagaccgaggaga

SEQ ID NO: 2246978 - RNA, 19 nt, Artificial Sequence
  Description of Artificial Sequence: Synthetic oligonucleotide
  Sense strand starting at position 3548 of SEQ ID NO: 1884190
aucuuaguaucucugaguu

SEQ ID NO: 2246979 - RNA, 19 nt, Artificial Sequence
  Description of Artificial Sequence: Synthetic oligonucleotide
  Antisense strand to SEQ ID NO: 2246978
aacucagagauacuaagau

SEQ ID NO: 2246980 - RNA, 19 nt, Artificial Sequence
  Description of Artificial Sequence: Synthetic oligonucleotide
  Sense strand starting at position 3550 of SEQ ID NO: 1884190
cuuaguaucucugaguuuc

SEQ ID NO: 2246981 - RNA, 19 nt, Artificial Sequence
  Description of Artificial Sequence: Synthetic oligonucleotide
  Antisense strand to SEQ ID NO: 2246980
gaaacucagagauacuaag

SEQ ID NO: 2246982 - RNA, 19 nt, Artificial Sequence
  Description of Artificial Sequence: Synthetic oligonucleotide
  Sense strand starting at position 3759 of SEQ ID NO: 1884190
gaggacucuugcgcucaca

SEQ ID NO: 2246983 - RNA, 19 nt, Artificial Sequence
  Description of Artificial Sequence: Synthetic oligonucleotide
  Antisense strand to SEQ ID NO: 2246982
ugugagcgcaagaguccuc

SEQ ID NO: 2246984 - RNA, 19 nt, Artificial Sequence
  Description of Artificial Sequence: Synthetic oligonucleotide
  Sense strand starting at position 3819 of SEQ ID NO: 1884190
aaacauugccguuagugau

SEQ ID NO: 2246985 - RNA, 19 nt, Artificial Sequence
  Description of Artificial Sequence: Synthetic oligonucleotide
  Antisense strand to SEQ ID NO: 2246984
aucacuaacggcaauguuu

SEQ ID NO: 2246986 - RNA, 19 nt, Artificial Sequence
  Description of Artificial Sequence: Synthetic oligonucleotide
  Sense strand starting at position 3829 of SEQ ID NO: 1884190
guuagugauaagugcugua

SEQ ID NO: 2246987 - RNA, 19 nt, Artificial Sequence
  Description of Artificial Sequence: Synthetic oligonucleotide
  Antisense strand to SEQ ID NO: 2246986
uacagcacuuaucacuaac

SEQ ID NO: 2246988 - RNA, 19 nt, Artificial Sequence
  Description of Artificial Sequence: Synthetic oligonucleotide
  Sense strand starting at position 3856 of SEQ ID NO: 1884190
aaagcagagucuugagauu

SEQ ID NO: 2246989 - RNA, 19 nt, Artificial Sequence
  Description of Artificial Sequence: Synthetic oligonucleotide
  Antisense strand to SEQ ID NO: 2246988
aaucucaagacucugcuuu

SEQ ID NO: 2246990 - RNA, 19 nt, Artificial Sequence
  Description of Artificial Sequence: Synthetic oligonucleotide
  Sense strand starting at position 3862 of SEQ ID NO: 1884190
gagucuugagauugugaug

SEQ ID NO: 2246991 - RNA, 19 nt, Artificial Sequence
  Description of Artificial Sequence: Synthetic oligonucleotide
  Antisense strand to SEQ ID NO: 2246990
caucacaaucucaagacuc

SEQ ID NO: 2246992 - RNA, 19 nt, Artificial Sequence
  Description of Artificial Sequence: Synthetic oligonucleotide
  Sense strand starting at position 3865 of SEQ ID NO: 1884190
ucuugagauugugauggaa

SEQ ID NO: 2246993 - RNA, 19 nt, Artificial Sequence
  Description of Artificial Sequence: Synthetic oligonucleotide
  Antisense strand to SEQ ID NO: 2246992
uuccaucacaaucucaaga

SEQ ID NO: 2246994 - RNA, 19 nt, Artificial Sequence
  Description of Artificial Sequence: Synthetic oligonucleotide
  Sense strand starting at position 8 of SEQ ID NO: 1884192
guucccaauugggugaaua

SEQ ID NO: 2246995 - RNA, 19 nt, Artificial Sequence
  Description of Artificial Sequence: Synthetic oligonucleotide
  Antisense strand to SEQ ID NO: 2246994
uauucacccaauugggaac

SEQ ID NO: 2246996 - RNA, 19 nt, Artificial Sequence
  Description of Artificial Sequence: Synthetic oligonucleotide
  Sense strand starting at position 9 of SEQ ID NO: 1884192
uucccaauugggugaauag

SEQ ID NO: 2246997 - RNA, 19 nt, Artificial Sequence
  Description of Artificial Sequence: Synthetic oligonucleotide
  Antisense strand to SEQ ID NO: 2246996
cuauucacccaauugggaa

SEQ ID NO: 2246998 - RNA, 19 nt, Artificial Sequence
  Description of Artificial Sequence: Synthetic oligonucleotide
  Sense strand starting at position 16 of SEQ ID NO: 1884192
uugggugaauaggugaaua

SEQ ID NO: 2246999 - RNA, 19 nt, Artificial Sequence
  Description of Artificial Sequence: Synthetic oligonucleotide
  Antisense strand to SEQ ID NO: 2246998
uauucaccuauucacccaa

SEQ ID NO: 2247000 - RNA, 19 nt, Artificial Sequence
  Description of Artificial Sequence: Synthetic oligonucleotide
  Sense strand starting at position 161 of SEQ ID NO: 1884192
guuugauaucuuuaccucu

SEQ ID NO: 2247001 - RNA, 19 nt, Artificial Sequence
  Description of Artificial Sequence: Synthetic oligonucleotide
  Antisense strand to SEQ ID NO: 2247000
agagguaaagauaucaaac

SEQ ID NO: 2247002 - RNA, 19 nt, Artificial Sequence
  Description of Artificial Sequence: Synthetic oligonucleotide
  Sense strand starting at position 203 of SEQ ID NO: 1884192
gcuugacugcucuauuagg

SEQ ID NO: 2247003 - RNA, 19 nt, Artificial Sequence
  Description of Artificial Sequence: Synthetic oligonucleotide
  Antisense strand to SEQ ID NO: 2247002
ccuaauagagcagucaagc

SEQ ID NO: 2247004 - RNA, 19 nt, Artificial Sequence
  Description of Artificial Sequence: Synthetic oligonucleotide
  Sense strand starting at position 444 of SEQ ID NO: 1884192
ugggucuucuuaucaacga

SEQ ID NO: 2247005 - RNA, 19 nt, Artificial Sequence
  Description of Artificial Sequence: Synthetic oligonucleotide
  Antisense strand to SEQ ID NO: 2247004
ucguugauaagaagaccca

SEQ ID NO: 2247006 - RNA, 19 nt, Artificial Sequence
  Description of Artificial Sequence: Synthetic oligonucleotide
  Sense strand starting at position 448 of SEQ ID NO: 1884192
ucuucuuaucaacgaaugu

SEQ ID NO: 2247007 - RNA, 19 nt, Artificial Sequence
  Description of Artificial Sequence: Synthetic oligonucleotide
  Antisense strand to SEQ ID NO: 2247006
acauucguugauaagaaga

SEQ ID NO: 2247008 - RNA, 19 nt, Artificial Sequence
  Description of Artificial Sequence: Synthetic oligonucleotide
  Sense strand starting at position 452 of SEQ ID NO: 1884192
cuuaucaacgaaugucagu

SEQ ID NO: 2247009 - RNA, 19 nt, Artificial Sequence
  Description of Artificial Sequence: Synthetic oligonucleotide
  Antisense strand to SEQ ID NO: 2247008
acugacauucguugauaag

SEQ ID NO: 2247010 - RNA, 19 nt, Artificial Sequence
  Description of Artificial Sequence: Synthetic oligonucleotide
  Sense strand starting at position 468 of SEQ ID NO: 1884192
agugucuucucuuuacaaa

SEQ ID NO: 2247011 - RNA, 19 nt, Artificial Sequence
  Description of Artificial Sequence: Synthetic oligonucleotide
  Antisense strand to SEQ ID NO: 2247010
uuuguaaagagaagacacu

SEQ ID NO: 2247012 - RNA, 19 nt, Artificial Sequence
  Description of Artificial Sequence: Synthetic oligonucleotide
  Sense strand starting at position 469 of SEQ ID NO: 1884192
gugucuucucuuuacaaac

SEQ ID NO: 2247013 - RNA, 19 nt, Artificial Sequence
  Description of Artificial Sequence: Synthetic oligonucleotide
  Antisense strand to SEQ ID NO: 2247012
guuuguaaagagaagacac

SEQ ID NO: 2247014 - RNA, 19 nt, Artificial Sequence
  Description of Artificial Sequence: Synthetic oligonucleotide
  Sense strand starting at position 771 of SEQ ID NO: 1884192
cuuuaccuucuuuguuaga

SEQ ID NO: 2247015 - RNA, 19 nt, Artificial Sequence
  Description of Artificial Sequence: Synthetic oligonucleotide
  Antisense strand to SEQ ID NO: 2247014
ucuaacaaagaagguaaag

SEQ ID NO: 2247016 - RNA, 19 nt, Artificial Sequence
  Description of Artificial Sequence: Synthetic oligonucleotide
  Sense strand starting at position 806 of SEQ ID NO: 1884192
agaaacuggucauauuuag

SEQ ID NO: 2247017 - RNA, 19 nt, Artificial Sequence
  Description of Artificial Sequence: Synthetic oligonucleotide
  Antisense strand to SEQ ID NO: 2247016
cuaaauaugaccaguuucu

SEQ ID NO: 2247018 - RNA, 19 nt, Artificial Sequence
  Description of Artificial Sequence: Synthetic oligonucleotide
  Sense strand starting at position 813 of SEQ ID NO: 1884192
ggucauauuuaguagauau

SEQ ID NO: 2247019 - RNA, 19 nt, Artificial Sequence
  Description of Artificial Sequence: Synthetic oligonucleotide
  Antisense strand to SEQ ID NO: 2247018
auaucuacuaaauaugacc

SEQ ID NO: 2247020 - RNA, 19 nt, Artificial Sequence
  Description of Artificial Sequence: Synthetic oligonucleotide
  Sense strand starting at position 824 of SEQ ID NO: 1884192
guagauauauaaccuggau

SEQ ID NO: 2247021 - RNA, 19 nt, Artificial Sequence
  Description of Artificial Sequence: Synthetic oligonucleotide
  Antisense strand to SEQ ID NO: 2247020
auccagguuauauaucuac

SEQ ID NO: 2247022 - RNA, 19 nt, Artificial Sequence
  Description of Artificial Sequence: Synthetic oligonucleotide
  Sense strand starting at position 974 of SEQ ID NO: 1884192
cuguuaacucauugguaaa

SEQ ID NO: 2247023 - RNA, 19 nt, Artificial Sequence
  Description of Artificial Sequence: Synthetic oligonucleotide
  Antisense strand to SEQ ID NO: 2247022
uuuaccaaugaguuaacag

SEQ ID NO: 2247024 - RNA, 19 nt, Artificial Sequence
  Description of Artificial Sequence: Synthetic oligonucleotide
  Sense strand starting at position 976 of SEQ ID NO: 1884192
guuaacucauugguaaaua

SEQ ID NO: 2247025 - RNA, 19 nt, Artificial Sequence
  Description of Artificial Sequence: Synthetic oligonucleotide
  Antisense strand to SEQ ID NO: 2247024
uauuuaccaaugaguuaac

SEQ ID NO: 2247026 - RNA, 19 nt, Artificial Sequence
  Description of Artificial Sequence: Synthetic oligonucleotide
  Sense strand starting at position 1053 of SEQ ID NO: 1884192
gggaauaggcucuacgugu

SEQ ID NO: 2247027 - RNA, 19 nt, Artificial Sequence
  Description of Artificial Sequence: Synthetic oligonucleotide
  Antisense strand to SEQ ID NO: 2247026
acacguagagccuauuccc

SEQ ID NO: 2247028 - RNA, 19 nt, Artificial Sequence
  Description of Artificial Sequence: Synthetic oligonucleotide
  Sense strand starting at position 1093 of SEQ ID NO: 1884192
aaccguauucgugcgugua

SEQ ID NO: 2247029 - RNA, 19 nt, Artificial Sequence
  Description of Artificial Sequence: Synthetic oligonucleotide
  Antisense strand to SEQ ID NO: 2247028
uacacgcacgaauacgguu

SEQ ID NO: 2247030 - RNA, 19 nt, Artificial Sequence
  Description of Artificial Sequence: Synthetic oligonucleotide
  Sense strand starting at position 1210 of SEQ ID NO: 1884192
ggcuuccuccucuauaagu

SEQ ID NO: 2247031 - RNA, 19 nt, Artificial Sequence
  Description of Artificial Sequence: Synthetic oligonucleotide
  Antisense strand to SEQ ID NO: 2247030
acuuauagaggaggaagcc

SEQ ID NO: 2247032 - RNA, 19 nt, Artificial Sequence
  Description of Artificial Sequence: Synthetic oligonucleotide
  Sense strand starting at position 1218 of SEQ ID NO: 1884192
ccucuauaaguugggauua

SEQ ID NO: 2247033 - RNA, 19 nt, Artificial Sequence
  Description of Artificial Sequence: Synthetic oligonucleotide
  Antisense strand to SEQ ID NO: 2247032
uaaucccaacuuauagagg

SEQ ID NO: 2247034 - RNA, 19 nt, Artificial Sequence
  Description of Artificial Sequence: Synthetic oligonucleotide
  Sense strand starting at position 1254 of SEQ ID NO: 1884192
acagguuugccaugaaacu

SEQ ID NO: 2247035 - RNA, 19 nt, Artificial Sequence
  Description of Artificial Sequence: Synthetic oligonucleotide
  Antisense strand to SEQ ID NO: 2247034
aguuucauggcaaaccugu

SEQ ID NO: 2247036 - RNA, 19 nt, Artificial Sequence
  Description of Artificial Sequence: Synthetic oligonucleotide
  Sense strand starting at position 1255 of SEQ ID NO: 1884192
cagguuugccaugaaacuc

SEQ ID NO: 2247037 - RNA, 19 nt, Artificial Sequence
  Description of Artificial Sequence: Synthetic oligonucleotide
  Antisense strand to SEQ ID NO: 2247036
gaguuucauggcaaaccug

SEQ ID NO: 2247038 - RNA, 19 nt, Artificial Sequence
  Description of Artificial Sequence: Synthetic oligonucleotide
  Sense strand starting at position 1352 of SEQ ID NO: 1884192
cccugugaccaagacaguu

SEQ ID NO: 2247039 - RNA, 19 nt, Artificial Sequence
  Description of Artificial Sequence: Synthetic oligonucleotide
  Antisense strand to SEQ ID NO: 2247038
aacugucuuggucacaggg

SEQ ID NO: 2247040 - RNA, 19 nt, Artificial Sequence
  Description of Artificial Sequence: Synthetic oligonucleotide
  Sense strand starting at position 2196 of SEQ ID NO: 1884192
gguuguuuacaucauaaca

SEQ ID NO: 2247041 - RNA, 19 nt, Artificial Sequence
  Description of Artificial Sequence: Synthetic oligonucleotide
  Antisense strand to SEQ ID NO: 2247040
uguuaugauguaaacaacc

SEQ ID NO: 2247042 - RNA, 19 nt, Artificial Sequence
  Description of Artificial Sequence: Synthetic oligonucleotide
  Sense strand starting at position 2478 of SEQ ID NO: 1884192
gugguaaagaagcauuacu

SEQ ID NO: 2247043 - RNA, 19 nt, Artificial Sequence
  Description of Artificial Sequence: Synthetic oligonucleotide
  Antisense strand to SEQ ID NO: 2247042
aguaaugcuucuuuaccac

SEQ ID NO: 2247044 - RNA, 19 nt, Artificial Sequence
  Description of Artificial Sequence: Synthetic oligonucleotide
  Sense strand starting at position 2536 of SEQ ID NO: 1884192
ucuaguggacuuugagauc

SEQ ID NO: 2247045 - RNA, 19 nt, Artificial Sequence
  Description of Artificial Sequence: Synthetic oligonucleotide
  Antisense strand to SEQ ID NO: 2247044
gaucucaaaguccacuaga

SEQ ID NO: 2247046 - RNA, 19 nt, Artificial Sequence
  Description of Artificial Sequence: Synthetic oligonucleotide
  Sense strand starting at position 2593 of SEQ ID NO: 1884192
auguguauucuagaagcca

SEQ ID NO: 2247047 - RNA, 19 nt, Artificial Sequence
  Description of Artificial Sequence: Synthetic oligonucleotide
  Antisense strand to SEQ ID NO: 2247046
uggcuucuagaauacacau

SEQ ID NO: 2247048 - RNA, 19 nt, Artificial Sequence
  Description of Artificial Sequence: Synthetic oligonucleotide
  Sense strand starting at position 2700 of SEQ ID NO: 1884192
guuaacuucuuacuaaagu

SEQ ID NO: 2247049 - RNA, 19 nt, Artificial Sequence
  Description of Artificial Sequence: Synthetic oligonucleotide
  Antisense strand to SEQ ID NO: 2247048
acuuuaguaagaaguuaac

SEQ ID NO: 2247050 - RNA, 19 nt, Artificial Sequence
  Description of Artificial Sequence: Synthetic oligonucleotide
  Sense strand starting at position 2722 of SEQ ID NO: 1884192
agaugacucuaaguggcaa

SEQ ID NO: 2247051 - RNA, 19 nt, Artificial Sequence
  Description of Artificial Sequence: Synthetic oligonucleotide
  Antisense strand to SEQ ID NO: 2247050
uugccacuuagagucaucu

SEQ ID NO: 2247052 - RNA, 19 nt, Artificial Sequence
  Description of Artificial Sequence: Synthetic oligonucleotide
  Sense strand starting at position 2946 of SEQ ID NO: 1884192
cguauaguccuuuaaagaa

SEQ ID NO: 2247053 - RNA, 19 nt, Artificial Sequence
  Description of Artificial Sequence: Synthetic oligonucleotide
  Antisense strand to SEQ ID NO: 2247052
uucuuuaaaggacuauacg

SEQ ID NO: 2247054 - RNA, 19 nt, Artificial Sequence
  Description of Artificial Sequence: Synthetic oligonucleotide
  Sense strand starting at position 3071 of SEQ ID NO: 1884192
gcaguaggauuacucuuua

SEQ ID NO: 2247055 - RNA, 19 nt, Artificial Sequence
  Description of Artificial Sequence: Synthetic oligonucleotide
  Antisense strand to SEQ ID NO: 2247054
uaaagaguaauccuacugc

SEQ ID NO: 2247056 - RNA, 19 nt, Artificial Sequence
  Description of Artificial Sequence: Synthetic oligonucleotide
  Sense strand starting at position 3076 of SEQ ID NO: 1884192
aggauuacucuuuaugcuu

SEQ ID NO: 2247057 - RNA, 19 nt, Artificial Sequence
  Description of Artificial Sequence: Synthetic oligonucleotide
  Antisense strand to SEQ ID NO: 2247056
aagcauaaagaguaauccu

SEQ ID NO: 2247058 - RNA, 19 nt, Artificial Sequence
  Description of Artificial Sequence: Synthetic oligonucleotide
  Sense strand starting at position 3164 of SEQ ID NO: 1884192
auaugcauuggaggauauu

SEQ ID NO: 2247059 - RNA, 19 nt, Artificial Sequence
  Description of Artificial Sequence: Synthetic oligonucleotide
  Antisense strand to SEQ ID NO: 2247058
aauauccuccaaugcauau

SEQ ID NO: 2247060 - RNA, 19 nt, Artificial Sequence
  Description of Artificial Sequence: Synthetic oligonucleotide
  Sense strand starting at position 3210 of SEQ ID NO: 1884192
aagacuugguauguuccua

SEQ ID NO: 2247061 - RNA, 19 nt, Artificial Sequence
  Description of Artificial Sequence: Synthetic oligonucleotide
  Antisense strand to SEQ ID NO: 2247060
uaggaacauaccaagucuu

SEQ ID NO: 2247062 - RNA, 19 nt, Artificial Sequence
  Description of Artificial Sequence: Synthetic oligonucleotide
  Sense strand starting at position 3287 of SEQ ID NO: 1884192
gcuuaaaugugauugguga

SEQ ID NO: 2247063 - RNA, 19 nt, Artificial Sequence
  Description of Artificial Sequence: Synthetic oligonucleotide
  Antisense strand to SEQ ID NO: 2247062
ucaccaaucacauuuaagc

SEQ ID NO: 2247064 - RNA, 19 nt, Artificial Sequence
  Description of Artificial Sequence: Synthetic oligonucleotide
  Sense strand starting at position 3294 of SEQ ID NO: 1884192
ugugauuggugaccuauca

SEQ ID NO: 2247065 - RNA, 19 nt, Artificial Sequence
  Description of Artificial Sequence: Synthetic oligonucleotide
  Antisense strand to SEQ ID NO: 2247064
ugauaggucaccaaucaca

SEQ ID NO: 2247066 - RNA, 19 nt, Artificial Sequence
  Description of Artificial Sequence: Synthetic oligonucleotide
  Sense strand starting at position 3321 of SEQ ID NO: 1884192
guuaaucaguauuccugaa

SEQ ID NO: 2247067 - RNA, 19 nt, Artificial Sequence
  Description of Artificial Sequence: Synthetic oligonucleotide
  Antisense strand to SEQ ID NO: 2247066
uucaggaauacugauuaac

SEQ ID NO: 2247068 - RNA, 19 nt, Artificial Sequence
  Description of Artificial Sequence: Synthetic oligonucleotide
  Sense strand starting at position 3369 of SEQ ID NO: 1884192
ugacauauguuagcaauga

SEQ ID NO: 2247069 - RNA, 19 nt, Artificial Sequence
  Description of Artificial Sequence: Synthetic oligonucleotide
  Antisense strand to SEQ ID NO: 2247068
ucauugcuaacauauguca

SEQ ID NO: 2247070 - RNA, 19 nt, Artificial Sequence
  Description of Artificial Sequence: Synthetic oligonucleotide
  Sense strand starting at position 3373 of SEQ ID NO: 1884192
auauguuagcaaugaagga

SEQ ID NO: 2247071 - RNA, 19 nt, Artificial Sequence
  Description of Artificial Sequence: Synthetic oligonucleotide
  Antisense strand to SEQ ID NO: 2247070
uccuucauugcuaacauau

SEQ ID NO: 2247072 - RNA, 19 nt, Artificial Sequence
  Description of Artificial Sequence: Synthetic oligonucleotide
  Sense strand starting at position 3394 of SEQ ID NO: 1884192
gggucacaaacaugugaua

SEQ ID NO: 2247073 - RNA, 19 nt, Artificial Sequence
  Description of Artificial Sequence: Synthetic oligonucleotide
  Antisense strand to SEQ ID NO: 2247072
uaucacauguuugugaccc

SEQ ID NO: 2247074 - RNA, 19 nt, Artificial Sequence
  Description of Artificial Sequence: Synthetic oligonucleotide
  Sense strand starting at position 149 of SEQ ID NO: 1884191
uagcgauuaagcgcaguga

SEQ ID NO: 2247075 - RNA, 19 nt, Artificial Sequence
  Description of Artificial Sequence: Synthetic oligonucleotide
  Antisense strand to SEQ ID NO: 2247074
ucacugcgcuuaaucgcua

SEQ ID NO: 2247076 - RNA, 19 nt, Artificial Sequence
  Description of Artificial Sequence: Synthetic oligonucleotide
  Sense strand starting at position 151 of SEQ ID NO: 1884191
gcgauuaagcgcagugaag

SEQ ID NO: 2247077 - RNA, 19 nt, Artificial Sequence
  Description of Artificial Sequence: Synthetic oligonucleotide
  Antisense strand to SEQ ID NO: 2247076
cuucacugcgcuuaaucgc

SEQ ID NO: 2247078 - RNA, 19 nt, Artificial Sequence
  Description of Artificial Sequence: Synthetic oligonucleotide
  Sense strand starting at position 153 of SEQ ID NO: 1884191
gauuaagcgcagugaagaa

SEQ ID NO: 2247079 - RNA, 19 nt, Artificial Sequence
  Description of Artificial Sequence: Synthetic oligonucleotide
  Antisense strand to SEQ ID NO: 2247078
uucuucacugcgcuuaauc

SEQ ID NO: 2247080 - RNA, 19 nt, Artificial Sequence
  Description of Artificial Sequence: Synthetic oligonucleotide
  Sense strand starting at position 215 of SEQ ID NO: 1884191
agauaaugaaggcgaucaa

SEQ ID NO: 2247081 - RNA, 19 nt, Artificial Sequence
  Description of Artificial Sequence: Synthetic oligonucleotide
  Antisense strand to SEQ ID NO: 2247080
uugaucgccuucauuaucu

SEQ ID NO: 2247082 - RNA, 19 nt, Artificial Sequence
  Description of Artificial Sequence: Synthetic oligonucleotide
  Sense strand starting at position 296 of SEQ ID NO: 1884191
gucuuacuaaugugaggug

SEQ ID NO: 2247083 - RNA, 19 nt, Artificial Sequence
  Description of Artificial Sequence: Synthetic oligonucleotide
  Antisense strand to SEQ ID NO: 2247082
caccucacauuaguaagac

SEQ ID NO: 2247084 - RNA, 19 nt, Artificial Sequence
  Description of Artificial Sequence: Synthetic oligonucleotide
  Sense strand starting at position 301 of SEQ ID NO: 1884191
acuaaugugaggugggaau

SEQ ID NO: 2247085 - RNA, 19 nt, Artificial Sequence
  Description of Artificial Sequence: Synthetic oligonucleotide
  Antisense strand to SEQ ID NO: 2247084
auucccaccucacauuagu

SEQ ID NO: 2247086 - RNA, 19 nt, Artificial Sequence
  Description of Artificial Sequence: Synthetic oligonucleotide
  Sense strand starting at position 312 of SEQ ID NO: 1884191
gugggaaugagucaaguua

SEQ ID NO: 2247087 - RNA, 19 nt, Artificial Sequence
  Description of Artificial Sequence: Synthetic oligonucleotide
  Antisense strand to SEQ ID NO: 2247086
uaacuugacucauucccac

SEQ ID NO: 2247088 - RNA, 19 nt, Artificial Sequence
  Description of Artificial Sequence: Synthetic oligonucleotide
  Sense strand starting at position 320 of SEQ ID NO: 1884191
gagucaaguuaaucuuuga

SEQ ID NO: 2247089 - RNA, 19 nt, Artificial Sequence
  Description of Artificial Sequence: Synthetic oligonucleotide
  Antisense strand to SEQ ID NO: 2247088
ucaaagauuaacuugacuc

SEQ ID NO: 2247090 - RNA, 19 nt, Artificial Sequence
  Description of Artificial Sequence: Synthetic oligonucleotide
  Sense strand starting at position 323 of SEQ ID NO: 1884191
ucaaguuaaucuuugagag

SEQ ID NO: 2247091 - RNA, 19 nt, Artificial Sequence
  Description of Artificial Sequence: Synthetic oligonucleotide
  Antisense strand to SEQ ID NO: 2247090
cucucaaagauuaacuuga

SEQ ID NO: 2247092 - RNA, 19 nt, Artificial Sequence
  Description of Artificial Sequence: Synthetic oligonucleotide
  Sense strand starting at position 324 of SEQ ID NO: 1884191
caaguuaaucuuugagagu

SEQ ID NO: 2247093 - RNA, 19 nt, Artificial Sequence
  Description of Artificial Sequence: Synthetic oligonucleotide
  Antisense strand to SEQ ID NO: 2247092
acucucaaagauuaacuug

SEQ ID NO: 2247094 - RNA, 19 nt, Artificial Sequence
  Description of Artificial Sequence: Synthetic oligonucleotide
  Sense strand starting at position 333 of SEQ ID NO: 1884191
cuuugagagugaucacauu

SEQ ID NO: 2247095 - RNA, 19 nt, Artificial Sequence
  Description of Artificial Sequence: Synthetic oligonucleotide
  Antisense strand to SEQ ID NO: 2247094
aaugugaucacucucaaag

SEQ ID NO: 2247096 - RNA, 19 nt, Artificial Sequence
  Description of Artificial Sequence: Synthetic oligonucleotide
  Sense strand starting at position 498 of SEQ ID NO: 1884191
acgcaauuacuaggaggau

SEQ ID NO: 2247097 - RNA, 19 nt, Artificial Sequence
  Description of Artificial Sequence: Synthetic oligonucleotide
  Antisense strand to SEQ ID NO: 2247096
auccuccuaguaauugcgu

SEQ ID NO: 2247098 - RNA, 19 nt, Artificial Sequence
  Description of Artificial Sequence: Synthetic oligonucleotide
  Sense strand starting at position 596 of SEQ ID NO: 1884191
uccucaaccgguuaaugua

SEQ ID NO: 2247099 - RNA, 19 nt, Artificial Sequence
  Description of Artificial Sequence: Synthetic oligonucleotide
  Antisense strand to SEQ ID NO: 2247098
uacauuaaccgguugagga

SEQ ID NO: 2247100 - RNA, 19 nt, Artificial Sequence
  Description of Artificial Sequence: Synthetic oligonucleotide
  Sense strand starting at position 631 of SEQ ID NO: 1884191
uaacucuuucgagaacgca

SEQ ID NO: 2247101 - RNA, 19 nt, Artificial Sequence
  Description of Artificial Sequence: Synthetic oligonucleotide
  Antisense strand to SEQ ID NO: 2247100
ugcguucucgaaagaguua

SEQ ID NO: 2247102 - RNA, 19 nt, Artificial Sequence
  Description of Artificial Sequence: Synthetic oligonucleotide
  Sense strand starting at position 1541 of SEQ ID NO: 1884191
cugcgucagcuucuucgaa

SEQ ID NO: 2247103 - RNA, 19 nt, Artificial Sequence
  Description of Artificial Sequence: Synthetic oligonucleotide
  Antisense strand to SEQ ID NO: 2247102
uucgaagaagcugacgcag

SEQ ID NO: 2247104 - RNA, 19 nt, Artificial Sequence
  Description of Artificial Sequence: Synthetic oligonucleotide
  Sense strand starting at position 2440 of SEQ ID NO: 1884191
cgaccuuggcaaggagaaa

SEQ ID NO: 2247105 - RNA, 19 nt, Artificial Sequence
  Description of Artificial Sequence: Synthetic oligonucleotide
  Antisense strand to SEQ ID NO: 2247104
uuucuccuugccaaggucg

SEQ ID NO: 2247106 - RNA, 19 nt, Artificial Sequence
  Description of Artificial Sequence: Synthetic oligonucleotide
  Sense strand starting at position 2478 of SEQ ID NO: 1884191
gagacuucgaaucguacag

SEQ ID NO: 2247107 - RNA, 19 nt, Artificial Sequence
  Description of Artificial Sequence: Synthetic oligonucleotide
  Antisense strand to SEQ ID NO: 2247106
cuguacgauucgaagucuc

SEQ ID NO: 2247108 - RNA, 19 nt, Artificial Sequence
  Description of Artificial Sequence: Synthetic oligonucleotide
  Sense strand starting at position 2534 of SEQ ID NO: 1884191
aagcgugcccuugaauaga

SEQ ID NO: 2247109 - RNA, 19 nt, Artificial Sequence
  Description of Artificial Sequence: Synthetic oligonucleotide
  Antisense strand to SEQ ID NO: 2247108
ucuauucaagggcacgcuu

SEQ ID NO: 2247110 - RNA, 19 nt, Artificial Sequence
  Description of Artificial Sequence: Synthetic oligonucleotide
  Sense strand starting at position 2627 of SEQ ID NO: 1884191
acccgagagcucgcaguuu

SEQ ID NO: 2247111 - RNA, 19 nt, Artificial Sequence
  Description of Artificial Sequence: Synthetic oligonucleotide
  Antisense strand to SEQ ID NO: 2247110
aaacugcgagcucucgggu

SEQ ID NO: 2247112 - RNA, 19 nt, Artificial Sequence
  Description of Artificial Sequence: Synthetic oligonucleotide
  Sense strand starting at position 2791 of SEQ ID NO: 1884191
uucucagaguccucaauag

SEQ ID NO: 2247113 - RNA, 19 nt, Artificial Sequence
  Description of Artificial Sequence: Synthetic oligonucleotide
  Antisense strand to SEQ ID NO: 2247112
cuauugaggacucugagaa

SEQ ID NO: 2247114 - RNA, 19 nt, Artificial Sequence
  Description of Artificial Sequence: Synthetic oligonucleotide
  Sense strand starting at position 2885 of SEQ ID NO: 1884191
aaaugugucuguccuuuga

SEQ ID NO: 2247115 - RNA, 19 nt, Artificial Sequence
  Description of Artificial Sequence: Synthetic oligonucleotide
  Antisense strand to SEQ ID NO: 2247114
ucaaaggacagacacauuu

SEQ ID NO: 2247116 - RNA, 19 nt, Artificial Sequence
  Description of Artificial Sequence: Synthetic oligonucleotide
  Sense strand starting at position 2961 of SEQ ID NO: 1884191
ugucaaacuuuguuggacu

SEQ ID NO: 2247117 - RNA, 19 nt, Artificial Sequence
  Description of Artificial Sequence: Synthetic oligonucleotide
  Antisense strand to SEQ ID NO: 2247116
aguccaacaaaguuugaca

SEQ ID NO: 2247118 - RNA, 19 nt, Artificial Sequence
  Description of Artificial Sequence: Synthetic oligonucleotide
  Sense strand starting at position 3098 of SEQ ID NO: 1884191
ccucucugaucuguggauu

SEQ ID NO: 2247119 - RNA, 19 nt, Artificial Sequence
  Description of Artificial Sequence: Synthetic oligonucleotide
  Antisense strand to SEQ ID NO: 2247118
aauccacagaucagagagg

SEQ ID NO: 2247120 - RNA, 19 nt, Artificial Sequence
  Description of Artificial Sequence: Synthetic oligonucleotide
  Sense strand starting at position 3106 of SEQ ID NO: 1884191
aucuguggauuccuuaaag

SEQ ID NO: 2247121 - RNA, 19 nt, Artificial Sequence
  Description of Artificial Sequence: Synthetic oligonucleotide
  Antisense strand to SEQ ID NO: 2247120
cuuuaaggaauccacagau

SEQ ID NO: 2247122 - RNA, 19 nt, Artificial Sequence
  Description of Artificial Sequence: Synthetic oligonucleotide
  Sense strand starting at position 3137 of SEQ ID NO: 1884191
uuaacagagcucuggugau

SEQ ID NO: 2247123 - RNA, 19 nt, Artificial Sequence
  Description of Artificial Sequence: Synthetic oligonucleotide
  Antisense strand to SEQ ID NO: 2247122
aucaccagagcucuguuaa

SEQ ID NO: 2247124 - RNA, 19 nt, Artificial Sequence
  Description of Artificial Sequence: Synthetic oligonucleotide
  Sense strand starting at position 3238 of SEQ ID NO: 1884191
ucaagaggcucuccugaua

SEQ ID NO: 2247125 - RNA, 19 nt, Artificial Sequence
  Description of Artificial Sequence: Synthetic oligonucleotide
  Antisense strand to SEQ ID NO: 2247124
uaucaggagagccucuuga

SEQ ID NO: 2247126 - RNA, 19 nt, Artificial Sequence
  Description of Artificial Sequence: Synthetic oligonucleotide
  Sense strand starting at position 3241 of SEQ ID NO: 1884191
agaggcucuccugauaggu

SEQ ID NO: 2247127 - RNA, 19 nt, Artificial Sequence
  Description of Artificial Sequence: Synthetic oligonucleotide
  Antisense strand to SEQ ID NO: 2247126
accuaucaggagagccucu

SEQ ID NO: 2247128 - RNA, 19 nt, Artificial Sequence
  Description of Artificial Sequence: Synthetic oligonucleotide
  Sense strand starting at position 3249 of SEQ ID NO: 1884191
uccugauagguccgcaaac

SEQ ID NO: 2247129 - RNA, 19 nt, Artificial Sequence
  Description of Artificial Sequence: Synthetic oligonucleotide
  Antisense strand to SEQ ID NO: 2247128
guuugcggaccuaucagga

SEQ ID NO: 2247130 - RNA, 19 nt, Artificial Sequence
  Description of Artificial Sequence: Synthetic oligonucleotide
  Sense strand starting at position 3251 of SEQ ID NO: 1884191
cugauagguccgcaaaccu

SEQ ID NO: 2247131 - RNA, 19 nt, Artificial Sequence
  Description of Artificial Sequence: Synthetic oligonucleotide
  Antisense strand to SEQ ID NO: 2247130
agguuugcggaccuaucag

SEQ ID NO: 2247132 - RNA, 19 nt, Artificial Sequence
  Description of Artificial Sequence: Synthetic oligonucleotide
  Sense strand starting at position 3386 of SEQ ID NO: 1884191
uuaaguaacccuugaggaa

SEQ ID NO: 2247133 - RNA, 19 nt, Artificial Sequence
  Description of Artificial Sequence: Synthetic oligonucleotide
  Antisense strand to SEQ ID NO: 2247132
uuccucaaggguuacuuaa

SEQ ID NO: 2247134 - RNA, 19 nt, Artificial Sequence
  Description of Artificial Sequence: Synthetic oligonucleotide
  Sense strand starting at position 3421 of SEQ ID NO: 1884191
agagauguuccuuaagcca

SEQ ID NO: 2247135 - RNA, 19 nt, Artificial Sequence
  Description of Artificial Sequence: Synthetic oligonucleotide
  Antisense strand to SEQ ID NO: 2247134
uggcuuaaggaacaucucu

SEQ ID NO: 2247136 - RNA, 19 nt, Artificial Sequence
  Description of Artificial Sequence: Synthetic oligonucleotide
  Sense strand starting at position 3507 of SEQ ID NO: 1884191
agcuaauuccuaggcuaag

SEQ ID NO: 2247137 - RNA, 19 nt, Artificial Sequence
  Description of Artificial Sequence: Synthetic oligonucleotide
  Antisense strand to SEQ ID NO: 2247136
cuuagccuaggaauuagcu

SEQ ID NO: 2247138 - RNA, 19 nt, Artificial Sequence
  Description of Artificial Sequence: Synthetic oligonucleotide
  Sense strand starting at position 3508 of SEQ ID NO: 1884191
gcuaauuccuaggcuaaga

SEQ ID NO: 2247139 - RNA, 19 nt, Artificial Sequence
  Description of Artificial Sequence: Synthetic oligonucleotide
  Antisense strand to SEQ ID NO: 2247138
ucuuagccuaggaauuagc

SEQ ID NO: 2247140 - RNA, 19 nt, Artificial Sequence
  Description of Artificial Sequence: Synthetic oligonucleotide
  Sense strand starting at position 3552 of SEQ ID NO: 1884191
ggguuugucgcugucugau

SEQ ID NO: 2247141 - RNA, 19 nt, Artificial Sequence
  Description of Artificial Sequence: Synthetic oligonucleotide
  Antisense strand to SEQ ID NO: 2247140
aucagacagcgacaaaccc

SEQ ID NO: 2247142 - RNA, 19 nt, Artificial Sequence
  Description of Artificial Sequence: Synthetic oligonucleotide
  Sense strand starting at position 3665 of SEQ ID NO: 1884191
cuuugaacucugcaaguga

SEQ ID NO: 2247143 - RNA, 19 nt, Artificial Sequence
  Description of Artificial Sequence: Synthetic oligonucleotide
  Antisense strand to SEQ ID NO: 2247142
ucacuugcagaguucaaag

SEQ ID NO: 2247144 - RNA, 19 nt, Artificial Sequence
  Description of Artificial Sequence: Synthetic oligonucleotide
  Sense strand starting at position 3678 of SEQ ID NO: 1884191
aagugaauccagcgaaagu

SEQ ID NO: 2247145 - RNA, 19 nt, Artificial Sequence
  Description of Artificial Sequence: Synthetic oligonucleotide
  Antisense strand to SEQ ID NO: 2247144
acuuucgcuggauucacuu

SEQ ID NO: 2247146 - RNA, 19 nt, Artificial Sequence
  Description of Artificial Sequence: Synthetic oligonucleotide
  Sense strand starting at position 3679 of SEQ ID NO: 1884191
agugaauccagcgaaagua

SEQ ID NO: 2247147 - RNA, 19 nt, Artificial Sequence
  Description of Artificial Sequence: Synthetic oligonucleotide
  Antisense strand to SEQ ID NO: 2247146
uacuuucgcuggauucacu

SEQ ID NO: 2247148 - RNA, 19 nt, Artificial Sequence
  Description of Artificial Sequence: Synthetic oligonucleotide
  Sense strand starting at position 3733 of SEQ ID NO: 1884191
gcagcaaauuaguuacaag

SEQ ID NO: 2247149 - RNA, 19 nt, Artificial Sequence
  Description of Artificial Sequence: Synthetic oligonucleotide
  Antisense strand to SEQ ID NO: 2247148
cuuguaacuaauuugcugc

SEQ ID NO: 2247150 - RNA, 19 nt, Artificial Sequence
  Description of Artificial Sequence: Synthetic oligonucleotide
  Sense strand starting at position 3753 of SEQ ID NO: 1884191
guugaaagaacuggacguu

SEQ ID NO: 2247151 - RNA, 19 nt, Artificial Sequence
  Description of Artificial Sequence: Synthetic oligonucleotide
  Antisense strand to SEQ ID NO: 2247150
aacguccaguucuuucaac

SEQ ID NO: 2247152 - RNA, 19 nt, Artificial Sequence
  Description of Artificial Sequence: Synthetic oligonucleotide
  Sense strand starting at position 3874 of SEQ ID NO: 1884191
gggcuuguccaauaggagu

SEQ ID NO: 2247153 - RNA, 19 nt, Artificial Sequence
  Description of Artificial Sequence: Synthetic oligonucleotide
  Antisense strand to SEQ ID NO: 2247152
acuccuauuggacaagccc

SEQ ID NO: 2247154 - RNA, 19 nt, Artificial Sequence
  Description of Artificial Sequence: Synthetic oligonucleotide
  Sense strand starting at position 130 of SEQ ID NO: 1884193
auuacugauugagcccaau

SEQ ID NO: 2247155 - RNA, 19 nt, Artificial Sequence
  Description of Artificial Sequence: Synthetic oligonucleotide
  Antisense strand to SEQ ID NO: 2247154
auugggcucaaucaguaau

SEQ ID NO: 2247156 - RNA, 19 nt, Artificial Sequence
  Description of Artificial Sequence: Synthetic oligonucleotide
  Sense strand starting at position 321 of SEQ ID NO: 1884193
auggguacugcuugagaug

SEQ ID NO: 2247157 - RNA, 19 nt, Artificial Sequence
  Description of Artificial Sequence: Synthetic oligonucleotide
  Antisense strand to SEQ ID NO: 2247156
caucucaagcaguacccau

SEQ ID NO: 2247158 - RNA, 19 nt, Artificial Sequence
  Description of Artificial Sequence: Synthetic oligonucleotide
  Sense strand starting at position 322 of SEQ ID NO: 1884193
uggguacugcuugagauga

SEQ ID NO: 2247159 - RNA, 19 nt, Artificial Sequence
  Description of Artificial Sequence: Synthetic oligonucleotide
  Antisense strand to SEQ ID NO: 2247158
ucaucucaagcaguaccca

SEQ ID NO: 2247160 - RNA, 19 nt, Artificial Sequence
  Description of Artificial Sequence: Synthetic oligonucleotide
  Sense strand starting at position 504 of SEQ ID NO: 1884193
gcuauaugugcuuaguaag

SEQ ID NO: 2247161 - RNA, 19 nt, Artificial Sequence
  Description of Artificial Sequence: Synthetic oligonucleotide
  Antisense strand to SEQ ID NO: 2247160
cuuacuaagcacauauagc

SEQ ID NO: 2247162 - RNA, 19 nt, Artificial Sequence
  Description of Artificial Sequence: Synthetic oligonucleotide
  Sense strand starting at position 640 of SEQ ID NO: 1884193
gcagucacugaucaguaga

SEQ ID NO: 2247163 - RNA, 19 nt, Artificial Sequence
  Description of Artificial Sequence: Synthetic oligonucleotide
  Antisense strand to SEQ ID NO: 2247162
ucuacugaucagugacugc

SEQ ID NO: 2247164 - RNA, 19 nt, Artificial Sequence
  Description of Artificial Sequence: Synthetic oligonucleotide
  Sense strand starting at position 642 of SEQ ID NO: 1884193
agucacugaucaguagagu

SEQ ID NO: 2247165 - RNA, 19 nt, Artificial Sequence
  Description of Artificial Sequence: Synthetic oligonucleotide
  Antisense strand to SEQ ID NO: 2247164
acucuacugaucagugacu

SEQ ID NO: 2247166 - RNA, 19 nt, Artificial Sequence
  Description of Artificial Sequence: Synthetic oligonucleotide
  Sense strand starting at position 643 of SEQ ID NO: 1884193
gucacugaucaguagagua

SEQ ID NO: 2247167 - RNA, 19 nt, Artificial Sequence
  Description of Artificial Sequence: Synthetic oligonucleotide
  Antisense strand to SEQ ID NO: 2247166
uacucuacugaucagugac

SEQ ID NO: 2247168 - RNA, 19 nt, Artificial Sequence
  Description of Artificial Sequence: Synthetic oligonucleotide
  Sense strand starting at position 648 of SEQ ID NO: 1884193
ugaucaguagaguauaggu

SEQ ID NO: 2247169 - RNA, 19 nt, Artificial Sequence
  Description of Artificial Sequence: Synthetic oligonucleotide
  Antisense strand to SEQ ID NO: 2247168
accuauacucuacugauca

SEQ ID NO: 2247170 - RNA, 19 nt, Artificial Sequence
  Description of Artificial Sequence: Synthetic oligonucleotide
  Sense strand starting at position 746 of SEQ ID NO: 1884193
aagugaacaugaguuauga

SEQ ID NO: 2247171 - RNA, 19 nt, Artificial Sequence
  Description of Artificial Sequence: Synthetic oligonucleotide
  Antisense strand to SEQ ID NO: 2247170
ucauaacucauguucacuu

SEQ ID NO: 2247172 - RNA, 19 nt, Artificial Sequence
  Description of Artificial Sequence: Synthetic oligonucleotide
  Sense strand starting at position 830 of SEQ ID NO: 1884193
cugagaaucuuuguaaacu

SEQ ID NO: 2247173 - RNA, 19 nt, Artificial Sequence
  Description of Artificial Sequence: Synthetic oligonucleotide
  Antisense strand to SEQ ID NO: 2247172
aguuuacaaagauucucag

SEQ ID NO: 2247174 - RNA, 19 nt, Artificial Sequence
  Description of Artificial Sequence: Synthetic oligonucleotide
  Sense strand starting at position 1309 of SEQ ID NO: 1884193
gaaauaaugccagguagaa

SEQ ID NO: 2247175 - RNA, 19 nt, Artificial Sequence
  Description of Artificial Sequence: Synthetic oligonucleotide
  Antisense strand to SEQ ID NO: 2247174
uucuaccuggcauuauuuc

SEQ ID NO: 2247176 - RNA, 19 nt, Artificial Sequence
  Description of Artificial Sequence: Synthetic oligonucleotide
  Sense strand starting at position 1380 of SEQ ID NO: 1884193
gcaggaagaucauaucaaa

SEQ ID NO: 2247177 - RNA, 19 nt, Artificial Sequence
  Description of Artificial Sequence: Synthetic oligonucleotide
  Antisense strand to SEQ ID NO: 2247176
uuugauaugaucuuccugc

SEQ ID NO: 2247178 - RNA, 19 nt, Artificial Sequence
  Description of Artificial Sequence: Synthetic oligonucleotide
  Sense strand starting at position 1383 of SEQ ID NO: 1884193
ggaagaucauaucaaauca

SEQ ID NO: 2247179 - RNA, 19 nt, Artificial Sequence
  Description of Artificial Sequence: Synthetic oligonucleotide
  Antisense strand to SEQ ID NO: 2247178
ugauuugauaugaucuucc

SEQ ID NO: 2247180 - RNA, 19 nt, Artificial Sequence
  Description of Artificial Sequence: Synthetic oligonucleotide
  Sense strand starting at position 1526 of SEQ ID NO: 1884193
gaugaaacccuguguguac

SEQ ID NO: 2247181 - RNA, 19 nt, Artificial Sequence
  Description of Artificial Sequence: Synthetic oligonucleotide
  Antisense strand to SEQ ID NO: 2247180
guacacacaggguuucauc

SEQ ID NO: 2247182 - RNA, 19 nt, Artificial Sequence
  Description of Artificial Sequence: Synthetic oligonucleotide
  Sense strand starting at position 1612 of SEQ ID NO: 1884193
gugagaggaucguugagcu

SEQ ID NO: 2247183 - RNA, 19 nt, Artificial Sequence
  Description of Artificial Sequence: Synthetic oligonucleotide
  Antisense strand to SEQ ID NO: 2247182
agcucaacgauccucucac

SEQ ID NO: 2247184 - RNA, 19 nt, Artificial Sequence
  Description of Artificial Sequence: Synthetic oligonucleotide
  Sense strand starting at position 1678 of SEQ ID NO: 1884193
cugcauucuccugggcuaa

SEQ ID NO: 2247185 - RNA, 19 nt, Artificial Sequence
  Description of Artificial Sequence: Synthetic oligonucleotide
  Antisense strand to SEQ ID NO: 2247184
uuagcccaggagaaugcag

SEQ ID NO: 2247186 - RNA, 19 nt, Artificial Sequence
  Description of Artificial Sequence: Synthetic oligonucleotide
  Sense strand starting at position 1679 of SEQ ID NO: 1884193
ugcauucuccugggcuaaa

SEQ ID NO: 2247187 - RNA, 19 nt, Artificial Sequence
  Description of Artificial Sequence: Synthetic oligonucleotide
  Antisense strand to SEQ ID NO: 2247186
uuuagcccaggagaaugca

SEQ ID NO: 2247188 - RNA, 19 nt, Artificial Sequence
  Description of Artificial Sequence: Synthetic oligonucleotide
  Sense strand starting at position 1680 of SEQ ID NO: 1884193
gcauucuccugggcuaaag

SEQ ID NO: 2247189 - RNA, 19 nt, Artificial Sequence
  Description of Artificial Sequence: Synthetic oligonucleotide
  Antisense strand to SEQ ID NO: 2247188
cuuuagcccaggagaaugc

SEQ ID NO: 2247190 - RNA, 19 nt, Artificial Sequence
  Description of Artificial Sequence: Synthetic oligonucleotide
  Sense strand starting at position 1780 of SEQ ID NO: 1884193
gauugcaucaggcggagau

SEQ ID NO: 2247191 - RNA, 19 nt, Artificial Sequence
  Description of Artificial Sequence: Synthetic oligonucleotide
  Antisense strand to SEQ ID NO: 2247190
aucuccgccugaugcaauc

SEQ ID NO: 2247192 - RNA, 19 nt, Artificial Sequence
  Description of Artificial Sequence: Synthetic oligonucleotide
  Sense strand starting at position 1781 of SEQ ID NO: 1884193
auugcaucaggcggagaua

SEQ ID NO: 2247193 - RNA, 19 nt, Artificial Sequence
  Description of Artificial Sequence: Synthetic oligonucleotide
  Antisense strand to SEQ ID NO: 2247192
uaucuccgccugaugcaau

SEQ ID NO: 2247194 - RNA, 19 nt, Artificial Sequence
  Description of Artificial Sequence: Synthetic oligonucleotide
  Sense strand starting at position 1867 of SEQ ID NO: 1884193
ggagauguguggagacaca

SEQ ID NO: 2247195 - RNA, 19 nt, Artificial Sequence
  Description of Artificial Sequence: Synthetic oligonucleotide
  Antisense strand to SEQ ID NO: 2247194
ugugucuccacacaucucc

SEQ ID NO: 2247196 - RNA, 19 nt, Artificial Sequence
  Description of Artificial Sequence: Synthetic oligonucleotide
  Sense strand starting at position 1887 of SEQ ID NO: 1884193
ccugaaagucuugaaguca

SEQ ID NO: 2247197 - RNA, 19 nt, Artificial Sequence
  Description of Artificial Sequence: Synthetic oligonucleotide
  Antisense strand to SEQ ID NO: 2247196
ugacuucaagacuuucagg

SEQ ID NO: 2247198 - RNA, 19 nt, Artificial Sequence
  Description of Artificial Sequence: Synthetic oligonucleotide
  Sense strand starting at position 2005 of SEQ ID NO: 1884193
gagaaauaguagcauuaga

SEQ ID NO: 2247199 - RNA, 19 nt, Artificial Sequence
  Description of Artificial Sequence: Synthetic oligonucleotide
  Antisense strand to SEQ ID NO: 2247198
ucuaaugcuacuauuucuc

SEQ ID NO: 2247200 - RNA, 19 nt, Artificial Sequence
  Description of Artificial Sequence: Synthetic oligonucleotide
  Sense strand starting at position 2020 of SEQ ID NO: 1884193
uagagaugauucccaggca

SEQ ID NO: 2247201 - RNA, 19 nt, Artificial Sequence
  Description of Artificial Sequence: Synthetic oligonucleotide
  Antisense strand to SEQ ID NO: 2247200
ugccugggaaucaucucua

SEQ ID NO: 2247202 - RNA, 19 nt, Artificial Sequence
  Description of Artificial Sequence: Synthetic oligonucleotide
  Sense strand starting at position 2119 of SEQ ID NO: 1884193
ggugcugcccaucagacaa

SEQ ID NO: 2247203 - RNA, 19 nt, Artificial Sequence
  Description of Artificial Sequence: Synthetic oligonucleotide
  Antisense strand to SEQ ID NO: 2247202
uugucugaugggcagcacc

SEQ ID NO: 2247204 - RNA, 19 nt, Artificial Sequence
  Description of Artificial Sequence: Synthetic oligonucleotide
  Sense strand starting at position 2361 of SEQ ID NO: 1884193
ccggaauuugugcguuuga

SEQ ID NO: 2247205 - RNA, 19 nt, Artificial Sequence
  Description of Artificial Sequence: Synthetic oligonucleotide
  Antisense strand to SEQ ID NO: 2247204
ucaaacgcacaaauuccgg

SEQ ID NO: 2247206 - RNA, 19 nt, Artificial Sequence
  Description of Artificial Sequence: Synthetic oligonucleotide
  Sense strand starting at position 2362 of SEQ ID NO: 1884193
cggaauuugugcguuugaa

SEQ ID NO: 2247207 - RNA, 19 nt, Artificial Sequence
  Description of Artificial Sequence: Synthetic oligonucleotide
  Antisense strand to SEQ ID NO: 2247206
uucaaacgcacaaauuccg

SEQ ID NO: 2247208 - RNA, 19 nt, Artificial Sequence
  Description of Artificial Sequence: Synthetic oligonucleotide
  Sense strand starting at position 2387 of SEQ ID NO: 1884193
aggcuuggcuagucaugau

SEQ ID NO: 2247209 - RNA, 19 nt, Artificial Sequence
  Description of Artificial Sequence: Synthetic oligonucleotide
  Antisense strand to SEQ ID NO: 2247208
aucaugacuagccaagccu

SEQ ID NO: 2247210 - RNA, 19 nt, Artificial Sequence
  Description of Artificial Sequence: Synthetic oligonucleotide
  Sense strand starting at position 2394 of SEQ ID NO: 1884193
gcuagucaugauuagcaaa

SEQ ID NO: 2247211 - RNA, 19 nt, Artificial Sequence
  Description of Artificial Sequence: Synthetic oligonucleotide
  Antisense strand to SEQ ID NO: 2247210
uuugcuaaucaugacuagc

SEQ ID NO: 2247212 - RNA, 19 nt, Artificial Sequence
  Description of Artificial Sequence: Synthetic oligonucleotide
  Sense strand starting at position 2428 of SEQ ID NO: 1884193
uuuggagccugcuuuauau

SEQ ID NO: 2247213 - RNA, 19 nt, Artificial Sequence
  Description of Artificial Sequence: Synthetic oligonucleotide
  Antisense strand to SEQ ID NO: 2247212
auauaaagcaggcuccaaa

SEQ ID NO: 2247214 - RNA, 19 nt, Artificial Sequence
  Description of Artificial Sequence: Synthetic oligonucleotide
  Sense strand starting at position 2435 of SEQ ID NO: 1884193
ccugcuuuauaucugugaa

SEQ ID NO: 2247215 - RNA, 19 nt, Artificial Sequence
  Description of Artificial Sequence: Synthetic oligonucleotide
  Antisense strand to SEQ ID NO: 2247214
uucacagauauaaagcagg

SEQ ID NO: 2247216 - RNA, 19 nt, Artificial Sequence
  Description of Artificial Sequence: Synthetic oligonucleotide
  Sense strand starting at position 2437 of SEQ ID NO: 1884193
ugcuuuauaucugugaaau

SEQ ID NO: 2247217 - RNA, 19 nt, Artificial Sequence
  Description of Artificial Sequence: Synthetic oligonucleotide
  Antisense strand to SEQ ID NO: 2247216
auuucacagauauaaagca

SEQ ID NO: 2247218 - RNA, 19 nt, Artificial Sequence
  Description of Artificial Sequence: Synthetic oligonucleotide
  Sense strand starting at position 2438 of SEQ ID NO: 1884193
gcuuuauaucugugaaaug

SEQ ID NO: 2247219 - RNA, 19 nt, Artificial Sequence
  Description of Artificial Sequence: Synthetic oligonucleotide
  Antisense strand to SEQ ID NO: 2247218
cauuucacagauauaaagc

SEQ ID NO: 2247220 - RNA, 19 nt, Artificial Sequence
  Description of Artificial Sequence: Synthetic oligonucleotide
  Sense strand starting at position 2456 of SEQ ID NO: 1884193
gggaauuauuuccaucuca

SEQ ID NO: 2247221 - RNA, 19 nt, Artificial Sequence
  Description of Artificial Sequence: Synthetic oligonucleotide
  Antisense strand to SEQ ID NO: 2247220
ugagauggaaauaauuccc

SEQ ID NO: 2247222 - RNA, 19 nt, Artificial Sequence
  Description of Artificial Sequence: Synthetic oligonucleotide
  Sense strand starting at position 2576 of SEQ ID NO: 1884193
ggcugaucacuuggagugu

SEQ ID NO: 2247223 - RNA, 19 nt, Artificial Sequence
  Description of Artificial Sequence: Synthetic oligonucleotide
  Antisense strand to SEQ ID NO: 2247222
acacuccaagugaucagcc

SEQ ID NO: 2247224 - RNA, 19 nt, Artificial Sequence
  Description of Artificial Sequence: Synthetic oligonucleotide
  Sense strand starting at position 2585 of SEQ ID NO: 1884193
cuuggaguguucgccuaag

SEQ ID NO: 2247225 - RNA, 19 nt, Artificial Sequence
  Description of Artificial Sequence: Synthetic oligonucleotide
  Antisense strand to SEQ ID NO: 2247224
cuuaggcgaacacuccaag

SEQ ID NO: 2247226 - RNA, 19 nt, Artificial Sequence
  Description of Artificial Sequence: Synthetic oligonucleotide
  Sense strand starting at position 3501 of SEQ ID NO: 1884193
gcguguuuccggcuggacu

SEQ ID NO: 2247227 - RNA, 19 nt, Artificial Sequence
  Description of Artificial Sequence: Synthetic oligonucleotide
  Antisense strand to SEQ ID NO: 2247226
aguccagccggaaacacgc

SEQ ID NO: 2247228 - RNA, 19 nt, Artificial Sequence
  Description of Artificial Sequence: Synthetic oligonucleotide
  Sense strand starting at position 3567 of SEQ ID NO: 1884193
ugggaauccucugaagaug

SEQ ID NO: 2247229 - RNA, 19 nt, Artificial Sequence
  Description of Artificial Sequence: Synthetic oligonucleotide
  Antisense strand to SEQ ID NO: 2247228
caucuucagaggauuccca

SEQ ID NO: 2247230 - RNA, 19 nt, Artificial Sequence
  Description of Artificial Sequence: Synthetic oligonucleotide
  Sense strand starting at position 3913 of SEQ ID NO: 1884193
cuccauuugucaguuugau

SEQ ID NO: 2247231 - RNA, 19 nt, Artificial Sequence
  Description of Artificial Sequence: Synthetic oligonucleotide
  Antisense strand to SEQ ID NO: 2247230
aucaaacugacaaauggag

SEQ ID NO: 2247232 - RNA, 19 nt, Artificial Sequence
  Description of Artificial Sequence: Synthetic oligonucleotide
  Sense strand starting at position 3968 of SEQ ID NO: 1884193
acugucugcagacgucaau

SEQ ID NO: 2247233 - RNA, 19 nt, Artificial Sequence
  Description of Artificial Sequence: Synthetic oligonucleotide
  Antisense strand to SEQ ID NO: 2247232
auugacgucugcagacagu

SEQ ID NO: 2247234 - RNA, 19 nt, Artificial Sequence
  Description of Artificial Sequence: Synthetic oligonucleotide
  Sense strand starting at position 4 of SEQ ID NO: 1884194
guaguuagcauuugcaaag

SEQ ID NO: 2247235 - RNA, 19 nt, Artificial Sequence
  Description of Artificial Sequence: Synthetic oligonucleotide
  Antisense strand to SEQ ID NO: 2247234
cuuugcaaaugcuaacuac

SEQ ID NO: 2247236 - RNA, 19 nt, Artificial Sequence
  Description of Artificial Sequence: Synthetic oligonucleotide
  Sense strand starting at position 5 of SEQ ID NO: 1884194
uaguuagcauuugcaaagu

SEQ ID NO: 2247237 - RNA, 19 nt, Artificial Sequence
  Description of Artificial Sequence: Synthetic oligonucleotide
  Antisense strand to SEQ ID NO: 2247236
acuuugcaaaugcuaacua

SEQ ID NO: 2247238 - RNA, 19 nt, Artificial Sequence
  Description of Artificial Sequence: Synthetic oligonucleotide
  Sense strand starting at position 85 of SEQ ID NO: 1884194
aaagguggagucugaggua

SEQ ID NO: 2247239 - RNA, 19 nt, Artificial Sequence
  Description of Artificial Sequence: Synthetic oligonucleotide
  Antisense strand to SEQ ID NO: 2247238
uaccucagacuccaccuuu

SEQ ID NO: 2247240 - RNA, 19 nt, Artificial Sequence
  Description of Artificial Sequence: Synthetic oligonucleotide
  Sense strand starting at position 179 of SEQ ID NO: 1884194
agaccaauggcugguaagu

SEQ ID NO: 2247241 - RNA, 19 nt, Artificial Sequence
  Description of Artificial Sequence: Synthetic oligonucleotide
  Antisense strand to SEQ ID NO: 2247240
acuuaccagccauuggucu

SEQ ID NO: 2247242 - RNA, 19 nt, Artificial Sequence
  Description of Artificial Sequence: Synthetic oligonucleotide
  Sense strand starting at position 384 of SEQ ID NO: 1884194
ccaagagugcuccaacuuc

SEQ ID NO: 2247243 - RNA, 19 nt, Artificial Sequence
  Description of Artificial Sequence: Synthetic oligonucleotide
  Antisense strand to SEQ ID NO: 2247242
gaaguuggagcacucuugg

SEQ ID NO: 2247244 - RNA, 19 nt, Artificial Sequence
  Description of Artificial Sequence: Synthetic oligonucleotide
  Sense strand starting at position 416 of SEQ ID NO: 1884194
aagacuguagaaugucaau

SEQ ID NO: 2247245 - RNA, 19 nt, Artificial Sequence
  Description of Artificial Sequence: Synthetic oligonucleotide
  Antisense strand to SEQ ID NO: 2247244
auugacauucuacagucuu

SEQ ID NO: 2247246 - RNA, 19 nt, Artificial Sequence
  Description of Artificial Sequence: Synthetic oligonucleotide
  Sense strand starting at position 467 of SEQ ID NO: 1884194
uacuauuccgggcagggau

SEQ ID NO: 2247247 - RNA, 19 nt, Artificial Sequence
  Description of Artificial Sequence: Synthetic oligonucleotide
  Antisense strand to SEQ ID NO: 2247246
aucccugcccggaauagua

SEQ ID NO: 2247248 - RNA, 19 nt, Artificial Sequence
  Description of Artificial Sequence: Synthetic oligonucleotide
  Sense strand starting at position 543 of SEQ ID NO: 1884194
ggauuccauggcuguggaa

SEQ ID NO: 2247249 - RNA, 19 nt, Artificial Sequence
  Description of Artificial Sequence: Synthetic oligonucleotide
  Antisense strand to SEQ ID NO: 2247248
uuccacagccauggaaucc

SEQ ID NO: 2247250 - RNA, 19 nt, Artificial Sequence
  Description of Artificial Sequence: Synthetic oligonucleotide
  Sense strand starting at position 581 of SEQ ID NO: 1884194
cuggucuucgaguaucaac

SEQ ID NO: 2247251 - RNA, 19 nt, Artificial Sequence
  Description of Artificial Sequence: Synthetic oligonucleotide
  Antisense strand to SEQ ID NO: 2247250
guugauacucgaagaccag

SEQ ID NO: 2247252 - RNA, 19 nt, Artificial Sequence
  Description of Artificial Sequence: Synthetic oligonucleotide
  Sense strand starting at position 589 of SEQ ID NO: 1884194
cgaguaucaacugaguauu

SEQ ID NO: 2247253 - RNA, 19 nt, Artificial Sequence
  Description of Artificial Sequence: Synthetic oligonucleotide
  Antisense strand to SEQ ID NO: 2247252
aauacucaguugauacucg

SEQ ID NO: 2247254 - RNA, 19 nt, Artificial Sequence
  Description of Artificial Sequence: Synthetic oligonucleotide
  Sense strand starting at position 592 of SEQ ID NO: 1884194
guaucaacugaguauugug

SEQ ID NO: 2247255 - RNA, 19 nt, Artificial Sequence
  Description of Artificial Sequence: Synthetic oligonucleotide
  Antisense strand to SEQ ID NO: 2247254
cacaauacucaguugauac

SEQ ID NO: 2247256 - RNA, 19 nt, Artificial Sequence
  Description of Artificial Sequence: Synthetic oligonucleotide
  Sense strand starting at position 599 of SEQ ID NO: 1884194
cugaguauuguguuucgcu

SEQ ID NO: 2247257 - RNA, 19 nt, Artificial Sequence
  Description of Artificial Sequence: Synthetic oligonucleotide
  Antisense strand to SEQ ID NO: 2247256
agcgaaacacaauacucag

SEQ ID NO: 2247258 - RNA, 19 nt, Artificial Sequence
  Description of Artificial Sequence: Synthetic oligonucleotide
  Sense strand starting at position 606 of SEQ ID NO: 1884194
uuguguuucgcugcuuaag

SEQ ID NO: 2247259 - RNA, 19 nt, Artificial Sequence
  Description of Artificial Sequence: Synthetic oligonucleotide
  Antisense strand to SEQ ID NO: 2247258
cuuaagcagcgaaacacaa

SEQ ID NO: 2247260 - RNA, 19 nt, Artificial Sequence
  Description of Artificial Sequence: Synthetic oligonucleotide
  Sense strand starting at position 635 of SEQ ID NO: 1884194
gugcaugaucuauauuaug

SEQ ID NO: 2247261 - RNA, 19 nt, Artificial Sequence
  Description of Artificial Sequence: Synthetic oligonucleotide
  Antisense strand to SEQ ID NO: 2247260
cauaauauagaucaugcac

SEQ ID NO: 2247262 - RNA, 19 nt, Artificial Sequence
  Description of Artificial Sequence: Synthetic oligonucleotide
  Sense strand starting at position 777 of SEQ ID NO: 1884194
uuguaagaagucuaggucu

SEQ ID NO: 2247263 - RNA, 19 nt, Artificial Sequence
  Description of Artificial Sequence: Synthetic oligonucleotide
  Antisense strand to SEQ ID NO: 2247262
agaccuagacuucuuacaa

SEQ ID NO: 2247264 - RNA, 19 nt, Artificial Sequence
  Description of Artificial Sequence: Synthetic oligonucleotide
  Sense strand starting at position 780 of SEQ ID NO: 1884194
uaagaagucuaggucuuua

SEQ ID NO: 2247265 - RNA, 19 nt, Artificial Sequence
  Description of Artificial Sequence: Synthetic oligonucleotide
  Antisense strand to SEQ ID NO: 2247264
uaaagaccuagacuucuua

SEQ ID NO: 2247266 - RNA, 19 nt, Artificial Sequence
  Description of Artificial Sequence: Synthetic oligonucleotide
  Sense strand starting at position 784 of SEQ ID NO: 1884194
aagucuaggucuuuaaaug

SEQ ID NO: 2247267 - RNA, 19 nt, Artificial Sequence
  Description of Artificial Sequence: Synthetic oligonucleotide
  Antisense strand to SEQ ID NO: 2247266
cauuuaaagaccuagacuu

SEQ ID NO: 2247268 - RNA, 19 nt, Artificial Sequence
  Description of Artificial Sequence: Synthetic oligonucleotide
  Sense strand starting at position 785 of SEQ ID NO: 1884194
agucuaggucuuuaaaugu

SEQ ID NO: 2247269 - RNA, 19 nt, Artificial Sequence
  Description of Artificial Sequence: Synthetic oligonucleotide
  Antisense strand to SEQ ID NO: 2247268
acauuuaaagaccuagacu

SEQ ID NO: 2247270 - RNA, 19 nt, Artificial Sequence
  Description of Artificial Sequence: Synthetic oligonucleotide
  Sense strand starting at position 791 of SEQ ID NO: 1884194
ggucuuuaaaugugggaag

SEQ ID NO: 2247271 - RNA, 19 nt, Artificial Sequence
  Description of Artificial Sequence: Synthetic oligonucleotide
  Antisense strand to SEQ ID NO: 2247270
cuucccacauuuaaagacc

SEQ ID NO: 2247272 - RNA, 19 nt, Artificial Sequence
  Description of Artificial Sequence: Synthetic oligonucleotide
  Sense strand starting at position 1004 of SEQ ID NO: 1884194
uguaguauccuggaagcag

SEQ ID NO: 2247273 - RNA, 19 nt, Artificial Sequence
  Description of Artificial Sequence: Synthetic oligonucleotide
  Antisense strand to SEQ ID NO: 2247272
cugcuuccaggauacuaca

SEQ ID NO: 2247274 - RNA, 19 nt, Artificial Sequence
  Description of Artificial Sequence: Synthetic oligonucleotide
  Sense strand starting at position 1212 of SEQ ID NO: 1884194
ugcauaggucuugaaacga

SEQ ID NO: 2247275 - RNA, 19 nt, Artificial Sequence
  Description of Artificial Sequence: Synthetic oligonucleotide
  Antisense strand to SEQ ID NO: 2247274
ucguuucaagaccuaugca

SEQ ID NO: 2247276 - RNA, 19 nt, Artificial Sequence
  Description of Artificial Sequence: Synthetic oligonucleotide
  Sense strand starting at position 1301 of SEQ ID NO: 1884194
ggaaaucuugcaugaggac

SEQ ID NO: 2247277 - RNA, 19 nt, Artificial Sequence
  Description of Artificial Sequence: Synthetic oligonucleotide
  Antisense strand to SEQ ID NO: 2247276
guccucaugcaagauuucc

SEQ ID NO: 2247278 - RNA, 19 nt, Artificial Sequence
  Description of Artificial Sequence: Synthetic oligonucleotide
  Sense strand starting at position 1316 of SEQ ID NO: 1884194
ggacaucacucucugguuu

SEQ ID NO: 2247279 - RNA, 19 nt, Artificial Sequence
  Description of Artificial Sequence: Synthetic oligonucleotide
  Antisense strand to SEQ ID NO: 2247278
aaaccagagagugaugucc

SEQ ID NO: 2247280 - RNA, 19 nt, Artificial Sequence
  Description of Artificial Sequence: Synthetic oligonucleotide
  Sense strand starting at position 1399 of SEQ ID NO: 1884194
guugucccuccugaggaau

SEQ ID NO: 2247281 - RNA, 19 nt, Artificial Sequence
  Description of Artificial Sequence: Synthetic oligonucleotide
  Antisense strand to SEQ ID NO: 2247280
auuccucaggagggacaac

SEQ ID NO: 2247282 - RNA, 19 nt, Artificial Sequence
  Description of Artificial Sequence: Synthetic oligonucleotide
  Sense strand starting at position 1481 of SEQ ID NO: 1884194
ugggacucuugauuccaga

SEQ ID NO: 2247283 - RNA, 19 nt, Artificial Sequence
  Description of Artificial Sequence: Synthetic oligonucleotide
  Antisense strand to SEQ ID NO: 2247282
ucuggaaucaagaguccca

SEQ ID NO: 2247284 - RNA, 19 nt, Artificial Sequence
  Description of Artificial Sequence: Synthetic oligonucleotide
  Sense strand starting at position 1647 of SEQ ID NO: 1884194
ggaaucgaaucuucccaau

SEQ ID NO: 2247285 - RNA, 19 nt, Artificial Sequence
  Description of Artificial Sequence: Synthetic oligonucleotide
  Antisense strand to SEQ ID NO: 2247284
auugggaagauucgauucc

SEQ ID NO: 2247286 - RNA, 19 nt, Artificial Sequence
  Description of Artificial Sequence: Synthetic oligonucleotide
  Sense strand starting at position 2157 of SEQ ID NO: 1884194
ugguauagaguuugagaau

SEQ ID NO: 2247287 - RNA, 19 nt, Artificial Sequence
  Description of Artificial Sequence: Synthetic oligonucleotide
  Antisense strand to SEQ ID NO: 2247286
auucucaaacucuauacca

SEQ ID NO: 2247288 - RNA, 19 nt, Artificial Sequence
  Description of Artificial Sequence: Synthetic oligonucleotide
  Sense strand starting at position 2377 of SEQ ID NO: 1884194
gugaauauuucugaaugga

SEQ ID NO: 2247289 - RNA, 19 nt, Artificial Sequence
  Description of Artificial Sequence: Synthetic oligonucleotide
  Antisense strand to SEQ ID NO: 2247288
uccauucagaaauauucac

SEQ ID NO: 2247290 - RNA, 19 nt, Artificial Sequence
  Description of Artificial Sequence: Synthetic oligonucleotide
  Sense strand starting at position 2795 of SEQ ID NO: 1884194
gcuagacccgugucuucuu

SEQ ID NO: 2247291 - RNA, 19 nt, Artificial Sequence
  Description of Artificial Sequence: Synthetic oligonucleotide
  Antisense strand to SEQ ID NO: 2247290
aagaagacacgggucuagc

SEQ ID NO: 2247292 - RNA, 19 nt, Artificial Sequence
  Description of Artificial Sequence: Synthetic oligonucleotide
  Sense strand starting at position 2965 of SEQ ID NO: 1884194
aguugacacuuacuguuaa

SEQ ID NO: 2247293 - RNA, 19 nt, Artificial Sequence
  Description of Artificial Sequence: Synthetic oligonucleotide
  Antisense strand to SEQ ID NO: 2247292
uuaacaguaagugucaacu

SEQ ID NO: 2247294 - RNA, 19 nt, Artificial Sequence
  Description of Artificial Sequence: Synthetic oligonucleotide
  Sense strand starting at position 3012 of SEQ ID NO: 1884194
auaccagguccuggagaua

SEQ ID NO: 2247295 - RNA, 19 nt, Artificial Sequence
  Description of Artificial Sequence: Synthetic oligonucleotide
  Antisense strand to SEQ ID NO: 2247294
uaucuccaggaccugguau

SEQ ID NO: 2247296 - RNA, 19 nt, Artificial Sequence
  Description of Artificial Sequence: Synthetic oligonucleotide
  Sense strand starting at position 3047 of SEQ ID NO: 1884194
aggucagcuccugaacaaa

SEQ ID NO: 2247297 - RNA, 19 nt, Artificial Sequence
  Description of Artificial Sequence: Synthetic oligonucleotide
  Antisense strand to SEQ ID NO: 2247296
uuuguucaggagcugaccu

SEQ ID NO: 2247298 - RNA, 19 nt, Artificial Sequence
  Description of Artificial Sequence: Synthetic oligonucleotide
  Sense strand starting at position 3275 of SEQ ID NO: 1884194
caguuuggcacagaaguga

SEQ ID NO: 2247299 - RNA, 19 nt, Artificial Sequence
  Description of Artificial Sequence: Synthetic oligonucleotide
  Antisense strand to SEQ ID NO: 2247298
ucacuucugugccaaacug

SEQ ID NO: 2247300 - RNA, 19 nt, Artificial Sequence
  Description of Artificial Sequence: Synthetic oligonucleotide
  Sense strand starting at position 3286 of SEQ ID NO: 1884194
agaagugagguaugaaucu

SEQ ID NO: 2247301 - RNA, 19 nt, Artificial Sequence
  Description of Artificial Sequence: Synthetic oligonucleotide
  Antisense strand to SEQ ID NO: 2247300
agauucauaccucacuucu

SEQ ID NO: 2247302 - RNA, 19 nt, Artificial Sequence
  Description of Artificial Sequence: Synthetic oligonucleotide
  Sense strand starting at position 3293 of SEQ ID NO: 1884194
agguaugaaucuuccagcu

SEQ ID NO: 2247303 - RNA, 19 nt, Artificial Sequence
  Description of Artificial Sequence: Synthetic oligonucleotide
  Antisense strand to SEQ ID NO: 2247302
agcuggaagauucauaccu

SEQ ID NO: 2247304 - RNA, 19 nt, Artificial Sequence
  Description of Artificial Sequence: Synthetic oligonucleotide
  Sense strand starting at position 3388 of SEQ ID NO: 1884194
aacuguugguggguagaga

SEQ ID NO: 2247305 - RNA, 19 nt, Artificial Sequence
  Description of Artificial Sequence: Synthetic oligonucleotide
  Antisense strand to SEQ ID NO: 2247304
ucucuacccaccaacaguu

SEQ ID NO: 2247306 - RNA, 19 nt, Artificial Sequence
  Description of Artificial Sequence: Synthetic oligonucleotide
  Sense strand starting at position 3503 of SEQ ID NO: 1884194
ggucuucugauauagaugu

SEQ ID NO: 2247307 - RNA, 19 nt, Artificial Sequence
  Description of Artificial Sequence: Synthetic oligonucleotide
  Antisense strand to SEQ ID NO: 2247306
acaucuauaucagaagacc

SEQ ID NO: 2247308 - RNA, 19 nt, Artificial Sequence
  Description of Artificial Sequence: Synthetic oligonucleotide
  Sense strand starting at position 3509 of SEQ ID NO: 1884194
cugauauagauguggcuga

SEQ ID NO: 2247309 - RNA, 19 nt, Artificial Sequence
  Description of Artificial Sequence: Synthetic oligonucleotide
  Antisense strand to SEQ ID NO: 2247308
ucagccacaucuauaucag

SEQ ID NO: 2247310 - RNA, 19 nt, Artificial Sequence
  Description of Artificial Sequence: Synthetic oligonucleotide
  Sense strand starting at position 3888 of SEQ ID NO: 1884194
uaaagucaagaucggauau

SEQ ID NO: 2247311 - RNA, 19 nt, Artificial Sequence
  Description of Artificial Sequence: Synthetic oligonucleotide
  Antisense strand to SEQ ID NO: 2247310
auauccgaucuugacuuua

SEQ ID NO: 2247312 - RNA, 19 nt, Artificial Sequence
  Description of Artificial Sequence: Synthetic oligonucleotide
  Sense strand starting at position 3890 of SEQ ID NO: 1884194
aagucaagaucggauauuu

SEQ ID NO: 2247313 - RNA, 19 nt, Artificial Sequence
  Description of Artificial Sequence: Synthetic oligonucleotide
  Antisense strand to SEQ ID NO: 2247312
aaauauccgaucuugacuu

SEQ ID NO: 2247314 - RNA, 19 nt, Artificial Sequence
  Description of Artificial Sequence: Synthetic oligonucleotide
  Sense strand starting at position 154 of SEQ ID NO: 1884195
ggugaauuacgugggugaa

SEQ ID NO: 2247315 - RNA, 19 nt, Artificial Sequence
  Description of Artificial Sequence: Synthetic oligonucleotide
  Antisense strand to SEQ ID NO: 2247314
uucacccacguaauucacc

SEQ ID NO: 2247316 - RNA, 19 nt, Artificial Sequence
  Description of Artificial Sequence: Synthetic oligonucleotide
  Sense strand starting at position 156 of SEQ ID NO: 1884195
ugaauuacgugggugaaug

SEQ ID NO: 2247317 - RNA, 19 nt, Artificial Sequence
  Description of Artificial Sequence: Synthetic oligonucleotide
  Antisense strand to SEQ ID NO: 2247316
cauucacccacguaauuca

SEQ ID NO: 2247318 - RNA, 19 nt, Artificial Sequence
  Description of Artificial Sequence: Synthetic oligonucleotide
  Sense strand starting at position 167 of SEQ ID NO: 1884195
ggugaaugcauccgaacug

SEQ ID NO: 2247319 - RNA, 19 nt, Artificial Sequence
  Description of Artificial Sequence: Synthetic oligonucleotide
  Antisense strand to SEQ ID NO: 2247318
caguucggaugcauucacc

SEQ ID NO: 2247320 - RNA, 19 nt, Artificial Sequence
  Description of Artificial Sequence: Synthetic oligonucleotide
  Sense strand starting at position 241 of SEQ ID NO: 1884195
aggccugagccuuacggaa

SEQ ID NO: 2247321 - RNA, 19 nt, Artificial Sequence
  Description of Artificial Sequence: Synthetic oligonucleotide
  Antisense strand to SEQ ID NO: 2247320
uuccguaaggcucaggccu

SEQ ID NO: 2247322 - RNA, 19 nt, Artificial Sequence
  Description of Artificial Sequence: Synthetic oligonucleotide
  Sense strand starting at position 253 of SEQ ID NO: 1884195
uacggaagagcuugucaag

SEQ ID NO: 2247323 - RNA, 19 nt, Artificial Sequence
  Description of Artificial Sequence: Synthetic oligonucleotide
  Antisense strand to SEQ ID NO: 2247322
cuugacaagcucuuccgua

SEQ ID NO: 2247324 - RNA, 19 nt, Artificial Sequence
  Description of Artificial Sequence: Synthetic oligonucleotide
  Sense strand starting at position 431 of SEQ ID NO: 1884195
ucuauuauugaggaguccu

SEQ ID NO: 2247325 - RNA, 19 nt, Artificial Sequence
  Description of Artificial Sequence: Synthetic oligonucleotide
  Antisense strand to SEQ ID NO: 2247324
aggacuccucaauaauaga

SEQ ID NO: 2247326 - RNA, 19 nt, Artificial Sequence
  Description of Artificial Sequence: Synthetic oligonucleotide
  Sense strand starting at position 1086 of SEQ ID NO: 1884195
guguguaugacacagauau

SEQ ID NO: 2247327 - RNA, 19 nt, Artificial Sequence
  Description of Artificial Sequence: Synthetic oligonucleotide
  Antisense strand to SEQ ID NO: 2247326
auaucugugucauacacac

SEQ ID NO: 2247328 - RNA, 19 nt, Artificial Sequence
  Description of Artificial Sequence: Synthetic oligonucleotide
  Sense strand starting at position 1088 of SEQ ID NO: 1884195
guguaugacacagauaugu

SEQ ID NO: 2247329 - RNA, 19 nt, Artificial Sequence
  Description of Artificial Sequence: Synthetic oligonucleotide
  Antisense strand to SEQ ID NO: 2247328
acauaucugugucauacac

SEQ ID NO: 2247330 - RNA, 19 nt, Artificial Sequence
  Description of Artificial Sequence: Synthetic oligonucleotide
  Sense strand starting at position 1113 of SEQ ID NO: 1884195
auguuauaucccggaaauu

SEQ ID NO: 2247331 - RNA, 19 nt, Artificial Sequence
  Description of Artificial Sequence: Synthetic oligonucleotide
  Antisense strand to SEQ ID NO: 2247330
aauuuccgggauauaacau

SEQ ID NO: 2247332 - RNA, 19 nt, Artificial Sequence
  Description of Artificial Sequence: Synthetic oligonucleotide
  Sense strand starting at position 1114 of SEQ ID NO: 1884195
uguuauaucccggaaauuc

SEQ ID NO: 2247333 - RNA, 19 nt, Artificial Sequence
  Description of Artificial Sequence: Synthetic oligonucleotide
  Antisense strand to SEQ ID NO: 2247332
gaauuuccgggauauaaca

SEQ ID NO: 2247334 - RNA, 19 nt, Artificial Sequence
  Description of Artificial Sequence: Synthetic oligonucleotide
  Sense strand starting at position 1230 of SEQ ID NO: 1884195
gccuguccugauuggagaa

SEQ ID NO: 2247335 - RNA, 19 nt, Artificial Sequence
  Description of Artificial Sequence: Synthetic oligonucleotide
  Antisense strand to SEQ ID NO: 2247334
uucuccaaucaggacaggc

SEQ ID NO: 2247336 - RNA, 19 nt, Artificial Sequence
  Description of Artificial Sequence: Synthetic oligonucleotide
  Sense strand starting at position 1350 of SEQ ID NO: 1884195
gaaagagcuggcuguagaa

SEQ ID NO: 2247337 - RNA, 19 nt, Artificial Sequence
  Description of Artificial Sequence: Synthetic oligonucleotide
  Antisense strand to SEQ ID NO: 2247336
uucuacagccagcucuuuc

SEQ ID NO: 2247338 - RNA, 19 nt, Artificial Sequence
  Description of Artificial Sequence: Synthetic oligonucleotide
  Sense strand starting at position 1352 of SEQ ID NO: 1884195
aagagcuggcuguagaagu

SEQ ID NO: 2247339 - RNA, 19 nt, Artificial Sequence
  Description of Artificial Sequence: Synthetic oligonucleotide
  Antisense strand to SEQ ID NO: 2247338
acuucuacagccagcucuu

SEQ ID NO: 2247340 - RNA, 19 nt, Artificial Sequence
  Description of Artificial Sequence: Synthetic oligonucleotide
  Sense strand starting at position 1397 of SEQ ID NO: 1884195
uuuccauauuuguagaaga

SEQ ID NO: 2247341 - RNA, 19 nt, Artificial Sequence
  Description of Artificial Sequence: Synthetic oligonucleotide
  Antisense strand to SEQ ID NO: 2247340
ucuucuacaaauauggaaa

SEQ ID NO: 2247342 - RNA, 19 nt, Artificial Sequence
  Description of Artificial Sequence: Synthetic oligonucleotide
  Sense strand starting at position 1418 of SEQ ID NO: 1884195
aacagaucugucugcuaug

SEQ ID NO: 2247343 - RNA, 19 nt, Artificial Sequence
  Description of Artificial Sequence: Synthetic oligonucleotide
  Antisense strand to SEQ ID NO: 2247342
cauagcagacagaucuguu

SEQ ID NO: 2247344 - RNA, 19 nt, Artificial Sequence
  Description of Artificial Sequence: Synthetic oligonucleotide
  Sense strand starting at position 1453 of SEQ ID NO: 1884195
gucuguuuccacuauccaa

SEQ ID NO: 2247345 - RNA, 19 nt, Artificial Sequence
  Description of Artificial Sequence: Synthetic oligonucleotide
  Antisense strand to SEQ ID NO: 2247344
uuggauaguggaaacagac

SEQ ID NO: 2247346 - RNA, 19 nt, Artificial Sequence
  Description of Artificial Sequence: Synthetic oligonucleotide
  Sense strand starting at position 1605 of SEQ ID NO: 1884195
agaaauuucucaggaagga

SEQ ID NO: 2247347 - RNA, 19 nt, Artificial Sequence
  Description of Artificial Sequence: Synthetic oligonucleotide
  Antisense strand to SEQ ID NO: 2247346
uccuuccugagaaauuucu

SEQ ID NO: 2247348 - RNA, 19 nt, Artificial Sequence
  Description of Artificial Sequence: Synthetic oligonucleotide
  Sense strand starting at position 1621 of SEQ ID NO: 1884195
ggauaauguguggacggau

SEQ ID NO: 2247349 - RNA, 19 nt, Artificial Sequence
  Description of Artificial Sequence: Synthetic oligonucleotide
  Antisense strand to SEQ ID NO: 2247348
auccguccacacauuaucc

SEQ ID NO: 2247350 - RNA, 19 nt, Artificial Sequence
  Description of Artificial Sequence: Synthetic oligonucleotide
  Sense strand starting at position 1985 of SEQ ID NO: 1884195
ggauguguucuagaaucag

SEQ ID NO: 2247351 - RNA, 19 nt, Artificial Sequence
  Description of Artificial Sequence: Synthetic oligonucleotide
  Antisense strand to SEQ ID NO: 2247350
cugauucuagaacacaucc

SEQ ID NO: 2247352 - RNA, 19 nt, Artificial Sequence
  Description of Artificial Sequence: Synthetic oligonucleotide
  Sense strand starting at position 1991 of SEQ ID NO: 1884195
guucuagaaucagcuugaa

SEQ ID NO: 2247353 - RNA, 19 nt, Artificial Sequence
  Description of Artificial Sequence: Synthetic oligonucleotide
  Antisense strand to SEQ ID NO: 2247352
uucaagcugauucuagaac

SEQ ID NO: 2247354 - RNA, 19 nt, Artificial Sequence
  Description of Artificial Sequence: Synthetic oligonucleotide
  Sense strand starting at position 1994 of SEQ ID NO: 1884195
cuagaaucagcuugaaugu

SEQ ID NO: 2247355 - RNA, 19 nt, Artificial Sequence
  Description of Artificial Sequence: Synthetic oligonucleotide
  Antisense strand to SEQ ID NO: 2247354
acauucaagcugauucuag

SEQ ID NO: 2247356 - RNA, 19 nt, Artificial Sequence
  Description of Artificial Sequence: Synthetic oligonucleotide
  Sense strand starting at position 2058 of SEQ ID NO: 1884195
cuagaaaugugcuuuauca

SEQ ID NO: 2247357 - RNA, 19 nt, Artificial Sequence
  Description of Artificial Sequence: Synthetic oligonucleotide
  Antisense strand to SEQ ID NO: 2247356
ugauaaagcacauuucuag

SEQ ID NO: 2247358 - RNA, 19 nt, Artificial Sequence
  Description of Artificial Sequence: Synthetic oligonucleotide
  Sense strand starting at position 2060 of SEQ ID NO: 1884195
agaaaugugcuuuaucaga

SEQ ID NO: 2247359 - RNA, 19 nt, Artificial Sequence
  Description of Artificial Sequence: Synthetic oligonucleotide
  Antisense strand to SEQ ID NO: 2247358
ucugauaaagcacauuucu

SEQ ID NO: 2247360 - RNA, 19 nt, Artificial Sequence
  Description of Artificial Sequence: Synthetic oligonucleotide
  Sense strand starting at position 2062 of SEQ ID NO: 1884195
aaaugugcuuuaucagaga

SEQ ID NO: 2247361 - RNA, 19 nt, Artificial Sequence
  Description of Artificial Sequence: Synthetic oligonucleotide
  Antisense strand to SEQ ID NO: 2247360
ucucugauaaagcacauuu

SEQ ID NO: 2247362 - RNA, 19 nt, Artificial Sequence
  Description of Artificial Sequence: Synthetic oligonucleotide
  Sense strand starting at position 2067 of SEQ ID NO: 1884195
ugcuuuaucagagagugug

SEQ ID NO: 2247363 - RNA, 19 nt, Artificial Sequence
  Description of Artificial Sequence: Synthetic oligonucleotide
  Antisense strand to SEQ ID NO: 2247362
cacacucucugauaaagca

SEQ ID NO: 2247364 - RNA, 19 nt, Artificial Sequence
  Description of Artificial Sequence: Synthetic oligonucleotide
  Sense strand starting at position 2231 of SEQ ID NO: 1884195
ccacaugugcauuggaaca

SEQ ID NO: 2247365 - RNA, 19 nt, Artificial Sequence
  Description of Artificial Sequence: Synthetic oligonucleotide
  Antisense strand to SEQ ID NO: 2247364
uguuccaaugcacaugugg

SEQ ID NO: 2247366 - RNA, 19 nt, Artificial Sequence
  Description of Artificial Sequence: Synthetic oligonucleotide
  Sense strand starting at position 2236 of SEQ ID NO: 1884195
ugugcauuggaacaaguua

SEQ ID NO: 2247367 - RNA, 19 nt, Artificial Sequence
  Description of Artificial Sequence: Synthetic oligonucleotide
  Antisense strand to SEQ ID NO: 2247366
uaacuuguuccaaugcaca

SEQ ID NO: 2247368 - RNA, 19 nt, Artificial Sequence
  Description of Artificial Sequence: Synthetic oligonucleotide
  Sense strand starting at position 2260 of SEQ ID NO: 1884195
uguggugcuggaaguguua

SEQ ID NO: 2247369 - RNA, 19 nt, Artificial Sequence
  Description of Artificial Sequence: Synthetic oligonucleotide
  Antisense strand to SEQ ID NO: 2247368
uaacacuuccagcaccaca

SEQ ID NO: 2247370 - RNA, 19 nt, Artificial Sequence
  Description of Artificial Sequence: Synthetic oligonucleotide
  Sense strand starting at position 2805 of SEQ ID NO: 1884195
acguuugaugacugccaaa

SEQ ID NO: 2247371 - RNA, 19 nt, Artificial Sequence
  Description of Artificial Sequence: Synthetic oligonucleotide
  Antisense strand to SEQ ID NO: 2247370
uuuggcagucaucaaacgu

SEQ ID NO: 2247372 - RNA, 19 nt, Artificial Sequence
  Description of Artificial Sequence: Synthetic oligonucleotide
  Sense strand starting at position 2959 of SEQ ID NO: 1884195
uuagucuucuacucaugau

SEQ ID NO: 2247373 - RNA, 19 nt, Artificial Sequence
  Description of Artificial Sequence: Synthetic oligonucleotide
  Antisense strand to SEQ ID NO: 2247372
aucaugaguagaagacuaa

SEQ ID NO: 2247374 - RNA, 19 nt, Artificial Sequence
  Description of Artificial Sequence: Synthetic oligonucleotide
  Sense strand starting at position 2971 of SEQ ID NO: 1884195
ucaugauuaucagugucau

SEQ ID NO: 2247375 - RNA, 19 nt, Artificial Sequence
  Description of Artificial Sequence: Synthetic oligonucleotide
  Antisense strand to SEQ ID NO: 2247374
augacacugauaaucauga

SEQ ID NO: 2247376 - RNA, 19 nt, Artificial Sequence
  Description of Artificial Sequence: Synthetic oligonucleotide
  Sense strand starting at position 2990 of SEQ ID NO: 1884195
uuucuucuacugcagugaa

SEQ ID NO: 2247377 - RNA, 19 nt, Artificial Sequence
  Description of Artificial Sequence: Synthetic oligonucleotide
  Antisense strand to SEQ ID NO: 2247376
uucacugcaguagaagaaa

SEQ ID NO: 2247378 - RNA, 19 nt, Artificial Sequence
  Description of Artificial Sequence: Synthetic oligonucleotide
  Sense strand starting at position 2993 of SEQ ID NO: 1884195
cuucuacugcagugaauuu

SEQ ID NO: 2247379 - RNA, 19 nt, Artificial Sequence
  Description of Artificial Sequence: Synthetic oligonucleotide
  Antisense strand to SEQ ID NO: 2247378
aaauucacugcaguagaag

SEQ ID NO: 2247380 - RNA, 19 nt, Artificial Sequence
  Description of Artificial Sequence: Synthetic oligonucleotide
  Sense strand starting at position 3202 of SEQ ID NO: 1884195
augguuuauuacccacagu

SEQ ID NO: 2247381 - RNA, 19 nt, Artificial Sequence
  Description of Artificial Sequence: Synthetic oligonucleotide
  Antisense strand to SEQ ID NO: 2247380
acuguggguaauaaaccau

SEQ ID NO: 2247382 - RNA, 19 nt, Artificial Sequence
  Description of Artificial Sequence: Synthetic oligonucleotide
  Sense strand starting at position 3613 of SEQ ID NO: 1884195
gccugagagcguucuuagc

SEQ ID NO: 2247383 - RNA, 19 nt, Artificial Sequence
  Description of Artificial Sequence: Synthetic oligonucleotide
  Antisense strand to SEQ ID NO: 2247382
gcuaagaacgcucucaggc

SEQ ID NO: 2247384 - RNA, 19 nt, Artificial Sequence
  Description of Artificial Sequence: Synthetic oligonucleotide
  Sense strand starting at position 3619 of SEQ ID NO: 1884195
gagcguucuuagcucauuu

SEQ ID NO: 2247385 - RNA, 19 nt, Artificial Sequence
  Description of Artificial Sequence: Synthetic oligonucleotide
  Antisense strand to SEQ ID NO: 2247384
aaaugagcuaagaacgcuc

SEQ ID NO: 2247386 - RNA, 19 nt, Artificial Sequence
  Description of Artificial Sequence: Synthetic oligonucleotide
  Sense strand starting at position 3684 of SEQ ID NO: 1884195
acauaacaccguuacugua

SEQ ID NO: 2247387 - RNA, 19 nt, Artificial Sequence
  Description of Artificial Sequence: Synthetic oligonucleotide
  Antisense strand to SEQ ID NO: 2247386
uacaguaacgguguuaugu

SEQ ID NO: 2247388 - RNA, 19 nt, Artificial Sequence
  Description of Artificial Sequence: Synthetic oligonucleotide
  Sense strand starting at position 3726 of SEQ ID NO: 1884195
ggcuuugcugccuaagaga

SEQ ID NO: 2247389 - RNA, 19 nt, Artificial Sequence
  Description of Artificial Sequence: Synthetic oligonucleotide
  Antisense strand to SEQ ID NO: 2247388
ucucuuaggcagcaaagcc

SEQ ID NO: 2247390 - RNA, 19 nt, Artificial Sequence
  Description of Artificial Sequence: Synthetic oligonucleotide
  Sense strand starting at position 3734 of SEQ ID NO: 1884195
ugccuaagagaacauguau

SEQ ID NO: 2247391 - RNA, 19 nt, Artificial Sequence
  Description of Artificial Sequence: Synthetic oligonucleotide
  Antisense strand to SEQ ID NO: 2247390
auacauguucucuuaggca

SEQ ID NO: 2247392 - RNA, 19 nt, Artificial Sequence
  Description of Artificial Sequence: Synthetic oligonucleotide
  Sense strand starting at position 3928 of SEQ ID NO: 1884195
uagcuagauuagguaggua

SEQ ID NO: 2247393 - RNA, 19 nt, Artificial Sequence
  Description of Artificial Sequence: Synthetic oligonucleotide
  Antisense strand to SEQ ID NO: 2247392
uaccuaccuaaucuagcua

SEQ ID NO: 2247394 - RNA, 19 nt, Artificial Sequence
  Description of Artificial Sequence: Synthetic oligonucleotide
  Sense strand starting at position 188 of SEQ ID NO: 1884196
guacuaggauuugugcuau

SEQ ID NO: 2247395 - RNA, 19 nt, Artificial Sequence
  Description of Artificial Sequence: Synthetic oligonucleotide
  Antisense strand to SEQ ID NO: 2247394
auagcacaaauccuaguac

SEQ ID NO: 2247396 - RNA, 19 nt, Artificial Sequence
  Description of Artificial Sequence: Synthetic oligonucleotide
  Sense strand starting at position 279 of SEQ ID NO: 1884196
gucugagagggaugaagua

SEQ ID NO: 2247397 - RNA, 19 nt, Artificial Sequence
  Description of Artificial Sequence: Synthetic oligonucleotide
  Antisense strand to SEQ ID NO: 2247396
uacuucaucccucucagac

SEQ ID NO: 2247398 - RNA, 19 nt, Artificial Sequence
  Description of Artificial Sequence: Synthetic oligonucleotide
  Sense strand starting at position 313 of SEQ ID NO: 1884196
cagaguauaucagucaaga

SEQ ID NO: 2247399 - RNA, 19 nt, Artificial Sequence
  Description of Artificial Sequence: Synthetic oligonucleotide
  Antisense strand to SEQ ID NO: 2247398
ucuugacugauauacucug

SEQ ID NO: 2247400 - RNA, 19 nt, Artificial Sequence
  Description of Artificial Sequence: Synthetic oligonucleotide
  Sense strand starting at position 337 of SEQ ID NO: 1884196
uuguuugaaaguggcagaa

SEQ ID NO: 2247401 - RNA, 19 nt, Artificial Sequence
  Description of Artificial Sequence: Synthetic oligonucleotide
  Antisense strand to SEQ ID NO: 2247400
uucugccacuuucaaacaa

SEQ ID NO: 2247402 - RNA, 19 nt, Artificial Sequence
  Description of Artificial Sequence: Synthetic oligonucleotide
  Sense strand starting at position 349 of SEQ ID NO: 1884196
ggcagaaauugaccuaagu

SEQ ID NO: 2247403 - RNA, 19 nt, Artificial Sequence
  Description of Artificial Sequence: Synthetic oligonucleotide
  Antisense strand to SEQ ID NO: 2247402
acuuaggucaauuucugcc

SEQ ID NO: 2247404 - RNA, 19 nt, Artificial Sequence
  Description of Artificial Sequence: Synthetic oligonucleotide
  Sense strand starting at position 380 of SEQ ID NO: 1884196
auugacucaugugcuuaaa

SEQ ID NO: 2247405 - RNA, 19 nt, Artificial Sequence
  Description of Artificial Sequence: Synthetic oligonucleotide
  Antisense strand to SEQ ID NO: 2247404
uuuaagcacaugagucaau

SEQ ID NO: 2247406 - RNA, 19 nt, Artificial Sequence
  Description of Artificial Sequence: Synthetic oligonucleotide
  Sense strand starting at position 417 of SEQ ID NO: 1884196
ucagguauagcuuaaccaa

SEQ ID NO: 2247407 - RNA, 19 nt, Artificial Sequence
  Description of Artificial Sequence: Synthetic oligonucleotide
  Antisense strand to SEQ ID NO: 2247406
uugguuaagcuauaccuga

SEQ ID NO: 2247408 - RNA, 19 nt, Artificial Sequence
  Description of Artificial Sequence: Synthetic oligonucleotide
  Sense strand starting at position 565 of SEQ ID NO: 1884196
guaagagucucuuccagaa

SEQ ID NO: 2247409 - RNA, 19 nt, Artificial Sequence
  Description of Artificial Sequence: Synthetic oligonucleotide
  Antisense strand to SEQ ID NO: 2247408
uucuggaagagacucuuac

SEQ ID NO: 2247410 - RNA, 19 nt, Artificial Sequence
  Description of Artificial Sequence: Synthetic oligonucleotide
  Sense strand starting at position 579 of SEQ ID NO: 1884196
cagaacuucccgcagaagu

SEQ ID NO: 2247411 - RNA, 19 nt, Artificial Sequence
  Description of Artificial Sequence: Synthetic oligonucleotide
  Antisense strand to SEQ ID NO: 2247410
acuucugcgggaaguucug

SEQ ID NO: 2247412 - RNA, 19 nt, Artificial Sequence
  Description of Artificial Sequence: Synthetic oligonucleotide
  Sense strand starting at position 942 of SEQ ID NO: 1884196
ucaauuaugugucccacaa

SEQ ID NO: 2247413 - RNA, 19 nt, Artificial Sequence
  Description of Artificial Sequence: Synthetic oligonucleotide
  Antisense strand to SEQ ID NO: 2247412
uugugggacacauaauuga

SEQ ID NO: 2247414 - RNA, 19 nt, Artificial Sequence
  Description of Artificial Sequence: Synthetic oligonucleotide
  Sense strand starting at position 987 of SEQ ID NO: 1884196
acaagaaagucccuaagua

SEQ ID NO: 2247415 - RNA, 19 nt, Artificial Sequence
  Description of Artificial Sequence: Synthetic oligonucleotide
  Antisense strand to SEQ ID NO: 2247414
uacuuagggacuuucuugu

SEQ ID NO: 2247416 - RNA, 19 nt, Artificial Sequence
  Description of Artificial Sequence: Synthetic oligonucleotide
  Sense strand starting at position 1075 of SEQ ID NO: 1884196
caggaaaguggcugagaua

SEQ ID NO: 2247417 - RNA, 19 nt, Artificial Sequence
  Description of Artificial Sequence: Synthetic oligonucleotide
  Antisense strand to SEQ ID NO: 2247416
uaucucagccacuuuccug

SEQ ID NO: 2247418 - RNA, 19 nt, Artificial Sequence
  Description of Artificial Sequence: Synthetic oligonucleotide
  Sense strand starting at position 1103 of SEQ ID NO: 1884196
gucuaaauguuaguaaaca

SEQ ID NO: 2247419 - RNA, 19 nt, Artificial Sequence
  Description of Artificial Sequence: Synthetic oligonucleotide
  Antisense strand to SEQ ID NO: 2247418
uguuuacuaacauuuagac

SEQ ID NO: 2247420 - RNA, 19 nt, Artificial Sequence
  Description of Artificial Sequence: Synthetic oligonucleotide
  Sense strand starting at position 1129 of SEQ ID NO: 1884196
uagacuuggccuggagaga

SEQ ID NO: 2247421 - RNA, 19 nt, Artificial Sequence
  Description of Artificial Sequence: Synthetic oligonucleotide
  Antisense strand to SEQ ID NO: 2247420
ucucuccaggccaagucua

SEQ ID NO: 2247422 - RNA, 19 nt, Artificial Sequence
  Description of Artificial Sequence: Synthetic oligonucleotide
  Sense strand starting at position 1331 of SEQ ID NO: 1884196
aggagaaaugcuugagucu

SEQ ID NO: 2247423 - RNA, 19 nt, Artificial Sequence
  Description of Artificial Sequence: Synthetic oligonucleotide
  Antisense strand to SEQ ID NO: 2247422
agacucaagcauuucuccu

SEQ ID NO: 2247424 - RNA, 19 nt, Artificial Sequence
  Description of Artificial Sequence: Synthetic oligonucleotide
  Sense strand starting at position 1363 of SEQ ID NO: 1884196
cagccugggcaagauauau

SEQ ID NO: 2247425 - RNA, 19 nt, Artificial Sequence
  Description of Artificial Sequence: Synthetic oligonucleotide
  Antisense strand to SEQ ID NO: 2247424
auauaucuugcccaggcug

SEQ ID NO: 2247426 - RNA, 19 nt, Artificial Sequence
  Description of Artificial Sequence: Synthetic oligonucleotide
  Sense strand starting at position 1424 of SEQ ID NO: 1884196
aucacaguuagguaauagu

SEQ ID NO: 2247427 - RNA, 19 nt, Artificial Sequence
  Description of Artificial Sequence: Synthetic oligonucleotide
  Antisense strand to SEQ ID NO: 2247426
acuauuaccuaacugugau

SEQ ID NO: 2247428 - RNA, 19 nt, Artificial Sequence
  Description of Artificial Sequence: Synthetic oligonucleotide
  Sense strand starting at position 1431 of SEQ ID NO: 1884196
uuagguaauagugagcuuu

SEQ ID NO: 2247429 - RNA, 19 nt, Artificial Sequence
  Description of Artificial Sequence: Synthetic oligonucleotide
  Antisense strand to SEQ ID NO: 2247428
aaagcucacuauuaccuaa

SEQ ID NO: 2247430 - RNA, 19 nt, Artificial Sequence
  Description of Artificial Sequence: Synthetic oligonucleotide
  Sense strand starting at position 1622 of SEQ ID NO: 1884196
auaaguagccagcaaagau

SEQ ID NO: 2247431 - RNA, 19 nt, Artificial Sequence
  Description of Artificial Sequence: Synthetic oligonucleotide
  Antisense strand to SEQ ID NO: 2247430
aucuuugcuggcuacuuau

SEQ ID NO: 2247432 - RNA, 19 nt, Artificial Sequence
  Description of Artificial Sequence: Synthetic oligonucleotide
  Sense strand starting at position 1687 of SEQ ID NO: 1884196
ccaugaccucauggcauau

SEQ ID NO: 2247433 - RNA, 19 nt, Artificial Sequence
  Description of Artificial Sequence: Synthetic oligonucleotide
  Antisense strand to SEQ ID NO: 2247432
auaugccaugaggucaugg

SEQ ID NO: 2247434 - RNA, 19 nt, Artificial Sequence
  Description of Artificial Sequence: Synthetic oligonucleotide
  Sense strand starting at position 1691 of SEQ ID NO: 1884196
gaccucauggcauauaagu

SEQ ID NO: 2247435 - RNA, 19 nt, Artificial Sequence
  Description of Artificial Sequence: Synthetic oligonucleotide
  Antisense strand to SEQ ID NO: 2247434
acuuauaugccaugagguc

SEQ ID NO: 2247436 - RNA, 19 nt, Artificial Sequence
  Description of Artificial Sequence: Synthetic oligonucleotide
  Sense strand starting at position 1964 of SEQ ID NO: 1884196
uuugaagucugugugaaag

SEQ ID NO: 2247437 - RNA, 19 nt, Artificial Sequence
  Description of Artificial Sequence: Synthetic oligonucleotide
  Antisense strand to SEQ ID NO: 2247436
cuuucacacagacuucaaa

SEQ ID NO: 2247438 - RNA, 19 nt, Artificial Sequence
  Description of Artificial Sequence: Synthetic oligonucleotide
  Sense strand starting at position 1970 of SEQ ID NO: 1884196
gucugugugaaagauaaag

SEQ ID NO: 2247439 - RNA, 19 nt, Artificial Sequence
  Description of Artificial Sequence: Synthetic oligonucleotide
  Antisense strand to SEQ ID NO: 2247438
cuuuaucuuucacacagac

SEQ ID NO: 2247440 - RNA, 19 nt, Artificial Sequence
  Description of Artificial Sequence: Synthetic oligonucleotide
  Sense strand starting at position 1981 of SEQ ID NO: 1884196
agauaaagucucuguacca

SEQ ID NO: 2247441 - RNA, 19 nt, Artificial Sequence
  Description of Artificial Sequence: Synthetic oligonucleotide
  Antisense strand to SEQ ID NO: 2247440
ugguacagagacuuuaucu

SEQ ID NO: 2247442 - RNA, 19 nt, Artificial Sequence
  Description of Artificial Sequence: Synthetic oligonucleotide
  Sense strand starting at position 1982 of SEQ ID NO: 1884196
gauaaagucucuguaccag

SEQ ID NO: 2247443 - RNA, 19 nt, Artificial Sequence
  Description of Artificial Sequence: Synthetic oligonucleotide
  Antisense strand to SEQ ID NO: 2247442
cugguacagagacuuuauc

SEQ ID NO: 2247444 - RNA, 19 nt, Artificial Sequence
  Description of Artificial Sequence: Synthetic oligonucleotide
  Sense strand starting at position 1997 of SEQ ID NO: 1884196
ccaguagagaaucguggaa

SEQ ID NO: 2247445 - RNA, 19 nt, Artificial Sequence
  Description of Artificial Sequence: Synthetic oligonucleotide
  Antisense strand to SEQ ID NO: 2247444
uuccacgauucucuacugg

SEQ ID NO: 2247446 - RNA, 19 nt, Artificial Sequence
  Description of Artificial Sequence: Synthetic oligonucleotide
  Sense strand starting at position 2203 of SEQ ID NO: 1884196
gcuaaauuggauugccaga

SEQ ID NO: 2247447 - RNA, 19 nt, Artificial Sequence
  Description of Artificial Sequence: Synthetic oligonucleotide
  Antisense strand to SEQ ID NO: 2247446
ucuggcaauccaauuuagc

SEQ ID NO: 2247448 - RNA, 19 nt, Artificial Sequence
  Description of Artificial Sequence: Synthetic oligonucleotide
  Sense strand starting at position 2217 of SEQ ID NO: 1884196
ccagaaugauuguuauaau

SEQ ID NO: 2247449 - RNA, 19 nt, Artificial Sequence
  Description of Artificial Sequence: Synthetic oligonucleotide
  Antisense strand to SEQ ID NO: 2247448
auuauaacaaucauucugg

SEQ ID NO: 2247450 - RNA, 19 nt, Artificial Sequence
  Description of Artificial Sequence: Synthetic oligonucleotide
  Sense strand starting at position 2267 of SEQ ID NO: 1884196
guuugaugcacaugaggaa

SEQ ID NO: 2247451 - RNA, 19 nt, Artificial Sequence
  Description of Artificial Sequence: Synthetic oligonucleotide
  Antisense strand to SEQ ID NO: 2247450
uuccucaugugcaucaaac

SEQ ID NO: 2247452 - RNA, 19 nt, Artificial Sequence
  Description of Artificial Sequence: Synthetic oligonucleotide
  Sense strand starting at position 2616 of SEQ ID NO: 1884196
ugcauuuaguacuucuauu

SEQ ID NO: 2247453 - RNA, 19 nt, Artificial Sequence
  Description of Artificial Sequence: Synthetic oligonucleotide
  Antisense strand to SEQ ID NO: 2247452
aauagaaguacuaaaugca

SEQ ID NO: 2247454 - RNA, 19 nt, Artificial Sequence
  Description of Artificial Sequence: Synthetic oligonucleotide
  Sense strand starting at position 2869 of SEQ ID NO: 1884196
guccuuggaaaguaucuga

SEQ ID NO: 2247455 - RNA, 19 nt, Artificial Sequence
  Description of Artificial Sequence: Synthetic oligonucleotide
  Antisense strand to SEQ ID NO: 2247454
ucagauacuuuccaaggac

SEQ ID NO: 2247456 - RNA, 19 nt, Artificial Sequence
  Description of Artificial Sequence: Synthetic oligonucleotide
  Sense strand starting at position 2873 of SEQ ID NO: 1884196
uuggaaaguaucugagacu

SEQ ID NO: 2247457 - RNA, 19 nt, Artificial Sequence
  Description of Artificial Sequence: Synthetic oligonucleotide
  Antisense strand to SEQ ID NO: 2247456
agucucagauacuuuccaa

SEQ ID NO: 2247458 - RNA, 19 nt, Artificial Sequence
  Description of Artificial Sequence: Synthetic oligonucleotide
  Sense strand starting at position 2966 of SEQ ID NO: 1884196
ccaguuguuccacaguuag

SEQ ID NO: 2247459 - RNA, 19 nt, Artificial Sequence
  Description of Artificial Sequence: Synthetic oligonucleotide
  Antisense strand to SEQ ID NO: 2247458
cuaacuguggaacaacugg

SEQ ID NO: 2247460 - RNA, 19 nt, Artificial Sequence
  Description of Artificial Sequence: Synthetic oligonucleotide
  Sense strand starting at position 3200 of SEQ ID NO: 1884196
ucuguaugccuugacauac

SEQ ID NO: 2247461 - RNA, 19 nt, Artificial Sequence
  Description of Artificial Sequence: Synthetic oligonucleotide
  Antisense strand to SEQ ID NO: 2247460
guaugucaaggcauacaga

SEQ ID NO: 2247462 - RNA, 19 nt, Artificial Sequence
  Description of Artificial Sequence: Synthetic oligonucleotide
  Sense strand starting at position 3315 of SEQ ID NO: 1884196
cuaccaugcuuugugauuu

SEQ ID NO: 2247463 - RNA, 19 nt, Artificial Sequence
  Description of Artificial Sequence: Synthetic oligonucleotide
  Antisense strand to SEQ ID NO: 2247462
aaaucacaaagcaugguag

SEQ ID NO: 2247464 - RNA, 19 nt, Artificial Sequence
  Description of Artificial Sequence: Synthetic oligonucleotide
  Sense strand starting at position 3321 of SEQ ID NO: 1884196
ugcuuugugauuuggccaa

SEQ ID NO: 2247465 - RNA, 19 nt, Artificial Sequence
  Description of Artificial Sequence: Synthetic oligonucleotide
  Antisense strand to SEQ ID NO: 2247464
uuggccaaaucacaaagca

SEQ ID NO: 2247466 - RNA, 19 nt, Artificial Sequence
  Description of Artificial Sequence: Synthetic oligonucleotide
  Sense strand starting at position 3379 of SEQ ID NO: 1884196
ugacuagaauccuuguuua

SEQ ID NO: 2247467 - RNA, 19 nt, Artificial Sequence
  Description of Artificial Sequence: Synthetic oligonucleotide
  Antisense strand to SEQ ID NO: 2247466
uaaacaaggauucuaguca

SEQ ID NO: 2247468 - RNA, 19 nt, Artificial Sequence
  Description of Artificial Sequence: Synthetic oligonucleotide
  Sense strand starting at position 3405 of SEQ ID NO: 1884196
ugcugaaaucuccagaauc

SEQ ID NO: 2247469 - RNA, 19 nt, Artificial Sequence
  Description of Artificial Sequence: Synthetic oligonucleotide
  Antisense strand to SEQ ID NO: 2247468
gauucuggagauuucagca

SEQ ID NO: 2247470 - RNA, 19 nt, Artificial Sequence
  Description of Artificial Sequence: Synthetic oligonucleotide
  Sense strand starting at position 3654 of SEQ ID NO: 1884196
ccggaagauucugugacuu

SEQ ID NO: 2247471 - RNA, 19 nt, Artificial Sequence
  Description of Artificial Sequence: Synthetic oligonucleotide
  Antisense strand to SEQ ID NO: 2247470
aagucacagaaucuuccgg

SEQ ID NO: 2247472 - RNA, 19 nt, Artificial Sequence
  Description of Artificial Sequence: Synthetic oligonucleotide
  Sense strand starting at position 3733 of SEQ ID NO: 1884196
aguccauucccuggacaca

SEQ ID NO: 2247473 - RNA, 19 nt, Artificial Sequence
  Description of Artificial Sequence: Synthetic oligonucleotide
  Antisense strand to SEQ ID NO: 2247472
uguguccagggaauggacu

SEQ ID NO: 2247474 - RNA, 19 nt, Artificial Sequence
  Description of Artificial Sequence: Synthetic oligonucleotide
  Sense strand starting at position 200 of SEQ ID NO: 1884197
ugcuuccuugguuauauaa

SEQ ID NO: 2247475 - RNA, 19 nt, Artificial Sequence
  Description of Artificial Sequence: Synthetic oligonucleotide
  Antisense strand to SEQ ID NO: 2247474
uuauauaaccaaggaagca

SEQ ID NO: 2247476 - RNA, 19 nt, Artificial Sequence
  Description of Artificial Sequence: Synthetic oligonucleotide
  Sense strand starting at position 351 of SEQ ID NO: 1884197
ucaguauuuggcuguguug

SEQ ID NO: 2247477 - RNA, 19 nt, Artificial Sequence
  Description of Artificial Sequence: Synthetic oligonucleotide
  Antisense strand to SEQ ID NO: 2247476
caacacagccaaauacuga

SEQ ID NO: 2247478 - RNA, 19 nt, Artificial Sequence
  Description of Artificial Sequence: Synthetic oligonucleotide
  Sense strand starting at position 381 of SEQ ID NO: 1884197
cccauuugguauccguuau

SEQ ID NO: 2247479 - RNA, 19 nt, Artificial Sequence
  Description of Artificial Sequence: Synthetic oligonucleotide
  Antisense strand to SEQ ID NO: 2247478
auaacggauaccaaauggg

SEQ ID NO: 2247480 - RNA, 19 nt, Artificial Sequence
  Description of Artificial Sequence: Synthetic oligonucleotide
  Sense strand starting at position 411 of SEQ ID NO: 1884197
cagugagugugauuaagaa

SEQ ID NO: 2247481 - RNA, 19 nt, Artificial Sequence
  Description of Artificial Sequence: Synthetic oligonucleotide
  Antisense strand to SEQ ID NO: 2247480
uucuuaaucacacucacug

SEQ ID NO: 2247482 - RNA, 19 nt, Artificial Sequence
  Description of Artificial Sequence: Synthetic oligonucleotide
  Sense strand starting at position 612 of SEQ ID NO: 1884197
uaggaauggucugucugga

SEQ ID NO: 2247483 - RNA, 19 nt, Artificial Sequence
  Description of Artificial Sequence: Synthetic oligonucleotide
  Antisense strand to SEQ ID NO: 2247482
uccagacagaccauuccua

SEQ ID NO: 2247484 - RNA, 19 nt, Artificial Sequence
  Description of Artificial Sequence: Synthetic oligonucleotide
  Sense strand starting at position 617 of SEQ ID NO: 1884197
auggucugucuggaagaca

SEQ ID NO: 2247485 - RNA, 19 nt, Artificial Sequence
  Description of Artificial Sequence: Synthetic oligonucleotide
  Antisense strand to SEQ ID NO: 2247484
ugucuuccagacagaccau

SEQ ID NO: 2247486 - RNA, 19 nt, Artificial Sequence
  Description of Artificial Sequence: Synthetic oligonucleotide
  Sense strand starting at position 639 of SEQ ID NO: 1884197
ggaggaugugagcaaaguu

SEQ ID NO: 2247487 - RNA, 19 nt, Artificial Sequence
  Description of Artificial Sequence: Synthetic oligonucleotide
  Antisense strand to SEQ ID NO: 2247486
aacuuugcucacauccucc

SEQ ID NO: 2247488 - RNA, 19 nt, Artificial Sequence
  Description of Artificial Sequence: Synthetic oligonucleotide
  Sense strand starting at position 841 of SEQ ID NO: 1884197
uagacaacugcaugguaau

SEQ ID NO: 2247489 - RNA, 19 nt, Artificial Sequence
  Description of Artificial Sequence: Synthetic oligonucleotide
  Antisense strand to SEQ ID NO: 2247488
auuaccaugcaguugucua

SEQ ID NO: 2247490 - RNA, 19 nt, Artificial Sequence
  Description of Artificial Sequence: Synthetic oligonucleotide
  Sense strand starting at position 842 of SEQ ID NO: 1884197
agacaacugcaugguaaua

SEQ ID NO: 2247491 - RNA, 19 nt, Artificial Sequence
  Description of Artificial Sequence: Synthetic oligonucleotide
  Antisense strand to SEQ ID NO: 2247490
uauuaccaugcaguugucu

SEQ ID NO: 2247492 - RNA, 19 nt, Artificial Sequence
  Description of Artificial Sequence: Synthetic oligonucleotide
  Sense strand starting at position 925 of SEQ ID NO: 1884197
caaggagucuaaccguaug

SEQ ID NO: 2247493 - RNA, 19 nt, Artificial Sequence
  Description of Artificial Sequence: Synthetic oligonucleotide
  Antisense strand to SEQ ID NO: 2247492
cauacgguuagacuccuug

SEQ ID NO: 2247494 - RNA, 19 nt, Artificial Sequence
  Description of Artificial Sequence: Synthetic oligonucleotide
  Sense strand starting at position 950 of SEQ ID NO: 1884197
ccuguaguccaugaaggua

SEQ ID NO: 2247495 - RNA, 19 nt, Artificial Sequence
  Description of Artificial Sequence: Synthetic oligonucleotide
  Antisense strand to SEQ ID NO: 2247494
uaccuucauggacuacagg

SEQ ID NO: 2247496 - RNA, 19 nt, Artificial Sequence
  Description of Artificial Sequence: Synthetic oligonucleotide
  Sense strand starting at position 1056 of SEQ ID NO: 1884197
ugggcuucuacaugagauu

SEQ ID NO: 2247497 - RNA, 19 nt, Artificial Sequence
  Description of Artificial Sequence: Synthetic oligonucleotide
  Antisense strand to SEQ ID NO: 2247496
aaucucauguagaagccca

SEQ ID NO: 2247498 - RNA, 19 nt, Artificial Sequence
  Description of Artificial Sequence: Synthetic oligonucleotide
  Sense strand starting at position 1125 of SEQ ID NO: 1884197
ucuacaaacgauugcauua

SEQ ID NO: 2247499 - RNA, 19 nt, Artificial Sequence
  Description of Artificial Sequence: Synthetic oligonucleotide
  Antisense strand to SEQ ID NO: 2247498
uaaugcaaucguuuguaga

SEQ ID NO: 2247500 - RNA, 19 nt, Artificial Sequence
  Description of Artificial Sequence: Synthetic oligonucleotide
  Sense strand starting at position 1144 of SEQ ID NO: 1884197
guuguuugacuccacuauu

SEQ ID NO: 2247501 - RNA, 19 nt, Artificial Sequence
  Description of Artificial Sequence: Synthetic oligonucleotide
  Antisense strand to SEQ ID NO: 2247500
aauaguggagucaaacaac

SEQ ID NO: 2247502 - RNA, 19 nt, Artificial Sequence
  Description of Artificial Sequence: Synthetic oligonucleotide
  Sense strand starting at position 1147 of SEQ ID NO: 1884197
guuugacuccacuauucca

SEQ ID NO: 2247503 - RNA, 19 nt, Artificial Sequence
  Description of Artificial Sequence: Synthetic oligonucleotide
  Antisense strand to SEQ ID NO: 2247502
uggaauaguggagucaaac

SEQ ID NO: 2247504 - RNA, 19 nt, Artificial Sequence
  Description of Artificial Sequence: Synthetic oligonucleotide
  Sense strand starting at position 1478 of SEQ ID NO: 1884197
gugccuuugaaggaagagu

SEQ ID NO: 2247505 - RNA, 19 nt, Artificial Sequence
  Description of Artificial Sequence: Synthetic oligonucleotide
  Antisense strand to SEQ ID NO: 2247504
acucuuccuucaaaggcac

SEQ ID NO: 2247506 - RNA, 19 nt, Artificial Sequence
  Description of Artificial Sequence: Synthetic oligonucleotide
  Sense strand starting at position 1536 of SEQ ID NO: 1884197
gguucugugcugucaccga

SEQ ID NO: 2247507 - RNA, 19 nt, Artificial Sequence
  Description of Artificial Sequence: Synthetic oligonucleotide
  Antisense strand to SEQ ID NO: 2247506
ucggugacagcacagaacc

SEQ ID NO: 2247508 - RNA, 19 nt, Artificial Sequence
  Description of Artificial Sequence: Synthetic oligonucleotide
  Sense strand starting at position 1543 of SEQ ID NO: 1884197
ugcugucaccgagcuacuu

SEQ ID NO: 2247509 - RNA, 19 nt, Artificial Sequence
  Description of Artificial Sequence: Synthetic oligonucleotide
  Antisense strand to SEQ ID NO: 2247508
aaguagcucggugacagca

SEQ ID NO: 2247510 - RNA, 19 nt, Artificial Sequence
  Description of Artificial Sequence: Synthetic oligonucleotide
  Sense strand starting at position 1594 of SEQ ID NO: 1884197
ugggcugugagucagaaga

SEQ ID NO: 2247511 - RNA, 19 nt, Artificial Sequence
  Description of Artificial Sequence: Synthetic oligonucleotide
  Antisense strand to SEQ ID NO: 2247510
ucuucugacucacagccca

SEQ ID NO: 2247512 - RNA, 19 nt, Artificial Sequence
  Description of Artificial Sequence: Synthetic oligonucleotide
  Sense strand starting at position 1604 of SEQ ID NO: 1884197
gucagaagacagugguuga

SEQ ID NO: 2247513 - RNA, 19 nt, Artificial Sequence
  Description of Artificial Sequence: Synthetic oligonucleotide
  Antisense strand to SEQ ID NO: 2247512
ucaaccacugucuucugac

SEQ ID NO: 2247514 - RNA, 19 nt, Artificial Sequence
  Description of Artificial Sequence: Synthetic oligonucleotide
  Sense strand starting at position 1605 of SEQ ID NO: 1884197
ucagaagacagugguugaa

SEQ ID NO: 2247515 - RNA, 19 nt, Artificial Sequence
  Description of Artificial Sequence: Synthetic oligonucleotide
  Antisense strand to SEQ ID NO: 2247514
uucaaccacugucuucuga

SEQ ID NO: 2247516 - RNA, 19 nt, Artificial Sequence
  Description of Artificial Sequence: Synthetic oligonucleotide
  Sense strand starting at position 1607 of SEQ ID NO: 1884197
agaagacagugguugaagu

SEQ ID NO: 2247517 - RNA, 19 nt, Artificial Sequence
  Description of Artificial Sequence: Synthetic oligonucleotide
  Antisense strand to SEQ ID NO: 2247516
acuucaaccacugucuucu

SEQ ID NO: 2247518 - RNA, 19 nt, Artificial Sequence
  Description of Artificial Sequence: Synthetic oligonucleotide
  Sense strand starting at position 1816 of SEQ ID NO: 1884197
gguuguaguugggucauuu

SEQ ID NO: 2247519 - RNA, 19 nt, Artificial Sequence
  Description of Artificial Sequence: Synthetic oligonucleotide
  Antisense strand to SEQ ID NO: 2247518
aaaugacccaacuacaacc

SEQ ID NO: 2247520 - RNA, 19 nt, Artificial Sequence
  Description of Artificial Sequence: Synthetic oligonucleotide
  Sense strand starting at position 2014 of SEQ ID NO: 1884197
ugauuauaccugcagugac

SEQ ID NO: 2247521 - RNA, 19 nt, Artificial Sequence
  Description of Artificial Sequence: Synthetic oligonucleotide
  Antisense strand to SEQ ID NO: 2247520
gucacugcagguauaauca

SEQ ID NO: 2247522 - RNA, 19 nt, Artificial Sequence
  Description of Artificial Sequence: Synthetic oligonucleotide
  Sense strand starting at position 2106 of SEQ ID NO: 1884197
agaacuuugucucuuaaga

SEQ ID NO: 2247523 - RNA, 19 nt, Artificial Sequence
  Description of Artificial Sequence: Synthetic oligonucleotide
  Antisense strand to SEQ ID NO: 2247522
ucuuaagagacaaaguucu

SEQ ID NO: 2247524 - RNA, 19 nt, Artificial Sequence
  Description of Artificial Sequence: Synthetic oligonucleotide
  Sense strand starting at position 2188 of SEQ ID NO: 1884197
aucaaugacuuguccuaag

SEQ ID NO: 2247525 - RNA, 19 nt, Artificial Sequence
  Description of Artificial Sequence: Synthetic oligonucleotide
  Antisense strand to SEQ ID NO: 2247524
cuuaggacaagucauugau

SEQ ID NO: 2247526 - RNA, 19 nt, Artificial Sequence
  Description of Artificial Sequence: Synthetic oligonucleotide
  Sense strand starting at position 2883 of SEQ ID NO: 1884197
uggcauuaggcuuauaaga

SEQ ID NO: 2247527 - RNA, 19 nt, Artificial Sequence
  Description of Artificial Sequence: Synthetic oligonucleotide
  Antisense strand to SEQ ID NO: 2247526
ucuuauaagccuaaugcca

SEQ ID NO: 2247528 - RNA, 19 nt, Artificial Sequence
  Description of Artificial Sequence: Synthetic oligonucleotide
  Sense strand starting at position 3042 of SEQ ID NO: 1884197
cagaaagcucugggauguu

SEQ ID NO: 2247529 - RNA, 19 nt, Artificial Sequence
  Description of Artificial Sequence: Synthetic oligonucleotide
  Antisense strand to SEQ ID NO: 2247528
aacaucccagagcuuucug

SEQ ID NO: 2247530 - RNA, 19 nt, Artificial Sequence
  Description of Artificial Sequence: Synthetic oligonucleotide
  Sense strand starting at position 3081 of SEQ ID NO: 1884197
cuuugauguuccucagaca

SEQ ID NO: 2247531 - RNA, 19 nt, Artificial Sequence
  Description of Artificial Sequence: Synthetic oligonucleotide
  Antisense strand to SEQ ID NO: 2247530
ugucugaggaacaucaaag

SEQ ID NO: 2247532 - RNA, 19 nt, Artificial Sequence
  Description of Artificial Sequence: Synthetic oligonucleotide
  Sense strand starting at position 3082 of SEQ ID NO: 1884197
uuugauguuccucagacaa

SEQ ID NO: 2247533 - RNA, 19 nt, Artificial Sequence
  Description of Artificial Sequence: Synthetic oligonucleotide
  Antisense strand to SEQ ID NO: 2247532
uugucugaggaacaucaaa

SEQ ID NO: 2247534 - RNA, 19 nt, Artificial Sequence
  Description of Artificial Sequence: Synthetic oligonucleotide
  Sense strand starting at position 3111 of SEQ ID NO: 1884197
aguugcagauuuguuguau

SEQ ID NO: 2247535 - RNA, 19 nt, Artificial Sequence
  Description of Artificial Sequence: Synthetic oligonucleotide
  Antisense strand to SEQ ID NO: 2247534
auacaacaaaucugcaacu

SEQ ID NO: 2247536 - RNA, 19 nt, Artificial Sequence
  Description of Artificial Sequence: Synthetic oligonucleotide
  Sense strand starting at position 3112 of SEQ ID NO: 1884197
guugcagauuuguuguaug

SEQ ID NO: 2247537 - RNA, 19 nt, Artificial Sequence
  Description of Artificial Sequence: Synthetic oligonucleotide
  Antisense strand to SEQ ID NO: 2247536
cauacaacaaaucugcaac

SEQ ID NO: 2247538 - RNA, 19 nt, Artificial Sequence
  Description of Artificial Sequence: Synthetic oligonucleotide
  Sense strand starting at position 3186 of SEQ ID NO: 1884197
guuagaauccuuuggcaaa

SEQ ID NO: 2247539 - RNA, 19 nt, Artificial Sequence
  Description of Artificial Sequence: Synthetic oligonucleotide
  Antisense strand to SEQ ID NO: 2247538
uuugccaaaggauucuaac

SEQ ID NO: 2247540 - RNA, 19 nt, Artificial Sequence
  Description of Artificial Sequence: Synthetic oligonucleotide
  Sense strand starting at position 3581 of SEQ ID NO: 1884197
uucuaaggguugucaagga

SEQ ID NO: 2247541 - RNA, 19 nt, Artificial Sequence
  Description of Artificial Sequence: Synthetic oligonucleotide
  Antisense strand to SEQ ID NO: 2247540
uccuugacaacccuuagaa

SEQ ID NO: 2247542 - RNA, 19 nt, Artificial Sequence
  Description of Artificial Sequence: Synthetic oligonucleotide
  Sense strand starting at position 3649 of SEQ ID NO: 1884197
acagcuuuacaauagugaa

SEQ ID NO: 2247543 - RNA, 19 nt, Artificial Sequence
  Description of Artificial Sequence: Synthetic oligonucleotide
  Antisense strand to SEQ ID NO: 2247542
uucacuauuguaaagcugu

SEQ ID NO: 2247544 - RNA, 19 nt, Artificial Sequence
  Description of Artificial Sequence: Synthetic oligonucleotide
  Sense strand starting at position 3688 of SEQ ID NO: 1884197
guaauaagagaaugguuac

SEQ ID NO: 2247545 - RNA, 19 nt, Artificial Sequence
  Description of Artificial Sequence: Synthetic oligonucleotide
  Antisense strand to SEQ ID NO: 2247544
guaaccauucucuuauuac

SEQ ID NO: 2247546 - RNA, 19 nt, Artificial Sequence
  Description of Artificial Sequence: Synthetic oligonucleotide
  Sense strand starting at position 3694 of SEQ ID NO: 1884197
agagaaugguuacuuacac

SEQ ID NO: 2247547 - RNA, 19 nt, Artificial Sequence
  Description of Artificial Sequence: Synthetic oligonucleotide
  Antisense strand to SEQ ID NO: 2247546
guguaaguaaccauucucu

SEQ ID NO: 2247548 - RNA, 19 nt, Artificial Sequence
  Description of Artificial Sequence: Synthetic oligonucleotide
  Sense strand starting at position 3695 of SEQ ID NO: 1884197
gagaaugguuacuuacacu

SEQ ID NO: 2247549 - RNA, 19 nt, Artificial Sequence
  Description of Artificial Sequence: Synthetic oligonucleotide
  Antisense strand to SEQ ID NO: 2247548
aguguaaguaaccauucuc

SEQ ID NO: 2247550 - RNA, 19 nt, Artificial Sequence
  Description of Artificial Sequence: Synthetic oligonucleotide
  Sense strand starting at position 3794 of SEQ ID NO: 1884197
ugguuaauacauuauguag

SEQ ID NO: 2247551 - RNA, 19 nt, Artificial Sequence
  Description of Artificial Sequence: Synthetic oligonucleotide
  Antisense strand to SEQ ID NO: 2247550
cuacauaauguauuaacca

SEQ ID NO: 2247552 - RNA, 19 nt, Artificial Sequence
  Description of Artificial Sequence: Synthetic oligonucleotide
  Sense strand starting at position 3877 of SEQ ID NO: 1884197
gguaucacaggugaucuuu

SEQ ID NO: 2247553 - RNA, 19 nt, Artificial Sequence
  Description of Artificial Sequence: Synthetic oligonucleotide
  Antisense strand to SEQ ID NO: 2247552
aaagaucaccugugauacc

SEQ ID NO: 2247554 - RNA, 19 nt, Artificial Sequence
  Description of Artificial Sequence: Synthetic oligonucleotide
  Sense strand starting at position 2 of SEQ ID NO: 1884198
guuaguacuuuacugguau

SEQ ID NO: 2247555 - RNA, 19 nt, Artificial Sequence
  Description of Artificial Sequence: Synthetic oligonucleotide
  Antisense strand to SEQ ID NO: 2247554
auaccaguaaaguacuaac

SEQ ID NO: 2247556 - RNA, 19 nt, Artificial Sequence
  Description of Artificial Sequence: Synthetic oligonucleotide
  Sense strand starting at position 14 of SEQ ID NO: 1884198
cugguauaguaucauuuaa

SEQ ID NO: 2247557 - RNA, 19 nt, Artificial Sequence
  Description of Artificial Sequence: Synthetic oligonucleotide
  Antisense strand to SEQ ID NO: 2247556
uuaaaugauacuauaccag

SEQ ID NO: 2247558 - RNA, 19 nt, Artificial Sequence
  Description of Artificial Sequence: Synthetic oligonucleotide
  Sense strand starting at position 255 of SEQ ID NO: 1884198
uacugauggcguugaauuc

SEQ ID NO: 2247559 - RNA, 19 nt, Artificial Sequence
  Description of Artificial Sequence: Synthetic oligonucleotide
  Antisense strand to SEQ ID NO: 2247558
gaauucaacgccaucagua

SEQ ID NO: 2247560 - RNA, 19 nt, Artificial Sequence
  Description of Artificial Sequence: Synthetic oligonucleotide
  Sense strand starting at position 338 of SEQ ID NO: 1884198
gggaaagguagcugguuaa

SEQ ID NO: 2247561 - RNA, 19 nt, Artificial Sequence
  Description of Artificial Sequence: Synthetic oligonucleotide
  Antisense strand to SEQ ID NO: 2247560
uuaaccagcuaccuuuccc

SEQ ID NO: 2247562 - RNA, 19 nt, Artificial Sequence
  Description of Artificial Sequence: Synthetic oligonucleotide
  Sense strand starting at position 341 of SEQ ID NO: 1884198
aaagguagcugguuaaaug

SEQ ID NO: 2247563 - RNA, 19 nt, Artificial Sequence
  Description of Artificial Sequence: Synthetic oligonucleotide
  Antisense strand to SEQ ID NO: 2247562
cauuuaaccagcuaccuuu

SEQ ID NO: 2247564 - RNA, 19 nt, Artificial Sequence
  Description of Artificial Sequence: Synthetic oligonucleotide
  Sense strand starting at position 342 of SEQ ID NO: 1884198
aagguagcugguuaaauga

SEQ ID NO: 2247565 - RNA, 19 nt, Artificial Sequence
  Description of Artificial Sequence: Synthetic oligonucleotide
  Antisense strand to SEQ ID NO: 2247564
ucauuuaaccagcuaccuu

SEQ ID NO: 2247566 - RNA, 19 nt, Artificial Sequence
  Description of Artificial Sequence: Synthetic oligonucleotide
  Sense strand starting at position 384 of SEQ ID NO: 1884198
gggcucucuuaaguggaga

SEQ ID NO: 2247567 - RNA, 19 nt, Artificial Sequence
  Description of Artificial Sequence: Synthetic oligonucleotide
  Antisense strand to SEQ ID NO: 2247566
ucuccacuuaagagagccc

SEQ ID NO: 2247568 - RNA, 19 nt, Artificial Sequence
  Description of Artificial Sequence: Synthetic oligonucleotide
  Sense strand starting at position 792 of SEQ ID NO: 1884198
ucaggagccuggccuuaau

SEQ ID NO: 2247569 - RNA, 19 nt, Artificial Sequence
  Description of Artificial Sequence: Synthetic oligonucleotide
  Antisense strand to SEQ ID NO: 2247568
auuaaggccaggcuccuga

SEQ ID NO: 2247570 - RNA, 19 nt, Artificial Sequence
  Description of Artificial Sequence: Synthetic oligonucleotide
  Sense strand starting at position 947 of SEQ ID NO: 1884198
caaauugggcagugaggua

SEQ ID NO: 2247571 - RNA, 19 nt, Artificial Sequence
  Description of Artificial Sequence: Synthetic oligonucleotide
  Antisense strand to SEQ ID NO: 2247570
uaccucacugcccaauuug

SEQ ID NO: 2247572 - RNA, 19 nt, Artificial Sequence
  Description of Artificial Sequence: Synthetic oligonucleotide
  Sense strand starting at position 1280 of SEQ ID NO: 1884198
gacuuuggucugcaggcaa

SEQ ID NO: 2247573 - RNA, 19 nt, Artificial Sequence
  Description of Artificial Sequence: Synthetic oligonucleotide
  Antisense strand to SEQ ID NO: 2247572
uugccugcagaccaaaguc

SEQ ID NO: 2247574 - RNA, 19 nt, Artificial Sequence
  Description of Artificial Sequence: Synthetic oligonucleotide
  Sense strand starting at position 1355 of SEQ ID NO: 1884198
gugagagucuuugcaggaa

SEQ ID NO: 2247575 - RNA, 19 nt, Artificial Sequence
  Description of Artificial Sequence: Synthetic oligonucleotide
  Antisense strand to SEQ ID NO: 2247574
uuccugcaaagacucucac

SEQ ID NO: 2247576 - RNA, 19 nt, Artificial Sequence
  Description of Artificial Sequence: Synthetic oligonucleotide
  Sense strand starting at position 1358 of SEQ ID NO: 1884198
agagucuuugcaggaagaa

SEQ ID NO: 2247577 - RNA, 19 nt, Artificial Sequence
  Description of Artificial Sequence: Synthetic oligonucleotide
  Antisense strand to SEQ ID NO: 2247576
uucuuccugcaaagacucu

SEQ ID NO: 2247578 - RNA, 19 nt, Artificial Sequence
  Description of Artificial Sequence: Synthetic oligonucleotide
  Sense strand starting at position 1810 of SEQ ID NO: 1884198
gaggcugaguccucccagu

SEQ ID NO: 2247579 - RNA, 19 nt, Artificial Sequence
  Description of Artificial Sequence: Synthetic oligonucleotide
  Antisense strand to SEQ ID NO: 2247578
acugggaggacucagccuc

SEQ ID NO: 2247580 - RNA, 19 nt, Artificial Sequence
  Description of Artificial Sequence: Synthetic oligonucleotide
  Sense strand starting at position 2036 of SEQ ID NO: 1884198
ggcuuuauccuuuggacuc

SEQ ID NO: 2247581 - RNA, 19 nt, Artificial Sequence
  Description of Artificial Sequence: Synthetic oligonucleotide
  Antisense strand to SEQ ID NO: 2247580
gaguccaaaggauaaagcc

SEQ ID NO: 2247582 - RNA, 19 nt, Artificial Sequence
  Description of Artificial Sequence: Synthetic oligonucleotide
  Sense strand starting at position 2047 of SEQ ID NO: 1884198
uuggacuccuuagaggaaa

SEQ ID NO: 2247583 - RNA, 19 nt, Artificial Sequence
  Description of Artificial Sequence: Synthetic oligonucleotide
  Antisense strand to SEQ ID NO: 2247582
uuuccucuaaggaguccaa

SEQ ID NO: 2247584 - RNA, 19 nt, Artificial Sequence
  Description of Artificial Sequence: Synthetic oligonucleotide
  Sense strand starting at position 2204 of SEQ ID NO: 1884198
gggaaagagcucuguuaau

SEQ ID NO: 2247585 - RNA, 19 nt, Artificial Sequence
  Description of Artificial Sequence: Synthetic oligonucleotide
  Antisense strand to SEQ ID NO: 2247584
auuaacagagcucuuuccc

SEQ ID NO: 2247586 - RNA, 19 nt, Artificial Sequence
  Description of Artificial Sequence: Synthetic oligonucleotide
  Sense strand starting at position 2210 of SEQ ID NO: 1884198
gagcucuguuaaucugagu

SEQ ID NO: 2247587 - RNA, 19 nt, Artificial Sequence
  Description of Artificial Sequence: Synthetic oligonucleotide
  Antisense strand to SEQ ID NO: 2247586
acucagauuaacagagcuc

SEQ ID NO: 2247588 - RNA, 19 nt, Artificial Sequence
  Description of Artificial Sequence: Synthetic oligonucleotide
  Sense strand starting at position 2215 of SEQ ID NO: 1884198
cuguuaaucugaguuuaca

SEQ ID NO: 2247589 - RNA, 19 nt, Artificial Sequence
  Description of Artificial Sequence: Synthetic oligonucleotide
  Antisense strand to SEQ ID NO: 2247588
uguaaacucagauuaacag

SEQ ID NO: 2247590 - RNA, 19 nt, Artificial Sequence
  Description of Artificial Sequence: Synthetic oligonucleotide
  Sense strand starting at position 2236 of SEQ ID NO: 1884198
uuuaguugccaagagauug

SEQ ID NO: 2247591 - RNA, 19 nt, Artificial Sequence
  Description of Artificial Sequence: Synthetic oligonucleotide
  Antisense strand to SEQ ID NO: 2247590
caaucucuuggcaacuaaa

SEQ ID NO: 2247592 - RNA, 19 nt, Artificial Sequence
  Description of Artificial Sequence: Synthetic oligonucleotide
  Sense strand starting at position 2244 of SEQ ID NO: 1884198
ccaagagauuguguuccca

SEQ ID NO: 2247593 - RNA, 19 nt, Artificial Sequence
  Description of Artificial Sequence: Synthetic oligonucleotide
  Antisense strand to SEQ ID NO: 2247592
ugggaacacaaucucuugg

SEQ ID NO: 2247594 - RNA, 19 nt, Artificial Sequence
  Description of Artificial Sequence: Synthetic oligonucleotide
  Sense strand starting at position 2246 of SEQ ID NO: 1884198
aagagauuguguucccaaa

SEQ ID NO: 2247595 - RNA, 19 nt, Artificial Sequence
  Description of Artificial Sequence: Synthetic oligonucleotide
  Antisense strand to SEQ ID NO: 2247594
uuugggaacacaaucucuu

SEQ ID NO: 2247596 - RNA, 19 nt, Artificial Sequence
  Description of Artificial Sequence: Synthetic oligonucleotide
  Sense strand starting at position 2248 of SEQ ID NO: 1884198
gagauuguguucccaaagu

SEQ ID NO: 2247597 - RNA, 19 nt, Artificial Sequence
  Description of Artificial Sequence: Synthetic oligonucleotide
  Antisense strand to SEQ ID NO: 2247596
acuuugggaacacaaucuc

SEQ ID NO: 2247598 - RNA, 19 nt, Artificial Sequence
  Description of Artificial Sequence: Synthetic oligonucleotide
  Sense strand starting at position 2349 of SEQ ID NO: 1884198
cguccuguugcucuugaca

SEQ ID NO: 2247599 - RNA, 19 nt, Artificial Sequence
  Description of Artificial Sequence: Synthetic oligonucleotide
  Antisense strand to SEQ ID NO: 2247598
ugucaagagcaacaggacg

SEQ ID NO: 2247600 - RNA, 19 nt, Artificial Sequence
  Description of Artificial Sequence: Synthetic oligonucleotide
  Sense strand starting at position 2352 of SEQ ID NO: 1884198
ccuguugcucuugacagau

SEQ ID NO: 2247601 - RNA, 19 nt, Artificial Sequence
  Description of Artificial Sequence: Synthetic oligonucleotide
  Antisense strand to SEQ ID NO: 2247600
aucugucaagagcaacagg

SEQ ID NO: 2247602 - RNA, 19 nt, Artificial Sequence
  Description of Artificial Sequence: Synthetic oligonucleotide
  Sense strand starting at position 2388 of SEQ ID NO: 1884198
ucaggagacuuguugcuca

SEQ ID NO: 2247603 - RNA, 19 nt, Artificial Sequence
  Description of Artificial Sequence: Synthetic oligonucleotide
  Antisense strand to SEQ ID NO: 2247602
ugagcaacaagucuccuga

SEQ ID NO: 2247604 - RNA, 19 nt, Artificial Sequence
  Description of Artificial Sequence: Synthetic oligonucleotide
  Sense strand starting at position 2393 of SEQ ID NO: 1884198
agacuuguugcucagugga

SEQ ID NO: 2247605 - RNA, 19 nt, Artificial Sequence
  Description of Artificial Sequence: Synthetic oligonucleotide
  Antisense strand to SEQ ID NO: 2247604
uccacugagcaacaagucu

SEQ ID NO: 2247606 - RNA, 19 nt, Artificial Sequence
  Description of Artificial Sequence: Synthetic oligonucleotide
  Sense strand starting at position 2396 of SEQ ID NO: 1884198
cuuguugcucaguggaacu

SEQ ID NO: 2247607 - RNA, 19 nt, Artificial Sequence
  Description of Artificial Sequence: Synthetic oligonucleotide
  Antisense strand to SEQ ID NO: 2247606
aguuccacugagcaacaag

SEQ ID NO: 2247608 - RNA, 19 nt, Artificial Sequence
  Description of Artificial Sequence: Synthetic oligonucleotide
  Sense strand starting at position 2466 of SEQ ID NO: 1884198
agggcuaccuucccuauua

SEQ ID NO: 2247609 - RNA, 19 nt, Artificial Sequence
  Description of Artificial Sequence: Synthetic oligonucleotide
  Antisense strand to SEQ ID NO: 2247608
uaauagggaagguagcccu

SEQ ID NO: 2247610 - RNA, 19 nt, Artificial Sequence
  Description of Artificial Sequence: Synthetic oligonucleotide
  Sense strand starting at position 2468 of SEQ ID NO: 1884198
ggcuaccuucccuauuaga

SEQ ID NO: 2247611 - RNA, 19 nt, Artificial Sequence
  Description of Artificial Sequence: Synthetic oligonucleotide
  Antisense strand to SEQ ID NO: 2247610
ucuaauagggaagguagcc

SEQ ID NO: 2247612 - RNA, 19 nt, Artificial Sequence
  Description of Artificial Sequence: Synthetic oligonucleotide
  Sense strand starting at position 2930 of SEQ ID NO: 1884198
uguaccuugaccuggagau

SEQ ID NO: 2247613 - RNA, 19 nt, Artificial Sequence
  Description of Artificial Sequence: Synthetic oligonucleotide
  Antisense strand to SEQ ID NO: 2247612
aucuccaggucaagguaca

SEQ ID NO: 2247614 - RNA, 19 nt, Artificial Sequence
  Description of Artificial Sequence: Synthetic oligonucleotide
  Sense strand starting at position 2931 of SEQ ID NO: 1884198
guaccuugaccuggagaua

SEQ ID NO: 2247615 - RNA, 19 nt, Artificial Sequence
  Description of Artificial Sequence: Synthetic oligonucleotide
  Antisense strand to SEQ ID NO: 2247614
uaucuccaggucaagguac

SEQ ID NO: 2247616 - RNA, 19 nt, Artificial Sequence
  Description of Artificial Sequence: Synthetic oligonucleotide
  Sense strand starting at position 3025 of SEQ ID NO: 1884198
uuuaaauggguguguaauu

SEQ ID NO: 2247617 - RNA, 19 nt, Artificial Sequence
  Description of Artificial Sequence: Synthetic oligonucleotide
  Antisense strand to SEQ ID NO: 2247616
aauuacacacccauuuaaa

SEQ ID NO: 2247618 - RNA, 19 nt, Artificial Sequence
  Description of Artificial Sequence: Synthetic oligonucleotide
  Sense strand starting at position 3034 of SEQ ID NO: 1884198
guguguaauuuagauacac

SEQ ID NO: 2247619 - RNA, 19 nt, Artificial Sequence
  Description of Artificial Sequence: Synthetic oligonucleotide
  Antisense strand to SEQ ID NO: 2247618
guguaucuaaauuacacac

SEQ ID NO: 2247620 - RNA, 19 nt, Artificial Sequence
  Description of Artificial Sequence: Synthetic oligonucleotide
  Sense strand starting at position 3616 of SEQ ID NO: 1884198
cuuguaguaagcugugauc

SEQ ID NO: 2247621 - RNA, 19 nt, Artificial Sequence
  Description of Artificial Sequence: Synthetic oligonucleotide
  Antisense strand to SEQ ID NO: 2247620
gaucacagcuuacuacaag

SEQ ID NO: 2247622 - RNA, 19 nt, Artificial Sequence
  Description of Artificial Sequence: Synthetic oligonucleotide
  Sense strand starting at position 3777 of SEQ ID NO: 1884198
ucugcucuagaaugucaua

SEQ ID NO: 2247623 - RNA, 19 nt, Artificial Sequence
  Description of Artificial Sequence: Synthetic oligonucleotide
  Antisense strand to SEQ ID NO: 2247622
uaugacauucuagagcaga

SEQ ID NO: 2247624 - RNA, 19 nt, Artificial Sequence
  Description of Artificial Sequence: Synthetic oligonucleotide
  Sense strand starting at position 3871 of SEQ ID NO: 1884198
cauuguuacguguaucagu

SEQ ID NO: 2247625 - RNA, 19 nt, Artificial Sequence
  Description of Artificial Sequence: Synthetic oligonucleotide
  Antisense strand to SEQ ID NO: 2247624
acugauacacguaacaaug

SEQ ID NO: 2247626 - RNA, 19 nt, Artificial Sequence
  Description of Artificial Sequence: Synthetic oligonucleotide
  Sense strand starting at position 3876 of SEQ ID NO: 1884198
uuacguguaucaguaauua

SEQ ID NO: 2247627 - RNA, 19 nt, Artificial Sequence
  Description of Artificial Sequence: Synthetic oligonucleotide
  Antisense strand to SEQ ID NO: 2247626
uaauuacugauacacguaa

SEQ ID NO: 2247628 - RNA, 19 nt, Artificial Sequence
  Description of Artificial Sequence: Synthetic oligonucleotide
  Sense strand starting at position 3905 of SEQ ID NO: 1884198
cuguaugguauugauauag

SEQ ID NO: 2247629 - RNA, 19 nt, Artificial Sequence
  Description of Artificial Sequence: Synthetic oligonucleotide
  Antisense strand to SEQ ID NO: 2247628
cuauaucaauaccauacag

SEQ ID NO: 2247630 - RNA, 19 nt, Artificial Sequence
  Description of Artificial Sequence: Synthetic oligonucleotide
  Sense strand starting at position 3916 of SEQ ID NO: 1884198
ugauauaguucuguaagaa

SEQ ID NO: 2247631 - RNA, 19 nt, Artificial Sequence
  Description of Artificial Sequence: Synthetic oligonucleotide
  Antisense strand to SEQ ID NO: 2247630
uucuuacagaacuauauca

SEQ ID NO: 2247632 - RNA, 19 nt, Artificial Sequence
  Description of Artificial Sequence: Synthetic oligonucleotide
  Sense strand starting at position 3974 of SEQ ID NO: 1884198
aucugaauucuccaguuug

SEQ ID NO: 2247633 - RNA, 19 nt, Artificial Sequence
  Description of Artificial Sequence: Synthetic oligonucleotide
  Antisense strand to SEQ ID NO: 2247632
caaacuggagaauucagau

SEQ ID NO: 2247634 - RNA, 19 nt, Artificial Sequence
  Description of Artificial Sequence: Synthetic oligonucleotide
  Sense strand starting at position 110 of SEQ ID NO: 1884199
uguuccuuggugcaaucua

SEQ ID NO: 2247635 - RNA, 19 nt, Artificial Sequence
  Description of Artificial Sequence: Synthetic oligonucleotide
  Antisense strand to SEQ ID NO: 2247634
uagauugcaccaaggaaca

SEQ ID NO: 2247636 - RNA, 19 nt, Artificial Sequence
  Description of Artificial Sequence: Synthetic oligonucleotide
  Sense strand starting at position 115 of SEQ ID NO: 1884199
cuuggugcaaucuagaagu

SEQ ID NO: 2247637 - RNA, 19 nt, Artificial Sequence
  Description of Artificial Sequence: Synthetic oligonucleotide
  Antisense strand to SEQ ID NO: 2247636
acuucuagauugcaccaag

SEQ ID NO: 2247638 - RNA, 19 nt, Artificial Sequence
  Description of Artificial Sequence: Synthetic oligonucleotide
  Sense strand starting at position 117 of SEQ ID NO: 1884199
uggugcaaucuagaagugu

SEQ ID NO: 2247639 - RNA, 19 nt, Artificial Sequence
  Description of Artificial Sequence: Synthetic oligonucleotide
  Antisense strand to SEQ ID NO: 2247638
acacuucuagauugcacca

SEQ ID NO: 2247640 - RNA, 19 nt, Artificial Sequence
  Description of Artificial Sequence: Synthetic oligonucleotide
  Sense strand starting at position 125 of SEQ ID NO: 1884199
ucuagaagugucuggcaca

SEQ ID NO: 2247641 - RNA, 19 nt, Artificial Sequence
  Description of Artificial Sequence: Synthetic oligonucleotide
  Antisense strand to SEQ ID NO: 2247640
ugugccagacacuucuaga

SEQ ID NO: 2247642 - RNA, 19 nt, Artificial Sequence
  Description of Artificial Sequence: Synthetic oligonucleotide
  Sense strand starting at position 146 of SEQ ID NO: 1884199
guaaguaaccuguaaauau

SEQ ID NO: 2247643 - RNA, 19 nt, Artificial Sequence
  Description of Artificial Sequence: Synthetic oligonucleotide
  Antisense strand to SEQ ID NO: 2247642
auauuuacagguuacuuac

SEQ ID NO: 2247644 - RNA, 19 nt, Artificial Sequence
  Description of Artificial Sequence: Synthetic oligonucleotide
  Sense strand starting at position 572 of SEQ ID NO: 1884199
cguuucuugcccuuacagu

SEQ ID NO: 2247645 - RNA, 19 nt, Artificial Sequence
  Description of Artificial Sequence: Synthetic oligonucleotide
  Antisense strand to SEQ ID NO: 2247644
acuguaagggcaagaaacg

SEQ ID NO: 2247646 - RNA, 19 nt, Artificial Sequence
  Description of Artificial Sequence: Synthetic oligonucleotide
  Sense strand starting at position 580 of SEQ ID NO: 1884199
gcccuuacagucugacaga

SEQ ID NO: 2247647 - RNA, 19 nt, Artificial Sequence
  Description of Artificial Sequence: Synthetic oligonucleotide
  Antisense strand to SEQ ID NO: 2247646
ucugucagacuguaagggc

SEQ ID NO: 2247648 - RNA, 19 nt, Artificial Sequence
  Description of Artificial Sequence: Synthetic oligonucleotide
  Sense strand starting at position 635 of SEQ ID NO: 1884199
uugccaauuuggcugcaaa

SEQ ID NO: 2247649 - RNA, 19 nt, Artificial Sequence
  Description of Artificial Sequence: Synthetic oligonucleotide
  Antisense strand to SEQ ID NO: 2247648
uuugcagccaaauuggcaa

SEQ ID NO: 2247650 - RNA, 19 nt, Artificial Sequence
  Description of Artificial Sequence: Synthetic oligonucleotide
  Sense strand starting at position 758 of SEQ ID NO: 1884199
ggauagaggucuucgggua

SEQ ID NO: 2247651 - RNA, 19 nt, Artificial Sequence
  Description of Artificial Sequence: Synthetic oligonucleotide
  Antisense strand to SEQ ID NO: 2247650
uacccgaagaccucuaucc

SEQ ID NO: 2247652 - RNA, 19 nt, Artificial Sequence
  Description of Artificial Sequence: Synthetic oligonucleotide
  Sense strand starting at position 759 of SEQ ID NO: 1884199
gauagaggucuucggguag

SEQ ID NO: 2247653 - RNA, 19 nt, Artificial Sequence
  Description of Artificial Sequence: Synthetic oligonucleotide
  Antisense strand to SEQ ID NO: 2247652
cuacccgaagaccucuauc

SEQ ID NO: 2247654 - RNA, 19 nt, Artificial Sequence
  Description of Artificial Sequence: Synthetic oligonucleotide
  Sense strand starting at position 880 of SEQ ID NO: 1884199
uccaauaucugauucugga

SEQ ID NO: 2247655 - RNA, 19 nt, Artificial Sequence
  Description of Artificial Sequence: Synthetic oligonucleotide
  Antisense strand to SEQ ID NO: 2247654
uccagaaucagauauugga

SEQ ID NO: 2247656 - RNA, 19 nt, Artificial Sequence
  Description of Artificial Sequence: Synthetic oligonucleotide
  Sense strand starting at position 1002 of SEQ ID NO: 1884199
cuaggaaucuuugcaagua

SEQ ID NO: 2247657 - RNA, 19 nt, Artificial Sequence
  Description of Artificial Sequence: Synthetic oligonucleotide
  Antisense strand to SEQ ID NO: 2247656
uacuugcaaagauuccuag

SEQ ID NO: 2247658 - RNA, 19 nt, Artificial Sequence
  Description of Artificial Sequence: Synthetic oligonucleotide
  Sense strand starting at position 1026 of SEQ ID NO: 1884199
gaugaugcaucagcaugaa

SEQ ID NO: 2247659 - RNA, 19 nt, Artificial Sequence
  Description of Artificial Sequence: Synthetic oligonucleotide
  Antisense strand to SEQ ID NO: 2247658
uucaugcugaugcaucauc

SEQ ID NO: 2247660 - RNA, 19 nt, Artificial Sequence
  Description of Artificial Sequence: Synthetic oligonucleotide
  Sense strand starting at position 1185 of SEQ ID NO: 1884199
gagguagggucuuuccuga

SEQ ID NO: 2247661 - RNA, 19 nt, Artificial Sequence
  Description of Artificial Sequence: Synthetic oligonucleotide
  Antisense strand to SEQ ID NO: 2247660
ucaggaaagacccuaccuc

SEQ ID NO: 2247662 - RNA, 19 nt, Artificial Sequence
  Description of Artificial Sequence: Synthetic oligonucleotide
  Sense strand starting at position 1309 of SEQ ID NO: 1884199
gccuuucgaaguuggagua

SEQ ID NO: 2247663 - RNA, 19 nt, Artificial Sequence
  Description of Artificial Sequence: Synthetic oligonucleotide
  Antisense strand to SEQ ID NO: 2247662
uacuccaacuucgaaaggc

SEQ ID NO: 2247664 - RNA, 19 nt, Artificial Sequence
  Description of Artificial Sequence: Synthetic oligonucleotide
  Sense strand starting at position 1321 of SEQ ID NO: 1884199
uggaguauuacgggaaaug

SEQ ID NO: 2247665 - RNA, 19 nt, Artificial Sequence
  Description of Artificial Sequence: Synthetic oligonucleotide
  Antisense strand to SEQ ID NO: 2247664
cauuucccguaauacucca

SEQ ID NO: 2247666 - RNA, 19 nt, Artificial Sequence
  Description of Artificial Sequence: Synthetic oligonucleotide
  Sense strand starting at position 1444 of SEQ ID NO: 1884199
uucgaagggcuuuaccaaa

SEQ ID NO: 2247667 - RNA, 19 nt, Artificial Sequence
  Description of Artificial Sequence: Synthetic oligonucleotide
  Antisense strand to SEQ ID NO: 2247666
uuugguaaagcccuucgaa

SEQ ID NO: 2247668 - RNA, 19 nt, Artificial Sequence
  Description of Artificial Sequence: Synthetic oligonucleotide
  Sense strand starting at position 2301 of SEQ ID NO: 1884199
gaacacaugucuccggaca

SEQ ID NO: 2247669 - RNA, 19 nt, Artificial Sequence
  Description of Artificial Sequence: Synthetic oligonucleotide
  Antisense strand to SEQ ID NO: 2247668
uguccggagacauguguuc

SEQ ID NO: 2247670 - RNA, 19 nt, Artificial Sequence
  Description of Artificial Sequence: Synthetic oligonucleotide
  Sense strand starting at position 2355 of SEQ ID NO: 1884199
ugauuucuguugcuaauau

SEQ ID NO: 2247671 - RNA, 19 nt, Artificial Sequence
  Description of Artificial Sequence: Synthetic oligonucleotide
  Antisense strand to SEQ ID NO: 2247670
auauuagcaacagaaauca

SEQ ID NO: 2247672 - RNA, 19 nt, Artificial Sequence
  Description of Artificial Sequence: Synthetic oligonucleotide
  Sense strand starting at position 2609 of SEQ ID NO: 1884199
cuaccauuguuaucucuga

SEQ ID NO: 2247673 - RNA, 19 nt, Artificial Sequence
  Description of Artificial Sequence: Synthetic oligonucleotide
  Antisense strand to SEQ ID NO: 2247672
ucagagauaacaaugguag

SEQ ID NO: 2247674 - RNA, 19 nt, Artificial Sequence
  Description of Artificial Sequence: Synthetic oligonucleotide
  Sense strand starting at position 2613 of SEQ ID NO: 1884199
cauuguuaucucugagguc

SEQ ID NO: 2247675 - RNA, 19 nt, Artificial Sequence
  Description of Artificial Sequence: Synthetic oligonucleotide
  Antisense strand to SEQ ID NO: 2247674
gaccucagagauaacaaug

SEQ ID NO: 2247676 - RNA, 19 nt, Artificial Sequence
  Description of Artificial Sequence: Synthetic oligonucleotide
  Sense strand starting at position 2711 of SEQ ID NO: 1884199
ggcugugccuggaagaagu

SEQ ID NO: 2247677 - RNA, 19 nt, Artificial Sequence
  Description of Artificial Sequence: Synthetic oligonucleotide
  Antisense strand to SEQ ID NO: 2247676
acuucuuccaggcacagcc

SEQ ID NO: 2247678 - RNA, 19 nt, Artificial Sequence
  Description of Artificial Sequence: Synthetic oligonucleotide
  Sense strand starting at position 2819 of SEQ ID NO: 1884199
cuggguagccaggaugaau

SEQ ID NO: 2247679 - RNA, 19 nt, Artificial Sequence
  Description of Artificial Sequence: Synthetic oligonucleotide
  Antisense strand to SEQ ID NO: 2247678
auucauccuggcuacccag

SEQ ID NO: 2247680 - RNA, 19 nt, Artificial Sequence
  Description of Artificial Sequence: Synthetic oligonucleotide
  Sense strand starting at position 2832 of SEQ ID NO: 1884199
augaauugcgucugaaguu

SEQ ID NO: 2247681 - RNA, 19 nt, Artificial Sequence
  Description of Artificial Sequence: Synthetic oligonucleotide
  Antisense strand to SEQ ID NO: 2247680
aacuucagacgcaauucau

SEQ ID NO: 2247682 - RNA, 19 nt, Artificial Sequence
  Description of Artificial Sequence: Synthetic oligonucleotide
  Sense strand starting at position 2842 of SEQ ID NO: 1884199
ucugaaguuccugaggcuu

SEQ ID NO: 2247683 - RNA, 19 nt, Artificial Sequence
  Description of Artificial Sequence: Synthetic oligonucleotide
  Antisense strand to SEQ ID NO: 2247682
aagccucaggaacuucaga

SEQ ID NO: 2247684 - RNA, 19 nt, Artificial Sequence
  Description of Artificial Sequence: Synthetic oligonucleotide
  Sense strand starting at position 2937 of SEQ ID NO: 1884199
cauuuacucguucgugcaa

SEQ ID NO: 2247685 - RNA, 19 nt, Artificial Sequence
  Description of Artificial Sequence: Synthetic oligonucleotide
  Antisense strand to SEQ ID NO: 2247684
uugcacgaacgaguaaaug

SEQ ID NO: 2247686 - RNA, 19 nt, Artificial Sequence
  Description of Artificial Sequence: Synthetic oligonucleotide
  Sense strand starting at position 2940 of SEQ ID NO: 1884199
uuacucguucgugcaacau

SEQ ID NO: 2247687 - RNA, 19 nt, Artificial Sequence
  Description of Artificial Sequence: Synthetic oligonucleotide
  Antisense strand to SEQ ID NO: 2247686
auguugcacgaacgaguaa

SEQ ID NO: 2247688 - RNA, 19 nt, Artificial Sequence
  Description of Artificial Sequence: Synthetic oligonucleotide
  Sense strand starting at position 2977 of SEQ ID NO: 1884199
ugugccaagcucuaaacua

SEQ ID NO: 2247689 - RNA, 19 nt, Artificial Sequence
  Description of Artificial Sequence: Synthetic oligonucleotide
  Antisense strand to SEQ ID NO: 2247688
uaguuuagagcuuggcaca

SEQ ID NO: 2247690 - RNA, 19 nt, Artificial Sequence
  Description of Artificial Sequence: Synthetic oligonucleotide
  Sense strand starting at position 3009 of SEQ ID NO: 1884199
aagauauguugucccagga

SEQ ID NO: 2247691 - RNA, 19 nt, Artificial Sequence
  Description of Artificial Sequence: Synthetic oligonucleotide
  Antisense strand to SEQ ID NO: 2247690
uccugggacaacauaucuu

SEQ ID NO: 2247692 - RNA, 19 nt, Artificial Sequence
  Description of Artificial Sequence: Synthetic oligonucleotide
  Sense strand starting at position 3013 of SEQ ID NO: 1884199
uauguugucccaggacuca

SEQ ID NO: 2247693 - RNA, 19 nt, Artificial Sequence
  Description of Artificial Sequence: Synthetic oligonucleotide
  Antisense strand to SEQ ID NO: 2247692
ugaguccugggacaacaua

SEQ ID NO: 2247694 - RNA, 19 nt, Artificial Sequence
  Description of Artificial Sequence: Synthetic oligonucleotide
  Sense strand starting at position 3069 of SEQ ID NO: 1884199
gcguuaaauagagguugua

SEQ ID NO: 2247695 - RNA, 19 nt, Artificial Sequence
  Description of Artificial Sequence: Synthetic oligonucleotide
  Antisense strand to SEQ ID NO: 2247694
uacaaccucuauuuaacgc

SEQ ID NO: 2247696 - RNA, 19 nt, Artificial Sequence
  Description of Artificial Sequence: Synthetic oligonucleotide
  Sense strand starting at position 3161 of SEQ ID NO: 1884199
ugauguuucuggguccuaa

SEQ ID NO: 2247697 - RNA, 19 nt, Artificial Sequence
  Description of Artificial Sequence: Synthetic oligonucleotide
  Antisense strand to SEQ ID NO: 2247696
uuaggacccagaaacauca

SEQ ID NO: 2247698 - RNA, 19 nt, Artificial Sequence
  Description of Artificial Sequence: Synthetic oligonucleotide
  Sense strand starting at position 3318 of SEQ ID NO: 1884199
cggaaauuauggccggaug

SEQ ID NO: 2247699 - RNA, 19 nt, Artificial Sequence
  Description of Artificial Sequence: Synthetic oligonucleotide
  Antisense strand to SEQ ID NO: 2247698
cauccggccauaauuuccg

SEQ ID NO: 2247700 - RNA, 19 nt, Artificial Sequence
  Description of Artificial Sequence: Synthetic oligonucleotide
  Sense strand starting at position 3319 of SEQ ID NO: 1884199
ggaaauuauggccggaugu

SEQ ID NO: 2247701 - RNA, 19 nt, Artificial Sequence
  Description of Artificial Sequence: Synthetic oligonucleotide
  Antisense strand to SEQ ID NO: 2247700
acauccggccauaauuucc

SEQ ID NO: 2247702 - RNA, 19 nt, Artificial Sequence
  Description of Artificial Sequence: Synthetic oligonucleotide
  Sense strand starting at position 3320 of SEQ ID NO: 1884199
gaaauuauggccggaugug

SEQ ID NO: 2247703 - RNA, 19 nt, Artificial Sequence
  Description of Artificial Sequence: Synthetic oligonucleotide
  Antisense strand to SEQ ID NO: 2247702
cacauccggccauaauuuc

SEQ ID NO: 2247704 - RNA, 19 nt, Artificial Sequence
  Description of Artificial Sequence: Synthetic oligonucleotide
  Sense strand starting at position 3628 of SEQ ID NO: 1884199
auaaauaagccgugcauca

SEQ ID NO: 2247705 - RNA, 19 nt, Artificial Sequence
  Description of Artificial Sequence: Synthetic oligonucleotide
  Antisense strand to SEQ ID NO: 2247704
ugaugcacggcuuauuuau

SEQ ID NO: 2247706 - RNA, 19 nt, Artificial Sequence
  Description of Artificial Sequence: Synthetic oligonucleotide
  Sense strand starting at position 3820 of SEQ ID NO: 1884199
aggcguuugcugagugaag

SEQ ID NO: 2247707 - RNA, 19 nt, Artificial Sequence
  Description of Artificial Sequence: Synthetic oligonucleotide
  Antisense strand to SEQ ID NO: 2247706
cuucacucagcaaacgccu

SEQ ID NO: 2247708 - RNA, 19 nt, Artificial Sequence
  Description of Artificial Sequence: Synthetic oligonucleotide
  Sense strand starting at position 3896 of SEQ ID NO: 1884199
gaagguacgugccugauua

SEQ ID NO: 2247709 - RNA, 19 nt, Artificial Sequence
  Description of Artificial Sequence: Synthetic oligonucleotide
  Antisense strand to SEQ ID NO: 2247708
uaaucaggcacguaccuuc

SEQ ID NO: 2247710 - RNA, 19 nt, Artificial Sequence
  Description of Artificial Sequence: Synthetic oligonucleotide
  Sense strand starting at position 3898 of SEQ ID NO: 1884199
agguacgugccugauuacu

SEQ ID NO: 2247711 - RNA, 19 nt, Artificial Sequence
  Description of Artificial Sequence: Synthetic oligonucleotide
  Antisense strand to SEQ ID NO: 2247710
aguaaucaggcacguaccu

SEQ ID NO: 2247712 - RNA, 19 nt, Artificial Sequence
  Description of Artificial Sequence: Synthetic oligonucleotide
  Sense strand starting at position 3948 of SEQ ID NO: 1884199
agcagucacucagucagaa

SEQ ID NO: 2247713 - RNA, 19 nt, Artificial Sequence
  Description of Artificial Sequence: Synthetic oligonucleotide
  Antisense strand to SEQ ID NO: 2247712
uucugacugagugacugcu

SEQ ID NO: 2247714 - RNA, 19 nt, Artificial Sequence
  Description of Artificial Sequence: Synthetic oligonucleotide
  Sense strand starting at position 134 of SEQ ID NO: 1884200
cagggagaaugagacuuaa

SEQ ID NO: 2247715 - RNA, 19 nt, Artificial Sequence
  Description of Artificial Sequence: Synthetic oligonucleotide
  Antisense strand to SEQ ID NO: 2247714
uuaagucucauucucccug

SEQ ID NO: 2247716 - RNA, 19 nt, Artificial Sequence
  Description of Artificial Sequence: Synthetic oligonucleotide
  Sense strand starting at position 194 of SEQ ID NO: 1884200
acagcugaccucugaauac

SEQ ID NO: 2247717 - RNA, 19 nt, Artificial Sequence
  Description of Artificial Sequence: Synthetic oligonucleotide
  Antisense strand to SEQ ID NO: 2247716
guauucagaggucagcugu

SEQ ID NO: 2247718 - RNA, 19 nt, Artificial Sequence
  Description of Artificial Sequence: Synthetic oligonucleotide
  Sense strand starting at position 203 of SEQ ID NO: 1884200
cucugaauacgucacacua

SEQ ID NO: 2247719 - RNA, 19 nt, Artificial Sequence
  Description of Artificial Sequence: Synthetic oligonucleotide
  Antisense strand to SEQ ID NO: 2247718
uagugugacguauucagag

SEQ ID NO: 2247720 - RNA, 19 nt, Artificial Sequence
  Description of Artificial Sequence: Synthetic oligonucleotide
  Sense strand starting at position 687 of SEQ ID NO: 1884200
gcacauuuaucuuucguga

SEQ ID NO: 2247721 - RNA, 19 nt, Artificial Sequence
  Description of Artificial Sequence: Synthetic oligonucleotide
  Antisense strand to SEQ ID NO: 2247720
ucacgaaagauaaaugugc

SEQ ID NO: 2247722 - RNA, 19 nt, Artificial Sequence
  Description of Artificial Sequence: Synthetic oligonucleotide
  Sense strand starting at position 689 of SEQ ID NO: 1884200
acauuuaucuuucgugaaa

SEQ ID NO: 2247723 - RNA, 19 nt, Artificial Sequence
  Description of Artificial Sequence: Synthetic oligonucleotide
  Antisense strand to SEQ ID NO: 2247722
uuucacgaaagauaaaugu

SEQ ID NO: 2247724 - RNA, 19 nt, Artificial Sequence
  Description of Artificial Sequence: Synthetic oligonucleotide
  Sense strand starting at position 892 of SEQ ID NO: 1884200
acaaacugucacuguggaa

SEQ ID NO: 2247725 - RNA, 19 nt, Artificial Sequence
  Description of Artificial Sequence: Synthetic oligonucleotide
  Antisense strand to SEQ ID NO: 2247724
uuccacagugacaguuugu

SEQ ID NO: 2247726 - RNA, 19 nt, Artificial Sequence
  Description of Artificial Sequence: Synthetic oligonucleotide
  Sense strand starting at position 969 of SEQ ID NO: 1884200
aaugguacccuguguagaa

SEQ ID NO: 2247727 - RNA, 19 nt, Artificial Sequence
  Description of Artificial Sequence: Synthetic oligonucleotide
  Antisense strand to SEQ ID NO: 2247726
uucuacacaggguaccauu

SEQ ID NO: 2247728 - RNA, 19 nt, Artificial Sequence
  Description of Artificial Sequence: Synthetic oligonucleotide
  Sense strand starting at position 1129 of SEQ ID NO: 1884200
uuccaagucucccaggaga

SEQ ID NO: 2247729 - RNA, 19 nt, Artificial Sequence
  Description of Artificial Sequence: Synthetic oligonucleotide
  Antisense strand to SEQ ID NO: 2247728
ucuccugggagacuuggaa

SEQ ID NO: 2247730 - RNA, 19 nt, Artificial Sequence
  Description of Artificial Sequence: Synthetic oligonucleotide
  Sense strand starting at position 1131 of SEQ ID NO: 1884200
ccaagucucccaggagaug

SEQ ID NO: 2247731 - RNA, 19 nt, Artificial Sequence
  Description of Artificial Sequence: Synthetic oligonucleotide
  Antisense strand to SEQ ID NO: 2247730
caucuccugggagacuugg

SEQ ID NO: 2247732 - RNA, 19 nt, Artificial Sequence
  Description of Artificial Sequence: Synthetic oligonucleotide
  Sense strand starting at position 1390 of SEQ ID NO: 1884200
guguucuucugagcuacaa

SEQ ID NO: 2247733 - RNA, 19 nt, Artificial Sequence
  Description of Artificial Sequence: Synthetic oligonucleotide
  Antisense strand to SEQ ID NO: 2247732
uuguagcucagaagaacac

SEQ ID NO: 2247734 - RNA, 19 nt, Artificial Sequence
  Description of Artificial Sequence: Synthetic oligonucleotide
  Sense strand starting at position 1589 of SEQ ID NO: 1884200
cggucuuggcagugcagau

SEQ ID NO: 2247735 - RNA, 19 nt, Artificial Sequence
  Description of Artificial Sequence: Synthetic oligonucleotide
  Antisense strand to SEQ ID NO: 2247734
aucugcacugccaagaccg

SEQ ID NO: 2247736 - RNA, 19 nt, Artificial Sequence
  Description of Artificial Sequence: Synthetic oligonucleotide
  Sense strand starting at position 1614 of SEQ ID NO: 1884200
cugggaaucguuuguguug

SEQ ID NO: 2247737 - RNA, 19 nt, Artificial Sequence
  Description of Artificial Sequence: Synthetic oligonucleotide
  Antisense strand to SEQ ID NO: 2247736
caacacaaacgauucccag

SEQ ID NO: 2247738 - RNA, 19 nt, Artificial Sequence
  Description of Artificial Sequence: Synthetic oligonucleotide
  Sense strand starting at position 1761 of SEQ ID NO: 1884200
gccauuauggcauguaaag

SEQ ID NO: 2247739 - RNA, 19 nt, Artificial Sequence
  Description of Artificial Sequence: Synthetic oligonucleotide
  Antisense strand to SEQ ID NO: 2247738
cuuuacaugccauaauggc

SEQ ID NO: 2247740 - RNA, 19 nt, Artificial Sequence
  Description of Artificial Sequence: Synthetic oligonucleotide
  Sense strand starting at position 1802 of SEQ ID NO: 1884200
cuagaauaauucugugaaa

SEQ ID NO: 2247741 - RNA, 19 nt, Artificial Sequence
  Description of Artificial Sequence: Synthetic oligonucleotide
  Antisense strand to SEQ ID NO: 2247740
uuucacagaauuauucuag

SEQ ID NO: 2247742 - RNA, 19 nt, Artificial Sequence
  Description of Artificial Sequence: Synthetic oligonucleotide
  Sense strand starting at position 1804 of SEQ ID NO: 1884200
agaauaauucugugaaagc

SEQ ID NO: 2247743 - RNA, 19 nt, Artificial Sequence
  Description of Artificial Sequence: Synthetic oligonucleotide
  Antisense strand to SEQ ID NO: 2247742
gcuuucacagaauuauucu

SEQ ID NO: 2247744 - RNA, 19 nt, Artificial Sequence
  Description of Artificial Sequence: Synthetic oligonucleotide
  Sense strand starting at position 1934 of SEQ ID NO: 1884200
uguugauggcgauguugaa

SEQ ID NO: 2247745 - RNA, 19 nt, Artificial Sequence
  Description of Artificial Sequence: Synthetic oligonucleotide
  Antisense strand to SEQ ID NO: 2247744
uucaacaucgccaucaaca

SEQ ID NO: 2247746 - RNA, 19 nt, Artificial Sequence
  Description of Artificial Sequence: Synthetic oligonucleotide
  Sense strand starting at position 2419 of SEQ ID NO: 1884200
auggcuucucuauggugua

SEQ ID NO: 2247747 - RNA, 19 nt, Artificial Sequence
  Description of Artificial Sequence: Synthetic oligonucleotide
  Antisense strand to SEQ ID NO: 2247746
uacaccauagagaagccau

SEQ ID NO: 2247748 - RNA, 19 nt, Artificial Sequence
  Description of Artificial Sequence: Synthetic oligonucleotide
  Sense strand starting at position 2464 of SEQ ID NO: 1884200
gugcuuuagggccauggaa

SEQ ID NO: 2247749 - RNA, 19 nt, Artificial Sequence
  Description of Artificial Sequence: Synthetic oligonucleotide
  Antisense strand to SEQ ID NO: 2247748
uuccauggcccuaaagcac

SEQ ID NO: 2247750 - RNA, 19 nt, Artificial Sequence
  Description of Artificial Sequence: Synthetic oligonucleotide
  Sense strand starting at position 2466 of SEQ ID NO: 1884200
gcuuuagggccauggaagu

SEQ ID NO: 2247751 - RNA, 19 nt, Artificial Sequence
  Description of Artificial Sequence: Synthetic oligonucleotide
  Antisense strand to SEQ ID NO: 2247750
acuuccauggcccuaaagc

SEQ ID NO: 2247752 - RNA, 19 nt, Artificial Sequence
  Description of Artificial Sequence: Synthetic oligonucleotide
  Sense strand starting at position 2472 of SEQ ID NO: 1884200
gggccauggaaguaaagua

SEQ ID NO: 2247753 - RNA, 19 nt, Artificial Sequence
  Description of Artificial Sequence: Synthetic oligonucleotide
  Antisense strand to SEQ ID NO: 2247752
uacuuuacuuccauggccc

SEQ ID NO: 2247754 - RNA, 19 nt, Artificial Sequence
  Description of Artificial Sequence: Synthetic oligonucleotide
  Sense strand starting at position 2501 of SEQ ID NO: 1884200
gaccacaagcacugugauu

SEQ ID NO: 2247755 - RNA, 19 nt, Artificial Sequence
  Description of Artificial Sequence: Synthetic oligonucleotide
  Antisense strand to SEQ ID NO: 2247754
aaucacagugcuugugguc

SEQ ID NO: 2247756 - RNA, 19 nt, Artificial Sequence
  Description of Artificial Sequence: Synthetic oligonucleotide
  Sense strand starting at position 2512 of SEQ ID NO: 1884200
cugugauuccaagacagug

SEQ ID NO: 2247757 - RNA, 19 nt, Artificial Sequence
  Description of Artificial Sequence: Synthetic oligonucleotide
  Antisense strand to SEQ ID NO: 2247756
cacugucuuggaaucacag

SEQ ID NO: 2247758 - RNA, 19 nt, Artificial Sequence
  Description of Artificial Sequence: Synthetic oligonucleotide
  Sense strand starting at position 2524 of SEQ ID NO: 1884200
gacagugaauuugaucaca

SEQ ID NO: 2247759 - RNA, 19 nt, Artificial Sequence
  Description of Artificial Sequence: Synthetic oligonucleotide
  Antisense strand to SEQ ID NO: 2247758
ugugaucaaauucacuguc

SEQ ID NO: 2247760 - RNA, 19 nt, Artificial Sequence
  Description of Artificial Sequence: Synthetic oligonucleotide
  Sense strand starting at position 2529 of SEQ ID NO: 1884200
ugaauuugaucacagagau

SEQ ID NO: 2247761 - RNA, 19 nt, Artificial Sequence
  Description of Artificial Sequence: Synthetic oligonucleotide
  Antisense strand to SEQ ID NO: 2247760
aucucugugaucaaauuca

SEQ ID NO: 2247762 - RNA, 19 nt, Artificial Sequence
  Description of Artificial Sequence: Synthetic oligonucleotide
  Sense strand starting at position 2643 of SEQ ID NO: 1884200
cuuggaagggcaugaaauu

SEQ ID NO: 2247763 - RNA, 19 nt, Artificial Sequence
  Description of Artificial Sequence: Synthetic oligonucleotide
  Antisense strand to SEQ ID NO: 2247762
aauuucaugcccuuccaag

SEQ ID NO: 2247764 - RNA, 19 nt, Artificial Sequence
  Description of Artificial Sequence: Synthetic oligonucleotide
  Sense strand starting at position 2652 of SEQ ID NO: 1884200
gcaugaaauuuagaacuua

SEQ ID NO: 2247765 - RNA, 19 nt, Artificial Sequence
  Description of Artificial Sequence: Synthetic oligonucleotide
  Antisense strand to SEQ ID NO: 2247764
uaaguucuaaauuucaugc

SEQ ID NO: 2247766 - RNA, 19 nt, Artificial Sequence
  Description of Artificial Sequence: Synthetic oligonucleotide
  Sense strand starting at position 2669 of SEQ ID NO: 1884200
uaggaauuguuucuggaau

SEQ ID NO: 2247767 - RNA, 19 nt, Artificial Sequence
  Description of Artificial Sequence: Synthetic oligonucleotide
  Antisense strand to SEQ ID NO: 2247766
auuccagaaacaauuccua

SEQ ID NO: 2247768 - RNA, 19 nt, Artificial Sequence
  Description of Artificial Sequence: Synthetic oligonucleotide
  Sense strand starting at position 2671 of SEQ ID NO: 1884200
ggaauuguuucuggaauuu

SEQ ID NO: 2247769 - RNA, 19 nt, Artificial Sequence
  Description of Artificial Sequence: Synthetic oligonucleotide
  Antisense strand to SEQ ID NO: 2247768
aaauuccagaaacaauucc

SEQ ID NO: 2247770 - RNA, 19 nt, Artificial Sequence
  Description of Artificial Sequence: Synthetic oligonucleotide
  Sense strand starting at position 3141 of SEQ ID NO: 1884200
ggcggaggcuaccauauuu

SEQ ID NO: 2247771 - RNA, 19 nt, Artificial Sequence
  Description of Artificial Sequence: Synthetic oligonucleotide
  Antisense strand to SEQ ID NO: 2247770
aaauaugguagccuccgcc

SEQ ID NO: 2247772 - RNA, 19 nt, Artificial Sequence
  Description of Artificial Sequence: Synthetic oligonucleotide
  Sense strand starting at position 3235 of SEQ ID NO: 1884200
ucauucgaauguucuacau

SEQ ID NO: 2247773 - RNA, 19 nt, Artificial Sequence
  Description of Artificial Sequence: Synthetic oligonucleotide
  Antisense strand to SEQ ID NO: 2247772
auguagaacauucgaauga

SEQ ID NO: 2247774 - RNA, 19 nt, Artificial Sequence
  Description of Artificial Sequence: Synthetic oligonucleotide
  Sense strand starting at position 3239 of SEQ ID NO: 1884200
ucgaauguucuacauuaaa

SEQ ID NO: 2247775 - RNA, 19 nt, Artificial Sequence
  Description of Artificial Sequence: Synthetic oligonucleotide
  Antisense strand to SEQ ID NO: 2247774
uuuaauguagaacauucga

SEQ ID NO: 2247776 - RNA, 19 nt, Artificial Sequence
  Description of Artificial Sequence: Synthetic oligonucleotide
  Sense strand starting at position 3734 of SEQ ID NO: 1884200
augggaauuucuuauguua

SEQ ID NO: 2247777 - RNA, 19 nt, Artificial Sequence
  Description of Artificial Sequence: Synthetic oligonucleotide
  Antisense strand to SEQ ID NO: 2247776
uaacauaagaaauucccau

SEQ ID NO: 2247778 - RNA, 19 nt, Artificial Sequence
  Description of Artificial Sequence: Synthetic oligonucleotide
  Sense strand starting at position 3736 of SEQ ID NO: 1884200
gggaauuucuuauguuaac

SEQ ID NO: 2247779 - RNA, 19 nt, Artificial Sequence
  Description of Artificial Sequence: Synthetic oligonucleotide
  Antisense strand to SEQ ID NO: 2247778
guuaacauaagaaauuccc

SEQ ID NO: 2247780 - RNA, 19 nt, Artificial Sequence
  Description of Artificial Sequence: Synthetic oligonucleotide
  Sense strand starting at position 3763 of SEQ ID NO: 1884200
caaccuucucugggaaggu

SEQ ID NO: 2247781 - RNA, 19 nt, Artificial Sequence
  Description of Artificial Sequence: Synthetic oligonucleotide
  Antisense strand to SEQ ID NO: 2247780
accuucccagagaagguug

SEQ ID NO: 2247782 - RNA, 19 nt, Artificial Sequence
  Description of Artificial Sequence: Synthetic oligonucleotide
  Sense strand starting at position 3764 of SEQ ID NO: 1884200
aaccuucucugggaaggua

SEQ ID NO: 2247783 - RNA, 19 nt, Artificial Sequence
  Description of Artificial Sequence: Synthetic oligonucleotide
  Antisense strand to SEQ ID NO: 2247782
uaccuucccagagaagguu

SEQ ID NO: 2247784 - RNA, 19 nt, Artificial Sequence
  Description of Artificial Sequence: Synthetic oligonucleotide
  Sense strand starting at position 3772 of SEQ ID NO: 1884200
cugggaagguacuauauga

SEQ ID NO: 2247785 - RNA, 19 nt, Artificial Sequence
  Description of Artificial Sequence: Synthetic oligonucleotide
  Antisense strand to SEQ ID NO: 2247784
ucauauaguaccuucccag

SEQ ID NO: 2247786 - RNA, 19 nt, Artificial Sequence
  Description of Artificial Sequence: Synthetic oligonucleotide
  Sense strand starting at position 3779 of SEQ ID NO: 1884200
gguacuauaugagcuggaa

SEQ ID NO: 2247787 - RNA, 19 nt, Artificial Sequence
  Description of Artificial Sequence: Synthetic oligonucleotide
  Antisense strand to SEQ ID NO: 2247786
uuccagcucauauaguacc

SEQ ID NO: 2247788 - RNA, 19 nt, Artificial Sequence
  Description of Artificial Sequence: Synthetic oligonucleotide
  Sense strand starting at position 3852 of SEQ ID NO: 1884200
gugaguuuaagccaggaac

SEQ ID NO: 2247789 - RNA, 19 nt, Artificial Sequence
  Description of Artificial Sequence: Synthetic oligonucleotide
  Antisense strand to SEQ ID NO: 2247788
guuccuggcuuaaacucac

SEQ ID NO: 2247790 - RNA, 19 nt, Artificial Sequence
  Description of Artificial Sequence: Synthetic oligonucleotide
  Sense strand starting at position 3854 of SEQ ID NO: 1884200
gaguuuaagccaggaacag

SEQ ID NO: 2247791 - RNA, 19 nt, Artificial Sequence
  Description of Artificial Sequence: Synthetic oligonucleotide
  Antisense strand to SEQ ID NO: 2247790
cuguuccuggcuuaaacuc

SEQ ID NO: 2247792 - RNA, 19 nt, Artificial Sequence
  Description of Artificial Sequence: Synthetic oligonucleotide
  Sense strand starting at position 3896 of SEQ ID NO: 1884200
cuguaaaggugacauccaa

SEQ ID NO: 2247793 - RNA, 19 nt, Artificial Sequence
  Description of Artificial Sequence: Synthetic oligonucleotide
  Antisense strand to SEQ ID NO: 2247792
uuggaugucaccuuuacag

SEQ ID NO: 2247794 - RNA, 19 nt, Artificial Sequence
  Description of Artificial Sequence: Synthetic oligonucleotide
  Sense strand starting at position 347 of SEQ ID NO: 1884201
gaagguguauuuggugcaa

SEQ ID NO: 2247795 - RNA, 19 nt, Artificial Sequence
  Description of Artificial Sequence: Synthetic oligonucleotide
  Antisense strand to SEQ ID NO: 2247794
uugcaccaaauacaccuuc

SEQ ID NO: 2247796 - RNA, 19 nt, Artificial Sequence
  Description of Artificial Sequence: Synthetic oligonucleotide
  Sense strand starting at position 349 of SEQ ID NO: 1884201
agguguauuuggugcaaac

SEQ ID NO: 2247797 - RNA, 19 nt, Artificial Sequence
  Description of Artificial Sequence: Synthetic oligonucleotide
  Antisense strand to SEQ ID NO: 2247796
guuugcaccaaauacaccu

SEQ ID NO: 2247798 - RNA, 19 nt, Artificial Sequence
  Description of Artificial Sequence: Synthetic oligonucleotide
  Sense strand starting at position 389 of SEQ ID NO: 1884201
guuaaagguuuacaauguu

SEQ ID NO: 2247799 - RNA, 19 nt, Artificial Sequence
  Description of Artificial Sequence: Synthetic oligonucleotide
  Antisense strand to SEQ ID NO: 2247798
aacauuguaaaccuuuaac

SEQ ID NO: 2247800 - RNA, 19 nt, Artificial Sequence
  Description of Artificial Sequence: Synthetic oligonucleotide
  Sense strand starting at position 408 of SEQ ID NO: 1884201
caguaagauguaugaacaa

SEQ ID NO: 2247801 - RNA, 19 nt, Artificial Sequence
  Description of Artificial Sequence: Synthetic oligonucleotide
  Antisense strand to SEQ ID NO: 2247800
uuguucauacaucuuacug

SEQ ID NO: 2247802 - RNA, 19 nt, Artificial Sequence
  Description of Artificial Sequence: Synthetic oligonucleotide
  Sense strand starting at position 534 of SEQ ID NO: 1884201
acuuuaaggugacagguaa

SEQ ID NO: 2247803 - RNA, 19 nt, Artificial Sequence
  Description of Artificial Sequence: Synthetic oligonucleotide
  Antisense strand to SEQ ID NO: 2247802
uuaccugucaccuuaaagu

SEQ ID NO: 2247804 - RNA, 19 nt, Artificial Sequence
  Description of Artificial Sequence: Synthetic oligonucleotide
  Sense strand starting at position 547 of SEQ ID NO: 1884201
agguaagcuucaugggaag

SEQ ID NO: 2247805 - RNA, 19 nt, Artificial Sequence
  Description of Artificial Sequence: Synthetic oligonucleotide
  Antisense strand to SEQ ID NO: 2247804
cuucccaugaagcuuaccu

SEQ ID NO: 2247806 - RNA, 19 nt, Artificial Sequence
  Description of Artificial Sequence: Synthetic oligonucleotide
  Sense strand starting at position 620 of SEQ ID NO: 1884201
gggccaauuugagaguaug

SEQ ID NO: 2247807 - RNA, 19 nt, Artificial Sequence
  Description of Artificial Sequence: Synthetic oligonucleotide
  Antisense strand to SEQ ID NO: 2247806
cauacucucaaauuggccc

SEQ ID NO: 2247808 - RNA, 19 nt, Artificial Sequence
  Description of Artificial Sequence: Synthetic oligonucleotide
  Sense strand starting at position 731 of SEQ ID NO: 1884201
guagcaguaccucacagua

SEQ ID NO: 2247809 - RNA, 19 nt, Artificial Sequence
  Description of Artificial Sequence: Synthetic oligonucleotide
  Antisense strand to SEQ ID NO: 2247808
uacugugagguacugcuac

SEQ ID NO: 2247810 - RNA, 19 nt, Artificial Sequence
  Description of Artificial Sequence: Synthetic oligonucleotide
  Sense strand starting at position 733 of SEQ ID NO: 1884201
agcaguaccucacaguaaa

SEQ ID NO: 2247811 - RNA, 19 nt, Artificial Sequence
  Description of Artificial Sequence: Synthetic oligonucleotide
  Antisense strand to SEQ ID NO: 2247810
uuuacugugagguacugcu

SEQ ID NO: 2247812 - RNA, 19 nt, Artificial Sequence
  Description of Artificial Sequence: Synthetic oligonucleotide
  Sense strand starting at position 1067 of SEQ ID NO: 1884201
ugaccuuggugacuuacau

SEQ ID NO: 2247813 - RNA, 19 nt, Artificial Sequence
  Description of Artificial Sequence: Synthetic oligonucleotide
  Antisense strand to SEQ ID NO: 2247812
auguaagucaccaagguca

SEQ ID NO: 2247814 - RNA, 19 nt, Artificial Sequence
  Description of Artificial Sequence: Synthetic oligonucleotide
  Sense strand starting at position 1071 of SEQ ID NO: 1884201
cuuggugacuuacauaagu

SEQ ID NO: 2247815 - RNA, 19 nt, Artificial Sequence
  Description of Artificial Sequence: Synthetic oligonucleotide
  Antisense strand to SEQ ID NO: 2247814
acuuauguaagucaccaag

SEQ ID NO: 2247816 - RNA, 19 nt, Artificial Sequence
  Description of Artificial Sequence: Synthetic oligonucleotide
  Sense strand starting at position 2029 of SEQ ID NO: 1884201
acguggguucuccguggaa

SEQ ID NO: 2247817 - RNA, 19 nt, Artificial Sequence
  Description of Artificial Sequence: Synthetic oligonucleotide
  Antisense strand to SEQ ID NO: 2247816
uuccacggagaacccacgu

SEQ ID NO: 2247818 - RNA, 19 nt, Artificial Sequence
  Description of Artificial Sequence: Synthetic oligonucleotide
  Sense strand starting at position 2188 of SEQ ID NO: 1884201
gcgcgaucucgacucccua

SEQ ID NO: 2247819 - RNA, 19 nt, Artificial Sequence
  Description of Artificial Sequence: Synthetic oligonucleotide
  Antisense strand to SEQ ID NO: 2247818
uagggagucgagaucgcgc

SEQ ID NO: 2247820 - RNA, 19 nt, Artificial Sequence
  Description of Artificial Sequence: Synthetic oligonucleotide
  Sense strand starting at position 2459 of SEQ ID NO: 1884201
agugcagucuuagggaaac

SEQ ID NO: 2247821 - RNA, 19 nt, Artificial Sequence
  Description of Artificial Sequence: Synthetic oligonucleotide
  Antisense strand to SEQ ID NO: 2247820
guuucccuaagacugcacu

SEQ ID NO: 2247822 - RNA, 19 nt, Artificial Sequence
  Description of Artificial Sequence: Synthetic oligonucleotide
  Sense strand starting at position 2488 of SEQ ID NO: 1884201
guuucauuugcgggugguu

SEQ ID NO: 2247823 - RNA, 19 nt, Artificial Sequence
  Description of Artificial Sequence: Synthetic oligonucleotide
  Antisense strand to SEQ ID NO: 2247822
aaccacccgcaaaugaaac

SEQ ID NO: 2247824 - RNA, 19 nt, Artificial Sequence
  Description of Artificial Sequence: Synthetic oligonucleotide
  Sense strand starting at position 2512 of SEQ ID NO: 1884201
uggcauacugagcgaucau

SEQ ID NO: 2247825 - RNA, 19 nt, Artificial Sequence
  Description of Artificial Sequence: Synthetic oligonucleotide
  Antisense strand to SEQ ID NO: 2247824
augaucgcucaguaugcca

SEQ ID NO: 2247826 - RNA, 19 nt, Artificial Sequence
  Description of Artificial Sequence: Synthetic oligonucleotide
  Sense strand starting at position 2513 of SEQ ID NO: 1884201
ggcauacugagcgaucaug

SEQ ID NO: 2247827 - RNA, 19 nt, Artificial Sequence
  Description of Artificial Sequence: Synthetic oligonucleotide
  Antisense strand to SEQ ID NO: 2247826
caugaucgcucaguaugcc

SEQ ID NO: 2247828 - RNA, 19 nt, Artificial Sequence
  Description of Artificial Sequence: Synthetic oligonucleotide
  Sense strand starting at position 2529 of SEQ ID NO: 1884201
augggugcuccucgacuua

SEQ ID NO: 2247829 - RNA, 19 nt, Artificial Sequence
  Description of Artificial Sequence: Synthetic oligonucleotide
  Antisense strand to SEQ ID NO: 2247828
uaagucgaggagcacccau

SEQ ID NO: 2247830 - RNA, 19 nt, Artificial Sequence
  Description of Artificial Sequence: Synthetic oligonucleotide
  Sense strand starting at position 2607 of SEQ ID NO: 1884201
caaucuacccgucguaaag

SEQ ID NO: 2247831 - RNA, 19 nt, Artificial Sequence
  Description of Artificial Sequence: Synthetic oligonucleotide
  Antisense strand to SEQ ID NO: 2247830
cuuuacgacggguagauug

SEQ ID NO: 2247832 - RNA, 19 nt, Artificial Sequence
  Description of Artificial Sequence: Synthetic oligonucleotide
  Sense strand starting at position 2670 of SEQ ID NO: 1884201
ugggauugauguccggaau

SEQ ID NO: 2247833 - RNA, 19 nt, Artificial Sequence
  Description of Artificial Sequence: Synthetic oligonucleotide
  Antisense strand to SEQ ID NO: 2247832
auuccggacaucaauccca

SEQ ID NO: 2247834 - RNA, 19 nt, Artificial Sequence
  Description of Artificial Sequence: Synthetic oligonucleotide
  Sense strand starting at position 2671 of SEQ ID NO: 1884201
gggauugauguccggaauc

SEQ ID NO: 2247835 - RNA, 19 nt, Artificial Sequence
  Description of Artificial Sequence: Synthetic oligonucleotide
  Antisense strand to SEQ ID NO: 2247834
gauuccggacaucaauccc

SEQ ID NO: 2247836 - RNA, 19 nt, Artificial Sequence
  Description of Artificial Sequence: Synthetic oligonucleotide
  Sense strand starting at position 2673 of SEQ ID NO: 1884201
gauugauguccggaaucag

SEQ ID NO: 2247837 - RNA, 19 nt, Artificial Sequence
  Description of Artificial Sequence: Synthetic oligonucleotide
  Antisense strand to SEQ ID NO: 2247836
cugauuccggacaucaauc

SEQ ID NO: 2247838 - RNA, 19 nt, Artificial Sequence
  Description of Artificial Sequence: Synthetic oligonucleotide
  Sense strand starting at position 2724 of SEQ ID NO: 1884201
augguauugcaccacuaaa

SEQ ID NO: 2247839 - RNA, 19 nt, Artificial Sequence
  Description of Artificial Sequence: Synthetic oligonucleotide
  Antisense strand to SEQ ID NO: 2247838
uuuaguggugcaauaccau

SEQ ID NO: 2247840 - RNA, 19 nt, Artificial Sequence
  Description of Artificial Sequence: Synthetic oligonucleotide
  Sense strand starting at position 2741 of SEQ ID NO: 1884201
aaagacagucgcugcaaau

SEQ ID NO: 2247841 - RNA, 19 nt, Artificial Sequence
  Description of Artificial Sequence: Synthetic oligonucleotide
  Antisense strand to SEQ ID NO: 2247840
auuugcagcgacugucuuu

SEQ ID NO: 2247842 - RNA, 19 nt, Artificial Sequence
  Description of Artificial Sequence: Synthetic oligonucleotide
  Sense strand starting at position 2751 of SEQ ID NO: 1884201
gcugcaaaucaggaacauu

SEQ ID NO: 2247843 - RNA, 19 nt, Artificial Sequence
  Description of Artificial Sequence: Synthetic oligonucleotide
  Antisense strand to SEQ ID NO: 2247842
aauguuccugauuugcagc

SEQ ID NO: 2247844 - RNA, 19 nt, Artificial Sequence
  Description of Artificial Sequence: Synthetic oligonucleotide
  Sense strand starting at position 2762 of SEQ ID NO: 1884201
ggaacauucguccacucca

SEQ ID NO: 2247845 - RNA, 19 nt, Artificial Sequence
  Description of Artificial Sequence: Synthetic oligonucleotide
  Antisense strand to SEQ ID NO: 2247844
uggaguggacgaauguucc

SEQ ID NO: 2247846 - RNA, 19 nt, Artificial Sequence
  Description of Artificial Sequence: Synthetic oligonucleotide
  Sense strand starting at position 2859 of SEQ ID NO: 1884201
aaaucucagcccugguaga

SEQ ID NO: 2247847 - RNA, 19 nt, Artificial Sequence
  Description of Artificial Sequence: Synthetic oligonucleotide
  Antisense strand to SEQ ID NO: 2247846
ucuaccagggcugagauuu

SEQ ID NO: 2247848 - RNA, 19 nt, Artificial Sequence
  Description of Artificial Sequence: Synthetic oligonucleotide
  Sense strand starting at position 3031 of SEQ ID NO: 1884201
caugcagacgucuaggaaa

SEQ ID NO: 2247849 - RNA, 19 nt, Artificial Sequence
  Description of Artificial Sequence: Synthetic oligonucleotide
  Antisense strand to SEQ ID NO: 2247848
uuuccuagacgucugcaug

SEQ ID NO: 2247850 - RNA, 19 nt, Artificial Sequence
  Description of Artificial Sequence: Synthetic oligonucleotide
  Sense strand starting at position 3264 of SEQ ID NO: 1884201
agacgaucgugauggacuu

SEQ ID NO: 2247851 - RNA, 19 nt, Artificial Sequence
  Description of Artificial Sequence: Synthetic oligonucleotide
  Antisense strand to SEQ ID NO: 2247850
aaguccaucacgaucgucu

SEQ ID NO: 2247852 - RNA, 19 nt, Artificial Sequence
  Description of Artificial Sequence: Synthetic oligonucleotide
  Sense strand starting at position 3288 of SEQ ID NO: 1884201
uuuggaugcucugcugaga

SEQ ID NO: 2247853 - RNA, 19 nt, Artificial Sequence
  Description of Artificial Sequence: Synthetic oligonucleotide
  Antisense strand to SEQ ID NO: 2247852
ucucagcagagcauccaaa

SEQ ID NO: 2247854 - RNA, 19 nt, Artificial Sequence
  Description of Artificial Sequence: Synthetic oligonucleotide
  Sense strand starting at position 3291 of SEQ ID NO: 1884201
ggaugcucugcugagaaua

SEQ ID NO: 2247855 - RNA, 19 nt, Artificial Sequence
  Description of Artificial Sequence: Synthetic oligonucleotide
  Antisense strand to SEQ ID NO: 2247854
uauucucagcagagcaucc

SEQ ID NO: 2247856 - RNA, 19 nt, Artificial Sequence
  Description of Artificial Sequence: Synthetic oligonucleotide
  Sense strand starting at position 3384 of SEQ ID NO: 1884201
aggauagaguggugaacau

SEQ ID NO: 2247857 - RNA, 19 nt, Artificial Sequence
  Description of Artificial Sequence: Synthetic oligonucleotide
  Antisense strand to SEQ ID NO: 2247856
auguucaccacucuauccu

SEQ ID NO: 2247858 - RNA, 19 nt, Artificial Sequence
  Description of Artificial Sequence: Synthetic oligonucleotide
  Sense strand starting at position 3480 of SEQ ID NO: 1884201
aaagaugcggugugagaga

SEQ ID NO: 2247859 - RNA, 19 nt, Artificial Sequence
  Description of Artificial Sequence: Synthetic oligonucleotide
  Antisense strand to SEQ ID NO: 2247858
ucucucacaccgcaucuuu

SEQ ID NO: 2247860 - RNA, 19 nt, Artificial Sequence
  Description of Artificial Sequence: Synthetic oligonucleotide
  Sense strand starting at position 3600 of SEQ ID NO: 1884201
accagagguucgcugucaa

SEQ ID NO: 2247861 - RNA, 19 nt, Artificial Sequence
  Description of Artificial Sequence: Synthetic oligonucleotide
  Antisense strand to SEQ ID NO: 2247860
uugacagcgaaccucuggu

SEQ ID NO: 2247862 - RNA, 19 nt, Artificial Sequence
  Description of Artificial Sequence: Synthetic oligonucleotide
  Sense strand starting at position 3674 of SEQ ID NO: 1884201
gcaucaaggugagagcauu

SEQ ID NO: 2247863 - RNA, 19 nt, Artificial Sequence
  Description of Artificial Sequence: Synthetic oligonucleotide
  Antisense strand to SEQ ID NO: 2247862
aaugcucucaccuugaugc

SEQ ID NO: 2247864 - RNA, 19 nt, Artificial Sequence
  Description of Artificial Sequence: Synthetic oligonucleotide
  Sense strand starting at position 3863 of SEQ ID NO: 1884201
gggaguggcugcucuguga

SEQ ID NO: 2247865 - RNA, 19 nt, Artificial Sequence
  Description of Artificial Sequence: Synthetic oligonucleotide
  Antisense strand to SEQ ID NO: 2247864
ucacagagcagccacuccc

SEQ ID NO: 2247866 - RNA, 19 nt, Artificial Sequence
  Description of Artificial Sequence: Synthetic oligonucleotide
  Sense strand starting at position 3876 of SEQ ID NO: 1884201
cugugaugcuaugugauga

SEQ ID NO: 2247867 - RNA, 19 nt, Artificial Sequence
  Description of Artificial Sequence: Synthetic oligonucleotide
  Antisense strand to SEQ ID NO: 2247866
ucaucacauagcaucacag

SEQ ID NO: 2247868 - RNA, 19 nt, Artificial Sequence
  Description of Artificial Sequence: Synthetic oligonucleotide
  Sense strand starting at position 3881 of SEQ ID NO: 1884201
augcuaugugaugaguaua

SEQ ID NO: 2247869 - RNA, 19 nt, Artificial Sequence
  Description of Artificial Sequence: Synthetic oligonucleotide
  Antisense strand to SEQ ID NO: 2247868
uauacucaucacauagcau

SEQ ID NO: 2247870 - RNA, 19 nt, Artificial Sequence
  Description of Artificial Sequence: Synthetic oligonucleotide
  Sense strand starting at position 3903 of SEQ ID NO: 1884201
gagugaccauuugguugua

SEQ ID NO: 2247871 - RNA, 19 nt, Artificial Sequence
  Description of Artificial Sequence: Synthetic oligonucleotide
  Antisense strand to SEQ ID NO: 2247870
uacaaccaaauggucacuc

SEQ ID NO: 2247872 - RNA, 19 nt, Artificial Sequence
  Description of Artificial Sequence: Synthetic oligonucleotide
  Sense strand starting at position 3970 of SEQ ID NO: 1884201
ggacucagaucacaaguuu

SEQ ID NO: 2247873 - RNA, 19 nt, Artificial Sequence
  Description of Artificial Sequence: Synthetic oligonucleotide
  Antisense strand to SEQ ID NO: 2247872
aaacuugugaucugagucc

SEQ ID NO: 2247874 - RNA, 19 nt, Artificial Sequence
  Description of Artificial Sequence: Synthetic oligonucleotide
  Sense strand starting at position 31 of SEQ ID NO: 1884202
agugcuguguuccugaaag

SEQ ID NO: 2247875 - RNA, 19 nt, Artificial Sequence
  Description of Artificial Sequence: Synthetic oligonucleotide
  Antisense strand to SEQ ID NO: 2247874
cuuucaggaacacagcacu

SEQ ID NO: 2247876 - RNA, 19 nt, Artificial Sequence
  Description of Artificial Sequence: Synthetic oligonucleotide
  Sense strand starting at position 93 of SEQ ID NO: 1884202
uccagagacgaugguucau

SEQ ID NO: 2247877 - RNA, 19 nt, Artificial Sequence
  Description of Artificial Sequence: Synthetic oligonucleotide
  Antisense strand to SEQ ID NO: 2247876
augaaccaucgucucugga

SEQ ID NO: 2247878 - RNA, 19 nt, Artificial Sequence
  Description of Artificial Sequence: Synthetic oligonucleotide
  Sense strand starting at position 151 of SEQ ID NO: 1884202
cuuacuggugcugaauaau

SEQ ID NO: 2247879 - RNA, 19 nt, Artificial Sequence
  Description of Artificial Sequence: Synthetic oligonucleotide
  Antisense strand to SEQ ID NO: 2247878
auuauucagcaccaguaag

SEQ ID NO: 2247880 - RNA, 19 nt, Artificial Sequence
  Description of Artificial Sequence: Synthetic oligonucleotide
  Sense strand starting at position 425 of SEQ ID NO: 1884202
auuggaucugcauguucuu

SEQ ID NO: 2247881 - RNA, 19 nt, Artificial Sequence
  Description of Artificial Sequence: Synthetic oligonucleotide
  Antisense strand to SEQ ID NO: 2247880
aagaacaugcagauccaau

SEQ ID NO: 2247882 - RNA, 19 nt, Artificial Sequence
  Description of Artificial Sequence: Synthetic oligonucleotide
  Sense strand starting at position 428 of SEQ ID NO: 1884202
ggaucugcauguucuuaac

SEQ ID NO: 2247883 - RNA, 19 nt, Artificial Sequence
  Description of Artificial Sequence: Synthetic oligonucleotide
  Antisense strand to SEQ ID NO: 2247882
guuaagaacaugcagaucc

SEQ ID NO: 2247884 - RNA, 19 nt, Artificial Sequence
  Description of Artificial Sequence: Synthetic oligonucleotide
  Sense strand starting at position 873 of SEQ ID NO: 1884202
gcacuaucugcugaguaug

SEQ ID NO: 2247885 - RNA, 19 nt, Artificial Sequence
  Description of Artificial Sequence: Synthetic oligonucleotide
  Antisense strand to SEQ ID NO: 2247884
cauacucagcagauagugc

SEQ ID NO: 2247886 - RNA, 19 nt, Artificial Sequence
  Description of Artificial Sequence: Synthetic oligonucleotide
  Sense strand starting at position 881 of SEQ ID NO: 1884202
ugcugaguauguucuacca

SEQ ID NO: 2247887 - RNA, 19 nt, Artificial Sequence
  Description of Artificial Sequence: Synthetic oligonucleotide
  Antisense strand to SEQ ID NO: 2247886
ugguagaacauacucagca

SEQ ID NO: 2247888 - RNA, 19 nt, Artificial Sequence
  Description of Artificial Sequence: Synthetic oligonucleotide
  Sense strand starting at position 993 of SEQ ID NO: 1884202
gcucaagggacauguuuac

SEQ ID NO: 2247889 - RNA, 19 nt, Artificial Sequence
  Description of Artificial Sequence: Synthetic oligonucleotide
  Antisense strand to SEQ ID NO: 2247888
guaaacaugucccuugagc

SEQ ID NO: 2247890 - RNA, 19 nt, Artificial Sequence
  Description of Artificial Sequence: Synthetic oligonucleotide
  Sense strand starting at position 999 of SEQ ID NO: 1884202
gggacauguuuacucaacu

SEQ ID NO: 2247891 - RNA, 19 nt, Artificial Sequence
  Description of Artificial Sequence: Synthetic oligonucleotide
  Antisense strand to SEQ ID NO: 2247890
aguugaguaaacauguccc

SEQ ID NO: 2247892 - RNA, 19 nt, Artificial Sequence
  Description of Artificial Sequence: Synthetic oligonucleotide
  Sense strand starting at position 1000 of SEQ ID NO: 1884202
ggacauguuuacucaacuu

SEQ ID NO: 2247893 - RNA, 19 nt, Artificial Sequence
  Description of Artificial Sequence: Synthetic oligonucleotide
  Antisense strand to SEQ ID NO: 2247892
aaguugaguaaacaugucc

SEQ ID NO: 2247894 - RNA, 19 nt, Artificial Sequence
  Description of Artificial Sequence: Synthetic oligonucleotide
  Sense strand starting at position 1362 of SEQ ID NO: 1884202
cagagaaagccguguacca

SEQ ID NO: 2247895 - RNA, 19 nt, Artificial Sequence
  Description of Artificial Sequence: Synthetic oligonucleotide
  Antisense strand to SEQ ID NO: 2247894
ugguacacggcuuucucug

SEQ ID NO: 2247896 - RNA, 19 nt, Artificial Sequence
  Description of Artificial Sequence: Synthetic oligonucleotide
  Sense strand starting at position 1364 of SEQ ID NO: 1884202
gagaaagccguguaccaaa

SEQ ID NO: 2247897 - RNA, 19 nt, Artificial Sequence
  Description of Artificial Sequence: Synthetic oligonucleotide
  Antisense strand to SEQ ID NO: 2247896
uuugguacacggcuuucuc

SEQ ID NO: 2247898 - RNA, 19 nt, Artificial Sequence
  Description of Artificial Sequence: Synthetic oligonucleotide
  Sense strand starting at position 1391 of SEQ ID NO: 1884202
acgcauugcccacaguuaa

SEQ ID NO: 2247899 - RNA, 19 nt, Artificial Sequence
  Description of Artificial Sequence: Synthetic oligonucleotide
  Antisense strand to SEQ ID NO: 2247898
uuaacugugggcaaugcgu

SEQ ID NO: 2247900 - RNA, 19 nt, Artificial Sequence
  Description of Artificial Sequence: Synthetic oligonucleotide
  Sense strand starting at position 1450 of SEQ ID NO: 1884202
agggaaagccuuugugagu

SEQ ID NO: 2247901 - RNA, 19 nt, Artificial Sequence
  Description of Artificial Sequence: Synthetic oligonucleotide
  Antisense strand to SEQ ID NO: 2247900
acucacaaaggcuuucccu

SEQ ID NO: 2247902 - RNA, 19 nt, Artificial Sequence
  Description of Artificial Sequence: Synthetic oligonucleotide
  Sense strand starting at position 1527 of SEQ ID NO: 1884202
ugauguaggcaucauucuu

SEQ ID NO: 2247903 - RNA, 19 nt, Artificial Sequence
  Description of Artificial Sequence: Synthetic oligonucleotide
  Antisense strand to SEQ ID NO: 2247902
aagaaugaugccuacauca

SEQ ID NO: 2247904 - RNA, 19 nt, Artificial Sequence
  Description of Artificial Sequence: Synthetic oligonucleotide
  Sense strand starting at position 1554 of SEQ ID NO: 1884202
aaguacacagucugagaaa

SEQ ID NO: 2247905 - RNA, 19 nt, Artificial Sequence
  Description of Artificial Sequence: Synthetic oligonucleotide
  Antisense strand to SEQ ID NO: 2247904
uuucucagacuguguacuu

SEQ ID NO: 2247906 - RNA, 19 nt, Artificial Sequence
  Description of Artificial Sequence: Synthetic oligonucleotide
  Sense strand starting at position 1580 of SEQ ID NO: 1884202
gcgcuugcccaagaucaca

SEQ ID NO: 2247907 - RNA, 19 nt, Artificial Sequence
  Description of Artificial Sequence: Synthetic oligonucleotide
  Antisense strand to SEQ ID NO: 2247906
ugugaucuugggcaagcgc

SEQ ID NO: 2247908 - RNA, 19 nt, Artificial Sequence
  Description of Artificial Sequence: Synthetic oligonucleotide
  Sense strand starting at position 1757 of SEQ ID NO: 1884202
gguccguuacccgcggaaa

SEQ ID NO: 2247909 - RNA, 19 nt, Artificial Sequence
  Description of Artificial Sequence: Synthetic oligonucleotide
  Antisense strand to SEQ ID NO: 2247908
uuuccgcggguaacggacc

SEQ ID NO: 2247910 - RNA, 19 nt, Artificial Sequence
  Description of Artificial Sequence: Synthetic oligonucleotide
  Sense strand starting at position 2062 of SEQ ID NO: 1884202
agaaauucccuuuaaggcu

SEQ ID NO: 2247911 - RNA, 19 nt, Artificial Sequence
  Description of Artificial Sequence: Synthetic oligonucleotide
  Antisense strand to SEQ ID NO: 2247910
agccuuaaagggaauuucu

SEQ ID NO: 2247912 - RNA, 19 nt, Artificial Sequence
  Description of Artificial Sequence: Synthetic oligonucleotide
  Sense strand starting at position 2186 of SEQ ID NO: 1884202
uguuaaccuuguguggauu

SEQ ID NO: 2247913 - RNA, 19 nt, Artificial Sequence
  Description of Artificial Sequence: Synthetic oligonucleotide
  Antisense strand to SEQ ID NO: 2247912
aauccacacaagguuaaca

SEQ ID NO: 2247914 - RNA, 19 nt, Artificial Sequence
  Description of Artificial Sequence: Synthetic oligonucleotide
  Sense strand starting at position 2187 of SEQ ID NO: 1884202
guuaaccuuguguggauua

SEQ ID NO: 2247915 - RNA, 19 nt, Artificial Sequence
  Description of Artificial Sequence: Synthetic oligonucleotide
  Antisense strand to SEQ ID NO: 2247914
uaauccacacaagguuaac

SEQ ID NO: 2247916 - RNA, 19 nt, Artificial Sequence
  Description of Artificial Sequence: Synthetic oligonucleotide
  Sense strand starting at position 2197 of SEQ ID NO: 1884202
uguggauuacugugucuag

SEQ ID NO: 2247917 - RNA, 19 nt, Artificial Sequence
  Description of Artificial Sequence: Synthetic oligonucleotide
  Antisense strand to SEQ ID NO: 2247916
cuagacacaguaauccaca

SEQ ID NO: 2247918 - RNA, 19 nt, Artificial Sequence
  Description of Artificial Sequence: Synthetic oligonucleotide
  Sense strand starting at position 2200 of SEQ ID NO: 1884202
ggauuacugugucuaguau

SEQ ID NO: 2247919 - RNA, 19 nt, Artificial Sequence
  Description of Artificial Sequence: Synthetic oligonucleotide
  Antisense strand to SEQ ID NO: 2247918
auacuagacacaguaaucc

SEQ ID NO: 2247920 - RNA, 19 nt, Artificial Sequence
  Description of Artificial Sequence: Synthetic oligonucleotide
  Sense strand starting at position 2201 of SEQ ID NO: 1884202
gauuacugugucuaguauu

SEQ ID NO: 2247921 - RNA, 19 nt, Artificial Sequence
  Description of Artificial Sequence: Synthetic oligonucleotide
  Antisense strand to SEQ ID NO: 2247920
aauacuagacacaguaauc

SEQ ID NO: 2247922 - RNA, 19 nt, Artificial Sequence
  Description of Artificial Sequence: Synthetic oligonucleotide
  Sense strand starting at position 2213 of SEQ ID NO: 1884202
uaguauuucugugacagga

SEQ ID NO: 2247923 - RNA, 19 nt, Artificial Sequence
  Description of Artificial Sequence: Synthetic oligonucleotide
  Antisense strand to SEQ ID NO: 2247922
uccugucacagaaauacua

SEQ ID NO: 2247924 - RNA, 19 nt, Artificial Sequence
  Description of Artificial Sequence: Synthetic oligonucleotide
  Sense strand starting at position 2215 of SEQ ID NO: 1884202
guauuucugugacaggauc

SEQ ID NO: 2247925 - RNA, 19 nt, Artificial Sequence
  Description of Artificial Sequence: Synthetic oligonucleotide
  Antisense strand to SEQ ID NO: 2247924
gauccugucacagaaauac

SEQ ID NO: 2247926 - RNA, 19 nt, Artificial Sequence
  Description of Artificial Sequence: Synthetic oligonucleotide
  Sense strand starting at position 2223 of SEQ ID NO: 1884202
gugacaggaucccuuucuu

SEQ ID NO: 2247927 - RNA, 19 nt, Artificial Sequence
  Description of Artificial Sequence: Synthetic oligonucleotide
  Antisense strand to SEQ ID NO: 2247926
aagaaagggauccugucac

SEQ ID NO: 2247928 - RNA, 19 nt, Artificial Sequence
  Description of Artificial Sequence: Synthetic oligonucleotide
  Sense strand starting at position 2265 of SEQ ID NO: 1884202
ccggcuucuguaugaaaug

SEQ ID NO: 2247929 - RNA, 19 nt, Artificial Sequence
  Description of Artificial Sequence: Synthetic oligonucleotide
  Antisense strand to SEQ ID NO: 2247928
cauuucauacagaagccgg

SEQ ID NO: 2247930 - RNA, 19 nt, Artificial Sequence
  Description of Artificial Sequence: Synthetic oligonucleotide
  Sense strand starting at position 2354 of SEQ ID NO: 1884202
ccugaaauccgcuggaauu

SEQ ID NO: 2247931 - RNA, 19 nt, Artificial Sequence
  Description of Artificial Sequence: Synthetic oligonucleotide
  Antisense strand to SEQ ID NO: 2247930
aauuccagcggauuucagg

SEQ ID NO: 2247932 - RNA, 19 nt, Artificial Sequence
  Description of Artificial Sequence: Synthetic oligonucleotide
  Sense strand starting at position 2355 of SEQ ID NO: 1884202
cugaaauccgcuggaauug

SEQ ID NO: 2247933 - RNA, 19 nt, Artificial Sequence
  Description of Artificial Sequence: Synthetic oligonucleotide
  Antisense strand to SEQ ID NO: 2247932
caauuccagcggauuucag

SEQ ID NO: 2247934 - RNA, 19 nt, Artificial Sequence
  Description of Artificial Sequence: Synthetic oligonucleotide
  Sense strand starting at position 2356 of SEQ ID NO: 1884202
ugaaauccgcuggaauugu

SEQ ID NO: 2247935 - RNA, 19 nt, Artificial Sequence
  Description of Artificial Sequence: Synthetic oligonucleotide
  Antisense strand to SEQ ID NO: 2247934
acaauuccagcggauuuca

SEQ ID NO: 2247936 - RNA, 19 nt, Artificial Sequence
  Description of Artificial Sequence: Synthetic oligonucleotide
  Sense strand starting at position 2462 of SEQ ID NO: 1884202
guguucaguggugagcaua

SEQ ID NO: 2247937 - RNA, 19 nt, Artificial Sequence
  Description of Artificial Sequence: Synthetic oligonucleotide
  Antisense strand to SEQ ID NO: 2247936
uaugcucaccacugaacac

SEQ ID NO: 2247938 - RNA, 19 nt, Artificial Sequence
  Description of Artificial Sequence: Synthetic oligonucleotide
  Sense strand starting at position 2465 of SEQ ID NO: 1884202
uucaguggugagcauagua

SEQ ID NO: 2247939 - RNA, 19 nt, Artificial Sequence
  Description of Artificial Sequence: Synthetic oligonucleotide
  Antisense strand to SEQ ID NO: 2247938
uacuaugcucaccacugaa

SEQ ID NO: 2247940 - RNA, 19 nt, Artificial Sequence
  Description of Artificial Sequence: Synthetic oligonucleotide
  Sense strand starting at position 2475 of SEQ ID NO: 1884202
agcauaguacuugaagcaa

SEQ ID NO: 2247941 - RNA, 19 nt, Artificial Sequence
  Description of Artificial Sequence: Synthetic oligonucleotide
  Antisense strand to SEQ ID NO: 2247940
uugcuucaaguacuaugcu

SEQ ID NO: 2247942 - RNA, 19 nt, Artificial Sequence
  Description of Artificial Sequence: Synthetic oligonucleotide
  Sense strand starting at position 2552 of SEQ ID NO: 1884202
agucuuggagcugguauuu

SEQ ID NO: 2247943 - RNA, 19 nt, Artificial Sequence
  Description of Artificial Sequence: Synthetic oligonucleotide
  Antisense strand to SEQ ID NO: 2247942
aaauaccagcuccaagacu

SEQ ID NO: 2247944 - RNA, 19 nt, Artificial Sequence
  Description of Artificial Sequence: Synthetic oligonucleotide
  Sense strand starting at position 3470 of SEQ ID NO: 1884202
uaauuaugucuguguuuag

SEQ ID NO: 2247945 - RNA, 19 nt, Artificial Sequence
  Description of Artificial Sequence: Synthetic oligonucleotide
  Antisense strand to SEQ ID NO: 2247944
cuaaacacagacauaauua

SEQ ID NO: 2247946 - RNA, 19 nt, Artificial Sequence
  Description of Artificial Sequence: Synthetic oligonucleotide
  Sense strand starting at position 3474 of SEQ ID NO: 1884202
uaugucuguguuuagcaga

SEQ ID NO: 2247947 - RNA, 19 nt, Artificial Sequence
  Description of Artificial Sequence: Synthetic oligonucleotide
  Antisense strand to SEQ ID NO: 2247946
ucugcuaaacacagacaua

SEQ ID NO: 2247948 - RNA, 19 nt, Artificial Sequence
  Description of Artificial Sequence: Synthetic oligonucleotide
  Sense strand starting at position 3479 of SEQ ID NO: 1884202
cuguguuuagcagaugauu

SEQ ID NO: 2247949 - RNA, 19 nt, Artificial Sequence
  Description of Artificial Sequence: Synthetic oligonucleotide
  Antisense strand to SEQ ID NO: 2247948
aaucaucugcuaaacacag

SEQ ID NO: 2247950 - RNA, 19 nt, Artificial Sequence
  Description of Artificial Sequence: Synthetic oligonucleotide
  Sense strand starting at position 3481 of SEQ ID NO: 1884202
guguuuagcagaugauuga

SEQ ID NO: 2247951 - RNA, 19 nt, Artificial Sequence
  Description of Artificial Sequence: Synthetic oligonucleotide
  Antisense strand to SEQ ID NO: 2247950
ucaaucaucugcuaaacac

SEQ ID NO: 2247952 - RNA, 19 nt, Artificial Sequence
  Description of Artificial Sequence: Synthetic oligonucleotide
  Sense strand starting at position 3482 of SEQ ID NO: 1884202
uguuuagcagaugauugaa

SEQ ID NO: 2247953 - RNA, 19 nt, Artificial Sequence
  Description of Artificial Sequence: Synthetic oligonucleotide
  Antisense strand to SEQ ID NO: 2247952
uucaaucaucugcuaaaca

SEQ ID NO: 2247954 - RNA, 19 nt, Artificial Sequence
  Description of Artificial Sequence: Synthetic oligonucleotide
  Sense strand starting at position 91 of SEQ ID NO: 1884203
cuuaucauaccugguguau

SEQ ID NO: 2247955 - RNA, 19 nt, Artificial Sequence
  Description of Artificial Sequence: Synthetic oligonucleotide
  Antisense strand to SEQ ID NO: 2247954
auacaccagguaugauaag

SEQ ID NO: 2247956 - RNA, 19 nt, Artificial Sequence
  Description of Artificial Sequence: Synthetic oligonucleotide
  Sense strand starting at position 95 of SEQ ID NO: 1884203
ucauaccugguguauauau

SEQ ID NO: 2247957 - RNA, 19 nt, Artificial Sequence
  Description of Artificial Sequence: Synthetic oligonucleotide
  Antisense strand to SEQ ID NO: 2247956
auauauacaccagguauga

SEQ ID NO: 2247958 - RNA, 19 nt, Artificial Sequence
  Description of Artificial Sequence: Synthetic oligonucleotide
  Sense strand starting at position 97 of SEQ ID NO: 1884203
auaccugguguauauauga

SEQ ID NO: 2247959 - RNA, 19 nt, Artificial Sequence
  Description of Artificial Sequence: Synthetic oligonucleotide
  Antisense strand to SEQ ID NO: 2247958
ucauauauacaccagguau

SEQ ID NO: 2247960 - RNA, 19 nt, Artificial Sequence
  Description of Artificial Sequence: Synthetic oligonucleotide
  Sense strand starting at position 141 of SEQ ID NO: 1884203
ugauuaaauuaacaggaca

SEQ ID NO: 2247961 - RNA, 19 nt, Artificial Sequence
  Description of Artificial Sequence: Synthetic oligonucleotide
  Antisense strand to SEQ ID NO: 2247960
uguccuguuaauuuaauca

SEQ ID NO: 2247962 - RNA, 19 nt, Artificial Sequence
  Description of Artificial Sequence: Synthetic oligonucleotide
  Sense strand starting at position 175 of SEQ ID NO: 1884203
agugccuaauugucaauga

SEQ ID NO: 2247963 - RNA, 19 nt, Artificial Sequence
  Description of Artificial Sequence: Synthetic oligonucleotide
  Antisense strand to SEQ ID NO: 2247962
ucauugacaauuaggcacu

SEQ ID NO: 2247964 - RNA, 19 nt, Artificial Sequence
  Description of Artificial Sequence: Synthetic oligonucleotide
  Sense strand starting at position 201 of SEQ ID NO: 1884203
agauauggagcgugaggaa

SEQ ID NO: 2247965 - RNA, 19 nt, Artificial Sequence
  Description of Artificial Sequence: Synthetic oligonucleotide
  Antisense strand to SEQ ID NO: 2247964
uuccucacgcuccauaucu

SEQ ID NO: 2247966 - RNA, 19 nt, Artificial Sequence
  Description of Artificial Sequence: Synthetic oligonucleotide
  Sense strand starting at position 210 of SEQ ID NO: 1884203
gcgugaggaaucuaccauc

SEQ ID NO: 2247967 - RNA, 19 nt, Artificial Sequence
  Description of Artificial Sequence: Synthetic oligonucleotide
  Antisense strand to SEQ ID NO: 2247966
gaugguagauuccucacgc

SEQ ID NO: 2247968 - RNA, 19 nt, Artificial Sequence
  Description of Artificial Sequence: Synthetic oligonucleotide
  Sense strand starting at position 276 of SEQ ID NO: 1884203
guaacaggauccgcugaaa

SEQ ID NO: 2247969 - RNA, 19 nt, Artificial Sequence
  Description of Artificial Sequence: Synthetic oligonucleotide
  Antisense strand to SEQ ID NO: 2247968
uuucagcggauccuguuac

SEQ ID NO: 2247970 - RNA, 19 nt, Artificial Sequence
  Description of Artificial Sequence: Synthetic oligonucleotide
  Sense strand starting at position 326 of SEQ ID NO: 1884203
gucugaacuagggaagcuu

SEQ ID NO: 2247971 - RNA, 19 nt, Artificial Sequence
  Description of Artificial Sequence: Synthetic oligonucleotide
  Antisense strand to SEQ ID NO: 2247970
aagcuucccuaguucagac

SEQ ID NO: 2247972 - RNA, 19 nt, Artificial Sequence
  Description of Artificial Sequence: Synthetic oligonucleotide
  Sense strand starting at position 377 of SEQ ID NO: 1884203
gggaucacugcuuaagcuu

SEQ ID NO: 2247973 - RNA, 19 nt, Artificial Sequence
  Description of Artificial Sequence: Synthetic oligonucleotide
  Antisense strand to SEQ ID NO: 2247972
aagcuuaagcagugauccc

SEQ ID NO: 2247974 - RNA, 19 nt, Artificial Sequence
  Description of Artificial Sequence: Synthetic oligonucleotide
  Sense strand starting at position 474 of SEQ ID NO: 1884203
ccagguucugaugauguca

SEQ ID NO: 2247975 - RNA, 19 nt, Artificial Sequence
  Description of Artificial Sequence: Synthetic oligonucleotide
  Antisense strand to SEQ ID NO: 2247974
ugacaucaucagaaccugg

SEQ ID NO: 2247976 - RNA, 19 nt, Artificial Sequence
  Description of Artificial Sequence: Synthetic oligonucleotide
  Sense strand starting at position 537 of SEQ ID NO: 1884203
uggcuaggaucuuccaaga

SEQ ID NO: 2247977 - RNA, 19 nt, Artificial Sequence
  Description of Artificial Sequence: Synthetic oligonucleotide
  Antisense strand to SEQ ID NO: 2247976
ucuuggaagauccuagcca

SEQ ID NO: 2247978 - RNA, 19 nt, Artificial Sequence
  Description of Artificial Sequence: Synthetic oligonucleotide
  Sense strand starting at position 822 of SEQ ID NO: 1884203
ugaucagaaggcugcuaau

SEQ ID NO: 2247979 - RNA, 19 nt, Artificial Sequence
  Description of Artificial Sequence: Synthetic oligonucleotide
  Antisense strand to SEQ ID NO: 2247978
auuagcagccuucugauca

SEQ ID NO: 2247980 - RNA, 19 nt, Artificial Sequence
  Description of Artificial Sequence: Synthetic oligonucleotide
  Sense strand starting at position 1241 of SEQ ID NO: 1884203
agauuaaucugaucuuagu

SEQ ID NO: 2247981 - RNA, 19 nt, Artificial Sequence
  Description of Artificial Sequence: Synthetic oligonucleotide
  Antisense strand to SEQ ID NO: 2247980
acuaagaucagauuaaucu

SEQ ID NO: 2247982 - RNA, 19 nt, Artificial Sequence
  Description of Artificial Sequence: Synthetic oligonucleotide
  Sense strand starting at position 1333 of SEQ ID NO: 1884203
guaagaauauuaguaacca

SEQ ID NO: 2247983 - RNA, 19 nt, Artificial Sequence
  Description of Artificial Sequence: Synthetic oligonucleotide
  Antisense strand to SEQ ID NO: 2247982
ugguuacuaauauucuuac

SEQ ID NO: 2247984 - RNA, 19 nt, Artificial Sequence
  Description of Artificial Sequence: Synthetic oligonucleotide
  Sense strand starting at position 1426 of SEQ ID NO: 1884203
cccugugaccaucauuagu

SEQ ID NO: 2247985 - RNA, 19 nt, Artificial Sequence
  Description of Artificial Sequence: Synthetic oligonucleotide
  Antisense strand to SEQ ID NO: 2247984
acuaaugauggucacaggg

SEQ ID NO: 2247986 - RNA, 19 nt, Artificial Sequence
  Description of Artificial Sequence: Synthetic oligonucleotide
  Sense strand starting at position 1429 of SEQ ID NO: 1884203
ugugaccaucauuaguauu

SEQ ID NO: 2247987 - RNA, 19 nt, Artificial Sequence
  Description of Artificial Sequence: Synthetic oligonucleotide
  Antisense strand to SEQ ID NO: 2247986
aauacuaaugauggucaca

SEQ ID NO: 2247988 - RNA, 19 nt, Artificial Sequence
  Description of Artificial Sequence: Synthetic oligonucleotide
  Sense strand starting at position 1441 of SEQ ID NO: 1884203
uaguauuacccgcaaggca

SEQ ID NO: 2247989 - RNA, 19 nt, Artificial Sequence
  Description of Artificial Sequence: Synthetic oligonucleotide
  Antisense strand to SEQ ID NO: 2247988
ugccuugcggguaauacua

SEQ ID NO: 2247990 - RNA, 19 nt, Artificial Sequence
  Description of Artificial Sequence: Synthetic oligonucleotide
  Sense strand starting at position 2539 of SEQ ID NO: 1884203
ggaagaagguggaaaguuu

SEQ ID NO: 2247991 - RNA, 19 nt, Artificial Sequence
  Description of Artificial Sequence: Synthetic oligonucleotide
  Antisense strand to SEQ ID NO: 2247990
aaacuuuccaccuucuucc

SEQ ID NO: 2247992 - RNA, 19 nt, Artificial Sequence
  Description of Artificial Sequence: Synthetic oligonucleotide
  Sense strand starting at position 2737 of SEQ ID NO: 1884203
ggaggcaggucuuugaaag

SEQ ID NO: 2247993 - RNA, 19 nt, Artificial Sequence
  Description of Artificial Sequence: Synthetic oligonucleotide
  Antisense strand to SEQ ID NO: 2247992
cuuucaaagaccugccucc

SEQ ID NO: 2247994 - RNA, 19 nt, Artificial Sequence
  Description of Artificial Sequence: Synthetic oligonucleotide
  Sense strand starting at position 2738 of SEQ ID NO: 1884203
gaggcaggucuuugaaaga

SEQ ID NO: 2247995 - RNA, 19 nt, Artificial Sequence
  Description of Artificial Sequence: Synthetic oligonucleotide
  Antisense strand to SEQ ID NO: 2247994
ucuuucaaagaccugccuc

SEQ ID NO: 2247996 - RNA, 19 nt, Artificial Sequence
  Description of Artificial Sequence: Synthetic oligonucleotide
  Sense strand starting at position 2784 of SEQ ID NO: 1884203
cugcgugcucauuccugua

SEQ ID NO: 2247997 - RNA, 19 nt, Artificial Sequence
  Description of Artificial Sequence: Synthetic oligonucleotide
  Antisense strand to SEQ ID NO: 2247996
uacaggaaugagcacgcag

SEQ ID NO: 2247998 - RNA, 19 nt, Artificial Sequence
  Description of Artificial Sequence: Synthetic oligonucleotide
  Sense strand starting at position 2852 of SEQ ID NO: 1884203
aaguuugugcaauaaagua

SEQ ID NO: 2247999 - RNA, 19 nt, Artificial Sequence
  Description of Artificial Sequence: Synthetic oligonucleotide
  Antisense strand to SEQ ID NO: 2247998
uacuuuauugcacaaacuu

SEQ ID NO: 2248000 - RNA, 19 nt, Artificial Sequence
  Description of Artificial Sequence: Synthetic oligonucleotide
  Sense strand starting at position 2864 of SEQ ID NO: 1884203
uaaaguaucuuugugguau

SEQ ID NO: 2248001 - RNA, 19 nt, Artificial Sequence
  Description of Artificial Sequence: Synthetic oligonucleotide
  Antisense strand to SEQ ID NO: 2248000
auaccacaaagauacuuua

SEQ ID NO: 2248002 - RNA, 19 nt, Artificial Sequence
  Description of Artificial Sequence: Synthetic oligonucleotide
  Sense strand starting at position 2892 of SEQ ID NO: 1884203
gagagccaccguuaucaau

SEQ ID NO: 2248003 - RNA, 19 nt, Artificial Sequence
  Description of Artificial Sequence: Synthetic oligonucleotide
  Antisense strand to SEQ ID NO: 2248002
auugauaacgguggcucuc

SEQ ID NO: 2248004 - RNA, 19 nt, Artificial Sequence
  Description of Artificial Sequence: Synthetic oligonucleotide
  Sense strand starting at position 2898 of SEQ ID NO: 1884203
caccguuaucaaugggaga

SEQ ID NO: 2248005 - RNA, 19 nt, Artificial Sequence
  Description of Artificial Sequence: Synthetic oligonucleotide
  Antisense strand to SEQ ID NO: 2248004
ucucccauugauaacggug

SEQ ID NO: 2248006 - RNA, 19 nt, Artificial Sequence
  Description of Artificial Sequence: Synthetic oligonucleotide
  Sense strand starting at position 2899 of SEQ ID NO: 1884203
accguuaucaaugggagag

SEQ ID NO: 2248007 - RNA, 19 nt, Artificial Sequence
  Description of Artificial Sequence: Synthetic oligonucleotide
  Antisense strand to SEQ ID NO: 2248006
cucucccauugauaacggu

SEQ ID NO: 2248008 - RNA, 19 nt, Artificial Sequence
  Description of Artificial Sequence: Synthetic oligonucleotide
  Sense strand starting at position 2900 of SEQ ID NO: 1884203
ccguuaucaaugggagagu

SEQ ID NO: 2248009 - RNA, 19 nt, Artificial Sequence
  Description of Artificial Sequence: Synthetic oligonucleotide
  Antisense strand to SEQ ID NO: 2248008
acucucccauugauaacgg

SEQ ID NO: 2248010 - RNA, 19 nt, Artificial Sequence
  Description of Artificial Sequence: Synthetic oligonucleotide
  Sense strand starting at position 2997 of SEQ ID NO: 1884203
ccggucauuucugcaagga

SEQ ID NO: 2248011 - RNA, 19 nt, Artificial Sequence
  Description of Artificial Sequence: Synthetic oligonucleotide
  Antisense strand to SEQ ID NO: 2248010
uccuugcagaaaugaccgg

SEQ ID NO: 2248012 - RNA, 19 nt, Artificial Sequence
  Description of Artificial Sequence: Synthetic oligonucleotide
  Sense strand starting at position 3161 of SEQ ID NO: 1884203
ucuuccuguccaugggaaa

SEQ ID NO: 2248013 - RNA, 19 nt, Artificial Sequence
  Description of Artificial Sequence: Synthetic oligonucleotide
  Antisense strand to SEQ ID NO: 2248012
uuucccauggacaggaaga

SEQ ID NO: 2248014 - RNA, 19 nt, Artificial Sequence
  Description of Artificial Sequence: Synthetic oligonucleotide
  Sense strand starting at position 3162 of SEQ ID NO: 1884203
cuuccuguccaugggaaau

SEQ ID NO: 2248015 - RNA, 19 nt, Artificial Sequence
  Description of Artificial Sequence: Synthetic oligonucleotide
  Antisense strand to SEQ ID NO: 2248014
auuucccauggacaggaag

SEQ ID NO: 2248016 - RNA, 19 nt, Artificial Sequence
  Description of Artificial Sequence: Synthetic oligonucleotide
  Sense strand starting at position 3345 of SEQ ID NO: 1884203
auucuaaaccacugggauu

SEQ ID NO: 2248017 - RNA, 19 nt, Artificial Sequence
  Description of Artificial Sequence: Synthetic oligonucleotide
  Antisense strand to SEQ ID NO: 2248016
aaucccagugguuuagaau

SEQ ID NO: 2248018 - RNA, 19 nt, Artificial Sequence
  Description of Artificial Sequence: Synthetic oligonucleotide
  Sense strand starting at position 3632 of SEQ ID NO: 1884203
gugcugugucuagcgggaa

SEQ ID NO: 2248019 - RNA, 19 nt, Artificial Sequence
  Description of Artificial Sequence: Synthetic oligonucleotide
  Antisense strand to SEQ ID NO: 2248018
uucccgcuagacacagcac

SEQ ID NO: 2248020 - RNA, 19 nt, Artificial Sequence
  Description of Artificial Sequence: Synthetic oligonucleotide
  Sense strand starting at position 3645 of SEQ ID NO: 1884203
cgggaagaagagugacauu

SEQ ID NO: 2248021 - RNA, 19 nt, Artificial Sequence
  Description of Artificial Sequence: Synthetic oligonucleotide
  Antisense strand to SEQ ID NO: 2248020
aaugucacucuucuucccg

SEQ ID NO: 2248022 - RNA, 19 nt, Artificial Sequence
  Description of Artificial Sequence: Synthetic oligonucleotide
  Sense strand starting at position 3648 of SEQ ID NO: 1884203
gaagaagagugacauuuac

SEQ ID NO: 2248023 - RNA, 19 nt, Artificial Sequence
  Description of Artificial Sequence: Synthetic oligonucleotide
  Antisense strand to SEQ ID NO: 2248022
guaaaugucacucuucuuc

SEQ ID NO: 2248024 - RNA, 19 nt, Artificial Sequence
  Description of Artificial Sequence: Synthetic oligonucleotide
  Sense strand starting at position 3655 of SEQ ID NO: 1884203
agugacauuuacuaauaug

SEQ ID NO: 2248025 - RNA, 19 nt, Artificial Sequence
  Description of Artificial Sequence: Synthetic oligonucleotide
  Antisense strand to SEQ ID NO: 2248024
cauauuaguaaaugucacu

SEQ ID NO: 2248026 - RNA, 19 nt, Artificial Sequence
  Description of Artificial Sequence: Synthetic oligonucleotide
  Sense strand starting at position 3663 of SEQ ID NO: 1884203
uuacuaauaugguugcaaa

SEQ ID NO: 2248027 - RNA, 19 nt, Artificial Sequence
  Description of Artificial Sequence: Synthetic oligonucleotide
  Antisense strand to SEQ ID NO: 2248026
uuugcaaccauauuaguaa

SEQ ID NO: 2248028 - RNA, 19 nt, Artificial Sequence
  Description of Artificial Sequence: Synthetic oligonucleotide
  Sense strand starting at position 3805 of SEQ ID NO: 1884203
uauuuaaagacguggcgua

SEQ ID NO: 2248029 - RNA, 19 nt, Artificial Sequence
  Description of Artificial Sequence: Synthetic oligonucleotide
  Antisense strand to SEQ ID NO: 2248028
uacgccacgucuuuaaaua

SEQ ID NO: 2248030 - RNA, 19 nt, Artificial Sequence
  Description of Artificial Sequence: Synthetic oligonucleotide
  Sense strand starting at position 3875 of SEQ ID NO: 1884203
agcgauccacucuaaguuu

SEQ ID NO: 2248031 - RNA, 19 nt, Artificial Sequence
  Description of Artificial Sequence: Synthetic oligonucleotide
  Antisense strand to SEQ ID NO: 2248030
aaacuuagaguggaucgcu

SEQ ID NO: 2248032 - RNA, 19 nt, Artificial Sequence
  Description of Artificial Sequence: Synthetic oligonucleotide
  Sense strand starting at position 3925 of SEQ ID NO: 1884203
augaacuucuguuucugau

SEQ ID NO: 2248033 - RNA, 19 nt, Artificial Sequence
  Description of Artificial Sequence: Synthetic oligonucleotide
  Antisense strand to SEQ ID NO: 2248032
aucagaaacagaaguucau

SEQ ID NO: 2248034 - RNA, 19 nt, Artificial Sequence
  Description of Artificial Sequence: Synthetic oligonucleotide
  Sense strand starting at position 83 of SEQ ID NO: 1884204
gcaagagauuggccuuuag

SEQ ID NO: 2248035 - RNA, 19 nt, Artificial Sequence
  Description of Artificial Sequence: Synthetic oligonucleotide
  Antisense strand to SEQ ID NO: 2248034
cuaaaggccaaucucuugc

SEQ ID NO: 2248036 - RNA, 19 nt, Artificial Sequence
  Description of Artificial Sequence: Synthetic oligonucleotide
  Sense strand starting at position 97 of SEQ ID NO: 1884204
uuuaguguggcacaaauau

SEQ ID NO: 2248037 - RNA, 19 nt, Artificial Sequence
  Description of Artificial Sequence: Synthetic oligonucleotide
  Antisense strand to SEQ ID NO: 2248036
auauuugugccacacuaaa

SEQ ID NO: 2248038 - RNA, 19 nt, Artificial Sequence
  Description of Artificial Sequence: Synthetic oligonucleotide
  Sense strand starting at position 231 of SEQ ID NO: 1884204
gcuugcagauuuccuagua

SEQ ID NO: 2248039 - RNA, 19 nt, Artificial Sequence
  Description of Artificial Sequence: Synthetic oligonucleotide
  Antisense strand to SEQ ID NO: 2248038
uacuaggaaaucugcaagc

SEQ ID NO: 2248040 - RNA, 19 nt, Artificial Sequence
  Description of Artificial Sequence: Synthetic oligonucleotide
  Sense strand starting at position 256 of SEQ ID NO: 1884204
aggugcuuaacgcauugau

SEQ ID NO: 2248041 - RNA, 19 nt, Artificial Sequence
  Description of Artificial Sequence: Synthetic oligonucleotide
  Antisense strand to SEQ ID NO: 2248040
aucaaugcguuaagcaccu

SEQ ID NO: 2248042 - RNA, 19 nt, Artificial Sequence
  Description of Artificial Sequence: Synthetic oligonucleotide
  Sense strand starting at position 282 of SEQ ID NO: 1884204
aggauaauuuccuggacag

SEQ ID NO: 2248043 - RNA, 19 nt, Artificial Sequence
  Description of Artificial Sequence: Synthetic oligonucleotide
  Antisense strand to SEQ ID NO: 2248042
cuguccaggaaauuauccu

SEQ ID NO: 2248044 - RNA, 19 nt, Artificial Sequence
  Description of Artificial Sequence: Synthetic oligonucleotide
  Sense strand starting at position 353 of SEQ ID NO: 1884204
uuguuuagaugaucuucuu

SEQ ID NO: 2248045 - RNA, 19 nt, Artificial Sequence
  Description of Artificial Sequence: Synthetic oligonucleotide
  Antisense strand to SEQ ID NO: 2248044
aagaagaucaucuaaacaa

SEQ ID NO: 2248046 - RNA, 19 nt, Artificial Sequence
  Description of Artificial Sequence: Synthetic oligonucleotide
  Sense strand starting at position 468 of SEQ ID NO: 1884204
uuaagauugucacuggcuu

SEQ ID NO: 2248047 - RNA, 19 nt, Artificial Sequence
  Description of Artificial Sequence: Synthetic oligonucleotide
  Antisense strand to SEQ ID NO: 2248046
aagccagugacaaucuuaa

SEQ ID NO: 2248048 - RNA, 19 nt, Artificial Sequence
  Description of Artificial Sequence: Synthetic oligonucleotide
  Sense strand starting at position 469 of SEQ ID NO: 1884204
uaagauugucacuggcuuu

SEQ ID NO: 2248049 - RNA, 19 nt, Artificial Sequence
  Description of Artificial Sequence: Synthetic oligonucleotide
  Antisense strand to SEQ ID NO: 2248048
aaagccagugacaaucuua

SEQ ID NO: 2248050 - RNA, 19 nt, Artificial Sequence
  Description of Artificial Sequence: Synthetic oligonucleotide
  Sense strand starting at position 501 of SEQ ID NO: 1884204
cccaguucugacuauagua

SEQ ID NO: 2248051 - RNA, 19 nt, Artificial Sequence
  Description of Artificial Sequence: Synthetic oligonucleotide
  Antisense strand to SEQ ID NO: 2248050
uacuauagucagaacuggg

SEQ ID NO: 2248052 - RNA, 19 nt, Artificial Sequence
  Description of Artificial Sequence: Synthetic oligonucleotide
  Sense strand starting at position 793 of SEQ ID NO: 1884204
aaaugagagcugugucuca

SEQ ID NO: 2248053 - RNA, 19 nt, Artificial Sequence
  Description of Artificial Sequence: Synthetic oligonucleotide
  Antisense strand to SEQ ID NO: 2248052
ugagacacagcucucauuu

SEQ ID NO: 2248054 - RNA, 19 nt, Artificial Sequence
  Description of Artificial Sequence: Synthetic oligonucleotide
  Sense strand starting at position 918 of SEQ ID NO: 1884204
cuaggcuuccaauaaguuu

SEQ ID NO: 2248055 - RNA, 19 nt, Artificial Sequence
  Description of Artificial Sequence: Synthetic oligonucleotide
  Antisense strand to SEQ ID NO: 2248054
aaacuuauuggaagccuag

SEQ ID NO: 2248056 - RNA, 19 nt, Artificial Sequence
  Description of Artificial Sequence: Synthetic oligonucleotide
  Sense strand starting at position 1156 of SEQ ID NO: 1884204
aagcguugcgaugugauau

SEQ ID NO: 2248057 - RNA, 19 nt, Artificial Sequence
  Description of Artificial Sequence: Synthetic oligonucleotide
  Antisense strand to SEQ ID NO: 2248056
auaucacaucgcaacgcuu

SEQ ID NO: 2248058 - RNA, 19 nt, Artificial Sequence
  Description of Artificial Sequence: Synthetic oligonucleotide
  Sense strand starting at position 1162 of SEQ ID NO: 1884204
ugcgaugugauauacuaau

SEQ ID NO: 2248059 - RNA, 19 nt, Artificial Sequence
  Description of Artificial Sequence: Synthetic oligonucleotide
  Antisense strand to SEQ ID NO: 2248058
auuaguauaucacaucgca

SEQ ID NO: 2248060 - RNA, 19 nt, Artificial Sequence
  Description of Artificial Sequence: Synthetic oligonucleotide
  Sense strand starting at position 1380 of SEQ ID NO: 1884204
augguuugauuaucggaug

SEQ ID NO: 2248061 - RNA, 19 nt, Artificial Sequence
  Description of Artificial Sequence: Synthetic oligonucleotide
  Antisense strand to SEQ ID NO: 2248060
cauccgauaaucaaaccau

SEQ ID NO: 2248062 - RNA, 19 nt, Artificial Sequence
  Description of Artificial Sequence: Synthetic oligonucleotide
  Sense strand starting at position 1385 of SEQ ID NO: 1884204
uugauuaucggauggucau

SEQ ID NO: 2248063 - RNA, 19 nt, Artificial Sequence
  Description of Artificial Sequence: Synthetic oligonucleotide
  Antisense strand to SEQ ID NO: 2248062
augaccauccgauaaucaa

SEQ ID NO: 2248064 - RNA, 19 nt, Artificial Sequence
  Description of Artificial Sequence: Synthetic oligonucleotide
  Sense strand starting at position 1386 of SEQ ID NO: 1884204
ugauuaucggauggucauu

SEQ ID NO: 2248065 - RNA, 19 nt, Artificial Sequence
  Description of Artificial Sequence: Synthetic oligonucleotide
  Antisense strand to SEQ ID NO: 2248064
aaugaccauccgauaauca

SEQ ID NO: 2248066 - RNA, 19 nt, Artificial Sequence
  Description of Artificial Sequence: Synthetic oligonucleotide
  Sense strand starting at position 1508 of SEQ ID NO: 1884204
ucguuugaugugcaaauuu

SEQ ID NO: 2248067 - RNA, 19 nt, Artificial Sequence
  Description of Artificial Sequence: Synthetic oligonucleotide
  Antisense strand to SEQ ID NO: 2248066
aaauuugcacaucaaacga

SEQ ID NO: 2248068 - RNA, 19 nt, Artificial Sequence
  Description of Artificial Sequence: Synthetic oligonucleotide
  Sense strand starting at position 1627 of SEQ ID NO: 1884204
gcgacucuaaaggguuaau

SEQ ID NO: 2248069 - RNA, 19 nt, Artificial Sequence
  Description of Artificial Sequence: Synthetic oligonucleotide
  Antisense strand to SEQ ID NO: 2248068
auuaacccuuuagagucgc

SEQ ID NO: 2248070 - RNA, 19 nt, Artificial Sequence
  Description of Artificial Sequence: Synthetic oligonucleotide
  Sense strand starting at position 1636 of SEQ ID NO: 1884204
aaggguuaaugagcaacuu

SEQ ID NO: 2248071 - RNA, 19 nt, Artificial Sequence
  Description of Artificial Sequence: Synthetic oligonucleotide
  Antisense strand to SEQ ID NO: 2248070
aaguugcucauuaacccuu

SEQ ID NO: 2248072 - RNA, 19 nt, Artificial Sequence
  Description of Artificial Sequence: Synthetic oligonucleotide
  Sense strand starting at position 1700 of SEQ ID NO: 1884204
gaauuacagaccgguuugu

SEQ ID NO: 2248073 - RNA, 19 nt, Artificial Sequence
  Description of Artificial Sequence: Synthetic oligonucleotide
  Antisense strand to SEQ ID NO: 2248072
acaaaccggucuguaauuc

SEQ ID NO: 2248074 - RNA, 19 nt, Artificial Sequence
  Description of Artificial Sequence: Synthetic oligonucleotide
  Sense strand starting at position 1704 of SEQ ID NO: 1884204
uacagaccgguuuguauuu

SEQ ID NO: 2248075 - RNA, 19 nt, Artificial Sequence
  Description of Artificial Sequence: Synthetic oligonucleotide
  Antisense strand to SEQ ID NO: 2248074
aaauacaaaccggucugua

SEQ ID NO: 2248076 - RNA, 19 nt, Artificial Sequence
  Description of Artificial Sequence: Synthetic oligonucleotide
  Sense strand starting at position 1709 of SEQ ID NO: 1884204
accgguuuguauuuaauac

SEQ ID NO: 2248077 - RNA, 19 nt, Artificial Sequence
  Description of Artificial Sequence: Synthetic oligonucleotide
  Antisense strand to SEQ ID NO: 2248076
guauuaaauacaaaccggu

SEQ ID NO: 2248078 - RNA, 19 nt, Artificial Sequence
  Description of Artificial Sequence: Synthetic oligonucleotide
  Sense strand starting at position 1754 of SEQ ID NO: 1884204
cgaguauuggcauaaagga

SEQ ID NO: 2248079 - RNA, 19 nt, Artificial Sequence
  Description of Artificial Sequence: Synthetic oligonucleotide
  Antisense strand to SEQ ID NO: 2248078
uccuuuaugccaauacucg

SEQ ID NO: 2248080 - RNA, 19 nt, Artificial Sequence
  Description of Artificial Sequence: Synthetic oligonucleotide
  Sense strand starting at position 1918 of SEQ ID NO: 1884204
gcuauaacgcucgcuggua

SEQ ID NO: 2248081 - RNA, 19 nt, Artificial Sequence
  Description of Artificial Sequence: Synthetic oligonucleotide
  Antisense strand to SEQ ID NO: 2248080
uaccagcgagcguuauagc

SEQ ID NO: 2248082 - RNA, 19 nt, Artificial Sequence
  Description of Artificial Sequence: Synthetic oligonucleotide
  Sense strand starting at position 2592 of SEQ ID NO: 1884204
ggguccuaucuggagacga

SEQ ID NO: 2248083 - RNA, 19 nt, Artificial Sequence
  Description of Artificial Sequence: Synthetic oligonucleotide
  Antisense strand to SEQ ID NO: 2248082
ucgucuccagauaggaccc

SEQ ID NO: 2248084 - RNA, 19 nt, Artificial Sequence
  Description of Artificial Sequence: Synthetic oligonucleotide
  Sense strand starting at position 2611 of SEQ ID NO: 1884204
gggaguagaacgugcugaa

SEQ ID NO: 2248085 - RNA, 19 nt, Artificial Sequence
  Description of Artificial Sequence: Synthetic oligonucleotide
  Antisense strand to SEQ ID NO: 2248084
uucagcacguucuacuccc

SEQ ID NO: 2248086 - RNA, 19 nt, Artificial Sequence
  Description of Artificial Sequence: Synthetic oligonucleotide
  Sense strand starting at position 3049 of SEQ ID NO: 1884204
ggagaaaucuccgcccuga

SEQ ID NO: 2248087 - RNA, 19 nt, Artificial Sequence
  Description of Artificial Sequence: Synthetic oligonucleotide
  Antisense strand to SEQ ID NO: 2248086
ucagggcggagauuucucc

SEQ ID NO: 2248088 - RNA, 19 nt, Artificial Sequence
  Description of Artificial Sequence: Synthetic oligonucleotide
  Sense strand starting at position 3107 of SEQ ID NO: 1884204
caggauuccgcugaaguau

SEQ ID NO: 2248089 - RNA, 19 nt, Artificial Sequence
  Description of Artificial Sequence: Synthetic oligonucleotide
  Antisense strand to SEQ ID NO: 2248088
auacuucagcggaauccug

SEQ ID NO: 2248090 - RNA, 19 nt, Artificial Sequence
  Description of Artificial Sequence: Synthetic oligonucleotide
  Sense strand starting at position 3133 of SEQ ID NO: 1884204
gcaaguguuuaaucgggaa

SEQ ID NO: 2248091 - RNA, 19 nt, Artificial Sequence
  Description of Artificial Sequence: Synthetic oligonucleotide
  Antisense strand to SEQ ID NO: 2248090
uucccgauuaaacacuugc

SEQ ID NO: 2248092 - RNA, 19 nt, Artificial Sequence
  Description of Artificial Sequence: Synthetic oligonucleotide
  Sense strand starting at position 3135 of SEQ ID NO: 1884204
aaguguuuaaucgggaaga

SEQ ID NO: 2248093 - RNA, 19 nt, Artificial Sequence
  Description of Artificial Sequence: Synthetic oligonucleotide
  Antisense strand to SEQ ID NO: 2248092
ucuucccgauuaaacacuu

SEQ ID NO: 2248094 - RNA, 19 nt, Artificial Sequence
  Description of Artificial Sequence: Synthetic oligonucleotide
  Sense strand starting at position 3137 of SEQ ID NO: 1884204
guguuuaaucgggaagaag

SEQ ID NO: 2248095 - RNA, 19 nt, Artificial Sequence
  Description of Artificial Sequence: Synthetic oligonucleotide
  Antisense strand to SEQ ID NO: 2248094
cuucuucccgauuaaacac

SEQ ID NO: 2248096 - RNA, 19 nt, Artificial Sequence
  Description of Artificial Sequence: Synthetic oligonucleotide
  Sense strand starting at position 3191 of SEQ ID NO: 1884204
cuccgugucccucaaugau

SEQ ID NO: 2248097 - RNA, 19 nt, Artificial Sequence
  Description of Artificial Sequence: Synthetic oligonucleotide
  Antisense strand to SEQ ID NO: 2248096
aucauugagggacacggag

SEQ ID NO: 2248098 - RNA, 19 nt, Artificial Sequence
  Description of Artificial Sequence: Synthetic oligonucleotide
  Sense strand starting at position 3364 of SEQ ID NO: 1884204
uucuuauugugauucucac

SEQ ID NO: 2248099 - RNA, 19 nt, Artificial Sequence
  Description of Artificial Sequence: Synthetic oligonucleotide
  Antisense strand to SEQ ID NO: 2248098
gugagaaucacaauaagaa

SEQ ID NO: 2248100 - RNA, 19 nt, Artificial Sequence
  Description of Artificial Sequence: Synthetic oligonucleotide
  Sense strand starting at position 3423 of SEQ ID NO: 1884204
acuguugucagccagagga

SEQ ID NO: 2248101 - RNA, 19 nt, Artificial Sequence
  Description of Artificial Sequence: Synthetic oligonucleotide
  Antisense strand to SEQ ID NO: 2248100
uccucuggcugacaacagu

SEQ ID NO: 2248102 - RNA, 19 nt, Artificial Sequence
  Description of Artificial Sequence: Synthetic oligonucleotide
  Sense strand starting at position 3425 of SEQ ID NO: 1884204
uguugucagccagaggacu

SEQ ID NO: 2248103 - RNA, 19 nt, Artificial Sequence
  Description of Artificial Sequence: Synthetic oligonucleotide
  Antisense strand to SEQ ID NO: 2248102
aguccucuggcugacaaca

SEQ ID NO: 2248104 - RNA, 19 nt, Artificial Sequence
  Description of Artificial Sequence: Synthetic oligonucleotide
  Sense strand starting at position 3661 of SEQ ID NO: 1884204
agcaguacuccaggaugaa

SEQ ID NO: 2248105 - RNA, 19 nt, Artificial Sequence
  Description of Artificial Sequence: Synthetic oligonucleotide
  Antisense strand to SEQ ID NO: 2248104
uucauccuggaguacugcu

SEQ ID NO: 2248106 - RNA, 19 nt, Artificial Sequence
  Description of Artificial Sequence: Synthetic oligonucleotide
  Sense strand starting at position 3662 of SEQ ID NO: 1884204
gcaguacuccaggaugaac

SEQ ID NO: 2248107 - RNA, 19 nt, Artificial Sequence
  Description of Artificial Sequence: Synthetic oligonucleotide
  Antisense strand to SEQ ID NO: 2248106
guucauccuggaguacugc

SEQ ID NO: 2248108 - RNA, 19 nt, Artificial Sequence
  Description of Artificial Sequence: Synthetic oligonucleotide
  Sense strand starting at position 3729 of SEQ ID NO: 1884204
gugagauugcaauguucca

SEQ ID NO: 2248109 - RNA, 19 nt, Artificial Sequence
  Description of Artificial Sequence: Synthetic oligonucleotide
  Antisense strand to SEQ ID NO: 2248108
uggaacauugcaaucucac

SEQ ID NO: 2248110 - RNA, 19 nt, Artificial Sequence
  Description of Artificial Sequence: Synthetic oligonucleotide
  Sense strand starting at position 3833 of SEQ ID NO: 1884204
uaaagugacugaguuucuu

SEQ ID NO: 2248111 - RNA, 19 nt, Artificial Sequence
  Description of Artificial Sequence: Synthetic oligonucleotide
  Antisense strand to SEQ ID NO: 2248110
aagaaacucagucacuuua

SEQ ID NO: 2248112 - RNA, 19 nt, Artificial Sequence
  Description of Artificial Sequence: Synthetic oligonucleotide
  Sense strand starting at position 3950 of SEQ ID NO: 1884204
accuaugacugacuguaua

SEQ ID NO: 2248113 - RNA, 19 nt, Artificial Sequence
  Description of Artificial Sequence: Synthetic oligonucleotide
  Antisense strand to SEQ ID NO: 2248112
uauacagucagucauaggu

SEQ ID NO: 2248114 - RNA, 19 nt, Artificial Sequence
  Description of Artificial Sequence: Synthetic oligonucleotide
  Sense strand starting at position 7 of SEQ ID NO: 1884205
gagcacaagaguugugcau

SEQ ID NO: 2248115 - RNA, 19 nt, Artificial Sequence
  Description of Artificial Sequence: Synthetic oligonucleotide
  Antisense strand to SEQ ID NO: 2248114
augcacaacucuugugcuc

SEQ ID NO: 2248116 - RNA, 19 nt, Artificial Sequence
  Description of Artificial Sequence: Synthetic oligonucleotide
  Sense strand starting at position 9 of SEQ ID NO: 1884205
gcacaagaguugugcauuu

SEQ ID NO: 2248117 - RNA, 19 nt, Artificial Sequence
  Description of Artificial Sequence: Synthetic oligonucleotide
  Antisense strand to SEQ ID NO: 2248116
aaaugcacaacucuugugc

SEQ ID NO: 2248118 - RNA, 19 nt, Artificial Sequence
  Description of Artificial Sequence: Synthetic oligonucleotide
  Sense strand starting at position 344 of SEQ ID NO: 1884205
cuggcugaguugugcauuu

SEQ ID NO: 2248119 - RNA, 19 nt, Artificial Sequence
  Description of Artificial Sequence: Synthetic oligonucleotide
  Antisense strand to SEQ ID NO: 2248118
aaaugcacaacucagccag

SEQ ID NO: 2248120 - RNA, 19 nt, Artificial Sequence
  Description of Artificial Sequence: Synthetic oligonucleotide
  Sense strand starting at position 483 of SEQ ID NO: 1884205
cccucagccucucaggaau

SEQ ID NO: 2248121 - RNA, 19 nt, Artificial Sequence
  Description of Artificial Sequence: Synthetic oligonucleotide
  Antisense strand to SEQ ID NO: 2248120
auuccugagaggcugaggg

SEQ ID NO: 2248122 - RNA, 19 nt, Artificial Sequence
  Description of Artificial Sequence: Synthetic oligonucleotide
  Sense strand starting at position 917 of SEQ ID NO: 1884205
gagucaagcuccugggcau

SEQ ID NO: 2248123 - RNA, 19 nt, Artificial Sequence
  Description of Artificial Sequence: Synthetic oligonucleotide
  Antisense strand to SEQ ID NO: 2248122
augcccaggagcuugacuc

SEQ ID NO: 2248124 - RNA, 19 nt, Artificial Sequence
  Description of Artificial Sequence: Synthetic oligonucleotide
  Sense strand starting at position 957 of SEQ ID NO: 1884205
cagucuggccagcaaagau

SEQ ID NO: 2248125 - RNA, 19 nt, Artificial Sequence
  Description of Artificial Sequence: Synthetic oligonucleotide
  Antisense strand to SEQ ID NO: 2248124
aucuuugcuggccagacug

SEQ ID NO: 2248126 - RNA, 19 nt, Artificial Sequence
  Description of Artificial Sequence: Synthetic oligonucleotide
  Sense strand starting at position 1024 of SEQ ID NO: 1884205
ucucuuggccaaggugaau

SEQ ID NO: 2248127 - RNA, 19 nt, Artificial Sequence
  Description of Artificial Sequence: Synthetic oligonucleotide
  Antisense strand to SEQ ID NO: 2248126
auucaccuuggccaagaga

SEQ ID NO: 2248128 - RNA, 19 nt, Artificial Sequence
  Description of Artificial Sequence: Synthetic oligonucleotide
  Sense strand starting at position 1063 of SEQ ID NO: 1884205
accagcaucgccuacagau

SEQ ID NO: 2248129 - RNA, 19 nt, Artificial Sequence
  Description of Artificial Sequence: Synthetic oligonucleotide
  Antisense strand to SEQ ID NO: 2248128
aucuguaggcgaugcuggu

SEQ ID NO: 2248130 - RNA, 19 nt, Artificial Sequence
  Description of Artificial Sequence: Synthetic oligonucleotide
  Sense strand starting at position 1123 of SEQ ID NO: 1884205
caauguugcuggcagacaa

SEQ ID NO: 2248131 - RNA, 19 nt, Artificial Sequence
  Description of Artificial Sequence: Synthetic oligonucleotide
  Antisense strand to SEQ ID NO: 2248130
uugucugccagcaacauug

SEQ ID NO: 2248132 - RNA, 19 nt, Artificial Sequence
  Description of Artificial Sequence: Synthetic oligonucleotide
  Sense strand starting at position 1186 of SEQ ID NO: 1884205
ucccgagagacugggauau

SEQ ID NO: 2248133 - RNA, 19 nt, Artificial Sequence
  Description of Artificial Sequence: Synthetic oligonucleotide
  Antisense strand to SEQ ID NO: 2248132
auaucccagucucucggga

SEQ ID NO: 2248134 - RNA, 19 nt, Artificial Sequence
  Description of Artificial Sequence: Synthetic oligonucleotide
  Sense strand starting at position 1198 of SEQ ID NO: 1884205
gggauaugguccuccagua

SEQ ID NO: 2248135 - RNA, 19 nt, Artificial Sequence
  Description of Artificial Sequence: Synthetic oligonucleotide
  Antisense strand to SEQ ID NO: 2248134
uacuggaggaccauauccc

SEQ ID NO: 2248136 - RNA, 19 nt, Artificial Sequence
  Description of Artificial Sequence: Synthetic oligonucleotide
  Sense strand starting at position 1421 of SEQ ID NO: 1884205
agcuucagugucggaguua

SEQ ID NO: 2248137 - RNA, 19 nt, Artificial Sequence
  Description of Artificial Sequence: Synthetic oligonucleotide
  Antisense strand to SEQ ID NO: 2248136
uaacuccgacacugaagcu

SEQ ID NO: 2248138 - RNA, 19 nt, Artificial Sequence
  Description of Artificial Sequence: Synthetic oligonucleotide
  Sense strand starting at position 1426 of SEQ ID NO: 1884205
cagugucggaguuacuaga

SEQ ID NO: 2248139 - RNA, 19 nt, Artificial Sequence
  Description of Artificial Sequence: Synthetic oligonucleotide
  Antisense strand to SEQ ID NO: 2248138
ucuaguaacuccgacacug

SEQ ID NO: 2248140 - RNA, 19 nt, Artificial Sequence
  Description of Artificial Sequence: Synthetic oligonucleotide
  Sense strand starting at position 1452 of SEQ ID NO: 1884205
gcuuguggccggcgaguua

SEQ ID NO: 2248141 - RNA, 19 nt, Artificial Sequence
  Description of Artificial Sequence: Synthetic oligonucleotide
  Antisense strand to SEQ ID NO: 2248140
uaacucgccggccacaagc

SEQ ID NO: 2248142 - RNA, 19 nt, Artificial Sequence
  Description of Artificial Sequence: Synthetic oligonucleotide
  Sense strand starting at position 1514 of SEQ ID NO: 1884205
cggucauuccuguguggug

SEQ ID NO: 2248143 - RNA, 19 nt, Artificial Sequence
  Description of Artificial Sequence: Synthetic oligonucleotide
  Antisense strand to SEQ ID NO: 2248142
caccacacaggaaugaccg

SEQ ID NO: 2248144 - RNA, 19 nt, Artificial Sequence
  Description of Artificial Sequence: Synthetic oligonucleotide
  Sense strand starting at position 1516 of SEQ ID NO: 1884205
gucauuccuguguggugga

SEQ ID NO: 2248145 - RNA, 19 nt, Artificial Sequence
  Description of Artificial Sequence: Synthetic oligonucleotide
  Antisense strand to SEQ ID NO: 2248144
uccaccacacaggaaugac

SEQ ID NO: 2248146 - RNA, 19 nt, Artificial Sequence
  Description of Artificial Sequence: Synthetic oligonucleotide
  Sense strand starting at position 1597 of SEQ ID NO: 1884205
gccucaguuucgucacgca

SEQ ID NO: 2248147 - RNA, 19 nt, Artificial Sequence
  Description of Artificial Sequence: Synthetic oligonucleotide
  Antisense strand to SEQ ID NO: 2248146
ugcgugacgaaacugaggc

SEQ ID NO: 2248148 - RNA, 19 nt, Artificial Sequence
  Description of Artificial Sequence: Synthetic oligonucleotide
  Sense strand starting at position 2079 of SEQ ID NO: 1884205
gggagcuuguccuccggaa

SEQ ID NO: 2248149 - RNA, 19 nt, Artificial Sequence
  Description of Artificial Sequence: Synthetic oligonucleotide
  Antisense strand to SEQ ID NO: 2248148
uuccggaggacaagcuccc

SEQ ID NO: 2248150 - RNA, 19 nt, Artificial Sequence
  Description of Artificial Sequence: Synthetic oligonucleotide
  Sense strand starting at position 2081 of SEQ ID NO: 1884205
gagcuuguccuccggaaag

SEQ ID NO: 2248151 - RNA, 19 nt, Artificial Sequence
  Description of Artificial Sequence: Synthetic oligonucleotide
  Antisense strand to SEQ ID NO: 2248150
cuuuccggaggacaagcuc

SEQ ID NO: 2248152 - RNA, 19 nt, Artificial Sequence
  Description of Artificial Sequence: Synthetic oligonucleotide
  Sense strand starting at position 2391 of SEQ ID NO: 1884205
uggagagcauguccagaaa

SEQ ID NO: 2248153 - RNA, 19 nt, Artificial Sequence
  Description of Artificial Sequence: Synthetic oligonucleotide
  Antisense strand to SEQ ID NO: 2248152
uuucuggacaugcucucca

SEQ ID NO: 2248154 - RNA, 19 nt, Artificial Sequence
  Description of Artificial Sequence: Synthetic oligonucleotide
  Sense strand starting at position 2677 of SEQ ID NO: 1884205
auagaagucucaggaaaca

SEQ ID NO: 2248155 - RNA, 19 nt, Artificial Sequence
  Description of Artificial Sequence: Synthetic oligonucleotide
  Antisense strand to SEQ ID NO: 2248154
uguuuccugagacuucuau

SEQ ID NO: 2248156 - RNA, 19 nt, Artificial Sequence
  Description of Artificial Sequence: Synthetic oligonucleotide
  Sense strand starting at position 2695 of SEQ ID NO: 1884205
agaagcagauucugucaaa

SEQ ID NO: 2248157 - RNA, 19 nt, Artificial Sequence
  Description of Artificial Sequence: Synthetic oligonucleotide
  Antisense strand to SEQ ID NO: 2248156
uuugacagaaucugcuucu

SEQ ID NO: 2248158 - RNA, 19 nt, Artificial Sequence
  Description of Artificial Sequence: Synthetic oligonucleotide
  Sense strand starting at position 2719 of SEQ ID NO: 1884205
guugaagugucuuugacac

SEQ ID NO: 2248159 - RNA, 19 nt, Artificial Sequence
  Description of Artificial Sequence: Synthetic oligonucleotide
  Antisense strand to SEQ ID NO: 2248158
gugucaaagacacuucaac

SEQ ID NO: 2248160 - RNA, 19 nt, Artificial Sequence
  Description of Artificial Sequence: Synthetic oligonucleotide
  Sense strand starting at position 2721 of SEQ ID NO: 1884205
ugaagugucuuugacacca

SEQ ID NO: 2248161 - RNA, 19 nt, Artificial Sequence
  Description of Artificial Sequence: Synthetic oligonucleotide
  Antisense strand to SEQ ID NO: 2248160
uggugucaaagacacuuca

SEQ ID NO: 2248162 - RNA, 19 nt, Artificial Sequence
  Description of Artificial Sequence: Synthetic oligonucleotide
  Sense strand starting at position 2808 of SEQ ID NO: 1884205
ggguuaaaugugugggcuu

SEQ ID NO: 2248163 - RNA, 19 nt, Artificial Sequence
  Description of Artificial Sequence: Synthetic oligonucleotide
  Antisense strand to SEQ ID NO: 2248162
aagcccacacauuuaaccc

SEQ ID NO: 2248164 - RNA, 19 nt, Artificial Sequence
  Description of Artificial Sequence: Synthetic oligonucleotide
  Sense strand starting at position 2810 of SEQ ID NO: 1884205
guuaaaugugugggcuugu

SEQ ID NO: 2248165 - RNA, 19 nt, Artificial Sequence
  Description of Artificial Sequence: Synthetic oligonucleotide
  Antisense strand to SEQ ID NO: 2248164
acaagcccacacauuuaac

SEQ ID NO: 2248166 - RNA, 19 nt, Artificial Sequence
  Description of Artificial Sequence: Synthetic oligonucleotide
  Sense strand starting at position 2821 of SEQ ID NO: 1884205
gggcuuguugcaugggaau

SEQ ID NO: 2248167 - RNA, 19 nt, Artificial Sequence
  Description of Artificial Sequence: Synthetic oligonucleotide
  Antisense strand to SEQ ID NO: 2248166
auucccaugcaacaagccc

SEQ ID NO: 2248168 - RNA, 19 nt, Artificial Sequence
  Description of Artificial Sequence: Synthetic oligonucleotide
  Sense strand starting at position 2823 of SEQ ID NO: 1884205
gcuuguugcaugggaauua

SEQ ID NO: 2248169 - RNA, 19 nt, Artificial Sequence
  Description of Artificial Sequence: Synthetic oligonucleotide
  Antisense strand to SEQ ID NO: 2248168
uaauucccaugcaacaagc

SEQ ID NO: 2248170 - RNA, 19 nt, Artificial Sequence
  Description of Artificial Sequence: Synthetic oligonucleotide
  Sense strand starting at position 2828 of SEQ ID NO: 1884205
uugcaugggaauuagguau

SEQ ID NO: 2248171 - RNA, 19 nt, Artificial Sequence
  Description of Artificial Sequence: Synthetic oligonucleotide
  Antisense strand to SEQ ID NO: 2248170
auaccuaauucccaugcaa

SEQ ID NO: 2248172 - RNA, 19 nt, Artificial Sequence
  Description of Artificial Sequence: Synthetic oligonucleotide
  Sense strand starting at position 2882 of SEQ ID NO: 1884205
cccguaguuucucuaucuu

SEQ ID NO: 2248173 - RNA, 19 nt, Artificial Sequence
  Description of Artificial Sequence: Synthetic oligonucleotide
  Antisense strand to SEQ ID NO: 2248172
aagauagagaaacuacggg

SEQ ID NO: 2248174 - RNA, 19 nt, Artificial Sequence
  Description of Artificial Sequence: Synthetic oligonucleotide
  Sense strand starting at position 3130 of SEQ ID NO: 1884205
uguacuguauguucuuuau

SEQ ID NO: 2248175 - RNA, 19 nt, Artificial Sequence
  Description of Artificial Sequence: Synthetic oligonucleotide
  Antisense strand to SEQ ID NO: 2248174
auaaagaacauacaguaca

SEQ ID NO: 2248176 - RNA, 19 nt, Artificial Sequence
  Description of Artificial Sequence: Synthetic oligonucleotide
  Sense strand starting at position 3133 of SEQ ID NO: 1884205
acuguauguucuuuaucca

SEQ ID NO: 2248177 - RNA, 19 nt, Artificial Sequence
  Description of Artificial Sequence: Synthetic oligonucleotide
  Antisense strand to SEQ ID NO: 2248176
uggauaaagaacauacagu

SEQ ID NO: 2248178 - RNA, 19 nt, Artificial Sequence
  Description of Artificial Sequence: Synthetic oligonucleotide
  Sense strand starting at position 3134 of SEQ ID NO: 1884205
cuguauguucuuuauccaa

SEQ ID NO: 2248179 - RNA, 19 nt, Artificial Sequence
  Description of Artificial Sequence: Synthetic oligonucleotide
  Antisense strand to SEQ ID NO: 2248178
uuggauaaagaacauacag

SEQ ID NO: 2248180 - RNA, 19 nt, Artificial Sequence
  Description of Artificial Sequence: Synthetic oligonucleotide
  Sense strand starting at position 3136 of SEQ ID NO: 1884205
guauguucuuuauccaauc

SEQ ID NO: 2248181 - RNA, 19 nt, Artificial Sequence
  Description of Artificial Sequence: Synthetic oligonucleotide
  Antisense strand to SEQ ID NO: 2248180
gauuggauaaagaacauac

SEQ ID NO: 2248182 - RNA, 19 nt, Artificial Sequence
  Description of Artificial Sequence: Synthetic oligonucleotide
  Sense strand starting at position 3185 of SEQ ID NO: 1884205
agucccugcuauugugaau

SEQ ID NO: 2248183 - RNA, 19 nt, Artificial Sequence
  Description of Artificial Sequence: Synthetic oligonucleotide
  Antisense strand to SEQ ID NO: 2248182
auucacaauagcagggacu

SEQ ID NO: 2248184 - RNA, 19 nt, Artificial Sequence
  Description of Artificial Sequence: Synthetic oligonucleotide
  Sense strand starting at position 3197 of SEQ ID NO: 1884205
ugugaauggugcuacgauu

SEQ ID NO: 2248185 - RNA, 19 nt, Artificial Sequence
  Description of Artificial Sequence: Synthetic oligonucleotide
  Antisense strand to SEQ ID NO: 2248184
aaucguagcaccauucaca

SEQ ID NO: 2248186 - RNA, 19 nt, Artificial Sequence
  Description of Artificial Sequence: Synthetic oligonucleotide
  Sense strand starting at position 3590 of SEQ ID NO: 1884205
gcaaccuuggcucagugua

SEQ ID NO: 2248187 - RNA, 19 nt, Artificial Sequence
  Description of Artificial Sequence: Synthetic oligonucleotide
  Antisense strand to SEQ ID NO: 2248186
uacacugagccaagguugc

SEQ ID NO: 2248188 - RNA, 19 nt, Artificial Sequence
  Description of Artificial Sequence: Synthetic oligonucleotide
  Sense strand starting at position 3852 of SEQ ID NO: 1884205
gacuuauauuccguugggu

SEQ ID NO: 2248189 - RNA, 19 nt, Artificial Sequence
  Description of Artificial Sequence: Synthetic oligonucleotide
  Antisense strand to SEQ ID NO: 2248188
acccaacggaauauaaguc

SEQ ID NO: 2248190 - RNA, 19 nt, Artificial Sequence
  Description of Artificial Sequence: Synthetic oligonucleotide
  Sense strand starting at position 3854 of SEQ ID NO: 1884205
cuuauauuccguuggguau

SEQ ID NO: 2248191 - RNA, 19 nt, Artificial Sequence
  Description of Artificial Sequence: Synthetic oligonucleotide
  Antisense strand to SEQ ID NO: 2248190
auacccaacggaauauaag

SEQ ID NO: 2248192 - RNA, 19 nt, Artificial Sequence
  Description of Artificial Sequence: Synthetic oligonucleotide
  Sense strand starting at position 3924 of SEQ ID NO: 1884205
uugagaaauuucuaaucug

SEQ ID NO: 2248193 - RNA, 19 nt, Artificial Sequence
  Description of Artificial Sequence: Synthetic oligonucleotide
  Antisense strand to SEQ ID NO: 2248192
cagauuagaaauuucucaa

SEQ ID NO: 2248194 - RNA, 19 nt, Artificial Sequence
  Description of Artificial Sequence: Synthetic oligonucleotide
  Sense strand starting at position 1072 of SEQ ID NO: 1884206
gggaguuuguguuaugcca

SEQ ID NO: 2248195 - RNA, 19 nt, Artificial Sequence
  Description of Artificial Sequence: Synthetic oligonucleotide
  Antisense strand to SEQ ID NO: 2248194
uggcauaacacaaacuccc

SEQ ID NO: 2248196 - RNA, 19 nt, Artificial Sequence
  Description of Artificial Sequence: Synthetic oligonucleotide
  Sense strand starting at position 1125 of SEQ ID NO: 1884206
gaggacaucuggguuccau

SEQ ID NO: 2248197 - RNA, 19 nt, Artificial Sequence
  Description of Artificial Sequence: Synthetic oligonucleotide
  Antisense strand to SEQ ID NO: 2248196
auggaacccagauguccuc

SEQ ID NO: 2248198 - RNA, 19 nt, Artificial Sequence
  Description of Artificial Sequence: Synthetic oligonucleotide
  Sense strand starting at position 1154 of SEQ ID NO: 1884206
ccaggauucugguugcaaa

SEQ ID NO: 2248199 - RNA, 19 nt, Artificial Sequence
  Description of Artificial Sequence: Synthetic oligonucleotide
  Antisense strand to SEQ ID NO: 2248198
uuugcaaccagaauccugg

SEQ ID NO: 2248200 - RNA, 19 nt, Artificial Sequence
  Description of Artificial Sequence: Synthetic oligonucleotide
  Sense strand starting at position 1155 of SEQ ID NO: 1884206
caggauucugguugcaaau

SEQ ID NO: 2248201 - RNA, 19 nt, Artificial Sequence
  Description of Artificial Sequence: Synthetic oligonucleotide
  Antisense strand to SEQ ID NO: 2248200
auuugcaaccagaauccug

SEQ ID NO: 2248202 - RNA, 19 nt, Artificial Sequence
  Description of Artificial Sequence: Synthetic oligonucleotide
  Sense strand starting at position 1157 of SEQ ID NO: 1884206
ggauucugguugcaaauua

SEQ ID NO: 2248203 - RNA, 19 nt, Artificial Sequence
  Description of Artificial Sequence: Synthetic oligonucleotide
  Antisense strand to SEQ ID NO: 2248202
uaauuugcaaccagaaucc

SEQ ID NO: 2248204 - RNA, 19 nt, Artificial Sequence
  Description of Artificial Sequence: Synthetic oligonucleotide
  Sense strand starting at position 1188 of SEQ ID NO: 1884206
uaaacuuaugcagggaagu

SEQ ID NO: 2248205 - RNA, 19 nt, Artificial Sequence
  Description of Artificial Sequence: Synthetic oligonucleotide
  Antisense strand to SEQ ID NO: 2248204
acuucccugcauaaguuua

SEQ ID NO: 2248206 - RNA, 19 nt, Artificial Sequence
  Description of Artificial Sequence: Synthetic oligonucleotide
  Sense strand starting at position 1244 of SEQ ID NO: 1884206
gaagccaucugggcucuaa

SEQ ID NO: 2248207 - RNA, 19 nt, Artificial Sequence
  Description of Artificial Sequence: Synthetic oligonucleotide
  Antisense strand to SEQ ID NO: 2248206
uuagagcccagauggcuuc

SEQ ID NO: 2248208 - RNA, 19 nt, Artificial Sequence
  Description of Artificial Sequence: Synthetic oligonucleotide
  Sense strand starting at position 1470 of SEQ ID NO: 1884206
cguggacucucuuaggaac

SEQ ID NO: 2248209 - RNA, 19 nt, Artificial Sequence
  Description of Artificial Sequence: Synthetic oligonucleotide
  Antisense strand to SEQ ID NO: 2248208
guuccuaagagaguccacg

SEQ ID NO: 2248210 - RNA, 19 nt, Artificial Sequence
  Description of Artificial Sequence: Synthetic oligonucleotide
  Sense strand starting at position 1473 of SEQ ID NO: 1884206
ggacucucuuaggaacgau

SEQ ID NO: 2248211 - RNA, 19 nt, Artificial Sequence
  Description of Artificial Sequence: Synthetic oligonucleotide
  Antisense strand to SEQ ID NO: 2248210
aucguuccuaagagagucc

SEQ ID NO: 2248212 - RNA, 19 nt, Artificial Sequence
  Description of Artificial Sequence: Synthetic oligonucleotide
  Sense strand starting at position 1495 of SEQ ID NO: 1884206
cgggucaccuaccauagau

SEQ ID NO: 2248213 - RNA, 19 nt, Artificial Sequence
  Description of Artificial Sequence: Synthetic oligonucleotide
  Antisense strand to SEQ ID NO: 2248212
aucuaugguaggugacccg

SEQ ID NO: 2248214 - RNA, 19 nt, Artificial Sequence
  Description of Artificial Sequence: Synthetic oligonucleotide
  Sense strand starting at position 1997 of SEQ ID NO: 1884206
guguuaauggugugcggca

SEQ ID NO: 2248215 - RNA, 19 nt, Artificial Sequence
  Description of Artificial Sequence: Synthetic oligonucleotide
  Antisense strand to SEQ ID NO: 2248214
ugccgcacaccauuaacac

SEQ ID NO: 2248216 - RNA, 19 nt, Artificial Sequence
  Description of Artificial Sequence: Synthetic oligonucleotide
  Sense strand starting at position 2063 of SEQ ID NO: 1884206
ggaccaugcaccuguuuga

SEQ ID NO: 2248217 - RNA, 19 nt, Artificial Sequence
  Description of Artificial Sequence: Synthetic oligonucleotide
  Antisense strand to SEQ ID NO: 2248216
ucaaacaggugcauggucc

SEQ ID NO: 2248218 - RNA, 19 nt, Artificial Sequence
  Description of Artificial Sequence: Synthetic oligonucleotide
  Sense strand starting at position 2066 of SEQ ID NO: 1884206
ccaugcaccuguuugauaa

SEQ ID NO: 2248219 - RNA, 19 nt, Artificial Sequence
  Description of Artificial Sequence: Synthetic oligonucleotide
  Antisense strand to SEQ ID NO: 2248218
uuaucaaacaggugcaugg

SEQ ID NO: 2248220 - RNA, 19 nt, Artificial Sequence
  Description of Artificial Sequence: Synthetic oligonucleotide
  Sense strand starting at position 2068 of SEQ ID NO: 1884206
augcaccuguuugauaaua

SEQ ID NO: 2248221 - RNA, 19 nt, Artificial Sequence
  Description of Artificial Sequence: Synthetic oligonucleotide
  Antisense strand to SEQ ID NO: 2248220
uauuaucaaacaggugcau

SEQ ID NO: 2248222 - RNA, 19 nt, Artificial Sequence
  Description of Artificial Sequence: Synthetic oligonucleotide
  Sense strand starting at position 2070 of SEQ ID NO: 1884206
gcaccuguuugauaauaag

SEQ ID NO: 2248223 - RNA, 19 nt, Artificial Sequence
  Description of Artificial Sequence: Synthetic oligonucleotide
  Antisense strand to SEQ ID NO: 2248222
cuuauuaucaaacaggugc

SEQ ID NO: 2248224 - RNA, 19 nt, Artificial Sequence
  Description of Artificial Sequence: Synthetic oligonucleotide
  Sense strand starting at position 2073 of SEQ ID NO: 1884206
ccuguuugauaauaaggca

SEQ ID NO: 2248225 - RNA, 19 nt, Artificial Sequence
  Description of Artificial Sequence: Synthetic oligonucleotide
  Antisense strand to SEQ ID NO: 2248224
ugccuuauuaucaaacagg

SEQ ID NO: 2248226 - RNA, 19 nt, Artificial Sequence
  Description of Artificial Sequence: Synthetic oligonucleotide
  Sense strand starting at position 2089 of SEQ ID NO: 1884206
gcaugcuucucuuacugca

SEQ ID NO: 2248227 - RNA, 19 nt, Artificial Sequence
  Description of Artificial Sequence: Synthetic oligonucleotide
  Antisense strand to SEQ ID NO: 2248226
ugcaguaagagaagcaugc

SEQ ID NO: 2248228 - RNA, 19 nt, Artificial Sequence
  Description of Artificial Sequence: Synthetic oligonucleotide
  Sense strand starting at position 2132 of SEQ ID NO: 1884206
ccagaaagacccugucuuu

SEQ ID NO: 2248229 - RNA, 19 nt, Artificial Sequence
  Description of Artificial Sequence: Synthetic oligonucleotide
  Antisense strand to SEQ ID NO: 2248228
aaagacagggucuuucugg

SEQ ID NO: 2248230 - RNA, 19 nt, Artificial Sequence
  Description of Artificial Sequence: Synthetic oligonucleotide
  Sense strand starting at position 2167 of SEQ ID NO: 1884206
aggaucauuuggcaaguga

SEQ ID NO: 2248231 - RNA, 19 nt, Artificial Sequence
  Description of Artificial Sequence: Synthetic oligonucleotide
  Antisense strand to SEQ ID NO: 2248230
ucacuugccaaaugauccu

SEQ ID NO: 2248232 - RNA, 19 nt, Artificial Sequence
  Description of Artificial Sequence: Synthetic oligonucleotide
  Sense strand starting at position 2237 of SEQ ID NO: 1884206
cugaacacauuugaguuaa

SEQ ID NO: 2248233 - RNA, 19 nt, Artificial Sequence
  Description of Artificial Sequence: Synthetic oligonucleotide
  Antisense strand to SEQ ID NO: 2248232
uuaacucaaauguguucag

SEQ ID NO: 2248234 - RNA, 19 nt, Artificial Sequence
  Description of Artificial Sequence: Synthetic oligonucleotide
  Sense strand starting at position 2320 of SEQ ID NO: 1884206
uuugcuguaacgugacaaa

SEQ ID NO: 2248235 - RNA, 19 nt, Artificial Sequence
  Description of Artificial Sequence: Synthetic oligonucleotide
  Antisense strand to SEQ ID NO: 2248234
uuugucacguuacagcaaa

SEQ ID NO: 2248236 - RNA, 19 nt, Artificial Sequence
  Description of Artificial Sequence: Synthetic oligonucleotide
  Sense strand starting at position 2340 of SEQ ID NO: 1884206
cccugagucuuagaauuau

SEQ ID NO: 2248237 - RNA, 19 nt, Artificial Sequence
  Description of Artificial Sequence: Synthetic oligonucleotide
  Antisense strand to SEQ ID NO: 2248236
auaauucuaagacucaggg

SEQ ID NO: 2248238 - RNA, 19 nt, Artificial Sequence
  Description of Artificial Sequence: Synthetic oligonucleotide
  Sense strand starting at position 2346 of SEQ ID NO: 1884206
gucuuagaauuauugggua

SEQ ID NO: 2248239 - RNA, 19 nt, Artificial Sequence
  Description of Artificial Sequence: Synthetic oligonucleotide
  Antisense strand to SEQ ID NO: 2248238
uacccaauaauucuaagac

SEQ ID NO: 2248240 - RNA, 19 nt, Artificial Sequence
  Description of Artificial Sequence: Synthetic oligonucleotide
  Sense strand starting at position 2349 of SEQ ID NO: 1884206
uuagaauuauuggguaaug

SEQ ID NO: 2248241 - RNA, 19 nt, Artificial Sequence
  Description of Artificial Sequence: Synthetic oligonucleotide
  Antisense strand to SEQ ID NO: 2248240
cauuacccaauaauucuaa

SEQ ID NO: 2248242 - RNA, 19 nt, Artificial Sequence
  Description of Artificial Sequence: Synthetic oligonucleotide
  Sense strand starting at position 2350 of SEQ ID NO: 1884206
uagaauuauuggguaaugu

SEQ ID NO: 2248243 - RNA, 19 nt, Artificial Sequence
  Description of Artificial Sequence: Synthetic oligonucleotide
  Antisense strand to SEQ ID NO: 2248242
acauuacccaauaauucua

SEQ ID NO: 2248244 - RNA, 19 nt, Artificial Sequence
  Description of Artificial Sequence: Synthetic oligonucleotide
  Sense strand starting at position 2354 of SEQ ID NO: 1884206
auuauuggguaaugugaaa

SEQ ID NO: 2248245 - RNA, 19 nt, Artificial Sequence
  Description of Artificial Sequence: Synthetic oligonucleotide
  Antisense strand to SEQ ID NO: 2248244
uuucacauuacccaauaau

SEQ ID NO: 2248246 - RNA, 19 nt, Artificial Sequence
  Description of Artificial Sequence: Synthetic oligonucleotide
  Sense strand starting at position 2666 of SEQ ID NO: 1884206
aaauguugacguggacuca

SEQ ID NO: 2248247 - RNA, 19 nt, Artificial Sequence
  Description of Artificial Sequence: Synthetic oligonucleotide
  Antisense strand to SEQ ID NO: 2248246
ugaguccacgucaacauuu

SEQ ID NO: 2248248 - RNA, 19 nt, Artificial Sequence
  Description of Artificial Sequence: Synthetic oligonucleotide
  Sense strand starting at position 2813 of SEQ ID NO: 1884206
ggacuaaguuucgcucugu

SEQ ID NO: 2248249 - RNA, 19 nt, Artificial Sequence
  Description of Artificial Sequence: Synthetic oligonucleotide
  Antisense strand to SEQ ID NO: 2248248
acagagcgaaacuuagucc

SEQ ID NO: 2248250 - RNA, 19 nt, Artificial Sequence
  Description of Artificial Sequence: Synthetic oligonucleotide
  Sense strand starting at position 2814 of SEQ ID NO: 1884206
gacuaaguuucgcucuguu

SEQ ID NO: 2248251 - RNA, 19 nt, Artificial Sequence
  Description of Artificial Sequence: Synthetic oligonucleotide
  Antisense strand to SEQ ID NO: 2248250
aacagagcgaaacuuaguc

SEQ ID NO: 2248252 - RNA, 19 nt, Artificial Sequence
  Description of Artificial Sequence: Synthetic oligonucleotide
  Sense strand starting at position 2965 of SEQ ID NO: 1884206
guugucucccaccaucaaa

SEQ ID NO: 2248253 - RNA, 19 nt, Artificial Sequence
  Description of Artificial Sequence: Synthetic oligonucleotide
  Antisense strand to SEQ ID NO: 2248252
uuugauggugggagacaac

SEQ ID NO: 2248254 - RNA, 19 nt, Artificial Sequence
  Description of Artificial Sequence: Synthetic oligonucleotide
  Sense strand starting at position 1201 of SEQ ID NO: 1884207
gggaguuuguguuaugcca

SEQ ID NO: 2248255 - RNA, 19 nt, Artificial Sequence
  Description of Artificial Sequence: Synthetic oligonucleotide
  Antisense strand to SEQ ID NO: 2248254
uggcauaacacaaacuccc

SEQ ID NO: 2248256 - RNA, 19 nt, Artificial Sequence
  Description of Artificial Sequence: Synthetic oligonucleotide
  Sense strand starting at position 1254 of SEQ ID NO: 1884207
gaggacaucuggguuccau

SEQ ID NO: 2248257 - RNA, 19 nt, Artificial Sequence
  Description of Artificial Sequence: Synthetic oligonucleotide
  Antisense strand to SEQ ID NO: 2248256
auggaacccagauguccuc

SEQ ID NO: 2248258 - RNA, 19 nt, Artificial Sequence
  Description of Artificial Sequence: Synthetic oligonucleotide
  Sense strand starting at position 1283 of SEQ ID NO: 1884207
ccaggauucugguugcaaa

SEQ ID NO: 2248259 - RNA, 19 nt, Artificial Sequence
  Description of Artificial Sequence: Synthetic oligonucleotide
  Antisense strand to SEQ ID NO: 2248258
uuugcaaccagaauccugg

SEQ ID NO: 2248260 - RNA, 19 nt, Artificial Sequence
  Description of Artificial Sequence: Synthetic oligonucleotide
  Sense strand starting at position 1284 of SEQ ID NO: 1884207
caggauucugguugcaaau

SEQ ID NO: 2248261 - RNA, 19 nt, Artificial Sequence
  Description of Artificial Sequence: Synthetic oligonucleotide
  Antisense strand to SEQ ID NO: 2248260
auuugcaaccagaauccug

SEQ ID NO: 2248262 - RNA, 19 nt, Artificial Sequence
  Description of Artificial Sequence: Synthetic oligonucleotide
  Sense strand starting at position 1286 of SEQ ID NO: 1884207
ggauucugguugcaaauua

SEQ ID NO: 2248263 - RNA, 19 nt, Artificial Sequence
  Description of Artificial Sequence: Synthetic oligonucleotide
  Antisense strand to SEQ ID NO: 2248262
uaauuugcaaccagaaucc

SEQ ID NO: 2248264 - RNA, 19 nt, Artificial Sequence
  Description of Artificial Sequence: Synthetic oligonucleotide
  Sense strand starting at position 1317 of SEQ ID NO: 1884207
uaaacuuaugcagggaagu

SEQ ID NO: 2248265 - RNA, 19 nt, Artificial Sequence
  Description of Artificial Sequence: Synthetic oligonucleotide
  Antisense strand to SEQ ID NO: 2248264
acuucccugcauaaguuua

SEQ ID NO: 2248266 - RNA, 19 nt, Artificial Sequence
  Description of Artificial Sequence: Synthetic oligonucleotide
  Sense strand starting at position 1373 of SEQ ID NO: 1884207
gaagccaucugggcucuaa

SEQ ID NO: 2248267 - RNA, 19 nt, Artificial Sequence
  Description of Artificial Sequence: Synthetic oligonucleotide
  Antisense strand to SEQ ID NO: 2248266
uuagagcccagauggcuuc

SEQ ID NO: 2248268 - RNA, 19 nt, Artificial Sequence
  Description of Artificial Sequence: Synthetic oligonucleotide
  Sense strand starting at position 1599 of SEQ ID NO: 1884207
cguggacucucuuaggaac

SEQ ID NO: 2248269 - RNA, 19 nt, Artificial Sequence
  Description of Artificial Sequence: Synthetic oligonucleotide
  Antisense strand to SEQ ID NO: 2248268
guuccuaagagaguccacg

SEQ ID NO: 2248270 - RNA, 19 nt, Artificial Sequence
  Description of Artificial Sequence: Synthetic oligonucleotide
  Sense strand starting at position 1602 of SEQ ID NO: 1884207
ggacucucuuaggaacgau

SEQ ID NO: 2248271 - RNA, 19 nt, Artificial Sequence
  Description of Artificial Sequence: Synthetic oligonucleotide
  Antisense strand to SEQ ID NO: 2248270
aucguuccuaagagagucc

SEQ ID NO: 2248272 - RNA, 19 nt, Artificial Sequence
  Description of Artificial Sequence: Synthetic oligonucleotide
  Sense strand starting at position 1624 of SEQ ID NO: 1884207
cgggucaccuaccauagau

SEQ ID NO: 2248273 - RNA, 19 nt, Artificial Sequence
  Description of Artificial Sequence: Synthetic oligonucleotide
  Antisense strand to SEQ ID NO: 2248272
aucuaugguaggugacccg

SEQ ID NO: 2248274 - RNA, 19 nt, Artificial Sequence
  Description of Artificial Sequence: Synthetic oligonucleotide
  Sense strand starting at position 2126 of SEQ ID NO: 1884207
guguuaauggugugcggca

SEQ ID NO: 2248275 - RNA, 19 nt, Artificial Sequence
  Description of Artificial Sequence: Synthetic oligonucleotide
  Antisense strand to SEQ ID NO: 2248274
ugccgcacaccauuaacac

SEQ ID NO: 2248276 - RNA, 19 nt, Artificial Sequence
  Description of Artificial Sequence: Synthetic oligonucleotide
  Sense strand starting at position 2192 of SEQ ID NO: 1884207
ggaccaugcaccuguuuga

SEQ ID NO: 2248277 - RNA, 19 nt, Artificial Sequence
  Description of Artificial Sequence: Synthetic oligonucleotide
  Antisense strand to SEQ ID NO: 2248276
ucaaacaggugcauggucc

SEQ ID NO: 2248278 - RNA, 19 nt, Artificial Sequence
  Description of Artificial Sequence: Synthetic oligonucleotide
  Sense strand starting at position 2195 of SEQ ID NO: 1884207
ccaugcaccuguuugauaa

SEQ ID NO: 2248279 - RNA, 19 nt, Artificial Sequence
  Description of Artificial Sequence: Synthetic oligonucleotide
  Antisense strand to SEQ ID NO: 2248278
uuaucaaacaggugcaugg

SEQ ID NO: 2248280 - RNA, 19 nt, Artificial Sequence
  Description of Artificial Sequence: Synthetic oligonucleotide
  Sense strand starting at position 2197 of SEQ ID NO: 1884207
augcaccuguuugauaaua

SEQ ID NO: 2248281 - RNA, 19 nt, Artificial Sequence
  Description of Artificial Sequence: Synthetic oligonucleotide
  Antisense strand to SEQ ID NO: 2248280
uauuaucaaacaggugcau

SEQ ID NO: 2248282 - RNA, 19 nt, Artificial Sequence
  Description of Artificial Sequence: Synthetic oligonucleotide
  Sense strand starting at position 2199 of SEQ ID NO: 1884207
gcaccuguuugauaauaag

SEQ ID NO: 2248283 - RNA, 19 nt, Artificial Sequence
  Description of Artificial Sequence: Synthetic oligonucleotide
  Antisense strand to SEQ ID NO: 2248282
cuuauuaucaaacaggugc

SEQ ID NO: 2248284 - RNA, 19 nt, Artificial Sequence
  Description of Artificial Sequence: Synthetic oligonucleotide
  Sense strand starting at position 2202 of SEQ ID NO: 1884207
ccuguuugauaauaaggca

SEQ ID NO: 2248285 - RNA, 19 nt, Artificial Sequence
  Description of Artificial Sequence: Synthetic oligonucleotide
  Antisense strand to SEQ ID NO: 2248284
ugccuuauuaucaaacagg

SEQ ID NO: 2248286 - RNA, 19 nt, Artificial Sequence
  Description of Artificial Sequence: Synthetic oligonucleotide
  Sense strand starting at position 2218 of SEQ ID NO: 1884207
gcaugcuucucuuacugca

SEQ ID NO: 2248287 - RNA, 19 nt, Artificial Sequence
  Description of Artificial Sequence: Synthetic oligonucleotide
  Antisense strand to SEQ ID NO: 2248286
ugcaguaagagaagcaugc

SEQ ID NO: 2248288 - RNA, 19 nt, Artificial Sequence
  Description of Artificial Sequence: Synthetic oligonucleotide
  Sense strand starting at position 2261 of SEQ ID NO: 1884207
ccagaaagacccugucuuu

SEQ ID NO: 2248289 - RNA, 19 nt, Artificial Sequence
  Description of Artificial Sequence: Synthetic oligonucleotide
  Antisense strand to SEQ ID NO: 2248288
aaagacagggucuuucugg

SEQ ID NO: 2248290 - RNA, 19 nt, Artificial Sequence
  Description of Artificial Sequence: Synthetic oligonucleotide
  Sense strand starting at position 2296 of SEQ ID NO: 1884207
aggaucauuuggcaaguga

SEQ ID NO: 2248291 - RNA, 19 nt, Artificial Sequence
  Description of Artificial Sequence: Synthetic oligonucleotide
  Antisense strand to SEQ ID NO: 2248290
ucacuugccaaaugauccu

SEQ ID NO: 2248292 - RNA, 19 nt, Artificial Sequence
  Description of Artificial Sequence: Synthetic oligonucleotide
  Sense strand starting at position 2366 of SEQ ID NO: 1884207
cugaacacauuugaguuaa

SEQ ID NO: 2248293 - RNA, 19 nt, Artificial Sequence
  Description of Artificial Sequence: Synthetic oligonucleotide
  Antisense strand to SEQ ID NO: 2248292
uuaacucaaauguguucag

SEQ ID NO: 2248294 - RNA, 19 nt, Artificial Sequence
  Description of Artificial Sequence: Synthetic oligonucleotide
  Sense strand starting at position 2449 of SEQ ID NO: 1884207
uuugcuguaacgugacaaa

SEQ ID NO: 2248295 - RNA, 19 nt, Artificial Sequence
  Description of Artificial Sequence: Synthetic oligonucleotide
  Antisense strand to SEQ ID NO: 2248294
uuugucacguuacagcaaa

SEQ ID NO: 2248296 - RNA, 19 nt, Artificial Sequence
  Description of Artificial Sequence: Synthetic oligonucleotide
  Sense strand starting at position 2469 of SEQ ID NO: 1884207
cccugagucuuagaauuau

SEQ ID NO: 2248297 - RNA, 19 nt, Artificial Sequence
  Description of Artificial Sequence: Synthetic oligonucleotide
  Antisense strand to SEQ ID NO: 2248296
auaauucuaagacucaggg

SEQ ID NO: 2248298 - RNA, 19 nt, Artificial Sequence
  Description of Artificial Sequence: Synthetic oligonucleotide
  Sense strand starting at position 2475 of SEQ ID NO: 1884207
gucuuagaauuauugggua

SEQ ID NO: 2248299 - RNA, 19 nt, Artificial Sequence
  Description of Artificial Sequence: Synthetic oligonucleotide
  Antisense strand to SEQ ID NO: 2248298
uacccaauaauucuaagac

SEQ ID NO: 2248300 - RNA, 19 nt, Artificial Sequence
  Description of Artificial Sequence: Synthetic oligonucleotide
  Sense strand starting at position 2478 of SEQ ID NO: 1884207
uuagaauuauuggguaaug

SEQ ID NO: 2248301 - RNA, 19 nt, Artificial Sequence
  Description of Artificial Sequence: Synthetic oligonucleotide
  Antisense strand to SEQ ID NO: 2248300
cauuacccaauaauucuaa

SEQ ID NO: 2248302 - RNA, 19 nt, Artificial Sequence
  Description of Artificial Sequence: Synthetic oligonucleotide
  Sense strand starting at position 2479 of SEQ ID NO: 1884207
uagaauuauuggguaaugu

SEQ ID NO: 2248303 - RNA, 19 nt, Artificial Sequence
  Description of Artificial Sequence: Synthetic oligonucleotide
  Antisense strand to SEQ ID NO: 2248302
acauuacccaauaauucua

SEQ ID NO: 2248304 - RNA, 19 nt, Artificial Sequence
  Description of Artificial Sequence: Synthetic oligonucleotide
  Sense strand starting at position 2483 of SEQ ID NO: 1884207
auuauuggguaaugugaaa

SEQ ID NO: 2248305 - RNA, 19 nt, Artificial Sequence
  Description of Artificial Sequence: Synthetic oligonucleotide
  Antisense strand to SEQ ID NO: 2248304
uuucacauuacccaauaau

SEQ ID NO: 2248306 - RNA, 19 nt, Artificial Sequence
  Description of Artificial Sequence: Synthetic oligonucleotide
  Sense strand starting at position 2795 of SEQ ID NO: 1884207
aaauguugacguggacuca

SEQ ID NO: 2248307 - RNA, 19 nt, Artificial Sequence
  Description of Artificial Sequence: Synthetic oligonucleotide
  Antisense strand to SEQ ID NO: 2248306
ugaguccacgucaacauuu

SEQ ID NO: 2248308 - RNA, 19 nt, Artificial Sequence
  Description of Artificial Sequence: Synthetic oligonucleotide
  Sense strand starting at position 2942 of SEQ ID NO: 1884207
ggacuaaguuucgcucugu

SEQ ID NO: 2248309 - RNA, 19 nt, Artificial Sequence
  Description of Artificial Sequence: Synthetic oligonucleotide
  Antisense strand to SEQ ID NO: 2248308
acagagcgaaacuuagucc

SEQ ID NO: 2248310 - RNA, 19 nt, Artificial Sequence
  Description of Artificial Sequence: Synthetic oligonucleotide
  Sense strand starting at position 2943 of SEQ ID NO: 1884207
gacuaaguuucgcucuguu

SEQ ID NO: 2248311 - RNA, 19 nt, Artificial Sequence
  Description of Artificial Sequence: Synthetic oligonucleotide
  Antisense strand to SEQ ID NO: 2248310
aacagagcgaaacuuaguc

SEQ ID NO: 2248312 - RNA, 19 nt, Artificial Sequence
  Description of Artificial Sequence: Synthetic oligonucleotide
  Sense strand starting at position 3094 of SEQ ID NO: 1884207
guugucucccaccaucaaa

SEQ ID NO: 2248313 - RNA, 19 nt, Artificial Sequence
  Description of Artificial Sequence: Synthetic oligonucleotide
  Antisense strand to SEQ ID NO: 2248312
uuugauggugggagacaac

SEQ ID NO: 2248314 - RNA, 19 nt, Artificial Sequence
  Description of Artificial Sequence: Synthetic oligonucleotide
  Sense strand starting at position 24 of SEQ ID NO: 1884208
accgcagugucagagcuua

SEQ ID NO: 2248315 - RNA, 19 nt, Artificial Sequence
  Description of Artificial Sequence: Synthetic oligonucleotide
  Antisense strand to SEQ ID NO: 2248314
uaagcucugacacugcggu

SEQ ID NO: 2248316 - RNA, 19 nt, Artificial Sequence
  Description of Artificial Sequence: Synthetic oligonucleotide
  Sense strand starting at position 52 of SEQ ID NO: 1884208
ccucuaacuugagagauga

SEQ ID NO: 2248317 - RNA, 19 nt, Artificial Sequence
  Description of Artificial Sequence: Synthetic oligonucleotide
  Antisense strand to SEQ ID NO: 2248316
ucaucucucaaguuagagg

SEQ ID NO: 2248318 - RNA, 19 nt, Artificial Sequence
  Description of Artificial Sequence: Synthetic oligonucleotide
  Sense strand starting at position 159 of SEQ ID NO: 1884208
gcugcaugacuucgggcaa

SEQ ID NO: 2248319 - RNA, 19 nt, Artificial Sequence
  Description of Artificial Sequence: Synthetic oligonucleotide
  Antisense strand to SEQ ID NO: 2248318
uugcccgaagucaugcagc

SEQ ID NO: 2248320 - RNA, 19 nt, Artificial Sequence
  Description of Artificial Sequence: Synthetic oligonucleotide
  Sense strand starting at position 163 of SEQ ID NO: 1884208
caugacuucgggcaaguau

SEQ ID NO: 2248321 - RNA, 19 nt, Artificial Sequence
  Description of Artificial Sequence: Synthetic oligonucleotide
  Antisense strand to SEQ ID NO: 2248320
auacuugcccgaagucaug

SEQ ID NO: 2248322 - RNA, 19 nt, Artificial Sequence
  Description of Artificial Sequence: Synthetic oligonucleotide
  Sense strand starting at position 174 of SEQ ID NO: 1884208
gcaaguauccauggagagg

SEQ ID NO: 2248323 - RNA, 19 nt, Artificial Sequence
  Description of Artificial Sequence: Synthetic oligonucleotide
  Antisense strand to SEQ ID NO: 2248322
ccucuccauggauacuugc

SEQ ID NO: 2248324 - RNA, 19 nt, Artificial Sequence
  Description of Artificial Sequence: Synthetic oligonucleotide
  Sense strand starting at position 259 of SEQ ID NO: 1884208
aguaaaugguuguugcuau

SEQ ID NO: 2248325 - RNA, 19 nt, Artificial Sequence
  Description of Artificial Sequence: Synthetic oligonucleotide
  Antisense strand to SEQ ID NO: 2248324
auagcaacaaccauuuacu

SEQ ID NO: 2248326 - RNA, 19 nt, Artificial Sequence
  Description of Artificial Sequence: Synthetic oligonucleotide
  Sense strand starting at position 260 of SEQ ID NO: 1884208
guaaaugguuguugcuauu

SEQ ID NO: 2248327 - RNA, 19 nt, Artificial Sequence
  Description of Artificial Sequence: Synthetic oligonucleotide
  Antisense strand to SEQ ID NO: 2248326
aauagcaacaaccauuuac

SEQ ID NO: 2248328 - RNA, 19 nt, Artificial Sequence
  Description of Artificial Sequence: Synthetic oligonucleotide
  Sense strand starting at position 263 of SEQ ID NO: 1884208
aaugguuguugcuauuauu

SEQ ID NO: 2248329 - RNA, 19 nt, Artificial Sequence
  Description of Artificial Sequence: Synthetic oligonucleotide
  Antisense strand to SEQ ID NO: 2248328
aauaauagcaacaaccauu

SEQ ID NO: 2248330 - RNA, 19 nt, Artificial Sequence
  Description of Artificial Sequence: Synthetic oligonucleotide
  Sense strand starting at position 266 of SEQ ID NO: 1884208
gguuguugcuauuauuauc

SEQ ID NO: 2248331 - RNA, 19 nt, Artificial Sequence
  Description of Artificial Sequence: Synthetic oligonucleotide
  Antisense strand to SEQ ID NO: 2248330
gauaauaauagcaacaacc

SEQ ID NO: 2248332 - RNA, 19 nt, Artificial Sequence
  Description of Artificial Sequence: Synthetic oligonucleotide
  Sense strand starting at position 602 of SEQ ID NO: 1884208
cacacuuugucacuggaga

SEQ ID NO: 2248333 - RNA, 19 nt, Artificial Sequence
  Description of Artificial Sequence: Synthetic oligonucleotide
  Antisense strand to SEQ ID NO: 2248332
ucuccagugacaaagugug

SEQ ID NO: 2248334 - RNA, 19 nt, Artificial Sequence
  Description of Artificial Sequence: Synthetic oligonucleotide
  Sense strand starting at position 603 of SEQ ID NO: 1884208
acacuuugucacuggagag

SEQ ID NO: 2248335 - RNA, 19 nt, Artificial Sequence
  Description of Artificial Sequence: Synthetic oligonucleotide
  Antisense strand to SEQ ID NO: 2248334
cucuccagugacaaagugu

SEQ ID NO: 2248336 - RNA, 19 nt, Artificial Sequence
  Description of Artificial Sequence: Synthetic oligonucleotide
  Sense strand starting at position 669 of SEQ ID NO: 1884208
agcccaaacucugugcgau

SEQ ID NO: 2248337 - RNA, 19 nt, Artificial Sequence
  Description of Artificial Sequence: Synthetic oligonucleotide
  Antisense strand to SEQ ID NO: 2248336
aucgcacagaguuugggcu

SEQ ID NO: 2248338 - RNA, 19 nt, Artificial Sequence
  Description of Artificial Sequence: Synthetic oligonucleotide
  Sense strand starting at position 670 of SEQ ID NO: 1884208
gcccaaacucugugcgaug

SEQ ID NO: 2248339 - RNA, 19 nt, Artificial Sequence
  Description of Artificial Sequence: Synthetic oligonucleotide
  Antisense strand to SEQ ID NO: 2248338
caucgcacagaguuugggc

SEQ ID NO: 2248340 - RNA, 19 nt, Artificial Sequence
  Description of Artificial Sequence: Synthetic oligonucleotide
  Sense strand starting at position 673 of SEQ ID NO: 1884208
caaacucugugcgauguga

SEQ ID NO: 2248341 - RNA, 19 nt, Artificial Sequence
  Description of Artificial Sequence: Synthetic oligonucleotide
  Antisense strand to SEQ ID NO: 2248340
ucacaucgcacagaguuug

SEQ ID NO: 2248342 - RNA, 19 nt, Artificial Sequence
  Description of Artificial Sequence: Synthetic oligonucleotide
  Sense strand starting at position 675 of SEQ ID NO: 1884208
aacucugugcgaugugaac

SEQ ID NO: 2248343 - RNA, 19 nt, Artificial Sequence
  Description of Artificial Sequence: Synthetic oligonucleotide
  Antisense strand to SEQ ID NO: 2248342
guucacaucgcacagaguu

SEQ ID NO: 2248344 - RNA, 19 nt, Artificial Sequence
  Description of Artificial Sequence: Synthetic oligonucleotide
  Sense strand starting at position 793 of SEQ ID NO: 1884208
ucuccagaguggucuggaa

SEQ ID NO: 2248345 - RNA, 19 nt, Artificial Sequence
  Description of Artificial Sequence: Synthetic oligonucleotide
  Antisense strand to SEQ ID NO: 2248344
uuccagaccacucuggaga

SEQ ID NO: 2248346 - RNA, 19 nt, Artificial Sequence
  Description of Artificial Sequence: Synthetic oligonucleotide
  Sense strand starting at position 795 of SEQ ID NO: 1884208
uccagaguggucuggaaua

SEQ ID NO: 2248347 - RNA, 19 nt, Artificial Sequence
  Description of Artificial Sequence: Synthetic oligonucleotide
  Antisense strand to SEQ ID NO: 2248346
uauuccagaccacucugga

SEQ ID NO: 2248348 - RNA, 19 nt, Artificial Sequence
  Description of Artificial Sequence: Synthetic oligonucleotide
  Sense strand starting at position 2375 of SEQ ID NO: 1884208
auauauagaucugaaguca

SEQ ID NO: 2248349 - RNA, 19 nt, Artificial Sequence
  Description of Artificial Sequence: Synthetic oligonucleotide
  Antisense strand to SEQ ID NO: 2248348
ugacuucagaucuauauau

SEQ ID NO: 2248350 - RNA, 19 nt, Artificial Sequence
  Description of Artificial Sequence: Synthetic oligonucleotide
  Sense strand starting at position 2400 of SEQ ID NO: 1884208
acaccucgauucugacaua

SEQ ID NO: 2248351 - RNA, 19 nt, Artificial Sequence
  Description of Artificial Sequence: Synthetic oligonucleotide
  Antisense strand to SEQ ID NO: 2248350
uaugucagaaucgaggugu

SEQ ID NO: 2248352 - RNA, 19 nt, Artificial Sequence
  Description of Artificial Sequence: Synthetic oligonucleotide
  Sense strand starting at position 2403 of SEQ ID NO: 1884208
ccucgauucugacauacac

SEQ ID NO: 2248353 - RNA, 19 nt, Artificial Sequence
  Description of Artificial Sequence: Synthetic oligonucleotide
  Antisense strand to SEQ ID NO: 2248352
guguaugucagaaucgagg

SEQ ID NO: 2248354 - RNA, 19 nt, Artificial Sequence
  Description of Artificial Sequence: Synthetic oligonucleotide
  Sense strand starting at position 2561 of SEQ ID NO: 1884208
ggccaauucgaagauguaa

SEQ ID NO: 2248355 - RNA, 19 nt, Artificial Sequence
  Description of Artificial Sequence: Synthetic oligonucleotide
  Antisense strand to SEQ ID NO: 2248354
uuacaucuucgaauuggcc

SEQ ID NO: 2248356 - RNA, 19 nt, Artificial Sequence
  Description of Artificial Sequence: Synthetic oligonucleotide
  Sense strand starting at position 2740 of SEQ ID NO: 1884208
gacguucccucucagauau

SEQ ID NO: 2248357 - RNA, 19 nt, Artificial Sequence
  Description of Artificial Sequence: Synthetic oligonucleotide
  Antisense strand to SEQ ID NO: 2248356
auaucugagagggaacguc

SEQ ID NO: 2248358 - RNA, 19 nt, Artificial Sequence
  Description of Artificial Sequence: Synthetic oligonucleotide
  Sense strand starting at position 2805 of SEQ ID NO: 1884208
aggacaauccugugcuguu

SEQ ID NO: 2248359 - RNA, 19 nt, Artificial Sequence
  Description of Artificial Sequence: Synthetic oligonucleotide
  Antisense strand to SEQ ID NO: 2248358
aacagcacaggauuguccu

SEQ ID NO: 2248360 - RNA, 19 nt, Artificial Sequence
  Description of Artificial Sequence: Synthetic oligonucleotide
  Sense strand starting at position 2806 of SEQ ID NO: 1884208
ggacaauccugugcuguua

SEQ ID NO: 2248361 - RNA, 19 nt, Artificial Sequence
  Description of Artificial Sequence: Synthetic oligonucleotide
  Antisense strand to SEQ ID NO: 2248360
uaacagcacaggauugucc

SEQ ID NO: 2248362 - RNA, 19 nt, Artificial Sequence
  Description of Artificial Sequence: Synthetic oligonucleotide
  Sense strand starting at position 2808 of SEQ ID NO: 1884208
acaauccugugcuguuaca

SEQ ID NO: 2248363 - RNA, 19 nt, Artificial Sequence
  Description of Artificial Sequence: Synthetic oligonucleotide
  Antisense strand to SEQ ID NO: 2248362
uguaacagcacaggauugu

SEQ ID NO: 2248364 - RNA, 19 nt, Artificial Sequence
  Description of Artificial Sequence: Synthetic oligonucleotide
  Sense strand starting at position 2815 of SEQ ID NO: 1884208
ugugcuguuacauguaugu

SEQ ID NO: 2248365 - RNA, 19 nt, Artificial Sequence
  Description of Artificial Sequence: Synthetic oligonucleotide
  Antisense strand to SEQ ID NO: 2248364
acauacauguaacagcaca

SEQ ID NO: 2248366 - RNA, 19 nt, Artificial Sequence
  Description of Artificial Sequence: Synthetic oligonucleotide
  Sense strand starting at position 3070 of SEQ ID NO: 1884208
gcgcuaacucgcugccaga

SEQ ID NO: 2248367 - RNA, 19 nt, Artificial Sequence
  Description of Artificial Sequence: Synthetic oligonucleotide
  Antisense strand to SEQ ID NO: 2248366
ucuggcagcgaguuagcgc

SEQ ID NO: 2248368 - RNA, 19 nt, Artificial Sequence
  Description of Artificial Sequence: Synthetic oligonucleotide
  Sense strand starting at position 3376 of SEQ ID NO: 1884208
gcauguuccgggagagccu

SEQ ID NO: 2248369 - RNA, 19 nt, Artificial Sequence
  Description of Artificial Sequence: Synthetic oligonucleotide
  Antisense strand to SEQ ID NO: 2248368
aggcucucccggaacaugc

SEQ ID NO: 2248370 - RNA, 19 nt, Artificial Sequence
  Description of Artificial Sequence: Synthetic oligonucleotide
  Sense strand starting at position 3591 of SEQ ID NO: 1884208
ggaagucgccgccaucauu

SEQ ID NO: 2248371 - RNA, 19 nt, Artificial Sequence
  Description of Artificial Sequence: Synthetic oligonucleotide
  Antisense strand to SEQ ID NO: 2248370
aaugauggcggcgacuucc

SEQ ID NO: 2248372 - RNA, 19 nt, Artificial Sequence
  Description of Artificial Sequence: Synthetic oligonucleotide
  Sense strand starting at position 3615 of SEQ ID NO: 1884208
ccuccagguucccgaugaa

SEQ ID NO: 2248373 - RNA, 19 nt, Artificial Sequence
  Description of Artificial Sequence: Synthetic oligonucleotide
  Antisense strand to SEQ ID NO: 2248372
uucaucgggaaccuggagg

SEQ ID NO: 2248374 - RNA, 19 nt, Artificial Sequence
  Description of Artificial Sequence: Synthetic oligonucleotide
  Sense strand starting at position 3618 of SEQ ID NO: 1884208
ccagguucccgaugaaguc

SEQ ID NO: 2248375 - RNA, 19 nt, Artificial Sequence
  Description of Artificial Sequence: Synthetic oligonucleotide
  Antisense strand to SEQ ID NO: 2248374
gacuucaucgggaaccugg

SEQ ID NO: 2248376 - RNA, 19 nt, Artificial Sequence
  Description of Artificial Sequence: Synthetic oligonucleotide
  Sense strand starting at position 3648 of SEQ ID NO: 1884208
ugcgcuucccgauguucua

SEQ ID NO: 2248377 - RNA, 19 nt, Artificial Sequence
  Description of Artificial Sequence: Synthetic oligonucleotide
  Antisense strand to SEQ ID NO: 2248376
uagaacaucgggaagcgca

SEQ ID NO: 2248378 - RNA, 19 nt, Artificial Sequence
  Description of Artificial Sequence: Synthetic oligonucleotide
  Sense strand starting at position 3649 of SEQ ID NO: 1884208
gcgcuucccgauguucuaa

SEQ ID NO: 2248379 - RNA, 19 nt, Artificial Sequence
  Description of Artificial Sequence: Synthetic oligonucleotide
  Antisense strand to SEQ ID NO: 2248378
uuagaacaucgggaagcgc

SEQ ID NO: 2248380 - RNA, 19 nt, Artificial Sequence
  Description of Artificial Sequence: Synthetic oligonucleotide
  Sense strand starting at position 3675 of SEQ ID NO: 1884208
aacggaggccugugaguuu

SEQ ID NO: 2248381 - RNA, 19 nt, Artificial Sequence
  Description of Artificial Sequence: Synthetic oligonucleotide
  Antisense strand to SEQ ID NO: 2248380
aaacucacaggccuccguu

SEQ ID NO: 2248382 - RNA, 19 nt, Artificial Sequence
  Description of Artificial Sequence: Synthetic oligonucleotide
  Sense strand starting at position 3769 of SEQ ID NO: 1884208
cucacauggccguggagau

SEQ ID NO: 2248383 - RNA, 19 nt, Artificial Sequence
  Description of Artificial Sequence: Synthetic oligonucleotide
  Antisense strand to SEQ ID NO: 2248382
aucuccacggccaugugag

SEQ ID NO: 2248384 - RNA, 19 nt, Artificial Sequence
  Description of Artificial Sequence: Synthetic oligonucleotide
  Sense strand starting at position 3779 of SEQ ID NO: 1884208
cguggagauccguguugag

SEQ ID NO: 2248385 - RNA, 19 nt, Artificial Sequence
  Description of Artificial Sequence: Synthetic oligonucleotide
  Antisense strand to SEQ ID NO: 2248384
cucaacacggaucuccacg

SEQ ID NO: 2248386 - RNA, 19 nt, Artificial Sequence
  Description of Artificial Sequence: Synthetic oligonucleotide
  Sense strand starting at position 29 of SEQ ID NO: 1884209
gaacuuaaaugagaacgau

SEQ ID NO: 2248387 - RNA, 19 nt, Artificial Sequence
  Description of Artificial Sequence: Synthetic oligonucleotide
  Antisense strand to SEQ ID NO: 2248386
aucguucucauuuaaguuc

SEQ ID NO: 2248388 - RNA, 19 nt, Artificial Sequence
  Description of Artificial Sequence: Synthetic oligonucleotide
  Sense strand starting at position 80 of SEQ ID NO: 1884209
agaucacaaggcugugaaa

SEQ ID NO: 2248389 - RNA, 19 nt, Artificial Sequence
  Description of Artificial Sequence: Synthetic oligonucleotide
  Antisense strand to SEQ ID NO: 2248388
uuucacagccuugugaucu

SEQ ID NO: 2248390 - RNA, 19 nt, Artificial Sequence
  Description of Artificial Sequence: Synthetic oligonucleotide
  Sense strand starting at position 82 of SEQ ID NO: 1884209
aucacaaggcugugaaauu

SEQ ID NO: 2248391 - RNA, 19 nt, Artificial Sequence
  Description of Artificial Sequence: Synthetic oligonucleotide
  Antisense strand to SEQ ID NO: 2248390
aauuucacagccuugugau

SEQ ID NO: 2248392 - RNA, 19 nt, Artificial Sequence
  Description of Artificial Sequence: Synthetic oligonucleotide
  Sense strand starting at position 102 of SEQ ID NO: 1884209
cuauuaagacaacguuuaa

SEQ ID NO: 2248393 - RNA, 19 nt, Artificial Sequence
  Description of Artificial Sequence: Synthetic oligonucleotide
  Antisense strand to SEQ ID NO: 2248392
uuaaacguugucuuaauag

SEQ ID NO: 2248394 - RNA, 19 nt, Artificial Sequence
  Description of Artificial Sequence: Synthetic oligonucleotide
  Sense strand starting at position 132 of SEQ ID NO: 1884209
ucaaauauguaugugcaau

SEQ ID NO: 2248395 - RNA, 19 nt, Artificial Sequence
  Description of Artificial Sequence: Synthetic oligonucleotide
  Antisense strand to SEQ ID NO: 2248394
auugcacauacauauuuga

SEQ ID NO: 2248396 - RNA, 19 nt, Artificial Sequence
  Description of Artificial Sequence: Synthetic oligonucleotide
  Sense strand starting at position 138 of SEQ ID NO: 1884209
auguaugugcaauaauaga

SEQ ID NO: 2248397 - RNA, 19 nt, Artificial Sequence
  Description of Artificial Sequence: Synthetic oligonucleotide
  Antisense strand to SEQ ID NO: 2248396
ucuauuauugcacauacau

SEQ ID NO: 2248398 - RNA, 19 nt, Artificial Sequence
  Description of Artificial Sequence: Synthetic oligonucleotide
  Sense strand starting at position 203 of SEQ ID NO: 1884209
aaaucaugcugguuugcua

SEQ ID NO: 2248399 - RNA, 19 nt, Artificial Sequence
  Description of Artificial Sequence: Synthetic oligonucleotide
  Antisense strand to SEQ ID NO: 2248398
uagcaaaccagcaugauuu

SEQ ID NO: 2248400 - RNA, 19 nt, Artificial Sequence
  Description of Artificial Sequence: Synthetic oligonucleotide
  Sense strand starting at position 722 of SEQ ID NO: 1884209
ucauucuaguuuguagaau

SEQ ID NO: 2248401 - RNA, 19 nt, Artificial Sequence
  Description of Artificial Sequence: Synthetic oligonucleotide
  Antisense strand to SEQ ID NO: 2248400
auucuacaaacuagaauga

SEQ ID NO: 2248402 - RNA, 19 nt, Artificial Sequence
  Description of Artificial Sequence: Synthetic oligonucleotide
  Sense strand starting at position 777 of SEQ ID NO: 1884209
uugaaagauacguguauca

SEQ ID NO: 2248403 - RNA, 19 nt, Artificial Sequence
  Description of Artificial Sequence: Synthetic oligonucleotide
  Antisense strand to SEQ ID NO: 2248402
ugauacacguaucuuucaa

SEQ ID NO: 2248404 - RNA, 19 nt, Artificial Sequence
  Description of Artificial Sequence: Synthetic oligonucleotide
  Sense strand starting at position 787 of SEQ ID NO: 1884209
cguguaucagaagguauag

SEQ ID NO: 2248405 - RNA, 19 nt, Artificial Sequence
  Description of Artificial Sequence: Synthetic oligonucleotide
  Antisense strand to SEQ ID NO: 2248404
cuauaccuucugauacacg

SEQ ID NO: 2248406 - RNA, 19 nt, Artificial Sequence
  Description of Artificial Sequence: Synthetic oligonucleotide
  Sense strand starting at position 837 of SEQ ID NO: 1884209
gugcaaaugugguuuaagg

SEQ ID NO: 2248407 - RNA, 19 nt, Artificial Sequence
  Description of Artificial Sequence: Synthetic oligonucleotide
  Antisense strand to SEQ ID NO: 2248406
ccuuaaaccacauuugcac

SEQ ID NO: 2248408 - RNA, 19 nt, Artificial Sequence
  Description of Artificial Sequence: Synthetic oligonucleotide
  Sense strand starting at position 839 of SEQ ID NO: 1884209
gcaaaugugguuuaaggau

SEQ ID NO: 2248409 - RNA, 19 nt, Artificial Sequence
  Description of Artificial Sequence: Synthetic oligonucleotide
  Antisense strand to SEQ ID NO: 2248408
auccuuaaaccacauuugc

SEQ ID NO: 2248410 - RNA, 19 nt, Artificial Sequence
  Description of Artificial Sequence: Synthetic oligonucleotide
  Sense strand starting at position 1253 of SEQ ID NO: 1884209
gaccuaaggcgucacgaaa

SEQ ID NO: 2248411 - RNA, 19 nt, Artificial Sequence
  Description of Artificial Sequence: Synthetic oligonucleotide
  Antisense strand to SEQ ID NO: 2248410
uuucgugacgccuuagguc

SEQ ID NO: 2248412 - RNA, 19 nt, Artificial Sequence
  Description of Artificial Sequence: Synthetic oligonucleotide
  Sense strand starting at position 1517 of SEQ ID NO: 1884209
agaacuugggccuggcaaa

SEQ ID NO: 2248413 - RNA, 19 nt, Artificial Sequence
  Description of Artificial Sequence: Synthetic oligonucleotide
  Antisense strand to SEQ ID NO: 2248412
uuugccaggcccaaguucu

SEQ ID NO: 2248414 - RNA, 19 nt, Artificial Sequence
  Description of Artificial Sequence: Synthetic oligonucleotide
  Sense strand starting at position 2214 of SEQ ID NO: 1884209
gugcuugaagcagauuauc

SEQ ID NO: 2248415 - RNA, 19 nt, Artificial Sequence
  Description of Artificial Sequence: Synthetic oligonucleotide
  Antisense strand to SEQ ID NO: 2248414
gauaaucugcuucaagcac

SEQ ID NO: 2248416 - RNA, 19 nt, Artificial Sequence
  Description of Artificial Sequence: Synthetic oligonucleotide
  Sense strand starting at position 2217 of SEQ ID NO: 1884209
cuugaagcagauuaucuua

SEQ ID NO: 2248417 - RNA, 19 nt, Artificial Sequence
  Description of Artificial Sequence: Synthetic oligonucleotide
  Antisense strand to SEQ ID NO: 2248416
uaagauaaucugcuucaag

SEQ ID NO: 2248418 - RNA, 19 nt, Artificial Sequence
  Description of Artificial Sequence: Synthetic oligonucleotide
  Sense strand starting at position 2219 of SEQ ID NO: 1884209
ugaagcagauuaucuuaaa

SEQ ID NO: 2248419 - RNA, 19 nt, Artificial Sequence
  Description of Artificial Sequence: Synthetic oligonucleotide
  Antisense strand to SEQ ID NO: 2248418
uuuaagauaaucugcuuca

SEQ ID NO: 2248420 - RNA, 19 nt, Artificial Sequence
  Description of Artificial Sequence: Synthetic oligonucleotide
  Sense strand starting at position 2334 of SEQ ID NO: 1884209
aucugcuucuuauuguuau

SEQ ID NO: 2248421 - RNA, 19 nt, Artificial Sequence
  Description of Artificial Sequence: Synthetic oligonucleotide
  Antisense strand to SEQ ID NO: 2248420
auaacaauaagaagcagau

SEQ ID NO: 2248422 - RNA, 19 nt, Artificial Sequence
  Description of Artificial Sequence: Synthetic oligonucleotide
  Sense strand starting at position 2344 of SEQ ID NO: 1884209
uauuguuaugaagguuaag

SEQ ID NO: 2248423 - RNA, 19 nt, Artificial Sequence
  Description of Artificial Sequence: Synthetic oligonucleotide
  Antisense strand to SEQ ID NO: 2248422
cuuaaccuucauaacaaua

SEQ ID NO: 2248424 - RNA, 19 nt, Artificial Sequence
  Description of Artificial Sequence: Synthetic oligonucleotide
  Sense strand starting at position 2347 of SEQ ID NO: 1884209
uguuaugaagguuaaguga

SEQ ID NO: 2248425 - RNA, 19 nt, Artificial Sequence
  Description of Artificial Sequence: Synthetic oligonucleotide
  Antisense strand to SEQ ID NO: 2248424
ucacuuaaccuucauaaca

SEQ ID NO: 2248426 - RNA, 19 nt, Artificial Sequence
  Description of Artificial Sequence: Synthetic oligonucleotide
  Sense strand starting at position 2363 of SEQ ID NO: 1884209
ugaguuaauuugugaagac

SEQ ID NO: 2248427 - RNA, 19 nt, Artificial Sequence
  Description of Artificial Sequence: Synthetic oligonucleotide
  Antisense strand to SEQ ID NO: 2248426
gucuucacaaauuaacuca

SEQ ID NO: 2248428 - RNA, 19 nt, Artificial Sequence
  Description of Artificial Sequence: Synthetic oligonucleotide
  Sense strand starting at position 2364 of SEQ ID NO: 1884209
gaguuaauuugugaagaca

SEQ ID NO: 2248429 - RNA, 19 nt, Artificial Sequence
  Description of Artificial Sequence: Synthetic oligonucleotide
  Antisense strand to SEQ ID NO: 2248428
ugucuucacaaauuaacuc

SEQ ID NO: 2248430 - RNA, 19 nt, Artificial Sequence
  Description of Artificial Sequence: Synthetic oligonucleotide
  Sense strand starting at position 2376 of SEQ ID NO: 1884209
gaagacauguuguuaacca

SEQ ID NO: 2248431 - RNA, 19 nt, Artificial Sequence
  Description of Artificial Sequence: Synthetic oligonucleotide
  Antisense strand to SEQ ID NO: 2248430
ugguuaacaacaugucuuc

SEQ ID NO: 2248432 - RNA, 19 nt, Artificial Sequence
  Description of Artificial Sequence: Synthetic oligonucleotide
  Sense strand starting at position 2380 of SEQ ID NO: 1884209
acauguuguuaaccaaagu

SEQ ID NO: 2248433 - RNA, 19 nt, Artificial Sequence
  Description of Artificial Sequence: Synthetic oligonucleotide
  Antisense strand to SEQ ID NO: 2248432
acuuugguuaacaacaugu

SEQ ID NO: 2248434 - RNA, 19 nt, Artificial Sequence
  Description of Artificial Sequence: Synthetic oligonucleotide
  Sense strand starting at position 2585 of SEQ ID NO: 1884209
gcaggaaguguaugucuac

SEQ ID NO: 2248435 - RNA, 19 nt, Artificial Sequence
  Description of Artificial Sequence: Synthetic oligonucleotide
  Antisense strand to SEQ ID NO: 2248434
guagacauacacuuccugc

SEQ ID NO: 2248436 - RNA, 19 nt, Artificial Sequence
  Description of Artificial Sequence: Synthetic oligonucleotide
  Sense strand starting at position 2624 of SEQ ID NO: 1884209
uuguaaaucuuagugaagg

SEQ ID NO: 2248437 - RNA, 19 nt, Artificial Sequence
  Description of Artificial Sequence: Synthetic oligonucleotide
  Antisense strand to SEQ ID NO: 2248436
ccuucacuaagauuuacaa

SEQ ID NO: 2248438 - RNA, 19 nt, Artificial Sequence
  Description of Artificial Sequence: Synthetic oligonucleotide
  Sense strand starting at position 2626 of SEQ ID NO: 1884209
guaaaucuuagugaaggua

SEQ ID NO: 2248439 - RNA, 19 nt, Artificial Sequence
  Description of Artificial Sequence: Synthetic oligonucleotide
  Antisense strand to SEQ ID NO: 2248438
uaccuucacuaagauuuac

SEQ ID NO: 2248440 - RNA, 19 nt, Artificial Sequence
  Description of Artificial Sequence: Synthetic oligonucleotide
  Sense strand starting at position 2743 of SEQ ID NO: 1884209
ugucauauacaauggauau

SEQ ID NO: 2248441 - RNA, 19 nt, Artificial Sequence
  Description of Artificial Sequence: Synthetic oligonucleotide
  Antisense strand to SEQ ID NO: 2248440
auauccauuguauaugaca

SEQ ID NO: 2248442 - RNA, 19 nt, Artificial Sequence
  Description of Artificial Sequence: Synthetic oligonucleotide
  Sense strand starting at position 3031 of SEQ ID NO: 1884209
ucaugaaggcaaggauauu

SEQ ID NO: 2248443 - RNA, 19 nt, Artificial Sequence
  Description of Artificial Sequence: Synthetic oligonucleotide
  Antisense strand to SEQ ID NO: 2248442
aauauccuugccuucauga

SEQ ID NO: 2248444 - RNA, 19 nt, Artificial Sequence
  Description of Artificial Sequence: Synthetic oligonucleotide
  Sense strand starting at position 3117 of SEQ ID NO: 1884209
auguaugcugaaugaauua

SEQ ID NO: 2248445 - RNA, 19 nt, Artificial Sequence
  Description of Artificial Sequence: Synthetic oligonucleotide
  Antisense strand to SEQ ID NO: 2248444
uaauucauucagcauacau

SEQ ID NO: 2248446 - RNA, 19 nt, Artificial Sequence
  Description of Artificial Sequence: Synthetic oligonucleotide
  Sense strand starting at position 3171 of SEQ ID NO: 1884209
agagaauaaugucaaugaa

SEQ ID NO: 2248447 - RNA, 19 nt, Artificial Sequence
  Description of Artificial Sequence: Synthetic oligonucleotide
  Antisense strand to SEQ ID NO: 2248446
uucauugacauuauucucu

SEQ ID NO: 2248448 - RNA, 19 nt, Artificial Sequence
  Description of Artificial Sequence: Synthetic oligonucleotide
  Sense strand starting at position 3207 of SEQ ID NO: 1884209
ucagauagcccuugaaacu

SEQ ID NO: 2248449 - RNA, 19 nt, Artificial Sequence
  Description of Artificial Sequence: Synthetic oligonucleotide
  Antisense strand to SEQ ID NO: 2248448
aguuucaagggcuaucuga

SEQ ID NO: 2248450 - RNA, 19 nt, Artificial Sequence
  Description of Artificial Sequence: Synthetic oligonucleotide
  Sense strand starting at position 3228 of SEQ ID NO: 1884209
agucaagucuaucuagcuu

SEQ ID NO: 2248451 - RNA, 19 nt, Artificial Sequence
  Description of Artificial Sequence: Synthetic oligonucleotide
  Antisense strand to SEQ ID NO: 2248450
aagcuagauagacuugacu

SEQ ID NO: 2248452 - RNA, 19 nt, Artificial Sequence
  Description of Artificial Sequence: Synthetic oligonucleotide
  Sense strand starting at position 3266 of SEQ ID NO: 1884209
agaucuuauuuaugagguu

SEQ ID NO: 2248453 - RNA, 19 nt, Artificial Sequence
  Description of Artificial Sequence: Synthetic oligonucleotide
  Antisense strand to SEQ ID NO: 2248452
aaccucauaaauaagaucu

SEQ ID NO: 2248454 - RNA, 19 nt, Artificial Sequence
  Description of Artificial Sequence: Synthetic oligonucleotide
  Sense strand starting at position 3400 of SEQ ID NO: 1884209
augcacauucucugaugau

SEQ ID NO: 2248455 - RNA, 19 nt, Artificial Sequence
  Description of Artificial Sequence: Synthetic oligonucleotide
  Antisense strand to SEQ ID NO: 2248454
aucaucagagaaugugcau

SEQ ID NO: 2248456 - RNA, 19 nt, Artificial Sequence
  Description of Artificial Sequence: Synthetic oligonucleotide
  Sense strand starting at position 3512 of SEQ ID NO: 1884209
cuaugauauuaagccagau

SEQ ID NO: 2248457 - RNA, 19 nt, Artificial Sequence
  Description of Artificial Sequence: Synthetic oligonucleotide
  Antisense strand to SEQ ID NO: 2248456
aucuggcuuaauaucauag

SEQ ID NO: 2248458 - RNA, 19 nt, Artificial Sequence
  Description of Artificial Sequence: Synthetic oligonucleotide
  Sense strand starting at position 3802 of SEQ ID NO: 1884209
gaaccauugcacugugcua

SEQ ID NO: 2248459 - RNA, 19 nt, Artificial Sequence
  Description of Artificial Sequence: Synthetic oligonucleotide
  Antisense strand to SEQ ID NO: 2248458
uagcacagugcaaugguuc

SEQ ID NO: 2248460 - RNA, 19 nt, Artificial Sequence
  Description of Artificial Sequence: Synthetic oligonucleotide
  Sense strand starting at position 3856 of SEQ ID NO: 1884209
ucaauaaauccagggcuau

SEQ ID NO: 2248461 - RNA, 19 nt, Artificial Sequence
  Description of Artificial Sequence: Synthetic oligonucleotide
  Antisense strand to SEQ ID NO: 2248460
auagcccuggauuuauuga

SEQ ID NO: 2248462 - RNA, 19 nt, Artificial Sequence
  Description of Artificial Sequence: Synthetic oligonucleotide
  Sense strand starting at position 3897 of SEQ ID NO: 1884209
ugacguacuuuggcaauau

SEQ ID NO: 2248463 - RNA, 19 nt, Artificial Sequence
  Description of Artificial Sequence: Synthetic oligonucleotide
  Antisense strand to SEQ ID NO: 2248462
auauugccaaaguacguca

SEQ ID NO: 2248464 - RNA, 19 nt, Artificial Sequence
  Description of Artificial Sequence: Synthetic oligonucleotide
  Sense strand starting at position 3901 of SEQ ID NO: 1884209
guacuuuggcaauaucauu

SEQ ID NO: 2248465 - RNA, 19 nt, Artificial Sequence
  Description of Artificial Sequence: Synthetic oligonucleotide
  Antisense strand to SEQ ID NO: 2248464
aaugauauugccaaaguac

SEQ ID NO: 2248466 - RNA, 19 nt, Artificial Sequence
  Description of Artificial Sequence: Synthetic oligonucleotide
  Sense strand starting at position 133 of SEQ ID NO: 1884210
accaacuuguugucaaauc

SEQ ID NO: 2248467 - RNA, 19 nt, Artificial Sequence
  Description of Artificial Sequence: Synthetic oligonucleotide
  Antisense strand to SEQ ID NO: 2248466
gauuugacaacaaguuggu

SEQ ID NO: 2248468 - RNA, 19 nt, Artificial Sequence
  Description of Artificial Sequence: Synthetic oligonucleotide
  Sense strand starting at position 161 of SEQ ID NO: 1884210
uagagcagagguuaaguua

SEQ ID NO: 2248469 - RNA, 19 nt, Artificial Sequence
  Description of Artificial Sequence: Synthetic oligonucleotide
  Antisense strand to SEQ ID NO: 2248468
uaacuuaaccucugcucua

SEQ ID NO: 2248470 - RNA, 19 nt, Artificial Sequence
  Description of Artificial Sequence: Synthetic oligonucleotide
  Sense strand starting at position 168 of SEQ ID NO: 1884210
gagguuaaguuacuuggau

SEQ ID NO: 2248471 - RNA, 19 nt, Artificial Sequence
  Description of Artificial Sequence: Synthetic oligonucleotide
  Antisense strand to SEQ ID NO: 2248470
auccaaguaacuuaaccuc

SEQ ID NO: 2248472 - RNA, 19 nt, Artificial Sequence
  Description of Artificial Sequence: Synthetic oligonucleotide
  Sense strand starting at position 169 of SEQ ID NO: 1884210
agguuaaguuacuuggaua

SEQ ID NO: 2248473 - RNA, 19 nt, Artificial Sequence
  Description of Artificial Sequence: Synthetic oligonucleotide
  Antisense strand to SEQ ID NO: 2248472
uauccaaguaacuuaaccu

SEQ ID NO: 2248474 - RNA, 19 nt, Artificial Sequence
  Description of Artificial Sequence: Synthetic oligonucleotide
  Sense strand starting at position 170 of SEQ ID NO: 1884210
gguuaaguuacuuggauaa

SEQ ID NO: 2248475 - RNA, 19 nt, Artificial Sequence
  Description of Artificial Sequence: Synthetic oligonucleotide
  Antisense strand to SEQ ID NO: 2248474
uuauccaaguaacuuaacc

SEQ ID NO: 2248476 - RNA, 19 nt, Artificial Sequence
  Description of Artificial Sequence: Synthetic oligonucleotide
  Sense strand starting at position 357 of SEQ ID NO: 1884210
gugguaaaucuagaguugu

SEQ ID NO: 2248477 - RNA, 19 nt, Artificial Sequence
  Description of Artificial Sequence: Synthetic oligonucleotide
  Antisense strand to SEQ ID NO: 2248476
acaacucuagauuuaccac

SEQ ID NO: 2248478 - RNA, 19 nt, Artificial Sequence
  Description of Artificial Sequence: Synthetic oligonucleotide
  Sense strand starting at position 365 of SEQ ID NO: 1884210
ucuagaguugucuaccuaa

SEQ ID NO: 2248479 - RNA, 19 nt, Artificial Sequence
  Description of Artificial Sequence: Synthetic oligonucleotide
  Antisense strand to SEQ ID NO: 2248478
uuagguagacaacucuaga

SEQ ID NO: 2248480 - RNA, 19 nt, Artificial Sequence
  Description of Artificial Sequence: Synthetic oligonucleotide
  Sense strand starting at position 455 of SEQ ID NO: 1884210
cuaggaugucgguaaacag

SEQ ID NO: 2248481 - RNA, 19 nt, Artificial Sequence
  Description of Artificial Sequence: Synthetic oligonucleotide
  Antisense strand to SEQ ID NO: 2248480
cuguuuaccgacauccuag

SEQ ID NO: 2248482 - RNA, 19 nt, Artificial Sequence
  Description of Artificial Sequence: Synthetic oligonucleotide
  Sense strand starting at position 607 of SEQ ID NO: 1884210
gcccaugauauuggaggaa

SEQ ID NO: 2248483 - RNA, 19 nt, Artificial Sequence
  Description of Artificial Sequence: Synthetic oligonucleotide
  Antisense strand to SEQ ID NO: 2248482
uuccuccaauaucaugggc

SEQ ID NO: 2248484 - RNA, 19 nt, Artificial Sequence
  Description of Artificial Sequence: Synthetic oligonucleotide
  Sense strand starting at position 741 of SEQ ID NO: 1884210
cuaugaggcuauuccacaa

SEQ ID NO: 2248485 - RNA, 19 nt, Artificial Sequence
  Description of Artificial Sequence: Synthetic oligonucleotide
  Antisense strand to SEQ ID NO: 2248484
uuguggaauagccucauag

SEQ ID NO: 2248486 - RNA, 19 nt, Artificial Sequence
  Description of Artificial Sequence: Synthetic oligonucleotide
  Sense strand starting at position 776 of SEQ ID NO: 1884210
ccuguuagggaauguuuau

SEQ ID NO: 2248487 - RNA, 19 nt, Artificial Sequence
  Description of Artificial Sequence: Synthetic oligonucleotide
  Antisense strand to SEQ ID NO: 2248486
auaaacauucccuaacagg

SEQ ID NO: 2248488 - RNA, 19 nt, Artificial Sequence
  Description of Artificial Sequence: Synthetic oligonucleotide
  Sense strand starting at position 817 of SEQ ID NO: 1884210
ggcugacuauuucuuaguu

SEQ ID NO: 2248489 - RNA, 19 nt, Artificial Sequence
  Description of Artificial Sequence: Synthetic oligonucleotide
  Antisense strand to SEQ ID NO: 2248488
aacuaagaaauagucagcc

SEQ ID NO: 2248490 - RNA, 19 nt, Artificial Sequence
  Description of Artificial Sequence: Synthetic oligonucleotide
  Sense strand starting at position 818 of SEQ ID NO: 1884210
gcugacuauuucuuaguuu

SEQ ID NO: 2248491 - RNA, 19 nt, Artificial Sequence
  Description of Artificial Sequence: Synthetic oligonucleotide
  Antisense strand to SEQ ID NO: 2248490
aaacuaagaaauagucagc

SEQ ID NO: 2248492 - RNA, 19 nt, Artificial Sequence
  Description of Artificial Sequence: Synthetic oligonucleotide
  Sense strand starting at position 931 of SEQ ID NO: 1884210
uguugcuuuaugggagaaa

SEQ ID NO: 2248493 - RNA, 19 nt, Artificial Sequence
  Description of Artificial Sequence: Synthetic oligonucleotide
  Antisense strand to SEQ ID NO: 2248492
uuucucccauaaagcaaca

SEQ ID NO: 2248494 - RNA, 19 nt, Artificial Sequence
  Description of Artificial Sequence: Synthetic oligonucleotide
  Sense strand starting at position 1073 of SEQ ID NO: 1884210
uuuaacaauggguggauua

SEQ ID NO: 2248495 - RNA, 19 nt, Artificial Sequence
  Description of Artificial Sequence: Synthetic oligonucleotide
  Antisense strand to SEQ ID NO: 2248494
uaauccacccauuguuaaa

SEQ ID NO: 2248496 - RNA, 19 nt, Artificial Sequence
  Description of Artificial Sequence: Synthetic oligonucleotide
  Sense strand starting at position 1074 of SEQ ID NO: 1884210
uuaacaauggguggauuau

SEQ ID NO: 2248497 - RNA, 19 nt, Artificial Sequence
  Description of Artificial Sequence: Synthetic oligonucleotide
  Antisense strand to SEQ ID NO: 2248496
auaauccacccauuguuaa

SEQ ID NO: 2248498 - RNA, 19 nt, Artificial Sequence
  Description of Artificial Sequence: Synthetic oligonucleotide
  Sense strand starting at position 1080 of SEQ ID NO: 1884210
auggguggauuauuacuau

SEQ ID NO: 2248499 - RNA, 19 nt, Artificial Sequence
  Description of Artificial Sequence: Synthetic oligonucleotide
  Antisense strand to SEQ ID NO: 2248498
auaguaauaauccacccau

SEQ ID NO: 2248500 - RNA, 19 nt, Artificial Sequence
  Description of Artificial Sequence: Synthetic oligonucleotide
  Sense strand starting at position 1084 of SEQ ID NO: 1884210
guggauuauuacuauuuag

SEQ ID NO: 2248501 - RNA, 19 nt, Artificial Sequence
  Description of Artificial Sequence: Synthetic oligonucleotide
  Antisense strand to SEQ ID NO: 2248500
cuaaauaguaauaauccac

SEQ ID NO: 2248502 - RNA, 19 nt, Artificial Sequence
  Description of Artificial Sequence: Synthetic oligonucleotide
  Sense strand starting at position 1175 of SEQ ID NO: 1884210
gcaucugacaggugguaaa

SEQ ID NO: 2248503 - RNA, 19 nt, Artificial Sequence
  Description of Artificial Sequence: Synthetic oligonucleotide
  Antisense strand to SEQ ID NO: 2248502
uuuaccaccugucagaugc

SEQ ID NO: 2248504 - RNA, 19 nt, Artificial Sequence
  Description of Artificial Sequence: Synthetic oligonucleotide
  Sense strand starting at position 1271 of SEQ ID NO: 1884210
cccaaaugugucuagggca

SEQ ID NO: 2248505 - RNA, 19 nt, Artificial Sequence
  Description of Artificial Sequence: Synthetic oligonucleotide
  Antisense strand to SEQ ID NO: 2248504
ugcccuagacacauuuggg

SEQ ID NO: 2248506 - RNA, 19 nt, Artificial Sequence
  Description of Artificial Sequence: Synthetic oligonucleotide
  Sense strand starting at position 1456 of SEQ ID NO: 1884210
acaggauucucagcacaca

SEQ ID NO: 2248507 - RNA, 19 nt, Artificial Sequence
  Description of Artificial Sequence: Synthetic oligonucleotide
  Antisense strand to SEQ ID NO: 2248506
ugugugcugagaauccugu

SEQ ID NO: 2248508 - RNA, 19 nt, Artificial Sequence
  Description of Artificial Sequence: Synthetic oligonucleotide
  Sense strand starting at position 1588 of SEQ ID NO: 1884210
gacucauuauuugagugac

SEQ ID NO: 2248509 - RNA, 19 nt, Artificial Sequence
  Description of Artificial Sequence: Synthetic oligonucleotide
  Antisense strand to SEQ ID NO: 2248508
gucacucaaauaaugaguc

SEQ ID NO: 2248510 - RNA, 19 nt, Artificial Sequence
  Description of Artificial Sequence: Synthetic oligonucleotide
  Sense strand starting at position 1603 of SEQ ID NO: 1884210
ugacaucaccagugauuac

SEQ ID NO: 2248511 - RNA, 19 nt, Artificial Sequence
  Description of Artificial Sequence: Synthetic oligonucleotide
  Antisense strand to SEQ ID NO: 2248510
guaaucacuggugauguca

SEQ ID NO: 2248512 - RNA, 19 nt, Artificial Sequence
  Description of Artificial Sequence: Synthetic oligonucleotide
  Sense strand starting at position 1610 of SEQ ID NO: 1884210
accagugauuacuucucuu

SEQ ID NO: 2248513 - RNA, 19 nt, Artificial Sequence
  Description of Artificial Sequence: Synthetic oligonucleotide
  Antisense strand to SEQ ID NO: 2248512
aagagaaguaaucacuggu

SEQ ID NO: 2248514 - RNA, 19 nt, Artificial Sequence
  Description of Artificial Sequence: Synthetic oligonucleotide
  Sense strand starting at position 1838 of SEQ ID NO: 1884210
aucaaagucuaguucuuga

SEQ ID NO: 2248515 - RNA, 19 nt, Artificial Sequence
  Description of Artificial Sequence: Synthetic oligonucleotide
  Antisense strand to SEQ ID NO: 2248514
ucaagaacuagacuuugau

SEQ ID NO: 2248516 - RNA, 19 nt, Artificial Sequence
  Description of Artificial Sequence: Synthetic oligonucleotide
  Sense strand starting at position 1843 of SEQ ID NO: 1884210
agucuaguucuugacccaa

SEQ ID NO: 2248517 - RNA, 19 nt, Artificial Sequence
  Description of Artificial Sequence: Synthetic oligonucleotide
  Antisense strand to SEQ ID NO: 2248516
uugggucaagaacuagacu

SEQ ID NO: 2248518 - RNA, 19 nt, Artificial Sequence
  Description of Artificial Sequence: Synthetic oligonucleotide
  Sense strand starting at position 3085 of SEQ ID NO: 1884210
uuacuuagucguuacacau

SEQ ID NO: 2248519 - RNA, 19 nt, Artificial Sequence
  Description of Artificial Sequence: Synthetic oligonucleotide
  Antisense strand to SEQ ID NO: 2248518
auguguaacgacuaaguaa

SEQ ID NO: 2248520 - RNA, 19 nt, Artificial Sequence
  Description of Artificial Sequence: Synthetic oligonucleotide
  Sense strand starting at position 3106 of SEQ ID NO: 1884210
uccugucgugucguuuaca

SEQ ID NO: 2248521 - RNA, 19 nt, Artificial Sequence
  Description of Artificial Sequence: Synthetic oligonucleotide
  Antisense strand to SEQ ID NO: 2248520
uguaaacgacacgacagga

SEQ ID NO: 2248522 - RNA, 19 nt, Artificial Sequence
  Description of Artificial Sequence: Synthetic oligonucleotide
  Sense strand starting at position 3112 of SEQ ID NO: 1884210
cgugucguuuacauagaga

SEQ ID NO: 2248523 - RNA, 19 nt, Artificial Sequence
  Description of Artificial Sequence: Synthetic oligonucleotide
  Antisense strand to SEQ ID NO: 2248522
ucucuauguaaacgacacg

SEQ ID NO: 2248524 - RNA, 19 nt, Artificial Sequence
  Description of Artificial Sequence: Synthetic oligonucleotide
  Sense strand starting at position 3307 of SEQ ID NO: 1884210
cagaccuuccaguggucaa

SEQ ID NO: 2248525 - RNA, 19 nt, Artificial Sequence
  Description of Artificial Sequence: Synthetic oligonucleotide
  Antisense strand to SEQ ID NO: 2248524
uugaccacuggaaggucug

SEQ ID NO: 2248526 - RNA, 19 nt, Artificial Sequence
  Description of Artificial Sequence: Synthetic oligonucleotide
  Sense strand starting at position 3310 of SEQ ID NO: 1884210
accuuccaguggucaagau

SEQ ID NO: 2248527 - RNA, 19 nt, Artificial Sequence
  Description of Artificial Sequence: Synthetic oligonucleotide
  Antisense strand to SEQ ID NO: 2248526
aucuugaccacuggaaggu

SEQ ID NO: 2248528 - RNA, 19 nt, Artificial Sequence
  Description of Artificial Sequence: Synthetic oligonucleotide
  Sense strand starting at position 3488 of SEQ ID NO: 1884210
agaggcagucugcaaucau

SEQ ID NO: 2248529 - RNA, 19 nt, Artificial Sequence
  Description of Artificial Sequence: Synthetic oligonucleotide
  Antisense strand to SEQ ID NO: 2248528
augauugcagacugccucu

SEQ ID NO: 2248530 - RNA, 19 nt, Artificial Sequence
  Description of Artificial Sequence: Synthetic oligonucleotide
  Sense strand starting at position 3492 of SEQ ID NO: 1884210
gcagucugcaaucauugga

SEQ ID NO: 2248531 - RNA, 19 nt, Artificial Sequence
  Description of Artificial Sequence: Synthetic oligonucleotide
  Antisense strand to SEQ ID NO: 2248530
uccaaugauugcagacugc

SEQ ID NO: 2248532 - RNA, 19 nt, Artificial Sequence
  Description of Artificial Sequence: Synthetic oligonucleotide
  Sense strand starting at position 3495 of SEQ ID NO: 1884210
gucugcaaucauuggaaau

SEQ ID NO: 2248533 - RNA, 19 nt, Artificial Sequence
  Description of Artificial Sequence: Synthetic oligonucleotide
  Antisense strand to SEQ ID NO: 2248532
auuuccaaugauugcagac

SEQ ID NO: 2248534 - RNA, 19 nt, Artificial Sequence
  Description of Artificial Sequence: Synthetic oligonucleotide
  Sense strand starting at position 3561 of SEQ ID NO: 1884210
uugcaugagcuugcguaau

SEQ ID NO: 2248535 - RNA, 19 nt, Artificial Sequence
  Description of Artificial Sequence: Synthetic oligonucleotide
  Antisense strand to SEQ ID NO: 2248534
auuacgcaagcucaugcaa

SEQ ID NO: 2248536 - RNA, 19 nt, Artificial Sequence
  Description of Artificial Sequence: Synthetic oligonucleotide
  Sense strand starting at position 3647 of SEQ ID NO: 1884210
guaugauauagcugggaug

SEQ ID NO: 2248537 - RNA, 19 nt, Artificial Sequence
  Description of Artificial Sequence: Synthetic oligonucleotide
  Antisense strand to SEQ ID NO: 2248536
caucccagcuauaucauac

SEQ ID NO: 2248538 - RNA, 19 nt, Artificial Sequence
  Description of Artificial Sequence: Synthetic oligonucleotide
  Sense strand starting at position 3648 of SEQ ID NO: 1884210
uaugauauagcugggaugu

SEQ ID NO: 2248539 - RNA, 19 nt, Artificial Sequence
  Description of Artificial Sequence: Synthetic oligonucleotide
  Antisense strand to SEQ ID NO: 2248538
acaucccagcuauaucaua

SEQ ID NO: 2248540 - RNA, 19 nt, Artificial Sequence
  Description of Artificial Sequence: Synthetic oligonucleotide
  Sense strand starting at position 3764 of SEQ ID NO: 1884210
cuuggaguuuaugcaaaug

SEQ ID NO: 2248541 - RNA, 19 nt, Artificial Sequence
  Description of Artificial Sequence: Synthetic oligonucleotide
  Antisense strand to SEQ ID NO: 2248540
cauuugcauaaacuccaag

SEQ ID NO: 2248542 - RNA, 19 nt, Artificial Sequence
  Description of Artificial Sequence: Synthetic oligonucleotide
  Sense strand starting at position 3773 of SEQ ID NO: 1884210
uaugcaaaugguuaugcua

SEQ ID NO: 2248543 - RNA, 19 nt, Artificial Sequence
  Description of Artificial Sequence: Synthetic oligonucleotide
  Antisense strand to SEQ ID NO: 2248542
uagcauaaccauuugcaua

SEQ ID NO: 2248544 - RNA, 19 nt, Artificial Sequence
  Description of Artificial Sequence: Synthetic oligonucleotide
  Sense strand starting at position 3776 of SEQ ID NO: 1884210
gcaaaugguuaugcuagaa

SEQ ID NO: 2248545 - RNA, 19 nt, Artificial Sequence
  Description of Artificial Sequence: Synthetic oligonucleotide
  Antisense strand to SEQ ID NO: 2248544
uucuagcauaaccauuugc

SEQ ID NO: 2248546 - RNA, 19 nt, Artificial Sequence
  Description of Artificial Sequence: Synthetic oligonucleotide
  Sense strand starting at position 119 of SEQ ID NO: 1884211
ugguguuaaggaugcuuca

SEQ ID NO: 2248547 - RNA, 19 nt, Artificial Sequence
  Description of Artificial Sequence: Synthetic oligonucleotide
  Antisense strand to SEQ ID NO: 2248546
ugaagcauccuuaacacca

SEQ ID NO: 2248548 - RNA, 19 nt, Artificial Sequence
  Description of Artificial Sequence: Synthetic oligonucleotide
  Sense strand starting at position 145 of SEQ ID NO: 1884211
gcccaugauauuggaggaa

SEQ ID NO: 2248549 - RNA, 19 nt, Artificial Sequence
  Description of Artificial Sequence: Synthetic oligonucleotide
  Antisense strand to SEQ ID NO: 2248548
uuccuccaauaucaugggc

SEQ ID NO: 2248550 - RNA, 19 nt, Artificial Sequence
  Description of Artificial Sequence: Synthetic oligonucleotide
  Sense strand starting at position 279 of SEQ ID NO: 1884211
cuaugaggcuauuccacaa

SEQ ID NO: 2248551 - RNA, 19 nt, Artificial Sequence
  Description of Artificial Sequence: Synthetic oligonucleotide
  Antisense strand to SEQ ID NO: 2248550
uuguggaauagccucauag

SEQ ID NO: 2248552 - RNA, 19 nt, Artificial Sequence
  Description of Artificial Sequence: Synthetic oligonucleotide
  Sense strand starting at position 314 of SEQ ID NO: 1884211
ccuguuagggaauguuuau

SEQ ID NO: 2248553 - RNA, 19 nt, Artificial Sequence
  Description of Artificial Sequence: Synthetic oligonucleotide
  Antisense strand to SEQ ID NO: 2248552
auaaacauucccuaacagg

SEQ ID NO: 2248554 - RNA, 19 nt, Artificial Sequence
  Description of Artificial Sequence: Synthetic oligonucleotide
  Sense strand starting at position 355 of SEQ ID NO: 1884211
ggcugacuauuucuuaguu

SEQ ID NO: 2248555 - RNA, 19 nt, Artificial Sequence
  Description of Artificial Sequence: Synthetic oligonucleotide
  Antisense strand to SEQ ID NO: 2248554
aacuaagaaauagucagcc

SEQ ID NO: 2248556 - RNA, 19 nt, Artificial Sequence
  Description of Artificial Sequence: Synthetic oligonucleotide
  Sense strand starting at position 356 of SEQ ID NO: 1884211
gcugacuauuucuuaguuu

SEQ ID NO: 2248557 - RNA, 19 nt, Artificial Sequence
  Description of Artificial Sequence: Synthetic oligonucleotide
  Antisense strand to SEQ ID NO: 2248556
aaacuaagaaauagucagc

SEQ ID NO: 2248558 - RNA, 19 nt, Artificial Sequence
  Description of Artificial Sequence: Synthetic oligonucleotide
  Sense strand starting at position 469 of SEQ ID NO: 1884211
uguugcuuuaugggagaaa

SEQ ID NO: 2248559 - RNA, 19 nt, Artificial Sequence
  Description of Artificial Sequence: Synthetic oligonucleotide
  Antisense strand to SEQ ID NO: 2248558
uuucucccauaaagcaaca

SEQ ID NO: 2248560 - RNA, 19 nt, Artificial Sequence
  Description of Artificial Sequence: Synthetic oligonucleotide
  Sense strand starting at position 512 of SEQ ID NO: 1884211
gugaacugaacucguuauu

SEQ ID NO: 2248561 - RNA, 19 nt, Artificial Sequence
  Description of Artificial Sequence: Synthetic oligonucleotide
  Antisense strand to SEQ ID NO: 2248560
aauaacgaguucaguucac

SEQ ID NO: 2248562 - RNA, 19 nt, Artificial Sequence
  Description of Artificial Sequence: Synthetic oligonucleotide
  Sense strand starting at position 578 of SEQ ID NO: 1884211
aucuuacaugcauggcaua

SEQ ID NO: 2248563 - RNA, 19 nt, Artificial Sequence
  Description of Artificial Sequence: Synthetic oligonucleotide
  Antisense strand to SEQ ID NO: 2248562
uaugccaugcauguaagau

SEQ ID NO: 2248564 - RNA, 19 nt, Artificial Sequence
  Description of Artificial Sequence: Synthetic oligonucleotide
  Sense strand starting at position 611 of SEQ ID NO: 1884211
uuuaacaauggguggauua

SEQ ID NO: 2248565 - RNA, 19 nt, Artificial Sequence
  Description of Artificial Sequence: Synthetic oligonucleotide
  Antisense strand to SEQ ID NO: 2248564
uaauccacccauuguuaaa

SEQ ID NO: 2248566 - RNA, 19 nt, Artificial Sequence
  Description of Artificial Sequence: Synthetic oligonucleotide
  Sense strand starting at position 612 of SEQ ID NO: 1884211
uuaacaauggguggauuau

SEQ ID NO: 2248567 - RNA, 19 nt, Artificial Sequence
  Description of Artificial Sequence: Synthetic oligonucleotide
  Antisense strand to SEQ ID NO: 2248566
auaauccacccauuguuaa

SEQ ID NO: 2248568 - RNA, 19 nt, Artificial Sequence
  Description of Artificial Sequence: Synthetic oligonucleotide
  Sense strand starting at position 618 of SEQ ID NO: 1884211
auggguggauuauuacuau

SEQ ID NO: 2248569 - RNA, 19 nt, Artificial Sequence
  Description of Artificial Sequence: Synthetic oligonucleotide
  Antisense strand to SEQ ID NO: 2248568
auaguaauaauccacccau

SEQ ID NO: 2248570 - RNA, 19 nt, Artificial Sequence
  Description of Artificial Sequence: Synthetic oligonucleotide
  Sense strand starting at position 622 of SEQ ID NO: 1884211
guggauuauuacuauuuag

SEQ ID NO: 2248571 - RNA, 19 nt, Artificial Sequence
  Description of Artificial Sequence: Synthetic oligonucleotide
  Antisense strand to SEQ ID NO: 2248570
cuaaauaguaauaauccac

SEQ ID NO: 2248572 - RNA, 19 nt, Artificial Sequence
  Description of Artificial Sequence: Synthetic oligonucleotide
  Sense strand starting at position 688 of SEQ ID NO: 1884211
uuaguuaauccuuacgcuu

SEQ ID NO: 2248573 - RNA, 19 nt, Artificial Sequence
  Description of Artificial Sequence: Synthetic oligonucleotide
  Antisense strand to SEQ ID NO: 2248572
aagcguaaggauuaacuaa

SEQ ID NO: 2248574 - RNA, 19 nt, Artificial Sequence
  Description of Artificial Sequence: Synthetic oligonucleotide
  Sense strand starting at position 713 of SEQ ID NO: 1884211
gcaucugacaggugguaaa

SEQ ID NO: 2248575 - RNA, 19 nt, Artificial Sequence
  Description of Artificial Sequence: Synthetic oligonucleotide
  Antisense strand to SEQ ID NO: 2248574
uuuaccaccugucagaugc

SEQ ID NO: 2248576 - RNA, 19 nt, Artificial Sequence
  Description of Artificial Sequence: Synthetic oligonucleotide
  Sense strand starting at position 809 of SEQ ID NO: 1884211
cccaaaugugucuagggca

SEQ ID NO: 2248577 - RNA, 19 nt, Artificial Sequence
  Description of Artificial Sequence: Synthetic oligonucleotide
  Antisense strand to SEQ ID NO: 2248576
ugcccuagacacauuuggg

SEQ ID NO: 2248578 - RNA, 19 nt, Artificial Sequence
  Description of Artificial Sequence: Synthetic oligonucleotide
  Sense strand starting at position 994 of SEQ ID NO: 1884211
acaggauucucagcacaca

SEQ ID NO: 2248579 - RNA, 19 nt, Artificial Sequence
  Description of Artificial Sequence: Synthetic oligonucleotide
  Antisense strand to SEQ ID NO: 2248578
ugugugcugagaauccugu

SEQ ID NO: 2248580 - RNA, 19 nt, Artificial Sequence
  Description of Artificial Sequence: Synthetic oligonucleotide
  Sense strand starting at position 1078 of SEQ ID NO: 1884211
cgguaaacuuaguuucgaa

SEQ ID NO: 2248581 - RNA, 19 nt, Artificial Sequence
  Description of Artificial Sequence: Synthetic oligonucleotide
  Antisense strand to SEQ ID NO: 2248580
uucgaaacuaaguuuaccg

SEQ ID NO: 2248582 - RNA, 19 nt, Artificial Sequence
  Description of Artificial Sequence: Synthetic oligonucleotide
  Sense strand starting at position 1126 of SEQ ID NO: 1884211
gacucauuauuugagugac

SEQ ID NO: 2248583 - RNA, 19 nt, Artificial Sequence
  Description of Artificial Sequence: Synthetic oligonucleotide
  Antisense strand to SEQ ID NO: 2248582
gucacucaaauaaugaguc

SEQ ID NO: 2248584 - RNA, 19 nt, Artificial Sequence
  Description of Artificial Sequence: Synthetic oligonucleotide
  Sense strand starting at position 1141 of SEQ ID NO: 1884211
ugacaucaccagugauuac

SEQ ID NO: 2248585 - RNA, 19 nt, Artificial Sequence
  Description of Artificial Sequence: Synthetic oligonucleotide
  Antisense strand to SEQ ID NO: 2248584
guaaucacuggugauguca

SEQ ID NO: 2248586 - RNA, 19 nt, Artificial Sequence
  Description of Artificial Sequence: Synthetic oligonucleotide
  Sense strand starting at position 1148 of SEQ ID NO: 1884211
accagugauuacuucucuu

SEQ ID NO: 2248587 - RNA, 19 nt, Artificial Sequence
  Description of Artificial Sequence: Synthetic oligonucleotide
  Antisense strand to SEQ ID NO: 2248586
aagagaaguaaucacuggu

SEQ ID NO: 2248588 - RNA, 19 nt, Artificial Sequence
  Description of Artificial Sequence: Synthetic oligonucleotide
  Sense strand starting at position 1376 of SEQ ID NO: 1884211
aucaaagucuaguucuuga

SEQ ID NO: 2248589 - RNA, 19 nt, Artificial Sequence
  Description of Artificial Sequence: Synthetic oligonucleotide
  Antisense strand to SEQ ID NO: 2248588
ucaagaacuagacuuugau

SEQ ID NO: 2248590 - RNA, 19 nt, Artificial Sequence
  Description of Artificial Sequence: Synthetic oligonucleotide
  Sense strand starting at position 1381 of SEQ ID NO: 1884211
agucuaguucuugacccaa

SEQ ID NO: 2248591 - RNA, 19 nt, Artificial Sequence
  Description of Artificial Sequence: Synthetic oligonucleotide
  Antisense strand to SEQ ID NO: 2248590
uugggucaagaacuagacu

SEQ ID NO: 2248592 - RNA, 19 nt, Artificial Sequence
  Description of Artificial Sequence: Synthetic oligonucleotide
  Sense strand starting at position 2480 of SEQ ID NO: 1884211
aaaguuucuggcgauguca

SEQ ID NO: 2248593 - RNA, 19 nt, Artificial Sequence
  Description of Artificial Sequence: Synthetic oligonucleotide
  Antisense strand to SEQ ID NO: 2248592
ugacaucgccagaaacuuu

SEQ ID NO: 2248594 - RNA, 19 nt, Artificial Sequence
  Description of Artificial Sequence: Synthetic oligonucleotide
  Sense strand starting at position 2623 of SEQ ID NO: 1884211
uuacuuagucguuacacau

SEQ ID NO: 2248595 - RNA, 19 nt, Artificial Sequence
  Description of Artificial Sequence: Synthetic oligonucleotide
  Antisense strand to SEQ ID NO: 2248594
auguguaacgacuaaguaa

SEQ ID NO: 2248596 - RNA, 19 nt, Artificial Sequence
  Description of Artificial Sequence: Synthetic oligonucleotide
  Sense strand starting at position 2642 of SEQ ID NO: 1884211
gguccugucgugucguuua

SEQ ID NO: 2248597 - RNA, 19 nt, Artificial Sequence
  Description of Artificial Sequence: Synthetic oligonucleotide
  Antisense strand to SEQ ID NO: 2248596
uaaacgacacgacaggacc

SEQ ID NO: 2248598 - RNA, 19 nt, Artificial Sequence
  Description of Artificial Sequence: Synthetic oligonucleotide
  Sense strand starting at position 2644 of SEQ ID NO: 1884211
uccugucgugucguuuaca

SEQ ID NO: 2248599 - RNA, 19 nt, Artificial Sequence
  Description of Artificial Sequence: Synthetic oligonucleotide
  Antisense strand to SEQ ID NO: 2248598
uguaaacgacacgacagga

SEQ ID NO: 2248600 - RNA, 19 nt, Artificial Sequence
  Description of Artificial Sequence: Synthetic oligonucleotide
  Sense strand starting at position 2650 of SEQ ID NO: 1884211
cgugucguuuacauagaga

SEQ ID NO: 2248601 - RNA, 19 nt, Artificial Sequence
  Description of Artificial Sequence: Synthetic oligonucleotide
  Antisense strand to SEQ ID NO: 2248600
ucucuauguaaacgacacg

SEQ ID NO: 2248602 - RNA, 19 nt, Artificial Sequence
  Description of Artificial Sequence: Synthetic oligonucleotide
  Sense strand starting at position 2845 of SEQ ID NO: 1884211
cagaccuuccaguggucaa

SEQ ID NO: 2248603 - RNA, 19 nt, Artificial Sequence
  Description of Artificial Sequence: Synthetic oligonucleotide
  Antisense strand to SEQ ID NO: 2248602
uugaccacuggaaggucug

SEQ ID NO: 2248604 - RNA, 19 nt, Artificial Sequence
  Description of Artificial Sequence: Synthetic oligonucleotide
  Sense strand starting at position 2848 of SEQ ID NO: 1884211
accuuccaguggucaagau

SEQ ID NO: 2248605 - RNA, 19 nt, Artificial Sequence
  Description of Artificial Sequence: Synthetic oligonucleotide
  Antisense strand to SEQ ID NO: 2248604
aucuugaccacuggaaggu

SEQ ID NO: 2248606 - RNA, 19 nt, Artificial Sequence
  Description of Artificial Sequence: Synthetic oligonucleotide
  Sense strand starting at position 3026 of SEQ ID NO: 1884211
agaggcagucugcaaucau

SEQ ID NO: 2248607 - RNA, 19 nt, Artificial Sequence
  Description of Artificial Sequence: Synthetic oligonucleotide
  Antisense strand to SEQ ID NO: 2248606
augauugcagacugccucu

SEQ ID NO: 2248608 - RNA, 19 nt, Artificial Sequence
  Description of Artificial Sequence: Synthetic oligonucleotide
  Sense strand starting at position 3030 of SEQ ID NO: 1884211
gcagucugcaaucauugga

SEQ ID NO: 2248609 - RNA, 19 nt, Artificial Sequence
  Description of Artificial Sequence: Synthetic oligonucleotide
  Antisense strand to SEQ ID NO: 2248608
uccaaugauugcagacugc

SEQ ID NO: 2248610 - RNA, 19 nt, Artificial Sequence
  Description of Artificial Sequence: Synthetic oligonucleotide
  Sense strand starting at position 3033 of SEQ ID NO: 1884211
gucugcaaucauuggaaau

SEQ ID NO: 2248611 - RNA, 19 nt, Artificial Sequence
  Description of Artificial Sequence: Synthetic oligonucleotide
  Antisense strand to SEQ ID NO: 2248610
auuuccaaugauugcagac

SEQ ID NO: 2248612 - RNA, 19 nt, Artificial Sequence
  Description of Artificial Sequence: Synthetic oligonucleotide
  Sense strand starting at position 3099 of SEQ ID NO: 1884211
uugcaugagcuugcguaau

SEQ ID NO: 2248613 - RNA, 19 nt, Artificial Sequence
  Description of Artificial Sequence: Synthetic oligonucleotide
  Antisense strand to SEQ ID NO: 2248612
auuacgcaagcucaugcaa

SEQ ID NO: 2248614 - RNA, 19 nt, Artificial Sequence
  Description of Artificial Sequence: Synthetic oligonucleotide
  Sense strand starting at position 3185 of SEQ ID NO: 1884211
guaugauauagcugggaug

SEQ ID NO: 2248615 - RNA, 19 nt, Artificial Sequence
  Description of Artificial Sequence: Synthetic oligonucleotide
  Antisense strand to SEQ ID NO: 2248614
caucccagcuauaucauac

SEQ ID NO: 2248616 - RNA, 19 nt, Artificial Sequence
  Description of Artificial Sequence: Synthetic oligonucleotide
  Sense strand starting at position 3186 of SEQ ID NO: 1884211
uaugauauagcugggaugu

SEQ ID NO: 2248617 - RNA, 19 nt, Artificial Sequence
  Description of Artificial Sequence: Synthetic oligonucleotide
  Antisense strand to SEQ ID NO: 2248616
acaucccagcuauaucaua

SEQ ID NO: 2248618 - RNA, 19 nt, Artificial Sequence
  Description of Artificial Sequence: Synthetic oligonucleotide
  Sense strand starting at position 3302 of SEQ ID NO: 1884211
cuuggaguuuaugcaaaug

SEQ ID NO: 2248619 - RNA, 19 nt, Artificial Sequence
  Description of Artificial Sequence: Synthetic oligonucleotide
  Antisense strand to SEQ ID NO: 2248618
cauuugcauaaacuccaag

SEQ ID NO: 2248620 - RNA, 19 nt, Artificial Sequence
  Description of Artificial Sequence: Synthetic oligonucleotide
  Sense strand starting at position 3311 of SEQ ID NO: 1884211
uaugcaaaugguuaugcua

SEQ ID NO: 2248621 - RNA, 19 nt, Artificial Sequence
  Description of Artificial Sequence: Synthetic oligonucleotide
  Antisense strand to SEQ ID NO: 2248620
uagcauaaccauuugcaua

SEQ ID NO: 2248622 - RNA, 19 nt, Artificial Sequence
  Description of Artificial Sequence: Synthetic oligonucleotide
  Sense strand starting at position 3314 of SEQ ID NO: 1884211
gcaaaugguuaugcuagaa

SEQ ID NO: 2248623 - RNA, 19 nt, Artificial Sequence
  Description of Artificial Sequence: Synthetic oligonucleotide
  Antisense strand to SEQ ID NO: 2248622
uucuagcauaaccauuugc

SEQ ID NO: 2248624 - RNA, 19 nt, Artificial Sequence
  Description of Artificial Sequence: Synthetic oligonucleotide
  Sense strand starting at position 3438 of SEQ ID NO: 1884211
ugcucaaagcuuuggacau

SEQ ID NO: 2248625 - RNA, 19 nt, Artificial Sequence
  Description of Artificial Sequence: Synthetic oligonucleotide
  Antisense strand to SEQ ID NO: 2248624
auguccaaagcuuugagca

SEQ ID NO: 2248626 - RNA, 19 nt, Artificial Sequence
  Description of Artificial Sequence: Synthetic oligonucleotide
  Sense strand starting at position 205 of SEQ ID NO: 1884212
gguauagugaacuauguga

SEQ ID NO: 2248627 - RNA, 19 nt, Artificial Sequence
  Description of Artificial Sequence: Synthetic oligonucleotide
  Antisense strand to SEQ ID NO: 2248626
ucacauaguucacuauacc

SEQ ID NO: 2248628 - RNA, 19 nt, Artificial Sequence
  Description of Artificial Sequence: Synthetic oligonucleotide
  Sense strand starting at position 207 of SEQ ID NO: 1884212
uauagugaacuaugugaca

SEQ ID NO: 2248629 - RNA, 19 nt, Artificial Sequence
  Description of Artificial Sequence: Synthetic oligonucleotide
  Antisense strand to SEQ ID NO: 2248628
ugucacauaguucacuaua

SEQ ID NO: 2248630 - RNA, 19 nt, Artificial Sequence
  Description of Artificial Sequence: Synthetic oligonucleotide
  Sense strand starting at position 276 of SEQ ID NO: 1884212
aguugucucuagccuugaa

SEQ ID NO: 2248631 - RNA, 19 nt, Artificial Sequence
  Description of Artificial Sequence: Synthetic oligonucleotide
  Antisense strand to SEQ ID NO: 2248630
uucaaggcuagagacaacu

SEQ ID NO: 2248632 - RNA, 19 nt, Artificial Sequence
  Description of Artificial Sequence: Synthetic oligonucleotide
  Sense strand starting at position 280 of SEQ ID NO: 1884212
gucucuagccuugaaggga

SEQ ID NO: 2248633 - RNA, 19 nt, Artificial Sequence
  Description of Artificial Sequence: Synthetic oligonucleotide
  Antisense strand to SEQ ID NO: 2248632
ucccuucaaggcuagagac

SEQ ID NO: 2248634 - RNA, 19 nt, Artificial Sequence
  Description of Artificial Sequence: Synthetic oligonucleotide
  Sense strand starting at position 330 of SEQ ID NO: 1884212
uguucuagucuacaauuga

SEQ ID NO: 2248635 - RNA, 19 nt, Artificial Sequence
  Description of Artificial Sequence: Synthetic oligonucleotide
  Antisense strand to SEQ ID NO: 2248634
ucaauuguagacuagaaca

SEQ ID NO: 2248636 - RNA, 19 nt, Artificial Sequence
  Description of Artificial Sequence: Synthetic oligonucleotide
  Sense strand starting at position 346 of SEQ ID NO: 1884212
ugagaacucugauauacuc

SEQ ID NO: 2248637 - RNA, 19 nt, Artificial Sequence
  Description of Artificial Sequence: Synthetic oligonucleotide
  Antisense strand to SEQ ID NO: 2248636
gaguauaucagaguucuca

SEQ ID NO: 2248638 - RNA, 19 nt, Artificial Sequence
  Description of Artificial Sequence: Synthetic oligonucleotide
  Sense strand starting at position 353 of SEQ ID NO: 1884212
ucugauauacucugugauc

SEQ ID NO: 2248639 - RNA, 19 nt, Artificial Sequence
  Description of Artificial Sequence: Synthetic oligonucleotide
  Antisense strand to SEQ ID NO: 2248638
gaucacagaguauaucaga

SEQ ID NO: 2248640 - RNA, 19 nt, Artificial Sequence
  Description of Artificial Sequence: Synthetic oligonucleotide
  Sense strand starting at position 2092 of SEQ ID NO: 1884212
ucuugaguuuccuuugagu

SEQ ID NO: 2248641 - RNA, 19 nt, Artificial Sequence
  Description of Artificial Sequence: Synthetic oligonucleotide
  Antisense strand to SEQ ID NO: 2248640
acucaaaggaaacucaaga

SEQ ID NO: 2248642 - RNA, 19 nt, Artificial Sequence
  Description of Artificial Sequence: Synthetic oligonucleotide
  Sense strand starting at position 2094 of SEQ ID NO: 1884212
uugaguuuccuuugaguga

SEQ ID NO: 2248643 - RNA, 19 nt, Artificial Sequence
  Description of Artificial Sequence: Synthetic oligonucleotide
  Antisense strand to SEQ ID NO: 2248642
ucacucaaaggaaacucaa

SEQ ID NO: 2248644 - RNA, 19 nt, Artificial Sequence
  Description of Artificial Sequence: Synthetic oligonucleotide
  Sense strand starting at position 2098 of SEQ ID NO: 1884212
guuuccuuugagugaucug

SEQ ID NO: 2248645 - RNA, 19 nt, Artificial Sequence
  Description of Artificial Sequence: Synthetic oligonucleotide
  Antisense strand to SEQ ID NO: 2248644
cagaucacucaaaggaaac

SEQ ID NO: 2248646 - RNA, 19 nt, Artificial Sequence
  Description of Artificial Sequence: Synthetic oligonucleotide
  Sense strand starting at position 2101 of SEQ ID NO: 1884212
uccuuugagugaucuguau

SEQ ID NO: 2248647 - RNA, 19 nt, Artificial Sequence
  Description of Artificial Sequence: Synthetic oligonucleotide
  Antisense strand to SEQ ID NO: 2248646
auacagaucacucaaagga

SEQ ID NO: 2248648 - RNA, 19 nt, Artificial Sequence
  Description of Artificial Sequence: Synthetic oligonucleotide
  Sense strand starting at position 2105 of SEQ ID NO: 1884212
uugagugaucuguauacau

SEQ ID NO: 2248649 - RNA, 19 nt, Artificial Sequence
  Description of Artificial Sequence: Synthetic oligonucleotide
  Antisense strand to SEQ ID NO: 2248648
auguauacagaucacucaa

SEQ ID NO: 2248650 - RNA, 19 nt, Artificial Sequence
  Description of Artificial Sequence: Synthetic oligonucleotide
  Sense strand starting at position 2107 of SEQ ID NO: 1884212
gagugaucuguauacaucu

SEQ ID NO: 2248651 - RNA, 19 nt, Artificial Sequence
  Description of Artificial Sequence: Synthetic oligonucleotide
  Antisense strand to SEQ ID NO: 2248650
agauguauacagaucacuc

SEQ ID NO: 2248652 - RNA, 19 nt, Artificial Sequence
  Description of Artificial Sequence: Synthetic oligonucleotide
  Sense strand starting at position 2365 of SEQ ID NO: 1884212
gaugccaugcuuuguuuaa

SEQ ID NO: 2248653 - RNA, 19 nt, Artificial Sequence
  Description of Artificial Sequence: Synthetic oligonucleotide
  Antisense strand to SEQ ID NO: 2248652
uuaaacaaagcauggcauc

SEQ ID NO: 2248654 - RNA, 19 nt, Artificial Sequence
  Description of Artificial Sequence: Synthetic oligonucleotide
  Sense strand starting at position 2386 of SEQ ID NO: 1884212
ccaguugguuuaccuauua

SEQ ID NO: 2248655 - RNA, 19 nt, Artificial Sequence
  Description of Artificial Sequence: Synthetic oligonucleotide
  Antisense strand to SEQ ID NO: 2248654
uaauagguaaaccaacugg

SEQ ID NO: 2248656 - RNA, 19 nt, Artificial Sequence
  Description of Artificial Sequence: Synthetic oligonucleotide
  Sense strand starting at position 2499 of SEQ ID NO: 1884212
caggaauggcaguguuuga

SEQ ID NO: 2248657 - RNA, 19 nt, Artificial Sequence
  Description of Artificial Sequence: Synthetic oligonucleotide
  Antisense strand to SEQ ID NO: 2248656
ucaaacacugccauuccug

SEQ ID NO: 2248658 - RNA, 19 nt, Artificial Sequence
  Description of Artificial Sequence: Synthetic oligonucleotide
  Sense strand starting at position 2504 of SEQ ID NO: 1884212
auggcaguguuugaagaug

SEQ ID NO: 2248659 - RNA, 19 nt, Artificial Sequence
  Description of Artificial Sequence: Synthetic oligonucleotide
  Antisense strand to SEQ ID NO: 2248658
caucuucaaacacugccau

SEQ ID NO: 2248660 - RNA, 19 nt, Artificial Sequence
  Description of Artificial Sequence: Synthetic oligonucleotide
  Sense strand starting at position 2506 of SEQ ID NO: 1884212
ggcaguguuugaagaugug

SEQ ID NO: 2248661 - RNA, 19 nt, Artificial Sequence
  Description of Artificial Sequence: Synthetic oligonucleotide
  Antisense strand to SEQ ID NO: 2248660
cacaucuucaaacacugcc

SEQ ID NO: 2248662 - RNA, 19 nt, Artificial Sequence
  Description of Artificial Sequence: Synthetic oligonucleotide
  Sense strand starting at position 2509 of SEQ ID NO: 1884212
aguguuugaagauguguuu

SEQ ID NO: 2248663 - RNA, 19 nt, Artificial Sequence
  Description of Artificial Sequence: Synthetic oligonucleotide
  Antisense strand to SEQ ID NO: 2248662
aaacacaucuucaaacacu

SEQ ID NO: 2248664 - RNA, 19 nt, Artificial Sequence
  Description of Artificial Sequence: Synthetic oligonucleotide
  Sense strand starting at position 2512 of SEQ ID NO: 1884212
guuugaagauguguuugaa

SEQ ID NO: 2248665 - RNA, 19 nt, Artificial Sequence
  Description of Artificial Sequence: Synthetic oligonucleotide
  Antisense strand to SEQ ID NO: 2248664
uucaaacacaucuucaaac

SEQ ID NO: 2248666 - RNA, 19 nt, Artificial Sequence
  Description of Artificial Sequence: Synthetic oligonucleotide
  Sense strand starting at position 2581 of SEQ ID NO: 1884212
gucucauuaguuuagacac

SEQ ID NO: 2248667 - RNA, 19 nt, Artificial Sequence
  Description of Artificial Sequence: Synthetic oligonucleotide
  Antisense strand to SEQ ID NO: 2248666
gugucuaaacuaaugagac

SEQ ID NO: 2248668 - RNA, 19 nt, Artificial Sequence
  Description of Artificial Sequence: Synthetic oligonucleotide
  Sense strand starting at position 2642 of SEQ ID NO: 1884212
uggaucauuuaguguguaa

SEQ ID NO: 2248669 - RNA, 19 nt, Artificial Sequence
  Description of Artificial Sequence: Synthetic oligonucleotide
  Antisense strand to SEQ ID NO: 2248668
uuacacacuaaaugaucca

SEQ ID NO: 2248670 - RNA, 19 nt, Artificial Sequence
  Description of Artificial Sequence: Synthetic oligonucleotide
  Sense strand starting at position 2669 of SEQ ID NO: 1884212
guuaaagacuugcagaauu

SEQ ID NO: 2248671 - RNA, 19 nt, Artificial Sequence
  Description of Artificial Sequence: Synthetic oligonucleotide
  Antisense strand to SEQ ID NO: 2248670
aauucugcaagucuuuaac

SEQ ID NO: 2248672 - RNA, 19 nt, Artificial Sequence
  Description of Artificial Sequence: Synthetic oligonucleotide
  Sense strand starting at position 2726 of SEQ ID NO: 1884212
ggaguacuaacuuacgauu

SEQ ID NO: 2248673 - RNA, 19 nt, Artificial Sequence
  Description of Artificial Sequence: Synthetic oligonucleotide
  Antisense strand to SEQ ID NO: 2248672
aaucguaaguuaguacucc

SEQ ID NO: 2248674 - RNA, 19 nt, Artificial Sequence
  Description of Artificial Sequence: Synthetic oligonucleotide
  Sense strand starting at position 2749 of SEQ ID NO: 1884212
uaggucauguucuaaauug

SEQ ID NO: 2248675 - RNA, 19 nt, Artificial Sequence
  Description of Artificial Sequence: Synthetic oligonucleotide
  Antisense strand to SEQ ID NO: 2248674
caauuuagaacaugaccua

SEQ ID NO: 2248676 - RNA, 19 nt, Artificial Sequence
  Description of Artificial Sequence: Synthetic oligonucleotide
  Sense strand starting at position 2838 of SEQ ID NO: 1884212
guuauauuccucuguccuu

SEQ ID NO: 2248677 - RNA, 19 nt, Artificial Sequence
  Description of Artificial Sequence: Synthetic oligonucleotide
  Antisense strand to SEQ ID NO: 2248676
aaggacagaggaauauaac

SEQ ID NO: 2248678 - RNA, 19 nt, Artificial Sequence
  Description of Artificial Sequence: Synthetic oligonucleotide
  Sense strand starting at position 2904 of SEQ ID NO: 1884212
ccacgauaauauggaaagu

SEQ ID NO: 2248679 - RNA, 19 nt, Artificial Sequence
  Description of Artificial Sequence: Synthetic oligonucleotide
  Antisense strand to SEQ ID NO: 2248678
acuuuccauauuaucgugg

SEQ ID NO: 2248680 - RNA, 19 nt, Artificial Sequence
  Description of Artificial Sequence: Synthetic oligonucleotide
  Sense strand starting at position 3253 of SEQ ID NO: 1884212
guguuaguacauuguaaga

SEQ ID NO: 2248681 - RNA, 19 nt, Artificial Sequence
  Description of Artificial Sequence: Synthetic oligonucleotide
  Antisense strand to SEQ ID NO: 2248680
ucuuacaauguacuaacac

SEQ ID NO: 2248682 - RNA, 19 nt, Artificial Sequence
  Description of Artificial Sequence: Synthetic oligonucleotide
  Sense strand starting at position 3258 of SEQ ID NO: 1884212
aguacauuguaagaucaca

SEQ ID NO: 2248683 - RNA, 19 nt, Artificial Sequence
  Description of Artificial Sequence: Synthetic oligonucleotide
  Antisense strand to SEQ ID NO: 2248682
ugugaucuuacaauguacu

SEQ ID NO: 2248684 - RNA, 19 nt, Artificial Sequence
  Description of Artificial Sequence: Synthetic oligonucleotide
  Sense strand starting at position 3263 of SEQ ID NO: 1884212
auuguaagaucacagagua

SEQ ID NO: 2248685 - RNA, 19 nt, Artificial Sequence
  Description of Artificial Sequence: Synthetic oligonucleotide
  Antisense strand to SEQ ID NO: 2248684
uacucugugaucuuacaau

SEQ ID NO: 2248686 - RNA, 19 nt, Artificial Sequence
  Description of Artificial Sequence: Synthetic oligonucleotide
  Sense strand starting at position 3290 of SEQ ID NO: 1884212
ccaucaguuguagacuaga

SEQ ID NO: 2248687 - RNA, 19 nt, Artificial Sequence
  Description of Artificial Sequence: Synthetic oligonucleotide
  Antisense strand to SEQ ID NO: 2248686
ucuagucuacaacugaugg

SEQ ID NO: 2248688 - RNA, 19 nt, Artificial Sequence
  Description of Artificial Sequence: Synthetic oligonucleotide
  Sense strand starting at position 3392 of SEQ ID NO: 1884212
uuagaaugguauccugaaa

SEQ ID NO: 2248689 - RNA, 19 nt, Artificial Sequence
  Description of Artificial Sequence: Synthetic oligonucleotide
  Antisense strand to SEQ ID NO: 2248688
uuucaggauaccauucuaa

SEQ ID NO: 2248690 - RNA, 19 nt, Artificial Sequence
  Description of Artificial Sequence: Synthetic oligonucleotide
  Sense strand starting at position 3429 of SEQ ID NO: 1884212
uguagcauguccuuuagaa

SEQ ID NO: 2248691 - RNA, 19 nt, Artificial Sequence
  Description of Artificial Sequence: Synthetic oligonucleotide
  Antisense strand to SEQ ID NO: 2248690
uucuaaaggacaugcuaca

SEQ ID NO: 2248692 - RNA, 19 nt, Artificial Sequence
  Description of Artificial Sequence: Synthetic oligonucleotide
  Sense strand starting at position 3608 of SEQ ID NO: 1884212
gucagugggugucuguaau

SEQ ID NO: 2248693 - RNA, 19 nt, Artificial Sequence
  Description of Artificial Sequence: Synthetic oligonucleotide
  Antisense strand to SEQ ID NO: 2248692
auuacagacacccacugac

SEQ ID NO: 2248694 - RNA, 19 nt, Artificial Sequence
  Description of Artificial Sequence: Synthetic oligonucleotide
  Sense strand starting at position 3893 of SEQ ID NO: 1884212
ccagguguauugucaacaa

SEQ ID NO: 2248695 - RNA, 19 nt, Artificial Sequence
  Description of Artificial Sequence: Synthetic oligonucleotide
  Antisense strand to SEQ ID NO: 2248694
uuguugacaauacaccugg

SEQ ID NO: 2248696 - RNA, 19 nt, Artificial Sequence
  Description of Artificial Sequence: Synthetic oligonucleotide
  Sense strand starting at position 3897 of SEQ ID NO: 1884212
guguauugucaacaagcag

SEQ ID NO: 2248697 - RNA, 19 nt, Artificial Sequence
  Description of Artificial Sequence: Synthetic oligonucleotide
  Antisense strand to SEQ ID NO: 2248696
cugcuuguugacaauacac

SEQ ID NO: 2248698 - RNA, 19 nt, Artificial Sequence
  Description of Artificial Sequence: Synthetic oligonucleotide
  Sense strand starting at position 3944 of SEQ ID NO: 1884212
gcaagaggucucuacagug

SEQ ID NO: 2248699 - RNA, 19 nt, Artificial Sequence
  Description of Artificial Sequence: Synthetic oligonucleotide
  Antisense strand to SEQ ID NO: 2248698
cacuguagagaccucuugc

SEQ ID NO: 2248700 - RNA, 19 nt, Artificial Sequence
  Description of Artificial Sequence: Synthetic oligonucleotide
  Sense strand starting at position 3952 of SEQ ID NO: 1884212
ucucuacagugggcuuaau

SEQ ID NO: 2248701 - RNA, 19 nt, Artificial Sequence
  Description of Artificial Sequence: Synthetic oligonucleotide
  Antisense strand to SEQ ID NO: 2248700
auuaagcccacuguagaga

SEQ ID NO: 2248702 - RNA, 19 nt, Artificial Sequence
  Description of Artificial Sequence: Synthetic oligonucleotide
  Sense strand starting at position 3963 of SEQ ID NO: 1884212
ggcuuaauguauuccauaa

SEQ ID NO: 2248703 - RNA, 19 nt, Artificial Sequence
  Description of Artificial Sequence: Synthetic oligonucleotide
  Antisense strand to SEQ ID NO: 2248702
uuauggaauacauuaagcc

SEQ ID NO: 2248704 - RNA, 19 nt, Artificial Sequence
  Description of Artificial Sequence: Synthetic oligonucleotide
  Sense strand starting at position 3981 of SEQ ID NO: 1884212
aaccaugcuguagauagau

SEQ ID NO: 2248705 - RNA, 19 nt, Artificial Sequence
  Description of Artificial Sequence: Synthetic oligonucleotide
  Antisense strand to SEQ ID NO: 2248704
aucuaucuacagcaugguu

SEQ ID NO: 2248706 - RNA, 19 nt, Artificial Sequence
  Description of Artificial Sequence: Synthetic oligonucleotide
  Sense strand starting at position 6 of SEQ ID NO: 1884213
cgaguaauuaaggguaguu

SEQ ID NO: 2248707 - RNA, 19 nt, Artificial Sequence
  Description of Artificial Sequence: Synthetic oligonucleotide
  Antisense strand to SEQ ID NO: 2248706
aacuacccuuaauuacucg

SEQ ID NO: 2248708 - RNA, 19 nt, Artificial Sequence
  Description of Artificial Sequence: Synthetic oligonucleotide
  Sense strand starting at position 11 of SEQ ID NO: 1884213
aauuaaggguaguuauguu

SEQ ID NO: 2248709 - RNA, 19 nt, Artificial Sequence
  Description of Artificial Sequence: Synthetic oligonucleotide
  Antisense strand to SEQ ID NO: 2248708
aacauaacuacccuuaauu

SEQ ID NO: 2248710 - RNA, 19 nt, Artificial Sequence
  Description of Artificial Sequence: Synthetic oligonucleotide
  Sense strand starting at position 84 of SEQ ID NO: 1884213
ucaguauucuaagauauug

SEQ ID NO: 2248711 - RNA, 19 nt, Artificial Sequence
  Description of Artificial Sequence: Synthetic oligonucleotide
  Antisense strand to SEQ ID NO: 2248710
caauaucuuagaauacuga

SEQ ID NO: 2248712 - RNA, 19 nt, Artificial Sequence
  Description of Artificial Sequence: Synthetic oligonucleotide
  Sense strand starting at position 118 of SEQ ID NO: 1884213
uugguuguuacugagcaau

SEQ ID NO: 2248713 - RNA, 19 nt, Artificial Sequence
  Description of Artificial Sequence: Synthetic oligonucleotide
  Antisense strand to SEQ ID NO: 2248712
auugcucaguaacaaccaa

SEQ ID NO: 2248714 - RNA, 19 nt, Artificial Sequence
  Description of Artificial Sequence: Synthetic oligonucleotide
  Sense strand starting at position 120 of SEQ ID NO: 1884213
gguuguuacugagcaauua

SEQ ID NO: 2248715 - RNA, 19 nt, Artificial Sequence
  Description of Artificial Sequence: Synthetic oligonucleotide
  Antisense strand to SEQ ID NO: 2248714
uaauugcucaguaacaacc

SEQ ID NO: 2248716 - RNA, 19 nt, Artificial Sequence
  Description of Artificial Sequence: Synthetic oligonucleotide
  Sense strand starting at position 121 of SEQ ID NO: 1884213
guuguuacugagcaauuac

SEQ ID NO: 2248717 - RNA, 19 nt, Artificial Sequence
  Description of Artificial Sequence: Synthetic oligonucleotide
  Antisense strand to SEQ ID NO: 2248716
guaauugcucaguaacaac

SEQ ID NO: 2248718 - RNA, 19 nt, Artificial Sequence
  Description of Artificial Sequence: Synthetic oligonucleotide
  Sense strand starting at position 131 of SEQ ID NO: 1884213
agcaauuacugccuagacu

SEQ ID NO: 2248719 - RNA, 19 nt, Artificial Sequence
  Description of Artificial Sequence: Synthetic oligonucleotide
  Antisense strand to SEQ ID NO: 2248718
agucuaggcaguaauugcu

SEQ ID NO: 2248720 - RNA, 19 nt, Artificial Sequence
  Description of Artificial Sequence: Synthetic oligonucleotide
  Sense strand starting at position 132 of SEQ ID NO: 1884213
gcaauuacugccuagacuc

SEQ ID NO: 2248721 - RNA, 19 nt, Artificial Sequence
  Description of Artificial Sequence: Synthetic oligonucleotide
  Antisense strand to SEQ ID NO: 2248720
gagucuaggcaguaauugc

SEQ ID NO: 2248722 - RNA, 19 nt, Artificial Sequence
  Description of Artificial Sequence: Synthetic oligonucleotide
  Sense strand starting at position 185 of SEQ ID NO: 1884213
ugauaucacuugccuagau

SEQ ID NO: 2248723 - RNA, 19 nt, Artificial Sequence
  Description of Artificial Sequence: Synthetic oligonucleotide
  Antisense strand to SEQ ID NO: 2248722
aucuaggcaagugauauca

SEQ ID NO: 2248724 - RNA, 19 nt, Artificial Sequence
  Description of Artificial Sequence: Synthetic oligonucleotide
  Sense strand starting at position 197 of SEQ ID NO: 1884213
ccuagauaugguugugauu

SEQ ID NO: 2248725 - RNA, 19 nt, Artificial Sequence
  Description of Artificial Sequence: Synthetic oligonucleotide
  Antisense strand to SEQ ID NO: 2248724
aaucacaaccauaucuagg

SEQ ID NO: 2248726 - RNA, 19 nt, Artificial Sequence
  Description of Artificial Sequence: Synthetic oligonucleotide
  Sense strand starting at position 199 of SEQ ID NO: 1884213
uagauaugguugugauuuc

SEQ ID NO: 2248727 - RNA, 19 nt, Artificial Sequence
  Description of Artificial Sequence: Synthetic oligonucleotide
  Antisense strand to SEQ ID NO: 2248726
gaaaucacaaccauaucua

SEQ ID NO: 2248728 - RNA, 19 nt, Artificial Sequence
  Description of Artificial Sequence: Synthetic oligonucleotide
  Sense strand starting at position 220 of SEQ ID NO: 1884213
auggcuacuuacucaugau

SEQ ID NO: 2248729 - RNA, 19 nt, Artificial Sequence
  Description of Artificial Sequence: Synthetic oligonucleotide
  Antisense strand to SEQ ID NO: 2248728
aucaugaguaaguagccau

SEQ ID NO: 2248730 - RNA, 19 nt, Artificial Sequence
  Description of Artificial Sequence: Synthetic oligonucleotide
  Sense strand starting at position 255 of SEQ ID NO: 1884213
cuguuaguuugagugacau

SEQ ID NO: 2248731 - RNA, 19 nt, Artificial Sequence
  Description of Artificial Sequence: Synthetic oligonucleotide
  Antisense strand to SEQ ID NO: 2248730
augucacucaaacuaacag

SEQ ID NO: 2248732 - RNA, 19 nt, Artificial Sequence
  Description of Artificial Sequence: Synthetic oligonucleotide
  Sense strand starting at position 281 of SEQ ID NO: 1884213
ugaugauaguguuuaugga

SEQ ID NO: 2248733 - RNA, 19 nt, Artificial Sequence
  Description of Artificial Sequence: Synthetic oligonucleotide
  Antisense strand to SEQ ID NO: 2248732
uccauaaacacuaucauca

SEQ ID NO: 2248734 - RNA, 19 nt, Artificial Sequence
  Description of Artificial Sequence: Synthetic oligonucleotide
  Sense strand starting at position 337 of SEQ ID NO: 1884213
ucuaguaacuagucuuuaa

SEQ ID NO: 2248735 - RNA, 19 nt, Artificial Sequence
  Description of Artificial Sequence: Synthetic oligonucleotide
  Antisense strand to SEQ ID NO: 2248734
uuaaagacuaguuacuaga

SEQ ID NO: 2248736 - RNA, 19 nt, Artificial Sequence
  Description of Artificial Sequence: Synthetic oligonucleotide
  Sense strand starting at position 341 of SEQ ID NO: 1884213
guaacuagucuuuaaucca

SEQ ID NO: 2248737 - RNA, 19 nt, Artificial Sequence
  Description of Artificial Sequence: Synthetic oligonucleotide
  Antisense strand to SEQ ID NO: 2248736
uggauuaaagacuaguuac

SEQ ID NO: 2248738 - RNA, 19 nt, Artificial Sequence
  Description of Artificial Sequence: Synthetic oligonucleotide
  Sense strand starting at position 410 of SEQ ID NO: 1884213
gcugaagcugaugauuaua

SEQ ID NO: 2248739 - RNA, 19 nt, Artificial Sequence
  Description of Artificial Sequence: Synthetic oligonucleotide
  Antisense strand to SEQ ID NO: 2248738
uauaaucaucagcuucagc

SEQ ID NO: 2248740 - RNA, 19 nt, Artificial Sequence
  Description of Artificial Sequence: Synthetic oligonucleotide
  Sense strand starting at position 412 of SEQ ID NO: 1884213
ugaagcugaugauuauaua

SEQ ID NO: 2248741 - RNA, 19 nt, Artificial Sequence
  Description of Artificial Sequence: Synthetic oligonucleotide
  Antisense strand to SEQ ID NO: 2248740
uauauaaucaucagcuuca

SEQ ID NO: 2248742 - RNA, 19 nt, Artificial Sequence
  Description of Artificial Sequence: Synthetic oligonucleotide
  Sense strand starting at position 415 of SEQ ID NO: 1884213
agcugaugauuauauaauc

SEQ ID NO: 2248743 - RNA, 19 nt, Artificial Sequence
  Description of Artificial Sequence: Synthetic oligonucleotide
  Antisense strand to SEQ ID NO: 2248742
gauuauauaaucaucagcu

SEQ ID NO: 2248744 - RNA, 19 nt, Artificial Sequence
  Description of Artificial Sequence: Synthetic oligonucleotide
  Sense strand starting at position 444 of SEQ ID NO: 1884213
uuuacuugugcaggagaag

SEQ ID NO: 2248745 - RNA, 19 nt, Artificial Sequence
  Description of Artificial Sequence: Synthetic oligonucleotide
  Antisense strand to SEQ ID NO: 2248744
cuucuccugcacaaguaaa

SEQ ID NO: 2248746 - RNA, 19 nt, Artificial Sequence
  Description of Artificial Sequence: Synthetic oligonucleotide
  Sense strand starting at position 459 of SEQ ID NO: 1884213
gaagaucauuggugauaug

SEQ ID NO: 2248747 - RNA, 19 nt, Artificial Sequence
  Description of Artificial Sequence: Synthetic oligonucleotide
  Antisense strand to SEQ ID NO: 2248746
cauaucaccaaugaucuuc

SEQ ID NO: 2248748 - RNA, 19 nt, Artificial Sequence
  Description of Artificial Sequence: Synthetic oligonucleotide
  Sense strand starting at position 470 of SEQ ID NO: 1884213
gugauaugcuaccaaugac

SEQ ID NO: 2248749 - RNA, 19 nt, Artificial Sequence
  Description of Artificial Sequence: Synthetic oligonucleotide
  Antisense strand to SEQ ID NO: 2248748
gucauugguagcauaucac

SEQ ID NO: 2248750 - RNA, 19 nt, Artificial Sequence
  Description of Artificial Sequence: Synthetic oligonucleotide
  Sense strand starting at position 488 of SEQ ID NO: 1884213
cuuuguguucuuuaaauac

SEQ ID NO: 2248751 - RNA, 19 nt, Artificial Sequence
  Description of Artificial Sequence: Synthetic oligonucleotide
  Antisense strand to SEQ ID NO: 2248750
guauuuaaagaacacaaag

SEQ ID NO: 2248752 - RNA, 19 nt, Artificial Sequence
  Description of Artificial Sequence: Synthetic oligonucleotide
  Sense strand starting at position 497 of SEQ ID NO: 1884213
cuuuaaauacguuguguuc

SEQ ID NO: 2248753 - RNA, 19 nt, Artificial Sequence
  Description of Artificial Sequence: Synthetic oligonucleotide
  Antisense strand to SEQ ID NO: 2248752
gaacacaacguauuuaaag

SEQ ID NO: 2248754 - RNA, 19 nt, Artificial Sequence
  Description of Artificial Sequence: Synthetic oligonucleotide
  Sense strand starting at position 639 of SEQ ID NO: 1884213
gccuguuauuaucuuaucu

SEQ ID NO: 2248755 - RNA, 19 nt, Artificial Sequence
  Description of Artificial Sequence: Synthetic oligonucleotide
  Antisense strand to SEQ ID NO: 2248754
agauaagauaauaacaggc

SEQ ID NO: 2248756 - RNA, 19 nt, Artificial Sequence
  Description of Artificial Sequence: Synthetic oligonucleotide
  Sense strand starting at position 2000 of SEQ ID NO: 1884213
acuguuguguucuuuaaau

SEQ ID NO: 2248757 - RNA, 19 nt, Artificial Sequence
  Description of Artificial Sequence: Synthetic oligonucleotide
  Antisense strand to SEQ ID NO: 2248756
auuuaaagaacacaacagu

SEQ ID NO: 2248758 - RNA, 19 nt, Artificial Sequence
  Description of Artificial Sequence: Synthetic oligonucleotide
  Sense strand starting at position 2050 of SEQ ID NO: 1884213
ucuggauuauguuuaaagu

SEQ ID NO: 2248759 - RNA, 19 nt, Artificial Sequence
  Description of Artificial Sequence: Synthetic oligonucleotide
  Antisense strand to SEQ ID NO: 2248758
acuuuaaacauaauccaga

SEQ ID NO: 2248760 - RNA, 19 nt, Artificial Sequence
  Description of Artificial Sequence: Synthetic oligonucleotide
  Sense strand starting at position 2051 of SEQ ID NO: 1884213
cuggauuauguuuaaagua

SEQ ID NO: 2248761 - RNA, 19 nt, Artificial Sequence
  Description of Artificial Sequence: Synthetic oligonucleotide
  Antisense strand to SEQ ID NO: 2248760
uacuuuaaacauaauccag

SEQ ID NO: 2248762 - RNA, 19 nt, Artificial Sequence
  Description of Artificial Sequence: Synthetic oligonucleotide
  Sense strand starting at position 2060 of SEQ ID NO: 1884213
guuuaaaguauauguagca

SEQ ID NO: 2248763 - RNA, 19 nt, Artificial Sequence
  Description of Artificial Sequence: Synthetic oligonucleotide
  Antisense strand to SEQ ID NO: 2248762
ugcuacauauacuuuaaac

SEQ ID NO: 2248764 - RNA, 19 nt, Artificial Sequence
  Description of Artificial Sequence: Synthetic oligonucleotide
  Sense strand starting at position 2682 of SEQ ID NO: 1884213
aguguuuggucucuccaga

SEQ ID NO: 2248765 - RNA, 19 nt, Artificial Sequence
  Description of Artificial Sequence: Synthetic oligonucleotide
  Antisense strand to SEQ ID NO: 2248764
ucuggagagaccaaacacu

SEQ ID NO: 2248766 - RNA, 19 nt, Artificial Sequence
  Description of Artificial Sequence: Synthetic oligonucleotide
  Sense strand starting at position 2764 of SEQ ID NO: 1884213
aggagccacugcuuuaaau

SEQ ID NO: 2248767 - RNA, 19 nt, Artificial Sequence
  Description of Artificial Sequence: Synthetic oligonucleotide
  Antisense strand to SEQ ID NO: 2248766
auuuaaagcaguggcuccu

SEQ ID NO: 2248768 - RNA, 19 nt, Artificial Sequence
  Description of Artificial Sequence: Synthetic oligonucleotide
  Sense strand starting at position 3120 of SEQ ID NO: 1884213
uuugauaaaucggugaauc

SEQ ID NO: 2248769 - RNA, 19 nt, Artificial Sequence
  Description of Artificial Sequence: Synthetic oligonucleotide
  Antisense strand to SEQ ID NO: 2248768
gauucaccgauuuaucaaa

SEQ ID NO: 2248770 - RNA, 19 nt, Artificial Sequence
  Description of Artificial Sequence: Synthetic oligonucleotide
  Sense strand starting at position 3121 of SEQ ID NO: 1884213
uugauaaaucggugaaucu

SEQ ID NO: 2248771 - RNA, 19 nt, Artificial Sequence
  Description of Artificial Sequence: Synthetic oligonucleotide
  Antisense strand to SEQ ID NO: 2248770
agauucaccgauuuaucaa

SEQ ID NO: 2248772 - RNA, 19 nt, Artificial Sequence
  Description of Artificial Sequence: Synthetic oligonucleotide
  Sense strand starting at position 3122 of SEQ ID NO: 1884213
ugauaaaucggugaaucuc

SEQ ID NO: 2248773 - RNA, 19 nt, Artificial Sequence
  Description of Artificial Sequence: Synthetic oligonucleotide
  Antisense strand to SEQ ID NO: 2248772
gagauucaccgauuuauca

SEQ ID NO: 2248774 - RNA, 19 nt, Artificial Sequence
  Description of Artificial Sequence: Synthetic oligonucleotide
  Sense strand starting at position 3153 of SEQ ID NO: 1884213
acauuaucaucucuuggga

SEQ ID NO: 2248775 - RNA, 19 nt, Artificial Sequence
  Description of Artificial Sequence: Synthetic oligonucleotide
  Antisense strand to SEQ ID NO: 2248774
ucccaagagaugauaaugu

SEQ ID NO: 2248776 - RNA, 19 nt, Artificial Sequence
  Description of Artificial Sequence: Synthetic oligonucleotide
  Sense strand starting at position 3155 of SEQ ID NO: 1884213
auuaucaucucuugggaag

SEQ ID NO: 2248777 - RNA, 19 nt, Artificial Sequence
  Description of Artificial Sequence: Synthetic oligonucleotide
  Antisense strand to SEQ ID NO: 2248776
cuucccaagagaugauaau

SEQ ID NO: 2248778 - RNA, 19 nt, Artificial Sequence
  Description of Artificial Sequence: Synthetic oligonucleotide
  Sense strand starting at position 3156 of SEQ ID NO: 1884213
uuaucaucucuugggaagu

SEQ ID NO: 2248779 - RNA, 19 nt, Artificial Sequence
  Description of Artificial Sequence: Synthetic oligonucleotide
  Antisense strand to SEQ ID NO: 2248778
acuucccaagagaugauaa

SEQ ID NO: 2248780 - RNA, 19 nt, Artificial Sequence
  Description of Artificial Sequence: Synthetic oligonucleotide
  Sense strand starting at position 3158 of SEQ ID NO: 1884213
aucaucucuugggaaguau

SEQ ID NO: 2248781 - RNA, 19 nt, Artificial Sequence
  Description of Artificial Sequence: Synthetic oligonucleotide
  Antisense strand to SEQ ID NO: 2248780
auacuucccaagagaugau

SEQ ID NO: 2248782 - RNA, 19 nt, Artificial Sequence
  Description of Artificial Sequence: Synthetic oligonucleotide
  Sense strand starting at position 3548 of SEQ ID NO: 1884213
ggugcaaucuuggcuuguu

SEQ ID NO: 2248783 - RNA, 19 nt, Artificial Sequence
  Description of Artificial Sequence: Synthetic oligonucleotide
  Antisense strand to SEQ ID NO: 2248782
aacaagccaagauugcacc

SEQ ID NO: 2248784 - RNA, 19 nt, Artificial Sequence
  Description of Artificial Sequence: Synthetic oligonucleotide
  Sense strand starting at position 3837 of SEQ ID NO: 1884213
acugaaauaucugaaggug

SEQ ID NO: 2248785 - RNA, 19 nt, Artificial Sequence
  Description of Artificial Sequence: Synthetic oligonucleotide
  Antisense strand to SEQ ID NO: 2248784
caccuucagauauuucagu

SEQ ID NO: 2248786 - RNA, 19 nt, Artificial Sequence
  Description of Artificial Sequence: Synthetic oligonucleotide
  Sense strand starting at position 205 of SEQ ID NO: 1884214
gguauagugaacuauguga

SEQ ID NO: 2248787 - RNA, 19 nt, Artificial Sequence
  Description of Artificial Sequence: Synthetic oligonucleotide
  Antisense strand to SEQ ID NO: 2248786
ucacauaguucacuauacc

SEQ ID NO: 2248788 - RNA, 19 nt, Artificial Sequence
  Description of Artificial Sequence: Synthetic oligonucleotide
  Sense strand starting at position 207 of SEQ ID NO: 1884214
uauagugaacuaugugaca

SEQ ID NO: 2248789 - RNA, 19 nt, Artificial Sequence
  Description of Artificial Sequence: Synthetic oligonucleotide
  Antisense strand to SEQ ID NO: 2248788
ugucacauaguucacuaua

SEQ ID NO: 2248790 - RNA, 19 nt, Artificial Sequence
  Description of Artificial Sequence: Synthetic oligonucleotide
  Sense strand starting at position 276 of SEQ ID NO: 1884214
aguugucucuagccuugaa

SEQ ID NO: 2248791 - RNA, 19 nt, Artificial Sequence
  Description of Artificial Sequence: Synthetic oligonucleotide
  Antisense strand to SEQ ID NO: 2248790
uucaaggcuagagacaacu

SEQ ID NO: 2248792 - RNA, 19 nt, Artificial Sequence
  Description of Artificial Sequence: Synthetic oligonucleotide
  Sense strand starting at position 280 of SEQ ID NO: 1884214
gucucuagccuugaaggga

SEQ ID NO: 2248793 - RNA, 19 nt, Artificial Sequence
  Description of Artificial Sequence: Synthetic oligonucleotide
  Antisense strand to SEQ ID NO: 2248792
ucccuucaaggcuagagac

SEQ ID NO: 2248794 - RNA, 19 nt, Artificial Sequence
  Description of Artificial Sequence: Synthetic oligonucleotide
  Sense strand starting at position 330 of SEQ ID NO: 1884214
uguucuagucuacaauuga

SEQ ID NO: 2248795 - RNA, 19 nt, Artificial Sequence
  Description of Artificial Sequence: Synthetic oligonucleotide
  Antisense strand to SEQ ID NO: 2248794
ucaauuguagacuagaaca

SEQ ID NO: 2248796 - RNA, 19 nt, Artificial Sequence
  Description of Artificial Sequence: Synthetic oligonucleotide
  Sense strand starting at position 346 of SEQ ID NO: 1884214
ugagaacucugauauacuc

SEQ ID NO: 2248797 - RNA, 19 nt, Artificial Sequence
  Description of Artificial Sequence: Synthetic oligonucleotide
  Antisense strand to SEQ ID NO: 2248796
gaguauaucagaguucuca

SEQ ID NO: 2248798 - RNA, 19 nt, Artificial Sequence
  Description of Artificial Sequence: Synthetic oligonucleotide
  Sense strand starting at position 353 of SEQ ID NO: 1884214
ucugauauacucugugauc

SEQ ID NO: 2248799 - RNA, 19 nt, Artificial Sequence
  Description of Artificial Sequence: Synthetic oligonucleotide
  Antisense strand to SEQ ID NO: 2248798
gaucacagaguauaucaga

SEQ ID NO: 2248800 - RNA, 19 nt, Artificial Sequence
  Description of Artificial Sequence: Synthetic oligonucleotide
  Sense strand starting at position 2092 of SEQ ID NO: 1884214
ucuugaguuuccuuugagu

SEQ ID NO: 2248801 - RNA, 19 nt, Artificial Sequence
  Description of Artificial Sequence: Synthetic oligonucleotide
  Antisense strand to SEQ ID NO: 2248800
acucaaaggaaacucaaga

SEQ ID NO: 2248802 - RNA, 19 nt, Artificial Sequence
  Description of Artificial Sequence: Synthetic oligonucleotide
  Sense strand starting at position 2094 of SEQ ID NO: 1884214
uugaguuuccuuugaguga

SEQ ID NO: 2248803 - RNA, 19 nt, Artificial Sequence
  Description of Artificial Sequence: Synthetic oligonucleotide
  Antisense strand to SEQ ID NO: 2248802
ucacucaaaggaaacucaa

SEQ ID NO: 2248804 - RNA, 19 nt, Artificial Sequence
  Description of Artificial Sequence: Synthetic oligonucleotide
  Sense strand starting at position 2098 of SEQ ID NO: 1884214
guuuccuuugagugaucug

SEQ ID NO: 2248805 - RNA, 19 nt, Artificial Sequence
  Description of Artificial Sequence: Synthetic oligonucleotide
  Antisense strand to SEQ ID NO: 2248804
cagaucacucaaaggaaac

SEQ ID NO: 2248806 - RNA, 19 nt, Artificial Sequence
  Description of Artificial Sequence: Synthetic oligonucleotide
  Sense strand starting at position 2101 of SEQ ID NO: 1884214
uccuuugagugaucuguau

SEQ ID NO: 2248807 - RNA, 19 nt, Artificial Sequence
  Description of Artificial Sequence: Synthetic oligonucleotide
  Antisense strand to SEQ ID NO: 2248806
auacagaucacucaaagga

SEQ ID NO: 2248808 - RNA, 19 nt, Artificial Sequence
  Description of Artificial Sequence: Synthetic oligonucleotide
  Sense strand starting at position 2105 of SEQ ID NO: 1884214
uugagugaucuguauacau

SEQ ID NO: 2248809 - RNA, 19 nt, Artificial Sequence
  Description of Artificial Sequence: Synthetic oligonucleotide
  Antisense strand to SEQ ID NO: 2248808
auguauacagaucacucaa

SEQ ID NO: 2248810 - RNA, 19 nt, Artificial Sequence
  Description of Artificial Sequence: Synthetic oligonucleotide
  Sense strand starting at position 2107 of SEQ ID NO: 1884214
gagugaucuguauacaucu

SEQ ID NO: 2248811 - RNA, 19 nt, Artificial Sequence
  Description of Artificial Sequence: Synthetic oligonucleotide
  Antisense strand to SEQ ID NO: 2248810
agauguauacagaucacuc

SEQ ID NO: 2248812 - RNA, 19 nt, Artificial Sequence
  Description of Artificial Sequence: Synthetic oligonucleotide
  Sense strand starting at position 2365 of SEQ ID NO: 1884214
gaugccaugcuuuguuuaa

SEQ ID NO: 2248813 - RNA, 19 nt, Artificial Sequence
  Description of Artificial Sequence: Synthetic oligonucleotide
  Antisense strand to SEQ ID NO: 2248812
uuaaacaaagcauggcauc

SEQ ID NO: 2248814 - RNA, 19 nt, Artificial Sequence
  Description of Artificial Sequence: Synthetic oligonucleotide
  Sense strand starting at position 2386 of SEQ ID NO: 1884214
ccaguugguuuaccuauua

SEQ ID NO: 2248815 - RNA, 19 nt, Artificial Sequence
  Description of Artificial Sequence: Synthetic oligonucleotide
  Antisense strand to SEQ ID NO: 2248814
uaauagguaaaccaacugg

SEQ ID NO: 2248816 - RNA, 19 nt, Artificial Sequence
  Description of Artificial Sequence: Synthetic oligonucleotide
  Sense strand starting at position 2499 of SEQ ID NO: 1884214
caggaauggcaguguuuga

SEQ ID NO: 2248817 - RNA, 19 nt, Artificial Sequence
  Description of Artificial Sequence: Synthetic oligonucleotide
  Antisense strand to SEQ ID NO: 2248816
ucaaacacugccauuccug

SEQ ID NO: 2248818 - RNA, 19 nt, Artificial Sequence
  Description of Artificial Sequence: Synthetic oligonucleotide
  Sense strand starting at position 2504 of SEQ ID NO: 1884214
auggcaguguuugaagaug

SEQ ID NO: 2248819 - RNA, 19 nt, Artificial Sequence
  Description of Artificial Sequence: Synthetic oligonucleotide
  Antisense strand to SEQ ID NO: 2248818
caucuucaaacacugccau

SEQ ID NO: 2248820 - RNA, 19 nt, Artificial Sequence
  Description of Artificial Sequence: Synthetic oligonucleotide
  Sense strand starting at position 2506 of SEQ ID NO: 1884214
ggcaguguuugaagaugug

SEQ ID NO: 2248821 - RNA, 19 nt, Artificial Sequence
  Description of Artificial Sequence: Synthetic oligonucleotide
  Antisense strand to SEQ ID NO: 2248820
cacaucuucaaacacugcc

SEQ ID NO: 2248822 - RNA, 19 nt, Artificial Sequence
  Description of Artificial Sequence: Synthetic oligonucleotide
  Sense strand starting at position 2509 of SEQ ID NO: 1884214
aguguuugaagauguguuu

SEQ ID NO: 2248823 - RNA, 19 nt, Artificial Sequence
  Description of Artificial Sequence: Synthetic oligonucleotide
  Antisense strand to SEQ ID NO: 2248822
aaacacaucuucaaacacu

SEQ ID NO: 2248824 - RNA, 19 nt, Artificial Sequence
  Description of Artificial Sequence: Synthetic oligonucleotide
  Sense strand starting at position 2512 of SEQ ID NO: 1884214
guuugaagauguguuugaa

SEQ ID NO: 2248825 - RNA, 19 nt, Artificial Sequence
  Description of Artificial Sequence: Synthetic oligonucleotide
  Antisense strand to SEQ ID NO: 2248824
uucaaacacaucuucaaac

SEQ ID NO: 2248826 - RNA, 19 nt, Artificial Sequence
  Description of Artificial Sequence: Synthetic oligonucleotide
  Sense strand starting at position 2581 of SEQ ID NO: 1884214
gucucauuaguuuagacac

SEQ ID NO: 2248827 - RNA, 19 nt, Artificial Sequence
  Description of Artificial Sequence: Synthetic oligonucleotide
  Antisense strand to SEQ ID NO: 2248826
gugucuaaacuaaugagac

SEQ ID NO: 2248828 - RNA, 19 nt, Artificial Sequence
  Description of Artificial Sequence: Synthetic oligonucleotide
  Sense strand starting at position 2642 of SEQ ID NO: 1884214
uggaucauuuaguguguaa

SEQ ID NO: 2248829 - RNA, 19 nt, Artificial Sequence
  Description of Artificial Sequence: Synthetic oligonucleotide
  Antisense strand to SEQ ID NO: 2248828
uuacacacuaaaugaucca

SEQ ID NO: 2248830 - RNA, 19 nt, Artificial Sequence
  Description of Artificial Sequence: Synthetic oligonucleotide
  Sense strand starting at position 2669 of SEQ ID NO: 1884214
guuaaagacuugcagaauu

SEQ ID NO: 2248831 - RNA, 19 nt, Artificial Sequence
  Description of Artificial Sequence: Synthetic oligonucleotide
  Antisense strand to SEQ ID NO: 2248830
aauucugcaagucuuuaac

SEQ ID NO: 2248832 - RNA, 19 nt, Artificial Sequence
  Description of Artificial Sequence: Synthetic oligonucleotide
  Sense strand starting at position 2726 of SEQ ID NO: 1884214
ggaguacuaacuuacgauu

SEQ ID NO: 2248833 - RNA, 19 nt, Artificial Sequence
  Description of Artificial Sequence: Synthetic oligonucleotide
  Antisense strand to SEQ ID NO: 2248832
aaucguaaguuaguacucc

SEQ ID NO: 2248834 - RNA, 19 nt, Artificial Sequence
  Description of Artificial Sequence: Synthetic oligonucleotide
  Sense strand starting at position 2749 of SEQ ID NO: 1884214
uaggucauguucuaaauug

SEQ ID NO: 2248835 - RNA, 19 nt, Artificial Sequence
  Description of Artificial Sequence: Synthetic oligonucleotide
  Antisense strand to SEQ ID NO: 2248834
caauuuagaacaugaccua

SEQ ID NO: 2248836 - RNA, 19 nt, Artificial Sequence
  Description of Artificial Sequence: Synthetic oligonucleotide
  Sense strand starting at position 2838 of SEQ ID NO: 1884214
guuauauuccucuguccuu

SEQ ID NO: 2248837 - RNA, 19 nt, Artificial Sequence
  Description of Artificial Sequence: Synthetic oligonucleotide
  Antisense strand to SEQ ID NO: 2248836
aaggacagaggaauauaac

SEQ ID NO: 2248838 - RNA, 19 nt, Artificial Sequence
  Description of Artificial Sequence: Synthetic oligonucleotide
  Sense strand starting at position 2904 of SEQ ID NO: 1884214
ccacgauaauauggaaagu

SEQ ID NO: 2248839 - RNA, 19 nt, Artificial Sequence
  Description of Artificial Sequence: Synthetic oligonucleotide
  Antisense strand to SEQ ID NO: 2248838
acuuuccauauuaucgugg

SEQ ID NO: 2248840 - RNA, 19 nt, Artificial Sequence
  Description of Artificial Sequence: Synthetic oligonucleotide
  Sense strand starting at position 3253 of SEQ ID NO: 1884214
guguuaguacauuguaaga

SEQ ID NO: 2248841 - RNA, 19 nt, Artificial Sequence
  Description of Artificial Sequence: Synthetic oligonucleotide
  Antisense strand to SEQ ID NO: 2248840
ucuuacaauguacuaacac

SEQ ID NO: 2248842 - RNA, 19 nt, Artificial Sequence
  Description of Artificial Sequence: Synthetic oligonucleotide
  Sense strand starting at position 3258 of SEQ ID NO: 1884214
aguacauuguaagaucaca

SEQ ID NO: 2248843 - RNA, 19 nt, Artificial Sequence
  Description of Artificial Sequence: Synthetic oligonucleotide
  Antisense strand to SEQ ID NO: 2248842
ugugaucuuacaauguacu

SEQ ID NO: 2248844 - RNA, 19 nt, Artificial Sequence
  Description of Artificial Sequence: Synthetic oligonucleotide
  Sense strand starting at position 3263 of SEQ ID NO: 1884214
auuguaagaucacagagua

SEQ ID NO: 2248845 - RNA, 19 nt, Artificial Sequence
  Description of Artificial Sequence: Synthetic oligonucleotide
  Antisense strand to SEQ ID NO: 2248844
uacucugugaucuuacaau

SEQ ID NO: 2248846 - RNA, 19 nt, Artificial Sequence
  Description of Artificial Sequence: Synthetic oligonucleotide
  Sense strand starting at position 3290 of SEQ ID NO: 1884214
ccaucaguuguagacuaga

SEQ ID NO: 2248847 - RNA, 19 nt, Artificial Sequence
  Description of Artificial Sequence: Synthetic oligonucleotide
  Antisense strand to SEQ ID NO: 2248846
ucuagucuacaacugaugg

SEQ ID NO: 2248848 - RNA, 19 nt, Artificial Sequence
  Description of Artificial Sequence: Synthetic oligonucleotide
  Sense strand starting at position 3392 of SEQ ID NO: 1884214
uuagaaugguauccugaaa

SEQ ID NO: 2248849 - RNA, 19 nt, Artificial Sequence
  Description of Artificial Sequence: Synthetic oligonucleotide
  Antisense strand to SEQ ID NO: 2248848
uuucaggauaccauucuaa

SEQ ID NO: 2248850 - RNA, 19 nt, Artificial Sequence
  Description of Artificial Sequence: Synthetic oligonucleotide
  Sense strand starting at position 3429 of SEQ ID NO: 1884214
uguagcauguccuuuagaa

SEQ ID NO: 2248851 - RNA, 19 nt, Artificial Sequence
  Description of Artificial Sequence: Synthetic oligonucleotide
  Antisense strand to SEQ ID NO: 2248850
uucuaaaggacaugcuaca

SEQ ID NO: 2248852 - RNA, 19 nt, Artificial Sequence
  Description of Artificial Sequence: Synthetic oligonucleotide
  Sense strand starting at position 3608 of SEQ ID NO: 1884214
gucagugggugucuguaau

SEQ ID NO: 2248853 - RNA, 19 nt, Artificial Sequence
  Description of Artificial Sequence: Synthetic oligonucleotide
  Antisense strand to SEQ ID NO: 2248852
auuacagacacccacugac

SEQ ID NO: 2248854 - RNA, 19 nt, Artificial Sequence
  Description of Artificial Sequence: Synthetic oligonucleotide
  Sense strand starting at position 3893 of SEQ ID NO: 1884214
ccagguguauugucaacaa

SEQ ID NO: 2248855 - RNA, 19 nt, Artificial Sequence
  Description of Artificial Sequence: Synthetic oligonucleotide
  Antisense strand to SEQ ID NO: 2248854
uuguugacaauacaccugg

SEQ ID NO: 2248856 - RNA, 19 nt, Artificial Sequence
  Description of Artificial Sequence: Synthetic oligonucleotide
  Sense strand starting at position 3897 of SEQ ID NO: 1884214
guguauugucaacaagcag

SEQ ID NO: 2248857 - RNA, 19 nt, Artificial Sequence
  Description of Artificial Sequence: Synthetic oligonucleotide
  Antisense strand to SEQ ID NO: 2248856
cugcuuguugacaauacac

SEQ ID NO: 2248858 - RNA, 19 nt, Artificial Sequence
  Description of Artificial Sequence: Synthetic oligonucleotide
  Sense strand starting at position 3944 of SEQ ID NO: 1884214
gcaagaggucucuacagug

SEQ ID NO: 2248859 - RNA, 19 nt, Artificial Sequence
  Description of Artificial Sequence: Synthetic oligonucleotide
  Antisense strand to SEQ ID NO: 2248858
cacuguagagaccucuugc

SEQ ID NO: 2248860 - RNA, 19 nt, Artificial Sequence
  Description of Artificial Sequence: Synthetic oligonucleotide
  Sense strand starting at position 3952 of SEQ ID NO: 1884214
ucucuacagugggcuuaau

SEQ ID NO: 2248861 - RNA, 19 nt, Artificial Sequence
  Description of Artificial Sequence: Synthetic oligonucleotide
  Antisense strand to SEQ ID NO: 2248860
auuaagcccacuguagaga

SEQ ID NO: 2248862 - RNA, 19 nt, Artificial Sequence
  Description of Artificial Sequence: Synthetic oligonucleotide
  Sense strand starting at position 3963 of SEQ ID NO: 1884214
ggcuuaauguauuccauaa

SEQ ID NO: 2248863 - RNA, 19 nt, Artificial Sequence
  Description of Artificial Sequence: Synthetic oligonucleotide
  Antisense strand to SEQ ID NO: 2248862
uuauggaauacauuaagcc

SEQ ID NO: 2248864 - RNA, 19 nt, Artificial Sequence
  Description of Artificial Sequence: Synthetic oligonucleotide
  Sense strand starting at position 3981 of SEQ ID NO: 1884214
aaccaugcuguagauagau

SEQ ID NO: 2248865 - RNA, 19 nt, Artificial Sequence
  Description of Artificial Sequence: Synthetic oligonucleotide
  Antisense strand to SEQ ID NO: 2248864
aucuaucuacagcaugguu

SEQ ID NO: 2248866 - RNA, 19 nt, Artificial Sequence
  Description of Artificial Sequence: Synthetic oligonucleotide
  Sense strand starting at position 205 of SEQ ID NO: 1884215
gguauagugaacuauguga

SEQ ID NO: 2248867 - RNA, 19 nt, Artificial Sequence
  Description of Artificial Sequence: Synthetic oligonucleotide
  Antisense strand to SEQ ID NO: 2248866
ucacauaguucacuauacc

SEQ ID NO: 2248868 - RNA, 19 nt, Artificial Sequence
  Description of Artificial Sequence: Synthetic oligonucleotide
  Sense strand starting at position 207 of SEQ ID NO: 1884215
uauagugaacuaugugaca

SEQ ID NO: 2248869 - RNA, 19 nt, Artificial Sequence
  Description of Artificial Sequence: Synthetic oligonucleotide
  Antisense strand to SEQ ID NO: 2248868
ugucacauaguucacuaua

SEQ ID NO: 2248870 - RNA, 19 nt, Artificial Sequence
  Description of Artificial Sequence: Synthetic oligonucleotide
  Sense strand starting at position 276 of SEQ ID NO: 1884215
aguugucucuagccuugaa

SEQ ID NO: 2248871 - RNA, 19 nt, Artificial Sequence
  Description of Artificial Sequence: Synthetic oligonucleotide
  Antisense strand to SEQ ID NO: 2248870
uucaaggcuagagacaacu

SEQ ID NO: 2248872 - RNA, 19 nt, Artificial Sequence
  Description of Artificial Sequence: Synthetic oligonucleotide
  Sense strand starting at position 280 of SEQ ID NO: 1884215
gucucuagccuugaaggga

SEQ ID NO: 2248873 - RNA, 19 nt, Artificial Sequence
  Description of Artificial Sequence: Synthetic oligonucleotide
  Antisense strand to SEQ ID NO: 2248872
ucccuucaaggcuagagac

SEQ ID NO: 2248874 - RNA, 19 nt, Artificial Sequence
  Description of Artificial Sequence: Synthetic oligonucleotide
  Sense strand starting at position 330 of SEQ ID NO: 1884215
uguucuagucuacaauuga

SEQ ID NO: 2248875 - RNA, 19 nt, Artificial Sequence
  Description of Artificial Sequence: Synthetic oligonucleotide
  Antisense strand to SEQ ID NO: 2248874
ucaauuguagacuagaaca

SEQ ID NO: 2248876 - RNA, 19 nt, Artificial Sequence
  Description of Artificial Sequence: Synthetic oligonucleotide
  Sense strand starting at position 346 of SEQ ID NO: 1884215
ugagaacucugauauacuc

SEQ ID NO: 2248877 - RNA, 19 nt, Artificial Sequence
  Description of Artificial Sequence: Synthetic oligonucleotide
  Antisense strand to SEQ ID NO: 2248876
gaguauaucagaguucuca

SEQ ID NO: 2248878 - RNA, 19 nt, Artificial Sequence
  Description of Artificial Sequence: Synthetic oligonucleotide
  Sense strand starting at position 353 of SEQ ID NO: 1884215
ucugauauacucugugauc

SEQ ID NO: 2248879 - RNA, 19 nt, Artificial Sequence
  Description of Artificial Sequence: Synthetic oligonucleotide
  Antisense strand to SEQ ID NO: 2248878
gaucacagaguauaucaga

SEQ ID NO: 2248880 - RNA, 19 nt, Artificial Sequence
  Description of Artificial Sequence: Synthetic oligonucleotide
  Sense strand starting at position 2092 of SEQ ID NO: 1884215
ucuugaguuuccuuugagu

SEQ ID NO: 2248881 - RNA, 19 nt, Artificial Sequence
  Description of Artificial Sequence: Synthetic oligonucleotide
  Antisense strand to SEQ ID NO: 2248880
acucaaaggaaacucaaga

SEQ ID NO: 2248882 - RNA, 19 nt, Artificial Sequence
  Description of Artificial Sequence: Synthetic oligonucleotide
  Sense strand starting at position 2094 of SEQ ID NO: 1884215
uugaguuuccuuugaguga

SEQ ID NO: 2248883 - RNA, 19 nt, Artificial Sequence
  Description of Artificial Sequence: Synthetic oligonucleotide
  Antisense strand to SEQ ID NO: 2248882
ucacucaaaggaaacucaa

SEQ ID NO: 2248884 - RNA, 19 nt, Artificial Sequence
  Description of Artificial Sequence: Synthetic oligonucleotide
  Sense strand starting at position 2098 of SEQ ID NO: 1884215
guuuccuuugagugaucug

SEQ ID NO: 2248885 - RNA, 19 nt, Artificial Sequence
  Description of Artificial Sequence: Synthetic oligonucleotide
  Antisense strand to SEQ ID NO: 2248884
cagaucacucaaaggaaac

SEQ ID NO: 2248886 - RNA, 19 nt, Artificial Sequence
  Description of Artificial Sequence: Synthetic oligonucleotide
  Sense strand starting at position 2101 of SEQ ID NO: 1884215
uccuuugagugaucuguau

SEQ ID NO: 2248887 - RNA, 19 nt, Artificial Sequence
  Description of Artificial Sequence: Synthetic oligonucleotide
  Antisense strand to SEQ ID NO: 2248886
auacagaucacucaaagga

SEQ ID NO: 2248888 - RNA, 19 nt, Artificial Sequence
  Description of Artificial Sequence: Synthetic oligonucleotide
  Sense strand starting at position 2105 of SEQ ID NO: 1884215
uugagugaucuguauacau

SEQ ID NO: 2248889 - RNA, 19 nt, Artificial Sequence
  Description of Artificial Sequence: Synthetic oligonucleotide
  Antisense strand to SEQ ID NO: 2248888
auguauacagaucacucaa

SEQ ID NO: 2248890 - RNA, 19 nt, Artificial Sequence
  Description of Artificial Sequence: Synthetic oligonucleotide
  Sense strand starting at position 2107 of SEQ ID NO: 1884215
gagugaucuguauacaucu

SEQ ID NO: 2248891 - RNA, 19 nt, Artificial Sequence
  Description of Artificial Sequence: Synthetic oligonucleotide
  Antisense strand to SEQ ID NO: 2248890
agauguauacagaucacuc

SEQ ID NO: 2248892 - RNA, 19 nt, Artificial Sequence
  Description of Artificial Sequence: Synthetic oligonucleotide
  Sense strand starting at position 2365 of SEQ ID NO: 1884215
gaugccaugcuuuguuuaa

SEQ ID NO: 2248893 - RNA, 19 nt, Artificial Sequence
  Description of Artificial Sequence: Synthetic oligonucleotide
  Antisense strand to SEQ ID NO: 2248892
uuaaacaaagcauggcauc

SEQ ID NO: 2248894 - RNA, 19 nt, Artificial Sequence
  Description of Artificial Sequence: Synthetic oligonucleotide
  Sense strand starting at position 2386 of SEQ ID NO: 1884215
ccaguugguuuaccuauua

SEQ ID NO: 2248895 - RNA, 19 nt, Artificial Sequence
  Description of Artificial Sequence: Synthetic oligonucleotide
  Antisense strand to SEQ ID NO: 2248894
uaauagguaaaccaacugg

SEQ ID NO: 2248896 - RNA, 19 nt, Artificial Sequence
  Description of Artificial Sequence: Synthetic oligonucleotide
  Sense strand starting at position 2499 of SEQ ID NO: 1884215
caggaauggcaguguuuga

SEQ ID NO: 2248897 - RNA, 19 nt, Artificial Sequence
  Description of Artificial Sequence: Synthetic oligonucleotide
  Antisense strand to SEQ ID NO: 2248896
ucaaacacugccauuccug

SEQ ID NO: 2248898 - RNA, 19 nt, Artificial Sequence
  Description of Artificial Sequence: Synthetic oligonucleotide
  Sense strand starting at position 2504 of SEQ ID NO: 1884215
auggcaguguuugaagaug

SEQ ID NO: 2248899 - RNA, 19 nt, Artificial Sequence
  Description of Artificial Sequence: Synthetic oligonucleotide
  Antisense strand to SEQ ID NO: 2248898
caucuucaaacacugccau

SEQ ID NO: 2248900 - RNA, 19 nt, Artificial Sequence
  Description of Artificial Sequence: Synthetic oligonucleotide
  Sense strand starting at position 2506 of SEQ ID NO: 1884215
ggcaguguuugaagaugug

SEQ ID NO: 2248901 - RNA, 19 nt, Artificial Sequence
  Description of Artificial Sequence: Synthetic oligonucleotide
  Antisense strand to SEQ ID NO: 2248900
cacaucuucaaacacugcc

SEQ ID NO: 2248902 - RNA, 19 nt, Artificial Sequence
  Description of Artificial Sequence: Synthetic oligonucleotide
  Sense strand starting at position 2509 of SEQ ID NO: 1884215
aguguuugaagauguguuu

SEQ ID NO: 2248903 - RNA, 19 nt, Artificial Sequence
  Description of Artificial Sequence: Synthetic oligonucleotide
  Antisense strand to SEQ ID NO: 2248902
aaacacaucuucaaacacu

SEQ ID NO: 2248904 - RNA, 19 nt, Artificial Sequence
  Description of Artificial Sequence: Synthetic oligonucleotide
  Sense strand starting at position 2512 of SEQ ID NO: 1884215
guuugaagauguguuugaa

SEQ ID NO: 2248905 - RNA, 19 nt, Artificial Sequence
  Description of Artificial Sequence: Synthetic oligonucleotide
  Antisense strand to SEQ ID NO: 2248904
uucaaacacaucuucaaac

SEQ ID NO: 2248906 - RNA, 19 nt, Artificial Sequence
  Description of Artificial Sequence: Synthetic oligonucleotide
  Sense strand starting at position 2581 of SEQ ID NO: 1884215
gucucauuaguuuagacac

SEQ ID NO: 2248907 - RNA, 19 nt, Artificial Sequence
  Description of Artificial Sequence: Synthetic oligonucleotide
  Antisense strand to SEQ ID NO: 2248906
gugucuaaacuaaugagac

SEQ ID NO: 2248908 - RNA, 19 nt, Artificial Sequence
  Description of Artificial Sequence: Synthetic oligonucleotide
  Sense strand starting at position 2642 of SEQ ID NO: 1884215
uggaucauuuaguguguaa

SEQ ID NO: 2248909 - RNA, 19 nt, Artificial Sequence
  Description of Artificial Sequence: Synthetic oligonucleotide
  Antisense strand to SEQ ID NO: 2248908
uuacacacuaaaugaucca

SEQ ID NO: 2248910 - RNA, 19 nt, Artificial Sequence
  Description of Artificial Sequence: Synthetic oligonucleotide
  Sense strand starting at position 2669 of SEQ ID NO: 1884215
guuaaagacuugcagaauu

SEQ ID NO: 2248911 - RNA, 19 nt, Artificial Sequence
  Description of Artificial Sequence: Synthetic oligonucleotide
  Antisense strand to SEQ ID NO: 2248910
aauucugcaagucuuuaac

SEQ ID NO: 2248912 - RNA, 19 nt, Artificial Sequence
  Description of Artificial Sequence: Synthetic oligonucleotide
  Sense strand starting at position 2726 of SEQ ID NO: 1884215
ggaguacuaacuuacgauu

SEQ ID NO: 2248913 - RNA, 19 nt, Artificial Sequence
  Description of Artificial Sequence: Synthetic oligonucleotide
  Antisense strand to SEQ ID NO: 2248912
aaucguaaguuaguacucc

SEQ ID NO: 2248914 - RNA, 19 nt, Artificial Sequence
  Description of Artificial Sequence: Synthetic oligonucleotide
  Sense strand starting at position 2749 of SEQ ID NO: 1884215
uaggucauguucuaaauug

SEQ ID NO: 2248915 - RNA, 19 nt, Artificial Sequence
  Description of Artificial Sequence: Synthetic oligonucleotide
  Antisense strand to SEQ ID NO: 2248914
caauuuagaacaugaccua

SEQ ID NO: 2248916 - RNA, 19 nt, Artificial Sequence
  Description of Artificial Sequence: Synthetic oligonucleotide
  Sense strand starting at position 2838 of SEQ ID NO: 1884215
guuauauuccucuguccuu

SEQ ID NO: 2248917 - RNA, 19 nt, Artificial Sequence
  Description of Artificial Sequence: Synthetic oligonucleotide
  Antisense strand to SEQ ID NO: 2248916
aaggacagaggaauauaac

SEQ ID NO: 2248918 - RNA, 19 nt, Artificial Sequence
  Description of Artificial Sequence: Synthetic oligonucleotide
  Sense strand starting at position 2904 of SEQ ID NO: 1884215
ccacgauaauauggaaagu

SEQ ID NO: 2248919 - RNA, 19 nt, Artificial Sequence
  Description of Artificial Sequence: Synthetic oligonucleotide
  Antisense strand to SEQ ID NO: 2248918
acuuuccauauuaucgugg

SEQ ID NO: 2248920 - RNA, 19 nt, Artificial Sequence
  Description of Artificial Sequence: Synthetic oligonucleotide
  Sense strand starting at position 3253 of SEQ ID NO: 1884215
guguuaguacauuguaaga

SEQ ID NO: 2248921 - RNA, 19 nt, Artificial Sequence
  Description of Artificial Sequence: Synthetic oligonucleotide
  Antisense strand to SEQ ID NO: 2248920
ucuuacaauguacuaacac

SEQ ID NO: 2248922 - RNA, 19 nt, Artificial Sequence
  Description of Artificial Sequence: Synthetic oligonucleotide
  Sense strand starting at position 3258 of SEQ ID NO: 1884215
aguacauuguaagaucaca

SEQ ID NO: 2248923 - RNA, 19 nt, Artificial Sequence
  Description of Artificial Sequence: Synthetic oligonucleotide
  Antisense strand to SEQ ID NO: 2248922
ugugaucuuacaauguacu

SEQ ID NO: 2248924 - RNA, 19 nt, Artificial Sequence
  Description of Artificial Sequence: Synthetic oligonucleotide
  Sense strand starting at position 3263 of SEQ ID NO: 1884215
auuguaagaucacagagua

SEQ ID NO: 2248925 - RNA, 19 nt, Artificial Sequence
  Description of Artificial Sequence: Synthetic oligonucleotide
  Antisense strand to SEQ ID NO: 2248924
uacucugugaucuuacaau

SEQ ID NO: 2248926 - RNA, 19 nt, Artificial Sequence
  Description of Artificial Sequence: Synthetic oligonucleotide
  Sense strand starting at position 3290 of SEQ ID NO: 1884215
ccaucaguuguagacuaga

SEQ ID NO: 2248927 - RNA, 19 nt, Artificial Sequence
  Description of Artificial Sequence: Synthetic oligonucleotide
  Antisense strand to SEQ ID NO: 2248926
ucuagucuacaacugaugg

SEQ ID NO: 2248928 - RNA, 19 nt, Artificial Sequence
  Description of Artificial Sequence: Synthetic oligonucleotide
  Sense strand starting at position 3392 of SEQ ID NO: 1884215
uuagaaugguauccugaaa

SEQ ID NO: 2248929 - RNA, 19 nt, Artificial Sequence
  Description of Artificial Sequence: Synthetic oligonucleotide
  Antisense strand to SEQ ID NO: 2248928
uuucaggauaccauucuaa

SEQ ID NO: 2248930 - RNA, 19 nt, Artificial Sequence
  Description of Artificial Sequence: Synthetic oligonucleotide
  Sense strand starting at position 3429 of SEQ ID NO: 1884215
uguagcauguccuuuagaa

SEQ ID NO: 2248931 - RNA, 19 nt, Artificial Sequence
  Description of Artificial Sequence: Synthetic oligonucleotide
  Antisense strand to SEQ ID NO: 2248930
uucuaaaggacaugcuaca

SEQ ID NO: 2248932 - RNA, 19 nt, Artificial Sequence
  Description of Artificial Sequence: Synthetic oligonucleotide
  Sense strand starting at position 3608 of SEQ ID NO: 1884215
gucagugggugucuguaau

SEQ ID NO: 2248933 - RNA, 19 nt, Artificial Sequence
  Description of Artificial Sequence: Synthetic oligonucleotide
  Antisense strand to SEQ ID NO: 2248932
auuacagacacccacugac

SEQ ID NO: 2248934 - RNA, 19 nt, Artificial Sequence
  Description of Artificial Sequence: Synthetic oligonucleotide
  Sense strand starting at position 3893 of SEQ ID NO: 1884215
ccagguguauugucaacaa

SEQ ID NO: 2248935 - RNA, 19 nt, Artificial Sequence
  Description of Artificial Sequence: Synthetic oligonucleotide
  Antisense strand to SEQ ID NO: 2248934
uuguugacaauacaccugg

SEQ ID NO: 2248936 - RNA, 19 nt, Artificial Sequence
  Description of Artificial Sequence: Synthetic oligonucleotide
  Sense strand starting at position 3897 of SEQ ID NO: 1884215
guguauugucaacaagcag

SEQ ID NO: 2248937 - RNA, 19 nt, Artificial Sequence
  Description of Artificial Sequence: Synthetic oligonucleotide
  Antisense strand to SEQ ID NO: 2248936
cugcuuguugacaauacac

SEQ ID NO: 2248938 - RNA, 19 nt, Artificial Sequence
  Description of Artificial Sequence: Synthetic oligonucleotide
  Sense strand starting at position 3944 of SEQ ID NO: 1884215
gcaagaggucucuacagug

SEQ ID NO: 2248939 - RNA, 19 nt, Artificial Sequence
  Description of Artificial Sequence: Synthetic oligonucleotide
  Antisense strand to SEQ ID NO: 2248938
cacuguagagaccucuugc

SEQ ID NO: 2248940 - RNA, 19 nt, Artificial Sequence
  Description of Artificial Sequence: Synthetic oligonucleotide
  Sense strand starting at position 3952 of SEQ ID NO: 1884215
ucucuacagugggcuuaau

SEQ ID NO: 2248941 - RNA, 19 nt, Artificial Sequence
  Description of Artificial Sequence: Synthetic oligonucleotide
  Antisense strand to SEQ ID NO: 2248940
auuaagcccacuguagaga

SEQ ID NO: 2248942 - RNA, 19 nt, Artificial Sequence
  Description of Artificial Sequence: Synthetic oligonucleotide
  Sense strand starting at position 3963 of SEQ ID NO: 1884215
ggcuuaauguauuccauaa

SEQ ID NO: 2248943 - RNA, 19 nt, Artificial Sequence
  Description of Artificial Sequence: Synthetic oligonucleotide
  Antisense strand to SEQ ID NO: 2248942
uuauggaauacauuaagcc

SEQ ID NO: 2248944 - RNA, 19 nt, Artificial Sequence
  Description of Artificial Sequence: Synthetic oligonucleotide
  Sense strand starting at position 3981 of SEQ ID NO: 1884215
aaccaugcuguagauagau

SEQ ID NO: 2248945 - RNA, 19 nt, Artificial Sequence
  Description of Artificial Sequence: Synthetic oligonucleotide
  Antisense strand to SEQ ID NO: 2248944
aucuaucuacagcaugguu

SEQ ID NO: 2248946 - RNA, 19 nt, Artificial Sequence
  Description of Artificial Sequence: Synthetic oligonucleotide
  Sense strand starting at position 205 of SEQ ID NO: 1884216
gguauagugaacuauguga

SEQ ID NO: 2248947 - RNA, 19 nt, Artificial Sequence
  Description of Artificial Sequence: Synthetic oligonucleotide
  Antisense strand to SEQ ID NO: 2248946
ucacauaguucacuauacc

SEQ ID NO: 2248948 - RNA, 19 nt, Artificial Sequence
  Description of Artificial Sequence: Synthetic oligonucleotide
  Sense strand starting at position 207 of SEQ ID NO: 1884216
uauagugaacuaugugaca

SEQ ID NO: 2248949 - RNA, 19 nt, Artificial Sequence
  Description of Artificial Sequence: Synthetic oligonucleotide
  Antisense strand to SEQ ID NO: 2248948
ugucacauaguucacuaua

SEQ ID NO: 2248950 - RNA, 19 nt, Artificial Sequence
  Description of Artificial Sequence: Synthetic oligonucleotide
  Sense strand starting at position 276 of SEQ ID NO: 1884216
aguugucucuagccuugaa

SEQ ID NO: 2248951 - RNA, 19 nt, Artificial Sequence
  Description of Artificial Sequence: Synthetic oligonucleotide
  Antisense strand to SEQ ID NO: 2248950
uucaaggcuagagacaacu

SEQ ID NO: 2248952 - RNA, 19 nt, Artificial Sequence
  Description of Artificial Sequence: Synthetic oligonucleotide
  Sense strand starting at position 280 of SEQ ID NO: 1884216
gucucuagccuugaaggga

SEQ ID NO: 2248953 - RNA, 19 nt, Artificial Sequence
  Description of Artificial Sequence: Synthetic oligonucleotide
  Antisense strand to SEQ ID NO: 2248952
ucccuucaaggcuagagac

SEQ ID NO: 2248954 - RNA, 19 nt, Artificial Sequence
  Description of Artificial Sequence: Synthetic oligonucleotide
  Sense strand starting at position 330 of SEQ ID NO: 1884216
uguucuagucuacaauuga

SEQ ID NO: 2248955 - RNA, 19 nt, Artificial Sequence
  Description of Artificial Sequence: Synthetic oligonucleotide
  Antisense strand to SEQ ID NO: 2248954
ucaauuguagacuagaaca

SEQ ID NO: 2248956 - RNA, 19 nt, Artificial Sequence
  Description of Artificial Sequence: Synthetic oligonucleotide
  Sense strand starting at position 346 of SEQ ID NO: 1884216
ugagaacucugauauacuc

SEQ ID NO: 2248957 - RNA, 19 nt, Artificial Sequence
  Description of Artificial Sequence: Synthetic oligonucleotide
  Antisense strand to SEQ ID NO: 2248956
gaguauaucagaguucuca

SEQ ID NO: 2248958 - RNA, 19 nt, Artificial Sequence
  Description of Artificial Sequence: Synthetic oligonucleotide
  Sense strand starting at position 353 of SEQ ID NO: 1884216
ucugauauacucugugauc

SEQ ID NO: 2248959 - RNA, 19 nt, Artificial Sequence
  Description of Artificial Sequence: Synthetic oligonucleotide
  Antisense strand to SEQ ID NO: 2248958
gaucacagaguauaucaga

SEQ ID NO: 2248960 - RNA, 19 nt, Artificial Sequence
  Description of Artificial Sequence: Synthetic oligonucleotide
  Sense strand starting at position 2092 of SEQ ID NO: 1884216
ucuugaguuuccuuugagu

SEQ ID NO: 2248961 - RNA, 19 nt, Artificial Sequence
  Description of Artificial Sequence: Synthetic oligonucleotide
  Antisense strand to SEQ ID NO: 2248960
acucaaaggaaacucaaga

SEQ ID NO: 2248962 - RNA, 19 nt, Artificial Sequence
  Description of Artificial Sequence: Synthetic oligonucleotide
  Sense strand starting at position 2094 of SEQ ID NO: 1884216
uugaguuuccuuugaguga

SEQ ID NO: 2248963 - RNA, 19 nt, Artificial Sequence
  Description of Artificial Sequence: Synthetic oligonucleotide
  Antisense strand to SEQ ID NO: 2248962
ucacucaaaggaaacucaa

SEQ ID NO: 2248964 - RNA, 19 nt, Artificial Sequence
  Description of Artificial Sequence: Synthetic oligonucleotide
  Sense strand starting at position 2098 of SEQ ID NO: 1884216
guuuccuuugagugaucug

SEQ ID NO: 2248965 - RNA, 19 nt, Artificial Sequence
  Description of Artificial Sequence: Synthetic oligonucleotide
  Antisense strand to SEQ ID NO: 2248964
cagaucacucaaaggaaac

SEQ ID NO: 2248966 - RNA, 19 nt, Artificial Sequence
  Description of Artificial Sequence: Synthetic oligonucleotide
  Sense strand starting at position 2101 of SEQ ID NO: 1884216
uccuuugagugaucuguau

SEQ ID NO: 2248967 - RNA, 19 nt, Artificial Sequence
  Description of Artificial Sequence: Synthetic oligonucleotide
  Antisense strand to SEQ ID NO: 2248966
auacagaucacucaaagga

SEQ ID NO: 2248968 - RNA, 19 nt, Artificial Sequence
  Description of Artificial Sequence: Synthetic oligonucleotide
  Sense strand starting at position 2105 of SEQ ID NO: 1884216
uugagugaucuguauacau

SEQ ID NO: 2248969 - RNA, 19 nt, Artificial Sequence
  Description of Artificial Sequence: Synthetic oligonucleotide
  Antisense strand to SEQ ID NO: 2248968
auguauacagaucacucaa

SEQ ID NO: 2248970 - RNA, 19 nt, Artificial Sequence
  Description of Artificial Sequence: Synthetic oligonucleotide
  Sense strand starting at position 2107 of SEQ ID NO: 1884216
gagugaucuguauacaucu

SEQ ID NO: 2248971 - RNA, 19 nt, Artificial Sequence
  Description of Artificial Sequence: Synthetic oligonucleotide
  Antisense strand to SEQ ID NO: 2248970
agauguauacagaucacuc

SEQ ID NO: 2248972 - RNA, 19 nt, Artificial Sequence
  Description of Artificial Sequence: Synthetic oligonucleotide
  Sense strand starting at position 2365 of SEQ ID NO: 1884216
gaugccaugcuuuguuuaa

SEQ ID NO: 2248973 - RNA, 19 nt, Artificial Sequence
  Description of Artificial Sequence: Synthetic oligonucleotide
  Antisense strand to SEQ ID NO: 2248972
uuaaacaaagcauggcauc

SEQ ID NO: 2248974 - RNA, 19 nt, Artificial Sequence
  Description of Artificial Sequence: Synthetic oligonucleotide
  Sense strand starting at position 2386 of SEQ ID NO: 1884216
ccaguugguuuaccuauua

SEQ ID NO: 2248975 - RNA, 19 nt, Artificial Sequence
  Description of Artificial Sequence: Synthetic oligonucleotide
  Antisense strand to SEQ ID NO: 2248974
uaauagguaaaccaacugg

SEQ ID NO: 2248976 - RNA, 19 nt, Artificial Sequence
  Description of Artificial Sequence: Synthetic oligonucleotide
  Sense strand starting at position 2499 of SEQ ID NO: 1884216
caggaauggcaguguuuga

SEQ ID NO: 2248977 - RNA, 19 nt, Artificial Sequence
  Description of Artificial Sequence: Synthetic oligonucleotide
  Antisense strand to SEQ ID NO: 2248976
ucaaacacugccauuccug

SEQ ID NO: 2248978 - RNA, 19 nt, Artificial Sequence
  Description of Artificial Sequence: Synthetic oligonucleotide
  Sense strand starting at position 2504 of SEQ ID NO: 1884216
auggcaguguuugaagaug

SEQ ID NO: 2248979 - RNA, 19 nt, Artificial Sequence
  Description of Artificial Sequence: Synthetic oligonucleotide
  Antisense strand to SEQ ID NO: 2248978
caucuucaaacacugccau

SEQ ID NO: 2248980 - RNA, 19 nt, Artificial Sequence
  Description of Artificial Sequence: Synthetic oligonucleotide
  Sense strand starting at position 2506 of SEQ ID NO: 1884216
ggcaguguuugaagaugug

SEQ ID NO: 2248981 - RNA, 19 nt, Artificial Sequence
  Description of Artificial Sequence: Synthetic oligonucleotide
  Antisense strand to SEQ ID NO: 2248980
cacaucuucaaacacugcc

SEQ ID NO: 2248982 - RNA, 19 nt, Artificial Sequence
  Description of Artificial Sequence: Synthetic oligonucleotide
  Sense strand starting at position 2509 of SEQ ID NO: 1884216
aguguuugaagauguguuu

SEQ ID NO: 2248983 - RNA, 19 nt, Artificial Sequence
  Description of Artificial Sequence: Synthetic oligonucleotide
  Antisense strand to SEQ ID NO: 2248982
aaacacaucuucaaacacu

SEQ ID NO: 2248984 - RNA, 19 nt, Artificial Sequence
  Description of Artificial Sequence: Synthetic oligonucleotide
  Sense strand starting at position 2512 of SEQ ID NO: 1884216
guuugaagauguguuugaa

SEQ ID NO: 2248985 - RNA, 19 nt, Artificial Sequence
  Description of Artificial Sequence: Synthetic oligonucleotide
  Antisense strand to SEQ ID NO: 2248984
uucaaacacaucuucaaac

SEQ ID NO: 2248986 - RNA, 19 nt, Artificial Sequence
  Description of Artificial Sequence: Synthetic oligonucleotide
  Sense strand starting at position 2581 of SEQ ID NO: 1884216
gucucauuaguuuagacac

SEQ ID NO: 2248987 - RNA, 19 nt, Artificial Sequence
  Description of Artificial Sequence: Synthetic oligonucleotide
  Antisense strand to SEQ ID NO: 2248986
gugucuaaacuaaugagac

SEQ ID NO: 2248988 - RNA, 19 nt, Artificial Sequence
  Description of Artificial Sequence: Synthetic oligonucleotide
  Sense strand starting at position 2642 of SEQ ID NO: 1884216
uggaucauuuaguguguaa

SEQ ID NO: 2248989 - RNA, 19 nt, Artificial Sequence
  Description of Artificial Sequence: Synthetic oligonucleotide
  Antisense strand to SEQ ID NO: 2248988
uuacacacuaaaugaucca

SEQ ID NO: 2248990 - RNA, 19 nt, Artificial Sequence
  Description of Artificial Sequence: Synthetic oligonucleotide
  Sense strand starting at position 2669 of SEQ ID NO: 1884216
guuaaagacuugcagaauu

SEQ ID NO: 2248991 - RNA, 19 nt, Artificial Sequence
  Description of Artificial Sequence: Synthetic oligonucleotide
  Antisense strand to SEQ ID NO: 2248990
aauucugcaagucuuuaac

SEQ ID NO: 2248992 - RNA, 19 nt, Artificial Sequence
  Description of Artificial Sequence: Synthetic oligonucleotide
  Sense strand starting at position 2726 of SEQ ID NO: 1884216
ggaguacuaacuuacgauu

SEQ ID NO: 2248993 - RNA, 19 nt, Artificial Sequence
  Description of Artificial Sequence: Synthetic oligonucleotide
  Antisense strand to SEQ ID NO: 2248992
aaucguaaguuaguacucc

SEQ ID NO: 2248994 - RNA, 19 nt, Artificial Sequence
  Description of Artificial Sequence: Synthetic oligonucleotide
  Sense strand starting at position 2749 of SEQ ID NO: 1884216
uaggucauguucuaaauug

SEQ ID NO: 2248995 - RNA, 19 nt, Artificial Sequence
  Description of Artificial Sequence: Synthetic oligonucleotide
  Antisense strand to SEQ ID NO: 2248994
caauuuagaacaugaccua

SEQ ID NO: 2248996 - RNA, 19 nt, Artificial Sequence
  Description of Artificial Sequence: Synthetic oligonucleotide
  Sense strand starting at position 2838 of SEQ ID NO: 1884216
guuauauuccucuguccuu

SEQ ID NO: 2248997 - RNA, 19 nt, Artificial Sequence
  Description of Artificial Sequence: Synthetic oligonucleotide
  Antisense strand to SEQ ID NO: 2248996
aaggacagaggaauauaac

SEQ ID NO: 2248998 - RNA, 19 nt, Artificial Sequence
  Description of Artificial Sequence: Synthetic oligonucleotide
  Sense strand starting at position 2904 of SEQ ID NO: 1884216
ccacgauaauauggaaagu

SEQ ID NO: 2248999 - RNA, 19 nt, Artificial Sequence
  Description of Artificial Sequence: Synthetic oligonucleotide
  Antisense strand to SEQ ID NO: 2248998
acuuuccauauuaucgugg

SEQ ID NO: 2249000 - RNA, 19 nt, Artificial Sequence
  Description of Artificial Sequence: Synthetic oligonucleotide
  Sense strand starting at position 3253 of SEQ ID NO: 1884216
guguuaguacauuguaaga

SEQ ID NO: 2249001 - RNA, 19 nt, Artificial Sequence
  Description of Artificial Sequence: Synthetic oligonucleotide
  Antisense strand to SEQ ID NO: 2249000
ucuuacaauguacuaacac

SEQ ID NO: 2249002 - RNA, 19 nt, Artificial Sequence
  Description of Artificial Sequence: Synthetic oligonucleotide
  Sense strand starting at position 3258 of SEQ ID NO: 1884216
aguacauuguaagaucaca

SEQ ID NO: 2249003 - RNA, 19 nt, Artificial Sequence
  Description of Artificial Sequence: Synthetic oligonucleotide
  Antisense strand to SEQ ID NO: 2249002
ugugaucuuacaauguacu

SEQ ID NO: 2249004 - RNA, 19 nt, Artificial Sequence
  Description of Artificial Sequence: Synthetic oligonucleotide
  Sense strand starting at position 3263 of SEQ ID NO: 1884216
auuguaagaucacagagua

SEQ ID NO: 2249005 - RNA, 19 nt, Artificial Sequence
  Description of Artificial Sequence: Synthetic oligonucleotide
  Antisense strand to SEQ ID NO: 2249004
uacucugugaucuuacaau

SEQ ID NO: 2249006 - RNA, 19 nt, Artificial Sequence
  Description of Artificial Sequence: Synthetic oligonucleotide
  Sense strand starting at position 3290 of SEQ ID NO: 1884216
ccaucaguuguagacuaga

SEQ ID NO: 2249007 - RNA, 19 nt, Artificial Sequence
  Description of Artificial Sequence: Synthetic oligonucleotide
  Antisense strand to SEQ ID NO: 2249006
ucuagucuacaacugaugg

SEQ ID NO: 2249008 - RNA, 19 nt, Artificial Sequence
  Description of Artificial Sequence: Synthetic oligonucleotide
  Sense strand starting at position 3392 of SEQ ID NO: 1884216
uuagaaugguauccugaaa

SEQ ID NO: 2249009 - RNA, 19 nt, Artificial Sequence
  Description of Artificial Sequence: Synthetic oligonucleotide
  Antisense strand to SEQ ID NO: 2249008
uuucaggauaccauucuaa

SEQ ID NO: 2249010 - RNA, 19 nt, Artificial Sequence
  Description of Artificial Sequence: Synthetic oligonucleotide
  Sense strand starting at position 3429 of SEQ ID NO: 1884216
uguagcauguccuuuagaa

SEQ ID NO: 2249011 - RNA, 19 nt, Artificial Sequence
  Description of Artificial Sequence: Synthetic oligonucleotide
  Antisense strand to SEQ ID NO: 2249010
uucuaaaggacaugcuaca

SEQ ID NO: 2249012 - RNA, 19 nt, Artificial Sequence
  Description of Artificial Sequence: Synthetic oligonucleotide
  Sense strand starting at position 3608 of SEQ ID NO: 1884216
gucagugggugucuguaau

SEQ ID NO: 2249013 - RNA, 19 nt, Artificial Sequence
  Description of Artificial Sequence: Synthetic oligonucleotide
  Antisense strand to SEQ ID NO: 2249012
auuacagacacccacugac

SEQ ID NO: 2249014 - RNA, 19 nt, Artificial Sequence
  Description of Artificial Sequence: Synthetic oligonucleotide
  Sense strand starting at position 3893 of SEQ ID NO: 1884216
ccagguguauugucaacaa

SEQ ID NO: 2249015 - RNA, 19 nt, Artificial Sequence
  Description of Artificial Sequence: Synthetic oligonucleotide
  Antisense strand to SEQ ID NO: 2249014
uuguugacaauacaccugg

SEQ ID NO: 2249016 - RNA, 19 nt, Artificial Sequence
  Description of Artificial Sequence: Synthetic oligonucleotide
  Sense strand starting at position 3897 of SEQ ID NO: 1884216
guguauugucaacaagcag

SEQ ID NO: 2249017 - RNA, 19 nt, Artificial Sequence
  Description of Artificial Sequence: Synthetic oligonucleotide
  Antisense strand to SEQ ID NO: 2249016
cugcuuguugacaauacac

SEQ ID NO: 2249018 - RNA, 19 nt, Artificial Sequence
  Description of Artificial Sequence: Synthetic oligonucleotide
  Sense strand starting at position 3944 of SEQ ID NO: 1884216
gcaagaggucucuacagug

SEQ ID NO: 2249019 - RNA, 19 nt, Artificial Sequence
  Description of Artificial Sequence: Synthetic oligonucleotide
  Antisense strand to SEQ ID NO: 2249018
cacuguagagaccucuugc

SEQ ID NO: 2249020 - RNA, 19 nt, Artificial Sequence
  Description of Artificial Sequence: Synthetic oligonucleotide
  Sense strand starting at position 3952 of SEQ ID NO: 1884216
ucucuacagugggcuuaau

SEQ ID NO: 2249021 - RNA, 19 nt, Artificial Sequence
  Description of Artificial Sequence: Synthetic oligonucleotide
  Antisense strand to SEQ ID NO: 2249020
auuaagcccacuguagaga

SEQ ID NO: 2249022 - RNA, 19 nt, Artificial Sequence
  Description of Artificial Sequence: Synthetic oligonucleotide
  Sense strand starting at position 3963 of SEQ ID NO: 1884216
ggcuuaauguauuccauaa

SEQ ID NO: 2249023 - RNA, 19 nt, Artificial Sequence
  Description of Artificial Sequence: Synthetic oligonucleotide
  Antisense strand to SEQ ID NO: 2249022
uuauggaauacauuaagcc

SEQ ID NO: 2249024 - RNA, 19 nt, Artificial Sequence
  Description of Artificial Sequence: Synthetic oligonucleotide
  Sense strand starting at position 3981 of SEQ ID NO: 1884216
aaccaugcuguagauagau

SEQ ID NO: 2249025 - RNA, 19 nt, Artificial Sequence
  Description of Artificial Sequence: Synthetic oligonucleotide
  Antisense strand to SEQ ID NO: 2249024
aucuaucuacagcaugguu

SEQ ID NO: 2249026 - RNA, 19 nt, Artificial Sequence
  Description of Artificial Sequence: Synthetic oligonucleotide
  Sense strand starting at position 205 of SEQ ID NO: 1884217
gguauagugaacuauguga

SEQ ID NO: 2249027 - RNA, 19 nt, Artificial Sequence
  Description of Artificial Sequence: Synthetic oligonucleotide
  Antisense strand to SEQ ID NO: 2249026
ucacauaguucacuauacc

SEQ ID NO: 2249028 - RNA, 19 nt, Artificial Sequence
  Description of Artificial Sequence: Synthetic oligonucleotide
  Sense strand starting at position 207 of SEQ ID NO: 1884217
uauagugaacuaugugaca

SEQ ID NO: 2249029 - RNA, 19 nt, Artificial Sequence
  Description of Artificial Sequence: Synthetic oligonucleotide
  Antisense strand to SEQ ID NO: 2249028
ugucacauaguucacuaua

SEQ ID NO: 2249030 - RNA, 19 nt, Artificial Sequence
  Description of Artificial Sequence: Synthetic oligonucleotide
  Sense strand starting at position 276 of SEQ ID NO: 1884217
aguugucucuagccuugaa

SEQ ID NO: 2249031 - RNA, 19 nt, Artificial Sequence
  Description of Artificial Sequence: Synthetic oligonucleotide
  Antisense strand to SEQ ID NO: 2249030
uucaaggcuagagacaacu

SEQ ID NO: 2249032 - RNA, 19 nt, Artificial Sequence
  Description of Artificial Sequence: Synthetic oligonucleotide
  Sense strand starting at position 280 of SEQ ID NO: 1884217
gucucuagccuugaaggga

SEQ ID NO: 2249033 - RNA, 19 nt, Artificial Sequence
  Description of Artificial Sequence: Synthetic oligonucleotide
  Antisense strand to SEQ ID NO: 2249032
ucccuucaaggcuagagac

SEQ ID NO: 2249034 - RNA, 19 nt, Artificial Sequence
  Description of Artificial Sequence: Synthetic oligonucleotide
  Sense strand starting at position 330 of SEQ ID NO: 1884217
uguucuagucuacaauuga

SEQ ID NO: 2249035 - RNA, 19 nt, Artificial Sequence
  Description of Artificial Sequence: Synthetic oligonucleotide
  Antisense strand to SEQ ID NO: 2249034
ucaauuguagacuagaaca

SEQ ID NO: 2249036 - RNA, 19 nt, Artificial Sequence
  Description of Artificial Sequence: Synthetic oligonucleotide
  Sense strand starting at position 346 of SEQ ID NO: 1884217
ugagaacucugauauacuc

SEQ ID NO: 2249037 - RNA, 19 nt, Artificial Sequence
  Description of Artificial Sequence: Synthetic oligonucleotide
  Antisense strand to SEQ ID NO: 2249036
gaguauaucagaguucuca

SEQ ID NO: 2249038 - RNA, 19 nt, Artificial Sequence
  Description of Artificial Sequence: Synthetic oligonucleotide
  Sense strand starting at position 353 of SEQ ID NO: 1884217
ucugauauacucugugauc

SEQ ID NO: 2249039 - RNA, 19 nt, Artificial Sequence
  Description of Artificial Sequence: Synthetic oligonucleotide
  Antisense strand to SEQ ID NO: 2249038
gaucacagaguauaucaga

SEQ ID NO: 2249040 - RNA, 19 nt, Artificial Sequence
  Description of Artificial Sequence: Synthetic oligonucleotide
  Sense strand starting at position 2092 of SEQ ID NO: 1884217
ucuugaguuuccuuugagu

SEQ ID NO: 2249041 - RNA, 19 nt, Artificial Sequence
  Description of Artificial Sequence: Synthetic oligonucleotide
  Antisense strand to SEQ ID NO: 2249040
acucaaaggaaacucaaga

SEQ ID NO: 2249042 - RNA, 19 nt, Artificial Sequence
  Description of Artificial Sequence: Synthetic oligonucleotide
  Sense strand starting at position 2094 of SEQ ID NO: 1884217
uugaguuuccuuugaguga

SEQ ID NO: 2249043 - RNA, 19 nt, Artificial Sequence
  Description of Artificial Sequence: Synthetic oligonucleotide
  Antisense strand to SEQ ID NO: 2249042
ucacucaaaggaaacucaa

SEQ ID NO: 2249044 - RNA, 19 nt, Artificial Sequence
  Description of Artificial Sequence: Synthetic oligonucleotide
  Sense strand starting at position 2098 of SEQ ID NO: 1884217
guuuccuuugagugaucug

SEQ ID NO: 2249045 - RNA, 19 nt, Artificial Sequence
  Description of Artificial Sequence: Synthetic oligonucleotide
  Antisense strand to SEQ ID NO: 2249044
cagaucacucaaaggaaac

SEQ ID NO: 2249046 - RNA, 19 nt, Artificial Sequence
  Description of Artificial Sequence: Synthetic oligonucleotide
  Sense strand starting at position 2101 of SEQ ID NO: 1884217
uccuuugagugaucuguau

SEQ ID NO: 2249047 - RNA, 19 nt, Artificial Sequence
  Description of Artificial Sequence: Synthetic oligonucleotide
  Antisense strand to SEQ ID NO: 2249046
auacagaucacucaaagga

SEQ ID NO: 2249048 - RNA, 19 nt, Artificial Sequence
  Description of Artificial Sequence: Synthetic oligonucleotide
  Sense strand starting at position 2105 of SEQ ID NO: 1884217
uugagugaucuguauacau

SEQ ID NO: 2249049 - RNA, 19 nt, Artificial Sequence
  Description of Artificial Sequence: Synthetic oligonucleotide
  Antisense strand to SEQ ID NO: 2249048
auguauacagaucacucaa

SEQ ID NO: 2249050 - RNA, 19 nt, Artificial Sequence
  Description of Artificial Sequence: Synthetic oligonucleotide
  Sense strand starting at position 2107 of SEQ ID NO: 1884217
gagugaucuguauacaucu

SEQ ID NO: 2249051 - RNA, 19 nt, Artificial Sequence
  Description of Artificial Sequence: Synthetic oligonucleotide
  Antisense strand to SEQ ID NO: 2249050
agauguauacagaucacuc

SEQ ID NO: 2249052 - RNA, 19 nt, Artificial Sequence
  Description of Artificial Sequence: Synthetic oligonucleotide
  Sense strand starting at position 2365 of SEQ ID NO: 1884217
gaugccaugcuuuguuuaa

SEQ ID NO: 2249053 - RNA, 19 nt, Artificial Sequence
  Description of Artificial Sequence: Synthetic oligonucleotide
  Antisense strand to SEQ ID NO: 2249052
uuaaacaaagcauggcauc

SEQ ID NO: 2249054 - RNA, 19 nt, Artificial Sequence
  Description of Artificial Sequence: Synthetic oligonucleotide
  Sense strand starting at position 2386 of SEQ ID NO: 1884217
ccaguugguuuaccuauua

SEQ ID NO: 2249055 - RNA, 19 nt, Artificial Sequence
  Description of Artificial Sequence: Synthetic oligonucleotide
  Antisense strand to SEQ ID NO: 2249054
uaauagguaaaccaacugg

SEQ ID NO: 2249056 - RNA, 19 nt, Artificial Sequence
  Description of Artificial Sequence: Synthetic oligonucleotide
  Sense strand starting at position 2499 of SEQ ID NO: 1884217
caggaauggcaguguuuga

SEQ ID NO: 2249057 - RNA, 19 nt, Artificial Sequence
  Description of Artificial Sequence: Synthetic oligonucleotide
  Antisense strand to SEQ ID NO: 2249056
ucaaacacugccauuccug

SEQ ID NO: 2249058 - RNA, 19 nt, Artificial Sequence
  Description of Artificial Sequence: Synthetic oligonucleotide
  Sense strand starting at position 2504 of SEQ ID NO: 1884217
auggcaguguuugaagaug

SEQ ID NO: 2249059 - RNA, 19 nt, Artificial Sequence
  Description of Artificial Sequence: Synthetic oligonucleotide
  Antisense strand to SEQ ID NO: 2249058
caucuucaaacacugccau

SEQ ID NO: 2249060 - RNA, 19 nt, Artificial Sequence
  Description of Artificial Sequence: Synthetic oligonucleotide
  Sense strand starting at position 2506 of SEQ ID NO: 1884217
ggcaguguuugaagaugug

SEQ ID NO: 2249061 - RNA, 19 nt, Artificial Sequence
  Description of Artificial Sequence: Synthetic oligonucleotide
  Antisense strand to SEQ ID NO: 2249060
cacaucuucaaacacugcc

SEQ ID NO: 2249062 - RNA, 19 nt, Artificial Sequence
  Description of Artificial Sequence: Synthetic oligonucleotide
  Sense strand starting at position 2509 of SEQ ID NO: 1884217
aguguuugaagauguguuu

SEQ ID NO: 2249063 - RNA, 19 nt, Artificial Sequence
  Description of Artificial Sequence: Synthetic oligonucleotide
  Antisense strand to SEQ ID NO: 2249062
aaacacaucuucaaacacu

SEQ ID NO: 2249064 - RNA, 19 nt, Artificial Sequence
  Description of Artificial Sequence: Synthetic oligonucleotide
  Sense strand starting at position 2512 of SEQ ID NO: 1884217
guuugaagauguguuugaa

SEQ ID NO: 2249065 - RNA, 19 nt, Artificial Sequence
  Description of Artificial Sequence: Synthetic oligonucleotide
  Antisense strand to SEQ ID NO: 2249064
uucaaacacaucuucaaac

SEQ ID NO: 2249066 - RNA, 19 nt, Artificial Sequence
  Description of Artificial Sequence: Synthetic oligonucleotide
  Sense strand starting at position 2581 of SEQ ID NO: 1884217
gucucauuaguuuagacac

SEQ ID NO: 2249067 - RNA, 19 nt, Artificial Sequence
  Description of Artificial Sequence: Synthetic oligonucleotide
  Antisense strand to SEQ ID NO: 2249066
gugucuaaacuaaugagac

SEQ ID NO: 2249068 - RNA, 19 nt, Artificial Sequence
  Description of Artificial Sequence: Synthetic oligonucleotide
  Sense strand starting at position 2642 of SEQ ID NO: 1884217
uggaucauuuaguguguaa

SEQ ID NO: 2249069 - RNA, 19 nt, Artificial Sequence
  Description of Artificial Sequence: Synthetic oligonucleotide
  Antisense strand to SEQ ID NO: 2249068
uuacacacuaaaugaucca

SEQ ID NO: 2249070 - RNA, 19 nt, Artificial Sequence
  Description of Artificial Sequence: Synthetic oligonucleotide
  Sense strand starting at position 2669 of SEQ ID NO: 1884217
guuaaagacuugcagaauu

SEQ ID NO: 2249071 - RNA, 19 nt, Artificial Sequence
  Description of Artificial Sequence: Synthetic oligonucleotide
  Antisense strand to SEQ ID NO: 2249070
aauucugcaagucuuuaac

SEQ ID NO: 2249072 - RNA, 19 nt, Artificial Sequence
  Description of Artificial Sequence: Synthetic oligonucleotide
  Sense strand starting at position 2726 of SEQ ID NO: 1884217
ggaguacuaacuuacgauu

SEQ ID NO: 2249073 - RNA, 19 nt, Artificial Sequence
  Description of Artificial Sequence: Synthetic oligonucleotide
  Antisense strand to SEQ ID NO: 2249072
aaucguaaguuaguacucc

SEQ ID NO: 2249074 - RNA, 19 nt, Artificial Sequence
  Description of Artificial Sequence: Synthetic oligonucleotide
  Sense strand starting at position 2749 of SEQ ID NO: 1884217
uaggucauguucuaaauug

SEQ ID NO: 2249075 - RNA, 19 nt, Artificial Sequence
  Description of Artificial Sequence: Synthetic oligonucleotide
  Antisense strand to SEQ ID NO: 2249074
caauuuagaacaugaccua

SEQ ID NO: 2249076 - RNA, 19 nt, Artificial Sequence
  Description of Artificial Sequence: Synthetic oligonucleotide
  Sense strand starting at position 2838 of SEQ ID NO: 1884217
guuauauuccucuguccuu

SEQ ID NO: 2249077 - RNA, 19 nt, Artificial Sequence
  Description of Artificial Sequence: Synthetic oligonucleotide
  Antisense strand to SEQ ID NO: 2249076
aaggacagaggaauauaac

SEQ ID NO: 2249078 - RNA, 19 nt, Artificial Sequence
  Description of Artificial Sequence: Synthetic oligonucleotide
  Sense strand starting at position 2904 of SEQ ID NO: 1884217
ccacgauaauauggaaagu

SEQ ID NO: 2249079 - RNA, 19 nt, Artificial Sequence
  Description of Artificial Sequence: Synthetic oligonucleotide
  Antisense strand to SEQ ID NO: 2249078
acuuuccauauuaucgugg

SEQ ID NO: 2249080 - RNA, 19 nt, Artificial Sequence
  Description of Artificial Sequence: Synthetic oligonucleotide
  Sense strand starting at position 3253 of SEQ ID NO: 1884217
guguuaguacauuguaaga

SEQ ID NO: 2249081 - RNA, 19 nt, Artificial Sequence
  Description of Artificial Sequence: Synthetic oligonucleotide
  Antisense strand to SEQ ID NO: 2249080
ucuuacaauguacuaacac

SEQ ID NO: 2249082 - RNA, 19 nt, Artificial Sequence
  Description of Artificial Sequence: Synthetic oligonucleotide
  Sense strand starting at position 3258 of SEQ ID NO: 1884217
aguacauuguaagaucaca

SEQ ID NO: 2249083 - RNA, 19 nt, Artificial Sequence
  Description of Artificial Sequence: Synthetic oligonucleotide
  Antisense strand to SEQ ID NO: 2249082
ugugaucuuacaauguacu

SEQ ID NO: 2249084 - RNA, 19 nt, Artificial Sequence
  Description of Artificial Sequence: Synthetic oligonucleotide
  Sense strand starting at position 3263 of SEQ ID NO: 1884217
auuguaagaucacagagua

SEQ ID NO: 2249085 - RNA, 19 nt, Artificial Sequence
  Description of Artificial Sequence: Synthetic oligonucleotide
  Antisense strand to SEQ ID NO: 2249084
uacucugugaucuuacaau

SEQ ID NO: 2249086 - RNA, 19 nt, Artificial Sequence
  Description of Artificial Sequence: Synthetic oligonucleotide
  Sense strand starting at position 3290 of SEQ ID NO: 1884217
ccaucaguuguagacuaga

SEQ ID NO: 2249087 - RNA, 19 nt, Artificial Sequence
  Description of Artificial Sequence: Synthetic oligonucleotide
  Antisense strand to SEQ ID NO: 2249086
ucuagucuacaacugaugg

SEQ ID NO: 2249088 - RNA, 19 nt, Artificial Sequence
  Description of Artificial Sequence: Synthetic oligonucleotide
  Sense strand starting at position 3392 of SEQ ID NO: 1884217
uuagaaugguauccugaaa

SEQ ID NO: 2249089 - RNA, 19 nt, Artificial Sequence
  Description of Artificial Sequence: Synthetic oligonucleotide
  Antisense strand to SEQ ID NO: 2249088
uuucaggauaccauucuaa

SEQ ID NO: 2249090 - RNA, 19 nt, Artificial Sequence
  Description of Artificial Sequence: Synthetic oligonucleotide
  Sense strand starting at position 3429 of SEQ ID NO: 1884217
uguagcauguccuuuagaa

SEQ ID NO: 2249091 - RNA, 19 nt, Artificial Sequence
  Description of Artificial Sequence: Synthetic oligonucleotide
  Antisense strand to SEQ ID NO: 2249090
uucuaaaggacaugcuaca

SEQ ID NO: 2249092 - RNA, 19 nt, Artificial Sequence
  Description of Artificial Sequence: Synthetic oligonucleotide
  Sense strand starting at position 3608 of SEQ ID NO: 1884217
gucagugggugucuguaau

SEQ ID NO: 2249093 - RNA, 19 nt, Artificial Sequence
  Description of Artificial Sequence: Synthetic oligonucleotide
  Antisense strand to SEQ ID NO: 2249092
auuacagacacccacugac

SEQ ID NO: 2249094 - RNA, 19 nt, Artificial Sequence
  Description of Artificial Sequence: Synthetic oligonucleotide
  Sense strand starting at position 3893 of SEQ ID NO: 1884217
ccagguguauugucaacaa

SEQ ID NO: 2249095 - RNA, 19 nt, Artificial Sequence
  Description of Artificial Sequence: Synthetic oligonucleotide
  Antisense strand to SEQ ID NO: 2249094
uuguugacaauacaccugg

SEQ ID NO: 2249096 - RNA, 19 nt, Artificial Sequence
  Description of Artificial Sequence: Synthetic oligonucleotide
  Sense strand starting at position 3897 of SEQ ID NO: 1884217
guguauugucaacaagcag

SEQ ID NO: 2249097 - RNA, 19 nt, Artificial Sequence
  Description of Artificial Sequence: Synthetic oligonucleotide
  Antisense strand to SEQ ID NO: 2249096
cugcuuguugacaauacac

SEQ ID NO: 2249098 - RNA, 19 nt, Artificial Sequence
  Description of Artificial Sequence: Synthetic oligonucleotide
  Sense strand starting at position 3944 of SEQ ID NO: 1884217
gcaagaggucucuacagug

SEQ ID NO: 2249099 - RNA, 19 nt, Artificial Sequence
  Description of Artificial Sequence: Synthetic oligonucleotide
  Antisense strand to SEQ ID NO: 2249098
cacuguagagaccucuugc

SEQ ID NO: 2249100 - RNA, 19 nt, Artificial Sequence
  Description of Artificial Sequence: Synthetic oligonucleotide
  Sense strand starting at position 3952 of SEQ ID NO: 1884217
ucucuacagugggcuuaau

SEQ ID NO: 2249101 - RNA, 19 nt, Artificial Sequence
  Description of Artificial Sequence: Synthetic oligonucleotide
  Antisense strand to SEQ ID NO: 2249100
auuaagcccacuguagaga

SEQ ID NO: 2249102 - RNA, 19 nt, Artificial Sequence
  Description of Artificial Sequence: Synthetic oligonucleotide
  Sense strand starting at position 3963 of SEQ ID NO: 1884217
ggcuuaauguauuccauaa

SEQ ID NO: 2249103 - RNA, 19 nt, Artificial Sequence
  Description of Artificial Sequence: Synthetic oligonucleotide
  Antisense strand to SEQ ID NO: 2249102
uuauggaauacauuaagcc

SEQ ID NO: 2249104 - RNA, 19 nt, Artificial Sequence
  Description of Artificial Sequence: Synthetic oligonucleotide
  Sense strand starting at position 3981 of SEQ ID NO: 1884217
aaccaugcuguagauagau

SEQ ID NO: 2249105 - RNA, 19 nt, Artificial Sequence
  Description of Artificial Sequence: Synthetic oligonucleotide
  Antisense strand to SEQ ID NO: 2249104
aucuaucuacagcaugguu

SEQ ID NO: 2249106 - RNA, 19 nt, Artificial Sequence
  Description of Artificial Sequence: Synthetic oligonucleotide
  Sense strand starting at position 39 of SEQ ID NO: 1884218
ccuuccucggaucgacaua

SEQ ID NO: 2249107 - RNA, 19 nt, Artificial Sequence
  Description of Artificial Sequence: Synthetic oligonucleotide
  Antisense strand to SEQ ID NO: 2249106
uaugucgauccgaggaagg

SEQ ID NO: 2249108 - RNA, 19 nt, Artificial Sequence
  Description of Artificial Sequence: Synthetic oligonucleotide
  Sense strand starting at position 62 of SEQ ID NO: 1884218
gcaguuagaugcucccaga

SEQ ID NO: 2249109 - RNA, 19 nt, Artificial Sequence
  Description of Artificial Sequence: Synthetic oligonucleotide
  Antisense strand to SEQ ID NO: 2249108
ucugggagcaucuaacugc

SEQ ID NO: 2249110 - RNA, 19 nt, Artificial Sequence
  Description of Artificial Sequence: Synthetic oligonucleotide
  Sense strand starting at position 187 of SEQ ID NO: 1884218
ggauuagacagccaucagu

SEQ ID NO: 2249111 - RNA, 19 nt, Artificial Sequence
  Description of Artificial Sequence: Synthetic oligonucleotide
  Antisense strand to SEQ ID NO: 2249110
acugauggcugucuaaucc

SEQ ID NO: 2249112 - RNA, 19 nt, Artificial Sequence
  Description of Artificial Sequence: Synthetic oligonucleotide
  Sense strand starting at position 190 of SEQ ID NO: 1884218
uuagacagccaucaguaau

SEQ ID NO: 2249113 - RNA, 19 nt, Artificial Sequence
  Description of Artificial Sequence: Synthetic oligonucleotide
  Antisense strand to SEQ ID NO: 2249112
auuacugauggcugucuaa

SEQ ID NO: 2249114 - RNA, 19 nt, Artificial Sequence
  Description of Artificial Sequence: Synthetic oligonucleotide
  Sense strand starting at position 632 of SEQ ID NO: 1884218
aguagaaagucugucuaca

SEQ ID NO: 2249115 - RNA, 19 nt, Artificial Sequence
  Description of Artificial Sequence: Synthetic oligonucleotide
  Antisense strand to SEQ ID NO: 2249114
uguagacagacuuucuacu

SEQ ID NO: 2249116 - RNA, 19 nt, Artificial Sequence
  Description of Artificial Sequence: Synthetic oligonucleotide
  Sense strand starting at position 2187 of SEQ ID NO: 1884218
agcgaagucaaguauacac

SEQ ID NO: 2249117 - RNA, 19 nt, Artificial Sequence
  Description of Artificial Sequence: Synthetic oligonucleotide
  Antisense strand to SEQ ID NO: 2249116
guguauacuugacuucgcu

SEQ ID NO: 2249118 - RNA, 19 nt, Artificial Sequence
  Description of Artificial Sequence: Synthetic oligonucleotide
  Sense strand starting at position 2194 of SEQ ID NO: 1884218
ucaaguauacacugcgaga

SEQ ID NO: 2249119 - RNA, 19 nt, Artificial Sequence
  Description of Artificial Sequence: Synthetic oligonucleotide
  Antisense strand to SEQ ID NO: 2249118
ucucgcaguguauacuuga

SEQ ID NO: 2249120 - RNA, 19 nt, Artificial Sequence
  Description of Artificial Sequence: Synthetic oligonucleotide
  Sense strand starting at position 2199 of SEQ ID NO: 1884218
uauacacugcgagaucauu

SEQ ID NO: 2249121 - RNA, 19 nt, Artificial Sequence
  Description of Artificial Sequence: Synthetic oligonucleotide
  Antisense strand to SEQ ID NO: 2249120
aaugaucucgcaguguaua

SEQ ID NO: 2249122 - RNA, 19 nt, Artificial Sequence
  Description of Artificial Sequence: Synthetic oligonucleotide
  Sense strand starting at position 2252 of SEQ ID NO: 1884218
aucuguuuaaugggagucu

SEQ ID NO: 2249123 - RNA, 19 nt, Artificial Sequence
  Description of Artificial Sequence: Synthetic oligonucleotide
  Antisense strand to SEQ ID NO: 2249122
agacucccauuaaacagau

SEQ ID NO: 2249124 - RNA, 19 nt, Artificial Sequence
  Description of Artificial Sequence: Synthetic oligonucleotide
  Sense strand starting at position 2333 of SEQ ID NO: 1884218
ggagaaagcaugugucuga

SEQ ID NO: 2249125 - RNA, 19 nt, Artificial Sequence
  Description of Artificial Sequence: Synthetic oligonucleotide
  Antisense strand to SEQ ID NO: 2249124
ucagacacaugcuuucucc

SEQ ID NO: 2249126 - RNA, 19 nt, Artificial Sequence
  Description of Artificial Sequence: Synthetic oligonucleotide
  Sense strand starting at position 2334 of SEQ ID NO: 1884218
gagaaagcaugugucugau

SEQ ID NO: 2249127 - RNA, 19 nt, Artificial Sequence
  Description of Artificial Sequence: Synthetic oligonucleotide
  Antisense strand to SEQ ID NO: 2249126
aucagacacaugcuuucuc

SEQ ID NO: 2249128 - RNA, 19 nt, Artificial Sequence
  Description of Artificial Sequence: Synthetic oligonucleotide
  Sense strand starting at position 2503 of SEQ ID NO: 1884218
augucugagaccugaguuu

SEQ ID NO: 2249129 - RNA, 19 nt, Artificial Sequence
  Description of Artificial Sequence: Synthetic oligonucleotide
  Antisense strand to SEQ ID NO: 2249128
aaacucaggucucagacau

SEQ ID NO: 2249130 - RNA, 19 nt, Artificial Sequence
  Description of Artificial Sequence: Synthetic oligonucleotide
  Sense strand starting at position 2521 of SEQ ID NO: 1884218
uagggcuggcucugacauu

SEQ ID NO: 2249131 - RNA, 19 nt, Artificial Sequence
  Description of Artificial Sequence: Synthetic oligonucleotide
  Antisense strand to SEQ ID NO: 2249130
aaugucagagccagcccua

SEQ ID NO: 2249132 - RNA, 19 nt, Artificial Sequence
  Description of Artificial Sequence: Synthetic oligonucleotide
  Sense strand starting at position 2539 of SEQ ID NO: 1884218
uuucuaccuguguaacuua

SEQ ID NO: 2249133 - RNA, 19 nt, Artificial Sequence
  Description of Artificial Sequence: Synthetic oligonucleotide
  Antisense strand to SEQ ID NO: 2249132
uaaguuacacagguagaaa

SEQ ID NO: 2249134 - RNA, 19 nt, Artificial Sequence
  Description of Artificial Sequence: Synthetic oligonucleotide
  Sense strand starting at position 3010 of SEQ ID NO: 1884218
gcuaauaaucguuaauucu

SEQ ID NO: 2249135 - RNA, 19 nt, Artificial Sequence
  Description of Artificial Sequence: Synthetic oligonucleotide
  Antisense strand to SEQ ID NO: 2249134
agaauuaacgauuauuagc

SEQ ID NO: 2249136 - RNA, 19 nt, Artificial Sequence
  Description of Artificial Sequence: Synthetic oligonucleotide
  Sense strand starting at position 3025 of SEQ ID NO: 1884218
uucuuaauaggcugagguu

SEQ ID NO: 2249137 - RNA, 19 nt, Artificial Sequence
  Description of Artificial Sequence: Synthetic oligonucleotide
  Antisense strand to SEQ ID NO: 2249136
aaccucagccuauuaagaa

SEQ ID NO: 2249138 - RNA, 19 nt, Artificial Sequence
  Description of Artificial Sequence: Synthetic oligonucleotide
  Sense strand starting at position 3026 of SEQ ID NO: 1884218
ucuuaauaggcugagguuu

SEQ ID NO: 2249139 - RNA, 19 nt, Artificial Sequence
  Description of Artificial Sequence: Synthetic oligonucleotide
  Antisense strand to SEQ ID NO: 2249138
aaaccucagccuauuaaga

SEQ ID NO: 2249140 - RNA, 19 nt, Artificial Sequence
  Description of Artificial Sequence: Synthetic oligonucleotide
  Sense strand starting at position 3032 of SEQ ID NO: 1884218
uaggcugagguuugcaaua

SEQ ID NO: 2249141 - RNA, 19 nt, Artificial Sequence
  Description of Artificial Sequence: Synthetic oligonucleotide
  Antisense strand to SEQ ID NO: 2249140
uauugcaaaccucagccua

SEQ ID NO: 2249142 - RNA, 19 nt, Artificial Sequence
  Description of Artificial Sequence: Synthetic oligonucleotide
  Sense strand starting at position 3037 of SEQ ID NO: 1884218
ugagguuugcaauauucua

SEQ ID NO: 2249143 - RNA, 19 nt, Artificial Sequence
  Description of Artificial Sequence: Synthetic oligonucleotide
  Antisense strand to SEQ ID NO: 2249142
uagaauauugcaaaccuca

SEQ ID NO: 2249144 - RNA, 19 nt, Artificial Sequence
  Description of Artificial Sequence: Synthetic oligonucleotide
  Sense strand starting at position 3044 of SEQ ID NO: 1884218
ugcaauauucuaggaguuu

SEQ ID NO: 2249145 - RNA, 19 nt, Artificial Sequence
  Description of Artificial Sequence: Synthetic oligonucleotide
  Antisense strand to SEQ ID NO: 2249144
aaacuccuagaauauugca

SEQ ID NO: 2249146 - RNA, 19 nt, Artificial Sequence
  Description of Artificial Sequence: Synthetic oligonucleotide
  Sense strand starting at position 3064 of SEQ ID NO: 1884218
cuggaauguuaggccacau

SEQ ID NO: 2249147 - RNA, 19 nt, Artificial Sequence
  Description of Artificial Sequence: Synthetic oligonucleotide
  Antisense strand to SEQ ID NO: 2249146
auguggccuaacauuccag

SEQ ID NO: 2249148 - RNA, 19 nt, Artificial Sequence
  Description of Artificial Sequence: Synthetic oligonucleotide
  Sense strand starting at position 3114 of SEQ ID NO: 1884218
gaggcccagcuguagaaau

SEQ ID NO: 2249149 - RNA, 19 nt, Artificial Sequence
  Description of Artificial Sequence: Synthetic oligonucleotide
  Antisense strand to SEQ ID NO: 2249148
auuucuacagcugggccuc

SEQ ID NO: 2249150 - RNA, 19 nt, Artificial Sequence
  Description of Artificial Sequence: Synthetic oligonucleotide
  Sense strand starting at position 3152 of SEQ ID NO: 1884218
uuuguaacugaccaauagu

SEQ ID NO: 2249151 - RNA, 19 nt, Artificial Sequence
  Description of Artificial Sequence: Synthetic oligonucleotide
  Antisense strand to SEQ ID NO: 2249150
acuauuggucaguuacaaa

SEQ ID NO: 2249152 - RNA, 19 nt, Artificial Sequence
  Description of Artificial Sequence: Synthetic oligonucleotide
  Sense strand starting at position 3162 of SEQ ID NO: 1884218
accaauaguuaccugggua

SEQ ID NO: 2249153 - RNA, 19 nt, Artificial Sequence
  Description of Artificial Sequence: Synthetic oligonucleotide
  Antisense strand to SEQ ID NO: 2249152
uacccagguaacuauuggu

SEQ ID NO: 2249154 - RNA, 19 nt, Artificial Sequence
  Description of Artificial Sequence: Synthetic oligonucleotide
  Sense strand starting at position 3165 of SEQ ID NO: 1884218
aauaguuaccuggguauac

SEQ ID NO: 2249155 - RNA, 19 nt, Artificial Sequence
  Description of Artificial Sequence: Synthetic oligonucleotide
  Antisense strand to SEQ ID NO: 2249154
guauacccagguaacuauu

SEQ ID NO: 2249156 - RNA, 19 nt, Artificial Sequence
  Description of Artificial Sequence: Synthetic oligonucleotide
  Sense strand starting at position 3166 of SEQ ID NO: 1884218
auaguuaccuggguauaca

SEQ ID NO: 2249157 - RNA, 19 nt, Artificial Sequence
  Description of Artificial Sequence: Synthetic oligonucleotide
  Antisense strand to SEQ ID NO: 2249156
uguauacccagguaacuau

SEQ ID NO: 2249158 - RNA, 19 nt, Artificial Sequence
  Description of Artificial Sequence: Synthetic oligonucleotide
  Sense strand starting at position 3175 of SEQ ID NO: 1884218
uggguauacacaggugagu

SEQ ID NO: 2249159 - RNA, 19 nt, Artificial Sequence
  Description of Artificial Sequence: Synthetic oligonucleotide
  Antisense strand to SEQ ID NO: 2249158
acucaccuguguauaccca

SEQ ID NO: 2249160 - RNA, 19 nt, Artificial Sequence
  Description of Artificial Sequence: Synthetic oligonucleotide
  Sense strand starting at position 3177 of SEQ ID NO: 1884218
gguauacacaggugaguua

SEQ ID NO: 2249161 - RNA, 19 nt, Artificial Sequence
  Description of Artificial Sequence: Synthetic oligonucleotide
  Antisense strand to SEQ ID NO: 2249160
uaacucaccuguguauacc

SEQ ID NO: 2249162 - RNA, 19 nt, Artificial Sequence
  Description of Artificial Sequence: Synthetic oligonucleotide
  Sense strand starting at position 3227 of SEQ ID NO: 1884218
cuguauuugugagcuucuu

SEQ ID NO: 2249163 - RNA, 19 nt, Artificial Sequence
  Description of Artificial Sequence: Synthetic oligonucleotide
  Antisense strand to SEQ ID NO: 2249162
aagaagcucacaaauacag

SEQ ID NO: 2249164 - RNA, 19 nt, Artificial Sequence
  Description of Artificial Sequence: Synthetic oligonucleotide
  Sense strand starting at position 3245 of SEQ ID NO: 1884218
uggagaaguugucucaaac

SEQ ID NO: 2249165 - RNA, 19 nt, Artificial Sequence
  Description of Artificial Sequence: Synthetic oligonucleotide
  Antisense strand to SEQ ID NO: 2249164
guuugagacaacuucucca

SEQ ID NO: 2249166 - RNA, 19 nt, Artificial Sequence
  Description of Artificial Sequence: Synthetic oligonucleotide
  Sense strand starting at position 3277 of SEQ ID NO: 1884218
aaagguguuucuccugauc

SEQ ID NO: 2249167 - RNA, 19 nt, Artificial Sequence
  Description of Artificial Sequence: Synthetic oligonucleotide
  Antisense strand to SEQ ID NO: 2249166
gaucaggagaaacaccuuu

SEQ ID NO: 2249168 - RNA, 19 nt, Artificial Sequence
  Description of Artificial Sequence: Synthetic oligonucleotide
  Sense strand starting at position 3280 of SEQ ID NO: 1884218
gguguuucuccugaucagu

SEQ ID NO: 2249169 - RNA, 19 nt, Artificial Sequence
  Description of Artificial Sequence: Synthetic oligonucleotide
  Antisense strand to SEQ ID NO: 2249168
acugaucaggagaaacacc

SEQ ID NO: 2249170 - RNA, 19 nt, Artificial Sequence
  Description of Artificial Sequence: Synthetic oligonucleotide
  Sense strand starting at position 3322 of SEQ ID NO: 1884218
cuacgaaucucauuacuga

SEQ ID NO: 2249171 - RNA, 19 nt, Artificial Sequence
  Description of Artificial Sequence: Synthetic oligonucleotide
  Antisense strand to SEQ ID NO: 2249170
ucaguaaugagauucguag

SEQ ID NO: 2249172 - RNA, 19 nt, Artificial Sequence
  Description of Artificial Sequence: Synthetic oligonucleotide
  Sense strand starting at position 3325 of SEQ ID NO: 1884218
cgaaucucauuacugauca

SEQ ID NO: 2249173 - RNA, 19 nt, Artificial Sequence
  Description of Artificial Sequence: Synthetic oligonucleotide
  Antisense strand to SEQ ID NO: 2249172
ugaucaguaaugagauucg

SEQ ID NO: 2249174 - RNA, 19 nt, Artificial Sequence
  Description of Artificial Sequence: Synthetic oligonucleotide
  Sense strand starting at position 3380 of SEQ ID NO: 1884218
agccaaauuugcuuugugu

SEQ ID NO: 2249175 - RNA, 19 nt, Artificial Sequence
  Description of Artificial Sequence: Synthetic oligonucleotide
  Antisense strand to SEQ ID NO: 2249174
acacaaagcaaauuuggcu

SEQ ID NO: 2249176 - RNA, 19 nt, Artificial Sequence
  Description of Artificial Sequence: Synthetic oligonucleotide
  Sense strand starting at position 3662 of SEQ ID NO: 1884218
ucauuaagugcugggauca

SEQ ID NO: 2249177 - RNA, 19 nt, Artificial Sequence
  Description of Artificial Sequence: Synthetic oligonucleotide
  Antisense strand to SEQ ID NO: 2249176
ugaucccagcacuuaauga

SEQ ID NO: 2249178 - RNA, 19 nt, Artificial Sequence
  Description of Artificial Sequence: Synthetic oligonucleotide
  Sense strand starting at position 3741 of SEQ ID NO: 1884218
cucuguuaucccuaguuuc

SEQ ID NO: 2249179 - RNA, 19 nt, Artificial Sequence
  Description of Artificial Sequence: Synthetic oligonucleotide
  Antisense strand to SEQ ID NO: 2249178
gaaacuagggauaacagag

SEQ ID NO: 2249180 - RNA, 19 nt, Artificial Sequence
  Description of Artificial Sequence: Synthetic oligonucleotide
  Sense strand starting at position 3842 of SEQ ID NO: 1884218
gcaaauuaauguccaugaa

SEQ ID NO: 2249181 - RNA, 19 nt, Artificial Sequence
  Description of Artificial Sequence: Synthetic oligonucleotide
  Antisense strand to SEQ ID NO: 2249180
uucauggacauuaauuugc

SEQ ID NO: 2249182 - RNA, 19 nt, Artificial Sequence
  Description of Artificial Sequence: Synthetic oligonucleotide
  Sense strand starting at position 3928 of SEQ ID NO: 1884218
ccaugacaucuguguuucu

SEQ ID NO: 2249183 - RNA, 19 nt, Artificial Sequence
  Description of Artificial Sequence: Synthetic oligonucleotide
  Antisense strand to SEQ ID NO: 2249182
agaaacacagaugucaugg

SEQ ID NO: 2249184 - RNA, 19 nt, Artificial Sequence
  Description of Artificial Sequence: Synthetic oligonucleotide
  Sense strand starting at position 3931 of SEQ ID NO: 1884218
ugacaucuguguuucuaca

SEQ ID NO: 2249185 - RNA, 19 nt, Artificial Sequence
  Description of Artificial Sequence: Synthetic oligonucleotide
  Antisense strand to SEQ ID NO: 2249184
uguagaaacacagauguca

SEQ ID NO: 2249186 - RNA, 19 nt, Artificial Sequence
  Description of Artificial Sequence: Synthetic oligonucleotide
  Sense strand starting at position 264 of SEQ ID NO: 1884219
gccagaagcuauuauuagu

SEQ ID NO: 2249187 - RNA, 19 nt, Artificial Sequence
  Description of Artificial Sequence: Synthetic oligonucleotide
  Antisense strand to SEQ ID NO: 2249186
acuaauaauagcuucuggc

SEQ ID NO: 2249188 - RNA, 19 nt, Artificial Sequence
  Description of Artificial Sequence: Synthetic oligonucleotide
  Sense strand starting at position 298 of SEQ ID NO: 1884219
uuguuucuagaacaugagu

SEQ ID NO: 2249189 - RNA, 19 nt, Artificial Sequence
  Description of Artificial Sequence: Synthetic oligonucleotide
  Antisense strand to SEQ ID NO: 2249188
acucauguucuagaaacaa

SEQ ID NO: 2249190 - RNA, 19 nt, Artificial Sequence
  Description of Artificial Sequence: Synthetic oligonucleotide
  Sense strand starting at position 353 of SEQ ID NO: 1884219
aggugaucuuagggucaua

SEQ ID NO: 2249191 - RNA, 19 nt, Artificial Sequence
  Description of Artificial Sequence: Synthetic oligonucleotide
  Antisense strand to SEQ ID NO: 2249190
uaugacccuaagaucaccu

SEQ ID NO: 2249192 - RNA, 19 nt, Artificial Sequence
  Description of Artificial Sequence: Synthetic oligonucleotide
  Sense strand starting at position 364 of SEQ ID NO: 1884219
gggucauacuccuuuauua

SEQ ID NO: 2249193 - RNA, 19 nt, Artificial Sequence
  Description of Artificial Sequence: Synthetic oligonucleotide
  Antisense strand to SEQ ID NO: 2249192
uaauaaaggaguaugaccc

SEQ ID NO: 2249194 - RNA, 19 nt, Artificial Sequence
  Description of Artificial Sequence: Synthetic oligonucleotide
  Sense strand starting at position 1221 of SEQ ID NO: 1884219
gucacaaauuuguauuaca

SEQ ID NO: 2249195 - RNA, 19 nt, Artificial Sequence
  Description of Artificial Sequence: Synthetic oligonucleotide
  Antisense strand to SEQ ID NO: 2249194
uguaauacaaauuugugac

SEQ ID NO: 2249196 - RNA, 19 nt, Artificial Sequence
  Description of Artificial Sequence: Synthetic oligonucleotide
  Sense strand starting at position 1264 of SEQ ID NO: 1884219
auagaauguuuccauuagu

SEQ ID NO: 2249197 - RNA, 19 nt, Artificial Sequence
  Description of Artificial Sequence: Synthetic oligonucleotide
  Antisense strand to SEQ ID NO: 2249196
acuaauggaaacauucuau

SEQ ID NO: 2249198 - RNA, 19 nt, Artificial Sequence
  Description of Artificial Sequence: Synthetic oligonucleotide
  Sense strand starting at position 2055 of SEQ ID NO: 1884219
cuugaacccugagcucaaa

SEQ ID NO: 2249199 - RNA, 19 nt, Artificial Sequence
  Description of Artificial Sequence: Synthetic oligonucleotide
  Antisense strand to SEQ ID NO: 2249198
uuugagcucaggguucaag

SEQ ID NO: 2249200 - RNA, 19 nt, Artificial Sequence
  Description of Artificial Sequence: Synthetic oligonucleotide
  Sense strand starting at position 2130 of SEQ ID NO: 1884219
ccaggucuaccucauacuu

SEQ ID NO: 2249201 - RNA, 19 nt, Artificial Sequence
  Description of Artificial Sequence: Synthetic oligonucleotide
  Antisense strand to SEQ ID NO: 2249200
aaguaugagguagaccugg

SEQ ID NO: 2249202 - RNA, 19 nt, Artificial Sequence
  Description of Artificial Sequence: Synthetic oligonucleotide
  Sense strand starting at position 2164 of SEQ ID NO: 1884219
gauggagugucauccuguc

SEQ ID NO: 2249203 - RNA, 19 nt, Artificial Sequence
  Description of Artificial Sequence: Synthetic oligonucleotide
  Antisense strand to SEQ ID NO: 2249202
gacaggaugacacuccauc

SEQ ID NO: 2249204 - RNA, 19 nt, Artificial Sequence
  Description of Artificial Sequence: Synthetic oligonucleotide
  Sense strand starting at position 2483 of SEQ ID NO: 1884219
cugauuaguuaguauucca

SEQ ID NO: 2249205 - RNA, 19 nt, Artificial Sequence
  Description of Artificial Sequence: Synthetic oligonucleotide
  Antisense strand to SEQ ID NO: 2249204
uggaauacuaacuaaucag

SEQ ID NO: 2249206 - RNA, 19 nt, Artificial Sequence
  Description of Artificial Sequence: Synthetic oligonucleotide
  Sense strand starting at position 2496 of SEQ ID NO: 1884219
auuccauuguaagaauguu

SEQ ID NO: 2249207 - RNA, 19 nt, Artificial Sequence
  Description of Artificial Sequence: Synthetic oligonucleotide
  Antisense strand to SEQ ID NO: 2249206
aacauucuuacaauggaau

SEQ ID NO: 2249208 - RNA, 19 nt, Artificial Sequence
  Description of Artificial Sequence: Synthetic oligonucleotide
  Sense strand starting at position 2556 of SEQ ID NO: 1884219
agaggcucacucuauuaca

SEQ ID NO: 2249209 - RNA, 19 nt, Artificial Sequence
  Description of Artificial Sequence: Synthetic oligonucleotide
  Antisense strand to SEQ ID NO: 2249208
uguaauagagugagccucu

SEQ ID NO: 2249210 - RNA, 19 nt, Artificial Sequence
  Description of Artificial Sequence: Synthetic oligonucleotide
  Sense strand starting at position 2814 of SEQ ID NO: 1884219
cacccagccuguuguaaga

SEQ ID NO: 2249211 - RNA, 19 nt, Artificial Sequence
  Description of Artificial Sequence: Synthetic oligonucleotide
  Antisense strand to SEQ ID NO: 2249210
ucuuacaacaggcugggug

SEQ ID NO: 2249212 - RNA, 19 nt, Artificial Sequence
  Description of Artificial Sequence: Synthetic oligonucleotide
  Sense strand starting at position 2816 of SEQ ID NO: 1884219
cccagccuguuguaagaau

SEQ ID NO: 2249213 - RNA, 19 nt, Artificial Sequence
  Description of Artificial Sequence: Synthetic oligonucleotide
  Antisense strand to SEQ ID NO: 2249212
auucuuacaacaggcuggg

SEQ ID NO: 2249214 - RNA, 19 nt, Artificial Sequence
  Description of Artificial Sequence: Synthetic oligonucleotide
  Sense strand starting at position 2867 of SEQ ID NO: 1884219
uuguuuccagccugagcua

SEQ ID NO: 2249215 - RNA, 19 nt, Artificial Sequence
  Description of Artificial Sequence: Synthetic oligonucleotide
  Antisense strand to SEQ ID NO: 2249214
uagcucaggcuggaaacaa

SEQ ID NO: 2249216 - RNA, 19 nt, Artificial Sequence
  Description of Artificial Sequence: Synthetic oligonucleotide
  Sense strand starting at position 2870 of SEQ ID NO: 1884219
uuuccagccugagcuauua

SEQ ID NO: 2249217 - RNA, 19 nt, Artificial Sequence
  Description of Artificial Sequence: Synthetic oligonucleotide
  Antisense strand to SEQ ID NO: 2249216
uaauagcucaggcuggaaa

SEQ ID NO: 2249218 - RNA, 19 nt, Artificial Sequence
  Description of Artificial Sequence: Synthetic oligonucleotide
  Sense strand starting at position 2914 of SEQ ID NO: 1884219
uguauaagucauuguguga

SEQ ID NO: 2249219 - RNA, 19 nt, Artificial Sequence
  Description of Artificial Sequence: Synthetic oligonucleotide
  Antisense strand to SEQ ID NO: 2249218
ucacacaaugacuuauaca

SEQ ID NO: 2249220 - RNA, 19 nt, Artificial Sequence
  Description of Artificial Sequence: Synthetic oligonucleotide
  Sense strand starting at position 2917 of SEQ ID NO: 1884219
auaagucauugugugaaua

SEQ ID NO: 2249221 - RNA, 19 nt, Artificial Sequence
  Description of Artificial Sequence: Synthetic oligonucleotide
  Antisense strand to SEQ ID NO: 2249220
uauucacacaaugacuuau

SEQ ID NO: 2249222 - RNA, 19 nt, Artificial Sequence
  Description of Artificial Sequence: Synthetic oligonucleotide
  Sense strand starting at position 2918 of SEQ ID NO: 1884219
uaagucauugugugaauac

SEQ ID NO: 2249223 - RNA, 19 nt, Artificial Sequence
  Description of Artificial Sequence: Synthetic oligonucleotide
  Antisense strand to SEQ ID NO: 2249222
guauucacacaaugacuua

SEQ ID NO: 2249224 - RNA, 19 nt, Artificial Sequence
  Description of Artificial Sequence: Synthetic oligonucleotide
  Sense strand starting at position 2919 of SEQ ID NO: 1884219
aagucauugugugaauaca

SEQ ID NO: 2249225 - RNA, 19 nt, Artificial Sequence
  Description of Artificial Sequence: Synthetic oligonucleotide
  Antisense strand to SEQ ID NO: 2249224
uguauucacacaaugacuu

SEQ ID NO: 2249226 - RNA, 19 nt, Artificial Sequence
  Description of Artificial Sequence: Synthetic oligonucleotide
  Sense strand starting at position 2943 of SEQ ID NO: 1884219
ucauuuaucuaggagugga

SEQ ID NO: 2249227 - RNA, 19 nt, Artificial Sequence
  Description of Artificial Sequence: Synthetic oligonucleotide
  Antisense strand to SEQ ID NO: 2249226
uccacuccuagauaaauga

SEQ ID NO: 2249228 - RNA, 19 nt, Artificial Sequence
  Description of Artificial Sequence: Synthetic oligonucleotide
  Sense strand starting at position 2967 of SEQ ID NO: 1884219
uggcucguguguuguuuau

SEQ ID NO: 2249229 - RNA, 19 nt, Artificial Sequence
  Description of Artificial Sequence: Synthetic oligonucleotide
  Antisense strand to SEQ ID NO: 2249228
auaaacaacacacgagcca

SEQ ID NO: 2249230 - RNA, 19 nt, Artificial Sequence
  Description of Artificial Sequence: Synthetic oligonucleotide
  Sense strand starting at position 2969 of SEQ ID NO: 1884219
gcucguguguuguuuauuu

SEQ ID NO: 2249231 - RNA, 19 nt, Artificial Sequence
  Description of Artificial Sequence: Synthetic oligonucleotide
  Antisense strand to SEQ ID NO: 2249230
aaauaaacaacacacgagc

SEQ ID NO: 2249232 - RNA, 19 nt, Artificial Sequence
  Description of Artificial Sequence: Synthetic oligonucleotide
  Sense strand starting at position 2971 of SEQ ID NO: 1884219
ucguguguuguuuauuuaa

SEQ ID NO: 2249233 - RNA, 19 nt, Artificial Sequence
  Description of Artificial Sequence: Synthetic oligonucleotide
  Antisense strand to SEQ ID NO: 2249232
uuaaauaaacaacacacga

SEQ ID NO: 2249234 - RNA, 19 nt, Artificial Sequence
  Description of Artificial Sequence: Synthetic oligonucleotide
  Sense strand starting at position 2973 of SEQ ID NO: 1884219
guguguuguuuauuuaacu

SEQ ID NO: 2249235 - RNA, 19 nt, Artificial Sequence
  Description of Artificial Sequence: Synthetic oligonucleotide
  Antisense strand to SEQ ID NO: 2249234
aguuaaauaaacaacacac

SEQ ID NO: 2249236 - RNA, 19 nt, Artificial Sequence
  Description of Artificial Sequence: Synthetic oligonucleotide
  Sense strand starting at position 3045 of SEQ ID NO: 1884219
cuaccuguaguguggauua

SEQ ID NO: 2249237 - RNA, 19 nt, Artificial Sequence
  Description of Artificial Sequence: Synthetic oligonucleotide
  Antisense strand to SEQ ID NO: 2249236
uaauccacacuacagguag

SEQ ID NO: 2249238 - RNA, 19 nt, Artificial Sequence
  Description of Artificial Sequence: Synthetic oligonucleotide
  Sense strand starting at position 3238 of SEQ ID NO: 1884219
gugguaugaucagaguuca

SEQ ID NO: 2249239 - RNA, 19 nt, Artificial Sequence
  Description of Artificial Sequence: Synthetic oligonucleotide
  Antisense strand to SEQ ID NO: 2249238
ugaacucugaucauaccac

SEQ ID NO: 2249240 - RNA, 19 nt, Artificial Sequence
  Description of Artificial Sequence: Synthetic oligonucleotide
  Sense strand starting at position 3447 of SEQ ID NO: 1884219
aagugauugucaugccucu

SEQ ID NO: 2249241 - RNA, 19 nt, Artificial Sequence
  Description of Artificial Sequence: Synthetic oligonucleotide
  Antisense strand to SEQ ID NO: 2249240
agaggcaugacaaucacuu

SEQ ID NO: 2249242 - RNA, 19 nt, Artificial Sequence
  Description of Artificial Sequence: Synthetic oligonucleotide
  Sense strand starting at position 3731 of SEQ ID NO: 1884219
ggugccuaaguuugagaga

SEQ ID NO: 2249243 - RNA, 19 nt, Artificial Sequence
  Description of Artificial Sequence: Synthetic oligonucleotide
  Antisense strand to SEQ ID NO: 2249242
ucucucaaacuuaggcacc

SEQ ID NO: 2249244 - RNA, 19 nt, Artificial Sequence
  Description of Artificial Sequence: Synthetic oligonucleotide
  Sense strand starting at position 3732 of SEQ ID NO: 1884219
gugccuaaguuugagagaa

SEQ ID NO: 2249245 - RNA, 19 nt, Artificial Sequence
  Description of Artificial Sequence: Synthetic oligonucleotide
  Antisense strand to SEQ ID NO: 2249244
uucucucaaacuuaggcac

SEQ ID NO: 2249246 - RNA, 19 nt, Artificial Sequence
  Description of Artificial Sequence: Synthetic oligonucleotide
  Sense strand starting at position 3779 of SEQ ID NO: 1884219
cauagaguaugcugaguuu

SEQ ID NO: 2249247 - RNA, 19 nt, Artificial Sequence
  Description of Artificial Sequence: Synthetic oligonucleotide
  Antisense strand to SEQ ID NO: 2249246
aaacucagcauacucuaug

SEQ ID NO: 2249248 - RNA, 19 nt, Artificial Sequence
  Description of Artificial Sequence: Synthetic oligonucleotide
  Sense strand starting at position 3961 of SEQ ID NO: 1884219
ggcccauugucacgugugu

SEQ ID NO: 2249249 - RNA, 19 nt, Artificial Sequence
  Description of Artificial Sequence: Synthetic oligonucleotide
  Antisense strand to SEQ ID NO: 2249248
acacacgugacaaugggcc

SEQ ID NO: 2249250 - RNA, 19 nt, Artificial Sequence
  Description of Artificial Sequence: Synthetic oligonucleotide
  Sense strand starting at position 3963 of SEQ ID NO: 1884219
cccauugucacguguguga

SEQ ID NO: 2249251 - RNA, 19 nt, Artificial Sequence
  Description of Artificial Sequence: Synthetic oligonucleotide
  Antisense strand to SEQ ID NO: 2249250
ucacacacgugacaauggg

SEQ ID NO: 2249252 - RNA, 19 nt, Artificial Sequence
  Description of Artificial Sequence: Synthetic oligonucleotide
  Sense strand starting at position 3965 of SEQ ID NO: 1884219
cauugucacgugugugaau

SEQ ID NO: 2249253 - RNA, 19 nt, Artificial Sequence
  Description of Artificial Sequence: Synthetic oligonucleotide
  Antisense strand to SEQ ID NO: 2249252
auucacacacgugacaaug

SEQ ID NO: 2249254 - RNA, 19 nt, Artificial Sequence
  Description of Artificial Sequence: Synthetic oligonucleotide
  Sense strand starting at position 3967 of SEQ ID NO: 1884219
uugucacgugugugaauga

SEQ ID NO: 2249255 - RNA, 19 nt, Artificial Sequence
  Description of Artificial Sequence: Synthetic oligonucleotide
  Antisense strand to SEQ ID NO: 2249254
ucauucacacacgugacaa

SEQ ID NO: 2249256 - RNA, 19 nt, Artificial Sequence
  Description of Artificial Sequence: Synthetic oligonucleotide
  Sense strand starting at position 3978 of SEQ ID NO: 1884219
gugaaugacucuuugugcu

SEQ ID NO: 2249257 - RNA, 19 nt, Artificial Sequence
  Description of Artificial Sequence: Synthetic oligonucleotide
  Antisense strand to SEQ ID NO: 2249256
agcacaaagagucauucac

SEQ ID NO: 2249258 - RNA, 19 nt, Artificial Sequence
  Description of Artificial Sequence: Synthetic oligonucleotide
  Sense strand starting at position 3980 of SEQ ID NO: 1884219
gaaugacucuuugugcuug

SEQ ID NO: 2249259 - RNA, 19 nt, Artificial Sequence
  Description of Artificial Sequence: Synthetic oligonucleotide
  Antisense strand to SEQ ID NO: 2249258
caagcacaaagagucauuc

SEQ ID NO: 2249260 - RNA, 19 nt, Artificial Sequence
  Description of Artificial Sequence: Synthetic oligonucleotide
  Sense strand starting at position 265 of SEQ ID NO: 1884220
auaaaugccugugucauuu

SEQ ID NO: 2249261 - RNA, 19 nt, Artificial Sequence
  Description of Artificial Sequence: Synthetic oligonucleotide
  Antisense strand to SEQ ID NO: 2249260
aaaugacacaggcauuuau

SEQ ID NO: 2249262 - RNA, 19 nt, Artificial Sequence
  Description of Artificial Sequence: Synthetic oligonucleotide
  Sense strand starting at position 470 of SEQ ID NO: 1884220
gagauaagucaagguaugu

SEQ ID NO: 2249263 - RNA, 19 nt, Artificial Sequence
  Description of Artificial Sequence: Synthetic oligonucleotide
  Antisense strand to SEQ ID NO: 2249262
acauaccuugacuuaucuc

SEQ ID NO: 2249264 - RNA, 19 nt, Artificial Sequence
  Description of Artificial Sequence: Synthetic oligonucleotide
  Sense strand starting at position 475 of SEQ ID NO: 1884220
aagucaagguauguuaaca

SEQ ID NO: 2249265 - RNA, 19 nt, Artificial Sequence
  Description of Artificial Sequence: Synthetic oligonucleotide
  Antisense strand to SEQ ID NO: 2249264
uguuaacauaccuugacuu

SEQ ID NO: 2249266 - RNA, 19 nt, Artificial Sequence
  Description of Artificial Sequence: Synthetic oligonucleotide
  Sense strand starting at position 511 of SEQ ID NO: 1884220
gauguaaagcaguacagua

SEQ ID NO: 2249267 - RNA, 19 nt, Artificial Sequence
  Description of Artificial Sequence: Synthetic oligonucleotide
  Antisense strand to SEQ ID NO: 2249266
uacuguacugcuuuacauc

SEQ ID NO: 2249268 - RNA, 19 nt, Artificial Sequence
  Description of Artificial Sequence: Synthetic oligonucleotide
  Sense strand starting at position 518 of SEQ ID NO: 1884220
agcaguacaguauaaagau

SEQ ID NO: 2249269 - RNA, 19 nt, Artificial Sequence
  Description of Artificial Sequence: Synthetic oligonucleotide
  Antisense strand to SEQ ID NO: 2249268
aucuuuauacuguacugcu

SEQ ID NO: 2249270 - RNA, 19 nt, Artificial Sequence
  Description of Artificial Sequence: Synthetic oligonucleotide
  Sense strand starting at position 537 of SEQ ID NO: 1884220
auuagcauuccucagucua

SEQ ID NO: 2249271 - RNA, 19 nt, Artificial Sequence
  Description of Artificial Sequence: Synthetic oligonucleotide
  Antisense strand to SEQ ID NO: 2249270
uagacugaggaaugcuaau

SEQ ID NO: 2249272 - RNA, 19 nt, Artificial Sequence
  Description of Artificial Sequence: Synthetic oligonucleotide
  Sense strand starting at position 647 of SEQ ID NO: 1884220
accaauaguuaaguggauu

SEQ ID NO: 2249273 - RNA, 19 nt, Artificial Sequence
  Description of Artificial Sequence: Synthetic oligonucleotide
  Antisense strand to SEQ ID NO: 2249272
aauccacuuaacuauuggu

SEQ ID NO: 2249274 - RNA, 19 nt, Artificial Sequence
  Description of Artificial Sequence: Synthetic oligonucleotide
  Sense strand starting at position 670 of SEQ ID NO: 1884220
ugcucaaaguuuguuauuu

SEQ ID NO: 2249275 - RNA, 19 nt, Artificial Sequence
  Description of Artificial Sequence: Synthetic oligonucleotide
  Antisense strand to SEQ ID NO: 2249274
aaauaacaaacuuugagca

SEQ ID NO: 2249276 - RNA, 19 nt, Artificial Sequence
  Description of Artificial Sequence: Synthetic oligonucleotide
  Sense strand starting at position 717 of SEQ ID NO: 1884220
ggcugaacuuuaucaucaa

SEQ ID NO: 2249277 - RNA, 19 nt, Artificial Sequence
  Description of Artificial Sequence: Synthetic oligonucleotide
  Antisense strand to SEQ ID NO: 2249276
uugaugauaaaguucagcc

SEQ ID NO: 2249278 - RNA, 19 nt, Artificial Sequence
  Description of Artificial Sequence: Synthetic oligonucleotide
  Sense strand starting at position 803 of SEQ ID NO: 1884220
ggguaaauucuugaguacu

SEQ ID NO: 2249279 - RNA, 19 nt, Artificial Sequence
  Description of Artificial Sequence: Synthetic oligonucleotide
  Antisense strand to SEQ ID NO: 2249278
aguacucaagaauuuaccc

SEQ ID NO: 2249280 - RNA, 19 nt, Artificial Sequence
  Description of Artificial Sequence: Synthetic oligonucleotide
  Sense strand starting at position 809 of SEQ ID NO: 1884220
auucuugaguacucuagau

SEQ ID NO: 2249281 - RNA, 19 nt, Artificial Sequence
  Description of Artificial Sequence: Synthetic oligonucleotide
  Antisense strand to SEQ ID NO: 2249280
aucuagaguacucaagaau

SEQ ID NO: 2249282 - RNA, 19 nt, Artificial Sequence
  Description of Artificial Sequence: Synthetic oligonucleotide
  Sense strand starting at position 811 of SEQ ID NO: 1884220
ucuugaguacucuagauau

SEQ ID NO: 2249283 - RNA, 19 nt, Artificial Sequence
  Description of Artificial Sequence: Synthetic oligonucleotide
  Antisense strand to SEQ ID NO: 2249282
auaucuagaguacucaaga

SEQ ID NO: 2249284 - RNA, 19 nt, Artificial Sequence
  Description of Artificial Sequence: Synthetic oligonucleotide
  Sense strand starting at position 1269 of SEQ ID NO: 1884220
ugcaguauuuaucuugauu

SEQ ID NO: 2249285 - RNA, 19 nt, Artificial Sequence
  Description of Artificial Sequence: Synthetic oligonucleotide
  Antisense strand to SEQ ID NO: 2249284
aaucaagauaaauacugca

SEQ ID NO: 2249286 - RNA, 19 nt, Artificial Sequence
  Description of Artificial Sequence: Synthetic oligonucleotide
  Sense strand starting at position 2049 of SEQ ID NO: 1884220
ccaaaugaggucugugaaa

SEQ ID NO: 2249287 - RNA, 19 nt, Artificial Sequence
  Description of Artificial Sequence: Synthetic oligonucleotide
  Antisense strand to SEQ ID NO: 2249286
uuucacagaccucauuugg

SEQ ID NO: 2249288 - RNA, 19 nt, Artificial Sequence
  Description of Artificial Sequence: Synthetic oligonucleotide
  Sense strand starting at position 2165 of SEQ ID NO: 1884220
agccauuucccuggcuuga

SEQ ID NO: 2249289 - RNA, 19 nt, Artificial Sequence
  Description of Artificial Sequence: Synthetic oligonucleotide
  Antisense strand to SEQ ID NO: 2249288
ucaagccagggaaauggcu

SEQ ID NO: 2249290 - RNA, 19 nt, Artificial Sequence
  Description of Artificial Sequence: Synthetic oligonucleotide
  Sense strand starting at position 2233 of SEQ ID NO: 1884220
auauguuaugguuagggau

SEQ ID NO: 2249291 - RNA, 19 nt, Artificial Sequence
  Description of Artificial Sequence: Synthetic oligonucleotide
  Antisense strand to SEQ ID NO: 2249290
aucccuaaccauaacauau

SEQ ID NO: 2249292 - RNA, 19 nt, Artificial Sequence
  Description of Artificial Sequence: Synthetic oligonucleotide
  Sense strand starting at position 2239 of SEQ ID NO: 1884220
uaugguuagggauaugucu

SEQ ID NO: 2249293 - RNA, 19 nt, Artificial Sequence
  Description of Artificial Sequence: Synthetic oligonucleotide
  Antisense strand to SEQ ID NO: 2249292
agacauaucccuaaccaua

SEQ ID NO: 2249294 - RNA, 19 nt, Artificial Sequence
  Description of Artificial Sequence: Synthetic oligonucleotide
  Sense strand starting at position 2273 of SEQ ID NO: 1884220
guaguuuguguuucuguuu

SEQ ID NO: 2249295 - RNA, 19 nt, Artificial Sequence
  Description of Artificial Sequence: Synthetic oligonucleotide
  Antisense strand to SEQ ID NO: 2249294
aaacagaaacacaaacuac

SEQ ID NO: 2249296 - RNA, 19 nt, Artificial Sequence
  Description of Artificial Sequence: Synthetic oligonucleotide
  Sense strand starting at position 2421 of SEQ ID NO: 1884220
ggauaaaguaugggcugau

SEQ ID NO: 2249297 - RNA, 19 nt, Artificial Sequence
  Description of Artificial Sequence: Synthetic oligonucleotide
  Antisense strand to SEQ ID NO: 2249296
aucagcccauacuuuaucc

SEQ ID NO: 2249298 - RNA, 19 nt, Artificial Sequence
  Description of Artificial Sequence: Synthetic oligonucleotide
  Sense strand starting at position 2541 of SEQ ID NO: 1884220
ucaguuuguaguuaugaag

SEQ ID NO: 2249299 - RNA, 19 nt, Artificial Sequence
  Description of Artificial Sequence: Synthetic oligonucleotide
  Antisense strand to SEQ ID NO: 2249298
cuucauaacuacaaacuga

SEQ ID NO: 2249300 - RNA, 19 nt, Artificial Sequence
  Description of Artificial Sequence: Synthetic oligonucleotide
  Sense strand starting at position 2555 of SEQ ID NO: 1884220
ugaagucuugugcauuaaa

SEQ ID NO: 2249301 - RNA, 19 nt, Artificial Sequence
  Description of Artificial Sequence: Synthetic oligonucleotide
  Antisense strand to SEQ ID NO: 2249300
uuuaaugcacaagacuuca

SEQ ID NO: 2249302 - RNA, 19 nt, Artificial Sequence
  Description of Artificial Sequence: Synthetic oligonucleotide
  Sense strand starting at position 2591 of SEQ ID NO: 1884220
cuaguaagucugcaauuaa

SEQ ID NO: 2249303 - RNA, 19 nt, Artificial Sequence
  Description of Artificial Sequence: Synthetic oligonucleotide
  Antisense strand to SEQ ID NO: 2249302
uuaauugcagacuuacuag

SEQ ID NO: 2249304 - RNA, 19 nt, Artificial Sequence
  Description of Artificial Sequence: Synthetic oligonucleotide
  Sense strand starting at position 2699 of SEQ ID NO: 1884220
uccuuagauggugauucuu

SEQ ID NO: 2249305 - RNA, 19 nt, Artificial Sequence
  Description of Artificial Sequence: Synthetic oligonucleotide
  Antisense strand to SEQ ID NO: 2249304
aagaaucaccaucuaagga

SEQ ID NO: 2249306 - RNA, 19 nt, Artificial Sequence
  Description of Artificial Sequence: Synthetic oligonucleotide
  Sense strand starting at position 2780 of SEQ ID NO: 1884220
aguccuuuagcuuaaugaa

SEQ ID NO: 2249307 - RNA, 19 nt, Artificial Sequence
  Description of Artificial Sequence: Synthetic oligonucleotide
  Antisense strand to SEQ ID NO: 2249306
uucauuaagcuaaaggacu

SEQ ID NO: 2249308 - RNA, 19 nt, Artificial Sequence
  Description of Artificial Sequence: Synthetic oligonucleotide
  Sense strand starting at position 2793 of SEQ ID NO: 1884220
aaugaauguuaguucugga

SEQ ID NO: 2249309 - RNA, 19 nt, Artificial Sequence
  Description of Artificial Sequence: Synthetic oligonucleotide
  Antisense strand to SEQ ID NO: 2249308
uccagaacuaacauucauu

SEQ ID NO: 2249310 - RNA, 19 nt, Artificial Sequence
  Description of Artificial Sequence: Synthetic oligonucleotide
  Sense strand starting at position 2798 of SEQ ID NO: 1884220
auguuaguucuggaauaau

SEQ ID NO: 2249311 - RNA, 19 nt, Artificial Sequence
  Description of Artificial Sequence: Synthetic oligonucleotide
  Antisense strand to SEQ ID NO: 2249310
auuauuccagaacuaacau

SEQ ID NO: 2249312 - RNA, 19 nt, Artificial Sequence
  Description of Artificial Sequence: Synthetic oligonucleotide
  Sense strand starting at position 3042 of SEQ ID NO: 1884220
uuaugugacugacuguaua

SEQ ID NO: 2249313 - RNA, 19 nt, Artificial Sequence
  Description of Artificial Sequence: Synthetic oligonucleotide
  Antisense strand to SEQ ID NO: 2249312
uauacagucagucacauaa

SEQ ID NO: 2249314 - RNA, 19 nt, Artificial Sequence
  Description of Artificial Sequence: Synthetic oligonucleotide
  Sense strand starting at position 3111 of SEQ ID NO: 1884220
uaaugcuugguagauuauu

SEQ ID NO: 2249315 - RNA, 19 nt, Artificial Sequence
  Description of Artificial Sequence: Synthetic oligonucleotide
  Antisense strand to SEQ ID NO: 2249314
aauaaucuaccaagcauua

SEQ ID NO: 2249316 - RNA, 19 nt, Artificial Sequence
  Description of Artificial Sequence: Synthetic oligonucleotide
  Sense strand starting at position 3154 of SEQ ID NO: 1884220
uuacucuaguuauugauca

SEQ ID NO: 2249317 - RNA, 19 nt, Artificial Sequence
  Description of Artificial Sequence: Synthetic oligonucleotide
  Antisense strand to SEQ ID NO: 2249316
ugaucaauaacuagaguaa

SEQ ID NO: 2249318 - RNA, 19 nt, Artificial Sequence
  Description of Artificial Sequence: Synthetic oligonucleotide
  Sense strand starting at position 3291 of SEQ ID NO: 1884220
guugaaacacugugagaua

SEQ ID NO: 2249319 - RNA, 19 nt, Artificial Sequence
  Description of Artificial Sequence: Synthetic oligonucleotide
  Antisense strand to SEQ ID NO: 2249318
uaucucacaguguuucaac

SEQ ID NO: 2249320 - RNA, 19 nt, Artificial Sequence
  Description of Artificial Sequence: Synthetic oligonucleotide
  Sense strand starting at position 3343 of SEQ ID NO: 1884220
ccaaauaaauuugggauau

SEQ ID NO: 2249321 - RNA, 19 nt, Artificial Sequence
  Description of Artificial Sequence: Synthetic oligonucleotide
  Antisense strand to SEQ ID NO: 2249320
auaucccaaauuuauuugg

SEQ ID NO: 2249322 - RNA, 19 nt, Artificial Sequence
  Description of Artificial Sequence: Synthetic oligonucleotide
  Sense strand starting at position 3356 of SEQ ID NO: 1884220
ggauaucuucuauguaaua

SEQ ID NO: 2249323 - RNA, 19 nt, Artificial Sequence
  Description of Artificial Sequence: Synthetic oligonucleotide
  Antisense strand to SEQ ID NO: 2249322
uauuacauagaagauaucc

SEQ ID NO: 2249324 - RNA, 19 nt, Artificial Sequence
  Description of Artificial Sequence: Synthetic oligonucleotide
  Sense strand starting at position 3387 of SEQ ID NO: 1884220
uugcgaagaacguauagaa

SEQ ID NO: 2249325 - RNA, 19 nt, Artificial Sequence
  Description of Artificial Sequence: Synthetic oligonucleotide
  Antisense strand to SEQ ID NO: 2249324
uucuauacguucuucgcaa

SEQ ID NO: 2249326 - RNA, 19 nt, Artificial Sequence
  Description of Artificial Sequence: Synthetic oligonucleotide
  Sense strand starting at position 3464 of SEQ ID NO: 1884220
aaaccuauuugauagugga

SEQ ID NO: 2249327 - RNA, 19 nt, Artificial Sequence
  Description of Artificial Sequence: Synthetic oligonucleotide
  Antisense strand to SEQ ID NO: 2249326
uccacuaucaaauagguuu

SEQ ID NO: 2249328 - RNA, 19 nt, Artificial Sequence
  Description of Artificial Sequence: Synthetic oligonucleotide
  Sense strand starting at position 3477 of SEQ ID NO: 1884220
aguggaacuaaauguugua

SEQ ID NO: 2249329 - RNA, 19 nt, Artificial Sequence
  Description of Artificial Sequence: Synthetic oligonucleotide
  Antisense strand to SEQ ID NO: 2249328
uacaacauuuaguuccacu

SEQ ID NO: 2249330 - RNA, 19 nt, Artificial Sequence
  Description of Artificial Sequence: Synthetic oligonucleotide
  Sense strand starting at position 3561 of SEQ ID NO: 1884220
gguauuccaguacauguau

SEQ ID NO: 2249331 - RNA, 19 nt, Artificial Sequence
  Description of Artificial Sequence: Synthetic oligonucleotide
  Antisense strand to SEQ ID NO: 2249330
auacauguacuggaauacc

SEQ ID NO: 2249332 - RNA, 19 nt, Artificial Sequence
  Description of Artificial Sequence: Synthetic oligonucleotide
  Sense strand starting at position 3573 of SEQ ID NO: 1884220
cauguauuugcaugucagu

SEQ ID NO: 2249333 - RNA, 19 nt, Artificial Sequence
  Description of Artificial Sequence: Synthetic oligonucleotide
  Antisense strand to SEQ ID NO: 2249332
acugacaugcaaauacaug

SEQ ID NO: 2249334 - RNA, 19 nt, Artificial Sequence
  Description of Artificial Sequence: Synthetic oligonucleotide
  Sense strand starting at position 3772 of SEQ ID NO: 1884220
auugaucuucuuuggaacu

SEQ ID NO: 2249335 - RNA, 19 nt, Artificial Sequence
  Description of Artificial Sequence: Synthetic oligonucleotide
  Antisense strand to SEQ ID NO: 2249334
aguuccaaagaagaucaau

SEQ ID NO: 2249336 - RNA, 19 nt, Artificial Sequence
  Description of Artificial Sequence: Synthetic oligonucleotide
  Sense strand starting at position 3784 of SEQ ID NO: 1884220
uggaacuacuuucuguuaa

SEQ ID NO: 2249337 - RNA, 19 nt, Artificial Sequence
  Description of Artificial Sequence: Synthetic oligonucleotide
  Antisense strand to SEQ ID NO: 2249336
uuaacagaaaguaguucca

SEQ ID NO: 2249338 - RNA, 19 nt, Artificial Sequence
  Description of Artificial Sequence: Synthetic oligonucleotide
  Sense strand starting at position 3800 of SEQ ID NO: 1884220
uaagucuuagcaggaggaa

SEQ ID NO: 2249339 - RNA, 19 nt, Artificial Sequence
  Description of Artificial Sequence: Synthetic oligonucleotide
  Antisense strand to SEQ ID NO: 2249338
uuccuccugcuaagacuua

SEQ ID NO: 2249340 - RNA, 19 nt, Artificial Sequence
  Description of Artificial Sequence: Synthetic oligonucleotide
  Sense strand starting at position 164 of SEQ ID NO: 1884221
ggauauaagucauuauaug

SEQ ID NO: 2249341 - RNA, 19 nt, Artificial Sequence
  Description of Artificial Sequence: Synthetic oligonucleotide
  Antisense strand to SEQ ID NO: 2249340
cauauaaugacuuauaucc

SEQ ID NO: 2249342 - RNA, 19 nt, Artificial Sequence
  Description of Artificial Sequence: Synthetic oligonucleotide
  Sense strand starting at position 410 of SEQ ID NO: 1884221
agugaaucgagucauccuu

SEQ ID NO: 2249343 - RNA, 19 nt, Artificial Sequence
  Description of Artificial Sequence: Synthetic oligonucleotide
  Antisense strand to SEQ ID NO: 2249342
aaggaugacucgauucacu

SEQ ID NO: 2249344 - RNA, 19 nt, Artificial Sequence
  Description of Artificial Sequence: Synthetic oligonucleotide
  Sense strand starting at position 491 of SEQ ID NO: 1884221
ucuagauuacugcaaagcu

SEQ ID NO: 2249345 - RNA, 19 nt, Artificial Sequence
  Description of Artificial Sequence: Synthetic oligonucleotide
  Antisense strand to SEQ ID NO: 2249344
agcuuugcaguaaucuaga

SEQ ID NO: 2249346 - RNA, 19 nt, Artificial Sequence
  Description of Artificial Sequence: Synthetic oligonucleotide
  Sense strand starting at position 595 of SEQ ID NO: 1884221
auugcaaagcccuggauua

SEQ ID NO: 2249347 - RNA, 19 nt, Artificial Sequence
  Description of Artificial Sequence: Synthetic oligonucleotide
  Antisense strand to SEQ ID NO: 2249346
uaauccagggcuuugcaau

SEQ ID NO: 2249348 - RNA, 19 nt, Artificial Sequence
  Description of Artificial Sequence: Synthetic oligonucleotide
  Sense strand starting at position 653 of SEQ ID NO: 1884221
cugaaucugcuuuguuaaa

SEQ ID NO: 2249349 - RNA, 19 nt, Artificial Sequence
  Description of Artificial Sequence: Synthetic oligonucleotide
  Antisense strand to SEQ ID NO: 2249348
uuuaacaaagcagauucag

SEQ ID NO: 2249350 - RNA, 19 nt, Artificial Sequence
  Description of Artificial Sequence: Synthetic oligonucleotide
  Sense strand starting at position 713 of SEQ ID NO: 1884221
cuuaaugcaucacugaguu

SEQ ID NO: 2249351 - RNA, 19 nt, Artificial Sequence
  Description of Artificial Sequence: Synthetic oligonucleotide
  Antisense strand to SEQ ID NO: 2249350
aacucagugaugcauuaag

SEQ ID NO: 2249352 - RNA, 19 nt, Artificial Sequence
  Description of Artificial Sequence: Synthetic oligonucleotide
  Sense strand starting at position 946 of SEQ ID NO: 1884221
auuguaugauaugcagaac

SEQ ID NO: 2249353 - RNA, 19 nt, Artificial Sequence
  Description of Artificial Sequence: Synthetic oligonucleotide
  Antisense strand to SEQ ID NO: 2249352
guucugcauaucauacaau

SEQ ID NO: 2249354 - RNA, 19 nt, Artificial Sequence
  Description of Artificial Sequence: Synthetic oligonucleotide
  Sense strand starting at position 949 of SEQ ID NO: 1884221
guaugauaugcagaacuuu

SEQ ID NO: 2249355 - RNA, 19 nt, Artificial Sequence
  Description of Artificial Sequence: Synthetic oligonucleotide
  Antisense strand to SEQ ID NO: 2249354
aaaguucugcauaucauac

SEQ ID NO: 2249356 - RNA, 19 nt, Artificial Sequence
  Description of Artificial Sequence: Synthetic oligonucleotide
  Sense strand starting at position 958 of SEQ ID NO: 1884221
gcagaacuuuaacuggauu

SEQ ID NO: 2249357 - RNA, 19 nt, Artificial Sequence
  Description of Artificial Sequence: Synthetic oligonucleotide
  Antisense strand to SEQ ID NO: 2249356
aauccaguuaaaguucugc

SEQ ID NO: 2249358 - RNA, 19 nt, Artificial Sequence
  Description of Artificial Sequence: Synthetic oligonucleotide
  Sense strand starting at position 964 of SEQ ID NO: 1884221
cuuuaacuggauugcuuua

SEQ ID NO: 2249359 - RNA, 19 nt, Artificial Sequence
  Description of Artificial Sequence: Synthetic oligonucleotide
  Antisense strand to SEQ ID NO: 2249358
uaaagcaauccaguuaaag

SEQ ID NO: 2249360 - RNA, 19 nt, Artificial Sequence
  Description of Artificial Sequence: Synthetic oligonucleotide
  Sense strand starting at position 969 of SEQ ID NO: 1884221
acuggauugcuuuaaguga

SEQ ID NO: 2249361 - RNA, 19 nt, Artificial Sequence
  Description of Artificial Sequence: Synthetic oligonucleotide
  Antisense strand to SEQ ID NO: 2249360
ucacuuaaagcaauccagu

SEQ ID NO: 2249362 - RNA, 19 nt, Artificial Sequence
  Description of Artificial Sequence: Synthetic oligonucleotide
  Sense strand starting at position 1148 of SEQ ID NO: 1884221
ugguuaagguucucuuaau

SEQ ID NO: 2249363 - RNA, 19 nt, Artificial Sequence
  Description of Artificial Sequence: Synthetic oligonucleotide
  Antisense strand to SEQ ID NO: 2249362
auuaagagaaccuuaacca

SEQ ID NO: 2249364 - RNA, 19 nt, Artificial Sequence
  Description of Artificial Sequence: Synthetic oligonucleotide
  Sense strand starting at position 1149 of SEQ ID NO: 1884221
gguuaagguucucuuaaug

SEQ ID NO: 2249365 - RNA, 19 nt, Artificial Sequence
  Description of Artificial Sequence: Synthetic oligonucleotide
  Antisense strand to SEQ ID NO: 2249364
cauuaagagaaccuuaacc

SEQ ID NO: 2249366 - RNA, 19 nt, Artificial Sequence
  Description of Artificial Sequence: Synthetic oligonucleotide
  Sense strand starting at position 1766 of SEQ ID NO: 1884221
cagugcuuuccauaaagug

SEQ ID NO: 2249367 - RNA, 19 nt, Artificial Sequence
  Description of Artificial Sequence: Synthetic oligonucleotide
  Antisense strand to SEQ ID NO: 2249366
cacuuuauggaaagcacug

SEQ ID NO: 2249368 - RNA, 19 nt, Artificial Sequence
  Description of Artificial Sequence: Synthetic oligonucleotide
  Sense strand starting at position 1790 of SEQ ID NO: 1884221
gguuauguuguggugcauu

SEQ ID NO: 2249369 - RNA, 19 nt, Artificial Sequence
  Description of Artificial Sequence: Synthetic oligonucleotide
  Antisense strand to SEQ ID NO: 2249368
aaugcaccacaacauaacc

SEQ ID NO: 2249370 - RNA, 19 nt, Artificial Sequence
  Description of Artificial Sequence: Synthetic oligonucleotide
  Sense strand starting at position 1800 of SEQ ID NO: 1884221
uggugcauuucuuuaccuu

SEQ ID NO: 2249371 - RNA, 19 nt, Artificial Sequence
  Description of Artificial Sequence: Synthetic oligonucleotide
  Antisense strand to SEQ ID NO: 2249370
aagguaaagaaaugcacca

SEQ ID NO: 2249372 - RNA, 19 nt, Artificial Sequence
  Description of Artificial Sequence: Synthetic oligonucleotide
  Sense strand starting at position 1823 of SEQ ID NO: 1884221
uggccaaucccucauuaug

SEQ ID NO: 2249373 - RNA, 19 nt, Artificial Sequence
  Description of Artificial Sequence: Synthetic oligonucleotide
  Antisense strand to SEQ ID NO: 2249372
cauaaugagggauuggcca

SEQ ID NO: 2249374 - RNA, 19 nt, Artificial Sequence
  Description of Artificial Sequence: Synthetic oligonucleotide
  Sense strand starting at position 1871 of SEQ ID NO: 1884221
auguuaccaguuuguauuu

SEQ ID NO: 2249375 - RNA, 19 nt, Artificial Sequence
  Description of Artificial Sequence: Synthetic oligonucleotide
  Antisense strand to SEQ ID NO: 2249374
aaauacaaacugguaacau

SEQ ID NO: 2249376 - RNA, 19 nt, Artificial Sequence
  Description of Artificial Sequence: Synthetic oligonucleotide
  Sense strand starting at position 1872 of SEQ ID NO: 1884221
uguuaccaguuuguauuua

SEQ ID NO: 2249377 - RNA, 19 nt, Artificial Sequence
  Description of Artificial Sequence: Synthetic oligonucleotide
  Antisense strand to SEQ ID NO: 2249376
uaaauacaaacugguaaca

SEQ ID NO: 2249378 - RNA, 19 nt, Artificial Sequence
  Description of Artificial Sequence: Synthetic oligonucleotide
  Sense strand starting at position 2012 of SEQ ID NO: 1884221
gcuucuugccaaugggaaa

SEQ ID NO: 2249379 - RNA, 19 nt, Artificial Sequence
  Description of Artificial Sequence: Synthetic oligonucleotide
  Antisense strand to SEQ ID NO: 2249378
uuucccauuggcaagaagc

SEQ ID NO: 2249380 - RNA, 19 nt, Artificial Sequence
  Description of Artificial Sequence: Synthetic oligonucleotide
  Sense strand starting at position 2030 of SEQ ID NO: 1884221
auggaaugcugguaauuua

SEQ ID NO: 2249381 - RNA, 19 nt, Artificial Sequence
  Description of Artificial Sequence: Synthetic oligonucleotide
  Antisense strand to SEQ ID NO: 2249380
uaaauuaccagcauuccau

SEQ ID NO: 2249382 - RNA, 19 nt, Artificial Sequence
  Description of Artificial Sequence: Synthetic oligonucleotide
  Sense strand starting at position 2037 of SEQ ID NO: 1884221
gcugguaauuuauaggaag

SEQ ID NO: 2249383 - RNA, 19 nt, Artificial Sequence
  Description of Artificial Sequence: Synthetic oligonucleotide
  Antisense strand to SEQ ID NO: 2249382
cuuccuauaaauuaccagc

SEQ ID NO: 2249384 - RNA, 19 nt, Artificial Sequence
  Description of Artificial Sequence: Synthetic oligonucleotide
  Sense strand starting at position 2040 of SEQ ID NO: 1884221
gguaauuuauaggaaguga

SEQ ID NO: 2249385 - RNA, 19 nt, Artificial Sequence
  Description of Artificial Sequence: Synthetic oligonucleotide
  Antisense strand to SEQ ID NO: 2249384
ucacuuccuauaaauuacc

SEQ ID NO: 2249386 - RNA, 19 nt, Artificial Sequence
  Description of Artificial Sequence: Synthetic oligonucleotide
  Sense strand starting at position 2403 of SEQ ID NO: 1884221
guagguuguguugcccuua

SEQ ID NO: 2249387 - RNA, 19 nt, Artificial Sequence
  Description of Artificial Sequence: Synthetic oligonucleotide
  Antisense strand to SEQ ID NO: 2249386
uaagggcaacacaaccuac

SEQ ID NO: 2249388 - RNA, 19 nt, Artificial Sequence
  Description of Artificial Sequence: Synthetic oligonucleotide
  Sense strand starting at position 2408 of SEQ ID NO: 1884221
uuguguugcccuuaugaga

SEQ ID NO: 2249389 - RNA, 19 nt, Artificial Sequence
  Description of Artificial Sequence: Synthetic oligonucleotide
  Antisense strand to SEQ ID NO: 2249388
ucucauaagggcaacacaa

SEQ ID NO: 2249390 - RNA, 19 nt, Artificial Sequence
  Description of Artificial Sequence: Synthetic oligonucleotide
  Sense strand starting at position 2457 of SEQ ID NO: 1884221
ccaucauccucaguugaga

SEQ ID NO: 2249391 - RNA, 19 nt, Artificial Sequence
  Description of Artificial Sequence: Synthetic oligonucleotide
  Antisense strand to SEQ ID NO: 2249390
ucucaacugaggaugaugg

SEQ ID NO: 2249392 - RNA, 19 nt, Artificial Sequence
  Description of Artificial Sequence: Synthetic oligonucleotide
  Sense strand starting at position 2630 of SEQ ID NO: 1884221
ccauccauggucuguggaa

SEQ ID NO: 2249393 - RNA, 19 nt, Artificial Sequence
  Description of Artificial Sequence: Synthetic oligonucleotide
  Antisense strand to SEQ ID NO: 2249392
uuccacagaccauggaugg

SEQ ID NO: 2249394 - RNA, 19 nt, Artificial Sequence
  Description of Artificial Sequence: Synthetic oligonucleotide
  Sense strand starting at position 2631 of SEQ ID NO: 1884221
cauccauggucuguggaaa

SEQ ID NO: 2249395 - RNA, 19 nt, Artificial Sequence
  Description of Artificial Sequence: Synthetic oligonucleotide
  Antisense strand to SEQ ID NO: 2249394
uuuccacagaccauggaug

SEQ ID NO: 2249396 - RNA, 19 nt, Artificial Sequence
  Description of Artificial Sequence: Synthetic oligonucleotide
  Sense strand starting at position 2768 of SEQ ID NO: 1884221
gccacaauacuaggucaaa

SEQ ID NO: 2249397 - RNA, 19 nt, Artificial Sequence
  Description of Artificial Sequence: Synthetic oligonucleotide
  Antisense strand to SEQ ID NO: 2249396
uuugaccuaguauuguggc

SEQ ID NO: 2249398 - RNA, 19 nt, Artificial Sequence
  Description of Artificial Sequence: Synthetic oligonucleotide
  Sense strand starting at position 3107 of SEQ ID NO: 1884221
gagucuaccuggccagaca

SEQ ID NO: 2249399 - RNA, 19 nt, Artificial Sequence
  Description of Artificial Sequence: Synthetic oligonucleotide
  Antisense strand to SEQ ID NO: 2249398
ugucuggccagguagacuc

SEQ ID NO: 2249400 - RNA, 19 nt, Artificial Sequence
  Description of Artificial Sequence: Synthetic oligonucleotide
  Sense strand starting at position 3129 of SEQ ID NO: 1884221
aagaguuaccuugaggugu

SEQ ID NO: 2249401 - RNA, 19 nt, Artificial Sequence
  Description of Artificial Sequence: Synthetic oligonucleotide
  Antisense strand to SEQ ID NO: 2249400
acaccucaagguaacucuu

SEQ ID NO: 2249402 - RNA, 19 nt, Artificial Sequence
  Description of Artificial Sequence: Synthetic oligonucleotide
  Sense strand starting at position 3188 of SEQ ID NO: 1884221
ugauuccgcccugaauaca

SEQ ID NO: 2249403 - RNA, 19 nt, Artificial Sequence
  Description of Artificial Sequence: Synthetic oligonucleotide
  Antisense strand to SEQ ID NO: 2249402
uguauucagggcggaauca

SEQ ID NO: 2249404 - RNA, 19 nt, Artificial Sequence
  Description of Artificial Sequence: Synthetic oligonucleotide
  Sense strand starting at position 3278 of SEQ ID NO: 1884221
agguuaguuucauuggaag

SEQ ID NO: 2249405 - RNA, 19 nt, Artificial Sequence
  Description of Artificial Sequence: Synthetic oligonucleotide
  Antisense strand to SEQ ID NO: 2249404
cuuccaaugaaacuaaccu

SEQ ID NO: 2249406 - RNA, 19 nt, Artificial Sequence
  Description of Artificial Sequence: Synthetic oligonucleotide
  Sense strand starting at position 3344 of SEQ ID NO: 1884221
cccacuguaccuggaauaa

SEQ ID NO: 2249407 - RNA, 19 nt, Artificial Sequence
  Description of Artificial Sequence: Synthetic oligonucleotide
  Antisense strand to SEQ ID NO: 2249406
uuauuccagguacaguggg

SEQ ID NO: 2249408 - RNA, 19 nt, Artificial Sequence
  Description of Artificial Sequence: Synthetic oligonucleotide
  Sense strand starting at position 3409 of SEQ ID NO: 1884221
ccugcuguuccucugucau

SEQ ID NO: 2249409 - RNA, 19 nt, Artificial Sequence
  Description of Artificial Sequence: Synthetic oligonucleotide
  Antisense strand to SEQ ID NO: 2249408
augacagaggaacagcagg

SEQ ID NO: 2249410 - RNA, 19 nt, Artificial Sequence
  Description of Artificial Sequence: Synthetic oligonucleotide
  Sense strand starting at position 3588 of SEQ ID NO: 1884221
ugugucacaguuuaaacau

SEQ ID NO: 2249411 - RNA, 19 nt, Artificial Sequence
  Description of Artificial Sequence: Synthetic oligonucleotide
  Antisense strand to SEQ ID NO: 2249410
auguuuaaacugugacaca

SEQ ID NO: 2249412 - RNA, 19 nt, Artificial Sequence
  Description of Artificial Sequence: Synthetic oligonucleotide
  Sense strand starting at position 3609 of SEQ ID NO: 1884221
ccauauuggagaggucuca

SEQ ID NO: 2249413 - RNA, 19 nt, Artificial Sequence
  Description of Artificial Sequence: Synthetic oligonucleotide
  Antisense strand to SEQ ID NO: 2249412
ugagaccucuccaauaugg

SEQ ID NO: 2249414 - RNA, 19 nt, Artificial Sequence
  Description of Artificial Sequence: Synthetic oligonucleotide
  Sense strand starting at position 3659 of SEQ ID NO: 1884221
cgcugaacucaucauccuu

SEQ ID NO: 2249415 - RNA, 19 nt, Artificial Sequence
  Description of Artificial Sequence: Synthetic oligonucleotide
  Antisense strand to SEQ ID NO: 2249414
aaggaugaugaguucagcg

SEQ ID NO: 2249416 - RNA, 19 nt, Artificial Sequence
  Description of Artificial Sequence: Synthetic oligonucleotide
  Sense strand starting at position 3716 of SEQ ID NO: 1884221
cuuacuguagcacaguaaa

SEQ ID NO: 2249417 - RNA, 19 nt, Artificial Sequence
  Description of Artificial Sequence: Synthetic oligonucleotide
  Antisense strand to SEQ ID NO: 2249416
uuuacugugcuacaguaag

SEQ ID NO: 2249418 - RNA, 19 nt, Artificial Sequence
  Description of Artificial Sequence: Synthetic oligonucleotide
  Sense strand starting at position 3860 of SEQ ID NO: 1884221
aggccagccugacuaauau

SEQ ID NO: 2249419 - RNA, 19 nt, Artificial Sequence
  Description of Artificial Sequence: Synthetic oligonucleotide
  Antisense strand to SEQ ID NO: 2249418
auauuagucaggcuggccu

SEQ ID NO: 2249420 - RNA, 19 nt, Artificial Sequence
  Description of Artificial Sequence: Synthetic oligonucleotide
  Sense strand starting at position 185 of SEQ ID NO: 1884222
agccaaaguuaaugaauua

SEQ ID NO: 2249421 - RNA, 19 nt, Artificial Sequence
  Description of Artificial Sequence: Synthetic oligonucleotide
  Antisense strand to SEQ ID NO: 2249420
uaauucauuaacuuuggcu

SEQ ID NO: 2249422 - RNA, 19 nt, Artificial Sequence
  Description of Artificial Sequence: Synthetic oligonucleotide
  Sense strand starting at position 223 of SEQ ID NO: 1884222
cugccauucuccuguauuu

SEQ ID NO: 2249423 - RNA, 19 nt, Artificial Sequence
  Description of Artificial Sequence: Synthetic oligonucleotide
  Antisense strand to SEQ ID NO: 2249422
aaauacaggagaauggcag

SEQ ID NO: 2249424 - RNA, 19 nt, Artificial Sequence
  Description of Artificial Sequence: Synthetic oligonucleotide
  Sense strand starting at position 283 of SEQ ID NO: 1884222
augaucuucuauggagaua

SEQ ID NO: 2249425 - RNA, 19 nt, Artificial Sequence
  Description of Artificial Sequence: Synthetic oligonucleotide
  Antisense strand to SEQ ID NO: 2249424
uaucuccauagaagaucau

SEQ ID NO: 2249426 - RNA, 19 nt, Artificial Sequence
  Description of Artificial Sequence: Synthetic oligonucleotide
  Sense strand starting at position 324 of SEQ ID NO: 1884222
guuuaagggccucaugcaa

SEQ ID NO: 2249427 - RNA, 19 nt, Artificial Sequence
  Description of Artificial Sequence: Synthetic oligonucleotide
  Antisense strand to SEQ ID NO: 2249426
uugcaugaggcccuuaaac

SEQ ID NO: 2249428 - RNA, 19 nt, Artificial Sequence
  Description of Artificial Sequence: Synthetic oligonucleotide
  Sense strand starting at position 394 of SEQ ID NO: 1884222
agaauaaacuggcaauaaa

SEQ ID NO: 2249429 - RNA, 19 nt, Artificial Sequence
  Description of Artificial Sequence: Synthetic oligonucleotide
  Antisense strand to SEQ ID NO: 2249428
uuuauugccaguuuauucu

SEQ ID NO: 2249430 - RNA, 19 nt, Artificial Sequence
  Description of Artificial Sequence: Synthetic oligonucleotide
  Sense strand starting at position 432 of SEQ ID NO: 1884222
cuaggauuccagugucauc

SEQ ID NO: 2249431 - RNA, 19 nt, Artificial Sequence
  Description of Artificial Sequence: Synthetic oligonucleotide
  Antisense strand to SEQ ID NO: 2249430
gaugacacuggaauccuag

SEQ ID NO: 2249432 - RNA, 19 nt, Artificial Sequence
  Description of Artificial Sequence: Synthetic oligonucleotide
  Sense strand starting at position 437 of SEQ ID NO: 1884222
auuccagugucauccacaa

SEQ ID NO: 2249433 - RNA, 19 nt, Artificial Sequence
  Description of Artificial Sequence: Synthetic oligonucleotide
  Antisense strand to SEQ ID NO: 2249432
uuguggaugacacuggaau

SEQ ID NO: 2249434 - RNA, 19 nt, Artificial Sequence
  Description of Artificial Sequence: Synthetic oligonucleotide
  Sense strand starting at position 494 of SEQ ID NO: 1884222
gaagaagccguccaauucu

SEQ ID NO: 2249435 - RNA, 19 nt, Artificial Sequence
  Description of Artificial Sequence: Synthetic oligonucleotide
  Antisense strand to SEQ ID NO: 2249434
agaauuggacggcuucuuc

SEQ ID NO: 2249436 - RNA, 19 nt, Artificial Sequence
  Description of Artificial Sequence: Synthetic oligonucleotide
  Sense strand starting at position 545 of SEQ ID NO: 1884222
uucugacuguaguucugua

SEQ ID NO: 2249437 - RNA, 19 nt, Artificial Sequence
  Description of Artificial Sequence: Synthetic oligonucleotide
  Antisense strand to SEQ ID NO: 2249436
uacagaacuacagucagaa

SEQ ID NO: 2249438 - RNA, 19 nt, Artificial Sequence
  Description of Artificial Sequence: Synthetic oligonucleotide
  Sense strand starting at position 550 of SEQ ID NO: 1884222
acuguaguucuguauugca

SEQ ID NO: 2249439 - RNA, 19 nt, Artificial Sequence
  Description of Artificial Sequence: Synthetic oligonucleotide
  Antisense strand to SEQ ID NO: 2249438
ugcaauacagaacuacagu

SEQ ID NO: 2249440 - RNA, 19 nt, Artificial Sequence
  Description of Artificial Sequence: Synthetic oligonucleotide
  Sense strand starting at position 558 of SEQ ID NO: 1884222
ucuguauugcaugacuguu

SEQ ID NO: 2249441 - RNA, 19 nt, Artificial Sequence
  Description of Artificial Sequence: Synthetic oligonucleotide
  Antisense strand to SEQ ID NO: 2249440
aacagucaugcaauacaga

SEQ ID NO: 2249442 - RNA, 19 nt, Artificial Sequence
  Description of Artificial Sequence: Synthetic oligonucleotide
  Sense strand starting at position 842 of SEQ ID NO: 1884222
uguugugacuggugggaau

SEQ ID NO: 2249443 - RNA, 19 nt, Artificial Sequence
  Description of Artificial Sequence: Synthetic oligonucleotide
  Antisense strand to SEQ ID NO: 2249442
auucccaccagucacaaca

SEQ ID NO: 2249444 - RNA, 19 nt, Artificial Sequence
  Description of Artificial Sequence: Synthetic oligonucleotide
  Sense strand starting at position 903 of SEQ ID NO: 1884222
cgaagcacuuaguauaaca

SEQ ID NO: 2249445 - RNA, 19 nt, Artificial Sequence
  Description of Artificial Sequence: Synthetic oligonucleotide
  Antisense strand to SEQ ID NO: 2249444
uguuauacuaagugcuucg

SEQ ID NO: 2249446 - RNA, 19 nt, Artificial Sequence
  Description of Artificial Sequence: Synthetic oligonucleotide
  Sense strand starting at position 1004 of SEQ ID NO: 1884222
agucuccaaugaucuagua

SEQ ID NO: 2249447 - RNA, 19 nt, Artificial Sequence
  Description of Artificial Sequence: Synthetic oligonucleotide
  Antisense strand to SEQ ID NO: 2249446
uacuagaucauuggagacu

SEQ ID NO: 2249448 - RNA, 19 nt, Artificial Sequence
  Description of Artificial Sequence: Synthetic oligonucleotide
  Sense strand starting at position 1037 of SEQ ID NO: 1884222
ucuagauagcuaggcauga

SEQ ID NO: 2249449 - RNA, 19 nt, Artificial Sequence
  Description of Artificial Sequence: Synthetic oligonucleotide
  Antisense strand to SEQ ID NO: 2249448
ucaugccuagcuaucuaga

SEQ ID NO: 2249450 - RNA, 19 nt, Artificial Sequence
  Description of Artificial Sequence: Synthetic oligonucleotide
  Sense strand starting at position 1038 of SEQ ID NO: 1884222
cuagauagcuaggcaugaa

SEQ ID NO: 2249451 - RNA, 19 nt, Artificial Sequence
  Description of Artificial Sequence: Synthetic oligonucleotide
  Antisense strand to SEQ ID NO: 2249450
uucaugccuagcuaucuag

SEQ ID NO: 2249452 - RNA, 19 nt, Artificial Sequence
  Description of Artificial Sequence: Synthetic oligonucleotide
  Sense strand starting at position 1165 of SEQ ID NO: 1884222
uggucugacucccacuauu

SEQ ID NO: 2249453 - RNA, 19 nt, Artificial Sequence
  Description of Artificial Sequence: Synthetic oligonucleotide
  Antisense strand to SEQ ID NO: 2249452
aauagugggagucagacca

SEQ ID NO: 2249454 - RNA, 19 nt, Artificial Sequence
  Description of Artificial Sequence: Synthetic oligonucleotide
  Sense strand starting at position 2341 of SEQ ID NO: 1884222
gcgcgaaggccggauuuca

SEQ ID NO: 2249455 - RNA, 19 nt, Artificial Sequence
  Description of Artificial Sequence: Synthetic oligonucleotide
  Antisense strand to SEQ ID NO: 2249454
ugaaauccggccuucgcgc

SEQ ID NO: 2249456 - RNA, 19 nt, Artificial Sequence
  Description of Artificial Sequence: Synthetic oligonucleotide
  Sense strand starting at position 2516 of SEQ ID NO: 1884222
acuaguuagucccaaauua

SEQ ID NO: 2249457 - RNA, 19 nt, Artificial Sequence
  Description of Artificial Sequence: Synthetic oligonucleotide
  Antisense strand to SEQ ID NO: 2249456
uaauuugggacuaacuagu

SEQ ID NO: 2249458 - RNA, 19 nt, Artificial Sequence
  Description of Artificial Sequence: Synthetic oligonucleotide
  Sense strand starting at position 2864 of SEQ ID NO: 1884222
uuugguaaagcucauuaca

SEQ ID NO: 2249459 - RNA, 19 nt, Artificial Sequence
  Description of Artificial Sequence: Synthetic oligonucleotide
  Antisense strand to SEQ ID NO: 2249458
uguaaugagcuuuaccaaa

SEQ ID NO: 2249460 - RNA, 19 nt, Artificial Sequence
  Description of Artificial Sequence: Synthetic oligonucleotide
  Sense strand starting at position 2866 of SEQ ID NO: 1884222
ugguaaagcucauuacaaa

SEQ ID NO: 2249461 - RNA, 19 nt, Artificial Sequence
  Description of Artificial Sequence: Synthetic oligonucleotide
  Antisense strand to SEQ ID NO: 2249460
uuuguaaugagcuuuacca

SEQ ID NO: 2249462 - RNA, 19 nt, Artificial Sequence
  Description of Artificial Sequence: Synthetic oligonucleotide
  Sense strand starting at position 3017 of SEQ ID NO: 1884222
gaggcugagcuggauagau

SEQ ID NO: 2249463 - RNA, 19 nt, Artificial Sequence
  Description of Artificial Sequence: Synthetic oligonucleotide
  Antisense strand to SEQ ID NO: 2249462
aucuauccagcucagccuc

SEQ ID NO: 2249464 - RNA, 19 nt, Artificial Sequence
  Description of Artificial Sequence: Synthetic oligonucleotide
  Sense strand starting at position 3019 of SEQ ID NO: 1884222
ggcugagcuggauagauca

SEQ ID NO: 2249465 - RNA, 19 nt, Artificial Sequence
  Description of Artificial Sequence: Synthetic oligonucleotide
  Antisense strand to SEQ ID NO: 2249464
ugaucuauccagcucagcc

SEQ ID NO: 2249466 - RNA, 19 nt, Artificial Sequence
  Description of Artificial Sequence: Synthetic oligonucleotide
  Sense strand starting at position 3162 of SEQ ID NO: 1884222
ggcggaucacccggucaga

SEQ ID NO: 2249467 - RNA, 19 nt, Artificial Sequence
  Description of Artificial Sequence: Synthetic oligonucleotide
  Antisense strand to SEQ ID NO: 2249466
ucugaccgggugauccgcc

SEQ ID NO: 2249468 - RNA, 19 nt, Artificial Sequence
  Description of Artificial Sequence: Synthetic oligonucleotide
  Sense strand starting at position 3165 of SEQ ID NO: 1884222
ggaucacccggucagaagu

SEQ ID NO: 2249469 - RNA, 19 nt, Artificial Sequence
  Description of Artificial Sequence: Synthetic oligonucleotide
  Antisense strand to SEQ ID NO: 2249468
acuucugaccgggugaucc

SEQ ID NO: 2249470 - RNA, 19 nt, Artificial Sequence
  Description of Artificial Sequence: Synthetic oligonucleotide
  Sense strand starting at position 3269 of SEQ ID NO: 1884222
ucccaagauuccgucucaa

SEQ ID NO: 2249471 - RNA, 19 nt, Artificial Sequence
  Description of Artificial Sequence: Synthetic oligonucleotide
  Antisense strand to SEQ ID NO: 2249470
uugagacggaaucuuggga

SEQ ID NO: 2249472 - RNA, 19 nt, Artificial Sequence
  Description of Artificial Sequence: Synthetic oligonucleotide
  Sense strand starting at position 3347 of SEQ ID NO: 1884222
gauuaugagcccuagucau

SEQ ID NO: 2249473 - RNA, 19 nt, Artificial Sequence
  Description of Artificial Sequence: Synthetic oligonucleotide
  Antisense strand to SEQ ID NO: 2249472
augacuagggcucauaauc

SEQ ID NO: 2249474 - RNA, 19 nt, Artificial Sequence
  Description of Artificial Sequence: Synthetic oligonucleotide
  Sense strand starting at position 3379 of SEQ ID NO: 1884222
agugacucaaguggaauua

SEQ ID NO: 2249475 - RNA, 19 nt, Artificial Sequence
  Description of Artificial Sequence: Synthetic oligonucleotide
  Antisense strand to SEQ ID NO: 2249474
uaauuccacuugagucacu

SEQ ID NO: 2249476 - RNA, 19 nt, Artificial Sequence
  Description of Artificial Sequence: Synthetic oligonucleotide
  Sense strand starting at position 3391 of SEQ ID NO: 1884222
ggaauuagauaggcauauc

SEQ ID NO: 2249477 - RNA, 19 nt, Artificial Sequence
  Description of Artificial Sequence: Synthetic oligonucleotide
  Antisense strand to SEQ ID NO: 2249476
gauaugccuaucuaauucc

SEQ ID NO: 2249478 - RNA, 19 nt, Artificial Sequence
  Description of Artificial Sequence: Synthetic oligonucleotide
  Sense strand starting at position 3402 of SEQ ID NO: 1884222
ggcauauccuauuagcuag

SEQ ID NO: 2249479 - RNA, 19 nt, Artificial Sequence
  Description of Artificial Sequence: Synthetic oligonucleotide
  Antisense strand to SEQ ID NO: 2249478
cuagcuaauaggauaugcc

SEQ ID NO: 2249480 - RNA, 19 nt, Artificial Sequence
  Description of Artificial Sequence: Synthetic oligonucleotide
  Sense strand starting at position 3678 of SEQ ID NO: 1884222
cagcaauaugaagguauau

SEQ ID NO: 2249481 - RNA, 19 nt, Artificial Sequence
  Description of Artificial Sequence: Synthetic oligonucleotide
  Antisense strand to SEQ ID NO: 2249480
auauaccuucauauugcug

SEQ ID NO: 2249482 - RNA, 19 nt, Artificial Sequence
  Description of Artificial Sequence: Synthetic oligonucleotide
  Sense strand starting at position 3749 of SEQ ID NO: 1884222
guaagagacugaguaaagu

SEQ ID NO: 2249483 - RNA, 19 nt, Artificial Sequence
  Description of Artificial Sequence: Synthetic oligonucleotide
  Antisense strand to SEQ ID NO: 2249482
acuuuacucagucucuuac

SEQ ID NO: 2249484 - RNA, 19 nt, Artificial Sequence
  Description of Artificial Sequence: Synthetic oligonucleotide
  Sense strand starting at position 3782 of SEQ ID NO: 1884222
auaguuaugaugugugggu

SEQ ID NO: 2249485 - RNA, 19 nt, Artificial Sequence
  Description of Artificial Sequence: Synthetic oligonucleotide
  Antisense strand to SEQ ID NO: 2249484
acccacacaucauaacuau

SEQ ID NO: 2249486 - RNA, 19 nt, Artificial Sequence
  Description of Artificial Sequence: Synthetic oligonucleotide
  Sense strand starting at position 3891 of SEQ ID NO: 1884222
augugaagguugguugcau

SEQ ID NO: 2249487 - RNA, 19 nt, Artificial Sequence
  Description of Artificial Sequence: Synthetic oligonucleotide
  Antisense strand to SEQ ID NO: 2249486
augcaaccaaccuucacau

SEQ ID NO: 2249488 - RNA, 19 nt, Artificial Sequence
  Description of Artificial Sequence: Synthetic oligonucleotide
  Sense strand starting at position 3892 of SEQ ID NO: 1884222
ugugaagguugguugcaua

SEQ ID NO: 2249489 - RNA, 19 nt, Artificial Sequence
  Description of Artificial Sequence: Synthetic oligonucleotide
  Antisense strand to SEQ ID NO: 2249488
uaugcaaccaaccuucaca

SEQ ID NO: 2249490 - RNA, 19 nt, Artificial Sequence
  Description of Artificial Sequence: Synthetic oligonucleotide
  Sense strand starting at position 3959 of SEQ ID NO: 1884222
aguuaaguccaguauccga

SEQ ID NO: 2249491 - RNA, 19 nt, Artificial Sequence
  Description of Artificial Sequence: Synthetic oligonucleotide
  Antisense strand to SEQ ID NO: 2249490
ucggauacuggacuuaacu

SEQ ID NO: 2249492 - RNA, 19 nt, Artificial Sequence
  Description of Artificial Sequence: Synthetic oligonucleotide
  Sense strand starting at position 3964 of SEQ ID NO: 1884222
aguccaguauccgaugguu

SEQ ID NO: 2249493 - RNA, 19 nt, Artificial Sequence
  Description of Artificial Sequence: Synthetic oligonucleotide
  Antisense strand to SEQ ID NO: 2249492
aaccaucggauacuggacu

SEQ ID NO: 2249494 - RNA, 19 nt, Artificial Sequence
  Description of Artificial Sequence: Synthetic oligonucleotide
  Sense strand starting at position 3966 of SEQ ID NO: 1884222
uccaguauccgaugguuau

SEQ ID NO: 2249495 - RNA, 19 nt, Artificial Sequence
  Description of Artificial Sequence: Synthetic oligonucleotide
  Antisense strand to SEQ ID NO: 2249494
auaaccaucggauacugga

SEQ ID NO: 2249496 - RNA, 19 nt, Artificial Sequence
  Description of Artificial Sequence: Synthetic oligonucleotide
  Sense strand starting at position 3967 of SEQ ID NO: 1884222
ccaguauccgaugguuauc

SEQ ID NO: 2249497 - RNA, 19 nt, Artificial Sequence
  Description of Artificial Sequence: Synthetic oligonucleotide
  Antisense strand to SEQ ID NO: 2249496
gauaaccaucggauacugg

SEQ ID NO: 2249498 - RNA, 19 nt, Artificial Sequence
  Description of Artificial Sequence: Synthetic oligonucleotide
  Sense strand starting at position 3970 of SEQ ID NO: 1884222
guauccgaugguuaucuuu

SEQ ID NO: 2249499 - RNA, 19 nt, Artificial Sequence
  Description of Artificial Sequence: Synthetic oligonucleotide
  Antisense strand to SEQ ID NO: 2249498
aaagauaaccaucggauac

SEQ ID NO: 2249500 - RNA, 19 nt, Artificial Sequence
  Description of Artificial Sequence: Synthetic oligonucleotide
  Sense strand starting at position 80 of SEQ ID NO: 1884223
agccaaaguuaaugaauua

SEQ ID NO: 2249501 - RNA, 19 nt, Artificial Sequence
  Description of Artificial Sequence: Synthetic oligonucleotide
  Antisense strand to SEQ ID NO: 2249500
uaauucauuaacuuuggcu

SEQ ID NO: 2249502 - RNA, 19 nt, Artificial Sequence
  Description of Artificial Sequence: Synthetic oligonucleotide
  Sense strand starting at position 118 of SEQ ID NO: 1884223
cugccauucuccuguauuu

SEQ ID NO: 2249503 - RNA, 19 nt, Artificial Sequence
  Description of Artificial Sequence: Synthetic oligonucleotide
  Antisense strand to SEQ ID NO: 2249502
aaauacaggagaauggcag

SEQ ID NO: 2249504 - RNA, 19 nt, Artificial Sequence
  Description of Artificial Sequence: Synthetic oligonucleotide
  Sense strand starting at position 178 of SEQ ID NO: 1884223
augaucuucuauggagaua

SEQ ID NO: 2249505 - RNA, 19 nt, Artificial Sequence
  Description of Artificial Sequence: Synthetic oligonucleotide
  Antisense strand to SEQ ID NO: 2249504
uaucuccauagaagaucau

SEQ ID NO: 2249506 - RNA, 19 nt, Artificial Sequence
  Description of Artificial Sequence: Synthetic oligonucleotide
  Sense strand starting at position 219 of SEQ ID NO: 1884223
guuuaagggccucaugcaa

SEQ ID NO: 2249507 - RNA, 19 nt, Artificial Sequence
  Description of Artificial Sequence: Synthetic oligonucleotide
  Antisense strand to SEQ ID NO: 2249506
uugcaugaggcccuuaaac

SEQ ID NO: 2249508 - RNA, 19 nt, Artificial Sequence
  Description of Artificial Sequence: Synthetic oligonucleotide
  Sense strand starting at position 289 of SEQ ID NO: 1884223
agaauaaacuggcaauaaa

SEQ ID NO: 2249509 - RNA, 19 nt, Artificial Sequence
  Description of Artificial Sequence: Synthetic oligonucleotide
  Antisense strand to SEQ ID NO: 2249508
uuuauugccaguuuauucu

SEQ ID NO: 2249510 - RNA, 19 nt, Artificial Sequence
  Description of Artificial Sequence: Synthetic oligonucleotide
  Sense strand starting at position 327 of SEQ ID NO: 1884223
cuaggauuccagugucauc

SEQ ID NO: 2249511 - RNA, 19 nt, Artificial Sequence
  Description of Artificial Sequence: Synthetic oligonucleotide
  Antisense strand to SEQ ID NO: 2249510
gaugacacuggaauccuag

SEQ ID NO: 2249512 - RNA, 19 nt, Artificial Sequence
  Description of Artificial Sequence: Synthetic oligonucleotide
  Sense strand starting at position 332 of SEQ ID NO: 1884223
auuccagugucauccacaa

SEQ ID NO: 2249513 - RNA, 19 nt, Artificial Sequence
  Description of Artificial Sequence: Synthetic oligonucleotide
  Antisense strand to SEQ ID NO: 2249512
uuguggaugacacuggaau

SEQ ID NO: 2249514 - RNA, 19 nt, Artificial Sequence
  Description of Artificial Sequence: Synthetic oligonucleotide
  Sense strand starting at position 389 of SEQ ID NO: 1884223
gaagaagccguccaauucu

SEQ ID NO: 2249515 - RNA, 19 nt, Artificial Sequence
  Description of Artificial Sequence: Synthetic oligonucleotide
  Antisense strand to SEQ ID NO: 2249514
agaauuggacggcuucuuc

SEQ ID NO: 2249516 - RNA, 19 nt, Artificial Sequence
  Description of Artificial Sequence: Synthetic oligonucleotide
  Sense strand starting at position 440 of SEQ ID NO: 1884223
uucugacuguaguucugua

SEQ ID NO: 2249517 - RNA, 19 nt, Artificial Sequence
  Description of Artificial Sequence: Synthetic oligonucleotide
  Antisense strand to SEQ ID NO: 2249516
uacagaacuacagucagaa

SEQ ID NO: 2249518 - RNA, 19 nt, Artificial Sequence
  Description of Artificial Sequence: Synthetic oligonucleotide
  Sense strand starting at position 445 of SEQ ID NO: 1884223
acuguaguucuguauugca

SEQ ID NO: 2249519 - RNA, 19 nt, Artificial Sequence
  Description of Artificial Sequence: Synthetic oligonucleotide
  Antisense strand to SEQ ID NO: 2249518
ugcaauacagaacuacagu

SEQ ID NO: 2249520 - RNA, 19 nt, Artificial Sequence
  Description of Artificial Sequence: Synthetic oligonucleotide
  Sense strand starting at position 453 of SEQ ID NO: 1884223
ucuguauugcaugacuguu

SEQ ID NO: 2249521 - RNA, 19 nt, Artificial Sequence
  Description of Artificial Sequence: Synthetic oligonucleotide
  Antisense strand to SEQ ID NO: 2249520
aacagucaugcaauacaga

SEQ ID NO: 2249522 - RNA, 19 nt, Artificial Sequence
  Description of Artificial Sequence: Synthetic oligonucleotide
  Sense strand starting at position 737 of SEQ ID NO: 1884223
uguugugacuggugggaau

SEQ ID NO: 2249523 - RNA, 19 nt, Artificial Sequence
  Description of Artificial Sequence: Synthetic oligonucleotide
  Antisense strand to SEQ ID NO: 2249522
auucccaccagucacaaca

SEQ ID NO: 2249524 - RNA, 19 nt, Artificial Sequence
  Description of Artificial Sequence: Synthetic oligonucleotide
  Sense strand starting at position 798 of SEQ ID NO: 1884223
cgaagcacuuaguauaaca

SEQ ID NO: 2249525 - RNA, 19 nt, Artificial Sequence
  Description of Artificial Sequence: Synthetic oligonucleotide
  Antisense strand to SEQ ID NO: 2249524
uguuauacuaagugcuucg

SEQ ID NO: 2249526 - RNA, 19 nt, Artificial Sequence
  Description of Artificial Sequence: Synthetic oligonucleotide
  Sense strand starting at position 899 of SEQ ID NO: 1884223
agucuccaaugaucuagua

SEQ ID NO: 2249527 - RNA, 19 nt, Artificial Sequence
  Description of Artificial Sequence: Synthetic oligonucleotide
  Antisense strand to SEQ ID NO: 2249526
uacuagaucauuggagacu

SEQ ID NO: 2249528 - RNA, 19 nt, Artificial Sequence
  Description of Artificial Sequence: Synthetic oligonucleotide
  Sense strand starting at position 932 of SEQ ID NO: 1884223
ucuagauagcuaggcauga

SEQ ID NO: 2249529 - RNA, 19 nt, Artificial Sequence
  Description of Artificial Sequence: Synthetic oligonucleotide
  Antisense strand to SEQ ID NO: 2249528
ucaugccuagcuaucuaga

SEQ ID NO: 2249530 - RNA, 19 nt, Artificial Sequence
  Description of Artificial Sequence: Synthetic oligonucleotide
  Sense strand starting at position 933 of SEQ ID NO: 1884223
cuagauagcuaggcaugaa

SEQ ID NO: 2249531 - RNA, 19 nt, Artificial Sequence
  Description of Artificial Sequence: Synthetic oligonucleotide
  Antisense strand to SEQ ID NO: 2249530
uucaugccuagcuaucuag

SEQ ID NO: 2249532 - RNA, 19 nt, Artificial Sequence
  Description of Artificial Sequence: Synthetic oligonucleotide
  Sense strand starting at position 1060 of SEQ ID NO: 1884223
uggucugacucccacuauu

SEQ ID NO: 2249533 - RNA, 19 nt, Artificial Sequence
  Description of Artificial Sequence: Synthetic oligonucleotide
  Antisense strand to SEQ ID NO: 2249532
aauagugggagucagacca

SEQ ID NO: 2249534 - RNA, 19 nt, Artificial Sequence
  Description of Artificial Sequence: Synthetic oligonucleotide
  Sense strand starting at position 2236 of SEQ ID NO: 1884223
gcgcgaaggccggauuuca

SEQ ID NO: 2249535 - RNA, 19 nt, Artificial Sequence
  Description of Artificial Sequence: Synthetic oligonucleotide
  Antisense strand to SEQ ID NO: 2249534
ugaaauccggccuucgcgc

SEQ ID NO: 2249536 - RNA, 19 nt, Artificial Sequence
  Description of Artificial Sequence: Synthetic oligonucleotide
  Sense strand starting at position 2411 of SEQ ID NO: 1884223
acuaguuagucccaaauua

SEQ ID NO: 2249537 - RNA, 19 nt, Artificial Sequence
  Description of Artificial Sequence: Synthetic oligonucleotide
  Antisense strand to SEQ ID NO: 2249536
uaauuugggacuaacuagu

SEQ ID NO: 2249538 - RNA, 19 nt, Artificial Sequence
  Description of Artificial Sequence: Synthetic oligonucleotide
  Sense strand starting at position 2759 of SEQ ID NO: 1884223
uuugguaaagcucauuaca

SEQ ID NO: 2249539 - RNA, 19 nt, Artificial Sequence
  Description of Artificial Sequence: Synthetic oligonucleotide
  Antisense strand to SEQ ID NO: 2249538
uguaaugagcuuuaccaaa

SEQ ID NO: 2249540 - RNA, 19 nt, Artificial Sequence
  Description of Artificial Sequence: Synthetic oligonucleotide
  Sense strand starting at position 2761 of SEQ ID NO: 1884223
ugguaaagcucauuacaaa

SEQ ID NO: 2249541 - RNA, 19 nt, Artificial Sequence
  Description of Artificial Sequence: Synthetic oligonucleotide
  Antisense strand to SEQ ID NO: 2249540
uuuguaaugagcuuuacca

SEQ ID NO: 2249542 - RNA, 19 nt, Artificial Sequence
  Description of Artificial Sequence: Synthetic oligonucleotide
  Sense strand starting at position 2912 of SEQ ID NO: 1884223
gaggcugagcuggauagau

SEQ ID NO: 2249543 - RNA, 19 nt, Artificial Sequence
  Description of Artificial Sequence: Synthetic oligonucleotide
  Antisense strand to SEQ ID NO: 2249542
aucuauccagcucagccuc

SEQ ID NO: 2249544 - RNA, 19 nt, Artificial Sequence
  Description of Artificial Sequence: Synthetic oligonucleotide
  Sense strand starting at position 2914 of SEQ ID NO: 1884223
ggcugagcuggauagauca

SEQ ID NO: 2249545 - RNA, 19 nt, Artificial Sequence
  Description of Artificial Sequence: Synthetic oligonucleotide
  Antisense strand to SEQ ID NO: 2249544
ugaucuauccagcucagcc

SEQ ID NO: 2249546 - RNA, 19 nt, Artificial Sequence
  Description of Artificial Sequence: Synthetic oligonucleotide
  Sense strand starting at position 3057 of SEQ ID NO: 1884223
ggcggaucacccggucaga

SEQ ID NO: 2249547 - RNA, 19 nt, Artificial Sequence
  Description of Artificial Sequence: Synthetic oligonucleotide
  Antisense strand to SEQ ID NO: 2249546
ucugaccgggugauccgcc

SEQ ID NO: 2249548 - RNA, 19 nt, Artificial Sequence
  Description of Artificial Sequence: Synthetic oligonucleotide
  Sense strand starting at position 3060 of SEQ ID NO: 1884223
ggaucacccggucagaagu

SEQ ID NO: 2249549 - RNA, 19 nt, Artificial Sequence
  Description of Artificial Sequence: Synthetic oligonucleotide
  Antisense strand to SEQ ID NO: 2249548
acuucugaccgggugaucc

SEQ ID NO: 2249550 - RNA, 19 nt, Artificial Sequence
  Description of Artificial Sequence: Synthetic oligonucleotide
  Sense strand starting at position 3164 of SEQ ID NO: 1884223
ucccaagauuccgucucaa

SEQ ID NO: 2249551 - RNA, 19 nt, Artificial Sequence
  Description of Artificial Sequence: Synthetic oligonucleotide
  Antisense strand to SEQ ID NO: 2249550
uugagacggaaucuuggga

SEQ ID NO: 2249552 - RNA, 19 nt, Artificial Sequence
  Description of Artificial Sequence: Synthetic oligonucleotide
  Sense strand starting at position 3242 of SEQ ID NO: 1884223
gauuaugagcccuagucau

SEQ ID NO: 2249553 - RNA, 19 nt, Artificial Sequence
  Description of Artificial Sequence: Synthetic oligonucleotide
  Antisense strand to SEQ ID NO: 2249552
augacuagggcucauaauc

SEQ ID NO: 2249554 - RNA, 19 nt, Artificial Sequence
  Description of Artificial Sequence: Synthetic oligonucleotide
  Sense strand starting at position 3274 of SEQ ID NO: 1884223
agugacucaaguggaauua

SEQ ID NO: 2249555 - RNA, 19 nt, Artificial Sequence
  Description of Artificial Sequence: Synthetic oligonucleotide
  Antisense strand to SEQ ID NO: 2249554
uaauuccacuugagucacu

SEQ ID NO: 2249556 - RNA, 19 nt, Artificial Sequence
  Description of Artificial Sequence: Synthetic oligonucleotide
  Sense strand starting at position 3286 of SEQ ID NO: 1884223
ggaauuagauaggcauauc

SEQ ID NO: 2249557 - RNA, 19 nt, Artificial Sequence
  Description of Artificial Sequence: Synthetic oligonucleotide
  Antisense strand to SEQ ID NO: 2249556
gauaugccuaucuaauucc

SEQ ID NO: 2249558 - RNA, 19 nt, Artificial Sequence
  Description of Artificial Sequence: Synthetic oligonucleotide
  Sense strand starting at position 3297 of SEQ ID NO: 1884223
ggcauauccuauuagcuag

SEQ ID NO: 2249559 - RNA, 19 nt, Artificial Sequence
  Description of Artificial Sequence: Synthetic oligonucleotide
  Antisense strand to SEQ ID NO: 2249558
cuagcuaauaggauaugcc

SEQ ID NO: 2249560 - RNA, 19 nt, Artificial Sequence
  Description of Artificial Sequence: Synthetic oligonucleotide
  Sense strand starting at position 3573 of SEQ ID NO: 1884223
cagcaauaugaagguauau

SEQ ID NO: 2249561 - RNA, 19 nt, Artificial Sequence
  Description of Artificial Sequence: Synthetic oligonucleotide
  Antisense strand to SEQ ID NO: 2249560
auauaccuucauauugcug

SEQ ID NO: 2249562 - RNA, 19 nt, Artificial Sequence
  Description of Artificial Sequence: Synthetic oligonucleotide
  Sense strand starting at position 3644 of SEQ ID NO: 1884223
guaagagacugaguaaagu

SEQ ID NO: 2249563 - RNA, 19 nt, Artificial Sequence
  Description of Artificial Sequence: Synthetic oligonucleotide
  Antisense strand to SEQ ID NO: 2249562
acuuuacucagucucuuac

SEQ ID NO: 2249564 - RNA, 19 nt, Artificial Sequence
  Description of Artificial Sequence: Synthetic oligonucleotide
  Sense strand starting at position 3677 of SEQ ID NO: 1884223
auaguuaugaugugugggu

SEQ ID NO: 2249565 - RNA, 19 nt, Artificial Sequence
  Description of Artificial Sequence: Synthetic oligonucleotide
  Antisense strand to SEQ ID NO: 2249564
acccacacaucauaacuau

SEQ ID NO: 2249566 - RNA, 19 nt, Artificial Sequence
  Description of Artificial Sequence: Synthetic oligonucleotide
  Sense strand starting at position 3786 of SEQ ID NO: 1884223
augugaagguugguugcau

SEQ ID NO: 2249567 - RNA, 19 nt, Artificial Sequence
  Description of Artificial Sequence: Synthetic oligonucleotide
  Antisense strand to SEQ ID NO: 2249566
augcaaccaaccuucacau

SEQ ID NO: 2249568 - RNA, 19 nt, Artificial Sequence
  Description of Artificial Sequence: Synthetic oligonucleotide
  Sense strand starting at position 3787 of SEQ ID NO: 1884223
ugugaagguugguugcaua

SEQ ID NO: 2249569 - RNA, 19 nt, Artificial Sequence
  Description of Artificial Sequence: Synthetic oligonucleotide
  Antisense strand to SEQ ID NO: 2249568
uaugcaaccaaccuucaca

SEQ ID NO: 2249570 - RNA, 19 nt, Artificial Sequence
  Description of Artificial Sequence: Synthetic oligonucleotide
  Sense strand starting at position 3854 of SEQ ID NO: 1884223
aguuaaguccaguauccga

SEQ ID NO: 2249571 - RNA, 19 nt, Artificial Sequence
  Description of Artificial Sequence: Synthetic oligonucleotide
  Antisense strand to SEQ ID NO: 2249570
ucggauacuggacuuaacu

SEQ ID NO: 2249572 - RNA, 19 nt, Artificial Sequence
  Description of Artificial Sequence: Synthetic oligonucleotide
  Sense strand starting at position 3859 of SEQ ID NO: 1884223
aguccaguauccgaugguu

SEQ ID NO: 2249573 - RNA, 19 nt, Artificial Sequence
  Description of Artificial Sequence: Synthetic oligonucleotide
  Antisense strand to SEQ ID NO: 2249572
aaccaucggauacuggacu

SEQ ID NO: 2249574 - RNA, 19 nt, Artificial Sequence
  Description of Artificial Sequence: Synthetic oligonucleotide
  Sense strand starting at position 3861 of SEQ ID NO: 1884223
uccaguauccgaugguuau

SEQ ID NO: 2249575 - RNA, 19 nt, Artificial Sequence
  Description of Artificial Sequence: Synthetic oligonucleotide
  Antisense strand to SEQ ID NO: 2249574
auaaccaucggauacugga

SEQ ID NO: 2249576 - RNA, 19 nt, Artificial Sequence
  Description of Artificial Sequence: Synthetic oligonucleotide
  Sense strand starting at position 3862 of SEQ ID NO: 1884223
ccaguauccgaugguuauc

SEQ ID NO: 2249577 - RNA, 19 nt, Artificial Sequence
  Description of Artificial Sequence: Synthetic oligonucleotide
  Antisense strand to SEQ ID NO: 2249576
gauaaccaucggauacugg

SEQ ID NO: 2249578 - RNA, 19 nt, Artificial Sequence
  Description of Artificial Sequence: Synthetic oligonucleotide
  Sense strand starting at position 3865 of SEQ ID NO: 1884223
guauccgaugguuaucuuu

SEQ ID NO: 2249579 - RNA, 19 nt, Artificial Sequence
  Description of Artificial Sequence: Synthetic oligonucleotide
  Antisense strand to SEQ ID NO: 2249578
aaagauaaccaucggauac

SEQ ID NO: 2249580 - RNA, 19 nt, Artificial Sequence
  Description of Artificial Sequence: Synthetic oligonucleotide
  Sense strand starting at position 374 of SEQ ID NO: 1884224
ggaggaaguccaugugggu

SEQ ID NO: 2249581 - RNA, 19 nt, Artificial Sequence
  Description of Artificial Sequence: Synthetic oligonucleotide
  Antisense strand to SEQ ID NO: 2249580
acccacauggacuuccucc

SEQ ID NO: 2249582 - RNA, 19 nt, Artificial Sequence
  Description of Artificial Sequence: Synthetic oligonucleotide
  Sense strand starting at position 393 of SEQ ID NO: 1884224
ggugcuguguggucccaga

SEQ ID NO: 2249583 - RNA, 19 nt, Artificial Sequence
  Description of Artificial Sequence: Synthetic oligonucleotide
  Antisense strand to SEQ ID NO: 2249582
ucugggaccacacagcacc

SEQ ID NO: 2249584 - RNA, 19 nt, Artificial Sequence
  Description of Artificial Sequence: Synthetic oligonucleotide
  Sense strand starting at position 765 of SEQ ID NO: 1884224
cucccauguagcgggaauu

SEQ ID NO: 2249585 - RNA, 19 nt, Artificial Sequence
  Description of Artificial Sequence: Synthetic oligonucleotide
  Antisense strand to SEQ ID NO: 2249584
aauucccgcuacaugggag

SEQ ID NO: 2249586 - RNA, 19 nt, Artificial Sequence
  Description of Artificial Sequence: Synthetic oligonucleotide
  Sense strand starting at position 766 of SEQ ID NO: 1884224
ucccauguagcgggaauua

SEQ ID NO: 2249587 - RNA, 19 nt, Artificial Sequence
  Description of Artificial Sequence: Synthetic oligonucleotide
  Antisense strand to SEQ ID NO: 2249586
uaauucccgcuacauggga

SEQ ID NO: 2249588 - RNA, 19 nt, Artificial Sequence
  Description of Artificial Sequence: Synthetic oligonucleotide
  Sense strand starting at position 974 of SEQ ID NO: 1884224
agcuauuucuuguuguaau

SEQ ID NO: 2249589 - RNA, 19 nt, Artificial Sequence
  Description of Artificial Sequence: Synthetic oligonucleotide
  Antisense strand to SEQ ID NO: 2249588
auuacaacaagaaauagcu

SEQ ID NO: 2249590 - RNA, 19 nt, Artificial Sequence
  Description of Artificial Sequence: Synthetic oligonucleotide
  Sense strand starting at position 1010 of SEQ ID NO: 1884224
gugcaugcgaucguugaca

SEQ ID NO: 2249591 - RNA, 19 nt, Artificial Sequence
  Description of Artificial Sequence: Synthetic oligonucleotide
  Antisense strand to SEQ ID NO: 2249590
ugucaacgaucgcaugcac

SEQ ID NO: 2249592 - RNA, 19 nt, Artificial Sequence
  Description of Artificial Sequence: Synthetic oligonucleotide
  Sense strand starting at position 1553 of SEQ ID NO: 1884224
cccucaggacucuguugau

SEQ ID NO: 2249593 - RNA, 19 nt, Artificial Sequence
  Description of Artificial Sequence: Synthetic oligonucleotide
  Antisense strand to SEQ ID NO: 2249592
aucaacagaguccugaggg

SEQ ID NO: 2249594 - RNA, 19 nt, Artificial Sequence
  Description of Artificial Sequence: Synthetic oligonucleotide
  Sense strand starting at position 1563 of SEQ ID NO: 1884224
ucuguugaucagggucauu

SEQ ID NO: 2249595 - RNA, 19 nt, Artificial Sequence
  Description of Artificial Sequence: Synthetic oligonucleotide
  Antisense strand to SEQ ID NO: 2249594
aaugacccugaucaacaga

SEQ ID NO: 2249596 - RNA, 19 nt, Artificial Sequence
  Description of Artificial Sequence: Synthetic oligonucleotide
  Sense strand starting at position 1817 of SEQ ID NO: 1884224
agcugaugccuccagaaag

SEQ ID NO: 2249597 - RNA, 19 nt, Artificial Sequence
  Description of Artificial Sequence: Synthetic oligonucleotide
  Antisense strand to SEQ ID NO: 2249596
cuuucuggaggcaucagcu

SEQ ID NO: 2249598 - RNA, 19 nt, Artificial Sequence
  Description of Artificial Sequence: Synthetic oligonucleotide
  Sense strand starting at position 1827 of SEQ ID NO: 1884224
uccagaaaguuccauggau

SEQ ID NO: 2249599 - RNA, 19 nt, Artificial Sequence
  Description of Artificial Sequence: Synthetic oligonucleotide
  Antisense strand to SEQ ID NO: 2249598
auccauggaacuuucugga

SEQ ID NO: 2249600 - RNA, 19 nt, Artificial Sequence
  Description of Artificial Sequence: Synthetic oligonucleotide
  Sense strand starting at position 2062 of SEQ ID NO: 1884224
acagccuuuccagagcgaa

SEQ ID NO: 2249601 - RNA, 19 nt, Artificial Sequence
  Description of Artificial Sequence: Synthetic oligonucleotide
  Antisense strand to SEQ ID NO: 2249600
uucgcucuggaaaggcugu

SEQ ID NO: 2249602 - RNA, 19 nt, Artificial Sequence
  Description of Artificial Sequence: Synthetic oligonucleotide
  Sense strand starting at position 2065 of SEQ ID NO: 1884224
gccuuuccagagcgaauca

SEQ ID NO: 2249603 - RNA, 19 nt, Artificial Sequence
  Description of Artificial Sequence: Synthetic oligonucleotide
  Antisense strand to SEQ ID NO: 2249602
ugauucgcucuggaaaggc

SEQ ID NO: 2249604 - RNA, 19 nt, Artificial Sequence
  Description of Artificial Sequence: Synthetic oligonucleotide
  Sense strand starting at position 2169 of SEQ ID NO: 1884224
gguuuccucccacacugau

SEQ ID NO: 2249605 - RNA, 19 nt, Artificial Sequence
  Description of Artificial Sequence: Synthetic oligonucleotide
  Antisense strand to SEQ ID NO: 2249604
aucagugugggaggaaacc

SEQ ID NO: 2249606 - RNA, 19 nt, Artificial Sequence
  Description of Artificial Sequence: Synthetic oligonucleotide
  Sense strand starting at position 2442 of SEQ ID NO: 1884224
acggaagagcuuugcaaga

SEQ ID NO: 2249607 - RNA, 19 nt, Artificial Sequence
  Description of Artificial Sequence: Synthetic oligonucleotide
  Antisense strand to SEQ ID NO: 2249606
ucuugcaaagcucuuccgu

SEQ ID NO: 2249608 - RNA, 19 nt, Artificial Sequence
  Description of Artificial Sequence: Synthetic oligonucleotide
  Sense strand starting at position 2447 of SEQ ID NO: 1884224
agagcuuugcaagaacucu

SEQ ID NO: 2249609 - RNA, 19 nt, Artificial Sequence
  Description of Artificial Sequence: Synthetic oligonucleotide
  Antisense strand to SEQ ID NO: 2249608
agaguucuugcaaagcucu

SEQ ID NO: 2249610 - RNA, 19 nt, Artificial Sequence
  Description of Artificial Sequence: Synthetic oligonucleotide
  Sense strand starting at position 2453 of SEQ ID NO: 1884224
uugcaagaacucugagaac

SEQ ID NO: 2249611 - RNA, 19 nt, Artificial Sequence
  Description of Artificial Sequence: Synthetic oligonucleotide
  Antisense strand to SEQ ID NO: 2249610
guucucagaguucuugcaa

SEQ ID NO: 2249612 - RNA, 19 nt, Artificial Sequence
  Description of Artificial Sequence: Synthetic oligonucleotide
  Sense strand starting at position 2465 of SEQ ID NO: 1884224
ugagaacugaacugucguu

SEQ ID NO: 2249613 - RNA, 19 nt, Artificial Sequence
  Description of Artificial Sequence: Synthetic oligonucleotide
  Antisense strand to SEQ ID NO: 2249612
aacgacaguucaguucuca

SEQ ID NO: 2249614 - RNA, 19 nt, Artificial Sequence
  Description of Artificial Sequence: Synthetic oligonucleotide
  Sense strand starting at position 2470 of SEQ ID NO: 1884224
acugaacugucguuggaau

SEQ ID NO: 2249615 - RNA, 19 nt, Artificial Sequence
  Description of Artificial Sequence: Synthetic oligonucleotide
  Antisense strand to SEQ ID NO: 2249614
auuccaacgacaguucagu

SEQ ID NO: 2249616 - RNA, 19 nt, Artificial Sequence
  Description of Artificial Sequence: Synthetic oligonucleotide
  Sense strand starting at position 2471 of SEQ ID NO: 1884224
cugaacugucguuggaaug

SEQ ID NO: 2249617 - RNA, 19 nt, Artificial Sequence
  Description of Artificial Sequence: Synthetic oligonucleotide
  Antisense strand to SEQ ID NO: 2249616
cauuccaacgacaguucag

SEQ ID NO: 2249618 - RNA, 19 nt, Artificial Sequence
  Description of Artificial Sequence: Synthetic oligonucleotide
  Sense strand starting at position 2472 of SEQ ID NO: 1884224
ugaacugucguuggaauga

SEQ ID NO: 2249619 - RNA, 19 nt, Artificial Sequence
  Description of Artificial Sequence: Synthetic oligonucleotide
  Antisense strand to SEQ ID NO: 2249618
ucauuccaacgacaguuca

SEQ ID NO: 2249620 - RNA, 19 nt, Artificial Sequence
  Description of Artificial Sequence: Synthetic oligonucleotide
  Sense strand starting at position 2663 of SEQ ID NO: 1884224
gcaaaugcucuugaaauaa

SEQ ID NO: 2249621 - RNA, 19 nt, Artificial Sequence
  Description of Artificial Sequence: Synthetic oligonucleotide
  Antisense strand to SEQ ID NO: 2249620
uuauuucaagagcauuugc

SEQ ID NO: 2249622 - RNA, 19 nt, Artificial Sequence
  Description of Artificial Sequence: Synthetic oligonucleotide
  Sense strand starting at position 3023 of SEQ ID NO: 1884224
augaaacagugguaaggau

SEQ ID NO: 2249623 - RNA, 19 nt, Artificial Sequence
  Description of Artificial Sequence: Synthetic oligonucleotide
  Antisense strand to SEQ ID NO: 2249622
auccuuaccacuguuucau

SEQ ID NO: 2249624 - RNA, 19 nt, Artificial Sequence
  Description of Artificial Sequence: Synthetic oligonucleotide
  Sense strand starting at position 3086 of SEQ ID NO: 1884224
uggugcaacugcuuugaga

SEQ ID NO: 2249625 - RNA, 19 nt, Artificial Sequence
  Description of Artificial Sequence: Synthetic oligonucleotide
  Antisense strand to SEQ ID NO: 2249624
ucucaaagcaguugcacca

SEQ ID NO: 2249626 - RNA, 19 nt, Artificial Sequence
  Description of Artificial Sequence: Synthetic oligonucleotide
  Sense strand starting at position 3088 of SEQ ID NO: 1884224
gugcaacugcuuugagaaa

SEQ ID NO: 2249627 - RNA, 19 nt, Artificial Sequence
  Description of Artificial Sequence: Synthetic oligonucleotide
  Antisense strand to SEQ ID NO: 2249626
uuucucaaagcaguugcac

SEQ ID NO: 2249628 - RNA, 19 nt, Artificial Sequence
  Description of Artificial Sequence: Synthetic oligonucleotide
  Sense strand starting at position 3133 of SEQ ID NO: 1884224
cagagauacuccuggaaga

SEQ ID NO: 2249629 - RNA, 19 nt, Artificial Sequence
  Description of Artificial Sequence: Synthetic oligonucleotide
  Antisense strand to SEQ ID NO: 2249628
ucuuccaggaguaucucug

SEQ ID NO: 2249630 - RNA, 19 nt, Artificial Sequence
  Description of Artificial Sequence: Synthetic oligonucleotide
  Sense strand starting at position 3177 of SEQ ID NO: 1884224
cuccacucuuggguacaua

SEQ ID NO: 2249631 - RNA, 19 nt, Artificial Sequence
  Description of Artificial Sequence: Synthetic oligonucleotide
  Antisense strand to SEQ ID NO: 2249630
uauguacccaagaguggag

SEQ ID NO: 2249632 - RNA, 19 nt, Artificial Sequence
  Description of Artificial Sequence: Synthetic oligonucleotide
  Sense strand starting at position 3178 of SEQ ID NO: 1884224
uccacucuuggguacauau

SEQ ID NO: 2249633 - RNA, 19 nt, Artificial Sequence
  Description of Artificial Sequence: Synthetic oligonucleotide
  Antisense strand to SEQ ID NO: 2249632
auauguacccaagagugga

SEQ ID NO: 2249634 - RNA, 19 nt, Artificial Sequence
  Description of Artificial Sequence: Synthetic oligonucleotide
  Sense strand starting at position 3189 of SEQ ID NO: 1884224
guacauaucuaagaggaau

SEQ ID NO: 2249635 - RNA, 19 nt, Artificial Sequence
  Description of Artificial Sequence: Synthetic oligonucleotide
  Antisense strand to SEQ ID NO: 2249634
auuccucuuagauauguac

SEQ ID NO: 2249636 - RNA, 19 nt, Artificial Sequence
  Description of Artificial Sequence: Synthetic oligonucleotide
  Sense strand starting at position 3237 of SEQ ID NO: 1884224
caugaauguccaugcagca

SEQ ID NO: 2249637 - RNA, 19 nt, Artificial Sequence
  Description of Artificial Sequence: Synthetic oligonucleotide
  Antisense strand to SEQ ID NO: 2249636
ugcugcauggacauucaug

SEQ ID NO: 2249638 - RNA, 19 nt, Artificial Sequence
  Description of Artificial Sequence: Synthetic oligonucleotide
  Sense strand starting at position 3286 of SEQ ID NO: 1884224
gugugcauccacugauaaa

SEQ ID NO: 2249639 - RNA, 19 nt, Artificial Sequence
  Description of Artificial Sequence: Synthetic oligonucleotide
  Antisense strand to SEQ ID NO: 2249638
uuuaucaguggaugcacac

SEQ ID NO: 2249640 - RNA, 19 nt, Artificial Sequence
  Description of Artificial Sequence: Synthetic oligonucleotide
  Sense strand starting at position 3319 of SEQ ID NO: 1884224
gcgguauguccacauuaug

SEQ ID NO: 2249641 - RNA, 19 nt, Artificial Sequence
  Description of Artificial Sequence: Synthetic oligonucleotide
  Antisense strand to SEQ ID NO: 2249640
cauaauguggacauaccgc

SEQ ID NO: 2249642 - RNA, 19 nt, Artificial Sequence
  Description of Artificial Sequence: Synthetic oligonucleotide
  Sense strand starting at position 3322 of SEQ ID NO: 1884224
guauguccacauuauggaa

SEQ ID NO: 2249643 - RNA, 19 nt, Artificial Sequence
  Description of Artificial Sequence: Synthetic oligonucleotide
  Antisense strand to SEQ ID NO: 2249642
uuccauaauguggacauac

SEQ ID NO: 2249644 - RNA, 19 nt, Artificial Sequence
  Description of Artificial Sequence: Synthetic oligonucleotide
  Sense strand starting at position 3342 of SEQ ID NO: 1884224
gucacucagccauagaaag

SEQ ID NO: 2249645 - RNA, 19 nt, Artificial Sequence
  Description of Artificial Sequence: Synthetic oligonucleotide
  Antisense strand to SEQ ID NO: 2249644
cuuucuauggcugagugac

SEQ ID NO: 2249646 - RNA, 19 nt, Artificial Sequence
  Description of Artificial Sequence: Synthetic oligonucleotide
  Sense strand starting at position 3381 of SEQ ID NO: 1884224
gcuggaugugcgucaaccu

SEQ ID NO: 2249647 - RNA, 19 nt, Artificial Sequence
  Description of Artificial Sequence: Synthetic oligonucleotide
  Antisense strand to SEQ ID NO: 2249646
agguugacgcacauccagc

SEQ ID NO: 2249648 - RNA, 19 nt, Artificial Sequence
  Description of Artificial Sequence: Synthetic oligonucleotide
  Sense strand starting at position 3438 of SEQ ID NO: 1884224
ccacauacuggguacgauu

SEQ ID NO: 2249649 - RNA, 19 nt, Artificial Sequence
  Description of Artificial Sequence: Synthetic oligonucleotide
  Antisense strand to SEQ ID NO: 2249648
aaucguacccaguaugugg

SEQ ID NO: 2249650 - RNA, 19 nt, Artificial Sequence
  Description of Artificial Sequence: Synthetic oligonucleotide
  Sense strand starting at position 3463 of SEQ ID NO: 1884224
auaugagauuuccagaaua

SEQ ID NO: 2249651 - RNA, 19 nt, Artificial Sequence
  Description of Artificial Sequence: Synthetic oligonucleotide
  Antisense strand to SEQ ID NO: 2249650
uauucuggaaaucucauau

SEQ ID NO: 2249652 - RNA, 19 nt, Artificial Sequence
  Description of Artificial Sequence: Synthetic oligonucleotide
  Sense strand starting at position 3612 of SEQ ID NO: 1884224
uuuauuuauugggagacag

SEQ ID NO: 2249653 - RNA, 19 nt, Artificial Sequence
  Description of Artificial Sequence: Synthetic oligonucleotide
  Antisense strand to SEQ ID NO: 2249652
cugucucccaauaaauaaa

SEQ ID NO: 2249654 - RNA, 19 nt, Artificial Sequence
  Description of Artificial Sequence: Synthetic oligonucleotide
  Sense strand starting at position 3794 of SEQ ID NO: 1884224
gauggaaagccuugccaug

SEQ ID NO: 2249655 - RNA, 19 nt, Artificial Sequence
  Description of Artificial Sequence: Synthetic oligonucleotide
  Antisense strand to SEQ ID NO: 2249654
cauggcaaggcuuuccauc

SEQ ID NO: 2249656 - RNA, 19 nt, Artificial Sequence
  Description of Artificial Sequence: Synthetic oligonucleotide
  Sense strand starting at position 3796 of SEQ ID NO: 1884224
uggaaagccuugccaugua

SEQ ID NO: 2249657 - RNA, 19 nt, Artificial Sequence
  Description of Artificial Sequence: Synthetic oligonucleotide
  Antisense strand to SEQ ID NO: 2249656
uacauggcaaggcuuucca

SEQ ID NO: 2249658 - RNA, 19 nt, Artificial Sequence
  Description of Artificial Sequence: Synthetic oligonucleotide
  Sense strand starting at position 3949 of SEQ ID NO: 1884224
aguggugcugguugcauaa

SEQ ID NO: 2249659 - RNA, 19 nt, Artificial Sequence
  Description of Artificial Sequence: Synthetic oligonucleotide
  Antisense strand to SEQ ID NO: 2249658
uuaugcaaccagcaccacu

SEQ ID NO: 2249660 - RNA, 19 nt, Artificial Sequence
  Description of Artificial Sequence: Synthetic oligonucleotide
  Sense strand starting at position 7 of SEQ ID NO: 1884225
acugaauaauuggucuacu

SEQ ID NO: 2249661 - RNA, 19 nt, Artificial Sequence
  Description of Artificial Sequence: Synthetic oligonucleotide
  Antisense strand to SEQ ID NO: 2249660
aguagaccaauuauucagu

SEQ ID NO: 2249662 - RNA, 19 nt, Artificial Sequence
  Description of Artificial Sequence: Synthetic oligonucleotide
  Sense strand starting at position 8 of SEQ ID NO: 1884225
cugaauaauuggucuacua

SEQ ID NO: 2249663 - RNA, 19 nt, Artificial Sequence
  Description of Artificial Sequence: Synthetic oligonucleotide
  Antisense strand to SEQ ID NO: 2249662
uaguagaccaauuauucag

SEQ ID NO: 2249664 - RNA, 19 nt, Artificial Sequence
  Description of Artificial Sequence: Synthetic oligonucleotide
  Sense strand starting at position 39 of SEQ ID NO: 1884225
cauucuaggcagugggaau

SEQ ID NO: 2249665 - RNA, 19 nt, Artificial Sequence
  Description of Artificial Sequence: Synthetic oligonucleotide
  Antisense strand to SEQ ID NO: 2249664
auucccacugccuagaaug

SEQ ID NO: 2249666 - RNA, 19 nt, Artificial Sequence
  Description of Artificial Sequence: Synthetic oligonucleotide
  Sense strand starting at position 50 of SEQ ID NO: 1884225
gugggaauauaaucgugaa

SEQ ID NO: 2249667 - RNA, 19 nt, Artificial Sequence
  Description of Artificial Sequence: Synthetic oligonucleotide
  Antisense strand to SEQ ID NO: 2249666
uucacgauuauauucccac

SEQ ID NO: 2249668 - RNA, 19 nt, Artificial Sequence
  Description of Artificial Sequence: Synthetic oligonucleotide
  Sense strand starting at position 51 of SEQ ID NO: 1884225
ugggaauauaaucgugaau

SEQ ID NO: 2249669 - RNA, 19 nt, Artificial Sequence
  Description of Artificial Sequence: Synthetic oligonucleotide
  Antisense strand to SEQ ID NO: 2249668
auucacgauuauauuccca

SEQ ID NO: 2249670 - RNA, 19 nt, Artificial Sequence
  Description of Artificial Sequence: Synthetic oligonucleotide
  Sense strand starting at position 100 of SEQ ID NO: 1884225
auccuagugcaguggaaua

SEQ ID NO: 2249671 - RNA, 19 nt, Artificial Sequence
  Description of Artificial Sequence: Synthetic oligonucleotide
  Antisense strand to SEQ ID NO: 2249670
uauuccacugcacuaggau

SEQ ID NO: 2249672 - RNA, 19 nt, Artificial Sequence
  Description of Artificial Sequence: Synthetic oligonucleotide
  Sense strand starting at position 102 of SEQ ID NO: 1884225
ccuagugcaguggaauaaa

SEQ ID NO: 2249673 - RNA, 19 nt, Artificial Sequence
  Description of Artificial Sequence: Synthetic oligonucleotide
  Antisense strand to SEQ ID NO: 2249672
uuuauuccacugcacuagg

SEQ ID NO: 2249674 - RNA, 19 nt, Artificial Sequence
  Description of Artificial Sequence: Synthetic oligonucleotide
  Sense strand starting at position 130 of SEQ ID NO: 1884225
guacaugucagguagugac

SEQ ID NO: 2249675 - RNA, 19 nt, Artificial Sequence
  Description of Artificial Sequence: Synthetic oligonucleotide
  Antisense strand to SEQ ID NO: 2249674
gucacuaccugacauguac

SEQ ID NO: 2249676 - RNA, 19 nt, Artificial Sequence
  Description of Artificial Sequence: Synthetic oligonucleotide
  Sense strand starting at position 301 of SEQ ID NO: 1884225
uguacuaggcccuaaauaa

SEQ ID NO: 2249677 - RNA, 19 nt, Artificial Sequence
  Description of Artificial Sequence: Synthetic oligonucleotide
  Antisense strand to SEQ ID NO: 2249676
uuauuuagggccuaguaca

SEQ ID NO: 2249678 - RNA, 19 nt, Artificial Sequence
  Description of Artificial Sequence: Synthetic oligonucleotide
  Sense strand starting at position 336 of SEQ ID NO: 1884225
aggcaauuaggucauagcu

SEQ ID NO: 2249679 - RNA, 19 nt, Artificial Sequence
  Description of Artificial Sequence: Synthetic oligonucleotide
  Antisense strand to SEQ ID NO: 2249678
agcuaugaccuaauugccu

SEQ ID NO: 2249680 - RNA, 19 nt, Artificial Sequence
  Description of Artificial Sequence: Synthetic oligonucleotide
  Sense strand starting at position 470 of SEQ ID NO: 1884225
auuacaauucugugaggcu

SEQ ID NO: 2249681 - RNA, 19 nt, Artificial Sequence
  Description of Artificial Sequence: Synthetic oligonucleotide
  Antisense strand to SEQ ID NO: 2249680
agccucacagaauuguaau

SEQ ID NO: 2249682 - RNA, 19 nt, Artificial Sequence
  Description of Artificial Sequence: Synthetic oligonucleotide
  Sense strand starting at position 634 of SEQ ID NO: 1884225
agcaaucucccuggacaau

SEQ ID NO: 2249683 - RNA, 19 nt, Artificial Sequence
  Description of Artificial Sequence: Synthetic oligonucleotide
  Antisense strand to SEQ ID NO: 2249682
auuguccagggagauugcu

SEQ ID NO: 2249684 - RNA, 19 nt, Artificial Sequence
  Description of Artificial Sequence: Synthetic oligonucleotide
  Sense strand starting at position 635 of SEQ ID NO: 1884225
gcaaucucccuggacaaua

SEQ ID NO: 2249685 - RNA, 19 nt, Artificial Sequence
  Description of Artificial Sequence: Synthetic oligonucleotide
  Antisense strand to SEQ ID NO: 2249684
uauuguccagggagauugc

SEQ ID NO: 2249686 - RNA, 19 nt, Artificial Sequence
  Description of Artificial Sequence: Synthetic oligonucleotide
  Sense strand starting at position 726 of SEQ ID NO: 1884225
gaagaagugauguauuguc

SEQ ID NO: 2249687 - RNA, 19 nt, Artificial Sequence
  Description of Artificial Sequence: Synthetic oligonucleotide
  Antisense strand to SEQ ID NO: 2249686
gacaauacaucacuucuuc

SEQ ID NO: 2249688 - RNA, 19 nt, Artificial Sequence
  Description of Artificial Sequence: Synthetic oligonucleotide
  Sense strand starting at position 731 of SEQ ID NO: 1884225
agugauguauugucuugaa

SEQ ID NO: 2249689 - RNA, 19 nt, Artificial Sequence
  Description of Artificial Sequence: Synthetic oligonucleotide
  Antisense strand to SEQ ID NO: 2249688
uucaagacaauacaucacu

SEQ ID NO: 2249690 - RNA, 19 nt, Artificial Sequence
  Description of Artificial Sequence: Synthetic oligonucleotide
  Sense strand starting at position 735 of SEQ ID NO: 1884225
auguauugucuugaaagau

SEQ ID NO: 2249691 - RNA, 19 nt, Artificial Sequence
  Description of Artificial Sequence: Synthetic oligonucleotide
  Antisense strand to SEQ ID NO: 2249690
aucuuucaagacaauacau

SEQ ID NO: 2249692 - RNA, 19 nt, Artificial Sequence
  Description of Artificial Sequence: Synthetic oligonucleotide
  Sense strand starting at position 1062 of SEQ ID NO: 1884225
uaaggaaugcauuguauau

SEQ ID NO: 2249693 - RNA, 19 nt, Artificial Sequence
  Description of Artificial Sequence: Synthetic oligonucleotide
  Antisense strand to SEQ ID NO: 2249692
auauacaaugcauuccuua

SEQ ID NO: 2249694 - RNA, 19 nt, Artificial Sequence
  Description of Artificial Sequence: Synthetic oligonucleotide
  Sense strand starting at position 1194 of SEQ ID NO: 1884225
gacaguguaccguauccua

SEQ ID NO: 2249695 - RNA, 19 nt, Artificial Sequence
  Description of Artificial Sequence: Synthetic oligonucleotide
  Antisense strand to SEQ ID NO: 2249694
uaggauacgguacacuguc

SEQ ID NO: 2249696 - RNA, 19 nt, Artificial Sequence
  Description of Artificial Sequence: Synthetic oligonucleotide
  Sense strand starting at position 1239 of SEQ ID NO: 1884225
gguaucuuaccguauccua

SEQ ID NO: 2249697 - RNA, 19 nt, Artificial Sequence
  Description of Artificial Sequence: Synthetic oligonucleotide
  Antisense strand to SEQ ID NO: 2249696
uaggauacgguaagauacc

SEQ ID NO: 2249698 - RNA, 19 nt, Artificial Sequence
  Description of Artificial Sequence: Synthetic oligonucleotide
  Sense strand starting at position 1351 of SEQ ID NO: 1884225
acggguauucagcaaagau

SEQ ID NO: 2249699 - RNA, 19 nt, Artificial Sequence
  Description of Artificial Sequence: Synthetic oligonucleotide
  Antisense strand to SEQ ID NO: 2249698
aucuuugcugaauacccgu

SEQ ID NO: 2249700 - RNA, 19 nt, Artificial Sequence
  Description of Artificial Sequence: Synthetic oligonucleotide
  Sense strand starting at position 1489 of SEQ ID NO: 1884225
cucaaaccuggccaguaau

SEQ ID NO: 2249701 - RNA, 19 nt, Artificial Sequence
  Description of Artificial Sequence: Synthetic oligonucleotide
  Antisense strand to SEQ ID NO: 2249700
auuacuggccagguuugag

SEQ ID NO: 2249702 - RNA, 19 nt, Artificial Sequence
  Description of Artificial Sequence: Synthetic oligonucleotide
  Sense strand starting at position 1492 of SEQ ID NO: 1884225
aaaccuggccaguaaugau

SEQ ID NO: 2249703 - RNA, 19 nt, Artificial Sequence
  Description of Artificial Sequence: Synthetic oligonucleotide
  Antisense strand to SEQ ID NO: 2249702
aucauuacuggccagguuu

SEQ ID NO: 2249704 - RNA, 19 nt, Artificial Sequence
  Description of Artificial Sequence: Synthetic oligonucleotide
  Sense strand starting at position 1515 of SEQ ID NO: 1884225
gcaagcuauccagagggua

SEQ ID NO: 2249705 - RNA, 19 nt, Artificial Sequence
  Description of Artificial Sequence: Synthetic oligonucleotide
  Antisense strand to SEQ ID NO: 2249704
uacccucuggauagcuugc

SEQ ID NO: 2249706 - RNA, 19 nt, Artificial Sequence
  Description of Artificial Sequence: Synthetic oligonucleotide
  Sense strand starting at position 1622 of SEQ ID NO: 1884225
uuauuaccucccgguaaga

SEQ ID NO: 2249707 - RNA, 19 nt, Artificial Sequence
  Description of Artificial Sequence: Synthetic oligonucleotide
  Antisense strand to SEQ ID NO: 2249706
ucuuaccgggagguaauaa

SEQ ID NO: 2249708 - RNA, 19 nt, Artificial Sequence
  Description of Artificial Sequence: Synthetic oligonucleotide
  Sense strand starting at position 2051 of SEQ ID NO: 1884225
gcagguucuggauagacgu

SEQ ID NO: 2249709 - RNA, 19 nt, Artificial Sequence
  Description of Artificial Sequence: Synthetic oligonucleotide
  Antisense strand to SEQ ID NO: 2249708
acgucuauccagaaccugc

SEQ ID NO: 2249710 - RNA, 19 nt, Artificial Sequence
  Description of Artificial Sequence: Synthetic oligonucleotide
  Sense strand starting at position 2071 of SEQ ID NO: 1884225
cgaauugagacgcaauuga

SEQ ID NO: 2249711 - RNA, 19 nt, Artificial Sequence
  Description of Artificial Sequence: Synthetic oligonucleotide
  Antisense strand to SEQ ID NO: 2249710
ucaauugcgucucaauucg

SEQ ID NO: 2249712 - RNA, 19 nt, Artificial Sequence
  Description of Artificial Sequence: Synthetic oligonucleotide
  Sense strand starting at position 2082 of SEQ ID NO: 1884225
gcaauugacccugaaaguc

SEQ ID NO: 2249713 - RNA, 19 nt, Artificial Sequence
  Description of Artificial Sequence: Synthetic oligonucleotide
  Antisense strand to SEQ ID NO: 2249712
gacuuucagggucaauugc

SEQ ID NO: 2249714 - RNA, 19 nt, Artificial Sequence
  Description of Artificial Sequence: Synthetic oligonucleotide
  Sense strand starting at position 2143 of SEQ ID NO: 1884225
caggauggcucuccugaca

SEQ ID NO: 2249715 - RNA, 19 nt, Artificial Sequence
  Description of Artificial Sequence: Synthetic oligonucleotide
  Antisense strand to SEQ ID NO: 2249714
ugucaggagagccauccug

SEQ ID NO: 2249716 - RNA, 19 nt, Artificial Sequence
  Description of Artificial Sequence: Synthetic oligonucleotide
  Sense strand starting at position 2305 of SEQ ID NO: 1884225
gaacauugugguugaccca

SEQ ID NO: 2249717 - RNA, 19 nt, Artificial Sequence
  Description of Artificial Sequence: Synthetic oligonucleotide
  Antisense strand to SEQ ID NO: 2249716
ugggucaaccacaauguuc

SEQ ID NO: 2249718 - RNA, 19 nt, Artificial Sequence
  Description of Artificial Sequence: Synthetic oligonucleotide
  Sense strand starting at position 2308 of SEQ ID NO: 1884225
cauugugguugacccagaa

SEQ ID NO: 2249719 - RNA, 19 nt, Artificial Sequence
  Description of Artificial Sequence: Synthetic oligonucleotide
  Antisense strand to SEQ ID NO: 2249718
uucugggucaaccacaaug

SEQ ID NO: 2249720 - RNA, 19 nt, Artificial Sequence
  Description of Artificial Sequence: Synthetic oligonucleotide
  Sense strand starting at position 2348 of SEQ ID NO: 1884225
uuaaguguuuaauccauag

SEQ ID NO: 2249721 - RNA, 19 nt, Artificial Sequence
  Description of Artificial Sequence: Synthetic oligonucleotide
  Antisense strand to SEQ ID NO: 2249720
cuauggauuaaacacuuaa

SEQ ID NO: 2249722 - RNA, 19 nt, Artificial Sequence
  Description of Artificial Sequence: Synthetic oligonucleotide
  Sense strand starting at position 2352 of SEQ ID NO: 1884225
guguuuaauccauagggag

SEQ ID NO: 2249723 - RNA, 19 nt, Artificial Sequence
  Description of Artificial Sequence: Synthetic oligonucleotide
  Antisense strand to SEQ ID NO: 2249722
cucccuauggauuaaacac

SEQ ID NO: 2249724 - RNA, 19 nt, Artificial Sequence
  Description of Artificial Sequence: Synthetic oligonucleotide
  Sense strand starting at position 2951 of SEQ ID NO: 1884225
auugcuugaggccaaauua

SEQ ID NO: 2249725 - RNA, 19 nt, Artificial Sequence
  Description of Artificial Sequence: Synthetic oligonucleotide
  Antisense strand to SEQ ID NO: 2249724
uaauuuggccucaagcaau

SEQ ID NO: 2249726 - RNA, 19 nt, Artificial Sequence
  Description of Artificial Sequence: Synthetic oligonucleotide
  Sense strand starting at position 3092 of SEQ ID NO: 1884225
acaguaagcugacuuacuu

SEQ ID NO: 2249727 - RNA, 19 nt, Artificial Sequence
  Description of Artificial Sequence: Synthetic oligonucleotide
  Antisense strand to SEQ ID NO: 2249726
aaguaagucagcuuacugu

SEQ ID NO: 2249728 - RNA, 19 nt, Artificial Sequence
  Description of Artificial Sequence: Synthetic oligonucleotide
  Sense strand starting at position 3126 of SEQ ID NO: 1884225
uguggauaacuuggacaua

SEQ ID NO: 2249729 - RNA, 19 nt, Artificial Sequence
  Description of Artificial Sequence: Synthetic oligonucleotide
  Antisense strand to SEQ ID NO: 2249728
uauguccaaguuauccaca

SEQ ID NO: 2249730 - RNA, 19 nt, Artificial Sequence
  Description of Artificial Sequence: Synthetic oligonucleotide
  Sense strand starting at position 3137 of SEQ ID NO: 1884225
uggacauaauugucaucuu

SEQ ID NO: 2249731 - RNA, 19 nt, Artificial Sequence
  Description of Artificial Sequence: Synthetic oligonucleotide
  Antisense strand to SEQ ID NO: 2249730
aagaugacaauuaugucca

SEQ ID NO: 2249732 - RNA, 19 nt, Artificial Sequence
  Description of Artificial Sequence: Synthetic oligonucleotide
  Sense strand starting at position 3346 of SEQ ID NO: 1884225
ugggacacucguuaaagca

SEQ ID NO: 2249733 - RNA, 19 nt, Artificial Sequence
  Description of Artificial Sequence: Synthetic oligonucleotide
  Antisense strand to SEQ ID NO: 2249732
ugcuuuaacgaguguccca

SEQ ID NO: 2249734 - RNA, 19 nt, Artificial Sequence
  Description of Artificial Sequence: Synthetic oligonucleotide
  Sense strand starting at position 3354 of SEQ ID NO: 1884225
ucguuaaagcaguaaauua

SEQ ID NO: 2249735 - RNA, 19 nt, Artificial Sequence
  Description of Artificial Sequence: Synthetic oligonucleotide
  Antisense strand to SEQ ID NO: 2249734
uaauuuacugcuuuaacga

SEQ ID NO: 2249736 - RNA, 19 nt, Artificial Sequence
  Description of Artificial Sequence: Synthetic oligonucleotide
  Sense strand starting at position 3550 of SEQ ID NO: 1884225
ugcuuauccagaggagaca

SEQ ID NO: 2249737 - RNA, 19 nt, Artificial Sequence
  Description of Artificial Sequence: Synthetic oligonucleotide
  Antisense strand to SEQ ID NO: 2249736
ugucuccucuggauaagca

SEQ ID NO: 2249738 - RNA, 19 nt, Artificial Sequence
  Description of Artificial Sequence: Synthetic oligonucleotide
  Sense strand starting at position 3713 of SEQ ID NO: 1884225
ucauguguccggaguuggu

SEQ ID NO: 2249739 - RNA, 19 nt, Artificial Sequence
  Description of Artificial Sequence: Synthetic oligonucleotide
  Antisense strand to SEQ ID NO: 2249738
accaacuccggacacauga

SEQ ID NO: 2249740 - RNA, 19 nt, Artificial Sequence
  Description of Artificial Sequence: Synthetic oligonucleotide
  Sense strand starting at position 7 of SEQ ID NO: 1884226
guuacucucccagguaaua

SEQ ID NO: 2249741 - RNA, 19 nt, Artificial Sequence
  Description of Artificial Sequence: Synthetic oligonucleotide
  Antisense strand to SEQ ID NO: 2249740
uauuaccugggagaguaac

SEQ ID NO: 2249742 - RNA, 19 nt, Artificial Sequence
  Description of Artificial Sequence: Synthetic oligonucleotide
  Sense strand starting at position 28 of SEQ ID NO: 1884226
aaaguacuugcuuguguaa

SEQ ID NO: 2249743 - RNA, 19 nt, Artificial Sequence
  Description of Artificial Sequence: Synthetic oligonucleotide
  Antisense strand to SEQ ID NO: 2249742
uuacacaagcaaguacuuu

SEQ ID NO: 2249744 - RNA, 19 nt, Artificial Sequence
  Description of Artificial Sequence: Synthetic oligonucleotide
  Sense strand starting at position 227 of SEQ ID NO: 1884226
gcuucuguccuuugccaaa

SEQ ID NO: 2249745 - RNA, 19 nt, Artificial Sequence
  Description of Artificial Sequence: Synthetic oligonucleotide
  Antisense strand to SEQ ID NO: 2249744
uuuggcaaaggacagaagc

SEQ ID NO: 2249746 - RNA, 19 nt, Artificial Sequence
  Description of Artificial Sequence: Synthetic oligonucleotide
  Sense strand starting at position 246 of SEQ ID NO: 1884226
gggucugcaauguggagaa

SEQ ID NO: 2249747 - RNA, 19 nt, Artificial Sequence
  Description of Artificial Sequence: Synthetic oligonucleotide
  Antisense strand to SEQ ID NO: 2249746
uucuccacauugcagaccc

SEQ ID NO: 2249748 - RNA, 19 nt, Artificial Sequence
  Description of Artificial Sequence: Synthetic oligonucleotide
  Sense strand starting at position 351 of SEQ ID NO: 1884226
ugucuuaaagcugacguga

SEQ ID NO: 2249749 - RNA, 19 nt, Artificial Sequence
  Description of Artificial Sequence: Synthetic oligonucleotide
  Antisense strand to SEQ ID NO: 2249748
ucacgucagcuuuaagaca

SEQ ID NO: 2249750 - RNA, 19 nt, Artificial Sequence
  Description of Artificial Sequence: Synthetic oligonucleotide
  Sense strand starting at position 362 of SEQ ID NO: 1884226
ugacgugagugauuacguu

SEQ ID NO: 2249751 - RNA, 19 nt, Artificial Sequence
  Description of Artificial Sequence: Synthetic oligonucleotide
  Antisense strand to SEQ ID NO: 2249750
aacguaaucacucacguca

SEQ ID NO: 2249752 - RNA, 19 nt, Artificial Sequence
  Description of Artificial Sequence: Synthetic oligonucleotide
  Sense strand starting at position 380 of SEQ ID NO: 1884226
uucuguaguugccuaaagu

SEQ ID NO: 2249753 - RNA, 19 nt, Artificial Sequence
  Description of Artificial Sequence: Synthetic oligonucleotide
  Antisense strand to SEQ ID NO: 2249752
acuuuaggcaacuacagaa

SEQ ID NO: 2249754 - RNA, 19 nt, Artificial Sequence
  Description of Artificial Sequence: Synthetic oligonucleotide
  Sense strand starting at position 381 of SEQ ID NO: 1884226
ucuguaguugccuaaaguu

SEQ ID NO: 2249755 - RNA, 19 nt, Artificial Sequence
  Description of Artificial Sequence: Synthetic oligonucleotide
  Antisense strand to SEQ ID NO: 2249754
aacuuuaggcaacuacaga

SEQ ID NO: 2249756 - RNA, 19 nt, Artificial Sequence
  Description of Artificial Sequence: Synthetic oligonucleotide
  Sense strand starting at position 388 of SEQ ID NO: 1884226
uugccuaaaguugacuaua

SEQ ID NO: 2249757 - RNA, 19 nt, Artificial Sequence
  Description of Artificial Sequence: Synthetic oligonucleotide
  Antisense strand to SEQ ID NO: 2249756
uauagucaacuuuaggcaa

SEQ ID NO: 2249758 - RNA, 19 nt, Artificial Sequence
  Description of Artificial Sequence: Synthetic oligonucleotide
  Sense strand starting at position 390 of SEQ ID NO: 1884226
gccuaaaguugacuauauu

SEQ ID NO: 2249759 - RNA, 19 nt, Artificial Sequence
  Description of Artificial Sequence: Synthetic oligonucleotide
  Antisense strand to SEQ ID NO: 2249758
aauauagucaacuuuaggc

SEQ ID NO: 2249760 - RNA, 19 nt, Artificial Sequence
  Description of Artificial Sequence: Synthetic oligonucleotide
  Sense strand starting at position 437 of SEQ ID NO: 1884226
augggcagucaccgauaua

SEQ ID NO: 2249761 - RNA, 19 nt, Artificial Sequence
  Description of Artificial Sequence: Synthetic oligonucleotide
  Antisense strand to SEQ ID NO: 2249760
uauaucggugacugcccau

SEQ ID NO: 2249762 - RNA, 19 nt, Artificial Sequence
  Description of Artificial Sequence: Synthetic oligonucleotide
  Sense strand starting at position 438 of SEQ ID NO: 1884226
ugggcagucaccgauauau

SEQ ID NO: 2249763 - RNA, 19 nt, Artificial Sequence
  Description of Artificial Sequence: Synthetic oligonucleotide
  Antisense strand to SEQ ID NO: 2249762
auauaucggugacugccca

SEQ ID NO: 2249764 - RNA, 19 nt, Artificial Sequence
  Description of Artificial Sequence: Synthetic oligonucleotide
  Sense strand starting at position 440 of SEQ ID NO: 1884226
ggcagucaccgauauaugu

SEQ ID NO: 2249765 - RNA, 19 nt, Artificial Sequence
  Description of Artificial Sequence: Synthetic oligonucleotide
  Antisense strand to SEQ ID NO: 2249764
acauauaucggugacugcc

SEQ ID NO: 2249766 - RNA, 19 nt, Artificial Sequence
  Description of Artificial Sequence: Synthetic oligonucleotide
  Sense strand starting at position 447 of SEQ ID NO: 1884226
accgauauauguuuguuua

SEQ ID NO: 2249767 - RNA, 19 nt, Artificial Sequence
  Description of Artificial Sequence: Synthetic oligonucleotide
  Antisense strand to SEQ ID NO: 2249766
uaaacaaacauauaucggu

SEQ ID NO: 2249768 - RNA, 19 nt, Artificial Sequence
  Description of Artificial Sequence: Synthetic oligonucleotide
  Sense strand starting at position 448 of SEQ ID NO: 1884226
ccgauauauguuuguuuau

SEQ ID NO: 2249769 - RNA, 19 nt, Artificial Sequence
  Description of Artificial Sequence: Synthetic oligonucleotide
  Antisense strand to SEQ ID NO: 2249768
auaaacaaacauauaucgg

SEQ ID NO: 2249770 - RNA, 19 nt, Artificial Sequence
  Description of Artificial Sequence: Synthetic oligonucleotide
  Sense strand starting at position 753 of SEQ ID NO: 1884226
gucacugauguuugacaga

SEQ ID NO: 2249771 - RNA, 19 nt, Artificial Sequence
  Description of Artificial Sequence: Synthetic oligonucleotide
  Antisense strand to SEQ ID NO: 2249770
ucugucaaacaucagugac

SEQ ID NO: 2249772 - RNA, 19 nt, Artificial Sequence
  Description of Artificial Sequence: Synthetic oligonucleotide
  Sense strand starting at position 772 of SEQ ID NO: 1884226
aggauuaacuaauugucau

SEQ ID NO: 2249773 - RNA, 19 nt, Artificial Sequence
  Description of Artificial Sequence: Synthetic oligonucleotide
  Antisense strand to SEQ ID NO: 2249772
augacaauuaguuaauccu

SEQ ID NO: 2249774 - RNA, 19 nt, Artificial Sequence
  Description of Artificial Sequence: Synthetic oligonucleotide
  Sense strand starting at position 779 of SEQ ID NO: 1884226
acuaauugucaugggcaga

SEQ ID NO: 2249775 - RNA, 19 nt, Artificial Sequence
  Description of Artificial Sequence: Synthetic oligonucleotide
  Antisense strand to SEQ ID NO: 2249774
ucugcccaugacaauuagu

SEQ ID NO: 2249776 - RNA, 19 nt, Artificial Sequence
  Description of Artificial Sequence: Synthetic oligonucleotide
  Sense strand starting at position 780 of SEQ ID NO: 1884226
cuaauugucaugggcagau

SEQ ID NO: 2249777 - RNA, 19 nt, Artificial Sequence
  Description of Artificial Sequence: Synthetic oligonucleotide
  Antisense strand to SEQ ID NO: 2249776
aucugcccaugacaauuag

SEQ ID NO: 2249778 - RNA, 19 nt, Artificial Sequence
  Description of Artificial Sequence: Synthetic oligonucleotide
  Sense strand starting at position 784 of SEQ ID NO: 1884226
uugucaugggcagauguuu

SEQ ID NO: 2249779 - RNA, 19 nt, Artificial Sequence
  Description of Artificial Sequence: Synthetic oligonucleotide
  Antisense strand to SEQ ID NO: 2249778
aaacaucugcccaugacaa

SEQ ID NO: 2249780 - RNA, 19 nt, Artificial Sequence
  Description of Artificial Sequence: Synthetic oligonucleotide
  Sense strand starting at position 792 of SEQ ID NO: 1884226
ggcagauguuuguuaccca

SEQ ID NO: 2249781 - RNA, 19 nt, Artificial Sequence
  Description of Artificial Sequence: Synthetic oligonucleotide
  Antisense strand to SEQ ID NO: 2249780
uggguaacaaacaucugcc

SEQ ID NO: 2249782 - RNA, 19 nt, Artificial Sequence
  Description of Artificial Sequence: Synthetic oligonucleotide
  Sense strand starting at position 795 of SEQ ID NO: 1884226
agauguuuguuacccaagu

SEQ ID NO: 2249783 - RNA, 19 nt, Artificial Sequence
  Description of Artificial Sequence: Synthetic oligonucleotide
  Antisense strand to SEQ ID NO: 2249782
acuuggguaacaaacaucu

SEQ ID NO: 2249784 - RNA, 19 nt, Artificial Sequence
  Description of Artificial Sequence: Synthetic oligonucleotide
  Sense strand starting at position 796 of SEQ ID NO: 1884226
gauguuuguuacccaagua

SEQ ID NO: 2249785 - RNA, 19 nt, Artificial Sequence
  Description of Artificial Sequence: Synthetic oligonucleotide
  Antisense strand to SEQ ID NO: 2249784
uacuuggguaacaaacauc

SEQ ID NO: 2249786 - RNA, 19 nt, Artificial Sequence
  Description of Artificial Sequence: Synthetic oligonucleotide
  Sense strand starting at position 935 of SEQ ID NO: 1884226
cauugcuaacgcgaaacaa

SEQ ID NO: 2249787 - RNA, 19 nt, Artificial Sequence
  Description of Artificial Sequence: Synthetic oligonucleotide
  Antisense strand to SEQ ID NO: 2249786
uuguuucgcguuagcaaug

SEQ ID NO: 2249788 - RNA, 19 nt, Artificial Sequence
  Description of Artificial Sequence: Synthetic oligonucleotide
  Sense strand starting at position 943 of SEQ ID NO: 1884226
acgcgaaacaaguaucaau

SEQ ID NO: 2249789 - RNA, 19 nt, Artificial Sequence
  Description of Artificial Sequence: Synthetic oligonucleotide
  Antisense strand to SEQ ID NO: 2249788
auugauacuuguuucgcgu

SEQ ID NO: 2249790 - RNA, 19 nt, Artificial Sequence
  Description of Artificial Sequence: Synthetic oligonucleotide
  Sense strand starting at position 966 of SEQ ID NO: 1884226
ucaggaggcuuccuagaac

SEQ ID NO: 2249791 - RNA, 19 nt, Artificial Sequence
  Description of Artificial Sequence: Synthetic oligonucleotide
  Antisense strand to SEQ ID NO: 2249790
guucuaggaagccuccuga

SEQ ID NO: 2249792 - RNA, 19 nt, Artificial Sequence
  Description of Artificial Sequence: Synthetic oligonucleotide
  Sense strand starting at position 1094 of SEQ ID NO: 1884226
cccugucuauccuugugau

SEQ ID NO: 2249793 - RNA, 19 nt, Artificial Sequence
  Description of Artificial Sequence: Synthetic oligonucleotide
  Antisense strand to SEQ ID NO: 2249792
aucacaaggauagacaggg

SEQ ID NO: 2249794 - RNA, 19 nt, Artificial Sequence
  Description of Artificial Sequence: Synthetic oligonucleotide
  Sense strand starting at position 1095 of SEQ ID NO: 1884226
ccugucuauccuugugaug

SEQ ID NO: 2249795 - RNA, 19 nt, Artificial Sequence
  Description of Artificial Sequence: Synthetic oligonucleotide
  Antisense strand to SEQ ID NO: 2249794
caucacaaggauagacagg

SEQ ID NO: 2249796 - RNA, 19 nt, Artificial Sequence
  Description of Artificial Sequence: Synthetic oligonucleotide
  Sense strand starting at position 1475 of SEQ ID NO: 1884226
gcaacaugccaaggaaaga

SEQ ID NO: 2249797 - RNA, 19 nt, Artificial Sequence
  Description of Artificial Sequence: Synthetic oligonucleotide
  Antisense strand to SEQ ID NO: 2249796
ucuuuccuuggcauguugc

SEQ ID NO: 2249798 - RNA, 19 nt, Artificial Sequence
  Description of Artificial Sequence: Synthetic oligonucleotide
  Sense strand starting at position 2216 of SEQ ID NO: 1884226
ggguucuucgucgucuaca

SEQ ID NO: 2249799 - RNA, 19 nt, Artificial Sequence
  Description of Artificial Sequence: Synthetic oligonucleotide
  Antisense strand to SEQ ID NO: 2249798
uguagacgacgaagaaccc

SEQ ID NO: 2249800 - RNA, 19 nt, Artificial Sequence
  Description of Artificial Sequence: Synthetic oligonucleotide
  Sense strand starting at position 2729 of SEQ ID NO: 1884226
gcuucuuaucguuaucucu

SEQ ID NO: 2249801 - RNA, 19 nt, Artificial Sequence
  Description of Artificial Sequence: Synthetic oligonucleotide
  Antisense strand to SEQ ID NO: 2249800
agagauaacgauaagaagc

SEQ ID NO: 2249802 - RNA, 19 nt, Artificial Sequence
  Description of Artificial Sequence: Synthetic oligonucleotide
  Sense strand starting at position 2737 of SEQ ID NO: 1884226
ucguuaucucuuggaaguu

SEQ ID NO: 2249803 - RNA, 19 nt, Artificial Sequence
  Description of Artificial Sequence: Synthetic oligonucleotide
  Antisense strand to SEQ ID NO: 2249802
aacuuccaagagauaacga

SEQ ID NO: 2249804 - RNA, 19 nt, Artificial Sequence
  Description of Artificial Sequence: Synthetic oligonucleotide
  Sense strand starting at position 2761 of SEQ ID NO: 1884226
acauuugugacacgucguu

SEQ ID NO: 2249805 - RNA, 19 nt, Artificial Sequence
  Description of Artificial Sequence: Synthetic oligonucleotide
  Antisense strand to SEQ ID NO: 2249804
aacgacgugucacaaaugu

SEQ ID NO: 2249806 - RNA, 19 nt, Artificial Sequence
  Description of Artificial Sequence: Synthetic oligonucleotide
  Sense strand starting at position 2768 of SEQ ID NO: 1884226
ugacacgucguuguguaua

SEQ ID NO: 2249807 - RNA, 19 nt, Artificial Sequence
  Description of Artificial Sequence: Synthetic oligonucleotide
  Antisense strand to SEQ ID NO: 2249806
uauacacaacgacguguca

SEQ ID NO: 2249808 - RNA, 19 nt, Artificial Sequence
  Description of Artificial Sequence: Synthetic oligonucleotide
  Sense strand starting at position 2776 of SEQ ID NO: 1884226
cguuguguauaguuaauag

SEQ ID NO: 2249809 - RNA, 19 nt, Artificial Sequence
  Description of Artificial Sequence: Synthetic oligonucleotide
  Antisense strand to SEQ ID NO: 2249808
cuauuaacuauacacaacg

SEQ ID NO: 2249810 - RNA, 19 nt, Artificial Sequence
  Description of Artificial Sequence: Synthetic oligonucleotide
  Sense strand starting at position 2806 of SEQ ID NO: 1884226
ucugucucgacguaagcua

SEQ ID NO: 2249811 - RNA, 19 nt, Artificial Sequence
  Description of Artificial Sequence: Synthetic oligonucleotide
  Antisense strand to SEQ ID NO: 2249810
uagcuuacgucgagacaga

SEQ ID NO: 2249812 - RNA, 19 nt, Artificial Sequence
  Description of Artificial Sequence: Synthetic oligonucleotide
  Sense strand starting at position 3063 of SEQ ID NO: 1884226
gcagguuuccgccaccaaa

SEQ ID NO: 2249813 - RNA, 19 nt, Artificial Sequence
  Description of Artificial Sequence: Synthetic oligonucleotide
  Antisense strand to SEQ ID NO: 2249812
uuugguggcggaaaccugc

SEQ ID NO: 2249814 - RNA, 19 nt, Artificial Sequence
  Description of Artificial Sequence: Synthetic oligonucleotide
  Sense strand starting at position 3311 of SEQ ID NO: 1884226
gagucucugcuguacuuga

SEQ ID NO: 2249815 - RNA, 19 nt, Artificial Sequence
  Description of Artificial Sequence: Synthetic oligonucleotide
  Antisense strand to SEQ ID NO: 2249814
ucaaguacagcagagacuc

SEQ ID NO: 2249816 - RNA, 19 nt, Artificial Sequence
  Description of Artificial Sequence: Synthetic oligonucleotide
  Sense strand starting at position 3731 of SEQ ID NO: 1884226
ccugauaugcaguaaacuu

SEQ ID NO: 2249817 - RNA, 19 nt, Artificial Sequence
  Description of Artificial Sequence: Synthetic oligonucleotide
  Antisense strand to SEQ ID NO: 2249816
aaguuuacugcauaucagg

SEQ ID NO: 2249818 - RNA, 19 nt, Artificial Sequence
  Description of Artificial Sequence: Synthetic oligonucleotide
  Sense strand starting at position 3749 of SEQ ID NO: 1884226
ucuagauagaguggucguu

SEQ ID NO: 2249819 - RNA, 19 nt, Artificial Sequence
  Description of Artificial Sequence: Synthetic oligonucleotide
  Antisense strand to SEQ ID NO: 2249818
aacgaccacucuaucuaga

SEQ ID NO: 2249820 - RNA, 19 nt, Artificial Sequence
  Description of Artificial Sequence: Synthetic oligonucleotide
  Sense strand starting at position 674 of SEQ ID NO: 1884227
cagucacgauggcuguaau

SEQ ID NO: 2249821 - RNA, 19 nt, Artificial Sequence
  Description of Artificial Sequence: Synthetic oligonucleotide
  Antisense strand to SEQ ID NO: 2249820
auuacagccaucgugacug

SEQ ID NO: 2249822 - RNA, 19 nt, Artificial Sequence
  Description of Artificial Sequence: Synthetic oligonucleotide
  Sense strand starting at position 677 of SEQ ID NO: 1884227
ucacgauggcuguaaucuc

SEQ ID NO: 2249823 - RNA, 19 nt, Artificial Sequence
  Description of Artificial Sequence: Synthetic oligonucleotide
  Antisense strand to SEQ ID NO: 2249822
gagauuacagccaucguga

SEQ ID NO: 2249824 - RNA, 19 nt, Artificial Sequence
  Description of Artificial Sequence: Synthetic oligonucleotide
  Sense strand starting at position 854 of SEQ ID NO: 1884227
cccaaacuagucuggaauu

SEQ ID NO: 2249825 - RNA, 19 nt, Artificial Sequence
  Description of Artificial Sequence: Synthetic oligonucleotide
  Antisense strand to SEQ ID NO: 2249824
aauuccagacuaguuuggg

SEQ ID NO: 2249826 - RNA, 19 nt, Artificial Sequence
  Description of Artificial Sequence: Synthetic oligonucleotide
  Sense strand starting at position 979 of SEQ ID NO: 1884227
gagcaugagugcuggaaga

SEQ ID NO: 2249827 - RNA, 19 nt, Artificial Sequence
  Description of Artificial Sequence: Synthetic oligonucleotide
  Antisense strand to SEQ ID NO: 2249826
ucuuccagcacucaugcuc

SEQ ID NO: 2249828 - RNA, 19 nt, Artificial Sequence
  Description of Artificial Sequence: Synthetic oligonucleotide
  Sense strand starting at position 981 of SEQ ID NO: 1884227
gcaugagugcuggaagaaa

SEQ ID NO: 2249829 - RNA, 19 nt, Artificial Sequence
  Description of Artificial Sequence: Synthetic oligonucleotide
  Antisense strand to SEQ ID NO: 2249828
uuucuuccagcacucaugc

SEQ ID NO: 2249830 - RNA, 19 nt, Artificial Sequence
  Description of Artificial Sequence: Synthetic oligonucleotide
  Sense strand starting at position 1097 of SEQ ID NO: 1884227
uccagugcuugaucgcuua

SEQ ID NO: 2249831 - RNA, 19 nt, Artificial Sequence
  Description of Artificial Sequence: Synthetic oligonucleotide
  Antisense strand to SEQ ID NO: 2249830
uaagcgaucaagcacugga

SEQ ID NO: 2249832 - RNA, 19 nt, Artificial Sequence
  Description of Artificial Sequence: Synthetic oligonucleotide
  Sense strand starting at position 1100 of SEQ ID NO: 1884227
agugcuugaucgcuuauau

SEQ ID NO: 2249833 - RNA, 19 nt, Artificial Sequence
  Description of Artificial Sequence: Synthetic oligonucleotide
  Antisense strand to SEQ ID NO: 2249832
auauaagcgaucaagcacu

SEQ ID NO: 2249834 - RNA, 19 nt, Artificial Sequence
  Description of Artificial Sequence: Synthetic oligonucleotide
  Sense strand starting at position 1148 of SEQ ID NO: 1884227
ugggcucgaucgcauauau

SEQ ID NO: 2249835 - RNA, 19 nt, Artificial Sequence
  Description of Artificial Sequence: Synthetic oligonucleotide
  Antisense strand to SEQ ID NO: 2249834
auauaugcgaucgagccca

SEQ ID NO: 2249836 - RNA, 19 nt, Artificial Sequence
  Description of Artificial Sequence: Synthetic oligonucleotide
  Sense strand starting at position 1977 of SEQ ID NO: 1884227
guuacaucucgcccggcaa

SEQ ID NO: 2249837 - RNA, 19 nt, Artificial Sequence
  Description of Artificial Sequence: Synthetic oligonucleotide
  Antisense strand to SEQ ID NO: 2249836
uugccgggcgagauguaac

SEQ ID NO: 2249838 - RNA, 19 nt, Artificial Sequence
  Description of Artificial Sequence: Synthetic oligonucleotide
  Sense strand starting at position 2328 of SEQ ID NO: 1884227
gggccuuuggcgagucaca

SEQ ID NO: 2249839 - RNA, 19 nt, Artificial Sequence
  Description of Artificial Sequence: Synthetic oligonucleotide
  Antisense strand to SEQ ID NO: 2249838
ugugacucgccaaaggccc

SEQ ID NO: 2249840 - RNA, 19 nt, Artificial Sequence
  Description of Artificial Sequence: Synthetic oligonucleotide
  Sense strand starting at position 2695 of SEQ ID NO: 1884227
ugagguaaaccgugucuaa

SEQ ID NO: 2249841 - RNA, 19 nt, Artificial Sequence
  Description of Artificial Sequence: Synthetic oligonucleotide
  Antisense strand to SEQ ID NO: 2249840
uuagacacgguuuaccuca

SEQ ID NO: 2249842 - RNA, 19 nt, Artificial Sequence
  Description of Artificial Sequence: Synthetic oligonucleotide
  Sense strand starting at position 2994 of SEQ ID NO: 1884227
uuucgaacuccugaguugu

SEQ ID NO: 2249843 - RNA, 19 nt, Artificial Sequence
  Description of Artificial Sequence: Synthetic oligonucleotide
  Antisense strand to SEQ ID NO: 2249842
acaacucaggaguucgaaa

SEQ ID NO: 2249844 - RNA, 19 nt, Artificial Sequence
  Description of Artificial Sequence: Synthetic oligonucleotide
  Sense strand starting at position 3000 of SEQ ID NO: 1884227
acuccugaguuguagcgau

SEQ ID NO: 2249845 - RNA, 19 nt, Artificial Sequence
  Description of Artificial Sequence: Synthetic oligonucleotide
  Antisense strand to SEQ ID NO: 2249844
aucgcuacaacucaggagu

SEQ ID NO: 2249846 - RNA, 19 nt, Artificial Sequence
  Description of Artificial Sequence: Synthetic oligonucleotide
  Sense strand starting at position 3024 of SEQ ID NO: 1884227
cagcuuggccaucagaguu

SEQ ID NO: 2249847 - RNA, 19 nt, Artificial Sequence
  Description of Artificial Sequence: Synthetic oligonucleotide
  Antisense strand to SEQ ID NO: 2249846
aacucugauggccaagcug

SEQ ID NO: 2249848 - RNA, 19 nt, Artificial Sequence
  Description of Artificial Sequence: Synthetic oligonucleotide
  Sense strand starting at position 3580 of SEQ ID NO: 1884227
gaaagcaugucucuagcua

SEQ ID NO: 2249849 - RNA, 19 nt, Artificial Sequence
  Description of Artificial Sequence: Synthetic oligonucleotide
  Antisense strand to SEQ ID NO: 2249848
uagcuagagacaugcuuuc

SEQ ID NO: 2249850 - RNA, 19 nt, Artificial Sequence
  Description of Artificial Sequence: Synthetic oligonucleotide
  Sense strand starting at position 3584 of SEQ ID NO: 1884227
gcaugucucuagcuagcua

SEQ ID NO: 2249851 - RNA, 19 nt, Artificial Sequence
  Description of Artificial Sequence: Synthetic oligonucleotide
  Antisense strand to SEQ ID NO: 2249850
uagcuagcuagagacaugc

SEQ ID NO: 2249852 - RNA, 19 nt, Artificial Sequence
  Description of Artificial Sequence: Synthetic oligonucleotide
  Sense strand starting at position 3604 of SEQ ID NO: 1884227
cuagcuagauaauugauau

SEQ ID NO: 2249853 - RNA, 19 nt, Artificial Sequence
  Description of Artificial Sequence: Synthetic oligonucleotide
  Antisense strand to SEQ ID NO: 2249852
auaucaauuaucuagcuag

SEQ ID NO: 2249854 - RNA, 19 nt, Artificial Sequence
  Description of Artificial Sequence: Synthetic oligonucleotide
  Sense strand starting at position 3608 of SEQ ID NO: 1884227
cuagauaauugauauguag

SEQ ID NO: 2249855 - RNA, 19 nt, Artificial Sequence
  Description of Artificial Sequence: Synthetic oligonucleotide
  Antisense strand to SEQ ID NO: 2249854
cuacauaucaauuaucuag

SEQ ID NO: 2249856 - RNA, 19 nt, Artificial Sequence
  Description of Artificial Sequence: Synthetic oligonucleotide
  Sense strand starting at position 261 of SEQ ID NO: 1884228
auuccuaagucaucgauga

SEQ ID NO: 2249857 - RNA, 19 nt, Artificial Sequence
  Description of Artificial Sequence: Synthetic oligonucleotide
  Antisense strand to SEQ ID NO: 2249856
ucaucgaugacuuaggaau

SEQ ID NO: 2249858 - RNA, 19 nt, Artificial Sequence
  Description of Artificial Sequence: Synthetic oligonucleotide
  Sense strand starting at position 262 of SEQ ID NO: 1884228
uuccuaagucaucgaugaa

SEQ ID NO: 2249859 - RNA, 19 nt, Artificial Sequence
  Description of Artificial Sequence: Synthetic oligonucleotide
  Antisense strand to SEQ ID NO: 2249858
uucaucgaugacuuaggaa

SEQ ID NO: 2249860 - RNA, 19 nt, Artificial Sequence
  Description of Artificial Sequence: Synthetic oligonucleotide
  Sense strand starting at position 263 of SEQ ID NO: 1884228
uccuaagucaucgaugaag

SEQ ID NO: 2249861 - RNA, 19 nt, Artificial Sequence
  Description of Artificial Sequence: Synthetic oligonucleotide
  Antisense strand to SEQ ID NO: 2249860
cuucaucgaugacuuagga

SEQ ID NO: 2249862 - RNA, 19 nt, Artificial Sequence
  Description of Artificial Sequence: Synthetic oligonucleotide
  Sense strand starting at position 265 of SEQ ID NO: 1884228
cuaagucaucgaugaagga

SEQ ID NO: 2249863 - RNA, 19 nt, Artificial Sequence
  Description of Artificial Sequence: Synthetic oligonucleotide
  Antisense strand to SEQ ID NO: 2249862
uccuucaucgaugacuuag

SEQ ID NO: 2249864 - RNA, 19 nt, Artificial Sequence
  Description of Artificial Sequence: Synthetic oligonucleotide
  Sense strand starting at position 413 of SEQ ID NO: 1884228
gaaaguuugucucuauaga

SEQ ID NO: 2249865 - RNA, 19 nt, Artificial Sequence
  Description of Artificial Sequence: Synthetic oligonucleotide
  Antisense strand to SEQ ID NO: 2249864
ucuauagagacaaacuuuc

SEQ ID NO: 2249866 - RNA, 19 nt, Artificial Sequence
  Description of Artificial Sequence: Synthetic oligonucleotide
  Sense strand starting at position 518 of SEQ ID NO: 1884228
gggagcugaugcuugggaa

SEQ ID NO: 2249867 - RNA, 19 nt, Artificial Sequence
  Description of Artificial Sequence: Synthetic oligonucleotide
  Antisense strand to SEQ ID NO: 2249866
uucccaagcaucagcuccc

SEQ ID NO: 2249868 - RNA, 19 nt, Artificial Sequence
  Description of Artificial Sequence: Synthetic oligonucleotide
  Sense strand starting at position 887 of SEQ ID NO: 1884228
agucaauaacgucagaggu

SEQ ID NO: 2249869 - RNA, 19 nt, Artificial Sequence
  Description of Artificial Sequence: Synthetic oligonucleotide
  Antisense strand to SEQ ID NO: 2249868
accucugacguuauugacu

SEQ ID NO: 2249870 - RNA, 19 nt, Artificial Sequence
  Description of Artificial Sequence: Synthetic oligonucleotide
  Sense strand starting at position 1095 of SEQ ID NO: 1884228
ugguuagggccauacuuau

SEQ ID NO: 2249871 - RNA, 19 nt, Artificial Sequence
  Description of Artificial Sequence: Synthetic oligonucleotide
  Antisense strand to SEQ ID NO: 2249870
auaaguauggcccuaacca

SEQ ID NO: 2249872 - RNA, 19 nt, Artificial Sequence
  Description of Artificial Sequence: Synthetic oligonucleotide
  Sense strand starting at position 1125 of SEQ ID NO: 1884228
auuugucguuucucugaaa

SEQ ID NO: 2249873 - RNA, 19 nt, Artificial Sequence
  Description of Artificial Sequence: Synthetic oligonucleotide
  Antisense strand to SEQ ID NO: 2249872
uuucagagaaacgacaaau

SEQ ID NO: 2249874 - RNA, 19 nt, Artificial Sequence
  Description of Artificial Sequence: Synthetic oligonucleotide
  Sense strand starting at position 1227 of SEQ ID NO: 1884228
auggaaagcuggguccuau

SEQ ID NO: 2249875 - RNA, 19 nt, Artificial Sequence
  Description of Artificial Sequence: Synthetic oligonucleotide
  Antisense strand to SEQ ID NO: 2249874
auaggacccagcuuuccau

SEQ ID NO: 2249876 - RNA, 19 nt, Artificial Sequence
  Description of Artificial Sequence: Synthetic oligonucleotide
  Sense strand starting at position 1315 of SEQ ID NO: 1884228
guuaacaagaucgggaaau

SEQ ID NO: 2249877 - RNA, 19 nt, Artificial Sequence
  Description of Artificial Sequence: Synthetic oligonucleotide
  Antisense strand to SEQ ID NO: 2249876
auuucccgaucuuguuaac

SEQ ID NO: 2249878 - RNA, 19 nt, Artificial Sequence
  Description of Artificial Sequence: Synthetic oligonucleotide
  Sense strand starting at position 1393 of SEQ ID NO: 1884228
agagcuuacucaccugaga

SEQ ID NO: 2249879 - RNA, 19 nt, Artificial Sequence
  Description of Artificial Sequence: Synthetic oligonucleotide
  Antisense strand to SEQ ID NO: 2249878
ucucaggugaguaagcucu

SEQ ID NO: 2249880 - RNA, 19 nt, Artificial Sequence
  Description of Artificial Sequence: Synthetic oligonucleotide
  Sense strand starting at position 1554 of SEQ ID NO: 1884228
uguuuaggauaaucagauc

SEQ ID NO: 2249881 - RNA, 19 nt, Artificial Sequence
  Description of Artificial Sequence: Synthetic oligonucleotide
  Antisense strand to SEQ ID NO: 2249880
gaucugauuauccuaaaca

SEQ ID NO: 2249882 - RNA, 19 nt, Artificial Sequence
  Description of Artificial Sequence: Synthetic oligonucleotide
  Sense strand starting at position 1650 of SEQ ID NO: 1884228
uguauuucuuucguaacaa

SEQ ID NO: 2249883 - RNA, 19 nt, Artificial Sequence
  Description of Artificial Sequence: Synthetic oligonucleotide
  Antisense strand to SEQ ID NO: 2249882
uuguuacgaaagaaauaca

SEQ ID NO: 2249884 - RNA, 19 nt, Artificial Sequence
  Description of Artificial Sequence: Synthetic oligonucleotide
  Sense strand starting at position 1779 of SEQ ID NO: 1884228
cuuacaauugauggugaau

SEQ ID NO: 2249885 - RNA, 19 nt, Artificial Sequence
  Description of Artificial Sequence: Synthetic oligonucleotide
  Antisense strand to SEQ ID NO: 2249884
auucaccaucaauuguaag

SEQ ID NO: 2249886 - RNA, 19 nt, Artificial Sequence
  Description of Artificial Sequence: Synthetic oligonucleotide
  Sense strand starting at position 1932 of SEQ ID NO: 1884228
gcuguauaaccaggagaga

SEQ ID NO: 2249887 - RNA, 19 nt, Artificial Sequence
  Description of Artificial Sequence: Synthetic oligonucleotide
  Antisense strand to SEQ ID NO: 2249886
ucucuccugguuauacagc

SEQ ID NO: 2249888 - RNA, 19 nt, Artificial Sequence
  Description of Artificial Sequence: Synthetic oligonucleotide
  Sense strand starting at position 1945 of SEQ ID NO: 1884228
gagagauguucuccugacc

SEQ ID NO: 2249889 - RNA, 19 nt, Artificial Sequence
  Description of Artificial Sequence: Synthetic oligonucleotide
  Antisense strand to SEQ ID NO: 2249888
ggucaggagaacaucucuc

SEQ ID NO: 2249890 - RNA, 19 nt, Artificial Sequence
  Description of Artificial Sequence: Synthetic oligonucleotide
  Sense strand starting at position 2001 of SEQ ID NO: 1884228
gucugaaagaaaugcagau

SEQ ID NO: 2249891 - RNA, 19 nt, Artificial Sequence
  Description of Artificial Sequence: Synthetic oligonucleotide
  Antisense strand to SEQ ID NO: 2249890
aucugcauuucuuucagac

SEQ ID NO: 2249892 - RNA, 19 nt, Artificial Sequence
  Description of Artificial Sequence: Synthetic oligonucleotide
  Sense strand starting at position 2234 of SEQ ID NO: 1884228
acagaaauguuagcucuau

SEQ ID NO: 2249893 - RNA, 19 nt, Artificial Sequence
  Description of Artificial Sequence: Synthetic oligonucleotide
  Antisense strand to SEQ ID NO: 2249892
auagagcuaacauuucugu

SEQ ID NO: 2249894 - RNA, 19 nt, Artificial Sequence
  Description of Artificial Sequence: Synthetic oligonucleotide
  Sense strand starting at position 2235 of SEQ ID NO: 1884228
cagaaauguuagcucuaug

SEQ ID NO: 2249895 - RNA, 19 nt, Artificial Sequence
  Description of Artificial Sequence: Synthetic oligonucleotide
  Antisense strand to SEQ ID NO: 2249894
cauagagcuaacauuucug

SEQ ID NO: 2249896 - RNA, 19 nt, Artificial Sequence
  Description of Artificial Sequence: Synthetic oligonucleotide
  Sense strand starting at position 2515 of SEQ ID NO: 1884228
uuuauuaaggcugaaccua

SEQ ID NO: 2249897 - RNA, 19 nt, Artificial Sequence
  Description of Artificial Sequence: Synthetic oligonucleotide
  Antisense strand to SEQ ID NO: 2249896
uagguucagccuuaauaaa

SEQ ID NO: 2249898 - RNA, 19 nt, Artificial Sequence
  Description of Artificial Sequence: Synthetic oligonucleotide
  Sense strand starting at position 2609 of SEQ ID NO: 1884228
ggcaacauuucuguuuguu

SEQ ID NO: 2249899 - RNA, 19 nt, Artificial Sequence
  Description of Artificial Sequence: Synthetic oligonucleotide
  Antisense strand to SEQ ID NO: 2249898
aacaaacagaaauguugcc

SEQ ID NO: 2249900 - RNA, 19 nt, Artificial Sequence
  Description of Artificial Sequence: Synthetic oligonucleotide
  Sense strand starting at position 2622 of SEQ ID NO: 1884228
uuuguuuguguuuaggaag

SEQ ID NO: 2249901 - RNA, 19 nt, Artificial Sequence
  Description of Artificial Sequence: Synthetic oligonucleotide
  Antisense strand to SEQ ID NO: 2249900
cuuccuaaacacaaacaaa

SEQ ID NO: 2249902 - RNA, 19 nt, Artificial Sequence
  Description of Artificial Sequence: Synthetic oligonucleotide
  Sense strand starting at position 2659 of SEQ ID NO: 1884228
ugaauuaauugucuugaug

SEQ ID NO: 2249903 - RNA, 19 nt, Artificial Sequence
  Description of Artificial Sequence: Synthetic oligonucleotide
  Antisense strand to SEQ ID NO: 2249902
caucaagacaauuaauuca

SEQ ID NO: 2249904 - RNA, 19 nt, Artificial Sequence
  Description of Artificial Sequence: Synthetic oligonucleotide
  Sense strand starting at position 2679 of SEQ ID NO: 1884228
ccuauuucuuaguaggaaa

SEQ ID NO: 2249905 - RNA, 19 nt, Artificial Sequence
  Description of Artificial Sequence: Synthetic oligonucleotide
  Antisense strand to SEQ ID NO: 2249904
uuuccuacuaagaaauagg

SEQ ID NO: 2249906 - RNA, 19 nt, Artificial Sequence
  Description of Artificial Sequence: Synthetic oligonucleotide
  Sense strand starting at position 2706 of SEQ ID NO: 1884228
uuaggugugauccauugaa

SEQ ID NO: 2249907 - RNA, 19 nt, Artificial Sequence
  Description of Artificial Sequence: Synthetic oligonucleotide
  Antisense strand to SEQ ID NO: 2249906
uucaauggaucacaccuaa

SEQ ID NO: 2249908 - RNA, 19 nt, Artificial Sequence
  Description of Artificial Sequence: Synthetic oligonucleotide
  Sense strand starting at position 2770 of SEQ ID NO: 1884228
augugauagcauggaauua

SEQ ID NO: 2249909 - RNA, 19 nt, Artificial Sequence
  Description of Artificial Sequence: Synthetic oligonucleotide
  Antisense strand to SEQ ID NO: 2249908
uaauuccaugcuaucacau

SEQ ID NO: 2249910 - RNA, 19 nt, Artificial Sequence
  Description of Artificial Sequence: Synthetic oligonucleotide
  Sense strand starting at position 2782 of SEQ ID NO: 1884228
ggaauuaauuuccaguaua

SEQ ID NO: 2249911 - RNA, 19 nt, Artificial Sequence
  Description of Artificial Sequence: Synthetic oligonucleotide
  Antisense strand to SEQ ID NO: 2249910
uauacuggaaauuaauucc

SEQ ID NO: 2249912 - RNA, 19 nt, Artificial Sequence
  Description of Artificial Sequence: Synthetic oligonucleotide
  Sense strand starting at position 2820 of SEQ ID NO: 1884228
acacuuggacuuugaaauu

SEQ ID NO: 2249913 - RNA, 19 nt, Artificial Sequence
  Description of Artificial Sequence: Synthetic oligonucleotide
  Antisense strand to SEQ ID NO: 2249912
aauuucaaaguccaagugu

SEQ ID NO: 2249914 - RNA, 19 nt, Artificial Sequence
  Description of Artificial Sequence: Synthetic oligonucleotide
  Sense strand starting at position 2955 of SEQ ID NO: 1884228
acucuaggguuucucuaua

SEQ ID NO: 2249915 - RNA, 19 nt, Artificial Sequence
  Description of Artificial Sequence: Synthetic oligonucleotide
  Antisense strand to SEQ ID NO: 2249914
uauagagaaacccuagagu

SEQ ID NO: 2249916 - RNA, 19 nt, Artificial Sequence
  Description of Artificial Sequence: Synthetic oligonucleotide
  Sense strand starting at position 2982 of SEQ ID NO: 1884228
ggagugaaucggugagacu

SEQ ID NO: 2249917 - RNA, 19 nt, Artificial Sequence
  Description of Artificial Sequence: Synthetic oligonucleotide
  Antisense strand to SEQ ID NO: 2249916
agucucaccgauucacucc

SEQ ID NO: 2249918 - RNA, 19 nt, Artificial Sequence
  Description of Artificial Sequence: Synthetic oligonucleotide
  Sense strand starting at position 2983 of SEQ ID NO: 1884228
gagugaaucggugagacuc

SEQ ID NO: 2249919 - RNA, 19 nt, Artificial Sequence
  Description of Artificial Sequence: Synthetic oligonucleotide
  Antisense strand to SEQ ID NO: 2249918
gagucucaccgauucacuc

SEQ ID NO: 2249920 - RNA, 19 nt, Artificial Sequence
  Description of Artificial Sequence: Synthetic oligonucleotide
  Sense strand starting at position 3354 of SEQ ID NO: 1884228
guugguuaugaggagugaa

SEQ ID NO: 2249921 - RNA, 19 nt, Artificial Sequence
  Description of Artificial Sequence: Synthetic oligonucleotide
  Antisense strand to SEQ ID NO: 2249920
uucacuccucauaaccaac

SEQ ID NO: 2249922 - RNA, 19 nt, Artificial Sequence
  Description of Artificial Sequence: Synthetic oligonucleotide
  Sense strand starting at position 3357 of SEQ ID NO: 1884228
gguuaugaggagugaauga

SEQ ID NO: 2249923 - RNA, 19 nt, Artificial Sequence
  Description of Artificial Sequence: Synthetic oligonucleotide
  Antisense strand to SEQ ID NO: 2249922
ucauucacuccucauaacc

SEQ ID NO: 2249924 - RNA, 19 nt, Artificial Sequence
  Description of Artificial Sequence: Synthetic oligonucleotide
  Sense strand starting at position 3455 of SEQ ID NO: 1884228
uugggcuugguacaagauu

SEQ ID NO: 2249925 - RNA, 19 nt, Artificial Sequence
  Description of Artificial Sequence: Synthetic oligonucleotide
  Antisense strand to SEQ ID NO: 2249924
aaucuuguaccaagcccaa

SEQ ID NO: 2249926 - RNA, 19 nt, Artificial Sequence
  Description of Artificial Sequence: Synthetic oligonucleotide
  Sense strand starting at position 3620 of SEQ ID NO: 1884228
ccugaacucuaaguguuaa

SEQ ID NO: 2249927 - RNA, 19 nt, Artificial Sequence
  Description of Artificial Sequence: Synthetic oligonucleotide
  Antisense strand to SEQ ID NO: 2249926
uuaacacuuagaguucagg

SEQ ID NO: 2249928 - RNA, 19 nt, Artificial Sequence
  Description of Artificial Sequence: Synthetic oligonucleotide
  Sense strand starting at position 3699 of SEQ ID NO: 1884228
ggaugaugucauuauaguu

SEQ ID NO: 2249929 - RNA, 19 nt, Artificial Sequence
  Description of Artificial Sequence: Synthetic oligonucleotide
  Antisense strand to SEQ ID NO: 2249928
aacuauaaugacaucaucc

SEQ ID NO: 2249930 - RNA, 19 nt, Artificial Sequence
  Description of Artificial Sequence: Synthetic oligonucleotide
  Sense strand starting at position 3709 of SEQ ID NO: 1884228
auuauaguugcggacacua

SEQ ID NO: 2249931 - RNA, 19 nt, Artificial Sequence
  Description of Artificial Sequence: Synthetic oligonucleotide
  Antisense strand to SEQ ID NO: 2249930
uaguguccgcaacuauaau

SEQ ID NO: 2249932 - RNA, 19 nt, Artificial Sequence
  Description of Artificial Sequence: Synthetic oligonucleotide
  Sense strand starting at position 3814 of SEQ ID NO: 1884228
gagguacacuccguauaaa

SEQ ID NO: 2249933 - RNA, 19 nt, Artificial Sequence
  Description of Artificial Sequence: Synthetic oligonucleotide
  Antisense strand to SEQ ID NO: 2249932
uuuauacggaguguaccuc

SEQ ID NO: 2249934 - RNA, 19 nt, Artificial Sequence
  Description of Artificial Sequence: Synthetic oligonucleotide
  Sense strand starting at position 3856 of SEQ ID NO: 1884228
ggugaaguacuuggagauu

SEQ ID NO: 2249935 - RNA, 19 nt, Artificial Sequence
  Description of Artificial Sequence: Synthetic oligonucleotide
  Antisense strand to SEQ ID NO: 2249934
aaucuccaaguacuucacc

SEQ ID NO: 2249936 - RNA, 19 nt, Artificial Sequence
  Description of Artificial Sequence: Synthetic oligonucleotide
  Sense strand starting at position 284 of SEQ ID NO: 1884229
guucuugugagccgagaug

SEQ ID NO: 2249937 - RNA, 19 nt, Artificial Sequence
  Description of Artificial Sequence: Synthetic oligonucleotide
  Antisense strand to SEQ ID NO: 2249936
caucucggcucacaagaac

SEQ ID NO: 2249938 - RNA, 19 nt, Artificial Sequence
  Description of Artificial Sequence: Synthetic oligonucleotide
  Sense strand starting at position 286 of SEQ ID NO: 1884229
ucuugugagccgagauggu

SEQ ID NO: 2249939 - RNA, 19 nt, Artificial Sequence
  Description of Artificial Sequence: Synthetic oligonucleotide
  Antisense strand to SEQ ID NO: 2249938
accaucucggcucacaaga

SEQ ID NO: 2249940 - RNA, 19 nt, Artificial Sequence
  Description of Artificial Sequence: Synthetic oligonucleotide
  Sense strand starting at position 450 of SEQ ID NO: 1884229
acacauuuguaggaucuaa

SEQ ID NO: 2249941 - RNA, 19 nt, Artificial Sequence
  Description of Artificial Sequence: Synthetic oligonucleotide
  Antisense strand to SEQ ID NO: 2249940
uuagauccuacaaaugugu

SEQ ID NO: 2249942 - RNA, 19 nt, Artificial Sequence
  Description of Artificial Sequence: Synthetic oligonucleotide
  Sense strand starting at position 482 of SEQ ID NO: 1884229
ugaagaaaucgucgaauaa

SEQ ID NO: 2249943 - RNA, 19 nt, Artificial Sequence
  Description of Artificial Sequence: Synthetic oligonucleotide
  Antisense strand to SEQ ID NO: 2249942
uuauucgacgauuucuuca

SEQ ID NO: 2249944 - RNA, 19 nt, Artificial Sequence
  Description of Artificial Sequence: Synthetic oligonucleotide
  Sense strand starting at position 606 of SEQ ID NO: 1884229
gggucugugaucugccuuu

SEQ ID NO: 2249945 - RNA, 19 nt, Artificial Sequence
  Description of Artificial Sequence: Synthetic oligonucleotide
  Antisense strand to SEQ ID NO: 2249944
aaaggcagaucacagaccc

SEQ ID NO: 2249946 - RNA, 19 nt, Artificial Sequence
  Description of Artificial Sequence: Synthetic oligonucleotide
  Sense strand starting at position 662 of SEQ ID NO: 1884229
agguucuccaggugaggaa

SEQ ID NO: 2249947 - RNA, 19 nt, Artificial Sequence
  Description of Artificial Sequence: Synthetic oligonucleotide
  Antisense strand to SEQ ID NO: 2249946
uuccucaccuggagaaccu

SEQ ID NO: 2249948 - RNA, 19 nt, Artificial Sequence
  Description of Artificial Sequence: Synthetic oligonucleotide
  Sense strand starting at position 737 of SEQ ID NO: 1884229
ucagaagucugugcccuua

SEQ ID NO: 2249949 - RNA, 19 nt, Artificial Sequence
  Description of Artificial Sequence: Synthetic oligonucleotide
  Antisense strand to SEQ ID NO: 2249948
uaagggcacagacuucuga

SEQ ID NO: 2249950 - RNA, 19 nt, Artificial Sequence
  Description of Artificial Sequence: Synthetic oligonucleotide
  Sense strand starting at position 767 of SEQ ID NO: 1884229
ucaaauugcccuugagggu

SEQ ID NO: 2249951 - RNA, 19 nt, Artificial Sequence
  Description of Artificial Sequence: Synthetic oligonucleotide
  Antisense strand to SEQ ID NO: 2249950
acccucaagggcaauuuga

SEQ ID NO: 2249952 - RNA, 19 nt, Artificial Sequence
  Description of Artificial Sequence: Synthetic oligonucleotide
  Sense strand starting at position 853 of SEQ ID NO: 1884229
ggccuagaauaucucaaga

SEQ ID NO: 2249953 - RNA, 19 nt, Artificial Sequence
  Description of Artificial Sequence: Synthetic oligonucleotide
  Antisense strand to SEQ ID NO: 2249952
ucuugagauauucuaggcc

SEQ ID NO: 2249954 - RNA, 19 nt, Artificial Sequence
  Description of Artificial Sequence: Synthetic oligonucleotide
  Sense strand starting at position 933 of SEQ ID NO: 1884229
ccauuaagggcucaauggu

SEQ ID NO: 2249955 - RNA, 19 nt, Artificial Sequence
  Description of Artificial Sequence: Synthetic oligonucleotide
  Antisense strand to SEQ ID NO: 2249954
accauugagcccuuaaugg

SEQ ID NO: 2249956 - RNA, 19 nt, Artificial Sequence
  Description of Artificial Sequence: Synthetic oligonucleotide
  Sense strand starting at position 977 of SEQ ID NO: 1884229
agagguuugcuccagcaaa

SEQ ID NO: 2249957 - RNA, 19 nt, Artificial Sequence
  Description of Artificial Sequence: Synthetic oligonucleotide
  Antisense strand to SEQ ID NO: 2249956
uuugcuggagcaaaccucu

SEQ ID NO: 2249958 - RNA, 19 nt, Artificial Sequence
  Description of Artificial Sequence: Synthetic oligonucleotide
  Sense strand starting at position 1174 of SEQ ID NO: 1884229
ccagaugugcugugaaggu

SEQ ID NO: 2249959 - RNA, 19 nt, Artificial Sequence
  Description of Artificial Sequence: Synthetic oligonucleotide
  Antisense strand to SEQ ID NO: 2249958
accuucacagcacaucugg

SEQ ID NO: 2249960 - RNA, 19 nt, Artificial Sequence
  Description of Artificial Sequence: Synthetic oligonucleotide
  Sense strand starting at position 1301 of SEQ ID NO: 1884229
cuaaauguacuguauuguu

SEQ ID NO: 2249961 - RNA, 19 nt, Artificial Sequence
  Description of Artificial Sequence: Synthetic oligonucleotide
  Antisense strand to SEQ ID NO: 2249960
aacaauacaguacauuuag

SEQ ID NO: 2249962 - RNA, 19 nt, Artificial Sequence
  Description of Artificial Sequence: Synthetic oligonucleotide
  Sense strand starting at position 1368 of SEQ ID NO: 1884229
uuuaauuaccuguaaggcu

SEQ ID NO: 2249963 - RNA, 19 nt, Artificial Sequence
  Description of Artificial Sequence: Synthetic oligonucleotide
  Antisense strand to SEQ ID NO: 2249962
agccuuacagguaauuaaa

SEQ ID NO: 2249964 - RNA, 19 nt, Artificial Sequence
  Description of Artificial Sequence: Synthetic oligonucleotide
  Sense strand starting at position 1375 of SEQ ID NO: 1884229
accuguaaggcucacauca

SEQ ID NO: 2249965 - RNA, 19 nt, Artificial Sequence
  Description of Artificial Sequence: Synthetic oligonucleotide
  Antisense strand to SEQ ID NO: 2249964
ugaugugagccuuacaggu

SEQ ID NO: 2249966 - RNA, 19 nt, Artificial Sequence
  Description of Artificial Sequence: Synthetic oligonucleotide
  Sense strand starting at position 1490 of SEQ ID NO: 1884229
ccgaaaguggcugagcuua

SEQ ID NO: 2249967 - RNA, 19 nt, Artificial Sequence
  Description of Artificial Sequence: Synthetic oligonucleotide
  Antisense strand to SEQ ID NO: 2249966
uaagcucagccacuuucgg

SEQ ID NO: 2249968 - RNA, 19 nt, Artificial Sequence
  Description of Artificial Sequence: Synthetic oligonucleotide
  Sense strand starting at position 1868 of SEQ ID NO: 1884229
gcacguugggcucaaugaa

SEQ ID NO: 2249969 - RNA, 19 nt, Artificial Sequence
  Description of Artificial Sequence: Synthetic oligonucleotide
  Antisense strand to SEQ ID NO: 2249968
uucauugagcccaacgugc

SEQ ID NO: 2249970 - RNA, 19 nt, Artificial Sequence
  Description of Artificial Sequence: Synthetic oligonucleotide
  Sense strand starting at position 1937 of SEQ ID NO: 1884229
ccuccuguuccagggacau

SEQ ID NO: 2249971 - RNA, 19 nt, Artificial Sequence
  Description of Artificial Sequence: Synthetic oligonucleotide
  Antisense strand to SEQ ID NO: 2249970
augucccuggaacaggagg

SEQ ID NO: 2249972 - RNA, 19 nt, Artificial Sequence
  Description of Artificial Sequence: Synthetic oligonucleotide
  Sense strand starting at position 2227 of SEQ ID NO: 1884229
ccgucaucacaguaccuaa

SEQ ID NO: 2249973 - RNA, 19 nt, Artificial Sequence
  Description of Artificial Sequence: Synthetic oligonucleotide
  Antisense strand to SEQ ID NO: 2249972
uuagguacugugaugacgg

SEQ ID NO: 2249974 - RNA, 19 nt, Artificial Sequence
  Description of Artificial Sequence: Synthetic oligonucleotide
  Sense strand starting at position 2351 of SEQ ID NO: 1884229
cacgaauuccagugugcau

SEQ ID NO: 2249975 - RNA, 19 nt, Artificial Sequence
  Description of Artificial Sequence: Synthetic oligonucleotide
  Antisense strand to SEQ ID NO: 2249974
augcacacuggaauucgug

SEQ ID NO: 2249976 - RNA, 19 nt, Artificial Sequence
  Description of Artificial Sequence: Synthetic oligonucleotide
  Sense strand starting at position 2593 of SEQ ID NO: 1884229
agguaccauuuguaaagaa

SEQ ID NO: 2249977 - RNA, 19 nt, Artificial Sequence
  Description of Artificial Sequence: Synthetic oligonucleotide
  Antisense strand to SEQ ID NO: 2249976
uucuuuacaaaugguaccu

SEQ ID NO: 2249978 - RNA, 19 nt, Artificial Sequence
  Description of Artificial Sequence: Synthetic oligonucleotide
  Sense strand starting at position 2755 of SEQ ID NO: 1884229
acaucaucuaguuguguga

SEQ ID NO: 2249979 - RNA, 19 nt, Artificial Sequence
  Description of Artificial Sequence: Synthetic oligonucleotide
  Antisense strand to SEQ ID NO: 2249978
ucacacaacuagaugaugu

SEQ ID NO: 2249980 - RNA, 19 nt, Artificial Sequence
  Description of Artificial Sequence: Synthetic oligonucleotide
  Sense strand starting at position 2899 of SEQ ID NO: 1884229
cucagaagugcucaguauu

SEQ ID NO: 2249981 - RNA, 19 nt, Artificial Sequence
  Description of Artificial Sequence: Synthetic oligonucleotide
  Antisense strand to SEQ ID NO: 2249980
aauacugagcacuucugag

SEQ ID NO: 2249982 - RNA, 19 nt, Artificial Sequence
  Description of Artificial Sequence: Synthetic oligonucleotide
  Sense strand starting at position 2907 of SEQ ID NO: 1884229
ugcucaguauuggccauua

SEQ ID NO: 2249983 - RNA, 19 nt, Artificial Sequence
  Description of Artificial Sequence: Synthetic oligonucleotide
  Antisense strand to SEQ ID NO: 2249982
uaauggccaauacugagca

SEQ ID NO: 2249984 - RNA, 19 nt, Artificial Sequence
  Description of Artificial Sequence: Synthetic oligonucleotide
  Sense strand starting at position 2909 of SEQ ID NO: 1884229
cucaguauuggccauuaac

SEQ ID NO: 2249985 - RNA, 19 nt, Artificial Sequence
  Description of Artificial Sequence: Synthetic oligonucleotide
  Antisense strand to SEQ ID NO: 2249984
guuaauggccaauacugag

SEQ ID NO: 2249986 - RNA, 19 nt, Artificial Sequence
  Description of Artificial Sequence: Synthetic oligonucleotide
  Sense strand starting at position 3003 of SEQ ID NO: 1884229
guaugacucugcuucugua

SEQ ID NO: 2249987 - RNA, 19 nt, Artificial Sequence
  Description of Artificial Sequence: Synthetic oligonucleotide
  Antisense strand to SEQ ID NO: 2249986
uacagaagcagagucauac

SEQ ID NO: 2249988 - RNA, 19 nt, Artificial Sequence
  Description of Artificial Sequence: Synthetic oligonucleotide
  Sense strand starting at position 3015 of SEQ ID NO: 1884229
uucuguauuugcucaguuu

SEQ ID NO: 2249989 - RNA, 19 nt, Artificial Sequence
  Description of Artificial Sequence: Synthetic oligonucleotide
  Antisense strand to SEQ ID NO: 2249988
aaacugagcaaauacagaa

SEQ ID NO: 2249990 - RNA, 19 nt, Artificial Sequence
  Description of Artificial Sequence: Synthetic oligonucleotide
  Sense strand starting at position 3061 of SEQ ID NO: 1884229
ggguuuaucuccucuucca

SEQ ID NO: 2249991 - RNA, 19 nt, Artificial Sequence
  Description of Artificial Sequence: Synthetic oligonucleotide
  Antisense strand to SEQ ID NO: 2249990
uggaagaggagauaaaccc

SEQ ID NO: 2249992 - RNA, 19 nt, Artificial Sequence
  Description of Artificial Sequence: Synthetic oligonucleotide
  Sense strand starting at position 3093 of SEQ ID NO: 1884229
gacccuccgaguugaguaa

SEQ ID NO: 2249993 - RNA, 19 nt, Artificial Sequence
  Description of Artificial Sequence: Synthetic oligonucleotide
  Antisense strand to SEQ ID NO: 2249992
uuacucaacucggaggguc

SEQ ID NO: 2249994 - RNA, 19 nt, Artificial Sequence
  Description of Artificial Sequence: Synthetic oligonucleotide
  Sense strand starting at position 3130 of SEQ ID NO: 1884229
acccuuaugccgcagaaau

SEQ ID NO: 2249995 - RNA, 19 nt, Artificial Sequence
  Description of Artificial Sequence: Synthetic oligonucleotide
  Antisense strand to SEQ ID NO: 2249994
auuucugcggcauaagggu

SEQ ID NO: 2249996 - RNA, 19 nt, Artificial Sequence
  Description of Artificial Sequence: Synthetic oligonucleotide
  Sense strand starting at position 3171 of SEQ ID NO: 1884229
uguagcgugcuguucuauu

SEQ ID NO: 2249997 - RNA, 19 nt, Artificial Sequence
  Description of Artificial Sequence: Synthetic oligonucleotide
  Antisense strand to SEQ ID NO: 2249996
aauagaacagcacgcuaca

SEQ ID NO: 2249998 - RNA, 19 nt, Artificial Sequence
  Description of Artificial Sequence: Synthetic oligonucleotide
  Sense strand starting at position 3279 of SEQ ID NO: 1884229
cagagugauucucuuagaa

SEQ ID NO: 2249999 - RNA, 19 nt, Artificial Sequence
  Description of Artificial Sequence: Synthetic oligonucleotide
  Antisense strand to SEQ ID NO: 2249998
uucuaagagaaucacucug

SEQ ID NO: 2250000 - RNA, 19 nt, Artificial Sequence
  Description of Artificial Sequence: Synthetic oligonucleotide
  Sense strand starting at position 3480 of SEQ ID NO: 1884229
cugcccucugccuagaagu

SEQ ID NO: 2250001 - RNA, 19 nt, Artificial Sequence
  Description of Artificial Sequence: Synthetic oligonucleotide
  Antisense strand to SEQ ID NO: 2250000
acuucuaggcagagggcag

SEQ ID NO: 2250002 - RNA, 19 nt, Artificial Sequence
  Description of Artificial Sequence: Synthetic oligonucleotide
  Sense strand starting at position 3540 of SEQ ID NO: 1884229
ucccucgaugcucaucaaa

SEQ ID NO: 2250003 - RNA, 19 nt, Artificial Sequence
  Description of Artificial Sequence: Synthetic oligonucleotide
  Antisense strand to SEQ ID NO: 2250002
uuugaugagcaucgaggga

SEQ ID NO: 2250004 - RNA, 19 nt, Artificial Sequence
  Description of Artificial Sequence: Synthetic oligonucleotide
  Sense strand starting at position 3571 of SEQ ID NO: 1884229
guacaauuauuguccucau

SEQ ID NO: 2250005 - RNA, 19 nt, Artificial Sequence
  Description of Artificial Sequence: Synthetic oligonucleotide
  Antisense strand to SEQ ID NO: 2250004
augaggacaauaauuguac

SEQ ID NO: 2250006 - RNA, 19 nt, Artificial Sequence
  Description of Artificial Sequence: Synthetic oligonucleotide
  Sense strand starting at position 3886 of SEQ ID NO: 1884229
gaguuccuugagugcggaa

SEQ ID NO: 2250007 - RNA, 19 nt, Artificial Sequence
  Description of Artificial Sequence: Synthetic oligonucleotide
  Antisense strand to SEQ ID NO: 2250006
uuccgcacucaaggaacuc

SEQ ID NO: 2250008 - RNA, 19 nt, Artificial Sequence
  Description of Artificial Sequence: Synthetic oligonucleotide
  Sense strand starting at position 3932 of SEQ ID NO: 1884229
ugagguaaaugcucaauaa

SEQ ID NO: 2250009 - RNA, 19 nt, Artificial Sequence
  Description of Artificial Sequence: Synthetic oligonucleotide
  Antisense strand to SEQ ID NO: 2250008
uuauugagcauuuaccuca

SEQ ID NO: 2250010 - RNA, 19 nt, Artificial Sequence
  Description of Artificial Sequence: Synthetic oligonucleotide
  Sense strand starting at position 3953 of SEQ ID NO: 1884229
guuuguugauaaucugaga

SEQ ID NO: 2250011 - RNA, 19 nt, Artificial Sequence
  Description of Artificial Sequence: Synthetic oligonucleotide
  Antisense strand to SEQ ID NO: 2250010
ucucagauuaucaacaaac

SEQ ID NO: 2250012 - RNA, 19 nt, Artificial Sequence
  Description of Artificial Sequence: Synthetic oligonucleotide
  Sense strand starting at position 3956 of SEQ ID NO: 1884229
uguugauaaucugagaagg

SEQ ID NO: 2250013 - RNA, 19 nt, Artificial Sequence
  Description of Artificial Sequence: Synthetic oligonucleotide
  Antisense strand to SEQ ID NO: 2250012
ccuucucagauuaucaaca

SEQ ID NO: 2250014 - RNA, 19 nt, Artificial Sequence
  Description of Artificial Sequence: Synthetic oligonucleotide
  Sense strand starting at position 3958 of SEQ ID NO: 1884229
uugauaaucugagaaggaa

SEQ ID NO: 2250015 - RNA, 19 nt, Artificial Sequence
  Description of Artificial Sequence: Synthetic oligonucleotide
  Antisense strand to SEQ ID NO: 2250014
uuccuucucagauuaucaa

SEQ ID NO: 2250016 - RNA, 19 nt, Artificial Sequence
  Description of Artificial Sequence: Synthetic oligonucleotide
  Sense strand starting at position 57 of SEQ ID NO: 1884230
agcggaggccuguggauua

SEQ ID NO: 2250017 - RNA, 19 nt, Artificial Sequence
  Description of Artificial Sequence: Synthetic oligonucleotide
  Antisense strand to SEQ ID NO: 2250016
uaauccacaggccuccgcu

SEQ ID NO: 2250018 - RNA, 19 nt, Artificial Sequence
  Description of Artificial Sequence: Synthetic oligonucleotide
  Sense strand starting at position 273 of SEQ ID NO: 1884230
cagagugacucugaagaaa

SEQ ID NO: 2250019 - RNA, 19 nt, Artificial Sequence
  Description of Artificial Sequence: Synthetic oligonucleotide
  Antisense strand to SEQ ID NO: 2250018
uuucuucagagucacucug

SEQ ID NO: 2250020 - RNA, 19 nt, Artificial Sequence
  Description of Artificial Sequence: Synthetic oligonucleotide
  Sense strand starting at position 429 of SEQ ID NO: 1884230
cucuuagugucucuuauaa

SEQ ID NO: 2250021 - RNA, 19 nt, Artificial Sequence
  Description of Artificial Sequence: Synthetic oligonucleotide
  Antisense strand to SEQ ID NO: 2250020
uuauaagagacacuaagag

SEQ ID NO: 2250022 - RNA, 19 nt, Artificial Sequence
  Description of Artificial Sequence: Synthetic oligonucleotide
  Sense strand starting at position 844 of SEQ ID NO: 1884230
ggaccuuuguuucaggaag

SEQ ID NO: 2250023 - RNA, 19 nt, Artificial Sequence
  Description of Artificial Sequence: Synthetic oligonucleotide
  Antisense strand to SEQ ID NO: 2250022
cuuccugaaacaaaggucc

SEQ ID NO: 2250024 - RNA, 19 nt, Artificial Sequence
  Description of Artificial Sequence: Synthetic oligonucleotide
  Sense strand starting at position 855 of SEQ ID NO: 1884230
ucaggaaguccagagcuua

SEQ ID NO: 2250025 - RNA, 19 nt, Artificial Sequence
  Description of Artificial Sequence: Synthetic oligonucleotide
  Antisense strand to SEQ ID NO: 2250024
uaagcucuggacuuccuga

SEQ ID NO: 2250026 - RNA, 19 nt, Artificial Sequence
  Description of Artificial Sequence: Synthetic oligonucleotide
  Sense strand starting at position 938 of SEQ ID NO: 1884230
ggcacucccuuaguuugaa

SEQ ID NO: 2250027 - RNA, 19 nt, Artificial Sequence
  Description of Artificial Sequence: Synthetic oligonucleotide
  Antisense strand to SEQ ID NO: 2250026
uucaaacuaagggagugcc

SEQ ID NO: 2250028 - RNA, 19 nt, Artificial Sequence
  Description of Artificial Sequence: Synthetic oligonucleotide
  Sense strand starting at position 939 of SEQ ID NO: 1884230
gcacucccuuaguuugaaa

SEQ ID NO: 2250029 - RNA, 19 nt, Artificial Sequence
  Description of Artificial Sequence: Synthetic oligonucleotide
  Antisense strand to SEQ ID NO: 2250028
uuucaaacuaagggagugc

SEQ ID NO: 2250030 - RNA, 19 nt, Artificial Sequence
  Description of Artificial Sequence: Synthetic oligonucleotide
  Sense strand starting at position 1000 of SEQ ID NO: 1884230
ggugcaaacugauaaacau

SEQ ID NO: 2250031 - RNA, 19 nt, Artificial Sequence
  Description of Artificial Sequence: Synthetic oligonucleotide
  Antisense strand to SEQ ID NO: 2250030
auguuuaucaguuugcacc

SEQ ID NO: 2250032 - RNA, 19 nt, Artificial Sequence
  Description of Artificial Sequence: Synthetic oligonucleotide
  Sense strand starting at position 1045 of SEQ ID NO: 1884230
gagccuugcucccaguaga

SEQ ID NO: 2250033 - RNA, 19 nt, Artificial Sequence
  Description of Artificial Sequence: Synthetic oligonucleotide
  Antisense strand to SEQ ID NO: 2250032
ucuacugggagcaaggcuc

SEQ ID NO: 2250034 - RNA, 19 nt, Artificial Sequence
  Description of Artificial Sequence: Synthetic oligonucleotide
  Sense strand starting at position 1121 of SEQ ID NO: 1884230
aagcguaugugacaaaugu

SEQ ID NO: 2250035 - RNA, 19 nt, Artificial Sequence
  Description of Artificial Sequence: Synthetic oligonucleotide
  Antisense strand to SEQ ID NO: 2250034
acauuugucacauacgcuu

SEQ ID NO: 2250036 - RNA, 19 nt, Artificial Sequence
  Description of Artificial Sequence: Synthetic oligonucleotide
  Sense strand starting at position 1144 of SEQ ID NO: 1884230
uccuaaucuuccugagaag

SEQ ID NO: 2250037 - RNA, 19 nt, Artificial Sequence
  Description of Artificial Sequence: Synthetic oligonucleotide
  Antisense strand to SEQ ID NO: 2250036
cuucucaggaagauuagga

SEQ ID NO: 2250038 - RNA, 19 nt, Artificial Sequence
  Description of Artificial Sequence: Synthetic oligonucleotide
  Sense strand starting at position 1161 of SEQ ID NO: 1884230
agagcaguacugugucuua

SEQ ID NO: 2250039 - RNA, 19 nt, Artificial Sequence
  Description of Artificial Sequence: Synthetic oligonucleotide
  Antisense strand to SEQ ID NO: 2250038
uaagacacaguacugcucu

SEQ ID NO: 2250040 - RNA, 19 nt, Artificial Sequence
  Description of Artificial Sequence: Synthetic oligonucleotide
  Sense strand starting at position 1170 of SEQ ID NO: 1884230
cugugucuuacgggcgaaa

SEQ ID NO: 2250041 - RNA, 19 nt, Artificial Sequence
  Description of Artificial Sequence: Synthetic oligonucleotide
  Antisense strand to SEQ ID NO: 2250040
uuucgcccguaagacacag

SEQ ID NO: 2250042 - RNA, 19 nt, Artificial Sequence
  Description of Artificial Sequence: Synthetic oligonucleotide
  Sense strand starting at position 1321 of SEQ ID NO: 1884230
auggacugcuuagcugaaa

SEQ ID NO: 2250043 - RNA, 19 nt, Artificial Sequence
  Description of Artificial Sequence: Synthetic oligonucleotide
  Antisense strand to SEQ ID NO: 2250042
uuucagcuaagcaguccau

SEQ ID NO: 2250044 - RNA, 19 nt, Artificial Sequence
  Description of Artificial Sequence: Synthetic oligonucleotide
  Sense strand starting at position 1322 of SEQ ID NO: 1884230
uggacugcuuagcugaaau

SEQ ID NO: 2250045 - RNA, 19 nt, Artificial Sequence
  Description of Artificial Sequence: Synthetic oligonucleotide
  Antisense strand to SEQ ID NO: 2250044
auuucagcuaagcagucca

SEQ ID NO: 2250046 - RNA, 19 nt, Artificial Sequence
  Description of Artificial Sequence: Synthetic oligonucleotide
  Sense strand starting at position 1340 of SEQ ID NO: 1884230
uauagaggcguccaugaca

SEQ ID NO: 2250047 - RNA, 19 nt, Artificial Sequence
  Description of Artificial Sequence: Synthetic oligonucleotide
  Antisense strand to SEQ ID NO: 2250046
ugucauggacgccucuaua

SEQ ID NO: 2250048 - RNA, 19 nt, Artificial Sequence
  Description of Artificial Sequence: Synthetic oligonucleotide
  Sense strand starting at position 1363 of SEQ ID NO: 1884230
cccggagggcuuuguuaau

SEQ ID NO: 2250049 - RNA, 19 nt, Artificial Sequence
  Description of Artificial Sequence: Synthetic oligonucleotide
  Antisense strand to SEQ ID NO: 2250048
auuaacaaagcccuccggg

SEQ ID NO: 2250050 - RNA, 19 nt, Artificial Sequence
  Description of Artificial Sequence: Synthetic oligonucleotide
  Sense strand starting at position 1369 of SEQ ID NO: 1884230
gggcuuuguuaaucauauu

SEQ ID NO: 2250051 - RNA, 19 nt, Artificial Sequence
  Description of Artificial Sequence: Synthetic oligonucleotide
  Antisense strand to SEQ ID NO: 2250050
aauaugauuaacaaagccc

SEQ ID NO: 2250052 - RNA, 19 nt, Artificial Sequence
  Description of Artificial Sequence: Synthetic oligonucleotide
  Sense strand starting at position 1375 of SEQ ID NO: 1884230
uguuaaucauauugcagga

SEQ ID NO: 2250053 - RNA, 19 nt, Artificial Sequence
  Description of Artificial Sequence: Synthetic oligonucleotide
  Antisense strand to SEQ ID NO: 2250052
uccugcaauaugauuaaca

SEQ ID NO: 2250054 - RNA, 19 nt, Artificial Sequence
  Description of Artificial Sequence: Synthetic oligonucleotide
  Sense strand starting at position 1401 of SEQ ID NO: 1884230
cgcaguuucugguucugua

SEQ ID NO: 2250055 - RNA, 19 nt, Artificial Sequence
  Description of Artificial Sequence: Synthetic oligonucleotide
  Antisense strand to SEQ ID NO: 2250054
uacagaaccagaaacugcg

SEQ ID NO: 2250056 - RNA, 19 nt, Artificial Sequence
  Description of Artificial Sequence: Synthetic oligonucleotide
  Sense strand starting at position 1450 of SEQ ID NO: 1884230
uaacaaauucuagggugau

SEQ ID NO: 2250057 - RNA, 19 nt, Artificial Sequence
  Description of Artificial Sequence: Synthetic oligonucleotide
  Antisense strand to SEQ ID NO: 2250056
aucacccuagaauuuguua

SEQ ID NO: 2250058 - RNA, 19 nt, Artificial Sequence
  Description of Artificial Sequence: Synthetic oligonucleotide
  Sense strand starting at position 1451 of SEQ ID NO: 1884230
aacaaauucuagggugaua

SEQ ID NO: 2250059 - RNA, 19 nt, Artificial Sequence
  Description of Artificial Sequence: Synthetic oligonucleotide
  Antisense strand to SEQ ID NO: 2250058
uaucacccuagaauuuguu

SEQ ID NO: 2250060 - RNA, 19 nt, Artificial Sequence
  Description of Artificial Sequence: Synthetic oligonucleotide
  Sense strand starting at position 1453 of SEQ ID NO: 1884230
caaauucuagggugauagu

SEQ ID NO: 2250061 - RNA, 19 nt, Artificial Sequence
  Description of Artificial Sequence: Synthetic oligonucleotide
  Antisense strand to SEQ ID NO: 2250060
acuaucacccuagaauuug

SEQ ID NO: 2250062 - RNA, 19 nt, Artificial Sequence
  Description of Artificial Sequence: Synthetic oligonucleotide
  Sense strand starting at position 1683 of SEQ ID NO: 1884230
cagcgcucucgcuggauaa

SEQ ID NO: 2250063 - RNA, 19 nt, Artificial Sequence
  Description of Artificial Sequence: Synthetic oligonucleotide
  Antisense strand to SEQ ID NO: 2250062
uuauccagcgagagcgcug

SEQ ID NO: 2250064 - RNA, 19 nt, Artificial Sequence
  Description of Artificial Sequence: Synthetic oligonucleotide
  Sense strand starting at position 1762 of SEQ ID NO: 1884230
ugaguucuguugucucgau

SEQ ID NO: 2250065 - RNA, 19 nt, Artificial Sequence
  Description of Artificial Sequence: Synthetic oligonucleotide
  Antisense strand to SEQ ID NO: 2250064
aucgagacaacagaacuca

SEQ ID NO: 2250066 - RNA, 19 nt, Artificial Sequence
  Description of Artificial Sequence: Synthetic oligonucleotide
  Sense strand starting at position 1763 of SEQ ID NO: 1884230
gaguucuguugucucgauu

SEQ ID NO: 2250067 - RNA, 19 nt, Artificial Sequence
  Description of Artificial Sequence: Synthetic oligonucleotide
  Antisense strand to SEQ ID NO: 2250066
aaucgagacaacagaacuc

SEQ ID NO: 2250068 - RNA, 19 nt, Artificial Sequence
  Description of Artificial Sequence: Synthetic oligonucleotide
  Sense strand starting at position 1774 of SEQ ID NO: 1884230
ucucgauuucgccgcaguu

SEQ ID NO: 2250069 - RNA, 19 nt, Artificial Sequence
  Description of Artificial Sequence: Synthetic oligonucleotide
  Antisense strand to SEQ ID NO: 2250068
aacugcggcgaaaucgaga

SEQ ID NO: 2250070 - RNA, 19 nt, Artificial Sequence
  Description of Artificial Sequence: Synthetic oligonucleotide
  Sense strand starting at position 1811 of SEQ ID NO: 1884230
gaaccuguccucugggcaa

SEQ ID NO: 2250071 - RNA, 19 nt, Artificial Sequence
  Description of Artificial Sequence: Synthetic oligonucleotide
  Antisense strand to SEQ ID NO: 2250070
uugcccagaggacagguuc

SEQ ID NO: 2250072 - RNA, 19 nt, Artificial Sequence
  Description of Artificial Sequence: Synthetic oligonucleotide
  Sense strand starting at position 2466 of SEQ ID NO: 1884230
ggagaaagaugagagucua

SEQ ID NO: 2250073 - RNA, 19 nt, Artificial Sequence
  Description of Artificial Sequence: Synthetic oligonucleotide
  Antisense strand to SEQ ID NO: 2250072
uagacucucaucuuucucc

SEQ ID NO: 2250074 - RNA, 19 nt, Artificial Sequence
  Description of Artificial Sequence: Synthetic oligonucleotide
  Sense strand starting at position 2474 of SEQ ID NO: 1884230
augagagucuaugguuaga

SEQ ID NO: 2250075 - RNA, 19 nt, Artificial Sequence
  Description of Artificial Sequence: Synthetic oligonucleotide
  Antisense strand to SEQ ID NO: 2250074
ucuaaccauagacucucau

SEQ ID NO: 2250076 - RNA, 19 nt, Artificial Sequence
  Description of Artificial Sequence: Synthetic oligonucleotide
  Sense strand starting at position 2479 of SEQ ID NO: 1884230
agucuaugguuagagguuu

SEQ ID NO: 2250077 - RNA, 19 nt, Artificial Sequence
  Description of Artificial Sequence: Synthetic oligonucleotide
  Antisense strand to SEQ ID NO: 2250076
aaaccucuaaccauagacu

SEQ ID NO: 2250078 - RNA, 19 nt, Artificial Sequence
  Description of Artificial Sequence: Synthetic oligonucleotide
  Sense strand starting at position 2523 of SEQ ID NO: 1884230
gccguuuccuaggaaugau

SEQ ID NO: 2250079 - RNA, 19 nt, Artificial Sequence
  Description of Artificial Sequence: Synthetic oligonucleotide
  Antisense strand to SEQ ID NO: 2250078
aucauuccuaggaaacggc

SEQ ID NO: 2250080 - RNA, 19 nt, Artificial Sequence
  Description of Artificial Sequence: Synthetic oligonucleotide
  Sense strand starting at position 2526 of SEQ ID NO: 1884230
guuuccuaggaaugaucca

SEQ ID NO: 2250081 - RNA, 19 nt, Artificial Sequence
  Description of Artificial Sequence: Synthetic oligonucleotide
  Antisense strand to SEQ ID NO: 2250080
uggaucauuccuaggaaac

SEQ ID NO: 2250082 - RNA, 19 nt, Artificial Sequence
  Description of Artificial Sequence: Synthetic oligonucleotide
  Sense strand starting at position 2538 of SEQ ID NO: 1884230
ugauccauugggcauuaau

SEQ ID NO: 2250083 - RNA, 19 nt, Artificial Sequence
  Description of Artificial Sequence: Synthetic oligonucleotide
  Antisense strand to SEQ ID NO: 2250082
auuaaugcccaauggauca

SEQ ID NO: 2250084 - RNA, 19 nt, Artificial Sequence
  Description of Artificial Sequence: Synthetic oligonucleotide
  Sense strand starting at position 2547 of SEQ ID NO: 1884230
gggcauuaaucccaagugu

SEQ ID NO: 2250085 - RNA, 19 nt, Artificial Sequence
  Description of Artificial Sequence: Synthetic oligonucleotide
  Antisense strand to SEQ ID NO: 2250084
acacuugggauuaaugccc

SEQ ID NO: 2250086 - RNA, 19 nt, Artificial Sequence
  Description of Artificial Sequence: Synthetic oligonucleotide
  Sense strand starting at position 2597 of SEQ ID NO: 1884230
ccaguaguaguucgcaaac

SEQ ID NO: 2250087 - RNA, 19 nt, Artificial Sequence
  Description of Artificial Sequence: Synthetic oligonucleotide
  Antisense strand to SEQ ID NO: 2250086
guuugcgaacuacuacugg

SEQ ID NO: 2250088 - RNA, 19 nt, Artificial Sequence
  Description of Artificial Sequence: Synthetic oligonucleotide
  Sense strand starting at position 2599 of SEQ ID NO: 1884230
aguaguaguucgcaaacuc

SEQ ID NO: 2250089 - RNA, 19 nt, Artificial Sequence
  Description of Artificial Sequence: Synthetic oligonucleotide
  Antisense strand to SEQ ID NO: 2250088
gaguuugcgaacuacuacu

SEQ ID NO: 2250090 - RNA, 19 nt, Artificial Sequence
  Description of Artificial Sequence: Synthetic oligonucleotide
  Sense strand starting at position 2789 of SEQ ID NO: 1884230
ucaguuucccauuacuuga

SEQ ID NO: 2250091 - RNA, 19 nt, Artificial Sequence
  Description of Artificial Sequence: Synthetic oligonucleotide
  Antisense strand to SEQ ID NO: 2250090
ucaaguaaugggaaacuga

SEQ ID NO: 2250092 - RNA, 19 nt, Artificial Sequence
  Description of Artificial Sequence: Synthetic oligonucleotide
  Sense strand starting at position 3013 of SEQ ID NO: 1884230
guggcaagucgaaagcguu

SEQ ID NO: 2250093 - RNA, 19 nt, Artificial Sequence
  Description of Artificial Sequence: Synthetic oligonucleotide
  Antisense strand to SEQ ID NO: 2250092
aacgcuuucgacuugccac

SEQ ID NO: 2250094 - RNA, 19 nt, Artificial Sequence
  Description of Artificial Sequence: Synthetic oligonucleotide
  Sense strand starting at position 3229 of SEQ ID NO: 1884230
ccgugacuccagugcaagu

SEQ ID NO: 2250095 - RNA, 19 nt, Artificial Sequence
  Description of Artificial Sequence: Synthetic oligonucleotide
  Antisense strand to SEQ ID NO: 2250094
acuugcacuggagucacgg

SEQ ID NO: 2250096 - RNA, 19 nt, Artificial Sequence
  Description of Artificial Sequence: Synthetic oligonucleotide
  Sense strand starting at position 606 of SEQ ID NO: 1884231
gguuguuaugaggaucaac

SEQ ID NO: 2250097 - RNA, 19 nt, Artificial Sequence
  Description of Artificial Sequence: Synthetic oligonucleotide
  Antisense strand to SEQ ID NO: 2250096
guugauccucauaacaacc

SEQ ID NO: 2250098 - RNA, 19 nt, Artificial Sequence
  Description of Artificial Sequence: Synthetic oligonucleotide
  Sense strand starting at position 616 of SEQ ID NO: 1884231
aggaucaacugucauaaua

SEQ ID NO: 2250099 - RNA, 19 nt, Artificial Sequence
  Description of Artificial Sequence: Synthetic oligonucleotide
  Antisense strand to SEQ ID NO: 2250098
uauuaugacaguugauccu

SEQ ID NO: 2250100 - RNA, 19 nt, Artificial Sequence
  Description of Artificial Sequence: Synthetic oligonucleotide
  Sense strand starting at position 666 of SEQ ID NO: 1884231
auaccaagugcucaaugaa

SEQ ID NO: 2250101 - RNA, 19 nt, Artificial Sequence
  Description of Artificial Sequence: Synthetic oligonucleotide
  Antisense strand to SEQ ID NO: 2250100
uucauugagcacuugguau

SEQ ID NO: 2250102 - RNA, 19 nt, Artificial Sequence
  Description of Artificial Sequence: Synthetic oligonucleotide
  Sense strand starting at position 669 of SEQ ID NO: 1884231
ccaagugcucaaugaaugu

SEQ ID NO: 2250103 - RNA, 19 nt, Artificial Sequence
  Description of Artificial Sequence: Synthetic oligonucleotide
  Antisense strand to SEQ ID NO: 2250102
acauucauugagcacuugg

SEQ ID NO: 2250104 - RNA, 19 nt, Artificial Sequence
  Description of Artificial Sequence: Synthetic oligonucleotide
  Sense strand starting at position 755 of SEQ ID NO: 1884231
ggagguugaugaagagagu

SEQ ID NO: 2250105 - RNA, 19 nt, Artificial Sequence
  Description of Artificial Sequence: Synthetic oligonucleotide
  Antisense strand to SEQ ID NO: 2250104
acucucuucaucaaccucc

SEQ ID NO: 2250106 - RNA, 19 nt, Artificial Sequence
  Description of Artificial Sequence: Synthetic oligonucleotide
  Sense strand starting at position 1587 of SEQ ID NO: 1884231
gugagcuguauuugcuagu

SEQ ID NO: 2250107 - RNA, 19 nt, Artificial Sequence
  Description of Artificial Sequence: Synthetic oligonucleotide
  Antisense strand to SEQ ID NO: 2250106
acuagcaaauacagcucac

SEQ ID NO: 2250108 - RNA, 19 nt, Artificial Sequence
  Description of Artificial Sequence: Synthetic oligonucleotide
  Sense strand starting at position 1593 of SEQ ID NO: 1884231
uguauuugcuagucugcca

SEQ ID NO: 2250109 - RNA, 19 nt, Artificial Sequence
  Description of Artificial Sequence: Synthetic oligonucleotide
  Antisense strand to SEQ ID NO: 2250108
uggcagacuagcaaauaca

SEQ ID NO: 2250110 - RNA, 19 nt, Artificial Sequence
  Description of Artificial Sequence: Synthetic oligonucleotide
  Sense strand starting at position 2132 of SEQ ID NO: 1884231
aggguuaagcaaggguuau

SEQ ID NO: 2250111 - RNA, 19 nt, Artificial Sequence
  Description of Artificial Sequence: Synthetic oligonucleotide
  Antisense strand to SEQ ID NO: 2250110
auaacccuugcuuaacccu

SEQ ID NO: 2250112 - RNA, 19 nt, Artificial Sequence
  Description of Artificial Sequence: Synthetic oligonucleotide
  Sense strand starting at position 2133 of SEQ ID NO: 1884231
ggguuaagcaaggguuaug

SEQ ID NO: 2250113 - RNA, 19 nt, Artificial Sequence
  Description of Artificial Sequence: Synthetic oligonucleotide
  Antisense strand to SEQ ID NO: 2250112
cauaacccuugcuuaaccc

SEQ ID NO: 2250114 - RNA, 19 nt, Artificial Sequence
  Description of Artificial Sequence: Synthetic oligonucleotide
  Sense strand starting at position 2143 of SEQ ID NO: 1884231
aggguuaugguuugagaau

SEQ ID NO: 2250115 - RNA, 19 nt, Artificial Sequence
  Description of Artificial Sequence: Synthetic oligonucleotide
  Antisense strand to SEQ ID NO: 2250114
auucucaaaccauaacccu

SEQ ID NO: 2250116 - RNA, 19 nt, Artificial Sequence
  Description of Artificial Sequence: Synthetic oligonucleotide
  Sense strand starting at position 2486 of SEQ ID NO: 1884231
gucccacugcucuagaaug

SEQ ID NO: 2250117 - RNA, 19 nt, Artificial Sequence
  Description of Artificial Sequence: Synthetic oligonucleotide
  Antisense strand to SEQ ID NO: 2250116
cauucuagagcagugggac

SEQ ID NO: 2250118 - RNA, 19 nt, Artificial Sequence
  Description of Artificial Sequence: Synthetic oligonucleotide
  Sense strand starting at position 2544 of SEQ ID NO: 1884231
auguauuagucccuccaug

SEQ ID NO: 2250119 - RNA, 19 nt, Artificial Sequence
  Description of Artificial Sequence: Synthetic oligonucleotide
  Antisense strand to SEQ ID NO: 2250118
cauggagggacuaauacau

SEQ ID NO: 2250120 - RNA, 19 nt, Artificial Sequence
  Description of Artificial Sequence: Synthetic oligonucleotide
  Sense strand starting at position 2568 of SEQ ID NO: 1884231
gggacuaggugcuuuauca

SEQ ID NO: 2250121 - RNA, 19 nt, Artificial Sequence
  Description of Artificial Sequence: Synthetic oligonucleotide
  Antisense strand to SEQ ID NO: 2250120
ugauaaagcaccuaguccc

SEQ ID NO: 2250122 - RNA, 19 nt, Artificial Sequence
  Description of Artificial Sequence: Synthetic oligonucleotide
  Sense strand starting at position 2576 of SEQ ID NO: 1884231
gugcuuuaucacuagcaga

SEQ ID NO: 2250123 - RNA, 19 nt, Artificial Sequence
  Description of Artificial Sequence: Synthetic oligonucleotide
  Antisense strand to SEQ ID NO: 2250122
ucugcuagugauaaagcac

SEQ ID NO: 2250124 - RNA, 19 nt, Artificial Sequence
  Description of Artificial Sequence: Synthetic oligonucleotide
  Sense strand starting at position 2689 of SEQ ID NO: 1884231
gaaccagaauuugggagau

SEQ ID NO: 2250125 - RNA, 19 nt, Artificial Sequence
  Description of Artificial Sequence: Synthetic oligonucleotide
  Antisense strand to SEQ ID NO: 2250124
aucucccaaauucugguuc

SEQ ID NO: 2250126 - RNA, 19 nt, Artificial Sequence
  Description of Artificial Sequence: Synthetic oligonucleotide
  Sense strand starting at position 2730 of SEQ ID NO: 1884231
ugaugcuuucugcaagcaa

SEQ ID NO: 2250127 - RNA, 19 nt, Artificial Sequence
  Description of Artificial Sequence: Synthetic oligonucleotide
  Antisense strand to SEQ ID NO: 2250126
uugcuugcagaaagcauca

SEQ ID NO: 2250128 - RNA, 19 nt, Artificial Sequence
  Description of Artificial Sequence: Synthetic oligonucleotide
  Sense strand starting at position 2868 of SEQ ID NO: 1884231
cugugugagucacccuaga

SEQ ID NO: 2250129 - RNA, 19 nt, Artificial Sequence
  Description of Artificial Sequence: Synthetic oligonucleotide
  Antisense strand to SEQ ID NO: 2250128
ucuagggugacucacacag

SEQ ID NO: 2250130 - RNA, 19 nt, Artificial Sequence
  Description of Artificial Sequence: Synthetic oligonucleotide
  Sense strand starting at position 2986 of SEQ ID NO: 1884231
gggagacacagauguguuu

SEQ ID NO: 2250131 - RNA, 19 nt, Artificial Sequence
  Description of Artificial Sequence: Synthetic oligonucleotide
  Antisense strand to SEQ ID NO: 2250130
aaacacaucugugucuccc

SEQ ID NO: 2250132 - RNA, 19 nt, Artificial Sequence
  Description of Artificial Sequence: Synthetic oligonucleotide
  Sense strand starting at position 2992 of SEQ ID NO: 1884231
cacagauguguuuaugggu

SEQ ID NO: 2250133 - RNA, 19 nt, Artificial Sequence
  Description of Artificial Sequence: Synthetic oligonucleotide
  Antisense strand to SEQ ID NO: 2250132
acccauaaacacaucugug

SEQ ID NO: 2250134 - RNA, 19 nt, Artificial Sequence
  Description of Artificial Sequence: Synthetic oligonucleotide
  Sense strand starting at position 2999 of SEQ ID NO: 1884231
guguuuauggguuggguga

SEQ ID NO: 2250135 - RNA, 19 nt, Artificial Sequence
  Description of Artificial Sequence: Synthetic oligonucleotide
  Antisense strand to SEQ ID NO: 2250134
ucacccaacccauaaacac

SEQ ID NO: 2250136 - RNA, 19 nt, Artificial Sequence
  Description of Artificial Sequence: Synthetic oligonucleotide
  Sense strand starting at position 3000 of SEQ ID NO: 1884231
uguuuauggguugggugaa

SEQ ID NO: 2250137 - RNA, 19 nt, Artificial Sequence
  Description of Artificial Sequence: Synthetic oligonucleotide
  Antisense strand to SEQ ID NO: 2250136
uucacccaacccauaaaca

SEQ ID NO: 2250138 - RNA, 19 nt, Artificial Sequence
  Description of Artificial Sequence: Synthetic oligonucleotide
  Sense strand starting at position 3277 of SEQ ID NO: 1884231
guaauaguccuuugcauua

SEQ ID NO: 2250139 - RNA, 19 nt, Artificial Sequence
  Description of Artificial Sequence: Synthetic oligonucleotide
  Antisense strand to SEQ ID NO: 2250138
uaaugcaaaggacuauuac

SEQ ID NO: 2250140 - RNA, 19 nt, Artificial Sequence
  Description of Artificial Sequence: Synthetic oligonucleotide
  Sense strand starting at position 3282 of SEQ ID NO: 1884231
aguccuuugcauuagacau

SEQ ID NO: 2250141 - RNA, 19 nt, Artificial Sequence
  Description of Artificial Sequence: Synthetic oligonucleotide
  Antisense strand to SEQ ID NO: 2250140
augucuaaugcaaaggacu

SEQ ID NO: 2250142 - RNA, 19 nt, Artificial Sequence
  Description of Artificial Sequence: Synthetic oligonucleotide
  Sense strand starting at position 3320 of SEQ ID NO: 1884231
gucugaggaaacuagcauu

SEQ ID NO: 2250143 - RNA, 19 nt, Artificial Sequence
  Description of Artificial Sequence: Synthetic oligonucleotide
  Antisense strand to SEQ ID NO: 2250142
aaugcuaguuuccucagac

SEQ ID NO: 2250144 - RNA, 19 nt, Artificial Sequence
  Description of Artificial Sequence: Synthetic oligonucleotide
  Sense strand starting at position 3331 of SEQ ID NO: 1884231
cuagcauucgaauagguua

SEQ ID NO: 2250145 - RNA, 19 nt, Artificial Sequence
  Description of Artificial Sequence: Synthetic oligonucleotide
  Antisense strand to SEQ ID NO: 2250144
uaaccuauucgaaugcuag

SEQ ID NO: 2250146 - RNA, 19 nt, Artificial Sequence
  Description of Artificial Sequence: Synthetic oligonucleotide
  Sense strand starting at position 3334 of SEQ ID NO: 1884231
gcauucgaauagguuauga

SEQ ID NO: 2250147 - RNA, 19 nt, Artificial Sequence
  Description of Artificial Sequence: Synthetic oligonucleotide
  Antisense strand to SEQ ID NO: 2250146
ucauaaccuauucgaaugc

SEQ ID NO: 2250148 - RNA, 19 nt, Artificial Sequence
  Description of Artificial Sequence: Synthetic oligonucleotide
  Sense strand starting at position 3336 of SEQ ID NO: 1884231
auucgaauagguuaugacu

SEQ ID NO: 2250149 - RNA, 19 nt, Artificial Sequence
  Description of Artificial Sequence: Synthetic oligonucleotide
  Antisense strand to SEQ ID NO: 2250148
agucauaaccuauucgaau

SEQ ID NO: 2250150 - RNA, 19 nt, Artificial Sequence
  Description of Artificial Sequence: Synthetic oligonucleotide
  Sense strand starting at position 3401 of SEQ ID NO: 1884231
caggacucuccuggugaca

SEQ ID NO: 2250151 - RNA, 19 nt, Artificial Sequence
  Description of Artificial Sequence: Synthetic oligonucleotide
  Antisense strand to SEQ ID NO: 2250150
ugucaccaggagaguccug

SEQ ID NO: 2250152 - RNA, 19 nt, Artificial Sequence
  Description of Artificial Sequence: Synthetic oligonucleotide
  Sense strand starting at position 3432 of SEQ ID NO: 1884231
aucucaaucuggcuuaaga

SEQ ID NO: 2250153 - RNA, 19 nt, Artificial Sequence
  Description of Artificial Sequence: Synthetic oligonucleotide
  Antisense strand to SEQ ID NO: 2250152
ucuuaagccagauugagau

SEQ ID NO: 2250154 - RNA, 19 nt, Artificial Sequence
  Description of Artificial Sequence: Synthetic oligonucleotide
  Sense strand starting at position 3523 of SEQ ID NO: 1884231
ggaccaaaucugugucucu

SEQ ID NO: 2250155 - RNA, 19 nt, Artificial Sequence
  Description of Artificial Sequence: Synthetic oligonucleotide
  Antisense strand to SEQ ID NO: 2250154
agagacacagauuuggucc

SEQ ID NO: 2250156 - RNA, 19 nt, Artificial Sequence
  Description of Artificial Sequence: Synthetic oligonucleotide
  Sense strand starting at position 3526 of SEQ ID NO: 1884231
ccaaaucugugucucuuaa

SEQ ID NO: 2250157 - RNA, 19 nt, Artificial Sequence
  Description of Artificial Sequence: Synthetic oligonucleotide
  Antisense strand to SEQ ID NO: 2250156
uuaagagacacagauuugg

SEQ ID NO: 2250158 - RNA, 19 nt, Artificial Sequence
  Description of Artificial Sequence: Synthetic oligonucleotide
  Sense strand starting at position 3571 of SEQ ID NO: 1884231
ugacuuaauucucugauag

SEQ ID NO: 2250159 - RNA, 19 nt, Artificial Sequence
  Description of Artificial Sequence: Synthetic oligonucleotide
  Antisense strand to SEQ ID NO: 2250158
cuaucagagaauuaaguca

SEQ ID NO: 2250160 - RNA, 19 nt, Artificial Sequence
  Description of Artificial Sequence: Synthetic oligonucleotide
  Sense strand starting at position 3646 of SEQ ID NO: 1884231
uggcauuuaugaguuagca

SEQ ID NO: 2250161 - RNA, 19 nt, Artificial Sequence
  Description of Artificial Sequence: Synthetic oligonucleotide
  Antisense strand to SEQ ID NO: 2250160
ugcuaacucauaaaugcca

SEQ ID NO: 2250162 - RNA, 19 nt, Artificial Sequence
  Description of Artificial Sequence: Synthetic oligonucleotide
  Sense strand starting at position 3648 of SEQ ID NO: 1884231
gcauuuaugaguuagcagc

SEQ ID NO: 2250163 - RNA, 19 nt, Artificial Sequence
  Description of Artificial Sequence: Synthetic oligonucleotide
  Antisense strand to SEQ ID NO: 2250162
gcugcuaacucauaaaugc

SEQ ID NO: 2250164 - RNA, 19 nt, Artificial Sequence
  Description of Artificial Sequence: Synthetic oligonucleotide
  Sense strand starting at position 3655 of SEQ ID NO: 1884231
ugaguuagcagcuguagag

SEQ ID NO: 2250165 - RNA, 19 nt, Artificial Sequence
  Description of Artificial Sequence: Synthetic oligonucleotide
  Antisense strand to SEQ ID NO: 2250164
cucuacagcugcuaacuca

SEQ ID NO: 2250166 - RNA, 19 nt, Artificial Sequence
  Description of Artificial Sequence: Synthetic oligonucleotide
  Sense strand starting at position 3681 of SEQ ID NO: 1884231
acaucucuuccugguaguu

SEQ ID NO: 2250167 - RNA, 19 nt, Artificial Sequence
  Description of Artificial Sequence: Synthetic oligonucleotide
  Antisense strand to SEQ ID NO: 2250166
aacuaccaggaagagaugu

SEQ ID NO: 2250168 - RNA, 19 nt, Artificial Sequence
  Description of Artificial Sequence: Synthetic oligonucleotide
  Sense strand starting at position 3729 of SEQ ID NO: 1884231
ggaccaauguggguugcau

SEQ ID NO: 2250169 - RNA, 19 nt, Artificial Sequence
  Description of Artificial Sequence: Synthetic oligonucleotide
  Antisense strand to SEQ ID NO: 2250168
augcaacccacauuggucc

SEQ ID NO: 2250170 - RNA, 19 nt, Artificial Sequence
  Description of Artificial Sequence: Synthetic oligonucleotide
  Sense strand starting at position 3930 of SEQ ID NO: 1884231
ggcagcaucuuggcucuaa

SEQ ID NO: 2250171 - RNA, 19 nt, Artificial Sequence
  Description of Artificial Sequence: Synthetic oligonucleotide
  Antisense strand to SEQ ID NO: 2250170
uuagagccaagaugcugcc

SEQ ID NO: 2250172 - RNA, 19 nt, Artificial Sequence
  Description of Artificial Sequence: Synthetic oligonucleotide
  Sense strand starting at position 3931 of SEQ ID NO: 1884231
gcagcaucuuggcucuaaa

SEQ ID NO: 2250173 - RNA, 19 nt, Artificial Sequence
  Description of Artificial Sequence: Synthetic oligonucleotide
  Antisense strand to SEQ ID NO: 2250172
uuuagagccaagaugcugc

SEQ ID NO: 2250174 - RNA, 19 nt, Artificial Sequence
  Description of Artificial Sequence: Synthetic oligonucleotide
  Sense strand starting at position 3934 of SEQ ID NO: 1884231
gcaucuuggcucuaaagag

SEQ ID NO: 2250175 - RNA, 19 nt, Artificial Sequence
  Description of Artificial Sequence: Synthetic oligonucleotide
  Antisense strand to SEQ ID NO: 2250174
cucuuuagagccaagaugc

SEQ ID NO: 2250176 - RNA, 19 nt, Artificial Sequence
  Description of Artificial Sequence: Synthetic oligonucleotide
  Sense strand starting at position 5 of SEQ ID NO: 1884232
cauuauugauccucaggga

SEQ ID NO: 2250177 - RNA, 19 nt, Artificial Sequence
  Description of Artificial Sequence: Synthetic oligonucleotide
  Antisense strand to SEQ ID NO: 2250176
ucccugaggaucaauaaug

SEQ ID NO: 2250178 - RNA, 19 nt, Artificial Sequence
  Description of Artificial Sequence: Synthetic oligonucleotide
  Sense strand starting at position 21 of SEQ ID NO: 1884232
ggacacaauggauguucua

SEQ ID NO: 2250179 - RNA, 19 nt, Artificial Sequence
  Description of Artificial Sequence: Synthetic oligonucleotide
  Antisense strand to SEQ ID NO: 2250178
uagaacauccauugugucc

SEQ ID NO: 2250180 - RNA, 19 nt, Artificial Sequence
  Description of Artificial Sequence: Synthetic oligonucleotide
  Sense strand starting at position 28 of SEQ ID NO: 1884232
auggauguucuacagaguu

SEQ ID NO: 2250181 - RNA, 19 nt, Artificial Sequence
  Description of Artificial Sequence: Synthetic oligonucleotide
  Antisense strand to SEQ ID NO: 2250180
aacucuguagaacauccau

SEQ ID NO: 2250182 - RNA, 19 nt, Artificial Sequence
  Description of Artificial Sequence: Synthetic oligonucleotide
  Sense strand starting at position 106 of SEQ ID NO: 1884232
ggguaaauauguuuauacu

SEQ ID NO: 2250183 - RNA, 19 nt, Artificial Sequence
  Description of Artificial Sequence: Synthetic oligonucleotide
  Antisense strand to SEQ ID NO: 2250182
aguauaaacauauuuaccc

SEQ ID NO: 2250184 - RNA, 19 nt, Artificial Sequence
  Description of Artificial Sequence: Synthetic oligonucleotide
  Sense strand starting at position 107 of SEQ ID NO: 1884232
gguaaauauguuuauacug

SEQ ID NO: 2250185 - RNA, 19 nt, Artificial Sequence
  Description of Artificial Sequence: Synthetic oligonucleotide
  Antisense strand to SEQ ID NO: 2250184
caguauaaacauauuuacc

SEQ ID NO: 2250186 - RNA, 19 nt, Artificial Sequence
  Description of Artificial Sequence: Synthetic oligonucleotide
  Sense strand starting at position 158 of SEQ ID NO: 1884232
agcauuacagucugaauau

SEQ ID NO: 2250187 - RNA, 19 nt, Artificial Sequence
  Description of Artificial Sequence: Synthetic oligonucleotide
  Antisense strand to SEQ ID NO: 2250186
auauucagacuguaaugcu

SEQ ID NO: 2250188 - RNA, 19 nt, Artificial Sequence
  Description of Artificial Sequence: Synthetic oligonucleotide
  Sense strand starting at position 195 of SEQ ID NO: 1884232
gggagagaucuuuguucca

SEQ ID NO: 2250189 - RNA, 19 nt, Artificial Sequence
  Description of Artificial Sequence: Synthetic oligonucleotide
  Antisense strand to SEQ ID NO: 2250188
uggaacaaagaucucuccc

SEQ ID NO: 2250190 - RNA, 19 nt, Artificial Sequence
  Description of Artificial Sequence: Synthetic oligonucleotide
  Sense strand starting at position 197 of SEQ ID NO: 1884232
gagagaucuuuguuccaaa

SEQ ID NO: 2250191 - RNA, 19 nt, Artificial Sequence
  Description of Artificial Sequence: Synthetic oligonucleotide
  Antisense strand to SEQ ID NO: 2250190
uuuggaacaaagaucucuc

SEQ ID NO: 2250192 - RNA, 19 nt, Artificial Sequence
  Description of Artificial Sequence: Synthetic oligonucleotide
  Sense strand starting at position 327 of SEQ ID NO: 1884232
aaauguaacugguuguaca

SEQ ID NO: 2250193 - RNA, 19 nt, Artificial Sequence
  Description of Artificial Sequence: Synthetic oligonucleotide
  Antisense strand to SEQ ID NO: 2250192
uguacaaccaguuacauuu

SEQ ID NO: 2250194 - RNA, 19 nt, Artificial Sequence
  Description of Artificial Sequence: Synthetic oligonucleotide
  Sense strand starting at position 453 of SEQ ID NO: 1884232
ucuauauuccugugaauag

SEQ ID NO: 2250195 - RNA, 19 nt, Artificial Sequence
  Description of Artificial Sequence: Synthetic oligonucleotide
  Antisense strand to SEQ ID NO: 2250194
cuauucacaggaauauaga

SEQ ID NO: 2250196 - RNA, 19 nt, Artificial Sequence
  Description of Artificial Sequence: Synthetic oligonucleotide
  Sense strand starting at position 457 of SEQ ID NO: 1884232
uauuccugugaauagugua

SEQ ID NO: 2250197 - RNA, 19 nt, Artificial Sequence
  Description of Artificial Sequence: Synthetic oligonucleotide
  Antisense strand to SEQ ID NO: 2250196
uacacuauucacaggaaua

SEQ ID NO: 2250198 - RNA, 19 nt, Artificial Sequence
  Description of Artificial Sequence: Synthetic oligonucleotide
  Sense strand starting at position 1406 of SEQ ID NO: 1884232
gcacauccugcacaaguaa

SEQ ID NO: 2250199 - RNA, 19 nt, Artificial Sequence
  Description of Artificial Sequence: Synthetic oligonucleotide
  Antisense strand to SEQ ID NO: 2250198
uuacuugugcaggaugugc

SEQ ID NO: 2250200 - RNA, 19 nt, Artificial Sequence
  Description of Artificial Sequence: Synthetic oligonucleotide
  Sense strand starting at position 1526 of SEQ ID NO: 1884232
uugaguuggguugauacuu

SEQ ID NO: 2250201 - RNA, 19 nt, Artificial Sequence
  Description of Artificial Sequence: Synthetic oligonucleotide
  Antisense strand to SEQ ID NO: 2250200
aaguaucaacccaacucaa

SEQ ID NO: 2250202 - RNA, 19 nt, Artificial Sequence
  Description of Artificial Sequence: Synthetic oligonucleotide
  Sense strand starting at position 1612 of SEQ ID NO: 1884232
uaagucuacuggguccaaa

SEQ ID NO: 2250203 - RNA, 19 nt, Artificial Sequence
  Description of Artificial Sequence: Synthetic oligonucleotide
  Antisense strand to SEQ ID NO: 2250202
uuuggacccaguagacuua

SEQ ID NO: 2250204 - RNA, 19 nt, Artificial Sequence
  Description of Artificial Sequence: Synthetic oligonucleotide
  Sense strand starting at position 1615 of SEQ ID NO: 1884232
gucuacuggguccaaauua

SEQ ID NO: 2250205 - RNA, 19 nt, Artificial Sequence
  Description of Artificial Sequence: Synthetic oligonucleotide
  Antisense strand to SEQ ID NO: 2250204
uaauuuggacccaguagac

SEQ ID NO: 2250206 - RNA, 19 nt, Artificial Sequence
  Description of Artificial Sequence: Synthetic oligonucleotide
  Sense strand starting at position 1631 of SEQ ID NO: 1884232
uuaacuuaggugcaauaua

SEQ ID NO: 2250207 - RNA, 19 nt, Artificial Sequence
  Description of Artificial Sequence: Synthetic oligonucleotide
  Antisense strand to SEQ ID NO: 2250206
uauauugcaccuaaguuaa

SEQ ID NO: 2250208 - RNA, 19 nt, Artificial Sequence
  Description of Artificial Sequence: Synthetic oligonucleotide
  Sense strand starting at position 1641 of SEQ ID NO: 1884232
ugcaauauaugucuagaau

SEQ ID NO: 2250209 - RNA, 19 nt, Artificial Sequence
  Description of Artificial Sequence: Synthetic oligonucleotide
  Antisense strand to SEQ ID NO: 2250208
auucuagacauauauugca

SEQ ID NO: 2250210 - RNA, 19 nt, Artificial Sequence
  Description of Artificial Sequence: Synthetic oligonucleotide
  Sense strand starting at position 1642 of SEQ ID NO: 1884232
gcaauauaugucuagaauc

SEQ ID NO: 2250211 - RNA, 19 nt, Artificial Sequence
  Description of Artificial Sequence: Synthetic oligonucleotide
  Antisense strand to SEQ ID NO: 2250210
gauucuagacauauauugc

SEQ ID NO: 2250212 - RNA, 19 nt, Artificial Sequence
  Description of Artificial Sequence: Synthetic oligonucleotide
  Sense strand starting at position 1652 of SEQ ID NO: 1884232
ucuagaauccuaugggauu

SEQ ID NO: 2250213 - RNA, 19 nt, Artificial Sequence
  Description of Artificial Sequence: Synthetic oligonucleotide
  Antisense strand to SEQ ID NO: 2250212
aaucccauaggauucuaga

SEQ ID NO: 2250214 - RNA, 19 nt, Artificial Sequence
  Description of Artificial Sequence: Synthetic oligonucleotide
  Sense strand starting at position 2006 of SEQ ID NO: 1884232
uugagaaugucauuucguc

SEQ ID NO: 2250215 - RNA, 19 nt, Artificial Sequence
  Description of Artificial Sequence: Synthetic oligonucleotide
  Antisense strand to SEQ ID NO: 2250214
gacgaaaugacauucucaa

SEQ ID NO: 2250216 - RNA, 19 nt, Artificial Sequence
  Description of Artificial Sequence: Synthetic oligonucleotide
  Sense strand starting at position 2025 of SEQ ID NO: 1884232
acagaugacacuuggugau

SEQ ID NO: 2250217 - RNA, 19 nt, Artificial Sequence
  Description of Artificial Sequence: Synthetic oligonucleotide
  Antisense strand to SEQ ID NO: 2250216
aucaccaagugucaucugu

SEQ ID NO: 2250218 - RNA, 19 nt, Artificial Sequence
  Description of Artificial Sequence: Synthetic oligonucleotide
  Sense strand starting at position 2072 of SEQ ID NO: 1884232
gccuaugaacacugaaagu

SEQ ID NO: 2250219 - RNA, 19 nt, Artificial Sequence
  Description of Artificial Sequence: Synthetic oligonucleotide
  Antisense strand to SEQ ID NO: 2250218
acuuucaguguucauaggc

SEQ ID NO: 2250220 - RNA, 19 nt, Artificial Sequence
  Description of Artificial Sequence: Synthetic oligonucleotide
  Sense strand starting at position 2140 of SEQ ID NO: 1884232
ugcagucauguuuaccaaa

SEQ ID NO: 2250221 - RNA, 19 nt, Artificial Sequence
  Description of Artificial Sequence: Synthetic oligonucleotide
  Antisense strand to SEQ ID NO: 2250220
uuugguaaacaugacugca

SEQ ID NO: 2250222 - RNA, 19 nt, Artificial Sequence
  Description of Artificial Sequence: Synthetic oligonucleotide
  Sense strand starting at position 2489 of SEQ ID NO: 1884232
ccuguaugugguuauuaga

SEQ ID NO: 2250223 - RNA, 19 nt, Artificial Sequence
  Description of Artificial Sequence: Synthetic oligonucleotide
  Antisense strand to SEQ ID NO: 2250222
ucuaauaaccacauacagg

SEQ ID NO: 2250224 - RNA, 19 nt, Artificial Sequence
  Description of Artificial Sequence: Synthetic oligonucleotide
  Sense strand starting at position 2528 of SEQ ID NO: 1884232
ugcuuacauguuuagacaa

SEQ ID NO: 2250225 - RNA, 19 nt, Artificial Sequence
  Description of Artificial Sequence: Synthetic oligonucleotide
  Antisense strand to SEQ ID NO: 2250224
uugucuaaacauguaagca

SEQ ID NO: 2250226 - RNA, 19 nt, Artificial Sequence
  Description of Artificial Sequence: Synthetic oligonucleotide
  Sense strand starting at position 2592 of SEQ ID NO: 1884232
ucauaugacugauuaaguc

SEQ ID NO: 2250227 - RNA, 19 nt, Artificial Sequence
  Description of Artificial Sequence: Synthetic oligonucleotide
  Antisense strand to SEQ ID NO: 2250226
gacuuaaucagucauauga

SEQ ID NO: 2250228 - RNA, 19 nt, Artificial Sequence
  Description of Artificial Sequence: Synthetic oligonucleotide
  Sense strand starting at position 2600 of SEQ ID NO: 1884232
cugauuaagucaucuaaga

SEQ ID NO: 2250229 - RNA, 19 nt, Artificial Sequence
  Description of Artificial Sequence: Synthetic oligonucleotide
  Antisense strand to SEQ ID NO: 2250228
ucuuagaugacuuaaucag

SEQ ID NO: 2250230 - RNA, 19 nt, Artificial Sequence
  Description of Artificial Sequence: Synthetic oligonucleotide
  Sense strand starting at position 2764 of SEQ ID NO: 1884232
ucucuuagacaucauguga

SEQ ID NO: 2250231 - RNA, 19 nt, Artificial Sequence
  Description of Artificial Sequence: Synthetic oligonucleotide
  Antisense strand to SEQ ID NO: 2250230
ucacaugaugucuaagaga

SEQ ID NO: 2250232 - RNA, 19 nt, Artificial Sequence
  Description of Artificial Sequence: Synthetic oligonucleotide
  Sense strand starting at position 3097 of SEQ ID NO: 1884232
ugggauucagugugagaua

SEQ ID NO: 2250233 - RNA, 19 nt, Artificial Sequence
  Description of Artificial Sequence: Synthetic oligonucleotide
  Antisense strand to SEQ ID NO: 2250232
uaucucacacugaauccca

SEQ ID NO: 2250234 - RNA, 19 nt, Artificial Sequence
  Description of Artificial Sequence: Synthetic oligonucleotide
  Sense strand starting at position 3141 of SEQ ID NO: 1884232
aggguaacagucuagugaa

SEQ ID NO: 2250235 - RNA, 19 nt, Artificial Sequence
  Description of Artificial Sequence: Synthetic oligonucleotide
  Antisense strand to SEQ ID NO: 2250234
uucacuagacuguuacccu

SEQ ID NO: 2250236 - RNA, 19 nt, Artificial Sequence
  Description of Artificial Sequence: Synthetic oligonucleotide
  Sense strand starting at position 3196 of SEQ ID NO: 1884232
gugauaaauguccagcaug

SEQ ID NO: 2250237 - RNA, 19 nt, Artificial Sequence
  Description of Artificial Sequence: Synthetic oligonucleotide
  Antisense strand to SEQ ID NO: 2250236
caugcuggacauuuaucac

SEQ ID NO: 2250238 - RNA, 19 nt, Artificial Sequence
  Description of Artificial Sequence: Synthetic oligonucleotide
  Sense strand starting at position 3216 of SEQ ID NO: 1884232
aguugaaacacguaagagu

SEQ ID NO: 2250239 - RNA, 19 nt, Artificial Sequence
  Description of Artificial Sequence: Synthetic oligonucleotide
  Antisense strand to SEQ ID NO: 2250238
acucuuacguguuucaacu

SEQ ID NO: 2250240 - RNA, 19 nt, Artificial Sequence
  Description of Artificial Sequence: Synthetic oligonucleotide
  Sense strand starting at position 3223 of SEQ ID NO: 1884232
acacguaagaguggaauca

SEQ ID NO: 2250241 - RNA, 19 nt, Artificial Sequence
  Description of Artificial Sequence: Synthetic oligonucleotide
  Antisense strand to SEQ ID NO: 2250240
ugauuccacucuuacgugu

SEQ ID NO: 2250242 - RNA, 19 nt, Artificial Sequence
  Description of Artificial Sequence: Synthetic oligonucleotide
  Sense strand starting at position 3246 of SEQ ID NO: 1884232
agacuugaguggucaggga

SEQ ID NO: 2250243 - RNA, 19 nt, Artificial Sequence
  Description of Artificial Sequence: Synthetic oligonucleotide
  Antisense strand to SEQ ID NO: 2250242
ucccugaccacucaagucu

SEQ ID NO: 2250244 - RNA, 19 nt, Artificial Sequence
  Description of Artificial Sequence: Synthetic oligonucleotide
  Sense strand starting at position 3517 of SEQ ID NO: 1884232
ucugauugguguucuagaa

SEQ ID NO: 2250245 - RNA, 19 nt, Artificial Sequence
  Description of Artificial Sequence: Synthetic oligonucleotide
  Antisense strand to SEQ ID NO: 2250244
uucuagaacaccaaucaga

SEQ ID NO: 2250246 - RNA, 19 nt, Artificial Sequence
  Description of Artificial Sequence: Synthetic oligonucleotide
  Sense strand starting at position 3521 of SEQ ID NO: 1884232
auugguguucuagaacauu

SEQ ID NO: 2250247 - RNA, 19 nt, Artificial Sequence
  Description of Artificial Sequence: Synthetic oligonucleotide
  Antisense strand to SEQ ID NO: 2250246
aauguucuagaacaccaau

SEQ ID NO: 2250248 - RNA, 19 nt, Artificial Sequence
  Description of Artificial Sequence: Synthetic oligonucleotide
  Sense strand starting at position 3540 of SEQ ID NO: 1884232
ggguguagaauguacugaa

SEQ ID NO: 2250249 - RNA, 19 nt, Artificial Sequence
  Description of Artificial Sequence: Synthetic oligonucleotide
  Antisense strand to SEQ ID NO: 2250248
uucaguacauucuacaccc

SEQ ID NO: 2250250 - RNA, 19 nt, Artificial Sequence
  Description of Artificial Sequence: Synthetic oligonucleotide
  Sense strand starting at position 3544 of SEQ ID NO: 1884232
guagaauguacugaaggua

SEQ ID NO: 2250251 - RNA, 19 nt, Artificial Sequence
  Description of Artificial Sequence: Synthetic oligonucleotide
  Antisense strand to SEQ ID NO: 2250250
uaccuucaguacauucuac

SEQ ID NO: 2250252 - RNA, 19 nt, Artificial Sequence
  Description of Artificial Sequence: Synthetic oligonucleotide
  Sense strand starting at position 3620 of SEQ ID NO: 1884232
gcuggugugaaugaugaau

SEQ ID NO: 2250253 - RNA, 19 nt, Artificial Sequence
  Description of Artificial Sequence: Synthetic oligonucleotide
  Antisense strand to SEQ ID NO: 2250252
auucaucauucacaccagc

SEQ ID NO: 2250254 - RNA, 19 nt, Artificial Sequence
  Description of Artificial Sequence: Synthetic oligonucleotide
  Sense strand starting at position 3667 of SEQ ID NO: 1884232
ugaggaauuugagggauau

SEQ ID NO: 2250255 - RNA, 19 nt, Artificial Sequence
  Description of Artificial Sequence: Synthetic oligonucleotide
  Antisense strand to SEQ ID NO: 2250254
auaucccucaaauuccuca

SEQ ID NO: 2250256 - RNA, 19 nt, Artificial Sequence
  Description of Artificial Sequence: Synthetic oligonucleotide
  Sense strand starting at position 8 of SEQ ID NO: 1884233
ggaauuaggcagggcagaa

SEQ ID NO: 2250257 - RNA, 19 nt, Artificial Sequence
  Description of Artificial Sequence: Synthetic oligonucleotide
  Antisense strand to SEQ ID NO: 2250256
uucugcccugccuaauucc

SEQ ID NO: 2250258 - RNA, 19 nt, Artificial Sequence
  Description of Artificial Sequence: Synthetic oligonucleotide
  Sense strand starting at position 76 of SEQ ID NO: 1884233
ugcuaugucccacaaauag

SEQ ID NO: 2250259 - RNA, 19 nt, Artificial Sequence
  Description of Artificial Sequence: Synthetic oligonucleotide
  Antisense strand to SEQ ID NO: 2250258
cuauuugugggacauagca

SEQ ID NO: 2250260 - RNA, 19 nt, Artificial Sequence
  Description of Artificial Sequence: Synthetic oligonucleotide
  Sense strand starting at position 115 of SEQ ID NO: 1884233
acuuaaguccagugaucac

SEQ ID NO: 2250261 - RNA, 19 nt, Artificial Sequence
  Description of Artificial Sequence: Synthetic oligonucleotide
  Antisense strand to SEQ ID NO: 2250260
gugaucacuggacuuaagu

SEQ ID NO: 2250262 - RNA, 19 nt, Artificial Sequence
  Description of Artificial Sequence: Synthetic oligonucleotide
  Sense strand starting at position 137 of SEQ ID NO: 1884233
ugccaaggucugugccuaa

SEQ ID NO: 2250263 - RNA, 19 nt, Artificial Sequence
  Description of Artificial Sequence: Synthetic oligonucleotide
  Antisense strand to SEQ ID NO: 2250262
uuaggcacagaccuuggca

SEQ ID NO: 2250264 - RNA, 19 nt, Artificial Sequence
  Description of Artificial Sequence: Synthetic oligonucleotide
  Sense strand starting at position 141 of SEQ ID NO: 1884233
aaggucugugccuaacaga

SEQ ID NO: 2250265 - RNA, 19 nt, Artificial Sequence
  Description of Artificial Sequence: Synthetic oligonucleotide
  Antisense strand to SEQ ID NO: 2250264
ucuguuaggcacagaccuu

SEQ ID NO: 2250266 - RNA, 19 nt, Artificial Sequence
  Description of Artificial Sequence: Synthetic oligonucleotide
  Sense strand starting at position 148 of SEQ ID NO: 1884233
gugccuaacagaggucaca

SEQ ID NO: 2250267 - RNA, 19 nt, Artificial Sequence
  Description of Artificial Sequence: Synthetic oligonucleotide
  Antisense strand to SEQ ID NO: 2250266
ugugaccucuguuaggcac

SEQ ID NO: 2250268 - RNA, 19 nt, Artificial Sequence
  Description of Artificial Sequence: Synthetic oligonucleotide
  Sense strand starting at position 264 of SEQ ID NO: 1884233
ucacauaacuaguagauga

SEQ ID NO: 2250269 - RNA, 19 nt, Artificial Sequence
  Description of Artificial Sequence: Synthetic oligonucleotide
  Antisense strand to SEQ ID NO: 2250268
ucaucuacuaguuauguga

SEQ ID NO: 2250270 - RNA, 19 nt, Artificial Sequence
  Description of Artificial Sequence: Synthetic oligonucleotide
  Sense strand starting at position 456 of SEQ ID NO: 1884233
cuugucaauguuugcugaa

SEQ ID NO: 2250271 - RNA, 19 nt, Artificial Sequence
  Description of Artificial Sequence: Synthetic oligonucleotide
  Antisense strand to SEQ ID NO: 2250270
uucagcaaacauugacaag

SEQ ID NO: 2250272 - RNA, 19 nt, Artificial Sequence
  Description of Artificial Sequence: Synthetic oligonucleotide
  Sense strand starting at position 457 of SEQ ID NO: 1884233
uugucaauguuugcugaau

SEQ ID NO: 2250273 - RNA, 19 nt, Artificial Sequence
  Description of Artificial Sequence: Synthetic oligonucleotide
  Antisense strand to SEQ ID NO: 2250272
auucagcaaacauugacaa

SEQ ID NO: 2250274 - RNA, 19 nt, Artificial Sequence
  Description of Artificial Sequence: Synthetic oligonucleotide
  Sense strand starting at position 458 of SEQ ID NO: 1884233
ugucaauguuugcugaaug

SEQ ID NO: 2250275 - RNA, 19 nt, Artificial Sequence
  Description of Artificial Sequence: Synthetic oligonucleotide
  Antisense strand to SEQ ID NO: 2250274
cauucagcaaacauugaca

SEQ ID NO: 2250276 - RNA, 19 nt, Artificial Sequence
  Description of Artificial Sequence: Synthetic oligonucleotide
  Sense strand starting at position 829 of SEQ ID NO: 1884233
ccagauccaugagaaacaa

SEQ ID NO: 2250277 - RNA, 19 nt, Artificial Sequence
  Description of Artificial Sequence: Synthetic oligonucleotide
  Antisense strand to SEQ ID NO: 2250276
uuguuucucauggaucugg

SEQ ID NO: 2250278 - RNA, 19 nt, Artificial Sequence
  Description of Artificial Sequence: Synthetic oligonucleotide
  Sense strand starting at position 904 of SEQ ID NO: 1884233
guaacaagcucacuuguua

SEQ ID NO: 2250279 - RNA, 19 nt, Artificial Sequence
  Description of Artificial Sequence: Synthetic oligonucleotide
  Antisense strand to SEQ ID NO: 2250278
uaacaagugagcuuguuac

SEQ ID NO: 2250280 - RNA, 19 nt, Artificial Sequence
  Description of Artificial Sequence: Synthetic oligonucleotide
  Sense strand starting at position 993 of SEQ ID NO: 1884233
gcaagugguucuuuccaga

SEQ ID NO: 2250281 - RNA, 19 nt, Artificial Sequence
  Description of Artificial Sequence: Synthetic oligonucleotide
  Antisense strand to SEQ ID NO: 2250280
ucuggaaagaaccacuugc

SEQ ID NO: 2250282 - RNA, 19 nt, Artificial Sequence
  Description of Artificial Sequence: Synthetic oligonucleotide
  Sense strand starting at position 1097 of SEQ ID NO: 1884233
ccuagcgucuauuugucaa

SEQ ID NO: 2250283 - RNA, 19 nt, Artificial Sequence
  Description of Artificial Sequence: Synthetic oligonucleotide
  Antisense strand to SEQ ID NO: 2250282
uugacaaauagacgcuagg

SEQ ID NO: 2250284 - RNA, 19 nt, Artificial Sequence
  Description of Artificial Sequence: Synthetic oligonucleotide
  Sense strand starting at position 1121 of SEQ ID NO: 1884233
gacugagcuucugaagaag

SEQ ID NO: 2250285 - RNA, 19 nt, Artificial Sequence
  Description of Artificial Sequence: Synthetic oligonucleotide
  Antisense strand to SEQ ID NO: 2250284
cuucuucagaagcucaguc

SEQ ID NO: 2250286 - RNA, 19 nt, Artificial Sequence
  Description of Artificial Sequence: Synthetic oligonucleotide
  Sense strand starting at position 1189 of SEQ ID NO: 1884233
agcaaagucuuauuagucu

SEQ ID NO: 2250287 - RNA, 19 nt, Artificial Sequence
  Description of Artificial Sequence: Synthetic oligonucleotide
  Antisense strand to SEQ ID NO: 2250286
agacuaauaagacuuugcu

SEQ ID NO: 2250288 - RNA, 19 nt, Artificial Sequence
  Description of Artificial Sequence: Synthetic oligonucleotide
  Sense strand starting at position 1574 of SEQ ID NO: 1884233
accggcuuugcgguguaaa

SEQ ID NO: 2250289 - RNA, 19 nt, Artificial Sequence
  Description of Artificial Sequence: Synthetic oligonucleotide
  Antisense strand to SEQ ID NO: 2250288
uuuacaccgcaaagccggu

SEQ ID NO: 2250290 - RNA, 19 nt, Artificial Sequence
  Description of Artificial Sequence: Synthetic oligonucleotide
  Sense strand starting at position 1576 of SEQ ID NO: 1884233
cggcuuugcgguguaaaca

SEQ ID NO: 2250291 - RNA, 19 nt, Artificial Sequence
  Description of Artificial Sequence: Synthetic oligonucleotide
  Antisense strand to SEQ ID NO: 2250290
uguuuacaccgcaaagccg

SEQ ID NO: 2250292 - RNA, 19 nt, Artificial Sequence
  Description of Artificial Sequence: Synthetic oligonucleotide
  Sense strand starting at position 2522 of SEQ ID NO: 1884233
agccauagcguguaacaca

SEQ ID NO: 2250293 - RNA, 19 nt, Artificial Sequence
  Description of Artificial Sequence: Synthetic oligonucleotide
  Antisense strand to SEQ ID NO: 2250292
uguguuacacgcuauggcu

SEQ ID NO: 2250294 - RNA, 19 nt, Artificial Sequence
  Description of Artificial Sequence: Synthetic oligonucleotide
  Sense strand starting at position 2547 of SEQ ID NO: 1884233
ccgcguguucuuuaagaaa

SEQ ID NO: 2250295 - RNA, 19 nt, Artificial Sequence
  Description of Artificial Sequence: Synthetic oligonucleotide
  Antisense strand to SEQ ID NO: 2250294
uuucuuaaagaacacgcgg

SEQ ID NO: 2250296 - RNA, 19 nt, Artificial Sequence
  Description of Artificial Sequence: Synthetic oligonucleotide
  Sense strand starting at position 2955 of SEQ ID NO: 1884233
gccugaagaucugugacca

SEQ ID NO: 2250297 - RNA, 19 nt, Artificial Sequence
  Description of Artificial Sequence: Synthetic oligonucleotide
  Antisense strand to SEQ ID NO: 2250296
uggucacagaucuucaggc

SEQ ID NO: 2250298 - RNA, 19 nt, Artificial Sequence
  Description of Artificial Sequence: Synthetic oligonucleotide
  Sense strand starting at position 2956 of SEQ ID NO: 1884233
ccugaagaucugugaccau

SEQ ID NO: 2250299 - RNA, 19 nt, Artificial Sequence
  Description of Artificial Sequence: Synthetic oligonucleotide
  Antisense strand to SEQ ID NO: 2250298
auggucacagaucuucagg

SEQ ID NO: 2250300 - RNA, 19 nt, Artificial Sequence
  Description of Artificial Sequence: Synthetic oligonucleotide
  Sense strand starting at position 2963 of SEQ ID NO: 1884233
aucugugaccauggauagu

SEQ ID NO: 2250301 - RNA, 19 nt, Artificial Sequence
  Description of Artificial Sequence: Synthetic oligonucleotide
  Antisense strand to SEQ ID NO: 2250300
acuauccauggucacagau

SEQ ID NO: 2250302 - RNA, 19 nt, Artificial Sequence
  Description of Artificial Sequence: Synthetic oligonucleotide
  Sense strand starting at position 2976 of SEQ ID NO: 1884233
gauaguaaauucuugcagu

SEQ ID NO: 2250303 - RNA, 19 nt, Artificial Sequence
  Description of Artificial Sequence: Synthetic oligonucleotide
  Antisense strand to SEQ ID NO: 2250302
acugcaagaauuuacuauc

SEQ ID NO: 2250304 - RNA, 19 nt, Artificial Sequence
  Description of Artificial Sequence: Synthetic oligonucleotide
  Sense strand starting at position 3047 of SEQ ID NO: 1884233
uggacagguucucagaaca

SEQ ID NO: 2250305 - RNA, 19 nt, Artificial Sequence
  Description of Artificial Sequence: Synthetic oligonucleotide
  Antisense strand to SEQ ID NO: 2250304
uguucugagaaccugucca

SEQ ID NO: 2250306 - RNA, 19 nt, Artificial Sequence
  Description of Artificial Sequence: Synthetic oligonucleotide
  Sense strand starting at position 3369 of SEQ ID NO: 1884233
acccuaaauugucagaaag

SEQ ID NO: 2250307 - RNA, 19 nt, Artificial Sequence
  Description of Artificial Sequence: Synthetic oligonucleotide
  Antisense strand to SEQ ID NO: 2250306
cuuucugacaauuuagggu

SEQ ID NO: 2250308 - RNA, 19 nt, Artificial Sequence
  Description of Artificial Sequence: Synthetic oligonucleotide
  Sense strand starting at position 3426 of SEQ ID NO: 1884233
uuacaagcugagggauaau

SEQ ID NO: 2250309 - RNA, 19 nt, Artificial Sequence
  Description of Artificial Sequence: Synthetic oligonucleotide
  Antisense strand to SEQ ID NO: 2250308
auuaucccucagcuuguaa

SEQ ID NO: 2250310 - RNA, 19 nt, Artificial Sequence
  Description of Artificial Sequence: Synthetic oligonucleotide
  Sense strand starting at position 3578 of SEQ ID NO: 1884233
ugugauaguguauauguua

SEQ ID NO: 2250311 - RNA, 19 nt, Artificial Sequence
  Description of Artificial Sequence: Synthetic oligonucleotide
  Antisense strand to SEQ ID NO: 2250310
uaacauauacacuaucaca

SEQ ID NO: 2250312 - RNA, 19 nt, Artificial Sequence
  Description of Artificial Sequence: Synthetic oligonucleotide
  Sense strand starting at position 3581 of SEQ ID NO: 1884233
gauaguguauauguuaguu

SEQ ID NO: 2250313 - RNA, 19 nt, Artificial Sequence
  Description of Artificial Sequence: Synthetic oligonucleotide
  Antisense strand to SEQ ID NO: 2250312
aacuaacauauacacuauc

SEQ ID NO: 2250314 - RNA, 19 nt, Artificial Sequence
  Description of Artificial Sequence: Synthetic oligonucleotide
  Sense strand starting at position 3585 of SEQ ID NO: 1884233
guguauauguuaguuuagu

SEQ ID NO: 2250315 - RNA, 19 nt, Artificial Sequence
  Description of Artificial Sequence: Synthetic oligonucleotide
  Antisense strand to SEQ ID NO: 2250314
acuaaacuaacauauacac

SEQ ID NO: 2250316 - RNA, 19 nt, Artificial Sequence
  Description of Artificial Sequence: Synthetic oligonucleotide
  Sense strand starting at position 3586 of SEQ ID NO: 1884233
uguauauguuaguuuaguc

SEQ ID NO: 2250317 - RNA, 19 nt, Artificial Sequence
  Description of Artificial Sequence: Synthetic oligonucleotide
  Antisense strand to SEQ ID NO: 2250316
gacuaaacuaacauauaca

SEQ ID NO: 2250318 - RNA, 19 nt, Artificial Sequence
  Description of Artificial Sequence: Synthetic oligonucleotide
  Sense strand starting at position 3591 of SEQ ID NO: 1884233
auguuaguuuagucaucag

SEQ ID NO: 2250319 - RNA, 19 nt, Artificial Sequence
  Description of Artificial Sequence: Synthetic oligonucleotide
  Antisense strand to SEQ ID NO: 2250318
cugaugacuaaacuaacau

SEQ ID NO: 2250320 - RNA, 19 nt, Artificial Sequence
  Description of Artificial Sequence: Synthetic oligonucleotide
  Sense strand starting at position 3669 of SEQ ID NO: 1884233
ugaacagucucccauuuga

SEQ ID NO: 2250321 - RNA, 19 nt, Artificial Sequence
  Description of Artificial Sequence: Synthetic oligonucleotide
  Antisense strand to SEQ ID NO: 2250320
ucaaaugggagacuguuca

SEQ ID NO: 2250322 - RNA, 19 nt, Artificial Sequence
  Description of Artificial Sequence: Synthetic oligonucleotide
  Sense strand starting at position 3702 of SEQ ID NO: 1884233
cccaguacccagugaaaug

SEQ ID NO: 2250323 - RNA, 19 nt, Artificial Sequence
  Description of Artificial Sequence: Synthetic oligonucleotide
  Antisense strand to SEQ ID NO: 2250322
cauuucacuggguacuggg

SEQ ID NO: 2250324 - RNA, 19 nt, Artificial Sequence
  Description of Artificial Sequence: Synthetic oligonucleotide
  Sense strand starting at position 3798 of SEQ ID NO: 1884233
cagugauggaguggcagaa

SEQ ID NO: 2250325 - RNA, 19 nt, Artificial Sequence
  Description of Artificial Sequence: Synthetic oligonucleotide
  Antisense strand to SEQ ID NO: 2250324
uucugccacuccaucacug

SEQ ID NO: 2250326 - RNA, 19 nt, Artificial Sequence
  Description of Artificial Sequence: Synthetic oligonucleotide
  Sense strand starting at position 3893 of SEQ ID NO: 1884233
gggacaaagccguaggauu

SEQ ID NO: 2250327 - RNA, 19 nt, Artificial Sequence
  Description of Artificial Sequence: Synthetic oligonucleotide
  Antisense strand to SEQ ID NO: 2250326
aauccuacggcuuuguccc

SEQ ID NO: 2250328 - RNA, 19 nt, Artificial Sequence
  Description of Artificial Sequence: Synthetic oligonucleotide
  Sense strand starting at position 3904 of SEQ ID NO: 1884233
guaggauucagugagggca

SEQ ID NO: 2250329 - RNA, 19 nt, Artificial Sequence
  Description of Artificial Sequence: Synthetic oligonucleotide
  Antisense strand to SEQ ID NO: 2250328
ugcccucacugaauccuac

SEQ ID NO: 2250330 - RNA, 19 nt, Artificial Sequence
  Description of Artificial Sequence: Synthetic oligonucleotide
  Sense strand starting at position 3920 of SEQ ID NO: 1884233
gcagcagaucagggcuauu

SEQ ID NO: 2250331 - RNA, 19 nt, Artificial Sequence
  Description of Artificial Sequence: Synthetic oligonucleotide
  Antisense strand to SEQ ID NO: 2250330
aauagcccugaucugcugc

SEQ ID NO: 2250332 - RNA, 19 nt, Artificial Sequence
  Description of Artificial Sequence: Synthetic oligonucleotide
  Sense strand starting at position 3961 of SEQ ID NO: 1884233
gacccaugucugugaagcu

SEQ ID NO: 2250333 - RNA, 19 nt, Artificial Sequence
  Description of Artificial Sequence: Synthetic oligonucleotide
  Antisense strand to SEQ ID NO: 2250332
agcuucacagacauggguc

SEQ ID NO: 2250334 - RNA, 19 nt, Artificial Sequence
  Description of Artificial Sequence: Synthetic oligonucleotide
  Sense strand starting at position 3982 of SEQ ID NO: 1884233
ggugcuuugucacuugauu

SEQ ID NO: 2250335 - RNA, 19 nt, Artificial Sequence
  Description of Artificial Sequence: Synthetic oligonucleotide
  Antisense strand to SEQ ID NO: 2250334
aaucaagugacaaagcacc

SEQ ID NO: 2250336 - RNA, 19 nt, Artificial Sequence
  Description of Artificial Sequence: Synthetic oligonucleotide
  Sense strand starting at position 99 of SEQ ID NO: 1884234
agggaucuguggucugaca

SEQ ID NO: 2250337 - RNA, 19 nt, Artificial Sequence
  Description of Artificial Sequence: Synthetic oligonucleotide
  Antisense strand to SEQ ID NO: 2250336
ugucagaccacagaucccu

SEQ ID NO: 2250338 - RNA, 19 nt, Artificial Sequence
  Description of Artificial Sequence: Synthetic oligonucleotide
  Sense strand starting at position 107 of SEQ ID NO: 1884234
guggucugacaguaccuaa

SEQ ID NO: 2250339 - RNA, 19 nt, Artificial Sequence
  Description of Artificial Sequence: Synthetic oligonucleotide
  Antisense strand to SEQ ID NO: 2250338
uuagguacugucagaccac

SEQ ID NO: 2250340 - RNA, 19 nt, Artificial Sequence
  Description of Artificial Sequence: Synthetic oligonucleotide
  Sense strand starting at position 312 of SEQ ID NO: 1884234
gaauguuccgccuaagaaa

SEQ ID NO: 2250341 - RNA, 19 nt, Artificial Sequence
  Description of Artificial Sequence: Synthetic oligonucleotide
  Antisense strand to SEQ ID NO: 2250340
uuucuuaggcggaacauuc

SEQ ID NO: 2250342 - RNA, 19 nt, Artificial Sequence
  Description of Artificial Sequence: Synthetic oligonucleotide
  Sense strand starting at position 512 of SEQ ID NO: 1884234
auguaaauggguuaugcca

SEQ ID NO: 2250343 - RNA, 19 nt, Artificial Sequence
  Description of Artificial Sequence: Synthetic oligonucleotide
  Antisense strand to SEQ ID NO: 2250342
uggcauaacccauuuacau

SEQ ID NO: 2250344 - RNA, 19 nt, Artificial Sequence
  Description of Artificial Sequence: Synthetic oligonucleotide
  Sense strand starting at position 648 of SEQ ID NO: 1884234
gggcuaucacuguagaugu

SEQ ID NO: 2250345 - RNA, 19 nt, Artificial Sequence
  Description of Artificial Sequence: Synthetic oligonucleotide
  Antisense strand to SEQ ID NO: 2250344
acaucuacagugauagccc

SEQ ID NO: 2250346 - RNA, 19 nt, Artificial Sequence
  Description of Artificial Sequence: Synthetic oligonucleotide
  Sense strand starting at position 650 of SEQ ID NO: 1884234
gcuaucacuguagauguaa

SEQ ID NO: 2250347 - RNA, 19 nt, Artificial Sequence
  Description of Artificial Sequence: Synthetic oligonucleotide
  Antisense strand to SEQ ID NO: 2250346
uuacaucuacagugauagc

SEQ ID NO: 2250348 - RNA, 19 nt, Artificial Sequence
  Description of Artificial Sequence: Synthetic oligonucleotide
  Sense strand starting at position 708 of SEQ ID NO: 1884234
ccaggaauuuaguacauua

SEQ ID NO: 2250349 - RNA, 19 nt, Artificial Sequence
  Description of Artificial Sequence: Synthetic oligonucleotide
  Antisense strand to SEQ ID NO: 2250348
uaauguacuaaauuccugg

SEQ ID NO: 2250350 - RNA, 19 nt, Artificial Sequence
  Description of Artificial Sequence: Synthetic oligonucleotide
  Sense strand starting at position 781 of SEQ ID NO: 1884234
ggaaguaccuguccaauuc

SEQ ID NO: 2250351 - RNA, 19 nt, Artificial Sequence
  Description of Artificial Sequence: Synthetic oligonucleotide
  Antisense strand to SEQ ID NO: 2250350
gaauuggacagguacuucc

SEQ ID NO: 2250352 - RNA, 19 nt, Artificial Sequence
  Description of Artificial Sequence: Synthetic oligonucleotide
  Sense strand starting at position 840 of SEQ ID NO: 1884234
agguguauccaaggcaaau

SEQ ID NO: 2250353 - RNA, 19 nt, Artificial Sequence
  Description of Artificial Sequence: Synthetic oligonucleotide
  Antisense strand to SEQ ID NO: 2250352
auuugccuuggauacaccu

SEQ ID NO: 2250354 - RNA, 19 nt, Artificial Sequence
  Description of Artificial Sequence: Synthetic oligonucleotide
  Sense strand starting at position 1150 of SEQ ID NO: 1884234
cagaccuuugccuggagga

SEQ ID NO: 2250355 - RNA, 19 nt, Artificial Sequence
  Description of Artificial Sequence: Synthetic oligonucleotide
  Antisense strand to SEQ ID NO: 2250354
uccuccaggcaaaggucug

SEQ ID NO: 2250356 - RNA, 19 nt, Artificial Sequence
  Description of Artificial Sequence: Synthetic oligonucleotide
  Sense strand starting at position 1152 of SEQ ID NO: 1884234
gaccuuugccuggaggacu

SEQ ID NO: 2250357 - RNA, 19 nt, Artificial Sequence
  Description of Artificial Sequence: Synthetic oligonucleotide
  Antisense strand to SEQ ID NO: 2250356
aguccuccaggcaaagguc

SEQ ID NO: 2250358 - RNA, 19 nt, Artificial Sequence
  Description of Artificial Sequence: Synthetic oligonucleotide
  Sense strand starting at position 1338 of SEQ ID NO: 1884234
cuuauuguaggucaguaaa

SEQ ID NO: 2250359 - RNA, 19 nt, Artificial Sequence
  Description of Artificial Sequence: Synthetic oligonucleotide
  Antisense strand to SEQ ID NO: 2250358
uuuacugaccuacaauaag

SEQ ID NO: 2250360 - RNA, 19 nt, Artificial Sequence
  Description of Artificial Sequence: Synthetic oligonucleotide
  Sense strand starting at position 1340 of SEQ ID NO: 1884234
uauuguaggucaguaaaug

SEQ ID NO: 2250361 - RNA, 19 nt, Artificial Sequence
  Description of Artificial Sequence: Synthetic oligonucleotide
  Antisense strand to SEQ ID NO: 2250360
cauuuacugaccuacaaua

SEQ ID NO: 2250362 - RNA, 19 nt, Artificial Sequence
  Description of Artificial Sequence: Synthetic oligonucleotide
  Sense strand starting at position 1341 of SEQ ID NO: 1884234
auuguaggucaguaaaugu

SEQ ID NO: 2250363 - RNA, 19 nt, Artificial Sequence
  Description of Artificial Sequence: Synthetic oligonucleotide
  Antisense strand to SEQ ID NO: 2250362
acauuuacugaccuacaau

SEQ ID NO: 2250364 - RNA, 19 nt, Artificial Sequence
  Description of Artificial Sequence: Synthetic oligonucleotide
  Sense strand starting at position 1554 of SEQ ID NO: 1884234
cugaguuugaaugagucuu

SEQ ID NO: 2250365 - RNA, 19 nt, Artificial Sequence
  Description of Artificial Sequence: Synthetic oligonucleotide
  Antisense strand to SEQ ID NO: 2250364
aagacucauucaaacucag

SEQ ID NO: 2250366 - RNA, 19 nt, Artificial Sequence
  Description of Artificial Sequence: Synthetic oligonucleotide
  Sense strand starting at position 1560 of SEQ ID NO: 1884234
uugaaugagucuuucuuua

SEQ ID NO: 2250367 - RNA, 19 nt, Artificial Sequence
  Description of Artificial Sequence: Synthetic oligonucleotide
  Antisense strand to SEQ ID NO: 2250366
uaaagaaagacucauucaa

SEQ ID NO: 2250368 - RNA, 19 nt, Artificial Sequence
  Description of Artificial Sequence: Synthetic oligonucleotide
  Sense strand starting at position 1564 of SEQ ID NO: 1884234
augagucuuucuuuaucag

SEQ ID NO: 2250369 - RNA, 19 nt, Artificial Sequence
  Description of Artificial Sequence: Synthetic oligonucleotide
  Antisense strand to SEQ ID NO: 2250368
cugauaaagaaagacucau

SEQ ID NO: 2250370 - RNA, 19 nt, Artificial Sequence
  Description of Artificial Sequence: Synthetic oligonucleotide
  Sense strand starting at position 1565 of SEQ ID NO: 1884234
ugagucuuucuuuaucaga

SEQ ID NO: 2250371 - RNA, 19 nt, Artificial Sequence
  Description of Artificial Sequence: Synthetic oligonucleotide
  Antisense strand to SEQ ID NO: 2250370
ucugauaaagaaagacuca

SEQ ID NO: 2250372 - RNA, 19 nt, Artificial Sequence
  Description of Artificial Sequence: Synthetic oligonucleotide
  Sense strand starting at position 1567 of SEQ ID NO: 1884234
agucuuucuuuaucagaga

SEQ ID NO: 2250373 - RNA, 19 nt, Artificial Sequence
  Description of Artificial Sequence: Synthetic oligonucleotide
  Antisense strand to SEQ ID NO: 2250372
ucucugauaaagaaagacu

SEQ ID NO: 2250374 - RNA, 19 nt, Artificial Sequence
  Description of Artificial Sequence: Synthetic oligonucleotide
  Sense strand starting at position 1608 of SEQ ID NO: 1884234
agucaaagaucugcaauca

SEQ ID NO: 2250375 - RNA, 19 nt, Artificial Sequence
  Description of Artificial Sequence: Synthetic oligonucleotide
  Antisense strand to SEQ ID NO: 2250374
ugauugcagaucuuugacu

SEQ ID NO: 2250376 - RNA, 19 nt, Artificial Sequence
  Description of Artificial Sequence: Synthetic oligonucleotide
  Sense strand starting at position 1609 of SEQ ID NO: 1884234
gucaaagaucugcaaucac

SEQ ID NO: 2250377 - RNA, 19 nt, Artificial Sequence
  Description of Artificial Sequence: Synthetic oligonucleotide
  Antisense strand to SEQ ID NO: 2250376
gugauugcagaucuuugac

SEQ ID NO: 2250378 - RNA, 19 nt, Artificial Sequence
  Description of Artificial Sequence: Synthetic oligonucleotide
  Sense strand starting at position 1627 of SEQ ID NO: 1884234
ccaagucaggucugguaaa

SEQ ID NO: 2250379 - RNA, 19 nt, Artificial Sequence
  Description of Artificial Sequence: Synthetic oligonucleotide
  Antisense strand to SEQ ID NO: 2250378
uuuaccagaccugacuugg

SEQ ID NO: 2250380 - RNA, 19 nt, Artificial Sequence
  Description of Artificial Sequence: Synthetic oligonucleotide
  Sense strand starting at position 1842 of SEQ ID NO: 1884234
uuaaauauccuuuggcuga

SEQ ID NO: 2250381 - RNA, 19 nt, Artificial Sequence
  Description of Artificial Sequence: Synthetic oligonucleotide
  Antisense strand to SEQ ID NO: 2250380
ucagccaaaggauauuuaa

SEQ ID NO: 2250382 - RNA, 19 nt, Artificial Sequence
  Description of Artificial Sequence: Synthetic oligonucleotide
  Sense strand starting at position 1846 of SEQ ID NO: 1884234
auauccuuuggcugagaaa

SEQ ID NO: 2250383 - RNA, 19 nt, Artificial Sequence
  Description of Artificial Sequence: Synthetic oligonucleotide
  Antisense strand to SEQ ID NO: 2250382
uuucucagccaaaggauau

SEQ ID NO: 2250384 - RNA, 19 nt, Artificial Sequence
  Description of Artificial Sequence: Synthetic oligonucleotide
  Sense strand starting at position 1951 of SEQ ID NO: 1884234
ggugaaucauucuuaccca

SEQ ID NO: 2250385 - RNA, 19 nt, Artificial Sequence
  Description of Artificial Sequence: Synthetic oligonucleotide
  Antisense strand to SEQ ID NO: 2250384
uggguaagaaugauucacc

SEQ ID NO: 2250386 - RNA, 19 nt, Artificial Sequence
  Description of Artificial Sequence: Synthetic oligonucleotide
  Sense strand starting at position 2045 of SEQ ID NO: 1884234
augaguaauuaagccaacu

SEQ ID NO: 2250387 - RNA, 19 nt, Artificial Sequence
  Description of Artificial Sequence: Synthetic oligonucleotide
  Antisense strand to SEQ ID NO: 2250386
aguuggcuuaauuacucau

SEQ ID NO: 2250388 - RNA, 19 nt, Artificial Sequence
  Description of Artificial Sequence: Synthetic oligonucleotide
  Sense strand starting at position 2216 of SEQ ID NO: 1884234
ugcaguuggcccuagaaca

SEQ ID NO: 2250389 - RNA, 19 nt, Artificial Sequence
  Description of Artificial Sequence: Synthetic oligonucleotide
  Antisense strand to SEQ ID NO: 2250388
uguucuagggccaacugca

SEQ ID NO: 2250390 - RNA, 19 nt, Artificial Sequence
  Description of Artificial Sequence: Synthetic oligonucleotide
  Sense strand starting at position 2359 of SEQ ID NO: 1884234
agaccuauaugauugucca

SEQ ID NO: 2250391 - RNA, 19 nt, Artificial Sequence
  Description of Artificial Sequence: Synthetic oligonucleotide
  Antisense strand to SEQ ID NO: 2250390
uggacaaucauauaggucu

SEQ ID NO: 2250392 - RNA, 19 nt, Artificial Sequence
  Description of Artificial Sequence: Synthetic oligonucleotide
  Sense strand starting at position 2362 of SEQ ID NO: 1884234
ccuauaugauuguccacuu

SEQ ID NO: 2250393 - RNA, 19 nt, Artificial Sequence
  Description of Artificial Sequence: Synthetic oligonucleotide
  Antisense strand to SEQ ID NO: 2250392
aaguggacaaucauauagg

SEQ ID NO: 2250394 - RNA, 19 nt, Artificial Sequence
  Description of Artificial Sequence: Synthetic oligonucleotide
  Sense strand starting at position 3081 of SEQ ID NO: 1884234
gagcuuuacgacuaagaau

SEQ ID NO: 2250395 - RNA, 19 nt, Artificial Sequence
  Description of Artificial Sequence: Synthetic oligonucleotide
  Antisense strand to SEQ ID NO: 2250394
auucuuagucguaaagcuc

SEQ ID NO: 2250396 - RNA, 19 nt, Artificial Sequence
  Description of Artificial Sequence: Synthetic oligonucleotide
  Sense strand starting at position 3157 of SEQ ID NO: 1884234
aaguuuaaagcagguaaca

SEQ ID NO: 2250397 - RNA, 19 nt, Artificial Sequence
  Description of Artificial Sequence: Synthetic oligonucleotide
  Antisense strand to SEQ ID NO: 2250396
uguuaccugcuuuaaacuu

SEQ ID NO: 2250398 - RNA, 19 nt, Artificial Sequence
  Description of Artificial Sequence: Synthetic oligonucleotide
  Sense strand starting at position 3272 of SEQ ID NO: 1884234
caugaauugccuugagaag

SEQ ID NO: 2250399 - RNA, 19 nt, Artificial Sequence
  Description of Artificial Sequence: Synthetic oligonucleotide
  Antisense strand to SEQ ID NO: 2250398
cuucucaaggcaauucaug

SEQ ID NO: 2250400 - RNA, 19 nt, Artificial Sequence
  Description of Artificial Sequence: Synthetic oligonucleotide
  Sense strand starting at position 3398 of SEQ ID NO: 1884234
uuggcuaucccauauaagu

SEQ ID NO: 2250401 - RNA, 19 nt, Artificial Sequence
  Description of Artificial Sequence: Synthetic oligonucleotide
  Antisense strand to SEQ ID NO: 2250400
acuuauaugggauagccaa

SEQ ID NO: 2250402 - RNA, 19 nt, Artificial Sequence
  Description of Artificial Sequence: Synthetic oligonucleotide
  Sense strand starting at position 3433 of SEQ ID NO: 1884234
ugcuuucuugaauaacaag

SEQ ID NO: 2250403 - RNA, 19 nt, Artificial Sequence
  Description of Artificial Sequence: Synthetic oligonucleotide
  Antisense strand to SEQ ID NO: 2250402
cuuguuauucaagaaagca

SEQ ID NO: 2250404 - RNA, 19 nt, Artificial Sequence
  Description of Artificial Sequence: Synthetic oligonucleotide
  Sense strand starting at position 3549 of SEQ ID NO: 1884234
ggagauucuugagucaaca

SEQ ID NO: 2250405 - RNA, 19 nt, Artificial Sequence
  Description of Artificial Sequence: Synthetic oligonucleotide
  Antisense strand to SEQ ID NO: 2250404
uguugacucaagaaucucc

SEQ ID NO: 2250406 - RNA, 19 nt, Artificial Sequence
  Description of Artificial Sequence: Synthetic oligonucleotide
  Sense strand starting at position 3566 of SEQ ID NO: 1884234
cagaguguugaggauucua

SEQ ID NO: 2250407 - RNA, 19 nt, Artificial Sequence
  Description of Artificial Sequence: Synthetic oligonucleotide
  Antisense strand to SEQ ID NO: 2250406
uagaauccucaacacucug

SEQ ID NO: 2250408 - RNA, 19 nt, Artificial Sequence
  Description of Artificial Sequence: Synthetic oligonucleotide
  Sense strand starting at position 3574 of SEQ ID NO: 1884234
ugaggauucuacucuuacu

SEQ ID NO: 2250409 - RNA, 19 nt, Artificial Sequence
  Description of Artificial Sequence: Synthetic oligonucleotide
  Antisense strand to SEQ ID NO: 2250408
aguaagaguagaauccuca

SEQ ID NO: 2250410 - RNA, 19 nt, Artificial Sequence
  Description of Artificial Sequence: Synthetic oligonucleotide
  Sense strand starting at position 3733 of SEQ ID NO: 1884234
cccucagaagauuguuaaa

SEQ ID NO: 2250411 - RNA, 19 nt, Artificial Sequence
  Description of Artificial Sequence: Synthetic oligonucleotide
  Antisense strand to SEQ ID NO: 2250410
uuuaacaaucuucugaggg

SEQ ID NO: 2250412 - RNA, 19 nt, Artificial Sequence
  Description of Artificial Sequence: Synthetic oligonucleotide
  Sense strand starting at position 3844 of SEQ ID NO: 1884234
aagacucuguggcugauaa

SEQ ID NO: 2250413 - RNA, 19 nt, Artificial Sequence
  Description of Artificial Sequence: Synthetic oligonucleotide
  Antisense strand to SEQ ID NO: 2250412
uuaucagccacagagucuu

SEQ ID NO: 2250414 - RNA, 19 nt, Artificial Sequence
  Description of Artificial Sequence: Synthetic oligonucleotide
  Sense strand starting at position 3845 of SEQ ID NO: 1884234
agacucuguggcugauaaa

SEQ ID NO: 2250415 - RNA, 19 nt, Artificial Sequence
  Description of Artificial Sequence: Synthetic oligonucleotide
  Antisense strand to SEQ ID NO: 2250414
uuuaucagccacagagucu

SEQ ID NO: 2250416 - RNA, 19 nt, Artificial Sequence
  Description of Artificial Sequence: Synthetic oligonucleotide
  Sense strand starting at position 21 of SEQ ID NO: 1884235
ggaacuugcacaggugaaa

SEQ ID NO: 2250417 - RNA, 19 nt, Artificial Sequence
  Description of Artificial Sequence: Synthetic oligonucleotide
  Antisense strand to SEQ ID NO: 2250416
uuucaccugugcaaguucc

SEQ ID NO: 2250418 - RNA, 19 nt, Artificial Sequence
  Description of Artificial Sequence: Synthetic oligonucleotide
  Sense strand starting at position 48 of SEQ ID NO: 1884235
gagggaagauguguggauu

SEQ ID NO: 2250419 - RNA, 19 nt, Artificial Sequence
  Description of Artificial Sequence: Synthetic oligonucleotide
  Antisense strand to SEQ ID NO: 2250418
aauccacacaucuucccuc

SEQ ID NO: 2250420 - RNA, 19 nt, Artificial Sequence
  Description of Artificial Sequence: Synthetic oligonucleotide
  Sense strand starting at position 121 of SEQ ID NO: 1884235
uggauugggccuuguuaca

SEQ ID NO: 2250421 - RNA, 19 nt, Artificial Sequence
  Description of Artificial Sequence: Synthetic oligonucleotide
  Antisense strand to SEQ ID NO: 2250420
uguaacaaggcccaaucca

SEQ ID NO: 2250422 - RNA, 19 nt, Artificial Sequence
  Description of Artificial Sequence: Synthetic oligonucleotide
  Sense strand starting at position 143 of SEQ ID NO: 1884235
gcuugcauccaagagugaa

SEQ ID NO: 2250423 - RNA, 19 nt, Artificial Sequence
  Description of Artificial Sequence: Synthetic oligonucleotide
  Antisense strand to SEQ ID NO: 2250422
uucacucuuggaugcaagc

SEQ ID NO: 2250424 - RNA, 19 nt, Artificial Sequence
  Description of Artificial Sequence: Synthetic oligonucleotide
  Sense strand starting at position 167 of SEQ ID NO: 1884235
ugggaugugucaguaggca

SEQ ID NO: 2250425 - RNA, 19 nt, Artificial Sequence
  Description of Artificial Sequence: Synthetic oligonucleotide
  Antisense strand to SEQ ID NO: 2250424
ugccuacugacacauccca

SEQ ID NO: 2250426 - RNA, 19 nt, Artificial Sequence
  Description of Artificial Sequence: Synthetic oligonucleotide
  Sense strand starting at position 190 of SEQ ID NO: 1884235
gguguuauugaaggguucu

SEQ ID NO: 2250427 - RNA, 19 nt, Artificial Sequence
  Description of Artificial Sequence: Synthetic oligonucleotide
  Antisense strand to SEQ ID NO: 2250426
agaacccuucaauaacacc

SEQ ID NO: 2250428 - RNA, 19 nt, Artificial Sequence
  Description of Artificial Sequence: Synthetic oligonucleotide
  Sense strand starting at position 191 of SEQ ID NO: 1884235
guguuauugaaggguucug

SEQ ID NO: 2250429 - RNA, 19 nt, Artificial Sequence
  Description of Artificial Sequence: Synthetic oligonucleotide
  Antisense strand to SEQ ID NO: 2250428
cagaacccuucaauaacac

SEQ ID NO: 2250430 - RNA, 19 nt, Artificial Sequence
  Description of Artificial Sequence: Synthetic oligonucleotide
  Sense strand starting at position 234 of SEQ ID NO: 1884235
uguggagugaccggauaga

SEQ ID NO: 2250431 - RNA, 19 nt, Artificial Sequence
  Description of Artificial Sequence: Synthetic oligonucleotide
  Antisense strand to SEQ ID NO: 2250430
ucuauccggucacuccaca

SEQ ID NO: 2250432 - RNA, 19 nt, Artificial Sequence
  Description of Artificial Sequence: Synthetic oligonucleotide
  Sense strand starting at position 253 of SEQ ID NO: 1884235
aacugagguguauaacagu

SEQ ID NO: 2250433 - RNA, 19 nt, Artificial Sequence
  Description of Artificial Sequence: Synthetic oligonucleotide
  Antisense strand to SEQ ID NO: 2250432
acuguuauacaccucaguu

SEQ ID NO: 2250434 - RNA, 19 nt, Artificial Sequence
  Description of Artificial Sequence: Synthetic oligonucleotide
  Sense strand starting at position 264 of SEQ ID NO: 1884235
auaacaguugcugauguua

SEQ ID NO: 2250435 - RNA, 19 nt, Artificial Sequence
  Description of Artificial Sequence: Synthetic oligonucleotide
  Antisense strand to SEQ ID NO: 2250434
uaacaucagcaacuguuau

SEQ ID NO: 2250436 - RNA, 19 nt, Artificial Sequence
  Description of Artificial Sequence: Synthetic oligonucleotide
  Sense strand starting at position 272 of SEQ ID NO: 1884235
ugcugauguuaauugaaca

SEQ ID NO: 2250437 - RNA, 19 nt, Artificial Sequence
  Description of Artificial Sequence: Synthetic oligonucleotide
  Antisense strand to SEQ ID NO: 2250436
uguucaauuaacaucagca

SEQ ID NO: 2250438 - RNA, 19 nt, Artificial Sequence
  Description of Artificial Sequence: Synthetic oligonucleotide
  Sense strand starting at position 347 of SEQ ID NO: 1884235
ggucacucuucuguuugga

SEQ ID NO: 2250439 - RNA, 19 nt, Artificial Sequence
  Description of Artificial Sequence: Synthetic oligonucleotide
  Antisense strand to SEQ ID NO: 2250438
uccaaacagaagagugacc

SEQ ID NO: 2250440 - RNA, 19 nt, Artificial Sequence
  Description of Artificial Sequence: Synthetic oligonucleotide
  Sense strand starting at position 513 of SEQ ID NO: 1884235
guucucugugccuagaaua

SEQ ID NO: 2250441 - RNA, 19 nt, Artificial Sequence
  Description of Artificial Sequence: Synthetic oligonucleotide
  Antisense strand to SEQ ID NO: 2250440
uauucuaggcacagagaac

SEQ ID NO: 2250442 - RNA, 19 nt, Artificial Sequence
  Description of Artificial Sequence: Synthetic oligonucleotide
  Sense strand starting at position 570 of SEQ ID NO: 1884235
uccuuuaggucuuugauca

SEQ ID NO: 2250443 - RNA, 19 nt, Artificial Sequence
  Description of Artificial Sequence: Synthetic oligonucleotide
  Antisense strand to SEQ ID NO: 2250442
ugaucaaagaccuaaagga

SEQ ID NO: 2250444 - RNA, 19 nt, Artificial Sequence
  Description of Artificial Sequence: Synthetic oligonucleotide
  Sense strand starting at position 660 of SEQ ID NO: 1884235
uugauucuucucuguagua

SEQ ID NO: 2250445 - RNA, 19 nt, Artificial Sequence
  Description of Artificial Sequence: Synthetic oligonucleotide
  Antisense strand to SEQ ID NO: 2250444
uacuacagagaagaaucaa

SEQ ID NO: 2250446 - RNA, 19 nt, Artificial Sequence
  Description of Artificial Sequence: Synthetic oligonucleotide
  Sense strand starting at position 661 of SEQ ID NO: 1884235
ugauucuucucuguaguac

SEQ ID NO: 2250447 - RNA, 19 nt, Artificial Sequence
  Description of Artificial Sequence: Synthetic oligonucleotide
  Antisense strand to SEQ ID NO: 2250446
guacuacagagaagaauca

SEQ ID NO: 2250448 - RNA, 19 nt, Artificial Sequence
  Description of Artificial Sequence: Synthetic oligonucleotide
  Sense strand starting at position 792 of SEQ ID NO: 1884235
guaguuacugcaugaguga

SEQ ID NO: 2250449 - RNA, 19 nt, Artificial Sequence
  Description of Artificial Sequence: Synthetic oligonucleotide
  Antisense strand to SEQ ID NO: 2250448
ucacucaugcaguaacuac

SEQ ID NO: 2250450 - RNA, 19 nt, Artificial Sequence
  Description of Artificial Sequence: Synthetic oligonucleotide
  Sense strand starting at position 966 of SEQ ID NO: 1884235
cgccuugucaugguuguga

SEQ ID NO: 2250451 - RNA, 19 nt, Artificial Sequence
  Description of Artificial Sequence: Synthetic oligonucleotide
  Antisense strand to SEQ ID NO: 2250450
ucacaaccaugacaaggcg

SEQ ID NO: 2250452 - RNA, 19 nt, Artificial Sequence
  Description of Artificial Sequence: Synthetic oligonucleotide
  Sense strand starting at position 974 of SEQ ID NO: 1884235
caugguugugacugggcaa

SEQ ID NO: 2250453 - RNA, 19 nt, Artificial Sequence
  Description of Artificial Sequence: Synthetic oligonucleotide
  Antisense strand to SEQ ID NO: 2250452
uugcccagucacaaccaug

SEQ ID NO: 2250454 - RNA, 19 nt, Artificial Sequence
  Description of Artificial Sequence: Synthetic oligonucleotide
  Sense strand starting at position 977 of SEQ ID NO: 1884235
gguugugacugggcaacaa

SEQ ID NO: 2250455 - RNA, 19 nt, Artificial Sequence
  Description of Artificial Sequence: Synthetic oligonucleotide
  Antisense strand to SEQ ID NO: 2250454
uuguugcccagucacaacc

SEQ ID NO: 2250456 - RNA, 19 nt, Artificial Sequence
  Description of Artificial Sequence: Synthetic oligonucleotide
  Sense strand starting at position 1197 of SEQ ID NO: 1884235
aaaggagucugauuguugu

SEQ ID NO: 2250457 - RNA, 19 nt, Artificial Sequence
  Description of Artificial Sequence: Synthetic oligonucleotide
  Antisense strand to SEQ ID NO: 2250456
acaacaaucagacuccuuu

SEQ ID NO: 2250458 - RNA, 19 nt, Artificial Sequence
  Description of Artificial Sequence: Synthetic oligonucleotide
  Sense strand starting at position 1200 of SEQ ID NO: 1884235
ggagucugauuguuguaaa

SEQ ID NO: 2250459 - RNA, 19 nt, Artificial Sequence
  Description of Artificial Sequence: Synthetic oligonucleotide
  Antisense strand to SEQ ID NO: 2250458
uuuacaacaaucagacucc

SEQ ID NO: 2250460 - RNA, 19 nt, Artificial Sequence
  Description of Artificial Sequence: Synthetic oligonucleotide
  Sense strand starting at position 1497 of SEQ ID NO: 1884235
accuuacagcagcagaaau

SEQ ID NO: 2250461 - RNA, 19 nt, Artificial Sequence
  Description of Artificial Sequence: Synthetic oligonucleotide
  Antisense strand to SEQ ID NO: 2250460
auuucugcugcuguaaggu

SEQ ID NO: 2250462 - RNA, 19 nt, Artificial Sequence
  Description of Artificial Sequence: Synthetic oligonucleotide
  Sense strand starting at position 1638 of SEQ ID NO: 1884235
cggucucaccugcaugagu

SEQ ID NO: 2250463 - RNA, 19 nt, Artificial Sequence
  Description of Artificial Sequence: Synthetic oligonucleotide
  Antisense strand to SEQ ID NO: 2250462
acucaugcaggugagaccg

SEQ ID NO: 2250464 - RNA, 19 nt, Artificial Sequence
  Description of Artificial Sequence: Synthetic oligonucleotide
  Sense strand starting at position 1640 of SEQ ID NO: 1884235
gucucaccugcaugaguga

SEQ ID NO: 2250465 - RNA, 19 nt, Artificial Sequence
  Description of Artificial Sequence: Synthetic oligonucleotide
  Antisense strand to SEQ ID NO: 2250464
ucacucaugcaggugagac

SEQ ID NO: 2250466 - RNA, 19 nt, Artificial Sequence
  Description of Artificial Sequence: Synthetic oligonucleotide
  Sense strand starting at position 2135 of SEQ ID NO: 1884235
acuauuacagagugaucau

SEQ ID NO: 2250467 - RNA, 19 nt, Artificial Sequence
  Description of Artificial Sequence: Synthetic oligonucleotide
  Antisense strand to SEQ ID NO: 2250466
augaucacucuguaauagu

SEQ ID NO: 2250468 - RNA, 19 nt, Artificial Sequence
  Description of Artificial Sequence: Synthetic oligonucleotide
  Sense strand starting at position 2142 of SEQ ID NO: 1884235
cagagugaucauggcagca

SEQ ID NO: 2250469 - RNA, 19 nt, Artificial Sequence
  Description of Artificial Sequence: Synthetic oligonucleotide
  Antisense strand to SEQ ID NO: 2250468
ugcugccaugaucacucug

SEQ ID NO: 2250470 - RNA, 19 nt, Artificial Sequence
  Description of Artificial Sequence: Synthetic oligonucleotide
  Sense strand starting at position 2167 of SEQ ID NO: 1884235
acacacauccugugaagga

SEQ ID NO: 2250471 - RNA, 19 nt, Artificial Sequence
  Description of Artificial Sequence: Synthetic oligonucleotide
  Antisense strand to SEQ ID NO: 2250470
uccuucacaggaugugugu

SEQ ID NO: 2250472 - RNA, 19 nt, Artificial Sequence
  Description of Artificial Sequence: Synthetic oligonucleotide
  Sense strand starting at position 2200 of SEQ ID NO: 1884235
cucugaugguguccagagu

SEQ ID NO: 2250473 - RNA, 19 nt, Artificial Sequence
  Description of Artificial Sequence: Synthetic oligonucleotide
  Antisense strand to SEQ ID NO: 2250472
acucuggacaccaucagag

SEQ ID NO: 2250474 - RNA, 19 nt, Artificial Sequence
  Description of Artificial Sequence: Synthetic oligonucleotide
  Sense strand starting at position 2223 of SEQ ID NO: 1884235
uuuggcagucucuaagguu

SEQ ID NO: 2250475 - RNA, 19 nt, Artificial Sequence
  Description of Artificial Sequence: Synthetic oligonucleotide
  Antisense strand to SEQ ID NO: 2250474
aaccuuagagacugccaaa

SEQ ID NO: 2250476 - RNA, 19 nt, Artificial Sequence
  Description of Artificial Sequence: Synthetic oligonucleotide
  Sense strand starting at position 2335 of SEQ ID NO: 1884235
gacggagucuuacucauuc

SEQ ID NO: 2250477 - RNA, 19 nt, Artificial Sequence
  Description of Artificial Sequence: Synthetic oligonucleotide
  Antisense strand to SEQ ID NO: 2250476
gaaugaguaagacuccguc

SEQ ID NO: 2250478 - RNA, 19 nt, Artificial Sequence
  Description of Artificial Sequence: Synthetic oligonucleotide
  Sense strand starting at position 2651 of SEQ ID NO: 1884235
cugggaucuugugucaaug

SEQ ID NO: 2250479 - RNA, 19 nt, Artificial Sequence
  Description of Artificial Sequence: Synthetic oligonucleotide
  Antisense strand to SEQ ID NO: 2250478
cauugacacaagaucccag

SEQ ID NO: 2250480 - RNA, 19 nt, Artificial Sequence
  Description of Artificial Sequence: Synthetic oligonucleotide
  Sense strand starting at position 2859 of SEQ ID NO: 1884235
uccugaauuuaaugauagu

SEQ ID NO: 2250481 - RNA, 19 nt, Artificial Sequence
  Description of Artificial Sequence: Synthetic oligonucleotide
  Antisense strand to SEQ ID NO: 2250480
acuaucauuaaauucagga

SEQ ID NO: 2250482 - RNA, 19 nt, Artificial Sequence
  Description of Artificial Sequence: Synthetic oligonucleotide
  Sense strand starting at position 2862 of SEQ ID NO: 1884235
ugaauuuaaugauagucca

SEQ ID NO: 2250483 - RNA, 19 nt, Artificial Sequence
  Description of Artificial Sequence: Synthetic oligonucleotide
  Antisense strand to SEQ ID NO: 2250482
uggacuaucauuaaauuca

SEQ ID NO: 2250484 - RNA, 19 nt, Artificial Sequence
  Description of Artificial Sequence: Synthetic oligonucleotide
  Sense strand starting at position 3150 of SEQ ID NO: 1884235
ggcucugugacacgacauu

SEQ ID NO: 2250485 - RNA, 19 nt, Artificial Sequence
  Description of Artificial Sequence: Synthetic oligonucleotide
  Antisense strand to SEQ ID NO: 2250484
aaugucgugucacagagcc

SEQ ID NO: 2250486 - RNA, 19 nt, Artificial Sequence
  Description of Artificial Sequence: Synthetic oligonucleotide
  Sense strand starting at position 3264 of SEQ ID NO: 1884235
ugucaucugccagaagaga

SEQ ID NO: 2250487 - RNA, 19 nt, Artificial Sequence
  Description of Artificial Sequence: Synthetic oligonucleotide
  Antisense strand to SEQ ID NO: 2250486
ucucuucuggcagaugaca

SEQ ID NO: 2250488 - RNA, 19 nt, Artificial Sequence
  Description of Artificial Sequence: Synthetic oligonucleotide
  Sense strand starting at position 3318 of SEQ ID NO: 1884235
ucugauuuccuuuguguga

SEQ ID NO: 2250489 - RNA, 19 nt, Artificial Sequence
  Description of Artificial Sequence: Synthetic oligonucleotide
  Antisense strand to SEQ ID NO: 2250488
ucacacaaaggaaaucaga

SEQ ID NO: 2250490 - RNA, 19 nt, Artificial Sequence
  Description of Artificial Sequence: Synthetic oligonucleotide
  Sense strand starting at position 3753 of SEQ ID NO: 1884235
gguccauucccuuacuguu

SEQ ID NO: 2250491 - RNA, 19 nt, Artificial Sequence
  Description of Artificial Sequence: Synthetic oligonucleotide
  Antisense strand to SEQ ID NO: 2250490
aacaguaagggaauggacc

SEQ ID NO: 2250492 - RNA, 19 nt, Artificial Sequence
  Description of Artificial Sequence: Synthetic oligonucleotide
  Sense strand starting at position 3825 of SEQ ID NO: 1884235
ucugcaccgucccuagaaa

SEQ ID NO: 2250493 - RNA, 19 nt, Artificial Sequence
  Description of Artificial Sequence: Synthetic oligonucleotide
  Antisense strand to SEQ ID NO: 2250492
uuucuagggacggugcaga

SEQ ID NO: 2250494 - RNA, 19 nt, Artificial Sequence
  Description of Artificial Sequence: Synthetic oligonucleotide
  Sense strand starting at position 3826 of SEQ ID NO: 1884235
cugcaccgucccuagaaau

SEQ ID NO: 2250495 - RNA, 19 nt, Artificial Sequence
  Description of Artificial Sequence: Synthetic oligonucleotide
  Antisense strand to SEQ ID NO: 2250494
auuucuagggacggugcag

SEQ ID NO: 2250496 - RNA, 19 nt, Artificial Sequence
  Description of Artificial Sequence: Synthetic oligonucleotide
  Sense strand starting at position 3 of SEQ ID NO: 1884236
agaguaugugcucaauuaa

SEQ ID NO: 2250497 - RNA, 19 nt, Artificial Sequence
  Description of Artificial Sequence: Synthetic oligonucleotide
  Antisense strand to SEQ ID NO: 2250496
uuaauugagcacauacucu

SEQ ID NO: 2250498 - RNA, 19 nt, Artificial Sequence
  Description of Artificial Sequence: Synthetic oligonucleotide
  Sense strand starting at position 30 of SEQ ID NO: 1884236
agcacuucuggcuagaaug

SEQ ID NO: 2250499 - RNA, 19 nt, Artificial Sequence
  Description of Artificial Sequence: Synthetic oligonucleotide
  Antisense strand to SEQ ID NO: 2250498
cauucuagccagaagugcu

SEQ ID NO: 2250500 - RNA, 19 nt, Artificial Sequence
  Description of Artificial Sequence: Synthetic oligonucleotide
  Sense strand starting at position 225 of SEQ ID NO: 1884236
guaaacaucugcccuaaga

SEQ ID NO: 2250501 - RNA, 19 nt, Artificial Sequence
  Description of Artificial Sequence: Synthetic oligonucleotide
  Antisense strand to SEQ ID NO: 2250500
ucuuagggcagauguuuac

SEQ ID NO: 2250502 - RNA, 19 nt, Artificial Sequence
  Description of Artificial Sequence: Synthetic oligonucleotide
  Sense strand starting at position 452 of SEQ ID NO: 1884236
ggcugugcaaucuaaagua

SEQ ID NO: 2250503 - RNA, 19 nt, Artificial Sequence
  Description of Artificial Sequence: Synthetic oligonucleotide
  Antisense strand to SEQ ID NO: 2250502
uacuuuagauugcacagcc

SEQ ID NO: 2250504 - RNA, 19 nt, Artificial Sequence
  Description of Artificial Sequence: Synthetic oligonucleotide
  Sense strand starting at position 467 of SEQ ID NO: 1884236
aguaaacagaguuguauga

SEQ ID NO: 2250505 - RNA, 19 nt, Artificial Sequence
  Description of Artificial Sequence: Synthetic oligonucleotide
  Antisense strand to SEQ ID NO: 2250504
ucauacaacucuguuuacu

SEQ ID NO: 2250506 - RNA, 19 nt, Artificial Sequence
  Description of Artificial Sequence: Synthetic oligonucleotide
  Sense strand starting at position 471 of SEQ ID NO: 1884236
aacagaguuguaugaggau

SEQ ID NO: 2250507 - RNA, 19 nt, Artificial Sequence
  Description of Artificial Sequence: Synthetic oligonucleotide
  Antisense strand to SEQ ID NO: 2250506
auccucauacaacucuguu

SEQ ID NO: 2250508 - RNA, 19 nt, Artificial Sequence
  Description of Artificial Sequence: Synthetic oligonucleotide
  Sense strand starting at position 477 of SEQ ID NO: 1884236
guuguaugaggauguccaa

SEQ ID NO: 2250509 - RNA, 19 nt, Artificial Sequence
  Description of Artificial Sequence: Synthetic oligonucleotide
  Antisense strand to SEQ ID NO: 2250508
uuggacauccucauacaac

SEQ ID NO: 2250510 - RNA, 19 nt, Artificial Sequence
  Description of Artificial Sequence: Synthetic oligonucleotide
  Sense strand starting at position 480 of SEQ ID NO: 1884236
guaugaggauguccaauaa

SEQ ID NO: 2250511 - RNA, 19 nt, Artificial Sequence
  Description of Artificial Sequence: Synthetic oligonucleotide
  Antisense strand to SEQ ID NO: 2250510
uuauuggacauccucauac

SEQ ID NO: 2250512 - RNA, 19 nt, Artificial Sequence
  Description of Artificial Sequence: Synthetic oligonucleotide
  Sense strand starting at position 484 of SEQ ID NO: 1884236
gaggauguccaauaaugcu

SEQ ID NO: 2250513 - RNA, 19 nt, Artificial Sequence
  Description of Artificial Sequence: Synthetic oligonucleotide
  Antisense strand to SEQ ID NO: 2250512
agcauuauuggacauccuc

SEQ ID NO: 2250514 - RNA, 19 nt, Artificial Sequence
  Description of Artificial Sequence: Synthetic oligonucleotide
  Sense strand starting at position 565 of SEQ ID NO: 1884236
aaagauauguauguugcua

SEQ ID NO: 2250515 - RNA, 19 nt, Artificial Sequence
  Description of Artificial Sequence: Synthetic oligonucleotide
  Antisense strand to SEQ ID NO: 2250514
uagcaacauacauaucuuu

SEQ ID NO: 2250516 - RNA, 19 nt, Artificial Sequence
  Description of Artificial Sequence: Synthetic oligonucleotide
  Sense strand starting at position 670 of SEQ ID NO: 1884236
cuaaguuccuaccuuagga

SEQ ID NO: 2250517 - RNA, 19 nt, Artificial Sequence
  Description of Artificial Sequence: Synthetic oligonucleotide
  Antisense strand to SEQ ID NO: 2250516
uccuaagguaggaacuuag

SEQ ID NO: 2250518 - RNA, 19 nt, Artificial Sequence
  Description of Artificial Sequence: Synthetic oligonucleotide
  Sense strand starting at position 702 of SEQ ID NO: 1884236
ugcucuucccaggaaagca

SEQ ID NO: 2250519 - RNA, 19 nt, Artificial Sequence
  Description of Artificial Sequence: Synthetic oligonucleotide
  Antisense strand to SEQ ID NO: 2250518
ugcuuuccugggaagagca

SEQ ID NO: 2250520 - RNA, 19 nt, Artificial Sequence
  Description of Artificial Sequence: Synthetic oligonucleotide
  Sense strand starting at position 717 of SEQ ID NO: 1884236
agcacuaaacuuuggagua

SEQ ID NO: 2250521 - RNA, 19 nt, Artificial Sequence
  Description of Artificial Sequence: Synthetic oligonucleotide
  Antisense strand to SEQ ID NO: 2250520
uacuccaaaguuuagugcu

SEQ ID NO: 2250522 - RNA, 19 nt, Artificial Sequence
  Description of Artificial Sequence: Synthetic oligonucleotide
  Sense strand starting at position 748 of SEQ ID NO: 1884236
ucuccagucuagucaauac

SEQ ID NO: 2250523 - RNA, 19 nt, Artificial Sequence
  Description of Artificial Sequence: Synthetic oligonucleotide
  Antisense strand to SEQ ID NO: 2250522
guauugacuagacuggaga

SEQ ID NO: 2250524 - RNA, 19 nt, Artificial Sequence
  Description of Artificial Sequence: Synthetic oligonucleotide
  Sense strand starting at position 989 of SEQ ID NO: 1884236
gagacaaggugucucacuu

SEQ ID NO: 2250525 - RNA, 19 nt, Artificial Sequence
  Description of Artificial Sequence: Synthetic oligonucleotide
  Antisense strand to SEQ ID NO: 2250524
aagugagacaccuugucuc

SEQ ID NO: 2250526 - RNA, 19 nt, Artificial Sequence
  Description of Artificial Sequence: Synthetic oligonucleotide
  Sense strand starting at position 1128 of SEQ ID NO: 1884236
uuggaaugccuugauagcu

SEQ ID NO: 2250527 - RNA, 19 nt, Artificial Sequence
  Description of Artificial Sequence: Synthetic oligonucleotide
  Antisense strand to SEQ ID NO: 2250526
agcuaucaaggcauuccaa

SEQ ID NO: 2250528 - RNA, 19 nt, Artificial Sequence
  Description of Artificial Sequence: Synthetic oligonucleotide
  Sense strand starting at position 1133 of SEQ ID NO: 1884236
augccuugauagcucaaca

SEQ ID NO: 2250529 - RNA, 19 nt, Artificial Sequence
  Description of Artificial Sequence: Synthetic oligonucleotide
  Antisense strand to SEQ ID NO: 2250528
uguugagcuaucaaggcau

SEQ ID NO: 2250530 - RNA, 19 nt, Artificial Sequence
  Description of Artificial Sequence: Synthetic oligonucleotide
  Sense strand starting at position 1138 of SEQ ID NO: 1884236
uugauagcucaacauguca

SEQ ID NO: 2250531 - RNA, 19 nt, Artificial Sequence
  Description of Artificial Sequence: Synthetic oligonucleotide
  Antisense strand to SEQ ID NO: 2250530
ugacauguugagcuaucaa

SEQ ID NO: 2250532 - RNA, 19 nt, Artificial Sequence
  Description of Artificial Sequence: Synthetic oligonucleotide
  Sense strand starting at position 1621 of SEQ ID NO: 1884236
ucuuuaaugucaucaguag

SEQ ID NO: 2250533 - RNA, 19 nt, Artificial Sequence
  Description of Artificial Sequence: Synthetic oligonucleotide
  Antisense strand to SEQ ID NO: 2250532
cuacugaugacauuaaaga

SEQ ID NO: 2250534 - RNA, 19 nt, Artificial Sequence
  Description of Artificial Sequence: Synthetic oligonucleotide
  Sense strand starting at position 1622 of SEQ ID NO: 1884236
cuuuaaugucaucaguagu

SEQ ID NO: 2250535 - RNA, 19 nt, Artificial Sequence
  Description of Artificial Sequence: Synthetic oligonucleotide
  Antisense strand to SEQ ID NO: 2250534
acuacugaugacauuaaag

SEQ ID NO: 2250536 - RNA, 19 nt, Artificial Sequence
  Description of Artificial Sequence: Synthetic oligonucleotide
  Sense strand starting at position 1625 of SEQ ID NO: 1884236
uaaugucaucaguaguaga

SEQ ID NO: 2250537 - RNA, 19 nt, Artificial Sequence
  Description of Artificial Sequence: Synthetic oligonucleotide
  Antisense strand to SEQ ID NO: 2250536
ucuacuacugaugacauua

SEQ ID NO: 2250538 - RNA, 19 nt, Artificial Sequence
  Description of Artificial Sequence: Synthetic oligonucleotide
  Sense strand starting at position 1685 of SEQ ID NO: 1884236
aggagaaauuccuugugca

SEQ ID NO: 2250539 - RNA, 19 nt, Artificial Sequence
  Description of Artificial Sequence: Synthetic oligonucleotide
  Antisense strand to SEQ ID NO: 2250538
ugcacaaggaauuucuccu

SEQ ID NO: 2250540 - RNA, 19 nt, Artificial Sequence
  Description of Artificial Sequence: Synthetic oligonucleotide
  Sense strand starting at position 1686 of SEQ ID NO: 1884236
ggagaaauuccuugugcag

SEQ ID NO: 2250541 - RNA, 19 nt, Artificial Sequence
  Description of Artificial Sequence: Synthetic oligonucleotide
  Antisense strand to SEQ ID NO: 2250540
cugcacaaggaauuucucc

SEQ ID NO: 2250542 - RNA, 19 nt, Artificial Sequence
  Description of Artificial Sequence: Synthetic oligonucleotide
  Sense strand starting at position 1722 of SEQ ID NO: 1884236
ccugcacagucucugagaa

SEQ ID NO: 2250543 - RNA, 19 nt, Artificial Sequence
  Description of Artificial Sequence: Synthetic oligonucleotide
  Antisense strand to SEQ ID NO: 2250542
uucucagagacugugcagg

SEQ ID NO: 2250544 - RNA, 19 nt, Artificial Sequence
  Description of Artificial Sequence: Synthetic oligonucleotide
  Sense strand starting at position 1730 of SEQ ID NO: 1884236
gucucugagaaguagcaaa

SEQ ID NO: 2250545 - RNA, 19 nt, Artificial Sequence
  Description of Artificial Sequence: Synthetic oligonucleotide
  Antisense strand to SEQ ID NO: 2250544
uuugcuacuucucagagac

SEQ ID NO: 2250546 - RNA, 19 nt, Artificial Sequence
  Description of Artificial Sequence: Synthetic oligonucleotide
  Sense strand starting at position 1808 of SEQ ID NO: 1884236
ugugucagccugucuguaa

SEQ ID NO: 2250547 - RNA, 19 nt, Artificial Sequence
  Description of Artificial Sequence: Synthetic oligonucleotide
  Antisense strand to SEQ ID NO: 2250546
uuacagacaggcugacaca

SEQ ID NO: 2250548 - RNA, 19 nt, Artificial Sequence
  Description of Artificial Sequence: Synthetic oligonucleotide
  Sense strand starting at position 1892 of SEQ ID NO: 1884236
gagagauaucuccgucaca

SEQ ID NO: 2250549 - RNA, 19 nt, Artificial Sequence
  Description of Artificial Sequence: Synthetic oligonucleotide
  Antisense strand to SEQ ID NO: 2250548
ugugacggagauaucucuc

SEQ ID NO: 2250550 - RNA, 19 nt, Artificial Sequence
  Description of Artificial Sequence: Synthetic oligonucleotide
  Sense strand starting at position 1893 of SEQ ID NO: 1884236
agagauaucuccgucacaa

SEQ ID NO: 2250551 - RNA, 19 nt, Artificial Sequence
  Description of Artificial Sequence: Synthetic oligonucleotide
  Antisense strand to SEQ ID NO: 2250550
uugugacggagauaucucu

SEQ ID NO: 2250552 - RNA, 19 nt, Artificial Sequence
  Description of Artificial Sequence: Synthetic oligonucleotide
  Sense strand starting at position 1917 of SEQ ID NO: 1884236
ugccaucuccgauauuaua

SEQ ID NO: 2250553 - RNA, 19 nt, Artificial Sequence
  Description of Artificial Sequence: Synthetic oligonucleotide
  Antisense strand to SEQ ID NO: 2250552
uauaauaucggagauggca

SEQ ID NO: 2250554 - RNA, 19 nt, Artificial Sequence
  Description of Artificial Sequence: Synthetic oligonucleotide
  Sense strand starting at position 2188 of SEQ ID NO: 1884236
ggaacuuacuaucuaugcu

SEQ ID NO: 2250555 - RNA, 19 nt, Artificial Sequence
  Description of Artificial Sequence: Synthetic oligonucleotide
  Antisense strand to SEQ ID NO: 2250554
agcauagauaguaaguucc

SEQ ID NO: 2250556 - RNA, 19 nt, Artificial Sequence
  Description of Artificial Sequence: Synthetic oligonucleotide
  Sense strand starting at position 2638 of SEQ ID NO: 1884236
cgcccagccuauuuaaaua

SEQ ID NO: 2250557 - RNA, 19 nt, Artificial Sequence
  Description of Artificial Sequence: Synthetic oligonucleotide
  Antisense strand to SEQ ID NO: 2250556
uauuuaaauaggcugggcg

SEQ ID NO: 2250558 - RNA, 19 nt, Artificial Sequence
  Description of Artificial Sequence: Synthetic oligonucleotide
  Sense strand starting at position 3030 of SEQ ID NO: 1884236
aguacuugagguuauuaau

SEQ ID NO: 2250559 - RNA, 19 nt, Artificial Sequence
  Description of Artificial Sequence: Synthetic oligonucleotide
  Antisense strand to SEQ ID NO: 2250558
auuaauaaccucaaguacu

SEQ ID NO: 2250560 - RNA, 19 nt, Artificial Sequence
  Description of Artificial Sequence: Synthetic oligonucleotide
  Sense strand starting at position 3102 of SEQ ID NO: 1884236
cagguauccgcugaagagu

SEQ ID NO: 2250561 - RNA, 19 nt, Artificial Sequence
  Description of Artificial Sequence: Synthetic oligonucleotide
  Antisense strand to SEQ ID NO: 2250560
acucuucagcggauaccug

SEQ ID NO: 2250562 - RNA, 19 nt, Artificial Sequence
  Description of Artificial Sequence: Synthetic oligonucleotide
  Sense strand starting at position 3117 of SEQ ID NO: 1884236
gagugagauucggcaugaa

SEQ ID NO: 2250563 - RNA, 19 nt, Artificial Sequence
  Description of Artificial Sequence: Synthetic oligonucleotide
  Antisense strand to SEQ ID NO: 2250562
uucaugccgaaucucacuc

SEQ ID NO: 2250564 - RNA, 19 nt, Artificial Sequence
  Description of Artificial Sequence: Synthetic oligonucleotide
  Sense strand starting at position 3233 of SEQ ID NO: 1884236
agaacaaaucgcuggguuu

SEQ ID NO: 2250565 - RNA, 19 nt, Artificial Sequence
  Description of Artificial Sequence: Synthetic oligonucleotide
  Antisense strand to SEQ ID NO: 2250564
aaacccagcgauuuguucu

SEQ ID NO: 2250566 - RNA, 19 nt, Artificial Sequence
  Description of Artificial Sequence: Synthetic oligonucleotide
  Sense strand starting at position 3338 of SEQ ID NO: 1884236
accacuuucggcugggaua

SEQ ID NO: 2250567 - RNA, 19 nt, Artificial Sequence
  Description of Artificial Sequence: Synthetic oligonucleotide
  Antisense strand to SEQ ID NO: 2250566
uaucccagccgaaaguggu

SEQ ID NO: 2250568 - RNA, 19 nt, Artificial Sequence
  Description of Artificial Sequence: Synthetic oligonucleotide
  Sense strand starting at position 3765 of SEQ ID NO: 1884236
ccuuaagcugcugacuaaa

SEQ ID NO: 2250569 - RNA, 19 nt, Artificial Sequence
  Description of Artificial Sequence: Synthetic oligonucleotide
  Antisense strand to SEQ ID NO: 2250568
uuuagucagcagcuuaagg

SEQ ID NO: 2250570 - RNA, 19 nt, Artificial Sequence
  Description of Artificial Sequence: Synthetic oligonucleotide
  Sense strand starting at position 3767 of SEQ ID NO: 1884236
uuaagcugcugacuaaauu

SEQ ID NO: 2250571 - RNA, 19 nt, Artificial Sequence
  Description of Artificial Sequence: Synthetic oligonucleotide
  Antisense strand to SEQ ID NO: 2250570
aauuuagucagcagcuuaa

SEQ ID NO: 2250572 - RNA, 19 nt, Artificial Sequence
  Description of Artificial Sequence: Synthetic oligonucleotide
  Sense strand starting at position 3938 of SEQ ID NO: 1884236
augcaagaauggucuacca

SEQ ID NO: 2250573 - RNA, 19 nt, Artificial Sequence
  Description of Artificial Sequence: Synthetic oligonucleotide
  Antisense strand to SEQ ID NO: 2250572
ugguagaccauucuugcau

SEQ ID NO: 2250574 - RNA, 19 nt, Artificial Sequence
  Description of Artificial Sequence: Synthetic oligonucleotide
  Sense strand starting at position 3940 of SEQ ID NO: 1884236
gcaagaauggucuaccacu

SEQ ID NO: 2250575 - RNA, 19 nt, Artificial Sequence
  Description of Artificial Sequence: Synthetic oligonucleotide
  Antisense strand to SEQ ID NO: 2250574
agugguagaccauucuugc

SEQ ID NO: 2250576 - RNA, 19 nt, Artificial Sequence
  Description of Artificial Sequence: Synthetic oligonucleotide
  Sense strand starting at position 21 of SEQ ID NO: 1884237
cuuucucacgcugaauauu

SEQ ID NO: 2250577 - RNA, 19 nt, Artificial Sequence
  Description of Artificial Sequence: Synthetic oligonucleotide
  Antisense strand to SEQ ID NO: 2250576
aauauucagcgugagaaag

SEQ ID NO: 2250578 - RNA, 19 nt, Artificial Sequence
  Description of Artificial Sequence: Synthetic oligonucleotide
  Sense strand starting at position 269 of SEQ ID NO: 1884237
aucugcauuugauaaugga

SEQ ID NO: 2250579 - RNA, 19 nt, Artificial Sequence
  Description of Artificial Sequence: Synthetic oligonucleotide
  Antisense strand to SEQ ID NO: 2250578
uccauuaucaaaugcagau

SEQ ID NO: 2250580 - RNA, 19 nt, Artificial Sequence
  Description of Artificial Sequence: Synthetic oligonucleotide
  Sense strand starting at position 807 of SEQ ID NO: 1884237
ugaggaauccuauguccac

SEQ ID NO: 2250581 - RNA, 19 nt, Artificial Sequence
  Description of Artificial Sequence: Synthetic oligonucleotide
  Antisense strand to SEQ ID NO: 2250580
guggacauaggauuccuca

SEQ ID NO: 2250582 - RNA, 19 nt, Artificial Sequence
  Description of Artificial Sequence: Synthetic oligonucleotide
  Sense strand starting at position 808 of SEQ ID NO: 1884237
gaggaauccuauguccacu

SEQ ID NO: 2250583 - RNA, 19 nt, Artificial Sequence
  Description of Artificial Sequence: Synthetic oligonucleotide
  Antisense strand to SEQ ID NO: 2250582
aguggacauaggauuccuc

SEQ ID NO: 2250584 - RNA, 19 nt, Artificial Sequence
  Description of Artificial Sequence: Synthetic oligonucleotide
  Sense strand starting at position 1059 of SEQ ID NO: 1884237
cgggaagaugcauaccagu

SEQ ID NO: 2250585 - RNA, 19 nt, Artificial Sequence
  Description of Artificial Sequence: Synthetic oligonucleotide
  Antisense strand to SEQ ID NO: 2250584
acugguaugcaucuucccg

SEQ ID NO: 2250586 - RNA, 19 nt, Artificial Sequence
  Description of Artificial Sequence: Synthetic oligonucleotide
  Sense strand starting at position 1065 of SEQ ID NO: 1884237
gaugcauaccaguauauga

SEQ ID NO: 2250587 - RNA, 19 nt, Artificial Sequence
  Description of Artificial Sequence: Synthetic oligonucleotide
  Antisense strand to SEQ ID NO: 2250586
ucauauacugguaugcauc

SEQ ID NO: 2250588 - RNA, 19 nt, Artificial Sequence
  Description of Artificial Sequence: Synthetic oligonucleotide
  Sense strand starting at position 1075 of SEQ ID NO: 1884237
aguauaugagcugguuuaa

SEQ ID NO: 2250589 - RNA, 19 nt, Artificial Sequence
  Description of Artificial Sequence: Synthetic oligonucleotide
  Antisense strand to SEQ ID NO: 2250588
uuaaaccagcucauauacu

SEQ ID NO: 2250590 - RNA, 19 nt, Artificial Sequence
  Description of Artificial Sequence: Synthetic oligonucleotide
  Sense strand starting at position 1190 of SEQ ID NO: 1884237
caucuucucgaguagcaua

SEQ ID NO: 2250591 - RNA, 19 nt, Artificial Sequence
  Description of Artificial Sequence: Synthetic oligonucleotide
  Antisense strand to SEQ ID NO: 2250590
uaugcuacucgagaagaug

SEQ ID NO: 2250592 - RNA, 19 nt, Artificial Sequence
  Description of Artificial Sequence: Synthetic oligonucleotide
  Sense strand starting at position 1237 of SEQ ID NO: 1884237
cgagaagugugaucaauac

SEQ ID NO: 2250593 - RNA, 19 nt, Artificial Sequence
  Description of Artificial Sequence: Synthetic oligonucleotide
  Antisense strand to SEQ ID NO: 2250592
guauugaucacacuucucg

SEQ ID NO: 2250594 - RNA, 19 nt, Artificial Sequence
  Description of Artificial Sequence: Synthetic oligonucleotide
  Sense strand starting at position 1241 of SEQ ID NO: 1884237
aagugugaucaauacgaac

SEQ ID NO: 2250595 - RNA, 19 nt, Artificial Sequence
  Description of Artificial Sequence: Synthetic oligonucleotide
  Antisense strand to SEQ ID NO: 2250594
guucguauugaucacacuu

SEQ ID NO: 2250596 - RNA, 19 nt, Artificial Sequence
  Description of Artificial Sequence: Synthetic oligonucleotide
  Sense strand starting at position 1243 of SEQ ID NO: 1884237
gugugaucaauacgaaccu

SEQ ID NO: 2250597 - RNA, 19 nt, Artificial Sequence
  Description of Artificial Sequence: Synthetic oligonucleotide
  Antisense strand to SEQ ID NO: 2250596
agguucguauugaucacac

SEQ ID NO: 2250598 - RNA, 19 nt, Artificial Sequence
  Description of Artificial Sequence: Synthetic oligonucleotide
  Sense strand starting at position 1292 of SEQ ID NO: 1884237
acaaguaagcaugaaguca

SEQ ID NO: 2250599 - RNA, 19 nt, Artificial Sequence
  Description of Artificial Sequence: Synthetic oligonucleotide
  Antisense strand to SEQ ID NO: 2250598
ugacuucaugcuuacuugu

SEQ ID NO: 2250600 - RNA, 19 nt, Artificial Sequence
  Description of Artificial Sequence: Synthetic oligonucleotide
  Sense strand starting at position 1315 of SEQ ID NO: 1884237
guaacagaagaaugucaua

SEQ ID NO: 2250601 - RNA, 19 nt, Artificial Sequence
  Description of Artificial Sequence: Synthetic oligonucleotide
  Antisense strand to SEQ ID NO: 2250600
uaugacauucuucuguuac

SEQ ID NO: 2250602 - RNA, 19 nt, Artificial Sequence
  Description of Artificial Sequence: Synthetic oligonucleotide
  Sense strand starting at position 1371 of SEQ ID NO: 1884237
augguaucacuguaccaaa

SEQ ID NO: 2250603 - RNA, 19 nt, Artificial Sequence
  Description of Artificial Sequence: Synthetic oligonucleotide
  Antisense strand to SEQ ID NO: 2250602
uuugguacagugauaccau

SEQ ID NO: 2250604 - RNA, 19 nt, Artificial Sequence
  Description of Artificial Sequence: Synthetic oligonucleotide
  Sense strand starting at position 1562 of SEQ ID NO: 1884237
ucugauaaaucugugacac

SEQ ID NO: 2250605 - RNA, 19 nt, Artificial Sequence
  Description of Artificial Sequence: Synthetic oligonucleotide
  Antisense strand to SEQ ID NO: 2250604
gugucacagauuuaucaga

SEQ ID NO: 2250606 - RNA, 19 nt, Artificial Sequence
  Description of Artificial Sequence: Synthetic oligonucleotide
  Sense strand starting at position 1563 of SEQ ID NO: 1884237
cugauaaaucugugacacc

SEQ ID NO: 2250607 - RNA, 19 nt, Artificial Sequence
  Description of Artificial Sequence: Synthetic oligonucleotide
  Antisense strand to SEQ ID NO: 2250606
ggugucacagauuuaucag

SEQ ID NO: 2250608 - RNA, 19 nt, Artificial Sequence
  Description of Artificial Sequence: Synthetic oligonucleotide
  Sense strand starting at position 1572 of SEQ ID NO: 1884237
cugugacaccugcauagaa

SEQ ID NO: 2250609 - RNA, 19 nt, Artificial Sequence
  Description of Artificial Sequence: Synthetic oligonucleotide
  Antisense strand to SEQ ID NO: 2250608
uucuaugcaggugucacag

SEQ ID NO: 2250610 - RNA, 19 nt, Artificial Sequence
  Description of Artificial Sequence: Synthetic oligonucleotide
  Sense strand starting at position 1638 of SEQ ID NO: 1884237
gugcaaucucaugacaguc

SEQ ID NO: 2250611 - RNA, 19 nt, Artificial Sequence
  Description of Artificial Sequence: Synthetic oligonucleotide
  Antisense strand to SEQ ID NO: 2250610
gacugucaugagauugcac

SEQ ID NO: 2250612 - RNA, 19 nt, Artificial Sequence
  Description of Artificial Sequence: Synthetic oligonucleotide
  Sense strand starting at position 1648 of SEQ ID NO: 1884237
augacagucaugggaagua

SEQ ID NO: 2250613 - RNA, 19 nt, Artificial Sequence
  Description of Artificial Sequence: Synthetic oligonucleotide
  Antisense strand to SEQ ID NO: 2250612
uacuucccaugacugucau

SEQ ID NO: 2250614 - RNA, 19 nt, Artificial Sequence
  Description of Artificial Sequence: Synthetic oligonucleotide
  Sense strand starting at position 1701 of SEQ ID NO: 1884237
uuguuaaagccagaaugcu

SEQ ID NO: 2250615 - RNA, 19 nt, Artificial Sequence
  Description of Artificial Sequence: Synthetic oligonucleotide
  Antisense strand to SEQ ID NO: 2250614
agcauucuggcuuuaacaa

SEQ ID NO: 2250616 - RNA, 19 nt, Artificial Sequence
  Description of Artificial Sequence: Synthetic oligonucleotide
  Sense strand starting at position 1710 of SEQ ID NO: 1884237
ccagaaugcuaaucccaga

SEQ ID NO: 2250617 - RNA, 19 nt, Artificial Sequence
  Description of Artificial Sequence: Synthetic oligonucleotide
  Antisense strand to SEQ ID NO: 2250616
ucugggauuagcauucugg

SEQ ID NO: 2250618 - RNA, 19 nt, Artificial Sequence
  Description of Artificial Sequence: Synthetic oligonucleotide
  Sense strand starting at position 1831 of SEQ ID NO: 1884237
accugcuacuuaccgaaua

SEQ ID NO: 2250619 - RNA, 19 nt, Artificial Sequence
  Description of Artificial Sequence: Synthetic oligonucleotide
  Antisense strand to SEQ ID NO: 2250618
uauucgguaaguagcaggu

SEQ ID NO: 2250620 - RNA, 19 nt, Artificial Sequence
  Description of Artificial Sequence: Synthetic oligonucleotide
  Sense strand starting at position 1977 of SEQ ID NO: 1884237
aaagcaggucaaugaaaug

SEQ ID NO: 2250621 - RNA, 19 nt, Artificial Sequence
  Description of Artificial Sequence: Synthetic oligonucleotide
  Antisense strand to SEQ ID NO: 2250620
cauuucauugaccugcuuu

SEQ ID NO: 2250622 - RNA, 19 nt, Artificial Sequence
  Description of Artificial Sequence: Synthetic oligonucleotide
  Sense strand starting at position 2152 of SEQ ID NO: 1884237
gcuucugaauagcuauuaa

SEQ ID NO: 2250623 - RNA, 19 nt, Artificial Sequence
  Description of Artificial Sequence: Synthetic oligonucleotide
  Antisense strand to SEQ ID NO: 2250622
uuaauagcuauucagaagc

SEQ ID NO: 2250624 - RNA, 19 nt, Artificial Sequence
  Description of Artificial Sequence: Synthetic oligonucleotide
  Sense strand starting at position 2205 of SEQ ID NO: 1884237
cuucuuaugccacagaaag

SEQ ID NO: 2250625 - RNA, 19 nt, Artificial Sequence
  Description of Artificial Sequence: Synthetic oligonucleotide
  Antisense strand to SEQ ID NO: 2250624
cuuucuguggcauaagaag

SEQ ID NO: 2250626 - RNA, 19 nt, Artificial Sequence
  Description of Artificial Sequence: Synthetic oligonucleotide
  Sense strand starting at position 2223 of SEQ ID NO: 1884237
guaauagaaguaugcaaag

SEQ ID NO: 2250627 - RNA, 19 nt, Artificial Sequence
  Description of Artificial Sequence: Synthetic oligonucleotide
  Antisense strand to SEQ ID NO: 2250626
cuuugcauacuucuauuac

SEQ ID NO: 2250628 - RNA, 19 nt, Artificial Sequence
  Description of Artificial Sequence: Synthetic oligonucleotide
  Sense strand starting at position 2258 of SEQ ID NO: 1884237
ugcucaaugcuacaagauu

SEQ ID NO: 2250629 - RNA, 19 nt, Artificial Sequence
  Description of Artificial Sequence: Synthetic oligonucleotide
  Antisense strand to SEQ ID NO: 2250628
aaucuuguagcauugagca

SEQ ID NO: 2250630 - RNA, 19 nt, Artificial Sequence
  Description of Artificial Sequence: Synthetic oligonucleotide
  Sense strand starting at position 2838 of SEQ ID NO: 1884237
uacugauacuuguuugaag

SEQ ID NO: 2250631 - RNA, 19 nt, Artificial Sequence
  Description of Artificial Sequence: Synthetic oligonucleotide
  Antisense strand to SEQ ID NO: 2250630
cuucaaacaaguaucagua

SEQ ID NO: 2250632 - RNA, 19 nt, Artificial Sequence
  Description of Artificial Sequence: Synthetic oligonucleotide
  Sense strand starting at position 2840 of SEQ ID NO: 1884237
cugauacuuguuugaaggu

SEQ ID NO: 2250633 - RNA, 19 nt, Artificial Sequence
  Description of Artificial Sequence: Synthetic oligonucleotide
  Antisense strand to SEQ ID NO: 2250632
accuucaaacaaguaucag

SEQ ID NO: 2250634 - RNA, 19 nt, Artificial Sequence
  Description of Artificial Sequence: Synthetic oligonucleotide
  Sense strand starting at position 2863 of SEQ ID NO: 1884237
ggcagcaauggcuaaauua

SEQ ID NO: 2250635 - RNA, 19 nt, Artificial Sequence
  Description of Artificial Sequence: Synthetic oligonucleotide
  Antisense strand to SEQ ID NO: 2250634
uaauuuagccauugcugcc

SEQ ID NO: 2250636 - RNA, 19 nt, Artificial Sequence
  Description of Artificial Sequence: Synthetic oligonucleotide
  Sense strand starting at position 2908 of SEQ ID NO: 1884237
guuugcugagcacaucaga

SEQ ID NO: 2250637 - RNA, 19 nt, Artificial Sequence
  Description of Artificial Sequence: Synthetic oligonucleotide
  Antisense strand to SEQ ID NO: 2250636
ucugaugugcucagcaaac

SEQ ID NO: 2250638 - RNA, 19 nt, Artificial Sequence
  Description of Artificial Sequence: Synthetic oligonucleotide
  Sense strand starting at position 2911 of SEQ ID NO: 1884237
ugcugagcacaucagauau

SEQ ID NO: 2250639 - RNA, 19 nt, Artificial Sequence
  Description of Artificial Sequence: Synthetic oligonucleotide
  Antisense strand to SEQ ID NO: 2250638
auaucugaugugcucagca

SEQ ID NO: 2250640 - RNA, 19 nt, Artificial Sequence
  Description of Artificial Sequence: Synthetic oligonucleotide
  Sense strand starting at position 2962 of SEQ ID NO: 1884237
ugaaaugugcacugaauuc

SEQ ID NO: 2250641 - RNA, 19 nt, Artificial Sequence
  Description of Artificial Sequence: Synthetic oligonucleotide
  Antisense strand to SEQ ID NO: 2250640
gaauucagugcacauuuca

SEQ ID NO: 2250642 - RNA, 19 nt, Artificial Sequence
  Description of Artificial Sequence: Synthetic oligonucleotide
  Sense strand starting at position 3477 of SEQ ID NO: 1884237
uacuguggccaauagaaua

SEQ ID NO: 2250643 - RNA, 19 nt, Artificial Sequence
  Description of Artificial Sequence: Synthetic oligonucleotide
  Antisense strand to SEQ ID NO: 2250642
uauucuauuggccacagua

SEQ ID NO: 2250644 - RNA, 19 nt, Artificial Sequence
  Description of Artificial Sequence: Synthetic oligonucleotide
  Sense strand starting at position 3557 of SEQ ID NO: 1884237
uuaucauggcagcacuauu

SEQ ID NO: 2250645 - RNA, 19 nt, Artificial Sequence
  Description of Artificial Sequence: Synthetic oligonucleotide
  Antisense strand to SEQ ID NO: 2250644
aauagugcugccaugauaa

SEQ ID NO: 2250646 - RNA, 19 nt, Artificial Sequence
  Description of Artificial Sequence: Synthetic oligonucleotide
  Sense strand starting at position 3679 of SEQ ID NO: 1884237
caaacauagcggugagaaa

SEQ ID NO: 2250647 - RNA, 19 nt, Artificial Sequence
  Description of Artificial Sequence: Synthetic oligonucleotide
  Antisense strand to SEQ ID NO: 2250646
uuucucaccgcuauguuug

SEQ ID NO: 2250648 - RNA, 19 nt, Artificial Sequence
  Description of Artificial Sequence: Synthetic oligonucleotide
  Sense strand starting at position 3810 of SEQ ID NO: 1884237
cacagaaguguguacccau

SEQ ID NO: 2250649 - RNA, 19 nt, Artificial Sequence
  Description of Artificial Sequence: Synthetic oligonucleotide
  Antisense strand to SEQ ID NO: 2250648
auggguacacacuucugug

SEQ ID NO: 2250650 - RNA, 19 nt, Artificial Sequence
  Description of Artificial Sequence: Synthetic oligonucleotide
  Sense strand starting at position 3813 of SEQ ID NO: 1884237
agaaguguguacccauaga

SEQ ID NO: 2250651 - RNA, 19 nt, Artificial Sequence
  Description of Artificial Sequence: Synthetic oligonucleotide
  Antisense strand to SEQ ID NO: 2250650
ucuauggguacacacuucu

SEQ ID NO: 2250652 - RNA, 19 nt, Artificial Sequence
  Description of Artificial Sequence: Synthetic oligonucleotide
  Sense strand starting at position 3853 of SEQ ID NO: 1884237
caaauauuggcagaucgca

SEQ ID NO: 2250653 - RNA, 19 nt, Artificial Sequence
  Description of Artificial Sequence: Synthetic oligonucleotide
  Antisense strand to SEQ ID NO: 2250652
ugcgaucugccaauauuug

SEQ ID NO: 2250654 - RNA, 19 nt, Artificial Sequence
  Description of Artificial Sequence: Synthetic oligonucleotide
  Sense strand starting at position 3912 of SEQ ID NO: 1884237
gucuaagguuaacucuaau

SEQ ID NO: 2250655 - RNA, 19 nt, Artificial Sequence
  Description of Artificial Sequence: Synthetic oligonucleotide
  Antisense strand to SEQ ID NO: 2250654
auuagaguuaaccuuagac

SEQ ID NO: 2250656 - RNA, 19 nt, Artificial Sequence
  Description of Artificial Sequence: Synthetic oligonucleotide
  Sense strand starting at position 79 of SEQ ID NO: 1884238
aagccagaucugugaaaca

SEQ ID NO: 2250657 - RNA, 19 nt, Artificial Sequence
  Description of Artificial Sequence: Synthetic oligonucleotide
  Antisense strand to SEQ ID NO: 2250656
uguuucacagaucuggcuu

SEQ ID NO: 2250658 - RNA, 19 nt, Artificial Sequence
  Description of Artificial Sequence: Synthetic oligonucleotide
  Sense strand starting at position 209 of SEQ ID NO: 1884238
cugauuuagucagaccuuu

SEQ ID NO: 2250659 - RNA, 19 nt, Artificial Sequence
  Description of Artificial Sequence: Synthetic oligonucleotide
  Antisense strand to SEQ ID NO: 2250658
aaaggucugacuaaaucag

SEQ ID NO: 2250660 - RNA, 19 nt, Artificial Sequence
  Description of Artificial Sequence: Synthetic oligonucleotide
  Sense strand starting at position 215 of SEQ ID NO: 1884238
uagucagaccuuugaaaug

SEQ ID NO: 2250661 - RNA, 19 nt, Artificial Sequence
  Description of Artificial Sequence: Synthetic oligonucleotide
  Antisense strand to SEQ ID NO: 2250660
cauuucaaaggucugacua

SEQ ID NO: 2250662 - RNA, 19 nt, Artificial Sequence
  Description of Artificial Sequence: Synthetic oligonucleotide
  Sense strand starting at position 246 of SEQ ID NO: 1884238
ugccacauagccugaaauu

SEQ ID NO: 2250663 - RNA, 19 nt, Artificial Sequence
  Description of Artificial Sequence: Synthetic oligonucleotide
  Antisense strand to SEQ ID NO: 2250662
aauuucaggcuauguggca

SEQ ID NO: 2250664 - RNA, 19 nt, Artificial Sequence
  Description of Artificial Sequence: Synthetic oligonucleotide
  Sense strand starting at position 278 of SEQ ID NO: 1884238
acuugugguuguccaauuu

SEQ ID NO: 2250665 - RNA, 19 nt, Artificial Sequence
  Description of Artificial Sequence: Synthetic oligonucleotide
  Antisense strand to SEQ ID NO: 2250664
aaauuggacaaccacaagu

SEQ ID NO: 2250666 - RNA, 19 nt, Artificial Sequence
  Description of Artificial Sequence: Synthetic oligonucleotide
  Sense strand starting at position 547 of SEQ ID NO: 1884238
acugcugaaagcuggauua

SEQ ID NO: 2250667 - RNA, 19 nt, Artificial Sequence
  Description of Artificial Sequence: Synthetic oligonucleotide
  Antisense strand to SEQ ID NO: 2250666
uaauccagcuuucagcagu

SEQ ID NO: 2250668 - RNA, 19 nt, Artificial Sequence
  Description of Artificial Sequence: Synthetic oligonucleotide
  Sense strand starting at position 571 of SEQ ID NO: 1884238
cgcuguuaccaguuauguu

SEQ ID NO: 2250669 - RNA, 19 nt, Artificial Sequence
  Description of Artificial Sequence: Synthetic oligonucleotide
  Antisense strand to SEQ ID NO: 2250668
aacauaacugguaacagcg

SEQ ID NO: 2250670 - RNA, 19 nt, Artificial Sequence
  Description of Artificial Sequence: Synthetic oligonucleotide
  Sense strand starting at position 899 of SEQ ID NO: 1884238
accuguugcaagggaagaa

SEQ ID NO: 2250671 - RNA, 19 nt, Artificial Sequence
  Description of Artificial Sequence: Synthetic oligonucleotide
  Antisense strand to SEQ ID NO: 2250670
uucuucccuugcaacaggu

SEQ ID NO: 2250672 - RNA, 19 nt, Artificial Sequence
  Description of Artificial Sequence: Synthetic oligonucleotide
  Sense strand starting at position 994 of SEQ ID NO: 1884238
gcugcaagaacuugagguu

SEQ ID NO: 2250673 - RNA, 19 nt, Artificial Sequence
  Description of Artificial Sequence: Synthetic oligonucleotide
  Antisense strand to SEQ ID NO: 2250672
aaccucaaguucuugcagc

SEQ ID NO: 2250674 - RNA, 19 nt, Artificial Sequence
  Description of Artificial Sequence: Synthetic oligonucleotide
  Sense strand starting at position 1000 of SEQ ID NO: 1884238
agaacuugagguuggucua

SEQ ID NO: 2250675 - RNA, 19 nt, Artificial Sequence
  Description of Artificial Sequence: Synthetic oligonucleotide
  Antisense strand to SEQ ID NO: 2250674
uagaccaaccucaaguucu

SEQ ID NO: 2250676 - RNA, 19 nt, Artificial Sequence
  Description of Artificial Sequence: Synthetic oligonucleotide
  Sense strand starting at position 1001 of SEQ ID NO: 1884238
gaacuugagguuggucuaa

SEQ ID NO: 2250677 - RNA, 19 nt, Artificial Sequence
  Description of Artificial Sequence: Synthetic oligonucleotide
  Antisense strand to SEQ ID NO: 2250676
uuagaccaaccucaaguuc

SEQ ID NO: 2250678 - RNA, 19 nt, Artificial Sequence
  Description of Artificial Sequence: Synthetic oligonucleotide
  Sense strand starting at position 1003 of SEQ ID NO: 1884238
acuugagguuggucuaaag

SEQ ID NO: 2250679 - RNA, 19 nt, Artificial Sequence
  Description of Artificial Sequence: Synthetic oligonucleotide
  Antisense strand to SEQ ID NO: 2250678
cuuuagaccaaccucaagu

SEQ ID NO: 2250680 - RNA, 19 nt, Artificial Sequence
  Description of Artificial Sequence: Synthetic oligonucleotide
  Sense strand starting at position 1054 of SEQ ID NO: 1884238
uugguacauuuguacaaua

SEQ ID NO: 2250681 - RNA, 19 nt, Artificial Sequence
  Description of Artificial Sequence: Synthetic oligonucleotide
  Antisense strand to SEQ ID NO: 2250680
uauuguacaaauguaccaa

SEQ ID NO: 2250682 - RNA, 19 nt, Artificial Sequence
  Description of Artificial Sequence: Synthetic oligonucleotide
  Sense strand starting at position 1339 of SEQ ID NO: 1884238
gacgaucuucuccagcuau

SEQ ID NO: 2250683 - RNA, 19 nt, Artificial Sequence
  Description of Artificial Sequence: Synthetic oligonucleotide
  Antisense strand to SEQ ID NO: 2250682
auagcuggagaagaucguc

SEQ ID NO: 2250684 - RNA, 19 nt, Artificial Sequence
  Description of Artificial Sequence: Synthetic oligonucleotide
  Sense strand starting at position 1349 of SEQ ID NO: 1884238
uccagcuaugcaugaaaug

SEQ ID NO: 2250685 - RNA, 19 nt, Artificial Sequence
  Description of Artificial Sequence: Synthetic oligonucleotide
  Antisense strand to SEQ ID NO: 2250684
cauuucaugcauagcugga

SEQ ID NO: 2250686 - RNA, 19 nt, Artificial Sequence
  Description of Artificial Sequence: Synthetic oligonucleotide
  Sense strand starting at position 1350 of SEQ ID NO: 1884238
ccagcuaugcaugaaauga

SEQ ID NO: 2250687 - RNA, 19 nt, Artificial Sequence
  Description of Artificial Sequence: Synthetic oligonucleotide
  Antisense strand to SEQ ID NO: 2250686
ucauuucaugcauagcugg

SEQ ID NO: 2250688 - RNA, 19 nt, Artificial Sequence
  Description of Artificial Sequence: Synthetic oligonucleotide
  Sense strand starting at position 1513 of SEQ ID NO: 1884238
cuuugagauuaccugcauu

SEQ ID NO: 2250689 - RNA, 19 nt, Artificial Sequence
  Description of Artificial Sequence: Synthetic oligonucleotide
  Antisense strand to SEQ ID NO: 2250688
aaugcagguaaucucaaag

SEQ ID NO: 2250690 - RNA, 19 nt, Artificial Sequence
  Description of Artificial Sequence: Synthetic oligonucleotide
  Sense strand starting at position 1516 of SEQ ID NO: 1884238
ugagauuaccugcauugac

SEQ ID NO: 2250691 - RNA, 19 nt, Artificial Sequence
  Description of Artificial Sequence: Synthetic oligonucleotide
  Antisense strand to SEQ ID NO: 2250690
gucaaugcagguaaucuca

SEQ ID NO: 2250692 - RNA, 19 nt, Artificial Sequence
  Description of Artificial Sequence: Synthetic oligonucleotide
  Sense strand starting at position 1859 of SEQ ID NO: 1884238
uaagauacuugagaaggaa

SEQ ID NO: 2250693 - RNA, 19 nt, Artificial Sequence
  Description of Artificial Sequence: Synthetic oligonucleotide
  Antisense strand to SEQ ID NO: 2250692
uuccuucucaaguaucuua

SEQ ID NO: 2250694 - RNA, 19 nt, Artificial Sequence
  Description of Artificial Sequence: Synthetic oligonucleotide
  Sense strand starting at position 1916 of SEQ ID NO: 1884238
guaucugucagucaaggaa

SEQ ID NO: 2250695 - RNA, 19 nt, Artificial Sequence
  Description of Artificial Sequence: Synthetic oligonucleotide
  Antisense strand to SEQ ID NO: 2250694
uuccuugacugacagauac

SEQ ID NO: 2250696 - RNA, 19 nt, Artificial Sequence
  Description of Artificial Sequence: Synthetic oligonucleotide
  Sense strand starting at position 1920 of SEQ ID NO: 1884238
cugucagucaaggaagagu

SEQ ID NO: 2250697 - RNA, 19 nt, Artificial Sequence
  Description of Artificial Sequence: Synthetic oligonucleotide
  Antisense strand to SEQ ID NO: 2250696
acucuuccuugacugacag

SEQ ID NO: 2250698 - RNA, 19 nt, Artificial Sequence
  Description of Artificial Sequence: Synthetic oligonucleotide
  Sense strand starting at position 2146 of SEQ ID NO: 1884238
gaacuaguagcguacaaau

SEQ ID NO: 2250699 - RNA, 19 nt, Artificial Sequence
  Description of Artificial Sequence: Synthetic oligonucleotide
  Antisense strand to SEQ ID NO: 2250698
auuuguacgcuacuaguuc

SEQ ID NO: 2250700 - RNA, 19 nt, Artificial Sequence
  Description of Artificial Sequence: Synthetic oligonucleotide
  Sense strand starting at position 2148 of SEQ ID NO: 1884238
acuaguagcguacaaauaa

SEQ ID NO: 2250701 - RNA, 19 nt, Artificial Sequence
  Description of Artificial Sequence: Synthetic oligonucleotide
  Antisense strand to SEQ ID NO: 2250700
uuauuuguacgcuacuagu

SEQ ID NO: 2250702 - RNA, 19 nt, Artificial Sequence
  Description of Artificial Sequence: Synthetic oligonucleotide
  Sense strand starting at position 2172 of SEQ ID NO: 1884238
aguuguaaucugcaaugag

SEQ ID NO: 2250703 - RNA, 19 nt, Artificial Sequence
  Description of Artificial Sequence: Synthetic oligonucleotide
  Antisense strand to SEQ ID NO: 2250702
cucauugcagauuacaacu

SEQ ID NO: 2250704 - RNA, 19 nt, Artificial Sequence
  Description of Artificial Sequence: Synthetic oligonucleotide
  Sense strand starting at position 2175 of SEQ ID NO: 1884238
uguaaucugcaaugagaaa

SEQ ID NO: 2250705 - RNA, 19 nt, Artificial Sequence
  Description of Artificial Sequence: Synthetic oligonucleotide
  Antisense strand to SEQ ID NO: 2250704
uuucucauugcagauuaca

SEQ ID NO: 2250706 - RNA, 19 nt, Artificial Sequence
  Description of Artificial Sequence: Synthetic oligonucleotide
  Sense strand starting at position 2207 of SEQ ID NO: 1884238
uuaaauucugggugccuua

SEQ ID NO: 2250707 - RNA, 19 nt, Artificial Sequence
  Description of Artificial Sequence: Synthetic oligonucleotide
  Antisense strand to SEQ ID NO: 2250706
uaaggcacccagaauuuaa

SEQ ID NO: 2250708 - RNA, 19 nt, Artificial Sequence
  Description of Artificial Sequence: Synthetic oligonucleotide
  Sense strand starting at position 2210 of SEQ ID NO: 1884238
aauucugggugccuuaaua

SEQ ID NO: 2250709 - RNA, 19 nt, Artificial Sequence
  Description of Artificial Sequence: Synthetic oligonucleotide
  Antisense strand to SEQ ID NO: 2250708
uauuaaggcacccagaauu

SEQ ID NO: 2250710 - RNA, 19 nt, Artificial Sequence
  Description of Artificial Sequence: Synthetic oligonucleotide
  Sense strand starting at position 2652 of SEQ ID NO: 1884238
aggccuagauaccuuauaa

SEQ ID NO: 2250711 - RNA, 19 nt, Artificial Sequence
  Description of Artificial Sequence: Synthetic oligonucleotide
  Antisense strand to SEQ ID NO: 2250710
uuauaagguaucuaggccu

SEQ ID NO: 2250712 - RNA, 19 nt, Artificial Sequence
  Description of Artificial Sequence: Synthetic oligonucleotide
  Sense strand starting at position 2750 of SEQ ID NO: 1884238
acugaauguuucccuuaag

SEQ ID NO: 2250713 - RNA, 19 nt, Artificial Sequence
  Description of Artificial Sequence: Synthetic oligonucleotide
  Antisense strand to SEQ ID NO: 2250712
cuuaagggaaacauucagu

SEQ ID NO: 2250714 - RNA, 19 nt, Artificial Sequence
  Description of Artificial Sequence: Synthetic oligonucleotide
  Sense strand starting at position 2751 of SEQ ID NO: 1884238
cugaauguuucccuuaaga

SEQ ID NO: 2250715 - RNA, 19 nt, Artificial Sequence
  Description of Artificial Sequence: Synthetic oligonucleotide
  Antisense strand to SEQ ID NO: 2250714
ucuuaagggaaacauucag

SEQ ID NO: 2250716 - RNA, 19 nt, Artificial Sequence
  Description of Artificial Sequence: Synthetic oligonucleotide
  Sense strand starting at position 2987 of SEQ ID NO: 1884238
gguauucgggucuaccuaa

SEQ ID NO: 2250717 - RNA, 19 nt, Artificial Sequence
  Description of Artificial Sequence: Synthetic oligonucleotide
  Antisense strand to SEQ ID NO: 2250716
uuagguagacccgaauacc

SEQ ID NO: 2250718 - RNA, 19 nt, Artificial Sequence
  Description of Artificial Sequence: Synthetic oligonucleotide
  Sense strand starting at position 3342 of SEQ ID NO: 1884238
gugaauaaauagccuuaau

SEQ ID NO: 2250719 - RNA, 19 nt, Artificial Sequence
  Description of Artificial Sequence: Synthetic oligonucleotide
  Antisense strand to SEQ ID NO: 2250718
auuaaggcuauuuauucac

SEQ ID NO: 2250720 - RNA, 19 nt, Artificial Sequence
  Description of Artificial Sequence: Synthetic oligonucleotide
  Sense strand starting at position 3453 of SEQ ID NO: 1884238
gcuauagauuugcauagag

SEQ ID NO: 2250721 - RNA, 19 nt, Artificial Sequence
  Description of Artificial Sequence: Synthetic oligonucleotide
  Antisense strand to SEQ ID NO: 2250720
cucuaugcaaaucuauagc

SEQ ID NO: 2250722 - RNA, 19 nt, Artificial Sequence
  Description of Artificial Sequence: Synthetic oligonucleotide
  Sense strand starting at position 3632 of SEQ ID NO: 1884238
guuggaacuguggauuacu

SEQ ID NO: 2250723 - RNA, 19 nt, Artificial Sequence
  Description of Artificial Sequence: Synthetic oligonucleotide
  Antisense strand to SEQ ID NO: 2250722
aguaauccacaguuccaac

SEQ ID NO: 2250724 - RNA, 19 nt, Artificial Sequence
  Description of Artificial Sequence: Synthetic oligonucleotide
  Sense strand starting at position 3637 of SEQ ID NO: 1884238
aacuguggauuacuugaaa

SEQ ID NO: 2250725 - RNA, 19 nt, Artificial Sequence
  Description of Artificial Sequence: Synthetic oligonucleotide
  Antisense strand to SEQ ID NO: 2250724
uuucaaguaauccacaguu

SEQ ID NO: 2250726 - RNA, 19 nt, Artificial Sequence
  Description of Artificial Sequence: Synthetic oligonucleotide
  Sense strand starting at position 3685 of SEQ ID NO: 1884238
cagcaaugagaguauuagu

SEQ ID NO: 2250727 - RNA, 19 nt, Artificial Sequence
  Description of Artificial Sequence: Synthetic oligonucleotide
  Antisense strand to SEQ ID NO: 2250726
acuaauacucucauugcug

SEQ ID NO: 2250728 - RNA, 19 nt, Artificial Sequence
  Description of Artificial Sequence: Synthetic oligonucleotide
  Sense strand starting at position 3833 of SEQ ID NO: 1884238
ucauauguuccuuggauua

SEQ ID NO: 2250729 - RNA, 19 nt, Artificial Sequence
  Description of Artificial Sequence: Synthetic oligonucleotide
  Antisense strand to SEQ ID NO: 2250728
uaauccaaggaacauauga

SEQ ID NO: 2250730 - RNA, 19 nt, Artificial Sequence
  Description of Artificial Sequence: Synthetic oligonucleotide
  Sense strand starting at position 3866 of SEQ ID NO: 1884238
acccuuucucugugaauga

SEQ ID NO: 2250731 - RNA, 19 nt, Artificial Sequence
  Description of Artificial Sequence: Synthetic oligonucleotide
  Antisense strand to SEQ ID NO: 2250730
ucauucacagagaaagggu

SEQ ID NO: 2250732 - RNA, 19 nt, Artificial Sequence
  Description of Artificial Sequence: Synthetic oligonucleotide
  Sense strand starting at position 3870 of SEQ ID NO: 1884238
uuucucugugaaugauuaa

SEQ ID NO: 2250733 - RNA, 19 nt, Artificial Sequence
  Description of Artificial Sequence: Synthetic oligonucleotide
  Antisense strand to SEQ ID NO: 2250732
uuaaucauucacagagaaa

SEQ ID NO: 2250734 - RNA, 19 nt, Artificial Sequence
  Description of Artificial Sequence: Synthetic oligonucleotide
  Sense strand starting at position 3873 of SEQ ID NO: 1884238
cucugugaaugauuaagau

SEQ ID NO: 2250735 - RNA, 19 nt, Artificial Sequence
  Description of Artificial Sequence: Synthetic oligonucleotide
  Antisense strand to SEQ ID NO: 2250734
aucuuaaucauucacagag

SEQ ID NO: 2250736 - RNA, 19 nt, Artificial Sequence
  Description of Artificial Sequence: Synthetic oligonucleotide
  Sense strand starting at position 123 of SEQ ID NO: 1884239
gaggaaucauccuugacgu

SEQ ID NO: 2250737 - RNA, 19 nt, Artificial Sequence
  Description of Artificial Sequence: Synthetic oligonucleotide
  Antisense strand to SEQ ID NO: 2250736
acgucaaggaugauuccuc

SEQ ID NO: 2250738 - RNA, 19 nt, Artificial Sequence
  Description of Artificial Sequence: Synthetic oligonucleotide
  Sense strand starting at position 125 of SEQ ID NO: 1884239
ggaaucauccuugacgugu

SEQ ID NO: 2250739 - RNA, 19 nt, Artificial Sequence
  Description of Artificial Sequence: Synthetic oligonucleotide
  Antisense strand to SEQ ID NO: 2250738
acacgucaaggaugauucc

SEQ ID NO: 2250740 - RNA, 19 nt, Artificial Sequence
  Description of Artificial Sequence: Synthetic oligonucleotide
  Sense strand starting at position 131 of SEQ ID NO: 1884239
auccuugacguguaacaca

SEQ ID NO: 2250741 - RNA, 19 nt, Artificial Sequence
  Description of Artificial Sequence: Synthetic oligonucleotide
  Antisense strand to SEQ ID NO: 2250740
uguguuacacgucaaggau

SEQ ID NO: 2250742 - RNA, 19 nt, Artificial Sequence
  Description of Artificial Sequence: Synthetic oligonucleotide
  Sense strand starting at position 198 of SEQ ID NO: 1884239
aauguuagagauggacuuu

SEQ ID NO: 2250743 - RNA, 19 nt, Artificial Sequence
  Description of Artificial Sequence: Synthetic oligonucleotide
  Antisense strand to SEQ ID NO: 2250742
aaaguccaucucuaacauu

SEQ ID NO: 2250744 - RNA, 19 nt, Artificial Sequence
  Description of Artificial Sequence: Synthetic oligonucleotide
  Sense strand starting at position 207 of SEQ ID NO: 1884239
gauggacuuugagcucaaa

SEQ ID NO: 2250745 - RNA, 19 nt, Artificial Sequence
  Description of Artificial Sequence: Synthetic oligonucleotide
  Antisense strand to SEQ ID NO: 2250744
uuugagcucaaaguccauc

SEQ ID NO: 2250746 - RNA, 19 nt, Artificial Sequence
  Description of Artificial Sequence: Synthetic oligonucleotide
  Sense strand starting at position 273 of SEQ ID NO: 1884239
aggauaaacuguuugcuca

SEQ ID NO: 2250747 - RNA, 19 nt, Artificial Sequence
  Description of Artificial Sequence: Synthetic oligonucleotide
  Antisense strand to SEQ ID NO: 2250746
ugagcaaacaguuuauccu

SEQ ID NO: 2250748 - RNA, 19 nt, Artificial Sequence
  Description of Artificial Sequence: Synthetic oligonucleotide
  Sense strand starting at position 427 of SEQ ID NO: 1884239
ugaaguuggcagugaagau

SEQ ID NO: 2250749 - RNA, 19 nt, Artificial Sequence
  Description of Artificial Sequence: Synthetic oligonucleotide
  Antisense strand to SEQ ID NO: 2250748
aucuucacugccaacuuca

SEQ ID NO: 2250750 - RNA, 19 nt, Artificial Sequence
  Description of Artificial Sequence: Synthetic oligonucleotide
  Sense strand starting at position 428 of SEQ ID NO: 1884239
gaaguuggcagugaagauu

SEQ ID NO: 2250751 - RNA, 19 nt, Artificial Sequence
  Description of Artificial Sequence: Synthetic oligonucleotide
  Antisense strand to SEQ ID NO: 2250750
aaucuucacugccaacuuc

SEQ ID NO: 2250752 - RNA, 19 nt, Artificial Sequence
  Description of Artificial Sequence: Synthetic oligonucleotide
  Sense strand starting at position 440 of SEQ ID NO: 1884239
gaagauuugcagcgcucaa

SEQ ID NO: 2250753 - RNA, 19 nt, Artificial Sequence
  Description of Artificial Sequence: Synthetic oligonucleotide
  Antisense strand to SEQ ID NO: 2250752
uugagcgcugcaaaucuuc

SEQ ID NO: 2250754 - RNA, 19 nt, Artificial Sequence
  Description of Artificial Sequence: Synthetic oligonucleotide
  Sense strand starting at position 519 of SEQ ID NO: 1884239
gugugcuugggcucaguau

SEQ ID NO: 2250755 - RNA, 19 nt, Artificial Sequence
  Description of Artificial Sequence: Synthetic oligonucleotide
  Antisense strand to SEQ ID NO: 2250754
auacugagcccaagcacac

SEQ ID NO: 2250756 - RNA, 19 nt, Artificial Sequence
  Description of Artificial Sequence: Synthetic oligonucleotide
  Sense strand starting at position 676 of SEQ ID NO: 1884239
gcaauuugcugggcccaga

SEQ ID NO: 2250757 - RNA, 19 nt, Artificial Sequence
  Description of Artificial Sequence: Synthetic oligonucleotide
  Antisense strand to SEQ ID NO: 2250756
ucugggcccagcaaauugc

SEQ ID NO: 2250758 - RNA, 19 nt, Artificial Sequence
  Description of Artificial Sequence: Synthetic oligonucleotide
  Sense strand starting at position 734 of SEQ ID NO: 1884239
gaggacauuccuggucaag

SEQ ID NO: 2250759 - RNA, 19 nt, Artificial Sequence
  Description of Artificial Sequence: Synthetic oligonucleotide
  Antisense strand to SEQ ID NO: 2250758
cuugaccaggaauguccuc

SEQ ID NO: 2250760 - RNA, 19 nt, Artificial Sequence
  Description of Artificial Sequence: Synthetic oligonucleotide
  Sense strand starting at position 807 of SEQ ID NO: 1884239
uggagaguggccugggaau

SEQ ID NO: 2250761 - RNA, 19 nt, Artificial Sequence
  Description of Artificial Sequence: Synthetic oligonucleotide
  Antisense strand to SEQ ID NO: 2250760
auucccaggccacucucca

SEQ ID NO: 2250762 - RNA, 19 nt, Artificial Sequence
  Description of Artificial Sequence: Synthetic oligonucleotide
  Sense strand starting at position 909 of SEQ ID NO: 1884239
ucuugcucucuggaauaau

SEQ ID NO: 2250763 - RNA, 19 nt, Artificial Sequence
  Description of Artificial Sequence: Synthetic oligonucleotide
  Antisense strand to SEQ ID NO: 2250762
auuauuccagagagcaaga

SEQ ID NO: 2250764 - RNA, 19 nt, Artificial Sequence
  Description of Artificial Sequence: Synthetic oligonucleotide
  Sense strand starting at position 992 of SEQ ID NO: 1884239
ggaaaugacuucccuuuga

SEQ ID NO: 2250765 - RNA, 19 nt, Artificial Sequence
  Description of Artificial Sequence: Synthetic oligonucleotide
  Antisense strand to SEQ ID NO: 2250764
ucaaagggaagucauuucc

SEQ ID NO: 2250766 - RNA, 19 nt, Artificial Sequence
  Description of Artificial Sequence: Synthetic oligonucleotide
  Sense strand starting at position 996 of SEQ ID NO: 1884239
augacuucccuuugaaguu

SEQ ID NO: 2250767 - RNA, 19 nt, Artificial Sequence
  Description of Artificial Sequence: Synthetic oligonucleotide
  Antisense strand to SEQ ID NO: 2250766
aacuucaaagggaagucau

SEQ ID NO: 2250768 - RNA, 19 nt, Artificial Sequence
  Description of Artificial Sequence: Synthetic oligonucleotide
  Sense strand starting at position 1085 of SEQ ID NO: 1884239
gugcuugcugggagcagaa

SEQ ID NO: 2250769 - RNA, 19 nt, Artificial Sequence
  Description of Artificial Sequence: Synthetic oligonucleotide
  Antisense strand to SEQ ID NO: 2250768
uucugcucccagcaagcac

SEQ ID NO: 2250770 - RNA, 19 nt, Artificial Sequence
  Description of Artificial Sequence: Synthetic oligonucleotide
  Sense strand starting at position 1285 of SEQ ID NO: 1884239
aaacauggccugugacaau

SEQ ID NO: 2250771 - RNA, 19 nt, Artificial Sequence
  Description of Artificial Sequence: Synthetic oligonucleotide
  Antisense strand to SEQ ID NO: 2250770
auugucacaggccauguuu

SEQ ID NO: 2250772 - RNA, 19 nt, Artificial Sequence
  Description of Artificial Sequence: Synthetic oligonucleotide
  Sense strand starting at position 1473 of SEQ ID NO: 1884239
uuguguagugcuccuuagu

SEQ ID NO: 2250773 - RNA, 19 nt, Artificial Sequence
  Description of Artificial Sequence: Synthetic oligonucleotide
  Antisense strand to SEQ ID NO: 2250772
acuaaggagcacuacacaa

SEQ ID NO: 2250774 - RNA, 19 nt, Artificial Sequence
  Description of Artificial Sequence: Synthetic oligonucleotide
  Sense strand starting at position 1474 of SEQ ID NO: 1884239
uguguagugcuccuuagua

SEQ ID NO: 2250775 - RNA, 19 nt, Artificial Sequence
  Description of Artificial Sequence: Synthetic oligonucleotide
  Antisense strand to SEQ ID NO: 2250774
uacuaaggagcacuacaca

SEQ ID NO: 2250776 - RNA, 19 nt, Artificial Sequence
  Description of Artificial Sequence: Synthetic oligonucleotide
  Sense strand starting at position 1504 of SEQ ID NO: 1884239
cugggauuguucuuaacaa

SEQ ID NO: 2250777 - RNA, 19 nt, Artificial Sequence
  Description of Artificial Sequence: Synthetic oligonucleotide
  Antisense strand to SEQ ID NO: 2250776
uuguuaagaacaaucccag

SEQ ID NO: 2250778 - RNA, 19 nt, Artificial Sequence
  Description of Artificial Sequence: Synthetic oligonucleotide
  Sense strand starting at position 1530 of SEQ ID NO: 1884239
ugaguuucucuaggaauua

SEQ ID NO: 2250779 - RNA, 19 nt, Artificial Sequence
  Description of Artificial Sequence: Synthetic oligonucleotide
  Antisense strand to SEQ ID NO: 2250778
uaauuccuagagaaacuca

SEQ ID NO: 2250780 - RNA, 19 nt, Artificial Sequence
  Description of Artificial Sequence: Synthetic oligonucleotide
  Sense strand starting at position 1654 of SEQ ID NO: 1884239
aaucuaaggcucugguaag

SEQ ID NO: 2250781 - RNA, 19 nt, Artificial Sequence
  Description of Artificial Sequence: Synthetic oligonucleotide
  Antisense strand to SEQ ID NO: 2250780
cuuaccagagccuuagauu

SEQ ID NO: 2250782 - RNA, 19 nt, Artificial Sequence
  Description of Artificial Sequence: Synthetic oligonucleotide
  Sense strand starting at position 1835 of SEQ ID NO: 1884239
cuuggugaggucuauuaaa

SEQ ID NO: 2250783 - RNA, 19 nt, Artificial Sequence
  Description of Artificial Sequence: Synthetic oligonucleotide
  Antisense strand to SEQ ID NO: 2250782
uuuaauagaccucaccaag

SEQ ID NO: 2250784 - RNA, 19 nt, Artificial Sequence
  Description of Artificial Sequence: Synthetic oligonucleotide
  Sense strand starting at position 1882 of SEQ ID NO: 1884239
gugcauguuggacagaacu

SEQ ID NO: 2250785 - RNA, 19 nt, Artificial Sequence
  Description of Artificial Sequence: Synthetic oligonucleotide
  Antisense strand to SEQ ID NO: 2250784
aguucuguccaacaugcac

SEQ ID NO: 2250786 - RNA, 19 nt, Artificial Sequence
  Description of Artificial Sequence: Synthetic oligonucleotide
  Sense strand starting at position 1938 of SEQ ID NO: 1884239
gugauucgguuucccauuu

SEQ ID NO: 2250787 - RNA, 19 nt, Artificial Sequence
  Description of Artificial Sequence: Synthetic oligonucleotide
  Antisense strand to SEQ ID NO: 2250786
aaaugggaaaccgaaucac

SEQ ID NO: 2250788 - RNA, 19 nt, Artificial Sequence
  Description of Artificial Sequence: Synthetic oligonucleotide
  Sense strand starting at position 2071 of SEQ ID NO: 1884239
gcucaucaccauggaaaca

SEQ ID NO: 2250789 - RNA, 19 nt, Artificial Sequence
  Description of Artificial Sequence: Synthetic oligonucleotide
  Antisense strand to SEQ ID NO: 2250788
uguuuccauggugaugagc

SEQ ID NO: 2250790 - RNA, 19 nt, Artificial Sequence
  Description of Artificial Sequence: Synthetic oligonucleotide
  Sense strand starting at position 2251 of SEQ ID NO: 1884239
agaaucuaaccaugagcca

SEQ ID NO: 2250791 - RNA, 19 nt, Artificial Sequence
  Description of Artificial Sequence: Synthetic oligonucleotide
  Antisense strand to SEQ ID NO: 2250790
uggcucaugguuagauucu

SEQ ID NO: 2250792 - RNA, 19 nt, Artificial Sequence
  Description of Artificial Sequence: Synthetic oligonucleotide
  Sense strand starting at position 2651 of SEQ ID NO: 1884239
gucucuuuggacuauugga

SEQ ID NO: 2250793 - RNA, 19 nt, Artificial Sequence
  Description of Artificial Sequence: Synthetic oligonucleotide
  Antisense strand to SEQ ID NO: 2250792
uccaauaguccaaagagac

SEQ ID NO: 2250794 - RNA, 19 nt, Artificial Sequence
  Description of Artificial Sequence: Synthetic oligonucleotide
  Sense strand starting at position 2752 of SEQ ID NO: 1884239
cuguguucucaugcagcuu

SEQ ID NO: 2250795 - RNA, 19 nt, Artificial Sequence
  Description of Artificial Sequence: Synthetic oligonucleotide
  Antisense strand to SEQ ID NO: 2250794
aagcugcaugagaacacag

SEQ ID NO: 2250796 - RNA, 19 nt, Artificial Sequence
  Description of Artificial Sequence: Synthetic oligonucleotide
  Sense strand starting at position 2819 of SEQ ID NO: 1884239
uggagacaauuaucaaguu

SEQ ID NO: 2250797 - RNA, 19 nt, Artificial Sequence
  Description of Artificial Sequence: Synthetic oligonucleotide
  Antisense strand to SEQ ID NO: 2250796
aacuugauaauugucucca

SEQ ID NO: 2250798 - RNA, 19 nt, Artificial Sequence
  Description of Artificial Sequence: Synthetic oligonucleotide
  Sense strand starting at position 2926 of SEQ ID NO: 1884239
ggaacuacuuauguuugua

SEQ ID NO: 2250799 - RNA, 19 nt, Artificial Sequence
  Description of Artificial Sequence: Synthetic oligonucleotide
  Antisense strand to SEQ ID NO: 2250798
uacaaacauaaguaguucc

SEQ ID NO: 2250800 - RNA, 19 nt, Artificial Sequence
  Description of Artificial Sequence: Synthetic oligonucleotide
  Sense strand starting at position 2947 of SEQ ID NO: 1884239
uuauuaaauuugggacaag

SEQ ID NO: 2250801 - RNA, 19 nt, Artificial Sequence
  Description of Artificial Sequence: Synthetic oligonucleotide
  Antisense strand to SEQ ID NO: 2250800
cuugucccaaauuuaauaa

SEQ ID NO: 2250802 - RNA, 19 nt, Artificial Sequence
  Description of Artificial Sequence: Synthetic oligonucleotide
  Sense strand starting at position 3302 of SEQ ID NO: 1884239
uauggucugcuacagaaau

SEQ ID NO: 2250803 - RNA, 19 nt, Artificial Sequence
  Description of Artificial Sequence: Synthetic oligonucleotide
  Antisense strand to SEQ ID NO: 2250802
auuucuguagcagaccaua

SEQ ID NO: 2250804 - RNA, 19 nt, Artificial Sequence
  Description of Artificial Sequence: Synthetic oligonucleotide
  Sense strand starting at position 3432 of SEQ ID NO: 1884239
aguaacaagugagcauuaa

SEQ ID NO: 2250805 - RNA, 19 nt, Artificial Sequence
  Description of Artificial Sequence: Synthetic oligonucleotide
  Antisense strand to SEQ ID NO: 2250804
uuaaugcucacuuguuacu

SEQ ID NO: 2250806 - RNA, 19 nt, Artificial Sequence
  Description of Artificial Sequence: Synthetic oligonucleotide
  Sense strand starting at position 3433 of SEQ ID NO: 1884239
guaacaagugagcauuaaa

SEQ ID NO: 2250807 - RNA, 19 nt, Artificial Sequence
  Description of Artificial Sequence: Synthetic oligonucleotide
  Antisense strand to SEQ ID NO: 2250806
uuuaaugcucacuuguuac

SEQ ID NO: 2250808 - RNA, 19 nt, Artificial Sequence
  Description of Artificial Sequence: Synthetic oligonucleotide
  Sense strand starting at position 3695 of SEQ ID NO: 1884239
guggcaauagauggaugua

SEQ ID NO: 2250809 - RNA, 19 nt, Artificial Sequence
  Description of Artificial Sequence: Synthetic oligonucleotide
  Antisense strand to SEQ ID NO: 2250808
uacauccaucuauugccac

SEQ ID NO: 2250810 - RNA, 19 nt, Artificial Sequence
  Description of Artificial Sequence: Synthetic oligonucleotide
  Sense strand starting at position 3847 of SEQ ID NO: 1884239
ucaauuuggucuccagugu

SEQ ID NO: 2250811 - RNA, 19 nt, Artificial Sequence
  Description of Artificial Sequence: Synthetic oligonucleotide
  Antisense strand to SEQ ID NO: 2250810
acacuggagaccaaauuga

SEQ ID NO: 2250812 - RNA, 19 nt, Artificial Sequence
  Description of Artificial Sequence: Synthetic oligonucleotide
  Sense strand starting at position 3899 of SEQ ID NO: 1884239
guuggaggucugcaauuag

SEQ ID NO: 2250813 - RNA, 19 nt, Artificial Sequence
  Description of Artificial Sequence: Synthetic oligonucleotide
  Antisense strand to SEQ ID NO: 2250812
cuaauugcagaccuccaac

SEQ ID NO: 2250814 - RNA, 19 nt, Artificial Sequence
  Description of Artificial Sequence: Synthetic oligonucleotide
  Sense strand starting at position 3910 of SEQ ID NO: 1884239
gcaauuagacuuuauugca

SEQ ID NO: 2250815 - RNA, 19 nt, Artificial Sequence
  Description of Artificial Sequence: Synthetic oligonucleotide
  Antisense strand to SEQ ID NO: 2250814
ugcaauaaagucuaauugc

SEQ ID NO: 2250816 - RNA, 19 nt, Artificial Sequence
  Description of Artificial Sequence: Synthetic oligonucleotide
  Sense strand starting at position 3665 of SEQ ID NO: 1884240
aacauaugucagugugcuu

SEQ ID NO: 2250817 - RNA, 19 nt, Artificial Sequence
  Description of Artificial Sequence: Synthetic oligonucleotide
  Antisense strand to SEQ ID NO: 2250816
aagcacacugacauauguu

SEQ ID NO: 2250818 - RNA, 19 nt, Artificial Sequence
  Description of Artificial Sequence: Synthetic oligonucleotide
  Sense strand starting at position 526 of SEQ ID NO: 1884241
ugaaucuuagugggaaauu

SEQ ID NO: 2250819 - RNA, 19 nt, Artificial Sequence
  Description of Artificial Sequence: Synthetic oligonucleotide
  Antisense strand to SEQ ID NO: 2250818
aauuucccacuaagauuca

SEQ ID NO: 2250820 - RNA, 19 nt, Artificial Sequence
  Description of Artificial Sequence: Synthetic oligonucleotide
  Sense strand starting at position 544 of SEQ ID NO: 1884241
ucauguuucugggaaauuu

SEQ ID NO: 2250821 - RNA, 19 nt, Artificial Sequence
  Description of Artificial Sequence: Synthetic oligonucleotide
  Antisense strand to SEQ ID NO: 2250820
aaauuucccagaaacauga

SEQ ID NO: 2250822 - RNA, 19 nt, Artificial Sequence
  Description of Artificial Sequence: Synthetic oligonucleotide
  Sense strand starting at position 635 of SEQ ID NO: 1884241
aaguaugggccucauuacu

SEQ ID NO: 2250823 - RNA, 19 nt, Artificial Sequence
  Description of Artificial Sequence: Synthetic oligonucleotide
  Antisense strand to SEQ ID NO: 2250822
aguaaugaggcccauacuu

SEQ ID NO: 2250824 - RNA, 19 nt, Artificial Sequence
  Description of Artificial Sequence: Synthetic oligonucleotide
  Sense strand starting at position 669 of SEQ ID NO: 1884241
ccacuuggcuauucgggaa

SEQ ID NO: 2250825 - RNA, 19 nt, Artificial Sequence
  Description of Artificial Sequence: Synthetic oligonucleotide
  Antisense strand to SEQ ID NO: 2250824
uucccgaauagccaagugg

SEQ ID NO: 2250826 - RNA, 19 nt, Artificial Sequence
  Description of Artificial Sequence: Synthetic oligonucleotide
  Sense strand starting at position 673 of SEQ ID NO: 1884241
uuggcuauucgggaauuau

SEQ ID NO: 2250827 - RNA, 19 nt, Artificial Sequence
  Description of Artificial Sequence: Synthetic oligonucleotide
  Antisense strand to SEQ ID NO: 2250826
auaauucccgaauagccaa

SEQ ID NO: 2250828 - RNA, 19 nt, Artificial Sequence
  Description of Artificial Sequence: Synthetic oligonucleotide
  Sense strand starting at position 699 of SEQ ID NO: 1884241
agcugaagauauucccuaa

SEQ ID NO: 2250829 - RNA, 19 nt, Artificial Sequence
  Description of Artificial Sequence: Synthetic oligonucleotide
  Antisense strand to SEQ ID NO: 2250828
uuagggaauaucuucagcu

SEQ ID NO: 2250830 - RNA, 19 nt, Artificial Sequence
  Description of Artificial Sequence: Synthetic oligonucleotide
  Sense strand starting at position 732 of SEQ ID NO: 1884241
gccuguucccuacaauuga

SEQ ID NO: 2250831 - RNA, 19 nt, Artificial Sequence
  Description of Artificial Sequence: Synthetic oligonucleotide
  Antisense strand to SEQ ID NO: 2250830
ucaauuguagggaacaggc

SEQ ID NO: 2250832 - RNA, 19 nt, Artificial Sequence
  Description of Artificial Sequence: Synthetic oligonucleotide
  Sense strand starting at position 818 of SEQ ID NO: 1884241
gcauuagcauaacuagaag

SEQ ID NO: 2250833 - RNA, 19 nt, Artificial Sequence
  Description of Artificial Sequence: Synthetic oligonucleotide
  Antisense strand to SEQ ID NO: 2250832
cuucuaguuaugcuaaugc

SEQ ID NO: 2250834 - RNA, 19 nt, Artificial Sequence
  Description of Artificial Sequence: Synthetic oligonucleotide
  Sense strand starting at position 864 of SEQ ID NO: 1884241
aaaugaaugucucugcgau

SEQ ID NO: 2250835 - RNA, 19 nt, Artificial Sequence
  Description of Artificial Sequence: Synthetic oligonucleotide
  Antisense strand to SEQ ID NO: 2250834
aucgcagagacauucauuu

SEQ ID NO: 2250836 - RNA, 19 nt, Artificial Sequence
  Description of Artificial Sequence: Synthetic oligonucleotide
  Sense strand starting at position 876 of SEQ ID NO: 1884241
cugcgaucaucuguaagau

SEQ ID NO: 2250837 - RNA, 19 nt, Artificial Sequence
  Description of Artificial Sequence: Synthetic oligonucleotide
  Antisense strand to SEQ ID NO: 2250836
aucuuacagaugaucgcag

SEQ ID NO: 2250838 - RNA, 19 nt, Artificial Sequence
  Description of Artificial Sequence: Synthetic oligonucleotide
  Sense strand starting at position 877 of SEQ ID NO: 1884241
ugcgaucaucuguaagauu

SEQ ID NO: 2250839 - RNA, 19 nt, Artificial Sequence
  Description of Artificial Sequence: Synthetic oligonucleotide
  Antisense strand to SEQ ID NO: 2250838
aaucuuacagaugaucgca

SEQ ID NO: 2250840 - RNA, 19 nt, Artificial Sequence
  Description of Artificial Sequence: Synthetic oligonucleotide
  Sense strand starting at position 931 of SEQ ID NO: 1884241
agucgcuuugacgaaacaa

SEQ ID NO: 2250841 - RNA, 19 nt, Artificial Sequence
  Description of Artificial Sequence: Synthetic oligonucleotide
  Antisense strand to SEQ ID NO: 2250840
uuguuucgucaaagcgacu

SEQ ID NO: 2250842 - RNA, 19 nt, Artificial Sequence
  Description of Artificial Sequence: Synthetic oligonucleotide
  Sense strand starting at position 952 of SEQ ID NO: 1884241
cuaggacaugugugucauu

SEQ ID NO: 2250843 - RNA, 19 nt, Artificial Sequence
  Description of Artificial Sequence: Synthetic oligonucleotide
  Antisense strand to SEQ ID NO: 2250842
aaugacacacauguccuag

SEQ ID NO: 2250844 - RNA, 19 nt, Artificial Sequence
  Description of Artificial Sequence: Synthetic oligonucleotide
  Sense strand starting at position 963 of SEQ ID NO: 1884241
gugucauugugacucaaca

SEQ ID NO: 2250845 - RNA, 19 nt, Artificial Sequence
  Description of Artificial Sequence: Synthetic oligonucleotide
  Antisense strand to SEQ ID NO: 2250844
uguugagucacaaugacac

SEQ ID NO: 2250846 - RNA, 19 nt, Artificial Sequence
  Description of Artificial Sequence: Synthetic oligonucleotide
  Sense strand starting at position 1133 of SEQ ID NO: 1884241
ugucuuagucauuacaggu

SEQ ID NO: 2250847 - RNA, 19 nt, Artificial Sequence
  Description of Artificial Sequence: Synthetic oligonucleotide
  Antisense strand to SEQ ID NO: 2250846
accuguaaugacuaagaca

SEQ ID NO: 2250848 - RNA, 19 nt, Artificial Sequence
  Description of Artificial Sequence: Synthetic oligonucleotide
  Sense strand starting at position 1191 of SEQ ID NO: 1884241
agauaaaccuaggaagaua

SEQ ID NO: 2250849 - RNA, 19 nt, Artificial Sequence
  Description of Artificial Sequence: Synthetic oligonucleotide
  Antisense strand to SEQ ID NO: 2250848
uaucuuccuagguuuaucu

SEQ ID NO: 2250850 - RNA, 19 nt, Artificial Sequence
  Description of Artificial Sequence: Synthetic oligonucleotide
  Sense strand starting at position 1202 of SEQ ID NO: 1884241
ggaagauauuuccgaauau

SEQ ID NO: 2250851 - RNA, 19 nt, Artificial Sequence
  Description of Artificial Sequence: Synthetic oligonucleotide
  Antisense strand to SEQ ID NO: 2250850
auauucggaaauaucuucc

SEQ ID NO: 2250852 - RNA, 19 nt, Artificial Sequence
  Description of Artificial Sequence: Synthetic oligonucleotide
  Sense strand starting at position 1203 of SEQ ID NO: 1884241
gaagauauuuccgaauaug

SEQ ID NO: 2250853 - RNA, 19 nt, Artificial Sequence
  Description of Artificial Sequence: Synthetic oligonucleotide
  Antisense strand to SEQ ID NO: 2250852
cauauucggaaauaucuuc

SEQ ID NO: 2250854 - RNA, 19 nt, Artificial Sequence
  Description of Artificial Sequence: Synthetic oligonucleotide
  Sense strand starting at position 1218 of SEQ ID NO: 1884241
uaugaugcuucucugagca

SEQ ID NO: 2250855 - RNA, 19 nt, Artificial Sequence
  Description of Artificial Sequence: Synthetic oligonucleotide
  Antisense strand to SEQ ID NO: 2250854
ugcucagagaagcaucaua

SEQ ID NO: 2250856 - RNA, 19 nt, Artificial Sequence
  Description of Artificial Sequence: Synthetic oligonucleotide
  Sense strand starting at position 1300 of SEQ ID NO: 1884241
gucuaaccauaauugaguu

SEQ ID NO: 2250857 - RNA, 19 nt, Artificial Sequence
  Description of Artificial Sequence: Synthetic oligonucleotide
  Antisense strand to SEQ ID NO: 2250856
aacucaauuaugguuagac

SEQ ID NO: 2250858 - RNA, 19 nt, Artificial Sequence
  Description of Artificial Sequence: Synthetic oligonucleotide
  Sense strand starting at position 1764 of SEQ ID NO: 1884241
ugaauauaaugacuugcau

SEQ ID NO: 2250859 - RNA, 19 nt, Artificial Sequence
  Description of Artificial Sequence: Synthetic oligonucleotide
  Antisense strand to SEQ ID NO: 2250858
augcaagucauuauauuca

SEQ ID NO: 2250860 - RNA, 19 nt, Artificial Sequence
  Description of Artificial Sequence: Synthetic oligonucleotide
  Sense strand starting at position 1824 of SEQ ID NO: 1884241
uccugagucuuaccuugaa

SEQ ID NO: 2250861 - RNA, 19 nt, Artificial Sequence
  Description of Artificial Sequence: Synthetic oligonucleotide
  Antisense strand to SEQ ID NO: 2250860
uucaagguaagacucagga

SEQ ID NO: 2250862 - RNA, 19 nt, Artificial Sequence
  Description of Artificial Sequence: Synthetic oligonucleotide
  Sense strand starting at position 1827 of SEQ ID NO: 1884241
ugagucuuaccuugaacug

SEQ ID NO: 2250863 - RNA, 19 nt, Artificial Sequence
  Description of Artificial Sequence: Synthetic oligonucleotide
  Antisense strand to SEQ ID NO: 2250862
caguucaagguaagacuca

SEQ ID NO: 2250864 - RNA, 19 nt, Artificial Sequence
  Description of Artificial Sequence: Synthetic oligonucleotide
  Sense strand starting at position 2185 of SEQ ID NO: 1884241
gccacuugccugcaagaca

SEQ ID NO: 2250865 - RNA, 19 nt, Artificial Sequence
  Description of Artificial Sequence: Synthetic oligonucleotide
  Antisense strand to SEQ ID NO: 2250864
ugucuugcaggcaaguggc

SEQ ID NO: 2250866 - RNA, 19 nt, Artificial Sequence
  Description of Artificial Sequence: Synthetic oligonucleotide
  Sense strand starting at position 2463 of SEQ ID NO: 1884241
ucaagaaugaguugucgga

SEQ ID NO: 2250867 - RNA, 19 nt, Artificial Sequence
  Description of Artificial Sequence: Synthetic oligonucleotide
  Antisense strand to SEQ ID NO: 2250866
uccgacaacucauucuuga

SEQ ID NO: 2250868 - RNA, 19 nt, Artificial Sequence
  Description of Artificial Sequence: Synthetic oligonucleotide
  Sense strand starting at position 2465 of SEQ ID NO: 1884241
aagaaugaguugucggauu

SEQ ID NO: 2250869 - RNA, 19 nt, Artificial Sequence
  Description of Artificial Sequence: Synthetic oligonucleotide
  Antisense strand to SEQ ID NO: 2250868
aauccgacaacucauucuu

SEQ ID NO: 2250870 - RNA, 19 nt, Artificial Sequence
  Description of Artificial Sequence: Synthetic oligonucleotide
  Sense strand starting at position 2845 of SEQ ID NO: 1884241
aguuucuugcauuggauca

SEQ ID NO: 2250871 - RNA, 19 nt, Artificial Sequence
  Description of Artificial Sequence: Synthetic oligonucleotide
  Antisense strand to SEQ ID NO: 2250870
ugauccaaugcaagaaacu

SEQ ID NO: 2250872 - RNA, 19 nt, Artificial Sequence
  Description of Artificial Sequence: Synthetic oligonucleotide
  Sense strand starting at position 2902 of SEQ ID NO: 1884241
uuacaaagacugugguaaa

SEQ ID NO: 2250873 - RNA, 19 nt, Artificial Sequence
  Description of Artificial Sequence: Synthetic oligonucleotide
  Antisense strand to SEQ ID NO: 2250872
uuuaccacagucuuuguaa

SEQ ID NO: 2250874 - RNA, 19 nt, Artificial Sequence
  Description of Artificial Sequence: Synthetic oligonucleotide
  Sense strand starting at position 2957 of SEQ ID NO: 1884241
uugagcauuucuuaagaug

SEQ ID NO: 2250875 - RNA, 19 nt, Artificial Sequence
  Description of Artificial Sequence: Synthetic oligonucleotide
  Antisense strand to SEQ ID NO: 2250874
caucuuaagaaaugcucaa

SEQ ID NO: 2250876 - RNA, 19 nt, Artificial Sequence
  Description of Artificial Sequence: Synthetic oligonucleotide
  Sense strand starting at position 2960 of SEQ ID NO: 1884241
agcauuucuuaagauggau

SEQ ID NO: 2250877 - RNA, 19 nt, Artificial Sequence
  Description of Artificial Sequence: Synthetic oligonucleotide
  Antisense strand to SEQ ID NO: 2250876
auccaucuuaagaaaugcu

SEQ ID NO: 2250878 - RNA, 19 nt, Artificial Sequence
  Description of Artificial Sequence: Synthetic oligonucleotide
  Sense strand starting at position 3033 of SEQ ID NO: 1884241
guccucuggccuugaauaa

SEQ ID NO: 2250879 - RNA, 19 nt, Artificial Sequence
  Description of Artificial Sequence: Synthetic oligonucleotide
  Antisense strand to SEQ ID NO: 2250878
uuauucaaggccagaggac

SEQ ID NO: 2250880 - RNA, 19 nt, Artificial Sequence
  Description of Artificial Sequence: Synthetic oligonucleotide
  Sense strand starting at position 3040 of SEQ ID NO: 1884241
ggccuugaauaagccagaa

SEQ ID NO: 2250881 - RNA, 19 nt, Artificial Sequence
  Description of Artificial Sequence: Synthetic oligonucleotide
  Antisense strand to SEQ ID NO: 2250880
uucuggcuuauucaaggcc

SEQ ID NO: 2250882 - RNA, 19 nt, Artificial Sequence
  Description of Artificial Sequence: Synthetic oligonucleotide
  Sense strand starting at position 3070 of SEQ ID NO: 1884241
gggagagguuguccucaca

SEQ ID NO: 2250883 - RNA, 19 nt, Artificial Sequence
  Description of Artificial Sequence: Synthetic oligonucleotide
  Antisense strand to SEQ ID NO: 2250882
ugugaggacaaccucuccc

SEQ ID NO: 2250884 - RNA, 19 nt, Artificial Sequence
  Description of Artificial Sequence: Synthetic oligonucleotide
  Sense strand starting at position 3566 of SEQ ID NO: 1884241
gcccuuguggcauauacau

SEQ ID NO: 2250885 - RNA, 19 nt, Artificial Sequence
  Description of Artificial Sequence: Synthetic oligonucleotide
  Antisense strand to SEQ ID NO: 2250884
auguauaugccacaagggc

SEQ ID NO: 2250886 - RNA, 19 nt, Artificial Sequence
  Description of Artificial Sequence: Synthetic oligonucleotide
  Sense strand starting at position 3718 of SEQ ID NO: 1884241
ggaggaguuucccuucccu

SEQ ID NO: 2250887 - RNA, 19 nt, Artificial Sequence
  Description of Artificial Sequence: Synthetic oligonucleotide
  Antisense strand to SEQ ID NO: 2250886
agggaagggaaacuccucc

SEQ ID NO: 2250888 - RNA, 19 nt, Artificial Sequence
  Description of Artificial Sequence: Synthetic oligonucleotide
  Sense strand starting at position 3864 of SEQ ID NO: 1884241
ccagaaguguguccuccaa

SEQ ID NO: 2250889 - RNA, 19 nt, Artificial Sequence
  Description of Artificial Sequence: Synthetic oligonucleotide
  Antisense strand to SEQ ID NO: 2250888
uuggaggacacacuucugg

SEQ ID NO: 2250890 - RNA, 19 nt, Artificial Sequence
  Description of Artificial Sequence: Synthetic oligonucleotide
  Sense strand starting at position 3866 of SEQ ID NO: 1884241
agaaguguguccuccaacu

SEQ ID NO: 2250891 - RNA, 19 nt, Artificial Sequence
  Description of Artificial Sequence: Synthetic oligonucleotide
  Antisense strand to SEQ ID NO: 2250890
aguuggaggacacacuucu

SEQ ID NO: 2250892 - RNA, 19 nt, Artificial Sequence
  Description of Artificial Sequence: Synthetic oligonucleotide
  Sense strand starting at position 3921 of SEQ ID NO: 1884241
ugcacuggcccggaaaguu

SEQ ID NO: 2250893 - RNA, 19 nt, Artificial Sequence
  Description of Artificial Sequence: Synthetic oligonucleotide
  Antisense strand to SEQ ID NO: 2250892
aacuuuccgggccagugca

SEQ ID NO: 2250894 - RNA, 19 nt, Artificial Sequence
  Description of Artificial Sequence: Synthetic oligonucleotide
  Sense strand starting at position 3945 of SEQ ID NO: 1884241
cugagaaaugucgguuucu

SEQ ID NO: 2250895 - RNA, 19 nt, Artificial Sequence
  Description of Artificial Sequence: Synthetic oligonucleotide
  Antisense strand to SEQ ID NO: 2250894
agaaaccgacauuucucag

SEQ ID NO: 2250896 - RNA, 19 nt, Artificial Sequence
  Description of Artificial Sequence: Synthetic oligonucleotide
  Sense strand starting at position 3946 of SEQ ID NO: 1884241
ugagaaaugucgguuucug

SEQ ID NO: 2250897 - RNA, 19 nt, Artificial Sequence
  Description of Artificial Sequence: Synthetic oligonucleotide
  Antisense strand to SEQ ID NO: 2250896
cagaaaccgacauuucuca

SEQ ID NO: 2250898 - RNA, 19 nt, Artificial Sequence
  Description of Artificial Sequence: Synthetic oligonucleotide
  Sense strand starting at position 115 of SEQ ID NO: 1884242
ucaggaaagcgcuauuauc

SEQ ID NO: 2250899 - RNA, 19 nt, Artificial Sequence
  Description of Artificial Sequence: Synthetic oligonucleotide
  Antisense strand to SEQ ID NO: 2250898
gauaauagcgcuuuccuga

SEQ ID NO: 2250900 - RNA, 19 nt, Artificial Sequence
  Description of Artificial Sequence: Synthetic oligonucleotide
  Sense strand starting at position 229 of SEQ ID NO: 1884242
gcaagauguagucaguuag

SEQ ID NO: 2250901 - RNA, 19 nt, Artificial Sequence
  Description of Artificial Sequence: Synthetic oligonucleotide
  Antisense strand to SEQ ID NO: 2250900
cuaacugacuacaucuugc

SEQ ID NO: 2250902 - RNA, 19 nt, Artificial Sequence
  Description of Artificial Sequence: Synthetic oligonucleotide
  Sense strand starting at position 233 of SEQ ID NO: 1884242
gauguagucaguuaggucu

SEQ ID NO: 2250903 - RNA, 19 nt, Artificial Sequence
  Description of Artificial Sequence: Synthetic oligonucleotide
  Antisense strand to SEQ ID NO: 2250902
agaccuaacugacuacauc

SEQ ID NO: 2250904 - RNA, 19 nt, Artificial Sequence
  Description of Artificial Sequence: Synthetic oligonucleotide
  Sense strand starting at position 236 of SEQ ID NO: 1884242
guagucaguuaggucugau

SEQ ID NO: 2250905 - RNA, 19 nt, Artificial Sequence
  Description of Artificial Sequence: Synthetic oligonucleotide
  Antisense strand to SEQ ID NO: 2250904
aucagaccuaacugacuac

SEQ ID NO: 2250906 - RNA, 19 nt, Artificial Sequence
  Description of Artificial Sequence: Synthetic oligonucleotide
  Sense strand starting at position 567 of SEQ ID NO: 1884242
cugagccucuggguaaaua

SEQ ID NO: 2250907 - RNA, 19 nt, Artificial Sequence
  Description of Artificial Sequence: Synthetic oligonucleotide
  Antisense strand to SEQ ID NO: 2250906
uauuuacccagaggcucag

SEQ ID NO: 2250908 - RNA, 19 nt, Artificial Sequence
  Description of Artificial Sequence: Synthetic oligonucleotide
  Sense strand starting at position 593 of SEQ ID NO: 1884242
gauauuugcuuagaggaag

SEQ ID NO: 2250909 - RNA, 19 nt, Artificial Sequence
  Description of Artificial Sequence: Synthetic oligonucleotide
  Antisense strand to SEQ ID NO: 2250908
cuuccucuaagcaaauauc

SEQ ID NO: 2250910 - RNA, 19 nt, Artificial Sequence
  Description of Artificial Sequence: Synthetic oligonucleotide
  Sense strand starting at position 612 of SEQ ID NO: 1884242
agacacauccauugagugu

SEQ ID NO: 2250911 - RNA, 19 nt, Artificial Sequence
  Description of Artificial Sequence: Synthetic oligonucleotide
  Antisense strand to SEQ ID NO: 2250910
acacucaauggaugugucu

SEQ ID NO: 2250912 - RNA, 19 nt, Artificial Sequence
  Description of Artificial Sequence: Synthetic oligonucleotide
  Sense strand starting at position 653 of SEQ ID NO: 1884242
ugagguccugcuuaaaguu

SEQ ID NO: 2250913 - RNA, 19 nt, Artificial Sequence
  Description of Artificial Sequence: Synthetic oligonucleotide
  Antisense strand to SEQ ID NO: 2250912
aacuuuaagcaggaccuca

SEQ ID NO: 2250914 - RNA, 19 nt, Artificial Sequence
  Description of Artificial Sequence: Synthetic oligonucleotide
  Sense strand starting at position 694 of SEQ ID NO: 1884242
gcaggacugccuggagaau

SEQ ID NO: 2250915 - RNA, 19 nt, Artificial Sequence
  Description of Artificial Sequence: Synthetic oligonucleotide
  Antisense strand to SEQ ID NO: 2250914
auucuccaggcaguccugc

SEQ ID NO: 2250916 - RNA, 19 nt, Artificial Sequence
  Description of Artificial Sequence: Synthetic oligonucleotide
  Sense strand starting at position 727 of SEQ ID NO: 1884242
ggaacucccugggucuaaa

SEQ ID NO: 2250917 - RNA, 19 nt, Artificial Sequence
  Description of Artificial Sequence: Synthetic oligonucleotide
  Antisense strand to SEQ ID NO: 2250916
uuuagacccagggaguucc

SEQ ID NO: 2250918 - RNA, 19 nt, Artificial Sequence
  Description of Artificial Sequence: Synthetic oligonucleotide
  Sense strand starting at position 771 of SEQ ID NO: 1884242
uuuccugcugugugaggaa

SEQ ID NO: 2250919 - RNA, 19 nt, Artificial Sequence
  Description of Artificial Sequence: Synthetic oligonucleotide
  Antisense strand to SEQ ID NO: 2250918
uuccucacacagcaggaaa

SEQ ID NO: 2250920 - RNA, 19 nt, Artificial Sequence
  Description of Artificial Sequence: Synthetic oligonucleotide
  Sense strand starting at position 896 of SEQ ID NO: 1884242
uugucugagucuguugaca

SEQ ID NO: 2250921 - RNA, 19 nt, Artificial Sequence
  Description of Artificial Sequence: Synthetic oligonucleotide
  Antisense strand to SEQ ID NO: 2250920
ugucaacagacucagacaa

SEQ ID NO: 2250922 - RNA, 19 nt, Artificial Sequence
  Description of Artificial Sequence: Synthetic oligonucleotide
  Sense strand starting at position 1034 of SEQ ID NO: 1884242
ccagauauacagugggcau

SEQ ID NO: 2250923 - RNA, 19 nt, Artificial Sequence
  Description of Artificial Sequence: Synthetic oligonucleotide
  Antisense strand to SEQ ID NO: 2250922
augcccacuguauaucugg

SEQ ID NO: 2250924 - RNA, 19 nt, Artificial Sequence
  Description of Artificial Sequence: Synthetic oligonucleotide
  Sense strand starting at position 1095 of SEQ ID NO: 1884242
gagcuuggcguuguuauca

SEQ ID NO: 2250925 - RNA, 19 nt, Artificial Sequence
  Description of Artificial Sequence: Synthetic oligonucleotide
  Antisense strand to SEQ ID NO: 2250924
ugauaacaacgccaagcuc

SEQ ID NO: 2250926 - RNA, 19 nt, Artificial Sequence
  Description of Artificial Sequence: Synthetic oligonucleotide
  Sense strand starting at position 1120 of SEQ ID NO: 1884242
agucuauucuauccugaca

SEQ ID NO: 2250927 - RNA, 19 nt, Artificial Sequence
  Description of Artificial Sequence: Synthetic oligonucleotide
  Antisense strand to SEQ ID NO: 2250926
ugucaggauagaauagacu

SEQ ID NO: 2250928 - RNA, 19 nt, Artificial Sequence
  Description of Artificial Sequence: Synthetic oligonucleotide
  Sense strand starting at position 1256 of SEQ ID NO: 1884242
gcuugauacuggcuaagau

SEQ ID NO: 2250929 - RNA, 19 nt, Artificial Sequence
  Description of Artificial Sequence: Synthetic oligonucleotide
  Antisense strand to SEQ ID NO: 2250928
aucuuagccaguaucaagc

SEQ ID NO: 2250930 - RNA, 19 nt, Artificial Sequence
  Description of Artificial Sequence: Synthetic oligonucleotide
  Sense strand starting at position 1257 of SEQ ID NO: 1884242
cuugauacuggcuaagauc

SEQ ID NO: 2250931 - RNA, 19 nt, Artificial Sequence
  Description of Artificial Sequence: Synthetic oligonucleotide
  Antisense strand to SEQ ID NO: 2250930
gaucuuagccaguaucaag

SEQ ID NO: 2250932 - RNA, 19 nt, Artificial Sequence
  Description of Artificial Sequence: Synthetic oligonucleotide
  Sense strand starting at position 1272 of SEQ ID NO: 1884242
gaucucugauuuggguuaa

SEQ ID NO: 2250933 - RNA, 19 nt, Artificial Sequence
  Description of Artificial Sequence: Synthetic oligonucleotide
  Antisense strand to SEQ ID NO: 2250932
uuaacccaaaucagagauc

SEQ ID NO: 2250934 - RNA, 19 nt, Artificial Sequence
  Description of Artificial Sequence: Synthetic oligonucleotide
  Sense strand starting at position 1283 of SEQ ID NO: 1884242
uggguuaaucgaugugaca

SEQ ID NO: 2250935 - RNA, 19 nt, Artificial Sequence
  Description of Artificial Sequence: Synthetic oligonucleotide
  Antisense strand to SEQ ID NO: 2250934
ugucacaucgauuaaccca

SEQ ID NO: 2250936 - RNA, 19 nt, Artificial Sequence
  Description of Artificial Sequence: Synthetic oligonucleotide
  Sense strand starting at position 1285 of SEQ ID NO: 1884242
gguuaaucgaugugacagc

SEQ ID NO: 2250937 - RNA, 19 nt, Artificial Sequence
  Description of Artificial Sequence: Synthetic oligonucleotide
  Antisense strand to SEQ ID NO: 2250936
gcugucacaucgauuaacc

SEQ ID NO: 2250938 - RNA, 19 nt, Artificial Sequence
  Description of Artificial Sequence: Synthetic oligonucleotide
  Sense strand starting at position 1304 of SEQ ID NO: 1884242
aguccaguccuguauguua

SEQ ID NO: 2250939 - RNA, 19 nt, Artificial Sequence
  Description of Artificial Sequence: Synthetic oligonucleotide
  Antisense strand to SEQ ID NO: 2250938
uaacauacaggacuggacu

SEQ ID NO: 2250940 - RNA, 19 nt, Artificial Sequence
  Description of Artificial Sequence: Synthetic oligonucleotide
  Sense strand starting at position 1313 of SEQ ID NO: 1884242
cuguauguuagcuccguuu

SEQ ID NO: 2250941 - RNA, 19 nt, Artificial Sequence
  Description of Artificial Sequence: Synthetic oligonucleotide
  Antisense strand to SEQ ID NO: 2250940
aaacggagcuaacauacag

SEQ ID NO: 2250942 - RNA, 19 nt, Artificial Sequence
  Description of Artificial Sequence: Synthetic oligonucleotide
  Sense strand starting at position 1326 of SEQ ID NO: 1884242
ccguuucucacagaaggau

SEQ ID NO: 2250943 - RNA, 19 nt, Artificial Sequence
  Description of Artificial Sequence: Synthetic oligonucleotide
  Antisense strand to SEQ ID NO: 2250942
auccuucugugagaaacgg

SEQ ID NO: 2250944 - RNA, 19 nt, Artificial Sequence
  Description of Artificial Sequence: Synthetic oligonucleotide
  Sense strand starting at position 1847 of SEQ ID NO: 1884242
guacguggaacucaccaau

SEQ ID NO: 2250945 - RNA, 19 nt, Artificial Sequence
  Description of Artificial Sequence: Synthetic oligonucleotide
  Antisense strand to SEQ ID NO: 2250944
auuggugaguuccacguac

SEQ ID NO: 2250946 - RNA, 19 nt, Artificial Sequence
  Description of Artificial Sequence: Synthetic oligonucleotide
  Sense strand starting at position 2105 of SEQ ID NO: 1884242
cggguaucacguagcagua

SEQ ID NO: 2250947 - RNA, 19 nt, Artificial Sequence
  Description of Artificial Sequence: Synthetic oligonucleotide
  Antisense strand to SEQ ID NO: 2250946
uacugcuacgugauacccg

SEQ ID NO: 2250948 - RNA, 19 nt, Artificial Sequence
  Description of Artificial Sequence: Synthetic oligonucleotide
  Sense strand starting at position 2213 of SEQ ID NO: 1884242
ccugaaauggccugaaggu

SEQ ID NO: 2250949 - RNA, 19 nt, Artificial Sequence
  Description of Artificial Sequence: Synthetic oligonucleotide
  Antisense strand to SEQ ID NO: 2250948
accuucaggccauuucagg

SEQ ID NO: 2250950 - RNA, 19 nt, Artificial Sequence
  Description of Artificial Sequence: Synthetic oligonucleotide
  Sense strand starting at position 2284 of SEQ ID NO: 1884242
guuuguuggcguucucuca

SEQ ID NO: 2250951 - RNA, 19 nt, Artificial Sequence
  Description of Artificial Sequence: Synthetic oligonucleotide
  Antisense strand to SEQ ID NO: 2250950
ugagagaacgccaacaaac

SEQ ID NO: 2250952 - RNA, 19 nt, Artificial Sequence
  Description of Artificial Sequence: Synthetic oligonucleotide
  Sense strand starting at position 2340 of SEQ ID NO: 1884242
agaagaaacucuguguuug

SEQ ID NO: 2250953 - RNA, 19 nt, Artificial Sequence
  Description of Artificial Sequence: Synthetic oligonucleotide
  Antisense strand to SEQ ID NO: 2250952
caaacacagaguuucuucu

SEQ ID NO: 2250954 - RNA, 19 nt, Artificial Sequence
  Description of Artificial Sequence: Synthetic oligonucleotide
  Sense strand starting at position 2341 of SEQ ID NO: 1884242
gaagaaacucuguguuuga

SEQ ID NO: 2250955 - RNA, 19 nt, Artificial Sequence
  Description of Artificial Sequence: Synthetic oligonucleotide
  Antisense strand to SEQ ID NO: 2250954
ucaaacacagaguuucuuc

SEQ ID NO: 2250956 - RNA, 19 nt, Artificial Sequence
  Description of Artificial Sequence: Synthetic oligonucleotide
  Sense strand starting at position 2342 of SEQ ID NO: 1884242
aagaaacucuguguuugau

SEQ ID NO: 2250957 - RNA, 19 nt, Artificial Sequence
  Description of Artificial Sequence: Synthetic oligonucleotide
  Antisense strand to SEQ ID NO: 2250956
aucaaacacagaguuucuu

SEQ ID NO: 2250958 - RNA, 19 nt, Artificial Sequence
  Description of Artificial Sequence: Synthetic oligonucleotide
  Sense strand starting at position 2344 of SEQ ID NO: 1884242
gaaacucuguguuugaugu

SEQ ID NO: 2250959 - RNA, 19 nt, Artificial Sequence
  Description of Artificial Sequence: Synthetic oligonucleotide
  Antisense strand to SEQ ID NO: 2250958
acaucaaacacagaguuuc

SEQ ID NO: 2250960 - RNA, 19 nt, Artificial Sequence
  Description of Artificial Sequence: Synthetic oligonucleotide
  Sense strand starting at position 2636 of SEQ ID NO: 1884242
cugaccuugugaucgaacu

SEQ ID NO: 2250961 - RNA, 19 nt, Artificial Sequence
  Description of Artificial Sequence: Synthetic oligonucleotide
  Antisense strand to SEQ ID NO: 2250960
aguucgaucacaaggucag

SEQ ID NO: 2250962 - RNA, 19 nt, Artificial Sequence
  Description of Artificial Sequence: Synthetic oligonucleotide
  Sense strand starting at position 3171 of SEQ ID NO: 1884242
guaugagaccucugucagg

SEQ ID NO: 2250963 - RNA, 19 nt, Artificial Sequence
  Description of Artificial Sequence: Synthetic oligonucleotide
  Antisense strand to SEQ ID NO: 2250962
ccugacagaggucucauac

SEQ ID NO: 2250964 - RNA, 19 nt, Artificial Sequence
  Description of Artificial Sequence: Synthetic oligonucleotide
  Sense strand starting at position 3266 of SEQ ID NO: 1884242
gccaguuccuaccuuuacu

SEQ ID NO: 2250965 - RNA, 19 nt, Artificial Sequence
  Description of Artificial Sequence: Synthetic oligonucleotide
  Antisense strand to SEQ ID NO: 2250964
aguaaagguaggaacuggc

SEQ ID NO: 2250966 - RNA, 19 nt, Artificial Sequence
  Description of Artificial Sequence: Synthetic oligonucleotide
  Sense strand starting at position 3551 of SEQ ID NO: 1884242
ccgugacaacaucaaucau

SEQ ID NO: 2250967 - RNA, 19 nt, Artificial Sequence
  Description of Artificial Sequence: Synthetic oligonucleotide
  Antisense strand to SEQ ID NO: 2250966
augauugauguugucacgg

SEQ ID NO: 2250968 - RNA, 19 nt, Artificial Sequence
  Description of Artificial Sequence: Synthetic oligonucleotide
  Sense strand starting at position 3575 of SEQ ID NO: 1884242
guaagaaguaauugguuua

SEQ ID NO: 2250969 - RNA, 19 nt, Artificial Sequence
  Description of Artificial Sequence: Synthetic oligonucleotide
  Antisense strand to SEQ ID NO: 2250968
uaaaccaauuacuucuuac

SEQ ID NO: 2250970 - RNA, 19 nt, Artificial Sequence
  Description of Artificial Sequence: Synthetic oligonucleotide
  Sense strand starting at position 3578 of SEQ ID NO: 1884242
agaaguaauugguuuaguc

SEQ ID NO: 2250971 - RNA, 19 nt, Artificial Sequence
  Description of Artificial Sequence: Synthetic oligonucleotide
  Antisense strand to SEQ ID NO: 2250970
gacuaaaccaauuacuucu

SEQ ID NO: 2250972 - RNA, 19 nt, Artificial Sequence
  Description of Artificial Sequence: Synthetic oligonucleotide
  Sense strand starting at position 3582 of SEQ ID NO: 1884242
guaauugguuuagucugga

SEQ ID NO: 2250973 - RNA, 19 nt, Artificial Sequence
  Description of Artificial Sequence: Synthetic oligonucleotide
  Antisense strand to SEQ ID NO: 2250972
uccagacuaaaccaauuac

SEQ ID NO: 2250974 - RNA, 19 nt, Artificial Sequence
  Description of Artificial Sequence: Synthetic oligonucleotide
  Sense strand starting at position 3758 of SEQ ID NO: 1884242
agggauaacuuggaauaga

SEQ ID NO: 2250975 - RNA, 19 nt, Artificial Sequence
  Description of Artificial Sequence: Synthetic oligonucleotide
  Antisense strand to SEQ ID NO: 2250974
ucuauuccaaguuaucccu

SEQ ID NO: 2250976 - RNA, 19 nt, Artificial Sequence
  Description of Artificial Sequence: Synthetic oligonucleotide
  Sense strand starting at position 3983 of SEQ ID NO: 1884242
gguuuacuccuagaugggu

SEQ ID NO: 2250977 - RNA, 19 nt, Artificial Sequence
  Description of Artificial Sequence: Synthetic oligonucleotide
  Antisense strand to SEQ ID NO: 2250976
acccaucuaggaguaaacc

SEQ ID NO: 2250978 - RNA, 19 nt, Artificial Sequence
  Description of Artificial Sequence: Synthetic oligonucleotide
  Sense strand starting at position 101 of SEQ ID NO: 1884243
uaggaacggguuugacauu

SEQ ID NO: 2250979 - RNA, 19 nt, Artificial Sequence
  Description of Artificial Sequence: Synthetic oligonucleotide
  Antisense strand to SEQ ID NO: 2250978
aaugucaaacccguuccua

SEQ ID NO: 2250980 - RNA, 19 nt, Artificial Sequence
  Description of Artificial Sequence: Synthetic oligonucleotide
  Sense strand starting at position 165 of SEQ ID NO: 1884243
guagaauauaaaggugauu

SEQ ID NO: 2250981 - RNA, 19 nt, Artificial Sequence
  Description of Artificial Sequence: Synthetic oligonucleotide
  Antisense strand to SEQ ID NO: 2250980
aaucaccuuuauauucuac

SEQ ID NO: 2250982 - RNA, 19 nt, Artificial Sequence
  Description of Artificial Sequence: Synthetic oligonucleotide
  Sense strand starting at position 170 of SEQ ID NO: 1884243
auauaaaggugauugggua

SEQ ID NO: 2250983 - RNA, 19 nt, Artificial Sequence
  Description of Artificial Sequence: Synthetic oligonucleotide
  Antisense strand to SEQ ID NO: 2250982
uacccaaucaccuuuauau

SEQ ID NO: 2250984 - RNA, 19 nt, Artificial Sequence
  Description of Artificial Sequence: Synthetic oligonucleotide
  Sense strand starting at position 424 of SEQ ID NO: 1884243
cauuaaguauaaucgguga

SEQ ID NO: 2250985 - RNA, 19 nt, Artificial Sequence
  Description of Artificial Sequence: Synthetic oligonucleotide
  Antisense strand to SEQ ID NO: 2250984
ucaccgauuauacuuaaug

SEQ ID NO: 2250986 - RNA, 19 nt, Artificial Sequence
  Description of Artificial Sequence: Synthetic oligonucleotide
  Sense strand starting at position 431 of SEQ ID NO: 1884243
uauaaucggugaucuccaa

SEQ ID NO: 2250987 - RNA, 19 nt, Artificial Sequence
  Description of Artificial Sequence: Synthetic oligonucleotide
  Antisense strand to SEQ ID NO: 2250986
uuggagaucaccgauuaua

SEQ ID NO: 2250988 - RNA, 19 nt, Artificial Sequence
  Description of Artificial Sequence: Synthetic oligonucleotide
  Sense strand starting at position 435 of SEQ ID NO: 1884243
aucggugaucuccaagguu

SEQ ID NO: 2250989 - RNA, 19 nt, Artificial Sequence
  Description of Artificial Sequence: Synthetic oligonucleotide
  Antisense strand to SEQ ID NO: 2250988
aaccuuggagaucaccgau

SEQ ID NO: 2250990 - RNA, 19 nt, Artificial Sequence
  Description of Artificial Sequence: Synthetic oligonucleotide
  Sense strand starting at position 542 of SEQ ID NO: 1884243
gcaggcccucuagacauau

SEQ ID NO: 2250991 - RNA, 19 nt, Artificial Sequence
  Description of Artificial Sequence: Synthetic oligonucleotide
  Antisense strand to SEQ ID NO: 2250990
auaugucuagagggccugc

SEQ ID NO: 2250992 - RNA, 19 nt, Artificial Sequence
  Description of Artificial Sequence: Synthetic oligonucleotide
  Sense strand starting at position 641 of SEQ ID NO: 1884243
augauuucaccgugagcug

SEQ ID NO: 2250993 - RNA, 19 nt, Artificial Sequence
  Description of Artificial Sequence: Synthetic oligonucleotide
  Antisense strand to SEQ ID NO: 2250992
cagcucacggugaaaucau

SEQ ID NO: 2250994 - RNA, 19 nt, Artificial Sequence
  Description of Artificial Sequence: Synthetic oligonucleotide
  Sense strand starting at position 726 of SEQ ID NO: 1884243
ugcucuaaggaagaguuua

SEQ ID NO: 2250995 - RNA, 19 nt, Artificial Sequence
  Description of Artificial Sequence: Synthetic oligonucleotide
  Antisense strand to SEQ ID NO: 2250994
uaaacucuuccuuagagca

SEQ ID NO: 2250996 - RNA, 19 nt, Artificial Sequence
  Description of Artificial Sequence: Synthetic oligonucleotide
  Sense strand starting at position 1029 of SEQ ID NO: 1884243
uugacaucaucaguaccua

SEQ ID NO: 2250997 - RNA, 19 nt, Artificial Sequence
  Description of Artificial Sequence: Synthetic oligonucleotide
  Antisense strand to SEQ ID NO: 2250996
uagguacugaugaugucaa

SEQ ID NO: 2250998 - RNA, 19 nt, Artificial Sequence
  Description of Artificial Sequence: Synthetic oligonucleotide
  Sense strand starting at position 1192 of SEQ ID NO: 1884243
guuucagucguugccaagu

SEQ ID NO: 2250999 - RNA, 19 nt, Artificial Sequence
  Description of Artificial Sequence: Synthetic oligonucleotide
  Antisense strand to SEQ ID NO: 2250998
acuuggcaacgacugaaac

SEQ ID NO: 2251000 - RNA, 19 nt, Artificial Sequence
  Description of Artificial Sequence: Synthetic oligonucleotide
  Sense strand starting at position 1227 of SEQ ID NO: 1884243
uccuaacauguuugagagu

SEQ ID NO: 2251001 - RNA, 19 nt, Artificial Sequence
  Description of Artificial Sequence: Synthetic oligonucleotide
  Antisense strand to SEQ ID NO: 2251000
acucucaaacauguuagga

SEQ ID NO: 2251002 - RNA, 19 nt, Artificial Sequence
  Description of Artificial Sequence: Synthetic oligonucleotide
  Sense strand starting at position 1238 of SEQ ID NO: 1884243
uugagagucuacccuuaac

SEQ ID NO: 2251003 - RNA, 19 nt, Artificial Sequence
  Description of Artificial Sequence: Synthetic oligonucleotide
  Antisense strand to SEQ ID NO: 2251002
guuaaggguagacucucaa

SEQ ID NO: 2251004 - RNA, 19 nt, Artificial Sequence
  Description of Artificial Sequence: Synthetic oligonucleotide
  Sense strand starting at position 1351 of SEQ ID NO: 1884243
uuauuugucuaggcaagca

SEQ ID NO: 2251005 - RNA, 19 nt, Artificial Sequence
  Description of Artificial Sequence: Synthetic oligonucleotide
  Antisense strand to SEQ ID NO: 2251004
ugcuugccuagacaaauaa

SEQ ID NO: 2251006 - RNA, 19 nt, Artificial Sequence
  Description of Artificial Sequence: Synthetic oligonucleotide
  Sense strand starting at position 2023 of SEQ ID NO: 1884243
uggcgcugccugucucaaa

SEQ ID NO: 2251007 - RNA, 19 nt, Artificial Sequence
  Description of Artificial Sequence: Synthetic oligonucleotide
  Antisense strand to SEQ ID NO: 2251006
uuugagacaggcagcgcca

SEQ ID NO: 2251008 - RNA, 19 nt, Artificial Sequence
  Description of Artificial Sequence: Synthetic oligonucleotide
  Sense strand starting at position 2291 of SEQ ID NO: 1884243
ucgcucucucgguuaucau

SEQ ID NO: 2251009 - RNA, 19 nt, Artificial Sequence
  Description of Artificial Sequence: Synthetic oligonucleotide
  Antisense strand to SEQ ID NO: 2251008
augauaaccgagagagcga

SEQ ID NO: 2251010 - RNA, 19 nt, Artificial Sequence
  Description of Artificial Sequence: Synthetic oligonucleotide
  Sense strand starting at position 2391 of SEQ ID NO: 1884243
gacaaacuugcucggauga

SEQ ID NO: 2251011 - RNA, 19 nt, Artificial Sequence
  Description of Artificial Sequence: Synthetic oligonucleotide
  Antisense strand to SEQ ID NO: 2251010
ucauccgagcaaguuuguc

SEQ ID NO: 2251012 - RNA, 19 nt, Artificial Sequence
  Description of Artificial Sequence: Synthetic oligonucleotide
  Sense strand starting at position 2392 of SEQ ID NO: 1884243
acaaacuugcucggaugaa

SEQ ID NO: 2251013 - RNA, 19 nt, Artificial Sequence
  Description of Artificial Sequence: Synthetic oligonucleotide
  Antisense strand to SEQ ID NO: 2251012
uucauccgagcaaguuugu

SEQ ID NO: 2251014 - RNA, 19 nt, Artificial Sequence
  Description of Artificial Sequence: Synthetic oligonucleotide
  Sense strand starting at position 2404 of SEQ ID NO: 1884243
ggaugaagucaugggagcu

SEQ ID NO: 2251015 - RNA, 19 nt, Artificial Sequence
  Description of Artificial Sequence: Synthetic oligonucleotide
  Antisense strand to SEQ ID NO: 2251014
agcucccaugacuucaucc

SEQ ID NO: 2251016 - RNA, 19 nt, Artificial Sequence
  Description of Artificial Sequence: Synthetic oligonucleotide
  Sense strand starting at position 2688 of SEQ ID NO: 1884243
aaaguugaucagugaguga

SEQ ID NO: 2251017 - RNA, 19 nt, Artificial Sequence
  Description of Artificial Sequence: Synthetic oligonucleotide
  Antisense strand to SEQ ID NO: 2251016
ucacucacugaucaacuuu

SEQ ID NO: 2251018 - RNA, 19 nt, Artificial Sequence
  Description of Artificial Sequence: Synthetic oligonucleotide
  Sense strand starting at position 2775 of SEQ ID NO: 1884243
cucugugugauggagaagu

SEQ ID NO: 2251019 - RNA, 19 nt, Artificial Sequence
  Description of Artificial Sequence: Synthetic oligonucleotide
  Antisense strand to SEQ ID NO: 2251018
acuucuccaucacacagag

SEQ ID NO: 2251020 - RNA, 19 nt, Artificial Sequence
  Description of Artificial Sequence: Synthetic oligonucleotide
  Sense strand starting at position 2777 of SEQ ID NO: 1884243
cugugugauggagaaguuu

SEQ ID NO: 2251021 - RNA, 19 nt, Artificial Sequence
  Description of Artificial Sequence: Synthetic oligonucleotide
  Antisense strand to SEQ ID NO: 2251020
aaacuucuccaucacacag

SEQ ID NO: 2251022 - RNA, 19 nt, Artificial Sequence
  Description of Artificial Sequence: Synthetic oligonucleotide
  Sense strand starting at position 2800 of SEQ ID NO: 1884243
gagcaucuacuagagaugu

SEQ ID NO: 2251023 - RNA, 19 nt, Artificial Sequence
  Description of Artificial Sequence: Synthetic oligonucleotide
  Antisense strand to SEQ ID NO: 2251022
acaucucuaguagaugcuc

SEQ ID NO: 2251024 - RNA, 19 nt, Artificial Sequence
  Description of Artificial Sequence: Synthetic oligonucleotide
  Sense strand starting at position 2831 of SEQ ID NO: 1884243
ggaacaaacuuaguaagca

SEQ ID NO: 2251025 - RNA, 19 nt, Artificial Sequence
  Description of Artificial Sequence: Synthetic oligonucleotide
  Antisense strand to SEQ ID NO: 2251024
ugcuuacuaaguuuguucc

SEQ ID NO: 2251026 - RNA, 19 nt, Artificial Sequence
  Description of Artificial Sequence: Synthetic oligonucleotide
  Sense strand starting at position 2853 of SEQ ID NO: 1884243
cuuguacguaaauggaaau

SEQ ID NO: 2251027 - RNA, 19 nt, Artificial Sequence
  Description of Artificial Sequence: Synthetic oligonucleotide
  Antisense strand to SEQ ID NO: 2251026
auuuccauuuacguacaag

SEQ ID NO: 2251028 - RNA, 19 nt, Artificial Sequence
  Description of Artificial Sequence: Synthetic oligonucleotide
  Sense strand starting at position 2896 of SEQ ID NO: 1884243
aaauguagcguggaaacua

SEQ ID NO: 2251029 - RNA, 19 nt, Artificial Sequence
  Description of Artificial Sequence: Synthetic oligonucleotide
  Antisense strand to SEQ ID NO: 2251028
uaguuuccacgcuacauuu

SEQ ID NO: 2251030 - RNA, 19 nt, Artificial Sequence
  Description of Artificial Sequence: Synthetic oligonucleotide
  Sense strand starting at position 2947 of SEQ ID NO: 1884243
guaaucaaagagugcuuaa

SEQ ID NO: 2251031 - RNA, 19 nt, Artificial Sequence
  Description of Artificial Sequence: Synthetic oligonucleotide
  Antisense strand to SEQ ID NO: 2251030
uuaagcacucuuugauuac

SEQ ID NO: 2251032 - RNA, 19 nt, Artificial Sequence
  Description of Artificial Sequence: Synthetic oligonucleotide
  Sense strand starting at position 3339 of SEQ ID NO: 1884243
ucacauacuguuggaugaa

SEQ ID NO: 2251033 - RNA, 19 nt, Artificial Sequence
  Description of Artificial Sequence: Synthetic oligonucleotide
  Antisense strand to SEQ ID NO: 2251032
uucauccaacaguauguga

SEQ ID NO: 2251034 - RNA, 19 nt, Artificial Sequence
  Description of Artificial Sequence: Synthetic oligonucleotide
  Sense strand starting at position 3358 of SEQ ID NO: 1884243
guguaaauacuguauaauc

SEQ ID NO: 2251035 - RNA, 19 nt, Artificial Sequence
  Description of Artificial Sequence: Synthetic oligonucleotide
  Antisense strand to SEQ ID NO: 2251034
gauuauacaguauuuacac

SEQ ID NO: 2251036 - RNA, 19 nt, Artificial Sequence
  Description of Artificial Sequence: Synthetic oligonucleotide
  Sense strand starting at position 3383 of SEQ ID NO: 1884243
agggaaauauuuggaagca

SEQ ID NO: 2251037 - RNA, 19 nt, Artificial Sequence
  Description of Artificial Sequence: Synthetic oligonucleotide
  Antisense strand to SEQ ID NO: 2251036
ugcuuccaaauauuucccu

SEQ ID NO: 2251038 - RNA, 19 nt, Artificial Sequence
  Description of Artificial Sequence: Synthetic oligonucleotide
  Sense strand starting at position 3384 of SEQ ID NO: 1884243
gggaaauauuuggaagcau

SEQ ID NO: 2251039 - RNA, 19 nt, Artificial Sequence
  Description of Artificial Sequence: Synthetic oligonucleotide
  Antisense strand to SEQ ID NO: 2251038
augcuuccaaauauuuccc

SEQ ID NO: 2251040 - RNA, 19 nt, Artificial Sequence
  Description of Artificial Sequence: Synthetic oligonucleotide
  Sense strand starting at position 3444 of SEQ ID NO: 1884243
ucggcaaauuaauccuaaa

SEQ ID NO: 2251041 - RNA, 19 nt, Artificial Sequence
  Description of Artificial Sequence: Synthetic oligonucleotide
  Antisense strand to SEQ ID NO: 2251040
uuuaggauuaauuugccga

SEQ ID NO: 2251042 - RNA, 19 nt, Artificial Sequence
  Description of Artificial Sequence: Synthetic oligonucleotide
  Sense strand starting at position 3544 of SEQ ID NO: 1884243
cacauugagugauuggaca

SEQ ID NO: 2251043 - RNA, 19 nt, Artificial Sequence
  Description of Artificial Sequence: Synthetic oligonucleotide
  Antisense strand to SEQ ID NO: 2251042
uguccaaucacucaaugug

SEQ ID NO: 2251044 - RNA, 19 nt, Artificial Sequence
  Description of Artificial Sequence: Synthetic oligonucleotide
  Sense strand starting at position 3589 of SEQ ID NO: 1884243
uuuccucauguguaagaaa

SEQ ID NO: 2251045 - RNA, 19 nt, Artificial Sequence
  Description of Artificial Sequence: Synthetic oligonucleotide
  Antisense strand to SEQ ID NO: 2251044
uuucuuacacaugaggaaa

SEQ ID NO: 2251046 - RNA, 19 nt, Artificial Sequence
  Description of Artificial Sequence: Synthetic oligonucleotide
  Sense strand starting at position 3611 of SEQ ID NO: 1884243
gaauaauaggguugugagg

SEQ ID NO: 2251047 - RNA, 19 nt, Artificial Sequence
  Description of Artificial Sequence: Synthetic oligonucleotide
  Antisense strand to SEQ ID NO: 2251046
ccucacaacccuauuauuc

SEQ ID NO: 2251048 - RNA, 19 nt, Artificial Sequence
  Description of Artificial Sequence: Synthetic oligonucleotide
  Sense strand starting at position 3694 of SEQ ID NO: 1884243
aguguaacugaucacugua

SEQ ID NO: 2251049 - RNA, 19 nt, Artificial Sequence
  Description of Artificial Sequence: Synthetic oligonucleotide
  Antisense strand to SEQ ID NO: 2251048
uacagugaucaguuacacu

SEQ ID NO: 2251050 - RNA, 19 nt, Artificial Sequence
  Description of Artificial Sequence: Synthetic oligonucleotide
  Sense strand starting at position 3696 of SEQ ID NO: 1884243
uguaacugaucacuguaau

SEQ ID NO: 2251051 - RNA, 19 nt, Artificial Sequence
  Description of Artificial Sequence: Synthetic oligonucleotide
  Antisense strand to SEQ ID NO: 2251050
auuacagugaucaguuaca

SEQ ID NO: 2251052 - RNA, 19 nt, Artificial Sequence
  Description of Artificial Sequence: Synthetic oligonucleotide
  Sense strand starting at position 3697 of SEQ ID NO: 1884243
guaacugaucacuguaauu

SEQ ID NO: 2251053 - RNA, 19 nt, Artificial Sequence
  Description of Artificial Sequence: Synthetic oligonucleotide
  Antisense strand to SEQ ID NO: 2251052
aauuacagugaucaguuac

SEQ ID NO: 2251054 - RNA, 19 nt, Artificial Sequence
  Description of Artificial Sequence: Synthetic oligonucleotide
  Sense strand starting at position 3715 of SEQ ID NO: 1884243
uuacacuggucaguuaaau

SEQ ID NO: 2251055 - RNA, 19 nt, Artificial Sequence
  Description of Artificial Sequence: Synthetic oligonucleotide
  Antisense strand to SEQ ID NO: 2251054
auuuaacugaccaguguaa

SEQ ID NO: 2251056 - RNA, 19 nt, Artificial Sequence
  Description of Artificial Sequence: Synthetic oligonucleotide
  Sense strand starting at position 3904 of SEQ ID NO: 1884243
acaugauugucucugagug

SEQ ID NO: 2251057 - RNA, 19 nt, Artificial Sequence
  Description of Artificial Sequence: Synthetic oligonucleotide
  Antisense strand to SEQ ID NO: 2251056
cacucagagacaaucaugu

SEQ ID NO: 2251058 - RNA, 19 nt, Artificial Sequence
  Description of Artificial Sequence: Synthetic oligonucleotide
  Sense strand starting at position 56 of SEQ ID NO: 1884244
cguaucagucgugauauuu

SEQ ID NO: 2251059 - RNA, 19 nt, Artificial Sequence
  Description of Artificial Sequence: Synthetic oligonucleotide
  Antisense strand to SEQ ID NO: 2251058
aaauaucacgacugauacg

SEQ ID NO: 2251060 - RNA, 19 nt, Artificial Sequence
  Description of Artificial Sequence: Synthetic oligonucleotide
  Sense strand starting at position 76 of SEQ ID NO: 1884244
cgaauaauucuauacuugu

SEQ ID NO: 2251061 - RNA, 19 nt, Artificial Sequence
  Description of Artificial Sequence: Synthetic oligonucleotide
  Antisense strand to SEQ ID NO: 2251060
acaaguauagaauuauucg

SEQ ID NO: 2251062 - RNA, 19 nt, Artificial Sequence
  Description of Artificial Sequence: Synthetic oligonucleotide
  Sense strand starting at position 211 of SEQ ID NO: 1884244
ggaauacacgcucaucauu

SEQ ID NO: 2251063 - RNA, 19 nt, Artificial Sequence
  Description of Artificial Sequence: Synthetic oligonucleotide
  Antisense strand to SEQ ID NO: 2251062
aaugaugagcguguauucc

SEQ ID NO: 2251064 - RNA, 19 nt, Artificial Sequence
  Description of Artificial Sequence: Synthetic oligonucleotide
  Sense strand starting at position 399 of SEQ ID NO: 1884244
ucagaugucuauguaaaua

SEQ ID NO: 2251065 - RNA, 19 nt, Artificial Sequence
  Description of Artificial Sequence: Synthetic oligonucleotide
  Antisense strand to SEQ ID NO: 2251064
uauuuacauagacaucuga

SEQ ID NO: 2251066 - RNA, 19 nt, Artificial Sequence
  Description of Artificial Sequence: Synthetic oligonucleotide
  Sense strand starting at position 477 of SEQ ID NO: 1884244
uuaacugaccaguguaaau

SEQ ID NO: 2251067 - RNA, 19 nt, Artificial Sequence
  Description of Artificial Sequence: Synthetic oligonucleotide
  Antisense strand to SEQ ID NO: 2251066
auuuacacuggucaguuaa

SEQ ID NO: 2251068 - RNA, 19 nt, Artificial Sequence
  Description of Artificial Sequence: Synthetic oligonucleotide
  Sense strand starting at position 489 of SEQ ID NO: 1884244
uguaaauuacagugaucag

SEQ ID NO: 2251069 - RNA, 19 nt, Artificial Sequence
  Description of Artificial Sequence: Synthetic oligonucleotide
  Antisense strand to SEQ ID NO: 2251068
cugaucacuguaauuuaca

SEQ ID NO: 2251070 - RNA, 19 nt, Artificial Sequence
  Description of Artificial Sequence: Synthetic oligonucleotide
  Sense strand starting at position 490 of SEQ ID NO: 1884244
guaaauuacagugaucagu

SEQ ID NO: 2251071 - RNA, 19 nt, Artificial Sequence
  Description of Artificial Sequence: Synthetic oligonucleotide
  Antisense strand to SEQ ID NO: 2251070
acugaucacuguaauuuac

SEQ ID NO: 2251072 - RNA, 19 nt, Artificial Sequence
  Description of Artificial Sequence: Synthetic oligonucleotide
  Sense strand starting at position 513 of SEQ ID NO: 1884244
cuuauuuagugcuuacucu

SEQ ID NO: 2251073 - RNA, 19 nt, Artificial Sequence
  Description of Artificial Sequence: Synthetic oligonucleotide
  Antisense strand to SEQ ID NO: 2251072
agaguaagcacuaaauaag

SEQ ID NO: 2251074 - RNA, 19 nt, Artificial Sequence
  Description of Artificial Sequence: Synthetic oligonucleotide
  Sense strand starting at position 653 of SEQ ID NO: 1884244
ucacucaaugugggacauu

SEQ ID NO: 2251075 - RNA, 19 nt, Artificial Sequence
  Description of Artificial Sequence: Synthetic oligonucleotide
  Antisense strand to SEQ ID NO: 2251074
aaugucccacauugaguga

SEQ ID NO: 2251076 - RNA, 19 nt, Artificial Sequence
  Description of Artificial Sequence: Synthetic oligonucleotide
  Sense strand starting at position 1138 of SEQ ID NO: 1884244
ggccgauucuuuguaauuu

SEQ ID NO: 2251077 - RNA, 19 nt, Artificial Sequence
  Description of Artificial Sequence: Synthetic oligonucleotide
  Antisense strand to SEQ ID NO: 2251076
aaauuacaaagaaucggcc

SEQ ID NO: 2251078 - RNA, 19 nt, Artificial Sequence
  Description of Artificial Sequence: Synthetic oligonucleotide
  Sense strand starting at position 1279 of SEQ ID NO: 1884244
uugacaugucaauauuagu

SEQ ID NO: 2251079 - RNA, 19 nt, Artificial Sequence
  Description of Artificial Sequence: Synthetic oligonucleotide
  Antisense strand to SEQ ID NO: 2251078
acuaauauugacaugucaa

SEQ ID NO: 2251080 - RNA, 19 nt, Artificial Sequence
  Description of Artificial Sequence: Synthetic oligonucleotide
  Sense strand starting at position 1320 of SEQ ID NO: 1884244
ccguaauuugcgggauaau

SEQ ID NO: 2251081 - RNA, 19 nt, Artificial Sequence
  Description of Artificial Sequence: Synthetic oligonucleotide
  Antisense strand to SEQ ID NO: 2251080
auuaucccgcaaauuacgg

SEQ ID NO: 2251082 - RNA, 19 nt, Artificial Sequence
  Description of Artificial Sequence: Synthetic oligonucleotide
  Sense strand starting at position 1351 of SEQ ID NO: 1884244
acaagaugugcuuacuaag

SEQ ID NO: 2251083 - RNA, 19 nt, Artificial Sequence
  Description of Artificial Sequence: Synthetic oligonucleotide
  Antisense strand to SEQ ID NO: 2251082
cuuaguaagcacaucuugu

SEQ ID NO: 2251084 - RNA, 19 nt, Artificial Sequence
  Description of Artificial Sequence: Synthetic oligonucleotide
  Sense strand starting at position 1385 of SEQ ID NO: 1884244
acgcaacaucucuaguaga

SEQ ID NO: 2251085 - RNA, 19 nt, Artificial Sequence
  Description of Artificial Sequence: Synthetic oligonucleotide
  Antisense strand to SEQ ID NO: 2251084
ucuacuagagauguugcgu

SEQ ID NO: 2251086 - RNA, 19 nt, Artificial Sequence
  Description of Artificial Sequence: Synthetic oligonucleotide
  Sense strand starting at position 1895 of SEQ ID NO: 1884244
gguuaugauaaccgagaga

SEQ ID NO: 2251087 - RNA, 19 nt, Artificial Sequence
  Description of Artificial Sequence: Synthetic oligonucleotide
  Antisense strand to SEQ ID NO: 2251086
ucucucgguuaucauaacc

SEQ ID NO: 2251088 - RNA, 19 nt, Artificial Sequence
  Description of Artificial Sequence: Synthetic oligonucleotide
  Sense strand starting at position 2648 of SEQ ID NO: 1884244
ggacucauccugugaaaug

SEQ ID NO: 2251089 - RNA, 19 nt, Artificial Sequence
  Description of Artificial Sequence: Synthetic oligonucleotide
  Antisense strand to SEQ ID NO: 2251088
cauuucacaggaugagucc

SEQ ID NO: 2251090 - RNA, 19 nt, Artificial Sequence
  Description of Artificial Sequence: Synthetic oligonucleotide
  Sense strand starting at position 2807 of SEQ ID NO: 1884244
cuagauuaggauuguaaac

SEQ ID NO: 2251091 - RNA, 19 nt, Artificial Sequence
  Description of Artificial Sequence: Synthetic oligonucleotide
  Antisense strand to SEQ ID NO: 2251090
guuuacaauccuaaucuag

SEQ ID NO: 2251092 - RNA, 19 nt, Artificial Sequence
  Description of Artificial Sequence: Synthetic oligonucleotide
  Sense strand starting at position 2818 of SEQ ID NO: 1884244
uuguaaacccuguaccaaa

SEQ ID NO: 2251093 - RNA, 19 nt, Artificial Sequence
  Description of Artificial Sequence: Synthetic oligonucleotide
  Antisense strand to SEQ ID NO: 2251092
uuugguacaggguuuacaa

SEQ ID NO: 2251094 - RNA, 19 nt, Artificial Sequence
  Description of Artificial Sequence: Synthetic oligonucleotide
  Sense strand starting at position 2889 of SEQ ID NO: 1884244
uagguaagguuccuuagag

SEQ ID NO: 2251095 - RNA, 19 nt, Artificial Sequence
  Description of Artificial Sequence: Synthetic oligonucleotide
  Antisense strand to SEQ ID NO: 2251094
cucuaaggaaccuuaccua

SEQ ID NO: 2251096 - RNA, 19 nt, Artificial Sequence
  Description of Artificial Sequence: Synthetic oligonucleotide
  Sense strand starting at position 2890 of SEQ ID NO: 1884244
agguaagguuccuuagagg

SEQ ID NO: 2251097 - RNA, 19 nt, Artificial Sequence
  Description of Artificial Sequence: Synthetic oligonucleotide
  Antisense strand to SEQ ID NO: 2251096
ccucuaaggaaccuuaccu

SEQ ID NO: 2251098 - RNA, 19 nt, Artificial Sequence
  Description of Artificial Sequence: Synthetic oligonucleotide
  Sense strand starting at position 2942 of SEQ ID NO: 1884244
gggagcucugguuaagggu

SEQ ID NO: 2251099 - RNA, 19 nt, Artificial Sequence
  Description of Artificial Sequence: Synthetic oligonucleotide
  Antisense strand to SEQ ID NO: 2251098
acccuuaaccagagcuccc

SEQ ID NO: 2251100 - RNA, 19 nt, Artificial Sequence
  Description of Artificial Sequence: Synthetic oligonucleotide
  Sense strand starting at position 2991 of SEQ ID NO: 1884244
augaaauacuuggcaacga

SEQ ID NO: 2251101 - RNA, 19 nt, Artificial Sequence
  Description of Artificial Sequence: Synthetic oligonucleotide
  Antisense strand to SEQ ID NO: 2251100
ucguugccaaguauuucau

SEQ ID NO: 2251102 - RNA, 19 nt, Artificial Sequence
  Description of Artificial Sequence: Synthetic oligonucleotide
  Sense strand starting at position 3077 of SEQ ID NO: 1884244
gguguaaagaaguguggaa

SEQ ID NO: 2251103 - RNA, 19 nt, Artificial Sequence
  Description of Artificial Sequence: Synthetic oligonucleotide
  Antisense strand to SEQ ID NO: 2251102
uuccacacuucuuuacacc

SEQ ID NO: 2251104 - RNA, 19 nt, Artificial Sequence
  Description of Artificial Sequence: Synthetic oligonucleotide
  Sense strand starting at position 3079 of SEQ ID NO: 1884244
uguaaagaaguguggaaga

SEQ ID NO: 2251105 - RNA, 19 nt, Artificial Sequence
  Description of Artificial Sequence: Synthetic oligonucleotide
  Antisense strand to SEQ ID NO: 2251104
ucuuccacacuucuuuaca

SEQ ID NO: 2251106 - RNA, 19 nt, Artificial Sequence
  Description of Artificial Sequence: Synthetic oligonucleotide
  Sense strand starting at position 3089 of SEQ ID NO: 1884244
uguggaagaaguuguugaa

SEQ ID NO: 2251107 - RNA, 19 nt, Artificial Sequence
  Description of Artificial Sequence: Synthetic oligonucleotide
  Antisense strand to SEQ ID NO: 2251106
uucaacaacuucuuccaca

SEQ ID NO: 2251108 - RNA, 19 nt, Artificial Sequence
  Description of Artificial Sequence: Synthetic oligonucleotide
  Sense strand starting at position 3098 of SEQ ID NO: 1884244
aguuguugaaucuggaaag

SEQ ID NO: 2251109 - RNA, 19 nt, Artificial Sequence
  Description of Artificial Sequence: Synthetic oligonucleotide
  Antisense strand to SEQ ID NO: 2251108
cuuuccagauucaacaacu

SEQ ID NO: 2251110 - RNA, 19 nt, Artificial Sequence
  Description of Artificial Sequence: Synthetic oligonucleotide
  Sense strand starting at position 3153 of SEQ ID NO: 1884244
acugguauuagguacugau

SEQ ID NO: 2251111 - RNA, 19 nt, Artificial Sequence
  Description of Artificial Sequence: Synthetic oligonucleotide
  Antisense strand to SEQ ID NO: 2251110
aucaguaccuaauaccagu

SEQ ID NO: 2251112 - RNA, 19 nt, Artificial Sequence
  Description of Artificial Sequence: Synthetic oligonucleotide
  Sense strand starting at position 3358 of SEQ ID NO: 1884244
ucccuuauggcagaaugua

SEQ ID NO: 2251113 - RNA, 19 nt, Artificial Sequence
  Description of Artificial Sequence: Synthetic oligonucleotide
  Antisense strand to SEQ ID NO: 2251112
uacauucugccauaaggga

SEQ ID NO: 2251114 - RNA, 19 nt, Artificial Sequence
  Description of Artificial Sequence: Synthetic oligonucleotide
  Sense strand starting at position 3366 of SEQ ID NO: 1884244
ggcagaauguaaucauuac

SEQ ID NO: 2251115 - RNA, 19 nt, Artificial Sequence
  Description of Artificial Sequence: Synthetic oligonucleotide
  Antisense strand to SEQ ID NO: 2251114
guaaugauuacauucugcc

SEQ ID NO: 2251116 - RNA, 19 nt, Artificial Sequence
  Description of Artificial Sequence: Synthetic oligonucleotide
  Sense strand starting at position 3370 of SEQ ID NO: 1884244
gaauguaaucauuacugug

SEQ ID NO: 2251117 - RNA, 19 nt, Artificial Sequence
  Description of Artificial Sequence: Synthetic oligonucleotide
  Antisense strand to SEQ ID NO: 2251116
cacaguaaugauuacauuc

SEQ ID NO: 2251118 - RNA, 19 nt, Artificial Sequence
  Description of Artificial Sequence: Synthetic oligonucleotide
  Sense strand starting at position 3394 of SEQ ID NO: 1884244
ggacaaccuuaugaauuua

SEQ ID NO: 2251119 - RNA, 19 nt, Artificial Sequence
  Description of Artificial Sequence: Synthetic oligonucleotide
  Antisense strand to SEQ ID NO: 2251118
uaaauucauaagguugucc

SEQ ID NO: 2251120 - RNA, 19 nt, Artificial Sequence
  Description of Artificial Sequence: Synthetic oligonucleotide
  Sense strand starting at position 3405 of SEQ ID NO: 1884244
ugaauuuacuugucuuugu

SEQ ID NO: 2251121 - RNA, 19 nt, Artificial Sequence
  Description of Artificial Sequence: Synthetic oligonucleotide
  Antisense strand to SEQ ID NO: 2251120
acaaagacaaguaaauuca

SEQ ID NO: 2251122 - RNA, 19 nt, Artificial Sequence
  Description of Artificial Sequence: Synthetic oligonucleotide
  Sense strand starting at position 3408 of SEQ ID NO: 1884244
auuuacuugucuuugugua

SEQ ID NO: 2251123 - RNA, 19 nt, Artificial Sequence
  Description of Artificial Sequence: Synthetic oligonucleotide
  Antisense strand to SEQ ID NO: 2251122
uacacaaagacaaguaaau

SEQ ID NO: 2251124 - RNA, 19 nt, Artificial Sequence
  Description of Artificial Sequence: Synthetic oligonucleotide
  Sense strand starting at position 3435 of SEQ ID NO: 1884244
augaaagguggauguugaa

SEQ ID NO: 2251125 - RNA, 19 nt, Artificial Sequence
  Description of Artificial Sequence: Synthetic oligonucleotide
  Antisense strand to SEQ ID NO: 2251124
uucaacauccaccuuucau

SEQ ID NO: 2251126 - RNA, 19 nt, Artificial Sequence
  Description of Artificial Sequence: Synthetic oligonucleotide
  Sense strand starting at position 3477 of SEQ ID NO: 1884244
agagcaugucacugaaacu

SEQ ID NO: 2251127 - RNA, 19 nt, Artificial Sequence
  Description of Artificial Sequence: Synthetic oligonucleotide
  Antisense strand to SEQ ID NO: 2251126
aguuucagugacaugcucu

SEQ ID NO: 2251128 - RNA, 19 nt, Artificial Sequence
  Description of Artificial Sequence: Synthetic oligonucleotide
  Sense strand starting at position 3484 of SEQ ID NO: 1884244
gucacugaaacuuggaagu

SEQ ID NO: 2251129 - RNA, 19 nt, Artificial Sequence
  Description of Artificial Sequence: Synthetic oligonucleotide
  Antisense strand to SEQ ID NO: 2251128
acuuccaaguuucagugac

SEQ ID NO: 2251130 - RNA, 19 nt, Artificial Sequence
  Description of Artificial Sequence: Synthetic oligonucleotide
  Sense strand starting at position 3595 of SEQ ID NO: 1884244
uguucuugucuuuaaagag

SEQ ID NO: 2251131 - RNA, 19 nt, Artificial Sequence
  Description of Artificial Sequence: Synthetic oligonucleotide
  Antisense strand to SEQ ID NO: 2251130
cucuuuaaagacaagaaca

SEQ ID NO: 2251132 - RNA, 19 nt, Artificial Sequence
  Description of Artificial Sequence: Synthetic oligonucleotide
  Sense strand starting at position 3721 of SEQ ID NO: 1884244
uuaaaugaguguccugaau

SEQ ID NO: 2251133 - RNA, 19 nt, Artificial Sequence
  Description of Artificial Sequence: Synthetic oligonucleotide
  Antisense strand to SEQ ID NO: 2251132
auucaggacacucauuuaa

SEQ ID NO: 2251134 - RNA, 19 nt, Artificial Sequence
  Description of Artificial Sequence: Synthetic oligonucleotide
  Sense strand starting at position 3758 of SEQ ID NO: 1884244
cuuggagaucaccgauuau

SEQ ID NO: 2251135 - RNA, 19 nt, Artificial Sequence
  Description of Artificial Sequence: Synthetic oligonucleotide
  Antisense strand to SEQ ID NO: 2251134
auaaucggugaucuccaag

SEQ ID NO: 2251136 - RNA, 19 nt, Artificial Sequence
  Description of Artificial Sequence: Synthetic oligonucleotide
  Sense strand starting at position 3883 of SEQ ID NO: 1884244
ugcuguucucaagcaguuu

SEQ ID NO: 2251137 - RNA, 19 nt, Artificial Sequence
  Description of Artificial Sequence: Synthetic oligonucleotide
  Antisense strand to SEQ ID NO: 2251136
aaacugcuugagaacagca

SEQ ID NO: 2251138 - RNA, 19 nt, Artificial Sequence
  Description of Artificial Sequence: Synthetic oligonucleotide
  Sense strand starting at position 75 of SEQ ID NO: 1884245
aauugcguuccagaagauu

SEQ ID NO: 2251139 - RNA, 19 nt, Artificial Sequence
  Description of Artificial Sequence: Synthetic oligonucleotide
  Antisense strand to SEQ ID NO: 2251138
aaucuucuggaacgcaauu

SEQ ID NO: 2251140 - RNA, 19 nt, Artificial Sequence
  Description of Artificial Sequence: Synthetic oligonucleotide
  Sense strand starting at position 106 of SEQ ID NO: 1884245
uucuguaagcagcauguua

SEQ ID NO: 2251141 - RNA, 19 nt, Artificial Sequence
  Description of Artificial Sequence: Synthetic oligonucleotide
  Antisense strand to SEQ ID NO: 2251140
uaacaugcugcuuacagaa

SEQ ID NO: 2251142 - RNA, 19 nt, Artificial Sequence
  Description of Artificial Sequence: Synthetic oligonucleotide
  Sense strand starting at position 167 of SEQ ID NO: 1884245
ggaacaaacuuguuguuag

SEQ ID NO: 2251143 - RNA, 19 nt, Artificial Sequence
  Description of Artificial Sequence: Synthetic oligonucleotide
  Antisense strand to SEQ ID NO: 2251142
cuaacaacaaguuuguucc

SEQ ID NO: 2251144 - RNA, 19 nt, Artificial Sequence
  Description of Artificial Sequence: Synthetic oligonucleotide
  Sense strand starting at position 178 of SEQ ID NO: 1884245
guuguuagggcuaguguca

SEQ ID NO: 2251145 - RNA, 19 nt, Artificial Sequence
  Description of Artificial Sequence: Synthetic oligonucleotide
  Antisense strand to SEQ ID NO: 2251144
ugacacuagcccuaacaac

SEQ ID NO: 2251146 - RNA, 19 nt, Artificial Sequence
  Description of Artificial Sequence: Synthetic oligonucleotide
  Sense strand starting at position 251 of SEQ ID NO: 1884245
cgagcuaugugacuuuagu

SEQ ID NO: 2251147 - RNA, 19 nt, Artificial Sequence
  Description of Artificial Sequence: Synthetic oligonucleotide
  Antisense strand to SEQ ID NO: 2251146
acuaaagucacauagcucg

SEQ ID NO: 2251148 - RNA, 19 nt, Artificial Sequence
  Description of Artificial Sequence: Synthetic oligonucleotide
  Sense strand starting at position 364 of SEQ ID NO: 1884245
uugguagcucuccaaggua

SEQ ID NO: 2251149 - RNA, 19 nt, Artificial Sequence
  Description of Artificial Sequence: Synthetic oligonucleotide
  Antisense strand to SEQ ID NO: 2251148
uaccuuggagagcuaccaa

SEQ ID NO: 2251150 - RNA, 19 nt, Artificial Sequence
  Description of Artificial Sequence: Synthetic oligonucleotide
  Sense strand starting at position 367 of SEQ ID NO: 1884245
guagcucuccaagguaguu

SEQ ID NO: 2251151 - RNA, 19 nt, Artificial Sequence
  Description of Artificial Sequence: Synthetic oligonucleotide
  Antisense strand to SEQ ID NO: 2251150
aacuaccuuggagagcuac

SEQ ID NO: 2251152 - RNA, 19 nt, Artificial Sequence
  Description of Artificial Sequence: Synthetic oligonucleotide
  Sense strand starting at position 379 of SEQ ID NO: 1884245
gguaguugcgaucaccuuu

SEQ ID NO: 2251153 - RNA, 19 nt, Artificial Sequence
  Description of Artificial Sequence: Synthetic oligonucleotide
  Antisense strand to SEQ ID NO: 2251152
aaaggugaucgcaacuacc

SEQ ID NO: 2251154 - RNA, 19 nt, Artificial Sequence
  Description of Artificial Sequence: Synthetic oligonucleotide
  Sense strand starting at position 406 of SEQ ID NO: 1884245
gagguaauuucagggaagg

SEQ ID NO: 2251155 - RNA, 19 nt, Artificial Sequence
  Description of Artificial Sequence: Synthetic oligonucleotide
  Antisense strand to SEQ ID NO: 2251154
ccuucccugaaauuaccuc

SEQ ID NO: 2251156 - RNA, 19 nt, Artificial Sequence
  Description of Artificial Sequence: Synthetic oligonucleotide
  Sense strand starting at position 427 of SEQ ID NO: 1884245
gaacacuuguuaguggcaa

SEQ ID NO: 2251157 - RNA, 19 nt, Artificial Sequence
  Description of Artificial Sequence: Synthetic oligonucleotide
  Antisense strand to SEQ ID NO: 2251156
uugccacuaacaaguguuc

SEQ ID NO: 2251158 - RNA, 19 nt, Artificial Sequence
  Description of Artificial Sequence: Synthetic oligonucleotide
  Sense strand starting at position 499 of SEQ ID NO: 1884245
gucagaaacccuuaagcau

SEQ ID NO: 2251159 - RNA, 19 nt, Artificial Sequence
  Description of Artificial Sequence: Synthetic oligonucleotide
  Antisense strand to SEQ ID NO: 2251158
augcuuaaggguuucugac

SEQ ID NO: 2251160 - RNA, 19 nt, Artificial Sequence
  Description of Artificial Sequence: Synthetic oligonucleotide
  Sense strand starting at position 603 of SEQ ID NO: 1884245
gaggcugauuggcuuugua

SEQ ID NO: 2251161 - RNA, 19 nt, Artificial Sequence
  Description of Artificial Sequence: Synthetic oligonucleotide
  Antisense strand to SEQ ID NO: 2251160
uacaaagccaaucagccuc

SEQ ID NO: 2251162 - RNA, 19 nt, Artificial Sequence
  Description of Artificial Sequence: Synthetic oligonucleotide
  Sense strand starting at position 702 of SEQ ID NO: 1884245
uuguguuaagcugaccuca

SEQ ID NO: 2251163 - RNA, 19 nt, Artificial Sequence
  Description of Artificial Sequence: Synthetic oligonucleotide
  Antisense strand to SEQ ID NO: 2251162
ugaggucagcuuaacacaa

SEQ ID NO: 2251164 - RNA, 19 nt, Artificial Sequence
  Description of Artificial Sequence: Synthetic oligonucleotide
  Sense strand starting at position 704 of SEQ ID NO: 1884245
guguuaagcugaccucauu

SEQ ID NO: 2251165 - RNA, 19 nt, Artificial Sequence
  Description of Artificial Sequence: Synthetic oligonucleotide
  Antisense strand to SEQ ID NO: 2251164
aaugaggucagcuuaacac

SEQ ID NO: 2251166 - RNA, 19 nt, Artificial Sequence
  Description of Artificial Sequence: Synthetic oligonucleotide
  Sense strand starting at position 738 of SEQ ID NO: 1884245
aaaggagguuccucuuauc

SEQ ID NO: 2251167 - RNA, 19 nt, Artificial Sequence
  Description of Artificial Sequence: Synthetic oligonucleotide
  Antisense strand to SEQ ID NO: 2251166
gauaagaggaaccuccuuu

SEQ ID NO: 2251168 - RNA, 19 nt, Artificial Sequence
  Description of Artificial Sequence: Synthetic oligonucleotide
  Sense strand starting at position 877 of SEQ ID NO: 1884245
acugcaaacacgugguuaa

SEQ ID NO: 2251169 - RNA, 19 nt, Artificial Sequence
  Description of Artificial Sequence: Synthetic oligonucleotide
  Antisense strand to SEQ ID NO: 2251168
uuaaccacguguuugcagu

SEQ ID NO: 2251170 - RNA, 19 nt, Artificial Sequence
  Description of Artificial Sequence: Synthetic oligonucleotide
  Sense strand starting at position 878 of SEQ ID NO: 1884245
cugcaaacacgugguuaaa

SEQ ID NO: 2251171 - RNA, 19 nt, Artificial Sequence
  Description of Artificial Sequence: Synthetic oligonucleotide
  Antisense strand to SEQ ID NO: 2251170
uuuaaccacguguuugcag

SEQ ID NO: 2251172 - RNA, 19 nt, Artificial Sequence
  Description of Artificial Sequence: Synthetic oligonucleotide
  Sense strand starting at position 912 of SEQ ID NO: 1884245
ucucgacagucuccaguaa

SEQ ID NO: 2251173 - RNA, 19 nt, Artificial Sequence
  Description of Artificial Sequence: Synthetic oligonucleotide
  Antisense strand to SEQ ID NO: 2251172
uuacuggagacugucgaga

SEQ ID NO: 2251174 - RNA, 19 nt, Artificial Sequence
  Description of Artificial Sequence: Synthetic oligonucleotide
  Sense strand starting at position 913 of SEQ ID NO: 1884245
cucgacagucuccaguaau

SEQ ID NO: 2251175 - RNA, 19 nt, Artificial Sequence
  Description of Artificial Sequence: Synthetic oligonucleotide
  Antisense strand to SEQ ID NO: 2251174
auuacuggagacugucgag

SEQ ID NO: 2251176 - RNA, 19 nt, Artificial Sequence
  Description of Artificial Sequence: Synthetic oligonucleotide
  Sense strand starting at position 916 of SEQ ID NO: 1884245
gacagucuccaguaaugca

SEQ ID NO: 2251177 - RNA, 19 nt, Artificial Sequence
  Description of Artificial Sequence: Synthetic oligonucleotide
  Antisense strand to SEQ ID NO: 2251176
ugcauuacuggagacuguc

SEQ ID NO: 2251178 - RNA, 19 nt, Artificial Sequence
  Description of Artificial Sequence: Synthetic oligonucleotide
  Sense strand starting at position 1006 of SEQ ID NO: 1884245
cccugacauucuccaagga

SEQ ID NO: 2251179 - RNA, 19 nt, Artificial Sequence
  Description of Artificial Sequence: Synthetic oligonucleotide
  Antisense strand to SEQ ID NO: 2251178
uccuuggagaaugucaggg

SEQ ID NO: 2251180 - RNA, 19 nt, Artificial Sequence
  Description of Artificial Sequence: Synthetic oligonucleotide
  Sense strand starting at position 1236 of SEQ ID NO: 1884245
gggugaaagaguuaccgua

SEQ ID NO: 2251181 - RNA, 19 nt, Artificial Sequence
  Description of Artificial Sequence: Synthetic oligonucleotide
  Antisense strand to SEQ ID NO: 2251180
uacgguaacucuuucaccc

SEQ ID NO: 2251182 - RNA, 19 nt, Artificial Sequence
  Description of Artificial Sequence: Synthetic oligonucleotide
  Sense strand starting at position 1238 of SEQ ID NO: 1884245
gugaaagaguuaccguaag

SEQ ID NO: 2251183 - RNA, 19 nt, Artificial Sequence
  Description of Artificial Sequence: Synthetic oligonucleotide
  Antisense strand to SEQ ID NO: 2251182
cuuacgguaacucuuucac

SEQ ID NO: 2251184 - RNA, 19 nt, Artificial Sequence
  Description of Artificial Sequence: Synthetic oligonucleotide
  Sense strand starting at position 1291 of SEQ ID NO: 1884245
gcgauucuccaacgaggca

SEQ ID NO: 2251185 - RNA, 19 nt, Artificial Sequence
  Description of Artificial Sequence: Synthetic oligonucleotide
  Antisense strand to SEQ ID NO: 2251184
ugccucguuggagaaucgc

SEQ ID NO: 2251186 - RNA, 19 nt, Artificial Sequence
  Description of Artificial Sequence: Synthetic oligonucleotide
  Sense strand starting at position 2590 of SEQ ID NO: 1884245
gggagcuggacuuggaauu

SEQ ID NO: 2251187 - RNA, 19 nt, Artificial Sequence
  Description of Artificial Sequence: Synthetic oligonucleotide
  Antisense strand to SEQ ID NO: 2251186
aauuccaaguccagcuccc

SEQ ID NO: 2251188 - RNA, 19 nt, Artificial Sequence
  Description of Artificial Sequence: Synthetic oligonucleotide
  Sense strand starting at position 2689 of SEQ ID NO: 1884245
ugggcucaacuuuaaugua

SEQ ID NO: 2251189 - RNA, 19 nt, Artificial Sequence
  Description of Artificial Sequence: Synthetic oligonucleotide
  Antisense strand to SEQ ID NO: 2251188
uacauuaaaguugagccca

SEQ ID NO: 2251190 - RNA, 19 nt, Artificial Sequence
  Description of Artificial Sequence: Synthetic oligonucleotide
  Sense strand starting at position 2803 of SEQ ID NO: 1884245
aggagaaggacacguuagu

SEQ ID NO: 2251191 - RNA, 19 nt, Artificial Sequence
  Description of Artificial Sequence: Synthetic oligonucleotide
  Antisense strand to SEQ ID NO: 2251190
acuaacguguccuucuccu

SEQ ID NO: 2251192 - RNA, 19 nt, Artificial Sequence
  Description of Artificial Sequence: Synthetic oligonucleotide
  Sense strand starting at position 2888 of SEQ ID NO: 1884245
ugacgcugcauccaugauu

SEQ ID NO: 2251193 - RNA, 19 nt, Artificial Sequence
  Description of Artificial Sequence: Synthetic oligonucleotide
  Antisense strand to SEQ ID NO: 2251192
aaucauggaugcagcguca

SEQ ID NO: 2251194 - RNA, 19 nt, Artificial Sequence
  Description of Artificial Sequence: Synthetic oligonucleotide
  Sense strand starting at position 2891 of SEQ ID NO: 1884245
cgcugcauccaugauuguu

SEQ ID NO: 2251195 - RNA, 19 nt, Artificial Sequence
  Description of Artificial Sequence: Synthetic oligonucleotide
  Antisense strand to SEQ ID NO: 2251194
aacaaucauggaugcagcg

SEQ ID NO: 2251196 - RNA, 19 nt, Artificial Sequence
  Description of Artificial Sequence: Synthetic oligonucleotide
  Sense strand starting at position 3400 of SEQ ID NO: 1884245
ucagacauguuucuaagau

SEQ ID NO: 2251197 - RNA, 19 nt, Artificial Sequence
  Description of Artificial Sequence: Synthetic oligonucleotide
  Antisense strand to SEQ ID NO: 2251196
aucuuagaaacaugucuga

SEQ ID NO: 2251198 - RNA, 19 nt, Artificial Sequence
  Description of Artificial Sequence: Synthetic oligonucleotide
  Sense strand starting at position 3404 of SEQ ID NO: 1884245
acauguuucuaagauuuga

SEQ ID NO: 2251199 - RNA, 19 nt, Artificial Sequence
  Description of Artificial Sequence: Synthetic oligonucleotide
  Antisense strand to SEQ ID NO: 2251198
ucaaaucuuagaaacaugu

SEQ ID NO: 2251200 - RNA, 19 nt, Artificial Sequence
  Description of Artificial Sequence: Synthetic oligonucleotide
  Sense strand starting at position 3419 of SEQ ID NO: 1884245
uugaguccuuaguaaauuu

SEQ ID NO: 2251201 - RNA, 19 nt, Artificial Sequence
  Description of Artificial Sequence: Synthetic oligonucleotide
  Antisense strand to SEQ ID NO: 2251200
aaauuuacuaaggacucaa

SEQ ID NO: 2251202 - RNA, 19 nt, Artificial Sequence
  Description of Artificial Sequence: Synthetic oligonucleotide
  Sense strand starting at position 3515 of SEQ ID NO: 1884245
cccuuuaaggcuuagucua

SEQ ID NO: 2251203 - RNA, 19 nt, Artificial Sequence
  Description of Artificial Sequence: Synthetic oligonucleotide
  Antisense strand to SEQ ID NO: 2251202
uagacuaagccuuaaaggg

SEQ ID NO: 2251204 - RNA, 19 nt, Artificial Sequence
  Description of Artificial Sequence: Synthetic oligonucleotide
  Sense strand starting at position 3523 of SEQ ID NO: 1884245
ggcuuagucuaucuaggau

SEQ ID NO: 2251205 - RNA, 19 nt, Artificial Sequence
  Description of Artificial Sequence: Synthetic oligonucleotide
  Antisense strand to SEQ ID NO: 2251204
auccuagauagacuaagcc

SEQ ID NO: 2251206 - RNA, 19 nt, Artificial Sequence
  Description of Artificial Sequence: Synthetic oligonucleotide
  Sense strand starting at position 3526 of SEQ ID NO: 1884245
uuagucuaucuaggauuau

SEQ ID NO: 2251207 - RNA, 19 nt, Artificial Sequence
  Description of Artificial Sequence: Synthetic oligonucleotide
  Antisense strand to SEQ ID NO: 2251206
auaauccuagauagacuaa

SEQ ID NO: 2251208 - RNA, 19 nt, Artificial Sequence
  Description of Artificial Sequence: Synthetic oligonucleotide
  Sense strand starting at position 3594 of SEQ ID NO: 1884245
uuaccucuccuguauguuu

SEQ ID NO: 2251209 - RNA, 19 nt, Artificial Sequence
  Description of Artificial Sequence: Synthetic oligonucleotide
  Antisense strand to SEQ ID NO: 2251208
aaacauacaggagagguaa

SEQ ID NO: 2251210 - RNA, 19 nt, Artificial Sequence
  Description of Artificial Sequence: Synthetic oligonucleotide
  Sense strand starting at position 3836 of SEQ ID NO: 1884245
gccugaauuccaggcuaga

SEQ ID NO: 2251211 - RNA, 19 nt, Artificial Sequence
  Description of Artificial Sequence: Synthetic oligonucleotide
  Antisense strand to SEQ ID NO: 2251210
ucuagccuggaauucaggc

SEQ ID NO: 2251212 - RNA, 19 nt, Artificial Sequence
  Description of Artificial Sequence: Synthetic oligonucleotide
  Sense strand starting at position 3853 of SEQ ID NO: 1884245
gaauauccacagugcguaa

SEQ ID NO: 2251213 - RNA, 19 nt, Artificial Sequence
  Description of Artificial Sequence: Synthetic oligonucleotide
  Antisense strand to SEQ ID NO: 2251212
uuacgcacuguggauauuc

SEQ ID NO: 2251214 - RNA, 19 nt, Artificial Sequence
  Description of Artificial Sequence: Synthetic oligonucleotide
  Sense strand starting at position 3874 of SEQ ID NO: 1884245
gacauaugcccuuaggugu

SEQ ID NO: 2251215 - RNA, 19 nt, Artificial Sequence
  Description of Artificial Sequence: Synthetic oligonucleotide
  Antisense strand to SEQ ID NO: 2251214
acaccuaagggcauauguc

SEQ ID NO: 2251216 - RNA, 19 nt, Artificial Sequence
  Description of Artificial Sequence: Synthetic oligonucleotide
  Sense strand starting at position 3885 of SEQ ID NO: 1884245
uuagguguugcacaaacau

SEQ ID NO: 2251217 - RNA, 19 nt, Artificial Sequence
  Description of Artificial Sequence: Synthetic oligonucleotide
  Antisense strand to SEQ ID NO: 2251216
auguuugugcaacaccuaa

SEQ ID NO: 2251218 - RNA, 19 nt, Artificial Sequence
  Description of Artificial Sequence: Synthetic oligonucleotide
  Sense strand starting at position 201 of SEQ ID NO: 1884246
ugguuugcuuacccauagu

SEQ ID NO: 2251219 - RNA, 19 nt, Artificial Sequence
  Description of Artificial Sequence: Synthetic oligonucleotide
  Antisense strand to SEQ ID NO: 2251218
acuauggguaagcaaacca

SEQ ID NO: 2251220 - RNA, 19 nt, Artificial Sequence
  Description of Artificial Sequence: Synthetic oligonucleotide
  Sense strand starting at position 204 of SEQ ID NO: 1884246
uuugcuuacccauaguguu

SEQ ID NO: 2251221 - RNA, 19 nt, Artificial Sequence
  Description of Artificial Sequence: Synthetic oligonucleotide
  Antisense strand to SEQ ID NO: 2251220
aacacuauggguaagcaaa

SEQ ID NO: 2251222 - RNA, 19 nt, Artificial Sequence
  Description of Artificial Sequence: Synthetic oligonucleotide
  Sense strand starting at position 384 of SEQ ID NO: 1884246
aaaguaggacuuuguaauc

SEQ ID NO: 2251223 - RNA, 19 nt, Artificial Sequence
  Description of Artificial Sequence: Synthetic oligonucleotide
  Antisense strand to SEQ ID NO: 2251222
gauuacaaaguccuacuuu

SEQ ID NO: 2251224 - RNA, 19 nt, Artificial Sequence
  Description of Artificial Sequence: Synthetic oligonucleotide
  Sense strand starting at position 389 of SEQ ID NO: 1884246
aggacuuuguaaucuuauu

SEQ ID NO: 2251225 - RNA, 19 nt, Artificial Sequence
  Description of Artificial Sequence: Synthetic oligonucleotide
  Antisense strand to SEQ ID NO: 2251224
aauaagauuacaaaguccu

SEQ ID NO: 2251226 - RNA, 19 nt, Artificial Sequence
  Description of Artificial Sequence: Synthetic oligonucleotide
  Sense strand starting at position 495 of SEQ ID NO: 1884246
uucuacuuuguauaaggau

SEQ ID NO: 2251227 - RNA, 19 nt, Artificial Sequence
  Description of Artificial Sequence: Synthetic oligonucleotide
  Antisense strand to SEQ ID NO: 2251226
auccuuauacaaaguagaa

SEQ ID NO: 2251228 - RNA, 19 nt, Artificial Sequence
  Description of Artificial Sequence: Synthetic oligonucleotide
  Sense strand starting at position 504 of SEQ ID NO: 1884246
guauaaggauacuuccauu

SEQ ID NO: 2251229 - RNA, 19 nt, Artificial Sequence
  Description of Artificial Sequence: Synthetic oligonucleotide
  Antisense strand to SEQ ID NO: 2251228
aauggaaguauccuuauac

SEQ ID NO: 2251230 - RNA, 19 nt, Artificial Sequence
  Description of Artificial Sequence: Synthetic oligonucleotide
  Sense strand starting at position 879 of SEQ ID NO: 1884246
uguguaucagaagguauag

SEQ ID NO: 2251231 - RNA, 19 nt, Artificial Sequence
  Description of Artificial Sequence: Synthetic oligonucleotide
  Antisense strand to SEQ ID NO: 2251230
cuauaccuucugauacaca

SEQ ID NO: 2251232 - RNA, 19 nt, Artificial Sequence
  Description of Artificial Sequence: Synthetic oligonucleotide
  Sense strand starting at position 929 of SEQ ID NO: 1884246
guguaaaugugguuuaagg

SEQ ID NO: 2251233 - RNA, 19 nt, Artificial Sequence
  Description of Artificial Sequence: Synthetic oligonucleotide
  Antisense strand to SEQ ID NO: 2251232
ccuuaaaccacauuuacac

SEQ ID NO: 2251234 - RNA, 19 nt, Artificial Sequence
  Description of Artificial Sequence: Synthetic oligonucleotide
  Sense strand starting at position 931 of SEQ ID NO: 1884246
guaaaugugguuuaaggau

SEQ ID NO: 2251235 - RNA, 19 nt, Artificial Sequence
  Description of Artificial Sequence: Synthetic oligonucleotide
  Antisense strand to SEQ ID NO: 2251234
auccuuaaaccacauuuac

SEQ ID NO: 2251236 - RNA, 19 nt, Artificial Sequence
  Description of Artificial Sequence: Synthetic oligonucleotide
  Sense strand starting at position 1003 of SEQ ID NO: 1884246
ccugaacucuguuccaaga

SEQ ID NO: 2251237 - RNA, 19 nt, Artificial Sequence
  Description of Artificial Sequence: Synthetic oligonucleotide
  Antisense strand to SEQ ID NO: 2251236
ucuuggaacagaguucagg

SEQ ID NO: 2251238 - RNA, 19 nt, Artificial Sequence
  Description of Artificial Sequence: Synthetic oligonucleotide
  Sense strand starting at position 1013 of SEQ ID NO: 1884246
guuccaagaccucgaugaa

SEQ ID NO: 2251239 - RNA, 19 nt, Artificial Sequence
  Description of Artificial Sequence: Synthetic oligonucleotide
  Antisense strand to SEQ ID NO: 2251238
uucaucgaggucuuggaac

SEQ ID NO: 2251240 - RNA, 19 nt, Artificial Sequence
  Description of Artificial Sequence: Synthetic oligonucleotide
  Sense strand starting at position 1016 of SEQ ID NO: 1884246
ccaagaccucgaugaaauc

SEQ ID NO: 2251241 - RNA, 19 nt, Artificial Sequence
  Description of Artificial Sequence: Synthetic oligonucleotide
  Antisense strand to SEQ ID NO: 2251240
gauuucaucgaggucuugg

SEQ ID NO: 2251242 - RNA, 19 nt, Artificial Sequence
  Description of Artificial Sequence: Synthetic oligonucleotide
  Sense strand starting at position 1351 of SEQ ID NO: 1884246
guccuaaggcaucacgaaa

SEQ ID NO: 2251243 - RNA, 19 nt, Artificial Sequence
  Description of Artificial Sequence: Synthetic oligonucleotide
  Antisense strand to SEQ ID NO: 2251242
uuucgugaugccuuaggac

SEQ ID NO: 2251244 - RNA, 19 nt, Artificial Sequence
  Description of Artificial Sequence: Synthetic oligonucleotide
  Sense strand starting at position 2036 of SEQ ID NO: 1884246
gcgucuuuccggagggcga

SEQ ID NO: 2251245 - RNA, 19 nt, Artificial Sequence
  Description of Artificial Sequence: Synthetic oligonucleotide
  Antisense strand to SEQ ID NO: 2251244
ucgcccuccggaaagacgc

SEQ ID NO: 2251246 - RNA, 19 nt, Artificial Sequence
  Description of Artificial Sequence: Synthetic oligonucleotide
  Sense strand starting at position 2049 of SEQ ID NO: 1884246
gggcgaguuccuuaugugu

SEQ ID NO: 2251247 - RNA, 19 nt, Artificial Sequence
  Description of Artificial Sequence: Synthetic oligonucleotide
  Antisense strand to SEQ ID NO: 2251246
acacauaaggaacucgccc

SEQ ID NO: 2251248 - RNA, 19 nt, Artificial Sequence
  Description of Artificial Sequence: Synthetic oligonucleotide
  Sense strand starting at position 2060 of SEQ ID NO: 1884246
uuaugugucuuugcugaca

SEQ ID NO: 2251249 - RNA, 19 nt, Artificial Sequence
  Description of Artificial Sequence: Synthetic oligonucleotide
  Antisense strand to SEQ ID NO: 2251248
ugucagcaaagacacauaa

SEQ ID NO: 2251250 - RNA, 19 nt, Artificial Sequence
  Description of Artificial Sequence: Synthetic oligonucleotide
  Sense strand starting at position 2122 of SEQ ID NO: 1884246
cugucuugucagugggaga

SEQ ID NO: 2251251 - RNA, 19 nt, Artificial Sequence
  Description of Artificial Sequence: Synthetic oligonucleotide
  Antisense strand to SEQ ID NO: 2251250
ucucccacugacaagacag

SEQ ID NO: 2251252 - RNA, 19 nt, Artificial Sequence
  Description of Artificial Sequence: Synthetic oligonucleotide
  Sense strand starting at position 2123 of SEQ ID NO: 1884246
ugucuugucagugggagag

SEQ ID NO: 2251253 - RNA, 19 nt, Artificial Sequence
  Description of Artificial Sequence: Synthetic oligonucleotide
  Antisense strand to SEQ ID NO: 2251252
cucucccacugacaagaca

SEQ ID NO: 2251254 - RNA, 19 nt, Artificial Sequence
  Description of Artificial Sequence: Synthetic oligonucleotide
  Sense strand starting at position 2193 of SEQ ID NO: 1884246
agcuguauugcugugcgaa

SEQ ID NO: 2251255 - RNA, 19 nt, Artificial Sequence
  Description of Artificial Sequence: Synthetic oligonucleotide
  Antisense strand to SEQ ID NO: 2251254
uucgcacagcaauacagcu

SEQ ID NO: 2251256 - RNA, 19 nt, Artificial Sequence
  Description of Artificial Sequence: Synthetic oligonucleotide
  Sense strand starting at position 2235 of SEQ ID NO: 1884246
accuuaaauuuaggucgaa

SEQ ID NO: 2251257 - RNA, 19 nt, Artificial Sequence
  Description of Artificial Sequence: Synthetic oligonucleotide
  Antisense strand to SEQ ID NO: 2251256
uucgaccuaaauuuaaggu

SEQ ID NO: 2251258 - RNA, 19 nt, Artificial Sequence
  Description of Artificial Sequence: Synthetic oligonucleotide
  Sense strand starting at position 2250 of SEQ ID NO: 1884246
cgaacucuaccuugucaca

SEQ ID NO: 2251259 - RNA, 19 nt, Artificial Sequence
  Description of Artificial Sequence: Synthetic oligonucleotide
  Antisense strand to SEQ ID NO: 2251258
ugugacaagguagaguucg

SEQ ID NO: 2251260 - RNA, 19 nt, Artificial Sequence
  Description of Artificial Sequence: Synthetic oligonucleotide
  Sense strand starting at position 2309 of SEQ ID NO: 1884246
cacgaaggcuucuuagaac

SEQ ID NO: 2251261 - RNA, 19 nt, Artificial Sequence
  Description of Artificial Sequence: Synthetic oligonucleotide
  Antisense strand to SEQ ID NO: 2251260
guucuaagaagccuucgug

SEQ ID NO: 2251262 - RNA, 19 nt, Artificial Sequence
  Description of Artificial Sequence: Synthetic oligonucleotide
  Sense strand starting at position 2348 of SEQ ID NO: 1884246
aagguuaaaugaguuacuu

SEQ ID NO: 2251263 - RNA, 19 nt, Artificial Sequence
  Description of Artificial Sequence: Synthetic oligonucleotide
  Antisense strand to SEQ ID NO: 2251262
aaguaacucauuuaaccuu

SEQ ID NO: 2251264 - RNA, 19 nt, Artificial Sequence
  Description of Artificial Sequence: Synthetic oligonucleotide
  Sense strand starting at position 2350 of SEQ ID NO: 1884246
gguuaaaugaguuacuuug

SEQ ID NO: 2251265 - RNA, 19 nt, Artificial Sequence
  Description of Artificial Sequence: Synthetic oligonucleotide
  Antisense strand to SEQ ID NO: 2251264
caaaguaacucauuuaacc

SEQ ID NO: 2251266 - RNA, 19 nt, Artificial Sequence
  Description of Artificial Sequence: Synthetic oligonucleotide
  Sense strand starting at position 2370 of SEQ ID NO: 1884246
gaaggcagauuguuaacca

SEQ ID NO: 2251267 - RNA, 19 nt, Artificial Sequence
  Description of Artificial Sequence: Synthetic oligonucleotide
  Antisense strand to SEQ ID NO: 2251266
ugguuaacaaucugccuuc

SEQ ID NO: 2251268 - RNA, 19 nt, Artificial Sequence
  Description of Artificial Sequence: Synthetic oligonucleotide
  Sense strand starting at position 2374 of SEQ ID NO: 1884246
gcagauuguuaaccacagu

SEQ ID NO: 2251269 - RNA, 19 nt, Artificial Sequence
  Description of Artificial Sequence: Synthetic oligonucleotide
  Antisense strand to SEQ ID NO: 2251268
acugugguuaacaaucugc

SEQ ID NO: 2251270 - RNA, 19 nt, Artificial Sequence
  Description of Artificial Sequence: Synthetic oligonucleotide
  Sense strand starting at position 2449 of SEQ ID NO: 1884246
gggagcacccuuuacaugu

SEQ ID NO: 2251271 - RNA, 19 nt, Artificial Sequence
  Description of Artificial Sequence: Synthetic oligonucleotide
  Antisense strand to SEQ ID NO: 2251270
acauguaaagggugcuccc

SEQ ID NO: 2251272 - RNA, 19 nt, Artificial Sequence
  Description of Artificial Sequence: Synthetic oligonucleotide
  Sense strand starting at position 2501 of SEQ ID NO: 1884246
guaggucaggugcauauaa

SEQ ID NO: 2251273 - RNA, 19 nt, Artificial Sequence
  Description of Artificial Sequence: Synthetic oligonucleotide
  Antisense strand to SEQ ID NO: 2251272
uuauaugcaccugaccuac

SEQ ID NO: 2251274 - RNA, 19 nt, Artificial Sequence
  Description of Artificial Sequence: Synthetic oligonucleotide
  Sense strand starting at position 2546 of SEQ ID NO: 1884246
acucuuccuccucguaaga

SEQ ID NO: 2251275 - RNA, 19 nt, Artificial Sequence
  Description of Artificial Sequence: Synthetic oligonucleotide
  Antisense strand to SEQ ID NO: 2251274
ucuuacgaggaggaagagu

SEQ ID NO: 2251276 - RNA, 19 nt, Artificial Sequence
  Description of Artificial Sequence: Synthetic oligonucleotide
  Sense strand starting at position 2991 of SEQ ID NO: 1884246
aucuuaagagguggaaguu

SEQ ID NO: 2251277 - RNA, 19 nt, Artificial Sequence
  Description of Artificial Sequence: Synthetic oligonucleotide
  Antisense strand to SEQ ID NO: 2251276
aacuuccaccucuuaagau

SEQ ID NO: 2251278 - RNA, 19 nt, Artificial Sequence
  Description of Artificial Sequence: Synthetic oligonucleotide
  Sense strand starting at position 3188 of SEQ ID NO: 1884246
aauguugccuucuuaagga

SEQ ID NO: 2251279 - RNA, 19 nt, Artificial Sequence
  Description of Artificial Sequence: Synthetic oligonucleotide
  Antisense strand to SEQ ID NO: 2251278
uccuuaagaaggcaacauu

SEQ ID NO: 2251280 - RNA, 19 nt, Artificial Sequence
  Description of Artificial Sequence: Synthetic oligonucleotide
  Sense strand starting at position 3236 of SEQ ID NO: 1884246
ugcagauuccuccagcauc

SEQ ID NO: 2251281 - RNA, 19 nt, Artificial Sequence
  Description of Artificial Sequence: Synthetic oligonucleotide
  Antisense strand to SEQ ID NO: 2251280
gaugcuggaggaaucugca

SEQ ID NO: 2251282 - RNA, 19 nt, Artificial Sequence
  Description of Artificial Sequence: Synthetic oligonucleotide
  Sense strand starting at position 3330 of SEQ ID NO: 1884246
cugugcaaauuaguugaau

SEQ ID NO: 2251283 - RNA, 19 nt, Artificial Sequence
  Description of Artificial Sequence: Synthetic oligonucleotide
  Antisense strand to SEQ ID NO: 2251282
auucaacuaauuugcacag

SEQ ID NO: 2251284 - RNA, 19 nt, Artificial Sequence
  Description of Artificial Sequence: Synthetic oligonucleotide
  Sense strand starting at position 3332 of SEQ ID NO: 1884246
gugcaaauuaguugaauga

SEQ ID NO: 2251285 - RNA, 19 nt, Artificial Sequence
  Description of Artificial Sequence: Synthetic oligonucleotide
  Antisense strand to SEQ ID NO: 2251284
ucauucaacuaauuugcac

SEQ ID NO: 2251286 - RNA, 19 nt, Artificial Sequence
  Description of Artificial Sequence: Synthetic oligonucleotide
  Sense strand starting at position 3386 of SEQ ID NO: 1884246
uuuaguuaaugagaugaag

SEQ ID NO: 2251287 - RNA, 19 nt, Artificial Sequence
  Description of Artificial Sequence: Synthetic oligonucleotide
  Antisense strand to SEQ ID NO: 2251286
cuucaucucauuaacuaaa

SEQ ID NO: 2251288 - RNA, 19 nt, Artificial Sequence
  Description of Artificial Sequence: Synthetic oligonucleotide
  Sense strand starting at position 3408 of SEQ ID NO: 1884246
ucgugaggcuaaucuuaag

SEQ ID NO: 2251289 - RNA, 19 nt, Artificial Sequence
  Description of Artificial Sequence: Synthetic oligonucleotide
  Antisense strand to SEQ ID NO: 2251288
cuuaagauuagccucacga

SEQ ID NO: 2251290 - RNA, 19 nt, Artificial Sequence
  Description of Artificial Sequence: Synthetic oligonucleotide
  Sense strand starting at position 3479 of SEQ ID NO: 1884246
aggguaacuuaggauagaa

SEQ ID NO: 2251291 - RNA, 19 nt, Artificial Sequence
  Description of Artificial Sequence: Synthetic oligonucleotide
  Antisense strand to SEQ ID NO: 2251290
uucuauccuaaguuacccu

SEQ ID NO: 2251292 - RNA, 19 nt, Artificial Sequence
  Description of Artificial Sequence: Synthetic oligonucleotide
  Sense strand starting at position 3505 of SEQ ID NO: 1884246
uuaggauaccuguaagccu

SEQ ID NO: 2251293 - RNA, 19 nt, Artificial Sequence
  Description of Artificial Sequence: Synthetic oligonucleotide
  Antisense strand to SEQ ID NO: 2251292
aggcuuacagguauccuaa

SEQ ID NO: 2251294 - RNA, 19 nt, Artificial Sequence
  Description of Artificial Sequence: Synthetic oligonucleotide
  Sense strand starting at position 3746 of SEQ ID NO: 1884246
uguauuaugugaguuaugu

SEQ ID NO: 2251295 - RNA, 19 nt, Artificial Sequence
  Description of Artificial Sequence: Synthetic oligonucleotide
  Antisense strand to SEQ ID NO: 2251294
acauaacucacauaauaca

SEQ ID NO: 2251296 - RNA, 19 nt, Artificial Sequence
  Description of Artificial Sequence: Synthetic oligonucleotide
  Sense strand starting at position 3754 of SEQ ID NO: 1884246
gugaguuauguuuacauau

SEQ ID NO: 2251297 - RNA, 19 nt, Artificial Sequence
  Description of Artificial Sequence: Synthetic oligonucleotide
  Antisense strand to SEQ ID NO: 2251296
auauguaaacauaacucac

SEQ ID NO: 2251298 - RNA, 19 nt, Artificial Sequence
  Description of Artificial Sequence: Synthetic oligonucleotide
  Sense strand starting at position 409 of SEQ ID NO: 1884247
gaucgauugagccaggcaa

SEQ ID NO: 2251299 - RNA, 19 nt, Artificial Sequence
  Description of Artificial Sequence: Synthetic oligonucleotide
  Antisense strand to SEQ ID NO: 2251298
uugccuggcucaaucgauc

SEQ ID NO: 2251300 - RNA, 19 nt, Artificial Sequence
  Description of Artificial Sequence: Synthetic oligonucleotide
  Sense strand starting at position 532 of SEQ ID NO: 1884247
gggaacgaaucucauuuau

SEQ ID NO: 2251301 - RNA, 19 nt, Artificial Sequence
  Description of Artificial Sequence: Synthetic oligonucleotide
  Antisense strand to SEQ ID NO: 2251300
auaaaugagauucguuccc

SEQ ID NO: 2251302 - RNA, 19 nt, Artificial Sequence
  Description of Artificial Sequence: Synthetic oligonucleotide
  Sense strand starting at position 851 of SEQ ID NO: 1884247
aacagaugaucagguaaau

SEQ ID NO: 2251303 - RNA, 19 nt, Artificial Sequence
  Description of Artificial Sequence: Synthetic oligonucleotide
  Antisense strand to SEQ ID NO: 2251302
auuuaccugaucaucuguu

SEQ ID NO: 2251304 - RNA, 19 nt, Artificial Sequence
  Description of Artificial Sequence: Synthetic oligonucleotide
  Sense strand starting at position 910 of SEQ ID NO: 1884247
ugguuugcuuacccauagu

SEQ ID NO: 2251305 - RNA, 19 nt, Artificial Sequence
  Description of Artificial Sequence: Synthetic oligonucleotide
  Antisense strand to SEQ ID NO: 2251304
acuauggguaagcaaacca

SEQ ID NO: 2251306 - RNA, 19 nt, Artificial Sequence
  Description of Artificial Sequence: Synthetic oligonucleotide
  Sense strand starting at position 913 of SEQ ID NO: 1884247
uuugcuuacccauaguguu

SEQ ID NO: 2251307 - RNA, 19 nt, Artificial Sequence
  Description of Artificial Sequence: Synthetic oligonucleotide
  Antisense strand to SEQ ID NO: 2251306
aacacuauggguaagcaaa

SEQ ID NO: 2251308 - RNA, 19 nt, Artificial Sequence
  Description of Artificial Sequence: Synthetic oligonucleotide
  Sense strand starting at position 987 of SEQ ID NO: 1884247
uacauuaagugaggaauac

SEQ ID NO: 2251309 - RNA, 19 nt, Artificial Sequence
  Description of Artificial Sequence: Synthetic oligonucleotide
  Antisense strand to SEQ ID NO: 2251308
guauuccucacuuaaugua

SEQ ID NO: 2251310 - RNA, 19 nt, Artificial Sequence
  Description of Artificial Sequence: Synthetic oligonucleotide
  Sense strand starting at position 1093 of SEQ ID NO: 1884247
aaaguaggacuuuguaauc

SEQ ID NO: 2251311 - RNA, 19 nt, Artificial Sequence
  Description of Artificial Sequence: Synthetic oligonucleotide
  Antisense strand to SEQ ID NO: 2251310
gauuacaaaguccuacuuu

SEQ ID NO: 2251312 - RNA, 19 nt, Artificial Sequence
  Description of Artificial Sequence: Synthetic oligonucleotide
  Sense strand starting at position 1098 of SEQ ID NO: 1884247
aggacuuuguaaucuuauu

SEQ ID NO: 2251313 - RNA, 19 nt, Artificial Sequence
  Description of Artificial Sequence: Synthetic oligonucleotide
  Antisense strand to SEQ ID NO: 2251312
aauaagauuacaaaguccu

SEQ ID NO: 2251314 - RNA, 19 nt, Artificial Sequence
  Description of Artificial Sequence: Synthetic oligonucleotide
  Sense strand starting at position 1204 of SEQ ID NO: 1884247
uucuacuuuguauaaggau

SEQ ID NO: 2251315 - RNA, 19 nt, Artificial Sequence
  Description of Artificial Sequence: Synthetic oligonucleotide
  Antisense strand to SEQ ID NO: 2251314
auccuuauacaaaguagaa

SEQ ID NO: 2251316 - RNA, 19 nt, Artificial Sequence
  Description of Artificial Sequence: Synthetic oligonucleotide
  Sense strand starting at position 1213 of SEQ ID NO: 1884247
guauaaggauacuuccauu

SEQ ID NO: 2251317 - RNA, 19 nt, Artificial Sequence
  Description of Artificial Sequence: Synthetic oligonucleotide
  Antisense strand to SEQ ID NO: 2251316
aauggaaguauccuuauac

SEQ ID NO: 2251318 - RNA, 19 nt, Artificial Sequence
  Description of Artificial Sequence: Synthetic oligonucleotide
  Sense strand starting at position 1588 of SEQ ID NO: 1884247
uguguaucagaagguauag

SEQ ID NO: 2251319 - RNA, 19 nt, Artificial Sequence
  Description of Artificial Sequence: Synthetic oligonucleotide
  Antisense strand to SEQ ID NO: 2251318
cuauaccuucugauacaca

SEQ ID NO: 2251320 - RNA, 19 nt, Artificial Sequence
  Description of Artificial Sequence: Synthetic oligonucleotide
  Sense strand starting at position 1638 of SEQ ID NO: 1884247
guguaaaugugguuuaagg

SEQ ID NO: 2251321 - RNA, 19 nt, Artificial Sequence
  Description of Artificial Sequence: Synthetic oligonucleotide
  Antisense strand to SEQ ID NO: 2251320
ccuuaaaccacauuuacac

SEQ ID NO: 2251322 - RNA, 19 nt, Artificial Sequence
  Description of Artificial Sequence: Synthetic oligonucleotide
  Sense strand starting at position 1640 of SEQ ID NO: 1884247
guaaaugugguuuaaggau

SEQ ID NO: 2251323 - RNA, 19 nt, Artificial Sequence
  Description of Artificial Sequence: Synthetic oligonucleotide
  Antisense strand to SEQ ID NO: 2251322
auccuuaaaccacauuuac

SEQ ID NO: 2251324 - RNA, 19 nt, Artificial Sequence
  Description of Artificial Sequence: Synthetic oligonucleotide
  Sense strand starting at position 1712 of SEQ ID NO: 1884247
ccugaacucuguuccaaga

SEQ ID NO: 2251325 - RNA, 19 nt, Artificial Sequence
  Description of Artificial Sequence: Synthetic oligonucleotide
  Antisense strand to SEQ ID NO: 2251324
ucuuggaacagaguucagg

SEQ ID NO: 2251326 - RNA, 19 nt, Artificial Sequence
  Description of Artificial Sequence: Synthetic oligonucleotide
  Sense strand starting at position 1722 of SEQ ID NO: 1884247
guuccaagaccucgaugaa

SEQ ID NO: 2251327 - RNA, 19 nt, Artificial Sequence
  Description of Artificial Sequence: Synthetic oligonucleotide
  Antisense strand to SEQ ID NO: 2251326
uucaucgaggucuuggaac

SEQ ID NO: 2251328 - RNA, 19 nt, Artificial Sequence
  Description of Artificial Sequence: Synthetic oligonucleotide
  Sense strand starting at position 1725 of SEQ ID NO: 1884247
ccaagaccucgaugaaauc

SEQ ID NO: 2251329 - RNA, 19 nt, Artificial Sequence
  Description of Artificial Sequence: Synthetic oligonucleotide
  Antisense strand to SEQ ID NO: 2251328
gauuucaucgaggucuugg

SEQ ID NO: 2251330 - RNA, 19 nt, Artificial Sequence
  Description of Artificial Sequence: Synthetic oligonucleotide
  Sense strand starting at position 2060 of SEQ ID NO: 1884247
guccuaaggcaucacgaaa

SEQ ID NO: 2251331 - RNA, 19 nt, Artificial Sequence
  Description of Artificial Sequence: Synthetic oligonucleotide
  Antisense strand to SEQ ID NO: 2251330
uuucgugaugccuuaggac

SEQ ID NO: 2251332 - RNA, 19 nt, Artificial Sequence
  Description of Artificial Sequence: Synthetic oligonucleotide
  Sense strand starting at position 2745 of SEQ ID NO: 1884247
gcgucuuuccggagggcga

SEQ ID NO: 2251333 - RNA, 19 nt, Artificial Sequence
  Description of Artificial Sequence: Synthetic oligonucleotide
  Antisense strand to SEQ ID NO: 2251332
ucgcccuccggaaagacgc

SEQ ID NO: 2251334 - RNA, 19 nt, Artificial Sequence
  Description of Artificial Sequence: Synthetic oligonucleotide
  Sense strand starting at position 2758 of SEQ ID NO: 1884247
gggcgaguuccuuaugugu

SEQ ID NO: 2251335 - RNA, 19 nt, Artificial Sequence
  Description of Artificial Sequence: Synthetic oligonucleotide
  Antisense strand to SEQ ID NO: 2251334
acacauaaggaacucgccc

SEQ ID NO: 2251336 - RNA, 19 nt, Artificial Sequence
  Description of Artificial Sequence: Synthetic oligonucleotide
  Sense strand starting at position 2767 of SEQ ID NO: 1884247
ccuuaugugucuuugcuga

SEQ ID NO: 2251337 - RNA, 19 nt, Artificial Sequence
  Description of Artificial Sequence: Synthetic oligonucleotide
  Antisense strand to SEQ ID NO: 2251336
ucagcaaagacacauaagg

SEQ ID NO: 2251338 - RNA, 19 nt, Artificial Sequence
  Description of Artificial Sequence: Synthetic oligonucleotide
  Sense strand starting at position 2769 of SEQ ID NO: 1884247
uuaugugucuuugcugaca

SEQ ID NO: 2251339 - RNA, 19 nt, Artificial Sequence
  Description of Artificial Sequence: Synthetic oligonucleotide
  Antisense strand to SEQ ID NO: 2251338
ugucagcaaagacacauaa

SEQ ID NO: 2251340 - RNA, 19 nt, Artificial Sequence
  Description of Artificial Sequence: Synthetic oligonucleotide
  Sense strand starting at position 2831 of SEQ ID NO: 1884247
cugucuugucagugggaga

SEQ ID NO: 2251341 - RNA, 19 nt, Artificial Sequence
  Description of Artificial Sequence: Synthetic oligonucleotide
  Antisense strand to SEQ ID NO: 2251340
ucucccacugacaagacag

SEQ ID NO: 2251342 - RNA, 19 nt, Artificial Sequence
  Description of Artificial Sequence: Synthetic oligonucleotide
  Sense strand starting at position 2832 of SEQ ID NO: 1884247
ugucuugucagugggagag

SEQ ID NO: 2251343 - RNA, 19 nt, Artificial Sequence
  Description of Artificial Sequence: Synthetic oligonucleotide
  Antisense strand to SEQ ID NO: 2251342
cucucccacugacaagaca

SEQ ID NO: 2251344 - RNA, 19 nt, Artificial Sequence
  Description of Artificial Sequence: Synthetic oligonucleotide
  Sense strand starting at position 2849 of SEQ ID NO: 1884247
aggacugagucaggagaau

SEQ ID NO: 2251345 - RNA, 19 nt, Artificial Sequence
  Description of Artificial Sequence: Synthetic oligonucleotide
  Antisense strand to SEQ ID NO: 2251344
auucuccugacucaguccu

SEQ ID NO: 2251346 - RNA, 19 nt, Artificial Sequence
  Description of Artificial Sequence: Synthetic oligonucleotide
  Sense strand starting at position 2902 of SEQ ID NO: 1884247
agcuguauugcugugcgaa

SEQ ID NO: 2251347 - RNA, 19 nt, Artificial Sequence
  Description of Artificial Sequence: Synthetic oligonucleotide
  Antisense strand to SEQ ID NO: 2251346
uucgcacagcaauacagcu

SEQ ID NO: 2251348 - RNA, 19 nt, Artificial Sequence
  Description of Artificial Sequence: Synthetic oligonucleotide
  Sense strand starting at position 2944 of SEQ ID NO: 1884247
accuuaaauuuaggucgaa

SEQ ID NO: 2251349 - RNA, 19 nt, Artificial Sequence
  Description of Artificial Sequence: Synthetic oligonucleotide
  Antisense strand to SEQ ID NO: 2251348
uucgaccuaaauuuaaggu

SEQ ID NO: 2251350 - RNA, 19 nt, Artificial Sequence
  Description of Artificial Sequence: Synthetic oligonucleotide
  Sense strand starting at position 2959 of SEQ ID NO: 1884247
cgaacucuaccuugucaca

SEQ ID NO: 2251351 - RNA, 19 nt, Artificial Sequence
  Description of Artificial Sequence: Synthetic oligonucleotide
  Antisense strand to SEQ ID NO: 2251350
ugugacaagguagaguucg

SEQ ID NO: 2251352 - RNA, 19 nt, Artificial Sequence
  Description of Artificial Sequence: Synthetic oligonucleotide
  Sense strand starting at position 3018 of SEQ ID NO: 1884247
cacgaaggcuucuuagaac

SEQ ID NO: 2251353 - RNA, 19 nt, Artificial Sequence
  Description of Artificial Sequence: Synthetic oligonucleotide
  Antisense strand to SEQ ID NO: 2251352
guucuaagaagccuucgug

SEQ ID NO: 2251354 - RNA, 19 nt, Artificial Sequence
  Description of Artificial Sequence: Synthetic oligonucleotide
  Sense strand starting at position 3057 of SEQ ID NO: 1884247
aagguuaaaugaguuacuu

SEQ ID NO: 2251355 - RNA, 19 nt, Artificial Sequence
  Description of Artificial Sequence: Synthetic oligonucleotide
  Antisense strand to SEQ ID NO: 2251354
aaguaacucauuuaaccuu

SEQ ID NO: 2251356 - RNA, 19 nt, Artificial Sequence
  Description of Artificial Sequence: Synthetic oligonucleotide
  Sense strand starting at position 3059 of SEQ ID NO: 1884247
gguuaaaugaguuacuuug

SEQ ID NO: 2251357 - RNA, 19 nt, Artificial Sequence
  Description of Artificial Sequence: Synthetic oligonucleotide
  Antisense strand to SEQ ID NO: 2251356
caaaguaacucauuuaacc

SEQ ID NO: 2251358 - RNA, 19 nt, Artificial Sequence
  Description of Artificial Sequence: Synthetic oligonucleotide
  Sense strand starting at position 3079 of SEQ ID NO: 1884247
gaaggcagauuguuaacca

SEQ ID NO: 2251359 - RNA, 19 nt, Artificial Sequence
  Description of Artificial Sequence: Synthetic oligonucleotide
  Antisense strand to SEQ ID NO: 2251358
ugguuaacaaucugccuuc

SEQ ID NO: 2251360 - RNA, 19 nt, Artificial Sequence
  Description of Artificial Sequence: Synthetic oligonucleotide
  Sense strand starting at position 3083 of SEQ ID NO: 1884247
gcagauuguuaaccacagu

SEQ ID NO: 2251361 - RNA, 19 nt, Artificial Sequence
  Description of Artificial Sequence: Synthetic oligonucleotide
  Antisense strand to SEQ ID NO: 2251360
acugugguuaacaaucugc

SEQ ID NO: 2251362 - RNA, 19 nt, Artificial Sequence
  Description of Artificial Sequence: Synthetic oligonucleotide
  Sense strand starting at position 3158 of SEQ ID NO: 1884247
gggagcacccuuuacaugu

SEQ ID NO: 2251363 - RNA, 19 nt, Artificial Sequence
  Description of Artificial Sequence: Synthetic oligonucleotide
  Antisense strand to SEQ ID NO: 2251362
acauguaaagggugcuccc

SEQ ID NO: 2251364 - RNA, 19 nt, Artificial Sequence
  Description of Artificial Sequence: Synthetic oligonucleotide
  Sense strand starting at position 3210 of SEQ ID NO: 1884247
guaggucaggugcauauaa

SEQ ID NO: 2251365 - RNA, 19 nt, Artificial Sequence
  Description of Artificial Sequence: Synthetic oligonucleotide
  Antisense strand to SEQ ID NO: 2251364
uuauaugcaccugaccuac

SEQ ID NO: 2251366 - RNA, 19 nt, Artificial Sequence
  Description of Artificial Sequence: Synthetic oligonucleotide
  Sense strand starting at position 3255 of SEQ ID NO: 1884247
acucuuccuccucguaaga

SEQ ID NO: 2251367 - RNA, 19 nt, Artificial Sequence
  Description of Artificial Sequence: Synthetic oligonucleotide
  Antisense strand to SEQ ID NO: 2251366
ucuuacgaggaggaagagu

SEQ ID NO: 2251368 - RNA, 19 nt, Artificial Sequence
  Description of Artificial Sequence: Synthetic oligonucleotide
  Sense strand starting at position 3411 of SEQ ID NO: 1884247
cccguaaucuugucuuauc

SEQ ID NO: 2251369 - RNA, 19 nt, Artificial Sequence
  Description of Artificial Sequence: Synthetic oligonucleotide
  Antisense strand to SEQ ID NO: 2251368
gauaagacaagauuacggg

SEQ ID NO: 2251370 - RNA, 19 nt, Artificial Sequence
  Description of Artificial Sequence: Synthetic oligonucleotide
  Sense strand starting at position 3412 of SEQ ID NO: 1884247
ccguaaucuugucuuaucu

SEQ ID NO: 2251371 - RNA, 19 nt, Artificial Sequence
  Description of Artificial Sequence: Synthetic oligonucleotide
  Antisense strand to SEQ ID NO: 2251370
agauaagacaagauuacgg

SEQ ID NO: 2251372 - RNA, 19 nt, Artificial Sequence
  Description of Artificial Sequence: Synthetic oligonucleotide
  Sense strand starting at position 3700 of SEQ ID NO: 1884247
aucuuaagagguggaaguu

SEQ ID NO: 2251373 - RNA, 19 nt, Artificial Sequence
  Description of Artificial Sequence: Synthetic oligonucleotide
  Antisense strand to SEQ ID NO: 2251372
aacuuccaccucuuaagau

SEQ ID NO: 2251374 - RNA, 19 nt, Artificial Sequence
  Description of Artificial Sequence: Synthetic oligonucleotide
  Sense strand starting at position 3897 of SEQ ID NO: 1884247
aauguugccuucuuaagga

SEQ ID NO: 2251375 - RNA, 19 nt, Artificial Sequence
  Description of Artificial Sequence: Synthetic oligonucleotide
  Antisense strand to SEQ ID NO: 2251374
uccuuaagaaggcaacauu

SEQ ID NO: 2251376 - RNA, 19 nt, Artificial Sequence
  Description of Artificial Sequence: Synthetic oligonucleotide
  Sense strand starting at position 3945 of SEQ ID NO: 1884247
ugcagauuccuccagcauc

SEQ ID NO: 2251377 - RNA, 19 nt, Artificial Sequence
  Description of Artificial Sequence: Synthetic oligonucleotide
  Antisense strand to SEQ ID NO: 2251376
gaugcuggaggaaucugca

SEQ ID NO: 2251378 - RNA, 19 nt, Artificial Sequence
  Description of Artificial Sequence: Synthetic oligonucleotide
  Sense strand starting at position 107 of SEQ ID NO: 1884248
gaaugauuguguguucagg

SEQ ID NO: 2251379 - RNA, 19 nt, Artificial Sequence
  Description of Artificial Sequence: Synthetic oligonucleotide
  Antisense strand to SEQ ID NO: 2251378
ccugaacacacaaucauuc

SEQ ID NO: 2251380 - RNA, 19 nt, Artificial Sequence
  Description of Artificial Sequence: Synthetic oligonucleotide
  Sense strand starting at position 109 of SEQ ID NO: 1884248
augauuguguguucaggau

SEQ ID NO: 2251381 - RNA, 19 nt, Artificial Sequence
  Description of Artificial Sequence: Synthetic oligonucleotide
  Antisense strand to SEQ ID NO: 2251380
auccugaacacacaaucau

SEQ ID NO: 2251382 - RNA, 19 nt, Artificial Sequence
  Description of Artificial Sequence: Synthetic oligonucleotide
  Sense strand starting at position 207 of SEQ ID NO: 1884248
acaggauaauucguaacca

SEQ ID NO: 2251383 - RNA, 19 nt, Artificial Sequence
  Description of Artificial Sequence: Synthetic oligonucleotide
  Antisense strand to SEQ ID NO: 2251382
ugguuacgaauuauccugu

SEQ ID NO: 2251384 - RNA, 19 nt, Artificial Sequence
  Description of Artificial Sequence: Synthetic oligonucleotide
  Sense strand starting at position 211 of SEQ ID NO: 1884248
gauaauucguaaccaggca

SEQ ID NO: 2251385 - RNA, 19 nt, Artificial Sequence
  Description of Artificial Sequence: Synthetic oligonucleotide
  Antisense strand to SEQ ID NO: 2251384
ugccugguuacgaauuauc

SEQ ID NO: 2251386 - RNA, 19 nt, Artificial Sequence
  Description of Artificial Sequence: Synthetic oligonucleotide
  Sense strand starting at position 294 of SEQ ID NO: 1884248
gagaguuugagaugagccu

SEQ ID NO: 2251387 - RNA, 19 nt, Artificial Sequence
  Description of Artificial Sequence: Synthetic oligonucleotide
  Antisense strand to SEQ ID NO: 2251386
aggcucaucucaaacucuc

SEQ ID NO: 2251388 - RNA, 19 nt, Artificial Sequence
  Description of Artificial Sequence: Synthetic oligonucleotide
  Sense strand starting at position 387 of SEQ ID NO: 1884248
accaguugaacaggugaua

SEQ ID NO: 2251389 - RNA, 19 nt, Artificial Sequence
  Description of Artificial Sequence: Synthetic oligonucleotide
  Antisense strand to SEQ ID NO: 2251388
uaucaccuguucaacuggu

SEQ ID NO: 2251390 - RNA, 19 nt, Artificial Sequence
  Description of Artificial Sequence: Synthetic oligonucleotide
  Sense strand starting at position 493 of SEQ ID NO: 1884248
gggccuucugagcaccauu

SEQ ID NO: 2251391 - RNA, 19 nt, Artificial Sequence
  Description of Artificial Sequence: Synthetic oligonucleotide
  Antisense strand to SEQ ID NO: 2251390
aauggugcucagaaggccc

SEQ ID NO: 2251392 - RNA, 19 nt, Artificial Sequence
  Description of Artificial Sequence: Synthetic oligonucleotide
  Sense strand starting at position 543 of SEQ ID NO: 1884248
ugaguaaagcaucggaaga

SEQ ID NO: 2251393 - RNA, 19 nt, Artificial Sequence
  Description of Artificial Sequence: Synthetic oligonucleotide
  Antisense strand to SEQ ID NO: 2251392
ucuuccgaugcuuuacuca

SEQ ID NO: 2251394 - RNA, 19 nt, Artificial Sequence
  Description of Artificial Sequence: Synthetic oligonucleotide
  Sense strand starting at position 544 of SEQ ID NO: 1884248
gaguaaagcaucggaagaa

SEQ ID NO: 2251395 - RNA, 19 nt, Artificial Sequence
  Description of Artificial Sequence: Synthetic oligonucleotide
  Antisense strand to SEQ ID NO: 2251394
uucuuccgaugcuuuacuc

SEQ ID NO: 2251396 - RNA, 19 nt, Artificial Sequence
  Description of Artificial Sequence: Synthetic oligonucleotide
  Sense strand starting at position 773 of SEQ ID NO: 1884248
cgucaaucugcggauggaa

SEQ ID NO: 2251397 - RNA, 19 nt, Artificial Sequence
  Description of Artificial Sequence: Synthetic oligonucleotide
  Antisense strand to SEQ ID NO: 2251396
uuccauccgcagauugacg

SEQ ID NO: 2251398 - RNA, 19 nt, Artificial Sequence
  Description of Artificial Sequence: Synthetic oligonucleotide
  Sense strand starting at position 923 of SEQ ID NO: 1884248
agucauagauucuuggaga

SEQ ID NO: 2251399 - RNA, 19 nt, Artificial Sequence
  Description of Artificial Sequence: Synthetic oligonucleotide
  Antisense strand to SEQ ID NO: 2251398
ucuccaagaaucuaugacu

SEQ ID NO: 2251400 - RNA, 19 nt, Artificial Sequence
  Description of Artificial Sequence: Synthetic oligonucleotide
  Sense strand starting at position 1064 of SEQ ID NO: 1884248
gcuagacagcucuaggguu

SEQ ID NO: 2251401 - RNA, 19 nt, Artificial Sequence
  Description of Artificial Sequence: Synthetic oligonucleotide
  Antisense strand to SEQ ID NO: 2251400
aacccuagagcugucuagc

SEQ ID NO: 2251402 - RNA, 19 nt, Artificial Sequence
  Description of Artificial Sequence: Synthetic oligonucleotide
  Sense strand starting at position 1066 of SEQ ID NO: 1884248
uagacagcucuaggguuua

SEQ ID NO: 2251403 - RNA, 19 nt, Artificial Sequence
  Description of Artificial Sequence: Synthetic oligonucleotide
  Antisense strand to SEQ ID NO: 2251402
uaaacccuagagcugucua

SEQ ID NO: 2251404 - RNA, 19 nt, Artificial Sequence
  Description of Artificial Sequence: Synthetic oligonucleotide
  Sense strand starting at position 1609 of SEQ ID NO: 1884248
aagauugcgaagugguuaa

SEQ ID NO: 2251405 - RNA, 19 nt, Artificial Sequence
  Description of Artificial Sequence: Synthetic oligonucleotide
  Antisense strand to SEQ ID NO: 2251404
uuaaccacuucgcaaucuu

SEQ ID NO: 2251406 - RNA, 19 nt, Artificial Sequence
  Description of Artificial Sequence: Synthetic oligonucleotide
  Sense strand starting at position 1613 of SEQ ID NO: 1884248
uugcgaagugguuaaauag

SEQ ID NO: 2251407 - RNA, 19 nt, Artificial Sequence
  Description of Artificial Sequence: Synthetic oligonucleotide
  Antisense strand to SEQ ID NO: 2251406
cuauuuaaccacuucgcaa

SEQ ID NO: 2251408 - RNA, 19 nt, Artificial Sequence
  Description of Artificial Sequence: Synthetic oligonucleotide
  Sense strand starting at position 1628 of SEQ ID NO: 1884248
auagcuauguaugcaaaua

SEQ ID NO: 2251409 - RNA, 19 nt, Artificial Sequence
  Description of Artificial Sequence: Synthetic oligonucleotide
  Antisense strand to SEQ ID NO: 2251408
uauuugcauacauagcuau

SEQ ID NO: 2251410 - RNA, 19 nt, Artificial Sequence
  Description of Artificial Sequence: Synthetic oligonucleotide
  Sense strand starting at position 1754 of SEQ ID NO: 1884248
auaucucaagagcaguuua

SEQ ID NO: 2251411 - RNA, 19 nt, Artificial Sequence
  Description of Artificial Sequence: Synthetic oligonucleotide
  Antisense strand to SEQ ID NO: 2251410
uaaacugcucuugagauau

SEQ ID NO: 2251412 - RNA, 19 nt, Artificial Sequence
  Description of Artificial Sequence: Synthetic oligonucleotide
  Sense strand starting at position 1779 of SEQ ID NO: 1884248
aacauaugauaagggaaga

SEQ ID NO: 2251413 - RNA, 19 nt, Artificial Sequence
  Description of Artificial Sequence: Synthetic oligonucleotide
  Antisense strand to SEQ ID NO: 2251412
ucuucccuuaucauauguu

SEQ ID NO: 2251414 - RNA, 19 nt, Artificial Sequence
  Description of Artificial Sequence: Synthetic oligonucleotide
  Sense strand starting at position 1807 of SEQ ID NO: 1884248
ucugacaauuucgcaguua

SEQ ID NO: 2251415 - RNA, 19 nt, Artificial Sequence
  Description of Artificial Sequence: Synthetic oligonucleotide
  Antisense strand to SEQ ID NO: 2251414
uaacugcgaaauugucaga

SEQ ID NO: 2251416 - RNA, 19 nt, Artificial Sequence
  Description of Artificial Sequence: Synthetic oligonucleotide
  Sense strand starting at position 2064 of SEQ ID NO: 1884248
ggaacuucugcugggacua

SEQ ID NO: 2251417 - RNA, 19 nt, Artificial Sequence
  Description of Artificial Sequence: Synthetic oligonucleotide
  Antisense strand to SEQ ID NO: 2251416
uagucccagcagaaguucc

SEQ ID NO: 2251418 - RNA, 19 nt, Artificial Sequence
  Description of Artificial Sequence: Synthetic oligonucleotide
  Sense strand starting at position 2259 of SEQ ID NO: 1884248
cagcgagugagcuaguaaa

SEQ ID NO: 2251419 - RNA, 19 nt, Artificial Sequence
  Description of Artificial Sequence: Synthetic oligonucleotide
  Antisense strand to SEQ ID NO: 2251418
uuuacuagcucacucgcug

SEQ ID NO: 2251420 - RNA, 19 nt, Artificial Sequence
  Description of Artificial Sequence: Synthetic oligonucleotide
  Sense strand starting at position 2322 of SEQ ID NO: 1884248
gcacuuuccagcgaaugag

SEQ ID NO: 2251421 - RNA, 19 nt, Artificial Sequence
  Description of Artificial Sequence: Synthetic oligonucleotide
  Antisense strand to SEQ ID NO: 2251420
cucauucgcuggaaagugc

SEQ ID NO: 2251422 - RNA, 19 nt, Artificial Sequence
  Description of Artificial Sequence: Synthetic oligonucleotide
  Sense strand starting at position 2366 of SEQ ID NO: 1884248
cggcaagugagccaguaaa

SEQ ID NO: 2251423 - RNA, 19 nt, Artificial Sequence
  Description of Artificial Sequence: Synthetic oligonucleotide
  Antisense strand to SEQ ID NO: 2251422
uuuacuggcucacuugccg

SEQ ID NO: 2251424 - RNA, 19 nt, Artificial Sequence
  Description of Artificial Sequence: Synthetic oligonucleotide
  Sense strand starting at position 2443 of SEQ ID NO: 1884248
uugaaauugacgggauccu

SEQ ID NO: 2251425 - RNA, 19 nt, Artificial Sequence
  Description of Artificial Sequence: Synthetic oligonucleotide
  Antisense strand to SEQ ID NO: 2251424
aggaucccgucaauuucaa

SEQ ID NO: 2251426 - RNA, 19 nt, Artificial Sequence
  Description of Artificial Sequence: Synthetic oligonucleotide
  Sense strand starting at position 2494 of SEQ ID NO: 1884248
ucaugaucccgugggaaga

SEQ ID NO: 2251427 - RNA, 19 nt, Artificial Sequence
  Description of Artificial Sequence: Synthetic oligonucleotide
  Antisense strand to SEQ ID NO: 2251426
ucuucccacgggaucauga

SEQ ID NO: 2251428 - RNA, 19 nt, Artificial Sequence
  Description of Artificial Sequence: Synthetic oligonucleotide
  Sense strand starting at position 2519 of SEQ ID NO: 1884248
cuuagucaucacugagaaa

SEQ ID NO: 2251429 - RNA, 19 nt, Artificial Sequence
  Description of Artificial Sequence: Synthetic oligonucleotide
  Antisense strand to SEQ ID NO: 2251428
uuucucagugaugacuaag

SEQ ID NO: 2251430 - RNA, 19 nt, Artificial Sequence
  Description of Artificial Sequence: Synthetic oligonucleotide
  Sense strand starting at position 2577 of SEQ ID NO: 1884248
aguaacaugccuuacugau

SEQ ID NO: 2251431 - RNA, 19 nt, Artificial Sequence
  Description of Artificial Sequence: Synthetic oligonucleotide
  Antisense strand to SEQ ID NO: 2251430
aucaguaaggcauguuacu

SEQ ID NO: 2251432 - RNA, 19 nt, Artificial Sequence
  Description of Artificial Sequence: Synthetic oligonucleotide
  Sense strand starting at position 2598 of SEQ ID NO: 1884248
ucuagugagcuguacuaau

SEQ ID NO: 2251433 - RNA, 19 nt, Artificial Sequence
  Description of Artificial Sequence: Synthetic oligonucleotide
  Antisense strand to SEQ ID NO: 2251432
auuaguacagcucacuaga

SEQ ID NO: 2251434 - RNA, 19 nt, Artificial Sequence
  Description of Artificial Sequence: Synthetic oligonucleotide
  Sense strand starting at position 2683 of SEQ ID NO: 1884248
uguugaacucucugcuaag

SEQ ID NO: 2251435 - RNA, 19 nt, Artificial Sequence
  Description of Artificial Sequence: Synthetic oligonucleotide
  Antisense strand to SEQ ID NO: 2251434
cuuagcagagaguucaaca

SEQ ID NO: 2251436 - RNA, 19 nt, Artificial Sequence
  Description of Artificial Sequence: Synthetic oligonucleotide
  Sense strand starting at position 2689 of SEQ ID NO: 1884248
acucucugcuaagugauau

SEQ ID NO: 2251437 - RNA, 19 nt, Artificial Sequence
  Description of Artificial Sequence: Synthetic oligonucleotide
  Antisense strand to SEQ ID NO: 2251436
auaucacuuagcagagagu

SEQ ID NO: 2251438 - RNA, 19 nt, Artificial Sequence
  Description of Artificial Sequence: Synthetic oligonucleotide
  Sense strand starting at position 2877 of SEQ ID NO: 1884248
gugcccuggcucuagaaua

SEQ ID NO: 2251439 - RNA, 19 nt, Artificial Sequence
  Description of Artificial Sequence: Synthetic oligonucleotide
  Antisense strand to SEQ ID NO: 2251438
uauucuagagccagggcac

SEQ ID NO: 2251440 - RNA, 19 nt, Artificial Sequence
  Description of Artificial Sequence: Synthetic oligonucleotide
  Sense strand starting at position 2981 of SEQ ID NO: 1884248
agcccuucucaguggagga

SEQ ID NO: 2251441 - RNA, 19 nt, Artificial Sequence
  Description of Artificial Sequence: Synthetic oligonucleotide
  Antisense strand to SEQ ID NO: 2251440
uccuccacugagaagggcu

SEQ ID NO: 2251442 - RNA, 19 nt, Artificial Sequence
  Description of Artificial Sequence: Synthetic oligonucleotide
  Sense strand starting at position 2982 of SEQ ID NO: 1884248
gcccuucucaguggaggaa

SEQ ID NO: 2251443 - RNA, 19 nt, Artificial Sequence
  Description of Artificial Sequence: Synthetic oligonucleotide
  Antisense strand to SEQ ID NO: 2251442
uuccuccacugagaagggc

SEQ ID NO: 2251444 - RNA, 19 nt, Artificial Sequence
  Description of Artificial Sequence: Synthetic oligonucleotide
  Sense strand starting at position 3074 of SEQ ID NO: 1884248
aggacuucucagcauauua

SEQ ID NO: 2251445 - RNA, 19 nt, Artificial Sequence
  Description of Artificial Sequence: Synthetic oligonucleotide
  Antisense strand to SEQ ID NO: 2251444
uaauaugcugagaaguccu

SEQ ID NO: 2251446 - RNA, 19 nt, Artificial Sequence
  Description of Artificial Sequence: Synthetic oligonucleotide
  Sense strand starting at position 3354 of SEQ ID NO: 1884248
cugaacaaaucugcaguaa

SEQ ID NO: 2251447 - RNA, 19 nt, Artificial Sequence
  Description of Artificial Sequence: Synthetic oligonucleotide
  Antisense strand to SEQ ID NO: 2251446
uuacugcagauuuguucag

SEQ ID NO: 2251448 - RNA, 19 nt, Artificial Sequence
  Description of Artificial Sequence: Synthetic oligonucleotide
  Sense strand starting at position 3442 of SEQ ID NO: 1884248
uucuguugaggguagauga

SEQ ID NO: 2251449 - RNA, 19 nt, Artificial Sequence
  Description of Artificial Sequence: Synthetic oligonucleotide
  Antisense strand to SEQ ID NO: 2251448
ucaucuacccucaacagaa

SEQ ID NO: 2251450 - RNA, 19 nt, Artificial Sequence
  Description of Artificial Sequence: Synthetic oligonucleotide
  Sense strand starting at position 3491 of SEQ ID NO: 1884248
cuggcaaacuucuucggaa

SEQ ID NO: 2251451 - RNA, 19 nt, Artificial Sequence
  Description of Artificial Sequence: Synthetic oligonucleotide
  Antisense strand to SEQ ID NO: 2251450
uuccgaagaaguuugccag

SEQ ID NO: 2251452 - RNA, 19 nt, Artificial Sequence
  Description of Artificial Sequence: Synthetic oligonucleotide
  Sense strand starting at position 3492 of SEQ ID NO: 1884248
uggcaaacuucuucggaaa

SEQ ID NO: 2251453 - RNA, 19 nt, Artificial Sequence
  Description of Artificial Sequence: Synthetic oligonucleotide
  Antisense strand to SEQ ID NO: 2251452
uuuccgaagaaguuugcca

SEQ ID NO: 2251454 - RNA, 19 nt, Artificial Sequence
  Description of Artificial Sequence: Synthetic oligonucleotide
  Sense strand starting at position 3578 of SEQ ID NO: 1884248
cuccguucugcuguuguaa

SEQ ID NO: 2251455 - RNA, 19 nt, Artificial Sequence
  Description of Artificial Sequence: Synthetic oligonucleotide
  Antisense strand to SEQ ID NO: 2251454
uuacaacagcagaacggag

SEQ ID NO: 2251456 - RNA, 19 nt, Artificial Sequence
  Description of Artificial Sequence: Synthetic oligonucleotide
  Sense strand starting at position 3579 of SEQ ID NO: 1884248
uccguucugcuguuguaau

SEQ ID NO: 2251457 - RNA, 19 nt, Artificial Sequence
  Description of Artificial Sequence: Synthetic oligonucleotide
  Antisense strand to SEQ ID NO: 2251456
auuacaacagcagaacgga

SEQ ID NO: 2251458 - RNA, 19 nt, Artificial Sequence
  Description of Artificial Sequence: Synthetic oligonucleotide
  Sense strand starting at position 626 of SEQ ID NO: 1884249
auugaugcuuucuaugaag

SEQ ID NO: 2251459 - RNA, 19 nt, Artificial Sequence
  Description of Artificial Sequence: Synthetic oligonucleotide
  Antisense strand to SEQ ID NO: 2251458
cuucauagaaagcaucaau

SEQ ID NO: 2251460 - RNA, 19 nt, Artificial Sequence
  Description of Artificial Sequence: Synthetic oligonucleotide
  Sense strand starting at position 658 of SEQ ID NO: 1884249
uuguuugaccugugauuug

SEQ ID NO: 2251461 - RNA, 19 nt, Artificial Sequence
  Description of Artificial Sequence: Synthetic oligonucleotide
  Antisense strand to SEQ ID NO: 2251460
caaaucacaggucaaacaa

SEQ ID NO: 2251462 - RNA, 19 nt, Artificial Sequence
  Description of Artificial Sequence: Synthetic oligonucleotide
  Sense strand starting at position 702 of SEQ ID NO: 1884249
guuagugcuaguuacacaa

SEQ ID NO: 2251463 - RNA, 19 nt, Artificial Sequence
  Description of Artificial Sequence: Synthetic oligonucleotide
  Antisense strand to SEQ ID NO: 2251462
uuguguaacuagcacuaac

SEQ ID NO: 2251464 - RNA, 19 nt, Artificial Sequence
  Description of Artificial Sequence: Synthetic oligonucleotide
  Sense strand starting at position 752 of SEQ ID NO: 1884249
acagguacuuucugaauag

SEQ ID NO: 2251465 - RNA, 19 nt, Artificial Sequence
  Description of Artificial Sequence: Synthetic oligonucleotide
  Antisense strand to SEQ ID NO: 2251464
cuauucagaaaguaccugu

SEQ ID NO: 2251466 - RNA, 19 nt, Artificial Sequence
  Description of Artificial Sequence: Synthetic oligonucleotide
  Sense strand starting at position 817 of SEQ ID NO: 1884249
aaggaaauguguguccugu

SEQ ID NO: 2251467 - RNA, 19 nt, Artificial Sequence
  Description of Artificial Sequence: Synthetic oligonucleotide
  Antisense strand to SEQ ID NO: 2251466
acaggacacacauuuccuu

SEQ ID NO: 2251468 - RNA, 19 nt, Artificial Sequence
  Description of Artificial Sequence: Synthetic oligonucleotide
  Sense strand starting at position 819 of SEQ ID NO: 1884249
ggaaauguguguccuguug

SEQ ID NO: 2251469 - RNA, 19 nt, Artificial Sequence
  Description of Artificial Sequence: Synthetic oligonucleotide
  Antisense strand to SEQ ID NO: 2251468
caacaggacacacauuucc

SEQ ID NO: 2251470 - RNA, 19 nt, Artificial Sequence
  Description of Artificial Sequence: Synthetic oligonucleotide
  Sense strand starting at position 1184 of SEQ ID NO: 1884249
ugucauuacugcuauugag

SEQ ID NO: 2251471 - RNA, 19 nt, Artificial Sequence
  Description of Artificial Sequence: Synthetic oligonucleotide
  Antisense strand to SEQ ID NO: 2251470
cucaauagcaguaaugaca

SEQ ID NO: 2251472 - RNA, 19 nt, Artificial Sequence
  Description of Artificial Sequence: Synthetic oligonucleotide
  Sense strand starting at position 1193 of SEQ ID NO: 1884249
ugcuauugagaccaucauu

SEQ ID NO: 2251473 - RNA, 19 nt, Artificial Sequence
  Description of Artificial Sequence: Synthetic oligonucleotide
  Antisense strand to SEQ ID NO: 2251472
aaugauggucucaauagca

SEQ ID NO: 2251474 - RNA, 19 nt, Artificial Sequence
  Description of Artificial Sequence: Synthetic oligonucleotide
  Sense strand starting at position 1243 of SEQ ID NO: 1884249
uugauaaacuagcagcaau

SEQ ID NO: 2251475 - RNA, 19 nt, Artificial Sequence
  Description of Artificial Sequence: Synthetic oligonucleotide
  Antisense strand to SEQ ID NO: 2251474
auugcugcuaguuuaucaa

SEQ ID NO: 2251476 - RNA, 19 nt, Artificial Sequence
  Description of Artificial Sequence: Synthetic oligonucleotide
  Sense strand starting at position 1283 of SEQ ID NO: 1884249
augaauacaucaugaagac

SEQ ID NO: 2251477 - RNA, 19 nt, Artificial Sequence
  Description of Artificial Sequence: Synthetic oligonucleotide
  Antisense strand to SEQ ID NO: 2251476
gucuucaugauguauucau

SEQ ID NO: 2251478 - RNA, 19 nt, Artificial Sequence
  Description of Artificial Sequence: Synthetic oligonucleotide
  Sense strand starting at position 1398 of SEQ ID NO: 1884249
gggaguuaaacggacucuu

SEQ ID NO: 2251479 - RNA, 19 nt, Artificial Sequence
  Description of Artificial Sequence: Synthetic oligonucleotide
  Antisense strand to SEQ ID NO: 2251478
aagaguccguuuaacuccc

SEQ ID NO: 2251480 - RNA, 19 nt, Artificial Sequence
  Description of Artificial Sequence: Synthetic oligonucleotide
  Sense strand starting at position 1425 of SEQ ID NO: 1884249
gagaguuaauugccugcua

SEQ ID NO: 2251481 - RNA, 19 nt, Artificial Sequence
  Description of Artificial Sequence: Synthetic oligonucleotide
  Antisense strand to SEQ ID NO: 2251480
uagcaggcaauuaacucuc

SEQ ID NO: 2251482 - RNA, 19 nt, Artificial Sequence
  Description of Artificial Sequence: Synthetic oligonucleotide
  Sense strand starting at position 1426 of SEQ ID NO: 1884249
agaguuaauugccugcuau

SEQ ID NO: 2251483 - RNA, 19 nt, Artificial Sequence
  Description of Artificial Sequence: Synthetic oligonucleotide
  Antisense strand to SEQ ID NO: 2251482
auagcaggcaauuaacucu

SEQ ID NO: 2251484 - RNA, 19 nt, Artificial Sequence
  Description of Artificial Sequence: Synthetic oligonucleotide
  Sense strand starting at position 1427 of SEQ ID NO: 1884249
gaguuaauugccugcuauu

SEQ ID NO: 2251485 - RNA, 19 nt, Artificial Sequence
  Description of Artificial Sequence: Synthetic oligonucleotide
  Antisense strand to SEQ ID NO: 2251484
aauagcaggcaauuaacuc

SEQ ID NO: 2251486 - RNA, 19 nt, Artificial Sequence
  Description of Artificial Sequence: Synthetic oligonucleotide
  Sense strand starting at position 2056 of SEQ ID NO: 1884249
caguguuccuuccugagag

SEQ ID NO: 2251487 - RNA, 19 nt, Artificial Sequence
  Description of Artificial Sequence: Synthetic oligonucleotide
  Antisense strand to SEQ ID NO: 2251486
cucucaggaaggaacacug

SEQ ID NO: 2251488 - RNA, 19 nt, Artificial Sequence
  Description of Artificial Sequence: Synthetic oligonucleotide
  Sense strand starting at position 2058 of SEQ ID NO: 1884249
guguuccuuccugagagcu

SEQ ID NO: 2251489 - RNA, 19 nt, Artificial Sequence
  Description of Artificial Sequence: Synthetic oligonucleotide
  Antisense strand to SEQ ID NO: 2251488
agcucucaggaaggaacac

SEQ ID NO: 2251490 - RNA, 19 nt, Artificial Sequence
  Description of Artificial Sequence: Synthetic oligonucleotide
  Sense strand starting at position 2137 of SEQ ID NO: 1884249
agauccagggccugugaau

SEQ ID NO: 2251491 - RNA, 19 nt, Artificial Sequence
  Description of Artificial Sequence: Synthetic oligonucleotide
  Antisense strand to SEQ ID NO: 2251490
auucacaggcccuggaucu

SEQ ID NO: 2251492 - RNA, 19 nt, Artificial Sequence
  Description of Artificial Sequence: Synthetic oligonucleotide
  Sense strand starting at position 2341 of SEQ ID NO: 1884249
auguguagaugccugucua

SEQ ID NO: 2251493 - RNA, 19 nt, Artificial Sequence
  Description of Artificial Sequence: Synthetic oligonucleotide
  Antisense strand to SEQ ID NO: 2251492
uagacaggcaucuacacau

SEQ ID NO: 2251494 - RNA, 19 nt, Artificial Sequence
  Description of Artificial Sequence: Synthetic oligonucleotide
  Sense strand starting at position 2425 of SEQ ID NO: 1884249
uggaguguggcuuagccaa

SEQ ID NO: 2251495 - RNA, 19 nt, Artificial Sequence
  Description of Artificial Sequence: Synthetic oligonucleotide
  Antisense strand to SEQ ID NO: 2251494
uuggcuaagccacacucca

SEQ ID NO: 2251496 - RNA, 19 nt, Artificial Sequence
  Description of Artificial Sequence: Synthetic oligonucleotide
  Sense strand starting at position 2716 of SEQ ID NO: 1884249
gcaugagucugcuaauuau

SEQ ID NO: 2251497 - RNA, 19 nt, Artificial Sequence
  Description of Artificial Sequence: Synthetic oligonucleotide
  Antisense strand to SEQ ID NO: 2251496
auaauuagcagacucaugc

SEQ ID NO: 2251498 - RNA, 19 nt, Artificial Sequence
  Description of Artificial Sequence: Synthetic oligonucleotide
  Sense strand starting at position 2727 of SEQ ID NO: 1884249
cuaauuauuugucuugucu

SEQ ID NO: 2251499 - RNA, 19 nt, Artificial Sequence
  Description of Artificial Sequence: Synthetic oligonucleotide
  Antisense strand to SEQ ID NO: 2251498
agacaagacaaauaauuag

SEQ ID NO: 2251500 - RNA, 19 nt, Artificial Sequence
  Description of Artificial Sequence: Synthetic oligonucleotide
  Sense strand starting at position 3090 of SEQ ID NO: 1884249
gucaguuggucacagcaga

SEQ ID NO: 2251501 - RNA, 19 nt, Artificial Sequence
  Description of Artificial Sequence: Synthetic oligonucleotide
  Antisense strand to SEQ ID NO: 2251500
ucugcugugaccaacugac

SEQ ID NO: 2251502 - RNA, 19 nt, Artificial Sequence
  Description of Artificial Sequence: Synthetic oligonucleotide
  Sense strand starting at position 3133 of SEQ ID NO: 1884249
gcugccguagccuugagaa

SEQ ID NO: 2251503 - RNA, 19 nt, Artificial Sequence
  Description of Artificial Sequence: Synthetic oligonucleotide
  Antisense strand to SEQ ID NO: 2251502
uucucaaggcuacggcagc

SEQ ID NO: 2251504 - RNA, 19 nt, Artificial Sequence
  Description of Artificial Sequence: Synthetic oligonucleotide
  Sense strand starting at position 3135 of SEQ ID NO: 1884249
ugccguagccuugagaaca

SEQ ID NO: 2251505 - RNA, 19 nt, Artificial Sequence
  Description of Artificial Sequence: Synthetic oligonucleotide
  Antisense strand to SEQ ID NO: 2251504
uguucucaaggcuacggca

SEQ ID NO: 2251506 - RNA, 19 nt, Artificial Sequence
  Description of Artificial Sequence: Synthetic oligonucleotide
  Sense strand starting at position 3216 of SEQ ID NO: 1884249
ucugauucgcuccaucagu

SEQ ID NO: 2251507 - RNA, 19 nt, Artificial Sequence
  Description of Artificial Sequence: Synthetic oligonucleotide
  Antisense strand to SEQ ID NO: 2251506
acugauggagcgaaucaga

SEQ ID NO: 2251508 - RNA, 19 nt, Artificial Sequence
  Description of Artificial Sequence: Synthetic oligonucleotide
  Sense strand starting at position 3275 of SEQ ID NO: 1884249
cagggcauuuauuggagaa

SEQ ID NO: 2251509 - RNA, 19 nt, Artificial Sequence
  Description of Artificial Sequence: Synthetic oligonucleotide
  Antisense strand to SEQ ID NO: 2251508
uucuccaauaaaugcccug

SEQ ID NO: 2251510 - RNA, 19 nt, Artificial Sequence
  Description of Artificial Sequence: Synthetic oligonucleotide
  Sense strand starting at position 3305 of SEQ ID NO: 1884249
augucucccucauucgaau

SEQ ID NO: 2251511 - RNA, 19 nt, Artificial Sequence
  Description of Artificial Sequence: Synthetic oligonucleotide
  Antisense strand to SEQ ID NO: 2251510
auucgaaugagggagacau

SEQ ID NO: 2251512 - RNA, 19 nt, Artificial Sequence
  Description of Artificial Sequence: Synthetic oligonucleotide
  Sense strand starting at position 3311 of SEQ ID NO: 1884249
cccucauucgaauguggga

SEQ ID NO: 2251513 - RNA, 19 nt, Artificial Sequence
  Description of Artificial Sequence: Synthetic oligonucleotide
  Antisense strand to SEQ ID NO: 2251512
ucccacauucgaaugaggg

SEQ ID NO: 2251514 - RNA, 19 nt, Artificial Sequence
  Description of Artificial Sequence: Synthetic oligonucleotide
  Sense strand starting at position 3329 of SEQ ID NO: 1884249
aguccaguuccgcaaguga

SEQ ID NO: 2251515 - RNA, 19 nt, Artificial Sequence
  Description of Artificial Sequence: Synthetic oligonucleotide
  Antisense strand to SEQ ID NO: 2251514
ucacuugcggaacuggacu

SEQ ID NO: 2251516 - RNA, 19 nt, Artificial Sequence
  Description of Artificial Sequence: Synthetic oligonucleotide
  Sense strand starting at position 3340 of SEQ ID NO: 1884249
gcaagugagguuuaacaag

SEQ ID NO: 2251517 - RNA, 19 nt, Artificial Sequence
  Description of Artificial Sequence: Synthetic oligonucleotide
  Antisense strand to SEQ ID NO: 2251516
cuuguuaaaccucacuugc

SEQ ID NO: 2251518 - RNA, 19 nt, Artificial Sequence
  Description of Artificial Sequence: Synthetic oligonucleotide
  Sense strand starting at position 3355 of SEQ ID NO: 1884249
caagaucaccacugugaag

SEQ ID NO: 2251519 - RNA, 19 nt, Artificial Sequence
  Description of Artificial Sequence: Synthetic oligonucleotide
  Antisense strand to SEQ ID NO: 2251518
cuucacaguggugaucuug

SEQ ID NO: 2251520 - RNA, 19 nt, Artificial Sequence
  Description of Artificial Sequence: Synthetic oligonucleotide
  Sense strand starting at position 3378 of SEQ ID NO: 1884249
cugugauggagucacaguu

SEQ ID NO: 2251521 - RNA, 19 nt, Artificial Sequence
  Description of Artificial Sequence: Synthetic oligonucleotide
  Antisense strand to SEQ ID NO: 2251520
aacugugacuccaucacag

SEQ ID NO: 2251522 - RNA, 19 nt, Artificial Sequence
  Description of Artificial Sequence: Synthetic oligonucleotide
  Sense strand starting at position 3388 of SEQ ID NO: 1884249
gucacaguucucugagccu

SEQ ID NO: 2251523 - RNA, 19 nt, Artificial Sequence
  Description of Artificial Sequence: Synthetic oligonucleotide
  Antisense strand to SEQ ID NO: 2251522
aggcucagagaacugugac

SEQ ID NO: 2251524 - RNA, 19 nt, Artificial Sequence
  Description of Artificial Sequence: Synthetic oligonucleotide
  Sense strand starting at position 3391 of SEQ ID NO: 1884249
acaguucucugagccucua

SEQ ID NO: 2251525 - RNA, 19 nt, Artificial Sequence
  Description of Artificial Sequence: Synthetic oligonucleotide
  Antisense strand to SEQ ID NO: 2251524
uagaggcucagagaacugu

SEQ ID NO: 2251526 - RNA, 19 nt, Artificial Sequence
  Description of Artificial Sequence: Synthetic oligonucleotide
  Sense strand starting at position 3414 of SEQ ID NO: 1884249
gggcgaguuucccaaagaa

SEQ ID NO: 2251527 - RNA, 19 nt, Artificial Sequence
  Description of Artificial Sequence: Synthetic oligonucleotide
  Antisense strand to SEQ ID NO: 2251526
uucuuugggaaacucgccc

SEQ ID NO: 2251528 - RNA, 19 nt, Artificial Sequence
  Description of Artificial Sequence: Synthetic oligonucleotide
  Sense strand starting at position 3443 of SEQ ID NO: 1884249
ccugguuucucaugacgag

SEQ ID NO: 2251529 - RNA, 19 nt, Artificial Sequence
  Description of Artificial Sequence: Synthetic oligonucleotide
  Antisense strand to SEQ ID NO: 2251528
cucgucaugagaaaccagg

SEQ ID NO: 2251530 - RNA, 19 nt, Artificial Sequence
  Description of Artificial Sequence: Synthetic oligonucleotide
  Sense strand starting at position 3608 of SEQ ID NO: 1884249
gagugacagcugcaugaga

SEQ ID NO: 2251531 - RNA, 19 nt, Artificial Sequence
  Description of Artificial Sequence: Synthetic oligonucleotide
  Antisense strand to SEQ ID NO: 2251530
ucucaugcagcugucacuc

SEQ ID NO: 2251532 - RNA, 19 nt, Artificial Sequence
  Description of Artificial Sequence: Synthetic oligonucleotide
  Sense strand starting at position 3854 of SEQ ID NO: 1884249
cagaguugcucucuggaag

SEQ ID NO: 2251533 - RNA, 19 nt, Artificial Sequence
  Description of Artificial Sequence: Synthetic oligonucleotide
  Antisense strand to SEQ ID NO: 2251532
cuuccagagagcaacucug

SEQ ID NO: 2251534 - RNA, 19 nt, Artificial Sequence
  Description of Artificial Sequence: Synthetic oligonucleotide
  Sense strand starting at position 3869 of SEQ ID NO: 1884249
gaaggugucucaggaaacu

SEQ ID NO: 2251535 - RNA, 19 nt, Artificial Sequence
  Description of Artificial Sequence: Synthetic oligonucleotide
  Antisense strand to SEQ ID NO: 2251534
aguuuccugagacaccuuc

SEQ ID NO: 2251536 - RNA, 19 nt, Artificial Sequence
  Description of Artificial Sequence: Synthetic oligonucleotide
  Sense strand starting at position 3923 of SEQ ID NO: 1884249
gagaaauacggccgggauc

SEQ ID NO: 2251537 - RNA, 19 nt, Artificial Sequence
  Description of Artificial Sequence: Synthetic oligonucleotide
  Antisense strand to SEQ ID NO: 2251536
gaucccggccguauuucuc

SEQ ID NO: 2251538 - RNA, 19 nt, Artificial Sequence
  Description of Artificial Sequence: Synthetic oligonucleotide
  Sense strand starting at position 105 of SEQ ID NO: 1884250
cacugugaguccucuacag

SEQ ID NO: 2251539 - RNA, 19 nt, Artificial Sequence
  Description of Artificial Sequence: Synthetic oligonucleotide
  Antisense strand to SEQ ID NO: 2251538
cuguagaggacucacagug

SEQ ID NO: 2251540 - RNA, 19 nt, Artificial Sequence
  Description of Artificial Sequence: Synthetic oligonucleotide
  Sense strand starting at position 107 of SEQ ID NO: 1884250
cugugaguccucuacagaa

SEQ ID NO: 2251541 - RNA, 19 nt, Artificial Sequence
  Description of Artificial Sequence: Synthetic oligonucleotide
  Antisense strand to SEQ ID NO: 2251540
uucuguagaggacucacag

SEQ ID NO: 2251542 - RNA, 19 nt, Artificial Sequence
  Description of Artificial Sequence: Synthetic oligonucleotide
  Sense strand starting at position 212 of SEQ ID NO: 1884250
cagagccauccaggaguua

SEQ ID NO: 2251543 - RNA, 19 nt, Artificial Sequence
  Description of Artificial Sequence: Synthetic oligonucleotide
  Antisense strand to SEQ ID NO: 2251542
uaacuccuggauggcucug

SEQ ID NO: 2251544 - RNA, 19 nt, Artificial Sequence
  Description of Artificial Sequence: Synthetic oligonucleotide
  Sense strand starting at position 494 of SEQ ID NO: 1884250
ugauguagcaguggauuaa

SEQ ID NO: 2251545 - RNA, 19 nt, Artificial Sequence
  Description of Artificial Sequence: Synthetic oligonucleotide
  Antisense strand to SEQ ID NO: 2251544
uuaauccacugcuacauca

SEQ ID NO: 2251546 - RNA, 19 nt, Artificial Sequence
  Description of Artificial Sequence: Synthetic oligonucleotide
  Sense strand starting at position 503 of SEQ ID NO: 1884250
aguggauuaacagguuaag

SEQ ID NO: 2251547 - RNA, 19 nt, Artificial Sequence
  Description of Artificial Sequence: Synthetic oligonucleotide
  Antisense strand to SEQ ID NO: 2251546
cuuaaccuguuaauccacu

SEQ ID NO: 2251548 - RNA, 19 nt, Artificial Sequence
  Description of Artificial Sequence: Synthetic oligonucleotide
  Sense strand starting at position 681 of SEQ ID NO: 1884250
gcaucuggucacgaacaaa

SEQ ID NO: 2251549 - RNA, 19 nt, Artificial Sequence
  Description of Artificial Sequence: Synthetic oligonucleotide
  Antisense strand to SEQ ID NO: 2251548
uuuguucgugaccagaugc

SEQ ID NO: 2251550 - RNA, 19 nt, Artificial Sequence
  Description of Artificial Sequence: Synthetic oligonucleotide
  Sense strand starting at position 712 of SEQ ID NO: 1884250
gcaagugugcaauaggaaa

SEQ ID NO: 2251551 - RNA, 19 nt, Artificial Sequence
  Description of Artificial Sequence: Synthetic oligonucleotide
  Antisense strand to SEQ ID NO: 2251550
uuuccuauugcacacuugc

SEQ ID NO: 2251552 - RNA, 19 nt, Artificial Sequence
  Description of Artificial Sequence: Synthetic oligonucleotide
  Sense strand starting at position 772 of SEQ ID NO: 1884250
ugggaauggcucugagcca

SEQ ID NO: 2251553 - RNA, 19 nt, Artificial Sequence
  Description of Artificial Sequence: Synthetic oligonucleotide
  Antisense strand to SEQ ID NO: 2251552
uggcucagagccauuccca

SEQ ID NO: 2251554 - RNA, 19 nt, Artificial Sequence
  Description of Artificial Sequence: Synthetic oligonucleotide
  Sense strand starting at position 861 of SEQ ID NO: 1884250
gcaggcuugguugaggaaa

SEQ ID NO: 2251555 - RNA, 19 nt, Artificial Sequence
  Description of Artificial Sequence: Synthetic oligonucleotide
  Antisense strand to SEQ ID NO: 2251554
uuuccucaaccaagccugc

SEQ ID NO: 2251556 - RNA, 19 nt, Artificial Sequence
  Description of Artificial Sequence: Synthetic oligonucleotide
  Sense strand starting at position 1015 of SEQ ID NO: 1884250
uuuauaagcuagguuuaag

SEQ ID NO: 2251557 - RNA, 19 nt, Artificial Sequence
  Description of Artificial Sequence: Synthetic oligonucleotide
  Antisense strand to SEQ ID NO: 2251556
cuuaaaccuagcuuauaaa

SEQ ID NO: 2251558 - RNA, 19 nt, Artificial Sequence
  Description of Artificial Sequence: Synthetic oligonucleotide
  Sense strand starting at position 1341 of SEQ ID NO: 1884250
ggucuuucuggugagagca

SEQ ID NO: 2251559 - RNA, 19 nt, Artificial Sequence
  Description of Artificial Sequence: Synthetic oligonucleotide
  Antisense strand to SEQ ID NO: 2251558
ugcucucaccagaaagacc

SEQ ID NO: 2251560 - RNA, 19 nt, Artificial Sequence
  Description of Artificial Sequence: Synthetic oligonucleotide
  Sense strand starting at position 1681 of SEQ ID NO: 1884250
cccgaaucaaucuguagga

SEQ ID NO: 2251561 - RNA, 19 nt, Artificial Sequence
  Description of Artificial Sequence: Synthetic oligonucleotide
  Antisense strand to SEQ ID NO: 2251560
uccuacagauugauucggg

SEQ ID NO: 2251562 - RNA, 19 nt, Artificial Sequence
  Description of Artificial Sequence: Synthetic oligonucleotide
  Sense strand starting at position 1682 of SEQ ID NO: 1884250
ccgaaucaaucuguaggaa

SEQ ID NO: 2251563 - RNA, 19 nt, Artificial Sequence
  Description of Artificial Sequence: Synthetic oligonucleotide
  Antisense strand to SEQ ID NO: 2251562
uuccuacagauugauucgg

SEQ ID NO: 2251564 - RNA, 19 nt, Artificial Sequence
  Description of Artificial Sequence: Synthetic oligonucleotide
  Sense strand starting at position 1793 of SEQ ID NO: 1884250
cuguacaauggugggaauu

SEQ ID NO: 2251565 - RNA, 19 nt, Artificial Sequence
  Description of Artificial Sequence: Synthetic oligonucleotide
  Antisense strand to SEQ ID NO: 2251564
aauucccaccauuguacag

SEQ ID NO: 2251566 - RNA, 19 nt, Artificial Sequence
  Description of Artificial Sequence: Synthetic oligonucleotide
  Sense strand starting at position 1794 of SEQ ID NO: 1884250
uguacaauggugggaauua

SEQ ID NO: 2251567 - RNA, 19 nt, Artificial Sequence
  Description of Artificial Sequence: Synthetic oligonucleotide
  Antisense strand to SEQ ID NO: 2251566
uaauucccaccauuguaca

SEQ ID NO: 2251568 - RNA, 19 nt, Artificial Sequence
  Description of Artificial Sequence: Synthetic oligonucleotide
  Sense strand starting at position 1984 of SEQ ID NO: 1884250
aggugugggagguggaaua

SEQ ID NO: 2251569 - RNA, 19 nt, Artificial Sequence
  Description of Artificial Sequence: Synthetic oligonucleotide
  Antisense strand to SEQ ID NO: 2251568
uauuccaccucccacaccu

SEQ ID NO: 2251570 - RNA, 19 nt, Artificial Sequence
  Description of Artificial Sequence: Synthetic oligonucleotide
  Sense strand starting at position 1986 of SEQ ID NO: 1884250
gugugggagguggaauaau

SEQ ID NO: 2251571 - RNA, 19 nt, Artificial Sequence
  Description of Artificial Sequence: Synthetic oligonucleotide
  Antisense strand to SEQ ID NO: 2251570
auuauuccaccucccacac

SEQ ID NO: 2251572 - RNA, 19 nt, Artificial Sequence
  Description of Artificial Sequence: Synthetic oligonucleotide
  Sense strand starting at position 2043 of SEQ ID NO: 1884250
gugaauaugcuaugacaca

SEQ ID NO: 2251573 - RNA, 19 nt, Artificial Sequence
  Description of Artificial Sequence: Synthetic oligonucleotide
  Antisense strand to SEQ ID NO: 2251572
ugugucauagcauauucac

SEQ ID NO: 2251574 - RNA, 19 nt, Artificial Sequence
  Description of Artificial Sequence: Synthetic oligonucleotide
  Sense strand starting at position 2069 of SEQ ID NO: 1884250
gaagguugcaguuggaauu

SEQ ID NO: 2251575 - RNA, 19 nt, Artificial Sequence
  Description of Artificial Sequence: Synthetic oligonucleotide
  Antisense strand to SEQ ID NO: 2251574
aauuccaacugcaaccuuc

SEQ ID NO: 2251576 - RNA, 19 nt, Artificial Sequence
  Description of Artificial Sequence: Synthetic oligonucleotide
  Sense strand starting at position 2433 of SEQ ID NO: 1884250
gccacuaagucugugggaa

SEQ ID NO: 2251577 - RNA, 19 nt, Artificial Sequence
  Description of Artificial Sequence: Synthetic oligonucleotide
  Antisense strand to SEQ ID NO: 2251576
uucccacagacuuaguggc

SEQ ID NO: 2251578 - RNA, 19 nt, Artificial Sequence
  Description of Artificial Sequence: Synthetic oligonucleotide
  Sense strand starting at position 2434 of SEQ ID NO: 1884250
ccacuaagucugugggaau

SEQ ID NO: 2251579 - RNA, 19 nt, Artificial Sequence
  Description of Artificial Sequence: Synthetic oligonucleotide
  Antisense strand to SEQ ID NO: 2251578
auucccacagacuuagugg

SEQ ID NO: 2251580 - RNA, 19 nt, Artificial Sequence
  Description of Artificial Sequence: Synthetic oligonucleotide
  Sense strand starting at position 2447 of SEQ ID NO: 1884250
gggaaucuguuauugcagu

SEQ ID NO: 2251581 - RNA, 19 nt, Artificial Sequence
  Description of Artificial Sequence: Synthetic oligonucleotide
  Antisense strand to SEQ ID NO: 2251580
acugcaauaacagauuccc

SEQ ID NO: 2251582 - RNA, 19 nt, Artificial Sequence
  Description of Artificial Sequence: Synthetic oligonucleotide
  Sense strand starting at position 2454 of SEQ ID NO: 1884250
uguuauugcagugacagga

SEQ ID NO: 2251583 - RNA, 19 nt, Artificial Sequence
  Description of Artificial Sequence: Synthetic oligonucleotide
  Antisense strand to SEQ ID NO: 2251582
uccugucacugcaauaaca

SEQ ID NO: 2251584 - RNA, 19 nt, Artificial Sequence
  Description of Artificial Sequence: Synthetic oligonucleotide
  Sense strand starting at position 2470 of SEQ ID NO: 1884250
ggaaaucaauaagaagaga

SEQ ID NO: 2251585 - RNA, 19 nt, Artificial Sequence
  Description of Artificial Sequence: Synthetic oligonucleotide
  Antisense strand to SEQ ID NO: 2251584
ucucuucuuauugauuucc

SEQ ID NO: 2251586 - RNA, 19 nt, Artificial Sequence
  Description of Artificial Sequence: Synthetic oligonucleotide
  Sense strand starting at position 2678 of SEQ ID NO: 1884250
gguuuacugaaccgagguu

SEQ ID NO: 2251587 - RNA, 19 nt, Artificial Sequence
  Description of Artificial Sequence: Synthetic oligonucleotide
  Antisense strand to SEQ ID NO: 2251586
aaccucgguucaguaaacc

SEQ ID NO: 2251588 - RNA, 19 nt, Artificial Sequence
  Description of Artificial Sequence: Synthetic oligonucleotide
  Sense strand starting at position 2970 of SEQ ID NO: 1884250
augaaaguguugcuaaagu

SEQ ID NO: 2251589 - RNA, 19 nt, Artificial Sequence
  Description of Artificial Sequence: Synthetic oligonucleotide
  Antisense strand to SEQ ID NO: 2251588
acuuuagcaacacuuucau

SEQ ID NO: 2251590 - RNA, 19 nt, Artificial Sequence
  Description of Artificial Sequence: Synthetic oligonucleotide
  Sense strand starting at position 3016 of SEQ ID NO: 1884250
ggugaaaugucugucucug

SEQ ID NO: 2251591 - RNA, 19 nt, Artificial Sequence
  Description of Artificial Sequence: Synthetic oligonucleotide
  Antisense strand to SEQ ID NO: 2251590
cagagacagacauuucacc

SEQ ID NO: 2251592 - RNA, 19 nt, Artificial Sequence
  Description of Artificial Sequence: Synthetic oligonucleotide
  Sense strand starting at position 3020 of SEQ ID NO: 1884250
aaaugucugucucugggua

SEQ ID NO: 2251593 - RNA, 19 nt, Artificial Sequence
  Description of Artificial Sequence: Synthetic oligonucleotide
  Antisense strand to SEQ ID NO: 2251592
uacccagagacagacauuu

SEQ ID NO: 2251594 - RNA, 19 nt, Artificial Sequence
  Description of Artificial Sequence: Synthetic oligonucleotide
  Sense strand starting at position 3025 of SEQ ID NO: 1884250
ucugucucuggguacaaga

SEQ ID NO: 2251595 - RNA, 19 nt, Artificial Sequence
  Description of Artificial Sequence: Synthetic oligonucleotide
  Antisense strand to SEQ ID NO: 2251594
ucuuguacccagagacaga

SEQ ID NO: 2251596 - RNA, 19 nt, Artificial Sequence
  Description of Artificial Sequence: Synthetic oligonucleotide
  Sense strand starting at position 3126 of SEQ ID NO: 1884250
guaguuuguacaugacaga

SEQ ID NO: 2251597 - RNA, 19 nt, Artificial Sequence
  Description of Artificial Sequence: Synthetic oligonucleotide
  Antisense strand to SEQ ID NO: 2251596
ucugucauguacaaacuac

SEQ ID NO: 2251598 - RNA, 19 nt, Artificial Sequence
  Description of Artificial Sequence: Synthetic oligonucleotide
  Sense strand starting at position 3216 of SEQ ID NO: 1884250
cggugauggauugguaaua

SEQ ID NO: 2251599 - RNA, 19 nt, Artificial Sequence
  Description of Artificial Sequence: Synthetic oligonucleotide
  Antisense strand to SEQ ID NO: 2251598
uauuaccaauccaucaccg

SEQ ID NO: 2251600 - RNA, 19 nt, Artificial Sequence
  Description of Artificial Sequence: Synthetic oligonucleotide
  Sense strand starting at position 3217 of SEQ ID NO: 1884250
ggugauggauugguaauaa

SEQ ID NO: 2251601 - RNA, 19 nt, Artificial Sequence
  Description of Artificial Sequence: Synthetic oligonucleotide
  Antisense strand to SEQ ID NO: 2251600
uuauuaccaauccaucacc

SEQ ID NO: 2251602 - RNA, 19 nt, Artificial Sequence
  Description of Artificial Sequence: Synthetic oligonucleotide
  Sense strand starting at position 3239 of SEQ ID NO: 1884250
ugggaugcauaacucauaa

SEQ ID NO: 2251603 - RNA, 19 nt, Artificial Sequence
  Description of Artificial Sequence: Synthetic oligonucleotide
  Antisense strand to SEQ ID NO: 2251602
uuaugaguuaugcauccca

SEQ ID NO: 2251604 - RNA, 19 nt, Artificial Sequence
  Description of Artificial Sequence: Synthetic oligonucleotide
  Sense strand starting at position 3347 of SEQ ID NO: 1884250
auuuacaugucacauggaa

SEQ ID NO: 2251605 - RNA, 19 nt, Artificial Sequence
  Description of Artificial Sequence: Synthetic oligonucleotide
  Antisense strand to SEQ ID NO: 2251604
uuccaugugacauguaaau

SEQ ID NO: 2251606 - RNA, 19 nt, Artificial Sequence
  Description of Artificial Sequence: Synthetic oligonucleotide
  Sense strand starting at position 3386 of SEQ ID NO: 1884250
uuucuugaguuaucauagu

SEQ ID NO: 2251607 - RNA, 19 nt, Artificial Sequence
  Description of Artificial Sequence: Synthetic oligonucleotide
  Antisense strand to SEQ ID NO: 2251606
acuaugauaacucaagaaa

SEQ ID NO: 2251608 - RNA, 19 nt, Artificial Sequence
  Description of Artificial Sequence: Synthetic oligonucleotide
  Sense strand starting at position 3392 of SEQ ID NO: 1884250
gaguuaucauaguucuuag

SEQ ID NO: 2251609 - RNA, 19 nt, Artificial Sequence
  Description of Artificial Sequence: Synthetic oligonucleotide
  Antisense strand to SEQ ID NO: 2251608
cuaagaacuaugauaacuc

SEQ ID NO: 2251610 - RNA, 19 nt, Artificial Sequence
  Description of Artificial Sequence: Synthetic oligonucleotide
  Sense strand starting at position 3442 of SEQ ID NO: 1884250
ugcugaagucaucaauaaa

SEQ ID NO: 2251611 - RNA, 19 nt, Artificial Sequence
  Description of Artificial Sequence: Synthetic oligonucleotide
  Antisense strand to SEQ ID NO: 2251610
uuuauugaugacuucagca

SEQ ID NO: 2251612 - RNA, 19 nt, Artificial Sequence
  Description of Artificial Sequence: Synthetic oligonucleotide
  Sense strand starting at position 3670 of SEQ ID NO: 1884250
cugggauauuaugaagaaa

SEQ ID NO: 2251613 - RNA, 19 nt, Artificial Sequence
  Description of Artificial Sequence: Synthetic oligonucleotide
  Antisense strand to SEQ ID NO: 2251612
uuucuucauaauaucccag

SEQ ID NO: 2251614 - RNA, 19 nt, Artificial Sequence
  Description of Artificial Sequence: Synthetic oligonucleotide
  Sense strand starting at position 3698 of SEQ ID NO: 1884250
gucaguaaauugcucaauu

SEQ ID NO: 2251615 - RNA, 19 nt, Artificial Sequence
  Description of Artificial Sequence: Synthetic oligonucleotide
  Antisense strand to SEQ ID NO: 2251614
aauugagcaauuuacugac

SEQ ID NO: 2251616 - RNA, 19 nt, Artificial Sequence
  Description of Artificial Sequence: Synthetic oligonucleotide
  Sense strand starting at position 3871 of SEQ ID NO: 1884250
auuggaaugucacacauuu

SEQ ID NO: 2251617 - RNA, 19 nt, Artificial Sequence
  Description of Artificial Sequence: Synthetic oligonucleotide
  Antisense strand to SEQ ID NO: 2251616
aaaugugugacauuccaau

SEQ ID NO: 2251618 - RNA, 19 nt, Artificial Sequence
  Description of Artificial Sequence: Synthetic oligonucleotide
  Sense strand starting at position 187 of SEQ ID NO: 1884251
ccgagaggcuuucuagaga

SEQ ID NO: 2251619 - RNA, 19 nt, Artificial Sequence
  Description of Artificial Sequence: Synthetic oligonucleotide
  Antisense strand to SEQ ID NO: 2251618
ucucuagaaagccucucgg

SEQ ID NO: 2251620 - RNA, 19 nt, Artificial Sequence
  Description of Artificial Sequence: Synthetic oligonucleotide
  Sense strand starting at position 192 of SEQ ID NO: 1884251
aggcuuucuagagagucaa

SEQ ID NO: 2251621 - RNA, 19 nt, Artificial Sequence
  Description of Artificial Sequence: Synthetic oligonucleotide
  Antisense strand to SEQ ID NO: 2251620
uugacucucuagaaagccu

SEQ ID NO: 2251622 - RNA, 19 nt, Artificial Sequence
  Description of Artificial Sequence: Synthetic oligonucleotide
  Sense strand starting at position 329 of SEQ ID NO: 1884251
ucugaacuccuaugaugaa

SEQ ID NO: 2251623 - RNA, 19 nt, Artificial Sequence
  Description of Artificial Sequence: Synthetic oligonucleotide
  Antisense strand to SEQ ID NO: 2251622
uucaucauaggaguucaga

SEQ ID NO: 2251624 - RNA, 19 nt, Artificial Sequence
  Description of Artificial Sequence: Synthetic oligonucleotide
  Sense strand starting at position 519 of SEQ ID NO: 1884251
agugguccucuagaccaaa

SEQ ID NO: 2251625 - RNA, 19 nt, Artificial Sequence
  Description of Artificial Sequence: Synthetic oligonucleotide
  Antisense strand to SEQ ID NO: 2251624
uuuggucuagaggaccacu

SEQ ID NO: 2251626 - RNA, 19 nt, Artificial Sequence
  Description of Artificial Sequence: Synthetic oligonucleotide
  Sense strand starting at position 579 of SEQ ID NO: 1884251
gggugcuuucuacacuaua

SEQ ID NO: 2251627 - RNA, 19 nt, Artificial Sequence
  Description of Artificial Sequence: Synthetic oligonucleotide
  Antisense strand to SEQ ID NO: 2251626
uauaguguagaaagcaccc

SEQ ID NO: 2251628 - RNA, 19 nt, Artificial Sequence
  Description of Artificial Sequence: Synthetic oligonucleotide
  Sense strand starting at position 643 of SEQ ID NO: 1884251
gcauuuccauuugguauaa

SEQ ID NO: 2251629 - RNA, 19 nt, Artificial Sequence
  Description of Artificial Sequence: Synthetic oligonucleotide
  Antisense strand to SEQ ID NO: 2251628
uuauaccaaauggaaaugc

SEQ ID NO: 2251630 - RNA, 19 nt, Artificial Sequence
  Description of Artificial Sequence: Synthetic oligonucleotide
  Sense strand starting at position 687 of SEQ ID NO: 1884251
ucaaaugauuguuccugca

SEQ ID NO: 2251631 - RNA, 19 nt, Artificial Sequence
  Description of Artificial Sequence: Synthetic oligonucleotide
  Antisense strand to SEQ ID NO: 2251630
ugcaggaacaaucauuuga

SEQ ID NO: 2251632 - RNA, 19 nt, Artificial Sequence
  Description of Artificial Sequence: Synthetic oligonucleotide
  Sense strand starting at position 949 of SEQ ID NO: 1884251
accagugucagauguuuaa

SEQ ID NO: 2251633 - RNA, 19 nt, Artificial Sequence
  Description of Artificial Sequence: Synthetic oligonucleotide
  Antisense strand to SEQ ID NO: 2251632
uuaaacaucugacacuggu

SEQ ID NO: 2251634 - RNA, 19 nt, Artificial Sequence
  Description of Artificial Sequence: Synthetic oligonucleotide
  Sense strand starting at position 953 of SEQ ID NO: 1884251
gugucagauguuuaacugu

SEQ ID NO: 2251635 - RNA, 19 nt, Artificial Sequence
  Description of Artificial Sequence: Synthetic oligonucleotide
  Antisense strand to SEQ ID NO: 2251634
acaguuaaacaucugacac

SEQ ID NO: 2251636 - RNA, 19 nt, Artificial Sequence
  Description of Artificial Sequence: Synthetic oligonucleotide
  Sense strand starting at position 956 of SEQ ID NO: 1884251
ucagauguuuaacugucaa

SEQ ID NO: 2251637 - RNA, 19 nt, Artificial Sequence
  Description of Artificial Sequence: Synthetic oligonucleotide
  Antisense strand to SEQ ID NO: 2251636
uugacaguuaaacaucuga

SEQ ID NO: 2251638 - RNA, 19 nt, Artificial Sequence
  Description of Artificial Sequence: Synthetic oligonucleotide
  Sense strand starting at position 1148 of SEQ ID NO: 1884251
aaggaaagcgucuauacuc

SEQ ID NO: 2251639 - RNA, 19 nt, Artificial Sequence
  Description of Artificial Sequence: Synthetic oligonucleotide
  Antisense strand to SEQ ID NO: 2251638
gaguauagacgcuuuccuu

SEQ ID NO: 2251640 - RNA, 19 nt, Artificial Sequence
  Description of Artificial Sequence: Synthetic oligonucleotide
  Sense strand starting at position 1184 of SEQ ID NO: 1884251
cuccucaaugccuagauga

SEQ ID NO: 2251641 - RNA, 19 nt, Artificial Sequence
  Description of Artificial Sequence: Synthetic oligonucleotide
  Antisense strand to SEQ ID NO: 2251640
ucaucuaggcauugaggag

SEQ ID NO: 2251642 - RNA, 19 nt, Artificial Sequence
  Description of Artificial Sequence: Synthetic oligonucleotide
  Sense strand starting at position 1186 of SEQ ID NO: 1884251
ccucaaugccuagaugaug

SEQ ID NO: 2251643 - RNA, 19 nt, Artificial Sequence
  Description of Artificial Sequence: Synthetic oligonucleotide
  Antisense strand to SEQ ID NO: 2251642
caucaucuaggcauugagg

SEQ ID NO: 2251644 - RNA, 19 nt, Artificial Sequence
  Description of Artificial Sequence: Synthetic oligonucleotide
  Sense strand starting at position 1207 of SEQ ID NO: 1884251
cggagacucggcgcgaauu

SEQ ID NO: 2251645 - RNA, 19 nt, Artificial Sequence
  Description of Artificial Sequence: Synthetic oligonucleotide
  Antisense strand to SEQ ID NO: 2251644
aauucgcgccgagucuccg

SEQ ID NO: 2251646 - RNA, 19 nt, Artificial Sequence
  Description of Artificial Sequence: Synthetic oligonucleotide
  Sense strand starting at position 1217 of SEQ ID NO: 1884251
gcgcgaauucgcagaggag

SEQ ID NO: 2251647 - RNA, 19 nt, Artificial Sequence
  Description of Artificial Sequence: Synthetic oligonucleotide
  Antisense strand to SEQ ID NO: 2251646
cuccucugcgaauucgcgc

SEQ ID NO: 2251648 - RNA, 19 nt, Artificial Sequence
  Description of Artificial Sequence: Synthetic oligonucleotide
  Sense strand starting at position 1297 of SEQ ID NO: 1884251
gaagguacggcguauuaag

SEQ ID NO: 2251649 - RNA, 19 nt, Artificial Sequence
  Description of Artificial Sequence: Synthetic oligonucleotide
  Antisense strand to SEQ ID NO: 2251648
cuuaauacgccguaccuuc

SEQ ID NO: 2251650 - RNA, 19 nt, Artificial Sequence
  Description of Artificial Sequence: Synthetic oligonucleotide
  Sense strand starting at position 1305 of SEQ ID NO: 1884251
ggcguauuaagagaguaaa

SEQ ID NO: 2251651 - RNA, 19 nt, Artificial Sequence
  Description of Artificial Sequence: Synthetic oligonucleotide
  Antisense strand to SEQ ID NO: 2251650
uuuacucucuuaauacgcc

SEQ ID NO: 2251652 - RNA, 19 nt, Artificial Sequence
  Description of Artificial Sequence: Synthetic oligonucleotide
  Sense strand starting at position 1364 of SEQ ID NO: 1884251
cgcggucugaaucaaagaa

SEQ ID NO: 2251653 - RNA, 19 nt, Artificial Sequence
  Description of Artificial Sequence: Synthetic oligonucleotide
  Antisense strand to SEQ ID NO: 2251652
uucuuugauucagaccgcg

SEQ ID NO: 2251654 - RNA, 19 nt, Artificial Sequence
  Description of Artificial Sequence: Synthetic oligonucleotide
  Sense strand starting at position 2039 of SEQ ID NO: 1884251
aagggcuguacguaacaga

SEQ ID NO: 2251655 - RNA, 19 nt, Artificial Sequence
  Description of Artificial Sequence: Synthetic oligonucleotide
  Antisense strand to SEQ ID NO: 2251654
ucuguuacguacagcccuu

SEQ ID NO: 2251656 - RNA, 19 nt, Artificial Sequence
  Description of Artificial Sequence: Synthetic oligonucleotide
  Sense strand starting at position 2193 of SEQ ID NO: 1884251
ugcagauuccaaggccuua

SEQ ID NO: 2251657 - RNA, 19 nt, Artificial Sequence
  Description of Artificial Sequence: Synthetic oligonucleotide
  Antisense strand to SEQ ID NO: 2251656
uaaggccuuggaaucugca

SEQ ID NO: 2251658 - RNA, 19 nt, Artificial Sequence
  Description of Artificial Sequence: Synthetic oligonucleotide
  Sense strand starting at position 2219 of SEQ ID NO: 1884251
gcuuaauuccgugugucua

SEQ ID NO: 2251659 - RNA, 19 nt, Artificial Sequence
  Description of Artificial Sequence: Synthetic oligonucleotide
  Antisense strand to SEQ ID NO: 2251658
uagacacacggaauuaagc

SEQ ID NO: 2251660 - RNA, 19 nt, Artificial Sequence
  Description of Artificial Sequence: Synthetic oligonucleotide
  Sense strand starting at position 2322 of SEQ ID NO: 1884251
gcaauauagcuuuagacug

SEQ ID NO: 2251661 - RNA, 19 nt, Artificial Sequence
  Description of Artificial Sequence: Synthetic oligonucleotide
  Antisense strand to SEQ ID NO: 2251660
cagucuaaagcuauauugc

SEQ ID NO: 2251662 - RNA, 19 nt, Artificial Sequence
  Description of Artificial Sequence: Synthetic oligonucleotide
  Sense strand starting at position 2327 of SEQ ID NO: 1884251
auagcuuuagacuguuuau

SEQ ID NO: 2251663 - RNA, 19 nt, Artificial Sequence
  Description of Artificial Sequence: Synthetic oligonucleotide
  Antisense strand to SEQ ID NO: 2251662
auaaacagucuaaagcuau

SEQ ID NO: 2251664 - RNA, 19 nt, Artificial Sequence
  Description of Artificial Sequence: Synthetic oligonucleotide
  Sense strand starting at position 2400 of SEQ ID NO: 1884251
gaggaaacuggcuaguugu

SEQ ID NO: 2251665 - RNA, 19 nt, Artificial Sequence
  Description of Artificial Sequence: Synthetic oligonucleotide
  Antisense strand to SEQ ID NO: 2251664
acaacuagccaguuuccuc

SEQ ID NO: 2251666 - RNA, 19 nt, Artificial Sequence
  Description of Artificial Sequence: Synthetic oligonucleotide
  Sense strand starting at position 2464 of SEQ ID NO: 1884251
acgucuugacuugggaaua

SEQ ID NO: 2251667 - RNA, 19 nt, Artificial Sequence
  Description of Artificial Sequence: Synthetic oligonucleotide
  Antisense strand to SEQ ID NO: 2251666
uauucccaagucaagacgu

SEQ ID NO: 2251668 - RNA, 19 nt, Artificial Sequence
  Description of Artificial Sequence: Synthetic oligonucleotide
  Sense strand starting at position 2485 of SEQ ID NO: 1884251
gcauucccucguuaagauu

SEQ ID NO: 2251669 - RNA, 19 nt, Artificial Sequence
  Description of Artificial Sequence: Synthetic oligonucleotide
  Antisense strand to SEQ ID NO: 2251668
aaucuuaacgagggaaugc

SEQ ID NO: 2251670 - RNA, 19 nt, Artificial Sequence
  Description of Artificial Sequence: Synthetic oligonucleotide
  Sense strand starting at position 2575 of SEQ ID NO: 1884251
acaaguaugccuugagaca

SEQ ID NO: 2251671 - RNA, 19 nt, Artificial Sequence
  Description of Artificial Sequence: Synthetic oligonucleotide
  Antisense strand to SEQ ID NO: 2251670
ugucucaaggcauacuugu

SEQ ID NO: 2251672 - RNA, 19 nt, Artificial Sequence
  Description of Artificial Sequence: Synthetic oligonucleotide
  Sense strand starting at position 2576 of SEQ ID NO: 1884251
caaguaugccuugagacau

SEQ ID NO: 2251673 - RNA, 19 nt, Artificial Sequence
  Description of Artificial Sequence: Synthetic oligonucleotide
  Antisense strand to SEQ ID NO: 2251672
augucucaaggcauacuug

SEQ ID NO: 2251674 - RNA, 19 nt, Artificial Sequence
  Description of Artificial Sequence: Synthetic oligonucleotide
  Sense strand starting at position 2584 of SEQ ID NO: 1884251
ccuugagacauugaugugu

SEQ ID NO: 2251675 - RNA, 19 nt, Artificial Sequence
  Description of Artificial Sequence: Synthetic oligonucleotide
  Antisense strand to SEQ ID NO: 2251674
acacaucaaugucucaagg

SEQ ID NO: 2251676 - RNA, 19 nt, Artificial Sequence
  Description of Artificial Sequence: Synthetic oligonucleotide
  Sense strand starting at position 2968 of SEQ ID NO: 1884251
cccauucuggcauggaaua

SEQ ID NO: 2251677 - RNA, 19 nt, Artificial Sequence
  Description of Artificial Sequence: Synthetic oligonucleotide
  Antisense strand to SEQ ID NO: 2251676
uauuccaugccagaauggg

SEQ ID NO: 2251678 - RNA, 19 nt, Artificial Sequence
  Description of Artificial Sequence: Synthetic oligonucleotide
  Sense strand starting at position 2969 of SEQ ID NO: 1884251
ccauucuggcauggaauaa

SEQ ID NO: 2251679 - RNA, 19 nt, Artificial Sequence
  Description of Artificial Sequence: Synthetic oligonucleotide
  Antisense strand to SEQ ID NO: 2251678
uuauuccaugccagaaugg

SEQ ID NO: 2251680 - RNA, 19 nt, Artificial Sequence
  Description of Artificial Sequence: Synthetic oligonucleotide
  Sense strand starting at position 3015 of SEQ ID NO: 1884251
uguacaacgcccuaaacau

SEQ ID NO: 2251681 - RNA, 19 nt, Artificial Sequence
  Description of Artificial Sequence: Synthetic oligonucleotide
  Antisense strand to SEQ ID NO: 2251680
auguuuagggcguuguaca

SEQ ID NO: 2251682 - RNA, 19 nt, Artificial Sequence
  Description of Artificial Sequence: Synthetic oligonucleotide
  Sense strand starting at position 3260 of SEQ ID NO: 1884251
guauaaaucuugcuguaaa

SEQ ID NO: 2251683 - RNA, 19 nt, Artificial Sequence
  Description of Artificial Sequence: Synthetic oligonucleotide
  Antisense strand to SEQ ID NO: 2251682
uuuacagcaagauuuauac

SEQ ID NO: 2251684 - RNA, 19 nt, Artificial Sequence
  Description of Artificial Sequence: Synthetic oligonucleotide
  Sense strand starting at position 3338 of SEQ ID NO: 1884251
uuuacauugcagugauaau

SEQ ID NO: 2251685 - RNA, 19 nt, Artificial Sequence
  Description of Artificial Sequence: Synthetic oligonucleotide
  Antisense strand to SEQ ID NO: 2251684
auuaucacugcaauguaaa

SEQ ID NO: 2251686 - RNA, 19 nt, Artificial Sequence
  Description of Artificial Sequence: Synthetic oligonucleotide
  Sense strand starting at position 3499 of SEQ ID NO: 1884251
ucucuagucccaugacuuc

SEQ ID NO: 2251687 - RNA, 19 nt, Artificial Sequence
  Description of Artificial Sequence: Synthetic oligonucleotide
  Antisense strand to SEQ ID NO: 2251686
gaagucaugggacuagaga

SEQ ID NO: 2251688 - RNA, 19 nt, Artificial Sequence
  Description of Artificial Sequence: Synthetic oligonucleotide
  Sense strand starting at position 3535 of SEQ ID NO: 1884251
ucaugacugccauauugaa

SEQ ID NO: 2251689 - RNA, 19 nt, Artificial Sequence
  Description of Artificial Sequence: Synthetic oligonucleotide
  Antisense strand to SEQ ID NO: 2251688
uucaauauggcagucauga

SEQ ID NO: 2251690 - RNA, 19 nt, Artificial Sequence
  Description of Artificial Sequence: Synthetic oligonucleotide
  Sense strand starting at position 3683 of SEQ ID NO: 1884251
aguccuucucuugguaaga

SEQ ID NO: 2251691 - RNA, 19 nt, Artificial Sequence
  Description of Artificial Sequence: Synthetic oligonucleotide
  Antisense strand to SEQ ID NO: 2251690
ucuuaccaagagaaggacu

SEQ ID NO: 2251692 - RNA, 19 nt, Artificial Sequence
  Description of Artificial Sequence: Synthetic oligonucleotide
  Sense strand starting at position 3694 of SEQ ID NO: 1884251
ugguaagaugcacauguuu

SEQ ID NO: 2251693 - RNA, 19 nt, Artificial Sequence
  Description of Artificial Sequence: Synthetic oligonucleotide
  Antisense strand to SEQ ID NO: 2251692
aaacaugugcaucuuacca

SEQ ID NO: 2251694 - RNA, 19 nt, Artificial Sequence
  Description of Artificial Sequence: Synthetic oligonucleotide
  Sense strand starting at position 3797 of SEQ ID NO: 1884251
ugaugaguauugcugauuc

SEQ ID NO: 2251695 - RNA, 19 nt, Artificial Sequence
  Description of Artificial Sequence: Synthetic oligonucleotide
  Antisense strand to SEQ ID NO: 2251694
gaaucagcaauacucauca

SEQ ID NO: 2251696 - RNA, 19 nt, Artificial Sequence
  Description of Artificial Sequence: Synthetic oligonucleotide
  Sense strand starting at position 3884 of SEQ ID NO: 1884251
caguaauaugcugguaaau

SEQ ID NO: 2251697 - RNA, 19 nt, Artificial Sequence
  Description of Artificial Sequence: Synthetic oligonucleotide
  Antisense strand to SEQ ID NO: 2251696
auuuaccagcauauuacug

SEQ ID NO: 2251698 - RNA, 19 nt, Artificial Sequence
  Description of Artificial Sequence: Synthetic oligonucleotide
  Sense strand starting at position 185 of SEQ ID NO: 1884252
acuuaucacuaacggcaau

SEQ ID NO: 2251699 - RNA, 19 nt, Artificial Sequence
  Description of Artificial Sequence: Synthetic oligonucleotide
  Antisense strand to SEQ ID NO: 2251698
auugccguuagugauaagu

SEQ ID NO: 2251700 - RNA, 19 nt, Artificial Sequence
  Description of Artificial Sequence: Synthetic oligonucleotide
  Sense strand starting at position 454 of SEQ ID NO: 1884252
cucugaaacucagagauac

SEQ ID NO: 2251701 - RNA, 19 nt, Artificial Sequence
  Description of Artificial Sequence: Synthetic oligonucleotide
  Antisense strand to SEQ ID NO: 2251700
guaucucugaguuucagag

SEQ ID NO: 2251702 - RNA, 19 nt, Artificial Sequence
  Description of Artificial Sequence: Synthetic oligonucleotide
  Sense strand starting at position 896 of SEQ ID NO: 1884252
ugcacuacagucugaacau

SEQ ID NO: 2251703 - RNA, 19 nt, Artificial Sequence
  Description of Artificial Sequence: Synthetic oligonucleotide
  Antisense strand to SEQ ID NO: 2251702
auguucagacuguagugca

SEQ ID NO: 2251704 - RNA, 19 nt, Artificial Sequence
  Description of Artificial Sequence: Synthetic oligonucleotide
  Sense strand starting at position 897 of SEQ ID NO: 1884252
gcacuacagucugaacaua

SEQ ID NO: 2251705 - RNA, 19 nt, Artificial Sequence
  Description of Artificial Sequence: Synthetic oligonucleotide
  Antisense strand to SEQ ID NO: 2251704
uauguucagacuguagugc

SEQ ID NO: 2251706 - RNA, 19 nt, Artificial Sequence
  Description of Artificial Sequence: Synthetic oligonucleotide
  Sense strand starting at position 1026 of SEQ ID NO: 1884252
agguccaaguuguauuuau

SEQ ID NO: 2251707 - RNA, 19 nt, Artificial Sequence
  Description of Artificial Sequence: Synthetic oligonucleotide
  Antisense strand to SEQ ID NO: 2251706
auaaauacaacuuggaccu

SEQ ID NO: 2251708 - RNA, 19 nt, Artificial Sequence
  Description of Artificial Sequence: Synthetic oligonucleotide
  Sense strand starting at position 1150 of SEQ ID NO: 1884252
uugccuauuuccguuucua

SEQ ID NO: 2251709 - RNA, 19 nt, Artificial Sequence
  Description of Artificial Sequence: Synthetic oligonucleotide
  Antisense strand to SEQ ID NO: 2251708
uagaaacggaaauaggcaa

SEQ ID NO: 2251710 - RNA, 19 nt, Artificial Sequence
  Description of Artificial Sequence: Synthetic oligonucleotide
  Sense strand starting at position 1295 of SEQ ID NO: 1884252
acugaauauucugcccuga

SEQ ID NO: 2251711 - RNA, 19 nt, Artificial Sequence
  Description of Artificial Sequence: Synthetic oligonucleotide
  Antisense strand to SEQ ID NO: 2251710
ucagggcagaauauucagu

SEQ ID NO: 2251712 - RNA, 19 nt, Artificial Sequence
  Description of Artificial Sequence: Synthetic oligonucleotide
  Sense strand starting at position 1330 of SEQ ID NO: 1884252
cagaauaugucgcugugua

SEQ ID NO: 2251713 - RNA, 19 nt, Artificial Sequence
  Description of Artificial Sequence: Synthetic oligonucleotide
  Antisense strand to SEQ ID NO: 2251712
uacacagcgacauauucug

SEQ ID NO: 2251714 - RNA, 19 nt, Artificial Sequence
  Description of Artificial Sequence: Synthetic oligonucleotide
  Sense strand starting at position 1331 of SEQ ID NO: 1884252
agaauaugucgcuguguac

SEQ ID NO: 2251715 - RNA, 19 nt, Artificial Sequence
  Description of Artificial Sequence: Synthetic oligonucleotide
  Antisense strand to SEQ ID NO: 2251714
guacacagcgacauauucu

SEQ ID NO: 2251716 - RNA, 19 nt, Artificial Sequence
  Description of Artificial Sequence: Synthetic oligonucleotide
  Sense strand starting at position 1334 of SEQ ID NO: 1884252
auaugucgcuguguacuaa

SEQ ID NO: 2251717 - RNA, 19 nt, Artificial Sequence
  Description of Artificial Sequence: Synthetic oligonucleotide
  Antisense strand to SEQ ID NO: 2251716
uuaguacacagcgacauau

SEQ ID NO: 2251718 - RNA, 19 nt, Artificial Sequence
  Description of Artificial Sequence: Synthetic oligonucleotide
  Sense strand starting at position 1335 of SEQ ID NO: 1884252
uaugucgcuguguacuaaa

SEQ ID NO: 2251719 - RNA, 19 nt, Artificial Sequence
  Description of Artificial Sequence: Synthetic oligonucleotide
  Antisense strand to SEQ ID NO: 2251718
uuuaguacacagcgacaua

SEQ ID NO: 2251720 - RNA, 19 nt, Artificial Sequence
  Description of Artificial Sequence: Synthetic oligonucleotide
  Sense strand starting at position 1401 of SEQ ID NO: 1884252
cggcucuacucuuaaucaa

SEQ ID NO: 2251721 - RNA, 19 nt, Artificial Sequence
  Description of Artificial Sequence: Synthetic oligonucleotide
  Antisense strand to SEQ ID NO: 2251720
uugauuaagaguagagccg

SEQ ID NO: 2251722 - RNA, 19 nt, Artificial Sequence
  Description of Artificial Sequence: Synthetic oligonucleotide
  Sense strand starting at position 1408 of SEQ ID NO: 1884252
acucuuaaucaagggucaa

SEQ ID NO: 2251723 - RNA, 19 nt, Artificial Sequence
  Description of Artificial Sequence: Synthetic oligonucleotide
  Antisense strand to SEQ ID NO: 2251722
uugacccuugauuaagagu

SEQ ID NO: 2251724 - RNA, 19 nt, Artificial Sequence
  Description of Artificial Sequence: Synthetic oligonucleotide
  Sense strand starting at position 1452 of SEQ ID NO: 1884252
guaggaggcuuggauauaa

SEQ ID NO: 2251725 - RNA, 19 nt, Artificial Sequence
  Description of Artificial Sequence: Synthetic oligonucleotide
  Antisense strand to SEQ ID NO: 2251724
uuauauccaagccuccuac

SEQ ID NO: 2251726 - RNA, 19 nt, Artificial Sequence
  Description of Artificial Sequence: Synthetic oligonucleotide
  Sense strand starting at position 1601 of SEQ ID NO: 1884252
gguacuuaagcuuguaaau

SEQ ID NO: 2251727 - RNA, 19 nt, Artificial Sequence
  Description of Artificial Sequence: Synthetic oligonucleotide
  Antisense strand to SEQ ID NO: 2251726
auuuacaagcuuaaguacc

SEQ ID NO: 2251728 - RNA, 19 nt, Artificial Sequence
  Description of Artificial Sequence: Synthetic oligonucleotide
  Sense strand starting at position 2230 of SEQ ID NO: 1884252
ucucucagguuagugaaau

SEQ ID NO: 2251729 - RNA, 19 nt, Artificial Sequence
  Description of Artificial Sequence: Synthetic oligonucleotide
  Antisense strand to SEQ ID NO: 2251728
auuucacuaaccugagaga

SEQ ID NO: 2251730 - RNA, 19 nt, Artificial Sequence
  Description of Artificial Sequence: Synthetic oligonucleotide
  Sense strand starting at position 2231 of SEQ ID NO: 1884252
cucucagguuagugaaaug

SEQ ID NO: 2251731 - RNA, 19 nt, Artificial Sequence
  Description of Artificial Sequence: Synthetic oligonucleotide
  Antisense strand to SEQ ID NO: 2251730
cauuucacuaaccugagag

SEQ ID NO: 2251732 - RNA, 19 nt, Artificial Sequence
  Description of Artificial Sequence: Synthetic oligonucleotide
  Sense strand starting at position 2606 of SEQ ID NO: 1884252
gcaucaucacucugagguc

SEQ ID NO: 2251733 - RNA, 19 nt, Artificial Sequence
  Description of Artificial Sequence: Synthetic oligonucleotide
  Antisense strand to SEQ ID NO: 2251732
gaccucagagugaugaugc

SEQ ID NO: 2251734 - RNA, 19 nt, Artificial Sequence
  Description of Artificial Sequence: Synthetic oligonucleotide
  Sense strand starting at position 2891 of SEQ ID NO: 1884252
gagcuauuagucuaagcug

SEQ ID NO: 2251735 - RNA, 19 nt, Artificial Sequence
  Description of Artificial Sequence: Synthetic oligonucleotide
  Antisense strand to SEQ ID NO: 2251734
cagcuuagacuaauagcuc

SEQ ID NO: 2251736 - RNA, 19 nt, Artificial Sequence
  Description of Artificial Sequence: Synthetic oligonucleotide
  Sense strand starting at position 2899 of SEQ ID NO: 1884252
agucuaagcuggcauugua

SEQ ID NO: 2251737 - RNA, 19 nt, Artificial Sequence
  Description of Artificial Sequence: Synthetic oligonucleotide
  Antisense strand to SEQ ID NO: 2251736
uacaaugccagcuuagacu

SEQ ID NO: 2251738 - RNA, 19 nt, Artificial Sequence
  Description of Artificial Sequence: Synthetic oligonucleotide
  Sense strand starting at position 2927 of SEQ ID NO: 1884252
gguauacaguguugaauga

SEQ ID NO: 2251739 - RNA, 19 nt, Artificial Sequence
  Description of Artificial Sequence: Synthetic oligonucleotide
  Antisense strand to SEQ ID NO: 2251738
ucauucaacacuguauacc

SEQ ID NO: 2251740 - RNA, 19 nt, Artificial Sequence
  Description of Artificial Sequence: Synthetic oligonucleotide
  Sense strand starting at position 2931 of SEQ ID NO: 1884252
uacaguguugaaugagaga

SEQ ID NO: 2251741 - RNA, 19 nt, Artificial Sequence
  Description of Artificial Sequence: Synthetic oligonucleotide
  Antisense strand to SEQ ID NO: 2251740
ucucucauucaacacugua

SEQ ID NO: 2251742 - RNA, 19 nt, Artificial Sequence
  Description of Artificial Sequence: Synthetic oligonucleotide
  Sense strand starting at position 3164 of SEQ ID NO: 1884252
guguuucaggagugcaaug

SEQ ID NO: 2251743 - RNA, 19 nt, Artificial Sequence
  Description of Artificial Sequence: Synthetic oligonucleotide
  Antisense strand to SEQ ID NO: 2251742
cauugcacuccugaaacac

SEQ ID NO: 2251744 - RNA, 19 nt, Artificial Sequence
  Description of Artificial Sequence: Synthetic oligonucleotide
  Sense strand starting at position 3380 of SEQ ID NO: 1884252
gcaggagaaucacuggcau

SEQ ID NO: 2251745 - RNA, 19 nt, Artificial Sequence
  Description of Artificial Sequence: Synthetic oligonucleotide
  Antisense strand to SEQ ID NO: 2251744
augccagugauucuccugc

SEQ ID NO: 2251746 - RNA, 19 nt, Artificial Sequence
  Description of Artificial Sequence: Synthetic oligonucleotide
  Sense strand starting at position 3897 of SEQ ID NO: 1884252
gggaguucauggcauaaac

SEQ ID NO: 2251747 - RNA, 19 nt, Artificial Sequence
  Description of Artificial Sequence: Synthetic oligonucleotide
  Antisense strand to SEQ ID NO: 2251746
guuuaugccaugaacuccc

SEQ ID NO: 2251748 - RNA, 19 nt, Artificial Sequence
  Description of Artificial Sequence: Synthetic oligonucleotide
  Sense strand starting at position 664 of SEQ ID NO: 1884253
ggugguacguaccuagauu

SEQ ID NO: 2251749 - RNA, 19 nt, Artificial Sequence
  Description of Artificial Sequence: Synthetic oligonucleotide
  Antisense strand to SEQ ID NO: 2251748
aaucuagguacguaccacc

SEQ ID NO: 2251750 - RNA, 19 nt, Artificial Sequence
  Description of Artificial Sequence: Synthetic oligonucleotide
  Sense strand starting at position 672 of SEQ ID NO: 1884253
guaccuagauucccagcua

SEQ ID NO: 2251751 - RNA, 19 nt, Artificial Sequence
  Description of Artificial Sequence: Synthetic oligonucleotide
  Antisense strand to SEQ ID NO: 2251750
uagcugggaaucuagguac

SEQ ID NO: 2251752 - RNA, 19 nt, Artificial Sequence
  Description of Artificial Sequence: Synthetic oligonucleotide
  Sense strand starting at position 904 of SEQ ID NO: 1884253
gcacuagagucagucugaa

SEQ ID NO: 2251753 - RNA, 19 nt, Artificial Sequence
  Description of Artificial Sequence: Synthetic oligonucleotide
  Antisense strand to SEQ ID NO: 2251752
uucagacugacucuagugc

SEQ ID NO: 2251754 - RNA, 19 nt, Artificial Sequence
  Description of Artificial Sequence: Synthetic oligonucleotide
  Sense strand starting at position 908 of SEQ ID NO: 1884253
uagagucagucugaacaua

SEQ ID NO: 2251755 - RNA, 19 nt, Artificial Sequence
  Description of Artificial Sequence: Synthetic oligonucleotide
  Antisense strand to SEQ ID NO: 2251754
uauguucagacugacucua

SEQ ID NO: 2251756 - RNA, 19 nt, Artificial Sequence
  Description of Artificial Sequence: Synthetic oligonucleotide
  Sense strand starting at position 1037 of SEQ ID NO: 1884253
agguccaaguucuauuuau

SEQ ID NO: 2251757 - RNA, 19 nt, Artificial Sequence
  Description of Artificial Sequence: Synthetic oligonucleotide
  Antisense strand to SEQ ID NO: 2251756
auaaauagaacuuggaccu

SEQ ID NO: 2251758 - RNA, 19 nt, Artificial Sequence
  Description of Artificial Sequence: Synthetic oligonucleotide
  Sense strand starting at position 1268 of SEQ ID NO: 1884253
ugucccaagucauauuuau

SEQ ID NO: 2251759 - RNA, 19 nt, Artificial Sequence
  Description of Artificial Sequence: Synthetic oligonucleotide
  Antisense strand to SEQ ID NO: 2251758
auaaauaugacuugggaca

SEQ ID NO: 2251760 - RNA, 19 nt, Artificial Sequence
  Description of Artificial Sequence: Synthetic oligonucleotide
  Sense strand starting at position 1343 of SEQ ID NO: 1884253
cagaauaugucacugugua

SEQ ID NO: 2251761 - RNA, 19 nt, Artificial Sequence
  Description of Artificial Sequence: Synthetic oligonucleotide
  Antisense strand to SEQ ID NO: 2251760
uacacagugacauauucug

SEQ ID NO: 2251762 - RNA, 19 nt, Artificial Sequence
  Description of Artificial Sequence: Synthetic oligonucleotide
  Sense strand starting at position 1344 of SEQ ID NO: 1884253
agaauaugucacuguguac

SEQ ID NO: 2251763 - RNA, 19 nt, Artificial Sequence
  Description of Artificial Sequence: Synthetic oligonucleotide
  Antisense strand to SEQ ID NO: 2251762
guacacagugacauauucu

SEQ ID NO: 2251764 - RNA, 19 nt, Artificial Sequence
  Description of Artificial Sequence: Synthetic oligonucleotide
  Sense strand starting at position 1347 of SEQ ID NO: 1884253
auaugucacuguguacuaa

SEQ ID NO: 2251765 - RNA, 19 nt, Artificial Sequence
  Description of Artificial Sequence: Synthetic oligonucleotide
  Antisense strand to SEQ ID NO: 2251764
uuaguacacagugacauau

SEQ ID NO: 2251766 - RNA, 19 nt, Artificial Sequence
  Description of Artificial Sequence: Synthetic oligonucleotide
  Sense strand starting at position 1414 of SEQ ID NO: 1884253
gggcucuacucuuaagggu

SEQ ID NO: 2251767 - RNA, 19 nt, Artificial Sequence
  Description of Artificial Sequence: Synthetic oligonucleotide
  Antisense strand to SEQ ID NO: 2251766
acccuuaagaguagagccc

SEQ ID NO: 2251768 - RNA, 19 nt, Artificial Sequence
  Description of Artificial Sequence: Synthetic oligonucleotide
  Sense strand starting at position 1459 of SEQ ID NO: 1884253
acguacgaggcuuggauau

SEQ ID NO: 2251769 - RNA, 19 nt, Artificial Sequence
  Description of Artificial Sequence: Synthetic oligonucleotide
  Antisense strand to SEQ ID NO: 2251768
auauccaagccucguacgu

SEQ ID NO: 2251770 - RNA, 19 nt, Artificial Sequence
  Description of Artificial Sequence: Synthetic oligonucleotide
  Sense strand starting at position 1461 of SEQ ID NO: 1884253
guacgaggcuuggauauaa

SEQ ID NO: 2251771 - RNA, 19 nt, Artificial Sequence
  Description of Artificial Sequence: Synthetic oligonucleotide
  Antisense strand to SEQ ID NO: 2251770
uuauauccaagccucguac

SEQ ID NO: 2251772 - RNA, 19 nt, Artificial Sequence
  Description of Artificial Sequence: Synthetic oligonucleotide
  Sense strand starting at position 1610 of SEQ ID NO: 1884253
gguacuuaagcuuguaaac

SEQ ID NO: 2251773 - RNA, 19 nt, Artificial Sequence
  Description of Artificial Sequence: Synthetic oligonucleotide
  Antisense strand to SEQ ID NO: 2251772
guuuacaagcuuaaguacc

SEQ ID NO: 2251774 - RNA, 19 nt, Artificial Sequence
  Description of Artificial Sequence: Synthetic oligonucleotide
  Sense strand starting at position 1669 of SEQ ID NO: 1884253
cgcgcaacuuuaguguaaa

SEQ ID NO: 2251775 - RNA, 19 nt, Artificial Sequence
  Description of Artificial Sequence: Synthetic oligonucleotide
  Antisense strand to SEQ ID NO: 2251774
uuuacacuaaaguugcgcg

SEQ ID NO: 2251776 - RNA, 19 nt, Artificial Sequence
  Description of Artificial Sequence: Synthetic oligonucleotide
  Sense strand starting at position 1670 of SEQ ID NO: 1884253
gcgcaacuuuaguguaaac

SEQ ID NO: 2251777 - RNA, 19 nt, Artificial Sequence
  Description of Artificial Sequence: Synthetic oligonucleotide
  Antisense strand to SEQ ID NO: 2251776
guuuacacuaaaguugcgc

SEQ ID NO: 2251778 - RNA, 19 nt, Artificial Sequence
  Description of Artificial Sequence: Synthetic oligonucleotide
  Sense strand starting at position 2239 of SEQ ID NO: 1884253
cucucucaggguuagugaa

SEQ ID NO: 2251779 - RNA, 19 nt, Artificial Sequence
  Description of Artificial Sequence: Synthetic oligonucleotide
  Antisense strand to SEQ ID NO: 2251778
uucacuaacccugagagag

SEQ ID NO: 2251780 - RNA, 19 nt, Artificial Sequence
  Description of Artificial Sequence: Synthetic oligonucleotide
  Sense strand starting at position 2566 of SEQ ID NO: 1884253
cgaaccuucuggucucagu

SEQ ID NO: 2251781 - RNA, 19 nt, Artificial Sequence
  Description of Artificial Sequence: Synthetic oligonucleotide
  Antisense strand to SEQ ID NO: 2251780
acugagaccagaagguucg

SEQ ID NO: 2251782 - RNA, 19 nt, Artificial Sequence
  Description of Artificial Sequence: Synthetic oligonucleotide
  Sense strand starting at position 2914 of SEQ ID NO: 1884253
gagcuauuaguuuaagcug

SEQ ID NO: 2251783 - RNA, 19 nt, Artificial Sequence
  Description of Artificial Sequence: Synthetic oligonucleotide
  Antisense strand to SEQ ID NO: 2251782
cagcuuaaacuaauagcuc

SEQ ID NO: 2251784 - RNA, 19 nt, Artificial Sequence
  Description of Artificial Sequence: Synthetic oligonucleotide
  Sense strand starting at position 2922 of SEQ ID NO: 1884253
aguuuaagcuggcauugua

SEQ ID NO: 2251785 - RNA, 19 nt, Artificial Sequence
  Description of Artificial Sequence: Synthetic oligonucleotide
  Antisense strand to SEQ ID NO: 2251784
uacaaugccagcuuaaacu

SEQ ID NO: 2251786 - RNA, 19 nt, Artificial Sequence
  Description of Artificial Sequence: Synthetic oligonucleotide
  Sense strand starting at position 2950 of SEQ ID NO: 1884253
gguauacaguguugaacga

SEQ ID NO: 2251787 - RNA, 19 nt, Artificial Sequence
  Description of Artificial Sequence: Synthetic oligonucleotide
  Antisense strand to SEQ ID NO: 2251786
ucguucaacacuguauacc

SEQ ID NO: 2251788 - RNA, 19 nt, Artificial Sequence
  Description of Artificial Sequence: Synthetic oligonucleotide
  Sense strand starting at position 2954 of SEQ ID NO: 1884253
uacaguguugaacgagaga

SEQ ID NO: 2251789 - RNA, 19 nt, Artificial Sequence
  Description of Artificial Sequence: Synthetic oligonucleotide
  Antisense strand to SEQ ID NO: 2251788
ucucucguucaacacugua

SEQ ID NO: 2251790 - RNA, 19 nt, Artificial Sequence
  Description of Artificial Sequence: Synthetic oligonucleotide
  Sense strand starting at position 3055 of SEQ ID NO: 1884253
uguucugauagaugaauga

SEQ ID NO: 2251791 - RNA, 19 nt, Artificial Sequence
  Description of Artificial Sequence: Synthetic oligonucleotide
  Antisense strand to SEQ ID NO: 2251790
ucauucaucuaucagaaca

SEQ ID NO: 2251792 - RNA, 19 nt, Artificial Sequence
  Description of Artificial Sequence: Synthetic oligonucleotide
  Sense strand starting at position 3920 of SEQ ID NO: 1884253
gggaguucguggcauaaac

SEQ ID NO: 2251793 - RNA, 19 nt, Artificial Sequence
  Description of Artificial Sequence: Synthetic oligonucleotide
  Antisense strand to SEQ ID NO: 2251792
guuuaugccacgaacuccc

SEQ ID NO: 2251794 - RNA, 19 nt, Artificial Sequence
  Description of Artificial Sequence: Synthetic oligonucleotide
  Sense strand starting at position 3922 of SEQ ID NO: 1884253
gaguucguggcauaaacau

SEQ ID NO: 2251795 - RNA, 19 nt, Artificial Sequence
  Description of Artificial Sequence: Synthetic oligonucleotide
  Antisense strand to SEQ ID NO: 2251794
auguuuaugccacgaacuc

SEQ ID NO: 2251796 - RNA, 19 nt, Artificial Sequence
  Description of Artificial Sequence: Synthetic oligonucleotide
  Sense strand starting at position 666 of SEQ ID NO: 1884254
cuaguuucuuuacugcaga

SEQ ID NO: 2251797 - RNA, 19 nt, Artificial Sequence
  Description of Artificial Sequence: Synthetic oligonucleotide
  Antisense strand to SEQ ID NO: 2251796
ucugcaguaaagaaacuag

SEQ ID NO: 2251798 - RNA, 19 nt, Artificial Sequence
  Description of Artificial Sequence: Synthetic oligonucleotide
  Sense strand starting at position 669 of SEQ ID NO: 1884254
guuucuuuacugcagaaac

SEQ ID NO: 2251799 - RNA, 19 nt, Artificial Sequence
  Description of Artificial Sequence: Synthetic oligonucleotide
  Antisense strand to SEQ ID NO: 2251798
guuucugcaguaaagaaac

SEQ ID NO: 2251800 - RNA, 19 nt, Artificial Sequence
  Description of Artificial Sequence: Synthetic oligonucleotide
  Sense strand starting at position 791 of SEQ ID NO: 1884254
gugagauaagguugugaca

SEQ ID NO: 2251801 - RNA, 19 nt, Artificial Sequence
  Description of Artificial Sequence: Synthetic oligonucleotide
  Antisense strand to SEQ ID NO: 2251800
ugucacaaccuuaucucac

SEQ ID NO: 2251802 - RNA, 19 nt, Artificial Sequence
  Description of Artificial Sequence: Synthetic oligonucleotide
  Sense strand starting at position 794 of SEQ ID NO: 1884254
agauaagguugugacauuu

SEQ ID NO: 2251803 - RNA, 19 nt, Artificial Sequence
  Description of Artificial Sequence: Synthetic oligonucleotide
  Antisense strand to SEQ ID NO: 2251802
aaaugucacaaccuuaucu

SEQ ID NO: 2251804 - RNA, 19 nt, Artificial Sequence
  Description of Artificial Sequence: Synthetic oligonucleotide
  Sense strand starting at position 939 of SEQ ID NO: 1884254
aaucuuugucaagagcagu

SEQ ID NO: 2251805 - RNA, 19 nt, Artificial Sequence
  Description of Artificial Sequence: Synthetic oligonucleotide
  Antisense strand to SEQ ID NO: 2251804
acugcucuugacaaagauu

SEQ ID NO: 2251806 - RNA, 19 nt, Artificial Sequence
  Description of Artificial Sequence: Synthetic oligonucleotide
  Sense strand starting at position 1195 of SEQ ID NO: 1884254
caggacauagguugucaga

SEQ ID NO: 2251807 - RNA, 19 nt, Artificial Sequence
  Description of Artificial Sequence: Synthetic oligonucleotide
  Antisense strand to SEQ ID NO: 2251806
ucugacaaccuauguccug

SEQ ID NO: 2251808 - RNA, 19 nt, Artificial Sequence
  Description of Artificial Sequence: Synthetic oligonucleotide
  Sense strand starting at position 1197 of SEQ ID NO: 1884254
ggacauagguugucagauu

SEQ ID NO: 2251809 - RNA, 19 nt, Artificial Sequence
  Description of Artificial Sequence: Synthetic oligonucleotide
  Antisense strand to SEQ ID NO: 2251808
aaucugacaaccuaugucc

SEQ ID NO: 2251810 - RNA, 19 nt, Artificial Sequence
  Description of Artificial Sequence: Synthetic oligonucleotide
  Sense strand starting at position 1198 of SEQ ID NO: 1884254
gacauagguugucagauuu

SEQ ID NO: 2251811 - RNA, 19 nt, Artificial Sequence
  Description of Artificial Sequence: Synthetic oligonucleotide
  Antisense strand to SEQ ID NO: 2251810
aaaucugacaaccuauguc

SEQ ID NO: 2251812 - RNA, 19 nt, Artificial Sequence
  Description of Artificial Sequence: Synthetic oligonucleotide
  Sense strand starting at position 1312 of SEQ ID NO: 1884254
accuuaucacuugacguua

SEQ ID NO: 2251813 - RNA, 19 nt, Artificial Sequence
  Description of Artificial Sequence: Synthetic oligonucleotide
  Antisense strand to SEQ ID NO: 2251812
uaacgucaagugauaaggu

SEQ ID NO: 2251814 - RNA, 19 nt, Artificial Sequence
  Description of Artificial Sequence: Synthetic oligonucleotide
  Sense strand starting at position 2741 of SEQ ID NO: 1884254
gagggcuggucaucaucuu

SEQ ID NO: 2251815 - RNA, 19 nt, Artificial Sequence
  Description of Artificial Sequence: Synthetic oligonucleotide
  Antisense strand to SEQ ID NO: 2251814
aagaugaugaccagcccuc

SEQ ID NO: 2251816 - RNA, 19 nt, Artificial Sequence
  Description of Artificial Sequence: Synthetic oligonucleotide
  Sense strand starting at position 2821 of SEQ ID NO: 1884254
uggcgugucccuguaaucu

SEQ ID NO: 2251817 - RNA, 19 nt, Artificial Sequence
  Description of Artificial Sequence: Synthetic oligonucleotide
  Antisense strand to SEQ ID NO: 2251816
agauuacagggacacgcca

SEQ ID NO: 2251818 - RNA, 19 nt, Artificial Sequence
  Description of Artificial Sequence: Synthetic oligonucleotide
  Sense strand starting at position 2899 of SEQ ID NO: 1884254
cggguaacauagcuagacu

SEQ ID NO: 2251819 - RNA, 19 nt, Artificial Sequence
  Description of Artificial Sequence: Synthetic oligonucleotide
  Antisense strand to SEQ ID NO: 2251818
agucuagcuauguuacccg

SEQ ID NO: 2251820 - RNA, 19 nt, Artificial Sequence
  Description of Artificial Sequence: Synthetic oligonucleotide
  Sense strand starting at position 2937 of SEQ ID NO: 1884254
gaaugaaugagguguugga

SEQ ID NO: 2251821 - RNA, 19 nt, Artificial Sequence
  Description of Artificial Sequence: Synthetic oligonucleotide
  Antisense strand to SEQ ID NO: 2251820
uccaacaccucauucauuc

SEQ ID NO: 2251822 - RNA, 19 nt, Artificial Sequence
  Description of Artificial Sequence: Synthetic oligonucleotide
  Sense strand starting at position 2941 of SEQ ID NO: 1884254
gaaugagguguuggaauaa

SEQ ID NO: 2251823 - RNA, 19 nt, Artificial Sequence
  Description of Artificial Sequence: Synthetic oligonucleotide
  Antisense strand to SEQ ID NO: 2251822
uuauuccaacaccucauuc

SEQ ID NO: 2251824 - RNA, 19 nt, Artificial Sequence
  Description of Artificial Sequence: Synthetic oligonucleotide
  Sense strand starting at position 3270 of SEQ ID NO: 1884254
ugcugugcaccuugagaaa

SEQ ID NO: 2251825 - RNA, 19 nt, Artificial Sequence
  Description of Artificial Sequence: Synthetic oligonucleotide
  Antisense strand to SEQ ID NO: 2251824
uuucucaaggugcacagca

SEQ ID NO: 2251826 - RNA, 19 nt, Artificial Sequence
  Description of Artificial Sequence: Synthetic oligonucleotide
  Sense strand starting at position 3292 of SEQ ID NO: 1884254
ugcuguccucauuaguuaa

SEQ ID NO: 2251827 - RNA, 19 nt, Artificial Sequence
  Description of Artificial Sequence: Synthetic oligonucleotide
  Antisense strand to SEQ ID NO: 2251826
uuaacuaaugaggacagca

SEQ ID NO: 2251828 - RNA, 19 nt, Artificial Sequence
  Description of Artificial Sequence: Synthetic oligonucleotide
  Sense strand starting at position 3294 of SEQ ID NO: 1884254
cuguccucauuaguuaaga

SEQ ID NO: 2251829 - RNA, 19 nt, Artificial Sequence
  Description of Artificial Sequence: Synthetic oligonucleotide
  Antisense strand to SEQ ID NO: 2251828
ucuuaacuaaugaggacag

SEQ ID NO: 2251830 - RNA, 19 nt, Artificial Sequence
  Description of Artificial Sequence: Synthetic oligonucleotide
  Sense strand starting at position 3295 of SEQ ID NO: 1884254
uguccucauuaguuaagau

SEQ ID NO: 2251831 - RNA, 19 nt, Artificial Sequence
  Description of Artificial Sequence: Synthetic oligonucleotide
  Antisense strand to SEQ ID NO: 2251830
aucuuaacuaaugaggaca

SEQ ID NO: 2251832 - RNA, 19 nt, Artificial Sequence
  Description of Artificial Sequence: Synthetic oligonucleotide
  Sense strand starting at position 3304 of SEQ ID NO: 1884254
uaguuaagauguuuggaac

SEQ ID NO: 2251833 - RNA, 19 nt, Artificial Sequence
  Description of Artificial Sequence: Synthetic oligonucleotide
  Antisense strand to SEQ ID NO: 2251832
guuccaaacaucuuaacua

SEQ ID NO: 2251834 - RNA, 19 nt, Artificial Sequence
  Description of Artificial Sequence: Synthetic oligonucleotide
  Sense strand starting at position 3305 of SEQ ID NO: 1884254
aguuaagauguuuggaacu

SEQ ID NO: 2251835 - RNA, 19 nt, Artificial Sequence
  Description of Artificial Sequence: Synthetic oligonucleotide
  Antisense strand to SEQ ID NO: 2251834
aguuccaaacaucuuaacu

SEQ ID NO: 2251836 - RNA, 19 nt, Artificial Sequence
  Description of Artificial Sequence: Synthetic oligonucleotide
  Sense strand starting at position 3382 of SEQ ID NO: 1884254
ggcucugucucggcuauuu

SEQ ID NO: 2251837 - RNA, 19 nt, Artificial Sequence
  Description of Artificial Sequence: Synthetic oligonucleotide
  Antisense strand to SEQ ID NO: 2251836
aaauagccgagacagagcc

SEQ ID NO: 2251838 - RNA, 19 nt, Artificial Sequence
  Description of Artificial Sequence: Synthetic oligonucleotide
  Sense strand starting at position 3391 of SEQ ID NO: 1884254
ucggcuauuuguguaagcu

SEQ ID NO: 2251839 - RNA, 19 nt, Artificial Sequence
  Description of Artificial Sequence: Synthetic oligonucleotide
  Antisense strand to SEQ ID NO: 2251838
agcuuacacaaauagccga

SEQ ID NO: 2251840 - RNA, 19 nt, Artificial Sequence
  Description of Artificial Sequence: Synthetic oligonucleotide
  Sense strand starting at position 3392 of SEQ ID NO: 1884254
cggcuauuuguguaagcuu

SEQ ID NO: 2251841 - RNA, 19 nt, Artificial Sequence
  Description of Artificial Sequence: Synthetic oligonucleotide
  Antisense strand to SEQ ID NO: 2251840
aagcuuacacaaauagccg

SEQ ID NO: 2251842 - RNA, 19 nt, Artificial Sequence
  Description of Artificial Sequence: Synthetic oligonucleotide
  Sense strand starting at position 3395 of SEQ ID NO: 1884254
cuauuuguguaagcuuaga

SEQ ID NO: 2251843 - RNA, 19 nt, Artificial Sequence
  Description of Artificial Sequence: Synthetic oligonucleotide
  Antisense strand to SEQ ID NO: 2251842
ucuaagcuuacacaaauag

SEQ ID NO: 2251844 - RNA, 19 nt, Artificial Sequence
  Description of Artificial Sequence: Synthetic oligonucleotide
  Sense strand starting at position 3441 of SEQ ID NO: 1884254
guuucuguaucuguaacau

SEQ ID NO: 2251845 - RNA, 19 nt, Artificial Sequence
  Description of Artificial Sequence: Synthetic oligonucleotide
  Antisense strand to SEQ ID NO: 2251844
auguuacagauacagaaac

SEQ ID NO: 2251846 - RNA, 19 nt, Artificial Sequence
  Description of Artificial Sequence: Synthetic oligonucleotide
  Sense strand starting at position 3447 of SEQ ID NO: 1884254
guaucuguaacaugaggau

SEQ ID NO: 2251847 - RNA, 19 nt, Artificial Sequence
  Description of Artificial Sequence: Synthetic oligonucleotide
  Antisense strand to SEQ ID NO: 2251846
auccucauguuacagauac

SEQ ID NO: 2251848 - RNA, 19 nt, Artificial Sequence
  Description of Artificial Sequence: Synthetic oligonucleotide
  Sense strand starting at position 3499 of SEQ ID NO: 1884254
uggguuaaaugaguugaua

SEQ ID NO: 2251849 - RNA, 19 nt, Artificial Sequence
  Description of Artificial Sequence: Synthetic oligonucleotide
  Antisense strand to SEQ ID NO: 2251848
uaucaacucauuuaaccca

SEQ ID NO: 2251850 - RNA, 19 nt, Artificial Sequence
  Description of Artificial Sequence: Synthetic oligonucleotide
  Sense strand starting at position 3501 of SEQ ID NO: 1884254
gguuaaaugaguugauauc

SEQ ID NO: 2251851 - RNA, 19 nt, Artificial Sequence
  Description of Artificial Sequence: Synthetic oligonucleotide
  Antisense strand to SEQ ID NO: 2251850
gauaucaacucauuuaacc

SEQ ID NO: 2251852 - RNA, 19 nt, Artificial Sequence
  Description of Artificial Sequence: Synthetic oligonucleotide
  Sense strand starting at position 3502 of SEQ ID NO: 1884254
guuaaaugaguugauaucu

SEQ ID NO: 2251853 - RNA, 19 nt, Artificial Sequence
  Description of Artificial Sequence: Synthetic oligonucleotide
  Antisense strand to SEQ ID NO: 2251852
agauaucaacucauuuaac

SEQ ID NO: 2251854 - RNA, 19 nt, Artificial Sequence
  Description of Artificial Sequence: Synthetic oligonucleotide
  Sense strand starting at position 3557 of SEQ ID NO: 1884254
uuguaagugugggugauua

SEQ ID NO: 2251855 - RNA, 19 nt, Artificial Sequence
  Description of Artificial Sequence: Synthetic oligonucleotide
  Antisense strand to SEQ ID NO: 2251854
uaaucacccacacuuacaa

SEQ ID NO: 2251856 - RNA, 19 nt, Artificial Sequence
  Description of Artificial Sequence: Synthetic oligonucleotide
  Sense strand starting at position 3559 of SEQ ID NO: 1884254
guaagugugggugauuauc

SEQ ID NO: 2251857 - RNA, 19 nt, Artificial Sequence
  Description of Artificial Sequence: Synthetic oligonucleotide
  Antisense strand to SEQ ID NO: 2251856
gauaaucacccacacuuac

SEQ ID NO: 2251858 - RNA, 19 nt, Artificial Sequence
  Description of Artificial Sequence: Synthetic oligonucleotide
  Sense strand starting at position 3561 of SEQ ID NO: 1884254
aagugugggugauuaucaa

SEQ ID NO: 2251859 - RNA, 19 nt, Artificial Sequence
  Description of Artificial Sequence: Synthetic oligonucleotide
  Antisense strand to SEQ ID NO: 2251858
uugauaaucacccacacuu

SEQ ID NO: 2251860 - RNA, 19 nt, Artificial Sequence
  Description of Artificial Sequence: Synthetic oligonucleotide
  Sense strand starting at position 3568 of SEQ ID NO: 1884254
ggugauuaucaauacugcu

SEQ ID NO: 2251861 - RNA, 19 nt, Artificial Sequence
  Description of Artificial Sequence: Synthetic oligonucleotide
  Antisense strand to SEQ ID NO: 2251860
agcaguauugauaaucacc

SEQ ID NO: 2251862 - RNA, 19 nt, Artificial Sequence
  Description of Artificial Sequence: Synthetic oligonucleotide
  Sense strand starting at position 3620 of SEQ ID NO: 1884254
acuguuguaucaucaauga

SEQ ID NO: 2251863 - RNA, 19 nt, Artificial Sequence
  Description of Artificial Sequence: Synthetic oligonucleotide
  Antisense strand to SEQ ID NO: 2251862
ucauugaugauacaacagu

SEQ ID NO: 2251864 - RNA, 19 nt, Artificial Sequence
  Description of Artificial Sequence: Synthetic oligonucleotide
  Sense strand starting at position 3629 of SEQ ID NO: 1884254
ucaucaaugagcuguggga

SEQ ID NO: 2251865 - RNA, 19 nt, Artificial Sequence
  Description of Artificial Sequence: Synthetic oligonucleotide
  Antisense strand to SEQ ID NO: 2251864
ucccacagcucauugauga

SEQ ID NO: 2251866 - RNA, 19 nt, Artificial Sequence
  Description of Artificial Sequence: Synthetic oligonucleotide
  Sense strand starting at position 3633 of SEQ ID NO: 1884254
caaugagcugugggaggua

SEQ ID NO: 2251867 - RNA, 19 nt, Artificial Sequence
  Description of Artificial Sequence: Synthetic oligonucleotide
  Antisense strand to SEQ ID NO: 2251866
uaccucccacagcucauug

SEQ ID NO: 2251868 - RNA, 19 nt, Artificial Sequence
  Description of Artificial Sequence: Synthetic oligonucleotide
  Sense strand starting at position 3636 of SEQ ID NO: 1884254
ugagcugugggagguauau

SEQ ID NO: 2251869 - RNA, 19 nt, Artificial Sequence
  Description of Artificial Sequence: Synthetic oligonucleotide
  Antisense strand to SEQ ID NO: 2251868
auauaccucccacagcuca

SEQ ID NO: 2251870 - RNA, 19 nt, Artificial Sequence
  Description of Artificial Sequence: Synthetic oligonucleotide
  Sense strand starting at position 3657 of SEQ ID NO: 1884254
agcugaagugucugauuaa

SEQ ID NO: 2251871 - RNA, 19 nt, Artificial Sequence
  Description of Artificial Sequence: Synthetic oligonucleotide
  Antisense strand to SEQ ID NO: 2251870
uuaaucagacacuucagcu

SEQ ID NO: 2251872 - RNA, 19 nt, Artificial Sequence
  Description of Artificial Sequence: Synthetic oligonucleotide
  Sense strand starting at position 3660 of SEQ ID NO: 1884254
ugaagugucugauuaaaca

SEQ ID NO: 2251873 - RNA, 19 nt, Artificial Sequence
  Description of Artificial Sequence: Synthetic oligonucleotide
  Antisense strand to SEQ ID NO: 2251872
uguuuaaucagacacuuca

SEQ ID NO: 2251874 - RNA, 19 nt, Artificial Sequence
  Description of Artificial Sequence: Synthetic oligonucleotide
  Sense strand starting at position 3934 of SEQ ID NO: 1884254
acgagaauugcuugagcac

SEQ ID NO: 2251875 - RNA, 19 nt, Artificial Sequence
  Description of Artificial Sequence: Synthetic oligonucleotide
  Antisense strand to SEQ ID NO: 2251874
gugcucaagcaauucucgu

SEQ ID NO: 2251876 - RNA, 19 nt, Artificial Sequence
  Description of Artificial Sequence: Synthetic oligonucleotide
  Sense strand starting at position 373 of SEQ ID NO: 1884255
aguguuuaaucagacacuu

SEQ ID NO: 2251877 - RNA, 19 nt, Artificial Sequence
  Description of Artificial Sequence: Synthetic oligonucleotide
  Antisense strand to SEQ ID NO: 2251876
aagugucugauuaaacacu

SEQ ID NO: 2251878 - RNA, 19 nt, Artificial Sequence
  Description of Artificial Sequence: Synthetic oligonucleotide
  Sense strand starting at position 407 of SEQ ID NO: 1884255
cccacagcucauugaugau

SEQ ID NO: 2251879 - RNA, 19 nt, Artificial Sequence
  Description of Artificial Sequence: Synthetic oligonucleotide
  Antisense strand to SEQ ID NO: 2251878
aucaucaaugagcuguggg

SEQ ID NO: 2251880 - RNA, 19 nt, Artificial Sequence
  Description of Artificial Sequence: Synthetic oligonucleotide
  Sense strand starting at position 413 of SEQ ID NO: 1884255
gcucauugaugauacaaca

SEQ ID NO: 2251881 - RNA, 19 nt, Artificial Sequence
  Description of Artificial Sequence: Synthetic oligonucleotide
  Antisense strand to SEQ ID NO: 2251880
uguuguaucaucaaugagc

SEQ ID NO: 2251882 - RNA, 19 nt, Artificial Sequence
  Description of Artificial Sequence: Synthetic oligonucleotide
  Sense strand starting at position 456 of SEQ ID NO: 1884255
gcuaaaggcucagcaguau

SEQ ID NO: 2251883 - RNA, 19 nt, Artificial Sequence
  Description of Artificial Sequence: Synthetic oligonucleotide
  Antisense strand to SEQ ID NO: 2251882
auacugcugagccuuuagc

SEQ ID NO: 2251884 - RNA, 19 nt, Artificial Sequence
  Description of Artificial Sequence: Synthetic oligonucleotide
  Sense strand starting at position 581 of SEQ ID NO: 1884255
cuggcauauccucauguua

SEQ ID NO: 2251885 - RNA, 19 nt, Artificial Sequence
  Description of Artificial Sequence: Synthetic oligonucleotide
  Antisense strand to SEQ ID NO: 2251884
uaacaugaggauaugccag

SEQ ID NO: 2251886 - RNA, 19 nt, Artificial Sequence
  Description of Artificial Sequence: Synthetic oligonucleotide
  Sense strand starting at position 624 of SEQ ID NO: 1884255
cgggcuaaguaauuaaucu

SEQ ID NO: 2251887 - RNA, 19 nt, Artificial Sequence
  Description of Artificial Sequence: Synthetic oligonucleotide
  Antisense strand to SEQ ID NO: 2251886
agauuaauuacuuagcccg

SEQ ID NO: 2251888 - RNA, 19 nt, Artificial Sequence
  Description of Artificial Sequence: Synthetic oligonucleotide
  Sense strand starting at position 720 of SEQ ID NO: 1884255
ggugcuguauaguuccaaa

SEQ ID NO: 2251889 - RNA, 19 nt, Artificial Sequence
  Description of Artificial Sequence: Synthetic oligonucleotide
  Antisense strand to SEQ ID NO: 2251888
uuuggaacuauacagcacc

SEQ ID NO: 2251890 - RNA, 19 nt, Artificial Sequence
  Description of Artificial Sequence: Synthetic oligonucleotide
  Sense strand starting at position 758 of SEQ ID NO: 1884255
agcauuauuucucaaggug

SEQ ID NO: 2251891 - RNA, 19 nt, Artificial Sequence
  Description of Artificial Sequence: Synthetic oligonucleotide
  Antisense strand to SEQ ID NO: 2251890
caccuugagaaauaaugcu

SEQ ID NO: 2251892 - RNA, 19 nt, Artificial Sequence
  Description of Artificial Sequence: Synthetic oligonucleotide
  Sense strand starting at position 1241 of SEQ ID NO: 1884255
gcccgaacaucuuuaucuu

SEQ ID NO: 2251893 - RNA, 19 nt, Artificial Sequence
  Description of Artificial Sequence: Synthetic oligonucleotide
  Antisense strand to SEQ ID NO: 2251892
aagauaaagauguucgggc

SEQ ID NO: 2251894 - RNA, 19 nt, Artificial Sequence
  Description of Artificial Sequence: Synthetic oligonucleotide
  Sense strand starting at position 2636 of SEQ ID NO: 1884255
uuaccuguagcugggauua

SEQ ID NO: 2251895 - RNA, 19 nt, Artificial Sequence
  Description of Artificial Sequence: Synthetic oligonucleotide
  Antisense strand to SEQ ID NO: 2251894
uaaucccagcuacagguaa

SEQ ID NO: 2251896 - RNA, 19 nt, Artificial Sequence
  Description of Artificial Sequence: Synthetic oligonucleotide
  Sense strand starting at position 2682 of SEQ ID NO: 1884255
uuuaguagacauggguauu

SEQ ID NO: 2251897 - RNA, 19 nt, Artificial Sequence
  Description of Artificial Sequence: Synthetic oligonucleotide
  Antisense strand to SEQ ID NO: 2251896
aauacccaugucuacuaaa

SEQ ID NO: 2251898 - RNA, 19 nt, Artificial Sequence
  Description of Artificial Sequence: Synthetic oligonucleotide
  Sense strand starting at position 2721 of SEQ ID NO: 1884255
ccuaacgucaagugauaag

SEQ ID NO: 2251899 - RNA, 19 nt, Artificial Sequence
  Description of Artificial Sequence: Synthetic oligonucleotide
  Antisense strand to SEQ ID NO: 2251898
cuuaucacuugacguuagg

SEQ ID NO: 2251900 - RNA, 19 nt, Artificial Sequence
  Description of Artificial Sequence: Synthetic oligonucleotide
  Sense strand starting at position 2759 of SEQ ID NO: 1884255
aggcgaagcuauuugggua

SEQ ID NO: 2251901 - RNA, 19 nt, Artificial Sequence
  Description of Artificial Sequence: Synthetic oligonucleotide
  Antisense strand to SEQ ID NO: 2251900
uacccaaauagcuucgccu

SEQ ID NO: 2251902 - RNA, 19 nt, Artificial Sequence
  Description of Artificial Sequence: Synthetic oligonucleotide
  Sense strand starting at position 2760 of SEQ ID NO: 1884255
ggcgaagcuauuuggguau

SEQ ID NO: 2251903 - RNA, 19 nt, Artificial Sequence
  Description of Artificial Sequence: Synthetic oligonucleotide
  Antisense strand to SEQ ID NO: 2251902
auacccaaauagcuucgcc

SEQ ID NO: 2251904 - RNA, 19 nt, Artificial Sequence
  Description of Artificial Sequence: Synthetic oligonucleotide
  Sense strand starting at position 2799 of SEQ ID NO: 1884255
ggagauuugucuuguccac

SEQ ID NO: 2251905 - RNA, 19 nt, Artificial Sequence
  Description of Artificial Sequence: Synthetic oligonucleotide
  Antisense strand to SEQ ID NO: 2251904
guggacaagacaaaucucc

SEQ ID NO: 2251906 - RNA, 19 nt, Artificial Sequence
  Description of Artificial Sequence: Synthetic oligonucleotide
  Sense strand starting at position 2805 of SEQ ID NO: 1884255
uugucuuguccacaguguu

SEQ ID NO: 2251907 - RNA, 19 nt, Artificial Sequence
  Description of Artificial Sequence: Synthetic oligonucleotide
  Antisense strand to SEQ ID NO: 2251906
aacacuguggacaagacaa

SEQ ID NO: 2251908 - RNA, 19 nt, Artificial Sequence
  Description of Artificial Sequence: Synthetic oligonucleotide
  Sense strand starting at position 2820 of SEQ ID NO: 1884255
uguuguuuguuggugucaa

SEQ ID NO: 2251909 - RNA, 19 nt, Artificial Sequence
  Description of Artificial Sequence: Synthetic oligonucleotide
  Antisense strand to SEQ ID NO: 2251908
uugacaccaacaaacaaca

SEQ ID NO: 2251910 - RNA, 19 nt, Artificial Sequence
  Description of Artificial Sequence: Synthetic oligonucleotide
  Sense strand starting at position 2871 of SEQ ID NO: 1884255
guacaauggagguguugaa

SEQ ID NO: 2251911 - RNA, 19 nt, Artificial Sequence
  Description of Artificial Sequence: Synthetic oligonucleotide
  Antisense strand to SEQ ID NO: 2251910
uucaacaccuccauuguac

SEQ ID NO: 2251912 - RNA, 19 nt, Artificial Sequence
  Description of Artificial Sequence: Synthetic oligonucleotide
  Sense strand starting at position 2906 of SEQ ID NO: 1884255
gugcauuucuguucuacga

SEQ ID NO: 2251913 - RNA, 19 nt, Artificial Sequence
  Description of Artificial Sequence: Synthetic oligonucleotide
  Antisense strand to SEQ ID NO: 2251912
ucguagaacagaaaugcac

SEQ ID NO: 2251914 - RNA, 19 nt, Artificial Sequence
  Description of Artificial Sequence: Synthetic oligonucleotide
  Sense strand starting at position 2908 of SEQ ID NO: 1884255
gcauuucuguucuacgauu

SEQ ID NO: 2251915 - RNA, 19 nt, Artificial Sequence
  Description of Artificial Sequence: Synthetic oligonucleotide
  Antisense strand to SEQ ID NO: 2251914
aaucguagaacagaaaugc

SEQ ID NO: 2251916 - RNA, 19 nt, Artificial Sequence
  Description of Artificial Sequence: Synthetic oligonucleotide
  Sense strand starting at position 2922 of SEQ ID NO: 1884255
cgauuuagugucugugacu

SEQ ID NO: 2251917 - RNA, 19 nt, Artificial Sequence
  Description of Artificial Sequence: Synthetic oligonucleotide
  Antisense strand to SEQ ID NO: 2251916
agucacagacacuaaaucg

SEQ ID NO: 2251918 - RNA, 19 nt, Artificial Sequence
  Description of Artificial Sequence: Synthetic oligonucleotide
  Sense strand starting at position 2927 of SEQ ID NO: 1884255
uagugucugugacuaguua

SEQ ID NO: 2251919 - RNA, 19 nt, Artificial Sequence
  Description of Artificial Sequence: Synthetic oligonucleotide
  Antisense strand to SEQ ID NO: 2251918
uaacuagucacagacacua

SEQ ID NO: 2251920 - RNA, 19 nt, Artificial Sequence
  Description of Artificial Sequence: Synthetic oligonucleotide
  Sense strand starting at position 2931 of SEQ ID NO: 1884255
gucugugacuaguuagaau

SEQ ID NO: 2251921 - RNA, 19 nt, Artificial Sequence
  Description of Artificial Sequence: Synthetic oligonucleotide
  Antisense strand to SEQ ID NO: 2251920
auucuaacuagucacagac

SEQ ID NO: 2251922 - RNA, 19 nt, Artificial Sequence
  Description of Artificial Sequence: Synthetic oligonucleotide
  Sense strand starting at position 2934 of SEQ ID NO: 1884255
ugugacuaguuagaauaua

SEQ ID NO: 2251923 - RNA, 19 nt, Artificial Sequence
  Description of Artificial Sequence: Synthetic oligonucleotide
  Antisense strand to SEQ ID NO: 2251922
uauauucuaacuagucaca

SEQ ID NO: 2251924 - RNA, 19 nt, Artificial Sequence
  Description of Artificial Sequence: Synthetic oligonucleotide
  Sense strand starting at position 2945 of SEQ ID NO: 1884255
agaauauaguuggaggaaa

SEQ ID NO: 2251925 - RNA, 19 nt, Artificial Sequence
  Description of Artificial Sequence: Synthetic oligonucleotide
  Antisense strand to SEQ ID NO: 2251924
uuuccuccaacuauauucu

SEQ ID NO: 2251926 - RNA, 19 nt, Artificial Sequence
  Description of Artificial Sequence: Synthetic oligonucleotide
  Sense strand starting at position 3025 of SEQ ID NO: 1884255
uugggaggaugcagugaua

SEQ ID NO: 2251927 - RNA, 19 nt, Artificial Sequence
  Description of Artificial Sequence: Synthetic oligonucleotide
  Antisense strand to SEQ ID NO: 2251926
uaucacugcauccucccaa

SEQ ID NO: 2251928 - RNA, 19 nt, Artificial Sequence
  Description of Artificial Sequence: Synthetic oligonucleotide
  Sense strand starting at position 3034 of SEQ ID NO: 1884255
ugcagugauauuugugcau

SEQ ID NO: 2251929 - RNA, 19 nt, Artificial Sequence
  Description of Artificial Sequence: Synthetic oligonucleotide
  Antisense strand to SEQ ID NO: 2251928
augcacaaauaucacugca

SEQ ID NO: 2251930 - RNA, 19 nt, Artificial Sequence
  Description of Artificial Sequence: Synthetic oligonucleotide
  Sense strand starting at position 3036 of SEQ ID NO: 1884255
cagugauauuugugcauua

SEQ ID NO: 2251931 - RNA, 19 nt, Artificial Sequence
  Description of Artificial Sequence: Synthetic oligonucleotide
  Antisense strand to SEQ ID NO: 2251930
uaaugcacaaauaucacug

SEQ ID NO: 2251932 - RNA, 19 nt, Artificial Sequence
  Description of Artificial Sequence: Synthetic oligonucleotide
  Sense strand starting at position 3037 of SEQ ID NO: 1884255
agugauauuugugcauuau

SEQ ID NO: 2251933 - RNA, 19 nt, Artificial Sequence
  Description of Artificial Sequence: Synthetic oligonucleotide
  Antisense strand to SEQ ID NO: 2251932
auaaugcacaaauaucacu

SEQ ID NO: 2251934 - RNA, 19 nt, Artificial Sequence
  Description of Artificial Sequence: Synthetic oligonucleotide
  Sense strand starting at position 3069 of SEQ ID NO: 1884255
gugaaacaacaucgugaga

SEQ ID NO: 2251935 - RNA, 19 nt, Artificial Sequence
  Description of Artificial Sequence: Synthetic oligonucleotide
  Antisense strand to SEQ ID NO: 2251934
ucucacgauguuguuucac

SEQ ID NO: 2251936 - RNA, 19 nt, Artificial Sequence
  Description of Artificial Sequence: Synthetic oligonucleotide
  Sense strand starting at position 3071 of SEQ ID NO: 1884255
gaaacaacaucgugagaga

SEQ ID NO: 2251937 - RNA, 19 nt, Artificial Sequence
  Description of Artificial Sequence: Synthetic oligonucleotide
  Antisense strand to SEQ ID NO: 2251936
ucucucacgauguuguuuc

SEQ ID NO: 2251938 - RNA, 19 nt, Artificial Sequence
  Description of Artificial Sequence: Synthetic oligonucleotide
  Sense strand starting at position 3078 of SEQ ID NO: 1884255
caucgugagagagguagua

SEQ ID NO: 2251939 - RNA, 19 nt, Artificial Sequence
  Description of Artificial Sequence: Synthetic oligonucleotide
  Antisense strand to SEQ ID NO: 2251938
uacuaccucucucacgaug

SEQ ID NO: 2251940 - RNA, 19 nt, Artificial Sequence
  Description of Artificial Sequence: Synthetic oligonucleotide
  Sense strand starting at position 3080 of SEQ ID NO: 1884255
ucgugagagagguaguacu

SEQ ID NO: 2251941 - RNA, 19 nt, Artificial Sequence
  Description of Artificial Sequence: Synthetic oligonucleotide
  Antisense strand to SEQ ID NO: 2251940
aguacuaccucucucacga

SEQ ID NO: 2251942 - RNA, 19 nt, Artificial Sequence
  Description of Artificial Sequence: Synthetic oligonucleotide
  Sense strand starting at position 3093 of SEQ ID NO: 1884255
aguacugcucuugacaaag

SEQ ID NO: 2251943 - RNA, 19 nt, Artificial Sequence
  Description of Artificial Sequence: Synthetic oligonucleotide
  Antisense strand to SEQ ID NO: 2251942
cuuugucaagagcaguacu

SEQ ID NO: 2251944 - RNA, 19 nt, Artificial Sequence
  Description of Artificial Sequence: Synthetic oligonucleotide
  Sense strand starting at position 3132 of SEQ ID NO: 1884255
uuugaaacuguugaguuau

SEQ ID NO: 2251945 - RNA, 19 nt, Artificial Sequence
  Description of Artificial Sequence: Synthetic oligonucleotide
  Antisense strand to SEQ ID NO: 2251944
auaacucaacaguuucaaa

SEQ ID NO: 2251946 - RNA, 19 nt, Artificial Sequence
  Description of Artificial Sequence: Synthetic oligonucleotide
  Sense strand starting at position 3282 of SEQ ID NO: 1884255
aguggaucauucucaguuu

SEQ ID NO: 2251947 - RNA, 19 nt, Artificial Sequence
  Description of Artificial Sequence: Synthetic oligonucleotide
  Antisense strand to SEQ ID NO: 2251946
aaacugagaaugauccacu

SEQ ID NO: 2251948 - RNA, 19 nt, Artificial Sequence
  Description of Artificial Sequence: Synthetic oligonucleotide
  Sense strand starting at position 3438 of SEQ ID NO: 1884255
uuugguggaauguauuaau

SEQ ID NO: 2251949 - RNA, 19 nt, Artificial Sequence
  Description of Artificial Sequence: Synthetic oligonucleotide
  Antisense strand to SEQ ID NO: 2251948
auuaauacauuccaccaaa

SEQ ID NO: 2251950 - RNA, 19 nt, Artificial Sequence
  Description of Artificial Sequence: Synthetic oligonucleotide
  Sense strand starting at position 3455 of SEQ ID NO: 1884255
auaggagucagccaggcau

SEQ ID NO: 2251951 - RNA, 19 nt, Artificial Sequence
  Description of Artificial Sequence: Synthetic oligonucleotide
  Antisense strand to SEQ ID NO: 2251950
augccuggcugacuccuau

SEQ ID NO: 2251952 - RNA, 19 nt, Artificial Sequence
  Description of Artificial Sequence: Synthetic oligonucleotide
  Sense strand starting at position 3791 of SEQ ID NO: 1884255
acaggagagucguuugaau

SEQ ID NO: 2251953 - RNA, 19 nt, Artificial Sequence
  Description of Artificial Sequence: Synthetic oligonucleotide
  Antisense strand to SEQ ID NO: 2251952
auucaaacgacucuccugu

SEQ ID NO: 2251954 - RNA, 19 nt, Artificial Sequence
  Description of Artificial Sequence: Synthetic oligonucleotide
  Sense strand starting at position 3920 of SEQ ID NO: 1884255
gugguagccaugccuguau

SEQ ID NO: 2251955 - RNA, 19 nt, Artificial Sequence
  Description of Artificial Sequence: Synthetic oligonucleotide
  Antisense strand to SEQ ID NO: 2251954
auacaggcauggcuaccac

SEQ ID NO: 2251956 - RNA, 19 nt, Artificial Sequence
  Description of Artificial Sequence: Synthetic oligonucleotide
  Sense strand starting at position 40 of SEQ ID NO: 1884256
cucagcucucaguauugga

SEQ ID NO: 2251957 - RNA, 19 nt, Artificial Sequence
  Description of Artificial Sequence: Synthetic oligonucleotide
  Antisense strand to SEQ ID NO: 2251956
uccaauacugagagcugag

SEQ ID NO: 2251958 - RNA, 19 nt, Artificial Sequence
  Description of Artificial Sequence: Synthetic oligonucleotide
  Sense strand starting at position 195 of SEQ ID NO: 1884256
agauauucccuuuguacuu

SEQ ID NO: 2251959 - RNA, 19 nt, Artificial Sequence
  Description of Artificial Sequence: Synthetic oligonucleotide
  Antisense strand to SEQ ID NO: 2251958
aaguacaaagggaauaucu

SEQ ID NO: 2251960 - RNA, 19 nt, Artificial Sequence
  Description of Artificial Sequence: Synthetic oligonucleotide
  Sense strand starting at position 655 of SEQ ID NO: 1884256
gagcacagguccuugaauu

SEQ ID NO: 2251961 - RNA, 19 nt, Artificial Sequence
  Description of Artificial Sequence: Synthetic oligonucleotide
  Antisense strand to SEQ ID NO: 2251960
aauucaaggaccugugcuc

SEQ ID NO: 2251962 - RNA, 19 nt, Artificial Sequence
  Description of Artificial Sequence: Synthetic oligonucleotide
  Sense strand starting at position 665 of SEQ ID NO: 1884256
ccuugaauuugagagugca

SEQ ID NO: 2251963 - RNA, 19 nt, Artificial Sequence
  Description of Artificial Sequence: Synthetic oligonucleotide
  Antisense strand to SEQ ID NO: 2251962
ugcacucucaaauucaagg

SEQ ID NO: 2251964 - RNA, 19 nt, Artificial Sequence
  Description of Artificial Sequence: Synthetic oligonucleotide
  Sense strand starting at position 834 of SEQ ID NO: 1884256
ggaaucuucgaguaguaaa

SEQ ID NO: 2251965 - RNA, 19 nt, Artificial Sequence
  Description of Artificial Sequence: Synthetic oligonucleotide
  Antisense strand to SEQ ID NO: 2251964
uuuacuacucgaagauucc

SEQ ID NO: 2251966 - RNA, 19 nt, Artificial Sequence
  Description of Artificial Sequence: Synthetic oligonucleotide
  Sense strand starting at position 1027 of SEQ ID NO: 1884256
gcgugaaacguguuaguga

SEQ ID NO: 2251967 - RNA, 19 nt, Artificial Sequence
  Description of Artificial Sequence: Synthetic oligonucleotide
  Antisense strand to SEQ ID NO: 2251966
ucacuaacacguuucacgc

SEQ ID NO: 2251968 - RNA, 19 nt, Artificial Sequence
  Description of Artificial Sequence: Synthetic oligonucleotide
  Sense strand starting at position 1030 of SEQ ID NO: 1884256
ugaaacguguuagugaauu

SEQ ID NO: 2251969 - RNA, 19 nt, Artificial Sequence
  Description of Artificial Sequence: Synthetic oligonucleotide
  Antisense strand to SEQ ID NO: 2251968
aauucacuaacacguuuca

SEQ ID NO: 2251970 - RNA, 19 nt, Artificial Sequence
  Description of Artificial Sequence: Synthetic oligonucleotide
  Sense strand starting at position 1036 of SEQ ID NO: 1884256
guguuagugaauuaaagua

SEQ ID NO: 2251971 - RNA, 19 nt, Artificial Sequence
  Description of Artificial Sequence: Synthetic oligonucleotide
  Antisense strand to SEQ ID NO: 2251970
uacuuuaauucacuaacac

SEQ ID NO: 2251972 - RNA, 19 nt, Artificial Sequence
  Description of Artificial Sequence: Synthetic oligonucleotide
  Sense strand starting at position 1048 of SEQ ID NO: 1884256
uaaaguacuucgguggaaa

SEQ ID NO: 2251973 - RNA, 19 nt, Artificial Sequence
  Description of Artificial Sequence: Synthetic oligonucleotide
  Antisense strand to SEQ ID NO: 2251972
uuuccaccgaaguacuuua

SEQ ID NO: 2251974 - RNA, 19 nt, Artificial Sequence
  Description of Artificial Sequence: Synthetic oligonucleotide
  Sense strand starting at position 2427 of SEQ ID NO: 1884256
gucugugugcaauaacuac

SEQ ID NO: 2251975 - RNA, 19 nt, Artificial Sequence
  Description of Artificial Sequence: Synthetic oligonucleotide
  Antisense strand to SEQ ID NO: 2251974
guaguuauugcacacagac

SEQ ID NO: 2251976 - RNA, 19 nt, Artificial Sequence
  Description of Artificial Sequence: Synthetic oligonucleotide
  Sense strand starting at position 2613 of SEQ ID NO: 1884256
cuuuaaauaggauguguuu

SEQ ID NO: 2251977 - RNA, 19 nt, Artificial Sequence
  Description of Artificial Sequence: Synthetic oligonucleotide
  Antisense strand to SEQ ID NO: 2251976
aaacacauccuauuuaaag

SEQ ID NO: 2251978 - RNA, 19 nt, Artificial Sequence
  Description of Artificial Sequence: Synthetic oligonucleotide
  Sense strand starting at position 2726 of SEQ ID NO: 1884256
auggcauuauagucauugu

SEQ ID NO: 2251979 - RNA, 19 nt, Artificial Sequence
  Description of Artificial Sequence: Synthetic oligonucleotide
  Antisense strand to SEQ ID NO: 2251978
acaaugacuauaaugccau

SEQ ID NO: 2251980 - RNA, 19 nt, Artificial Sequence
  Description of Artificial Sequence: Synthetic oligonucleotide
  Sense strand starting at position 2798 of SEQ ID NO: 1884256
ggcuuuguauuuccugaca

SEQ ID NO: 2251981 - RNA, 19 nt, Artificial Sequence
  Description of Artificial Sequence: Synthetic oligonucleotide
  Antisense strand to SEQ ID NO: 2251980
ugucaggaaauacaaagcc

SEQ ID NO: 2251982 - RNA, 19 nt, Artificial Sequence
  Description of Artificial Sequence: Synthetic oligonucleotide
  Sense strand starting at position 2831 of SEQ ID NO: 1884256
acauguugccucugaagau

SEQ ID NO: 2251983 - RNA, 19 nt, Artificial Sequence
  Description of Artificial Sequence: Synthetic oligonucleotide
  Antisense strand to SEQ ID NO: 2251982
aucuucagaggcaacaugu

SEQ ID NO: 2251984 - RNA, 19 nt, Artificial Sequence
  Description of Artificial Sequence: Synthetic oligonucleotide
  Sense strand starting at position 2994 of SEQ ID NO: 1884256
uuuauuaagcgugagacau

SEQ ID NO: 2251985 - RNA, 19 nt, Artificial Sequence
  Description of Artificial Sequence: Synthetic oligonucleotide
  Antisense strand to SEQ ID NO: 2251984
augucucacgcuuaauaaa

SEQ ID NO: 2251986 - RNA, 19 nt, Artificial Sequence
  Description of Artificial Sequence: Synthetic oligonucleotide
  Sense strand starting at position 3002 of SEQ ID NO: 1884256
gcgugagacauuugaggua

SEQ ID NO: 2251987 - RNA, 19 nt, Artificial Sequence
  Description of Artificial Sequence: Synthetic oligonucleotide
  Antisense strand to SEQ ID NO: 2251986
uaccucaaaugucucacgc

SEQ ID NO: 2251988 - RNA, 19 nt, Artificial Sequence
  Description of Artificial Sequence: Synthetic oligonucleotide
  Sense strand starting at position 3005 of SEQ ID NO: 1884256
ugagacauuugagguacuu

SEQ ID NO: 2251989 - RNA, 19 nt, Artificial Sequence
  Description of Artificial Sequence: Synthetic oligonucleotide
  Antisense strand to SEQ ID NO: 2251988
aaguaccucaaaugucuca

SEQ ID NO: 2251990 - RNA, 19 nt, Artificial Sequence
  Description of Artificial Sequence: Synthetic oligonucleotide
  Sense strand starting at position 3070 of SEQ ID NO: 1884256
ccaaguaagccucagggau

SEQ ID NO: 2251991 - RNA, 19 nt, Artificial Sequence
  Description of Artificial Sequence: Synthetic oligonucleotide
  Antisense strand to SEQ ID NO: 2251990
aucccugaggcuuacuugg

SEQ ID NO: 2251992 - RNA, 19 nt, Artificial Sequence
  Description of Artificial Sequence: Synthetic oligonucleotide
  Sense strand starting at position 3148 of SEQ ID NO: 1884256
aacuuugacugaguagguu

SEQ ID NO: 2251993 - RNA, 19 nt, Artificial Sequence
  Description of Artificial Sequence: Synthetic oligonucleotide
  Antisense strand to SEQ ID NO: 2251992
aaccuacucagucaaaguu

SEQ ID NO: 2251994 - RNA, 19 nt, Artificial Sequence
  Description of Artificial Sequence: Synthetic oligonucleotide
  Sense strand starting at position 3152 of SEQ ID NO: 1884256
uugacugaguagguuuaau

SEQ ID NO: 2251995 - RNA, 19 nt, Artificial Sequence
  Description of Artificial Sequence: Synthetic oligonucleotide
  Antisense strand to SEQ ID NO: 2251994
auuaaaccuacucagucaa

SEQ ID NO: 2251996 - RNA, 19 nt, Artificial Sequence
  Description of Artificial Sequence: Synthetic oligonucleotide
  Sense strand starting at position 3163 of SEQ ID NO: 1884256
gguuuaauaagccagagug

SEQ ID NO: 2251997 - RNA, 19 nt, Artificial Sequence
  Description of Artificial Sequence: Synthetic oligonucleotide
  Antisense strand to SEQ ID NO: 2251996
cacucuggcuuauuaaacc

SEQ ID NO: 2251998 - RNA, 19 nt, Artificial Sequence
  Description of Artificial Sequence: Synthetic oligonucleotide
  Sense strand starting at position 3179 of SEQ ID NO: 1884256
guggaaauaucuuugguca

SEQ ID NO: 2251999 - RNA, 19 nt, Artificial Sequence
  Description of Artificial Sequence: Synthetic oligonucleotide
  Antisense strand to SEQ ID NO: 2251998
ugaccaaagauauuuccac

SEQ ID NO: 2252000 - RNA, 19 nt, Artificial Sequence
  Description of Artificial Sequence: Synthetic oligonucleotide
  Sense strand starting at position 3180 of SEQ ID NO: 1884256
uggaaauaucuuuggucac

SEQ ID NO: 2252001 - RNA, 19 nt, Artificial Sequence
  Description of Artificial Sequence: Synthetic oligonucleotide
  Antisense strand to SEQ ID NO: 2252000
gugaccaaagauauuucca

SEQ ID NO: 2252002 - RNA, 19 nt, Artificial Sequence
  Description of Artificial Sequence: Synthetic oligonucleotide
  Sense strand starting at position 3182 of SEQ ID NO: 1884256
gaaauaucuuuggucacag

SEQ ID NO: 2252003 - RNA, 19 nt, Artificial Sequence
  Description of Artificial Sequence: Synthetic oligonucleotide
  Antisense strand to SEQ ID NO: 2252002
cugugaccaaagauauuuc

SEQ ID NO: 2252004 - RNA, 19 nt, Artificial Sequence
  Description of Artificial Sequence: Synthetic oligonucleotide
  Sense strand starting at position 3352 of SEQ ID NO: 1884256
uccuguuguguguaaauac

SEQ ID NO: 2252005 - RNA, 19 nt, Artificial Sequence
  Description of Artificial Sequence: Synthetic oligonucleotide
  Antisense strand to SEQ ID NO: 2252004
guauuuacacacaacagga

SEQ ID NO: 2252006 - RNA, 19 nt, Artificial Sequence
  Description of Artificial Sequence: Synthetic oligonucleotide
  Sense strand starting at position 3361 of SEQ ID NO: 1884256
guguaaauacuauagccaa

SEQ ID NO: 2252007 - RNA, 19 nt, Artificial Sequence
  Description of Artificial Sequence: Synthetic oligonucleotide
  Antisense strand to SEQ ID NO: 2252006
uuggcuauaguauuuacac

SEQ ID NO: 2252008 - RNA, 19 nt, Artificial Sequence
  Description of Artificial Sequence: Synthetic oligonucleotide
  Sense strand starting at position 3421 of SEQ ID NO: 1884256
uugguacugacaugugacu

SEQ ID NO: 2252009 - RNA, 19 nt, Artificial Sequence
  Description of Artificial Sequence: Synthetic oligonucleotide
  Antisense strand to SEQ ID NO: 2252008
agucacaugucaguaccaa

SEQ ID NO: 2252010 - RNA, 19 nt, Artificial Sequence
  Description of Artificial Sequence: Synthetic oligonucleotide
  Sense strand starting at position 3423 of SEQ ID NO: 1884256
gguacugacaugugacuua

SEQ ID NO: 2252011 - RNA, 19 nt, Artificial Sequence
  Description of Artificial Sequence: Synthetic oligonucleotide
  Antisense strand to SEQ ID NO: 2252010
uaagucacaugucaguacc

SEQ ID NO: 2252012 - RNA, 19 nt, Artificial Sequence
  Description of Artificial Sequence: Synthetic oligonucleotide
  Sense strand starting at position 3426 of SEQ ID NO: 1884256
acugacaugugacuuacaa

SEQ ID NO: 2252013 - RNA, 19 nt, Artificial Sequence
  Description of Artificial Sequence: Synthetic oligonucleotide
  Antisense strand to SEQ ID NO: 2252012
uuguaagucacaugucagu

SEQ ID NO: 2252014 - RNA, 19 nt, Artificial Sequence
  Description of Artificial Sequence: Synthetic oligonucleotide
  Sense strand starting at position 3434 of SEQ ID NO: 1884256
gugacuuacaaccgagaga

SEQ ID NO: 2252015 - RNA, 19 nt, Artificial Sequence
  Description of Artificial Sequence: Synthetic oligonucleotide
  Antisense strand to SEQ ID NO: 2252014
ucucucgguuguaagucac

SEQ ID NO: 2252016 - RNA, 19 nt, Artificial Sequence
  Description of Artificial Sequence: Synthetic oligonucleotide
  Sense strand starting at position 3477 of SEQ ID NO: 1884256
agugauggucaauaaguca

SEQ ID NO: 2252017 - RNA, 19 nt, Artificial Sequence
  Description of Artificial Sequence: Synthetic oligonucleotide
  Antisense strand to SEQ ID NO: 2252016
ugacuuauugaccaucacu

SEQ ID NO: 2252018 - RNA, 19 nt, Artificial Sequence
  Description of Artificial Sequence: Synthetic oligonucleotide
  Sense strand starting at position 3516 of SEQ ID NO: 1884256
auauacuaguguuuagagu

SEQ ID NO: 2252019 - RNA, 19 nt, Artificial Sequence
  Description of Artificial Sequence: Synthetic oligonucleotide
  Antisense strand to SEQ ID NO: 2252018
acucuaaacacuaguauau

SEQ ID NO: 2252020 - RNA, 19 nt, Artificial Sequence
  Description of Artificial Sequence: Synthetic oligonucleotide
  Sense strand starting at position 3517 of SEQ ID NO: 1884256
uauacuaguguuuagagua

SEQ ID NO: 2252021 - RNA, 19 nt, Artificial Sequence
  Description of Artificial Sequence: Synthetic oligonucleotide
  Antisense strand to SEQ ID NO: 2252020
uacucuaaacacuaguaua

SEQ ID NO: 2252022 - RNA, 19 nt, Artificial Sequence
  Description of Artificial Sequence: Synthetic oligonucleotide
  Sense strand starting at position 3639 of SEQ ID NO: 1884256
gugaauacuuaccucauag

SEQ ID NO: 2252023 - RNA, 19 nt, Artificial Sequence
  Description of Artificial Sequence: Synthetic oligonucleotide
  Antisense strand to SEQ ID NO: 2252022
cuaugagguaaguauucac

SEQ ID NO: 2252024 - RNA, 19 nt, Artificial Sequence
  Description of Artificial Sequence: Synthetic oligonucleotide
  Sense strand starting at position 3646 of SEQ ID NO: 1884256
cuuaccucauaggugauua

SEQ ID NO: 2252025 - RNA, 19 nt, Artificial Sequence
  Description of Artificial Sequence: Synthetic oligonucleotide
  Antisense strand to SEQ ID NO: 2252024
uaaucaccuaugagguaag

SEQ ID NO: 2252026 - RNA, 19 nt, Artificial Sequence
  Description of Artificial Sequence: Synthetic oligonucleotide
  Sense strand starting at position 3650 of SEQ ID NO: 1884256
ccucauaggugauuagaga

SEQ ID NO: 2252027 - RNA, 19 nt, Artificial Sequence
  Description of Artificial Sequence: Synthetic oligonucleotide
  Antisense strand to SEQ ID NO: 2252026
ucucuaaucaccuaugagg

SEQ ID NO: 2252028 - RNA, 19 nt, Artificial Sequence
  Description of Artificial Sequence: Synthetic oligonucleotide
  Sense strand starting at position 3681 of SEQ ID NO: 1884256
aauauauguugacugguga

SEQ ID NO: 2252029 - RNA, 19 nt, Artificial Sequence
  Description of Artificial Sequence: Synthetic oligonucleotide
  Antisense strand to SEQ ID NO: 2252028
ucaccagucaacauauauu

SEQ ID NO: 2252030 - RNA, 19 nt, Artificial Sequence
  Description of Artificial Sequence: Synthetic oligonucleotide
  Sense strand starting at position 3682 of SEQ ID NO: 1884256
auauauguugacuggugau

SEQ ID NO: 2252031 - RNA, 19 nt, Artificial Sequence
  Description of Artificial Sequence: Synthetic oligonucleotide
  Antisense strand to SEQ ID NO: 2252030
aucaccagucaacauauau

SEQ ID NO: 2252032 - RNA, 19 nt, Artificial Sequence
  Description of Artificial Sequence: Synthetic oligonucleotide
  Sense strand starting at position 3819 of SEQ ID NO: 1884256
uugagugacuagccaauaa

SEQ ID NO: 2252033 - RNA, 19 nt, Artificial Sequence
  Description of Artificial Sequence: Synthetic oligonucleotide
  Antisense strand to SEQ ID NO: 2252032
uuauuggcuagucacucaa

SEQ ID NO: 2252034 - RNA, 19 nt, Artificial Sequence
  Description of Artificial Sequence: Synthetic oligonucleotide
  Sense strand starting at position 3823 of SEQ ID NO: 1884256
gugacuagccaauaaacca

SEQ ID NO: 2252035 - RNA, 19 nt, Artificial Sequence
  Description of Artificial Sequence: Synthetic oligonucleotide
  Antisense strand to SEQ ID NO: 2252034
ugguuuauuggcuagucac

SEQ ID NO: 2252036 - RNA, 19 nt, Artificial Sequence
  Description of Artificial Sequence: Synthetic oligonucleotide
  Sense strand starting at position 231 of SEQ ID NO: 1884257
gaaguuaaacugugaugga

SEQ ID NO: 2252037 - RNA, 19 nt, Artificial Sequence
  Description of Artificial Sequence: Synthetic oligonucleotide
  Antisense strand to SEQ ID NO: 2252036
uccaucacaguuuaacuuc

SEQ ID NO: 2252038 - RNA, 19 nt, Artificial Sequence
  Description of Artificial Sequence: Synthetic oligonucleotide
  Sense strand starting at position 283 of SEQ ID NO: 1884257
gagcucugaggcuagaauu

SEQ ID NO: 2252039 - RNA, 19 nt, Artificial Sequence
  Description of Artificial Sequence: Synthetic oligonucleotide
  Antisense strand to SEQ ID NO: 2252038
aauucuagccucagagcuc

SEQ ID NO: 2252040 - RNA, 19 nt, Artificial Sequence
  Description of Artificial Sequence: Synthetic oligonucleotide
  Sense strand starting at position 294 of SEQ ID NO: 1884257
cuagaauuguucuucugaa

SEQ ID NO: 2252041 - RNA, 19 nt, Artificial Sequence
  Description of Artificial Sequence: Synthetic oligonucleotide
  Antisense strand to SEQ ID NO: 2252040
uucagaagaacaauucuag

SEQ ID NO: 2252042 - RNA, 19 nt, Artificial Sequence
  Description of Artificial Sequence: Synthetic oligonucleotide
  Sense strand starting at position 345 of SEQ ID NO: 1884257
ccaguuaauggacaagcua

SEQ ID NO: 2252043 - RNA, 19 nt, Artificial Sequence
  Description of Artificial Sequence: Synthetic oligonucleotide
  Antisense strand to SEQ ID NO: 2252042
uagcuuguccauuaacugg

SEQ ID NO: 2252044 - RNA, 19 nt, Artificial Sequence
  Description of Artificial Sequence: Synthetic oligonucleotide
  Sense strand starting at position 409 of SEQ ID NO: 1884257
gagaaagacucaguuacga

SEQ ID NO: 2252045 - RNA, 19 nt, Artificial Sequence
  Description of Artificial Sequence: Synthetic oligonucleotide
  Antisense strand to SEQ ID NO: 2252044
ucguaacugagucuuucuc

SEQ ID NO: 2252046 - RNA, 19 nt, Artificial Sequence
  Description of Artificial Sequence: Synthetic oligonucleotide
  Sense strand starting at position 424 of SEQ ID NO: 1884257
acgagcugucaguaaccaa

SEQ ID NO: 2252047 - RNA, 19 nt, Artificial Sequence
  Description of Artificial Sequence: Synthetic oligonucleotide
  Antisense strand to SEQ ID NO: 2252046
uugguuacugacagcucgu

SEQ ID NO: 2252048 - RNA, 19 nt, Artificial Sequence
  Description of Artificial Sequence: Synthetic oligonucleotide
  Sense strand starting at position 457 of SEQ ID NO: 1884257
gggaaugaaugccuugauc

SEQ ID NO: 2252049 - RNA, 19 nt, Artificial Sequence
  Description of Artificial Sequence: Synthetic oligonucleotide
  Antisense strand to SEQ ID NO: 2252048
gaucaaggcauucauuccc

SEQ ID NO: 2252050 - RNA, 19 nt, Artificial Sequence
  Description of Artificial Sequence: Synthetic oligonucleotide
  Sense strand starting at position 744 of SEQ ID NO: 1884257
ugcucaauauuaguggaaa

SEQ ID NO: 2252051 - RNA, 19 nt, Artificial Sequence
  Description of Artificial Sequence: Synthetic oligonucleotide
  Antisense strand to SEQ ID NO: 2252050
uuuccacuaauauugagca

SEQ ID NO: 2252052 - RNA, 19 nt, Artificial Sequence
  Description of Artificial Sequence: Synthetic oligonucleotide
  Sense strand starting at position 840 of SEQ ID NO: 1884257
uugagcuaugaguaaacuu

SEQ ID NO: 2252053 - RNA, 19 nt, Artificial Sequence
  Description of Artificial Sequence: Synthetic oligonucleotide
  Antisense strand to SEQ ID NO: 2252052
aaguuuacucauagcucaa

SEQ ID NO: 2252054 - RNA, 19 nt, Artificial Sequence
  Description of Artificial Sequence: Synthetic oligonucleotide
  Sense strand starting at position 1086 of SEQ ID NO: 1884257
cuaccuaugagauggguuu

SEQ ID NO: 2252055 - RNA, 19 nt, Artificial Sequence
  Description of Artificial Sequence: Synthetic oligonucleotide
  Antisense strand to SEQ ID NO: 2252054
aaacccaucucauagguag

SEQ ID NO: 2252056 - RNA, 19 nt, Artificial Sequence
  Description of Artificial Sequence: Synthetic oligonucleotide
  Sense strand starting at position 1088 of SEQ ID NO: 1884257
accuaugagauggguuuga

SEQ ID NO: 2252057 - RNA, 19 nt, Artificial Sequence
  Description of Artificial Sequence: Synthetic oligonucleotide
  Antisense strand to SEQ ID NO: 2252056
ucaaacccaucucauaggu

SEQ ID NO: 2252058 - RNA, 19 nt, Artificial Sequence
  Description of Artificial Sequence: Synthetic oligonucleotide
  Sense strand starting at position 1213 of SEQ ID NO: 1884257
uguuuccaucuguaaccaa

SEQ ID NO: 2252059 - RNA, 19 nt, Artificial Sequence
  Description of Artificial Sequence: Synthetic oligonucleotide
  Antisense strand to SEQ ID NO: 2252058
uugguuacagauggaaaca

SEQ ID NO: 2252060 - RNA, 19 nt, Artificial Sequence
  Description of Artificial Sequence: Synthetic oligonucleotide
  Sense strand starting at position 1279 of SEQ ID NO: 1884257
gaugacuacugcucacaga

SEQ ID NO: 2252061 - RNA, 19 nt, Artificial Sequence
  Description of Artificial Sequence: Synthetic oligonucleotide
  Antisense strand to SEQ ID NO: 2252060
ucugugagcaguagucauc

SEQ ID NO: 2252062 - RNA, 19 nt, Artificial Sequence
  Description of Artificial Sequence: Synthetic oligonucleotide
  Sense strand starting at position 1512 of SEQ ID NO: 1884257
aaugcuaccucagugaaga

SEQ ID NO: 2252063 - RNA, 19 nt, Artificial Sequence
  Description of Artificial Sequence: Synthetic oligonucleotide
  Antisense strand to SEQ ID NO: 2252062
ucuucacugagguagcauu

SEQ ID NO: 2252064 - RNA, 19 nt, Artificial Sequence
  Description of Artificial Sequence: Synthetic oligonucleotide
  Sense strand starting at position 1513 of SEQ ID NO: 1884257
augcuaccucagugaagag

SEQ ID NO: 2252065 - RNA, 19 nt, Artificial Sequence
  Description of Artificial Sequence: Synthetic oligonucleotide
  Antisense strand to SEQ ID NO: 2252064
cucuucacugagguagcau

SEQ ID NO: 2252066 - RNA, 19 nt, Artificial Sequence
  Description of Artificial Sequence: Synthetic oligonucleotide
  Sense strand starting at position 1514 of SEQ ID NO: 1884257
ugcuaccucagugaagagu

SEQ ID NO: 2252067 - RNA, 19 nt, Artificial Sequence
  Description of Artificial Sequence: Synthetic oligonucleotide
  Antisense strand to SEQ ID NO: 2252066
acucuucacugagguagca

SEQ ID NO: 2252068 - RNA, 19 nt, Artificial Sequence
  Description of Artificial Sequence: Synthetic oligonucleotide
  Sense strand starting at position 1523 of SEQ ID NO: 1884257
agugaagaguucuuagauu

SEQ ID NO: 2252069 - RNA, 19 nt, Artificial Sequence
  Description of Artificial Sequence: Synthetic oligonucleotide
  Antisense strand to SEQ ID NO: 2252068
aaucuaagaacucuucacu

SEQ ID NO: 2252070 - RNA, 19 nt, Artificial Sequence
  Description of Artificial Sequence: Synthetic oligonucleotide
  Sense strand starting at position 1641 of SEQ ID NO: 1884257
guaugaauauacuugcaug

SEQ ID NO: 2252071 - RNA, 19 nt, Artificial Sequence
  Description of Artificial Sequence: Synthetic oligonucleotide
  Antisense strand to SEQ ID NO: 2252070
caugcaaguauauucauac

SEQ ID NO: 2252072 - RNA, 19 nt, Artificial Sequence
  Description of Artificial Sequence: Synthetic oligonucleotide
  Sense strand starting at position 1659 of SEQ ID NO: 1884257
guaugccucccugaauaca

SEQ ID NO: 2252073 - RNA, 19 nt, Artificial Sequence
  Description of Artificial Sequence: Synthetic oligonucleotide
  Antisense strand to SEQ ID NO: 2252072
uguauucagggaggcauac

SEQ ID NO: 2252074 - RNA, 19 nt, Artificial Sequence
  Description of Artificial Sequence: Synthetic oligonucleotide
  Sense strand starting at position 1764 of SEQ ID NO: 1884257
aaacuauaugguuguggaa

SEQ ID NO: 2252075 - RNA, 19 nt, Artificial Sequence
  Description of Artificial Sequence: Synthetic oligonucleotide
  Antisense strand to SEQ ID NO: 2252074
uuccacaaccauauaguuu

SEQ ID NO: 2252076 - RNA, 19 nt, Artificial Sequence
  Description of Artificial Sequence: Synthetic oligonucleotide
  Sense strand starting at position 1786 of SEQ ID NO: 1884257
aauucugaugucuaaggca

SEQ ID NO: 2252077 - RNA, 19 nt, Artificial Sequence
  Description of Artificial Sequence: Synthetic oligonucleotide
  Antisense strand to SEQ ID NO: 2252076
ugccuuagacaucagaauu

SEQ ID NO: 2252078 - RNA, 19 nt, Artificial Sequence
  Description of Artificial Sequence: Synthetic oligonucleotide
  Sense strand starting at position 1999 of SEQ ID NO: 1884257
caugaugaccacugcagau

SEQ ID NO: 2252079 - RNA, 19 nt, Artificial Sequence
  Description of Artificial Sequence: Synthetic oligonucleotide
  Antisense strand to SEQ ID NO: 2252078
aucugcaguggucaucaug

SEQ ID NO: 2252080 - RNA, 19 nt, Artificial Sequence
  Description of Artificial Sequence: Synthetic oligonucleotide
  Sense strand starting at position 2278 of SEQ ID NO: 1884257
aaguuucuacuguaggcaa

SEQ ID NO: 2252081 - RNA, 19 nt, Artificial Sequence
  Description of Artificial Sequence: Synthetic oligonucleotide
  Antisense strand to SEQ ID NO: 2252080
uugccuacaguagaaacuu

SEQ ID NO: 2252082 - RNA, 19 nt, Artificial Sequence
  Description of Artificial Sequence: Synthetic oligonucleotide
  Sense strand starting at position 2297 of SEQ ID NO: 1884257
cugggacuccuuuggaauc

SEQ ID NO: 2252083 - RNA, 19 nt, Artificial Sequence
  Description of Artificial Sequence: Synthetic oligonucleotide
  Antisense strand to SEQ ID NO: 2252082
gauuccaaaggagucccag

SEQ ID NO: 2252084 - RNA, 19 nt, Artificial Sequence
  Description of Artificial Sequence: Synthetic oligonucleotide
  Sense strand starting at position 2339 of SEQ ID NO: 1884257
augagugaguuucugaacu

SEQ ID NO: 2252085 - RNA, 19 nt, Artificial Sequence
  Description of Artificial Sequence: Synthetic oligonucleotide
  Antisense strand to SEQ ID NO: 2252084
aguucagaaacucacucau

SEQ ID NO: 2252086 - RNA, 19 nt, Artificial Sequence
  Description of Artificial Sequence: Synthetic oligonucleotide
  Sense strand starting at position 2514 of SEQ ID NO: 1884257
gucagagugcuagaaacua

SEQ ID NO: 2252087 - RNA, 19 nt, Artificial Sequence
  Description of Artificial Sequence: Synthetic oligonucleotide
  Antisense strand to SEQ ID NO: 2252086
uaguuucuagcacucugac

SEQ ID NO: 2252088 - RNA, 19 nt, Artificial Sequence
  Description of Artificial Sequence: Synthetic oligonucleotide
  Sense strand starting at position 2791 of SEQ ID NO: 1884257
aaguauuccaguggcagga

SEQ ID NO: 2252089 - RNA, 19 nt, Artificial Sequence
  Description of Artificial Sequence: Synthetic oligonucleotide
  Antisense strand to SEQ ID NO: 2252088
uccugccacuggaauacuu

SEQ ID NO: 2252090 - RNA, 19 nt, Artificial Sequence
  Description of Artificial Sequence: Synthetic oligonucleotide
  Sense strand starting at position 2917 of SEQ ID NO: 1884257
auggcaguggcagaguaau

SEQ ID NO: 2252091 - RNA, 19 nt, Artificial Sequence
  Description of Artificial Sequence: Synthetic oligonucleotide
  Antisense strand to SEQ ID NO: 2252090
auuacucugccacugccau

SEQ ID NO: 2252092 - RNA, 19 nt, Artificial Sequence
  Description of Artificial Sequence: Synthetic oligonucleotide
  Sense strand starting at position 3061 of SEQ ID NO: 1884257
agauaaauaggguggugau

SEQ ID NO: 2252093 - RNA, 19 nt, Artificial Sequence
  Description of Artificial Sequence: Synthetic oligonucleotide
  Antisense strand to SEQ ID NO: 2252092
aucaccacccuauuuaucu

SEQ ID NO: 2252094 - RNA, 19 nt, Artificial Sequence
  Description of Artificial Sequence: Synthetic oligonucleotide
  Sense strand starting at position 3062 of SEQ ID NO: 1884257
gauaaauaggguggugaug

SEQ ID NO: 2252095 - RNA, 19 nt, Artificial Sequence
  Description of Artificial Sequence: Synthetic oligonucleotide
  Antisense strand to SEQ ID NO: 2252094
caucaccacccuauuuauc

SEQ ID NO: 2252096 - RNA, 19 nt, Artificial Sequence
  Description of Artificial Sequence: Synthetic oligonucleotide
  Sense strand starting at position 3094 of SEQ ID NO: 1884257
uaagcaagaguaugucaca

SEQ ID NO: 2252097 - RNA, 19 nt, Artificial Sequence
  Description of Artificial Sequence: Synthetic oligonucleotide
  Antisense strand to SEQ ID NO: 2252096
ugugacauacucuugcuua

SEQ ID NO: 2252098 - RNA, 19 nt, Artificial Sequence
  Description of Artificial Sequence: Synthetic oligonucleotide
  Sense strand starting at position 3244 of SEQ ID NO: 1884257
cucugaugucauuacacca

SEQ ID NO: 2252099 - RNA, 19 nt, Artificial Sequence
  Description of Artificial Sequence: Synthetic oligonucleotide
  Antisense strand to SEQ ID NO: 2252098
ugguguaaugacaucagag

SEQ ID NO: 2252100 - RNA, 19 nt, Artificial Sequence
  Description of Artificial Sequence: Synthetic oligonucleotide
  Sense strand starting at position 3318 of SEQ ID NO: 1884257
gguggcuaucauuaaauau

SEQ ID NO: 2252101 - RNA, 19 nt, Artificial Sequence
  Description of Artificial Sequence: Synthetic oligonucleotide
  Antisense strand to SEQ ID NO: 2252100
auauuuaaugauagccacc

SEQ ID NO: 2252102 - RNA, 19 nt, Artificial Sequence
  Description of Artificial Sequence: Synthetic oligonucleotide
  Sense strand starting at position 3374 of SEQ ID NO: 1884257
uaugauguaccggaggcua

SEQ ID NO: 2252103 - RNA, 19 nt, Artificial Sequence
  Description of Artificial Sequence: Synthetic oligonucleotide
  Antisense strand to SEQ ID NO: 2252102
uagccuccgguacaucaua

SEQ ID NO: 2252104 - RNA, 19 nt, Artificial Sequence
  Description of Artificial Sequence: Synthetic oligonucleotide
  Sense strand starting at position 3426 of SEQ ID NO: 1884257
ucguauauugaacagugau

SEQ ID NO: 2252105 - RNA, 19 nt, Artificial Sequence
  Description of Artificial Sequence: Synthetic oligonucleotide
  Antisense strand to SEQ ID NO: 2252104
aucacuguucaauauacga

SEQ ID NO: 2252106 - RNA, 19 nt, Artificial Sequence
  Description of Artificial Sequence: Synthetic oligonucleotide
  Sense strand starting at position 3522 of SEQ ID NO: 1884257
gcugaauuccauuaacggu

SEQ ID NO: 2252107 - RNA, 19 nt, Artificial Sequence
  Description of Artificial Sequence: Synthetic oligonucleotide
  Antisense strand to SEQ ID NO: 2252106
accguuaauggaauucagc

SEQ ID NO: 2252108 - RNA, 19 nt, Artificial Sequence
  Description of Artificial Sequence: Synthetic oligonucleotide
  Sense strand starting at position 3672 of SEQ ID NO: 1884257
augauuucuuaagaucaug

SEQ ID NO: 2252109 - RNA, 19 nt, Artificial Sequence
  Description of Artificial Sequence: Synthetic oligonucleotide
  Antisense strand to SEQ ID NO: 2252108
caugaucuuaagaaaucau

SEQ ID NO: 2252110 - RNA, 19 nt, Artificial Sequence
  Description of Artificial Sequence: Synthetic oligonucleotide
  Sense strand starting at position 3678 of SEQ ID NO: 1884257
ucuuaagaucauggagcua

SEQ ID NO: 2252111 - RNA, 19 nt, Artificial Sequence
  Description of Artificial Sequence: Synthetic oligonucleotide
  Antisense strand to SEQ ID NO: 2252110
uagcuccaugaucuuaaga

SEQ ID NO: 2252112 - RNA, 19 nt, Artificial Sequence
  Description of Artificial Sequence: Synthetic oligonucleotide
  Sense strand starting at position 3701 of SEQ ID NO: 1884257
auggcaaagaugugacaua

SEQ ID NO: 2252113 - RNA, 19 nt, Artificial Sequence
  Description of Artificial Sequence: Synthetic oligonucleotide
  Antisense strand to SEQ ID NO: 2252112
uaugucacaucuuugccau

SEQ ID NO: 2252114 - RNA, 19 nt, Artificial Sequence
  Description of Artificial Sequence: Synthetic oligonucleotide
  Sense strand starting at position 3820 of SEQ ID NO: 1884257
accugaauuuggcuaugcu

SEQ ID NO: 2252115 - RNA, 19 nt, Artificial Sequence
  Description of Artificial Sequence: Synthetic oligonucleotide
  Antisense strand to SEQ ID NO: 2252114
agcauagccaaauucaggu

SEQ ID NO: 2252116 - RNA, 19 nt, Artificial Sequence
  Description of Artificial Sequence: Synthetic oligonucleotide
  Sense strand starting at position 115 of SEQ ID NO: 1884258
gacaccugugucugaugua

SEQ ID NO: 2252117 - RNA, 19 nt, Artificial Sequence
  Description of Artificial Sequence: Synthetic oligonucleotide
  Antisense strand to SEQ ID NO: 2252116
uacaucagacacagguguc

SEQ ID NO: 2252118 - RNA, 19 nt, Artificial Sequence
  Description of Artificial Sequence: Synthetic oligonucleotide
  Sense strand starting at position 659 of SEQ ID NO: 1884258
cccugugaacagcauuaau

SEQ ID NO: 2252119 - RNA, 19 nt, Artificial Sequence
  Description of Artificial Sequence: Synthetic oligonucleotide
  Antisense strand to SEQ ID NO: 2252118
auuaaugcuguucacaggg

SEQ ID NO: 2252120 - RNA, 19 nt, Artificial Sequence
  Description of Artificial Sequence: Synthetic oligonucleotide
  Sense strand starting at position 673 of SEQ ID NO: 1884258
uuaauuaggucagagagaa

SEQ ID NO: 2252121 - RNA, 19 nt, Artificial Sequence
  Description of Artificial Sequence: Synthetic oligonucleotide
  Antisense strand to SEQ ID NO: 2252120
uucucucugaccuaauuaa

SEQ ID NO: 2252122 - RNA, 19 nt, Artificial Sequence
  Description of Artificial Sequence: Synthetic oligonucleotide
  Sense strand starting at position 756 of SEQ ID NO: 1884258
uucuccuaucaggagugau

SEQ ID NO: 2252123 - RNA, 19 nt, Artificial Sequence
  Description of Artificial Sequence: Synthetic oligonucleotide
  Antisense strand to SEQ ID NO: 2252122
aucacuccugauaggagaa

SEQ ID NO: 2252124 - RNA, 19 nt, Artificial Sequence
  Description of Artificial Sequence: Synthetic oligonucleotide
  Sense strand starting at position 759 of SEQ ID NO: 1884258
uccuaucaggagugauuaa

SEQ ID NO: 2252125 - RNA, 19 nt, Artificial Sequence
  Description of Artificial Sequence: Synthetic oligonucleotide
  Antisense strand to SEQ ID NO: 2252124
uuaaucacuccugauagga

SEQ ID NO: 2252126 - RNA, 19 nt, Artificial Sequence
  Description of Artificial Sequence: Synthetic oligonucleotide
  Sense strand starting at position 770 of SEQ ID NO: 1884258
gugauuaaauucuuaggau

SEQ ID NO: 2252127 - RNA, 19 nt, Artificial Sequence
  Description of Artificial Sequence: Synthetic oligonucleotide
  Antisense strand to SEQ ID NO: 2252126
auccuaagaauuuaaucac

SEQ ID NO: 2252128 - RNA, 19 nt, Artificial Sequence
  Description of Artificial Sequence: Synthetic oligonucleotide
  Sense strand starting at position 785 of SEQ ID NO: 1884258
ggaucucaugcucagaggu

SEQ ID NO: 2252129 - RNA, 19 nt, Artificial Sequence
  Description of Artificial Sequence: Synthetic oligonucleotide
  Antisense strand to SEQ ID NO: 2252128
accucugagcaugagaucc

SEQ ID NO: 2252130 - RNA, 19 nt, Artificial Sequence
  Description of Artificial Sequence: Synthetic oligonucleotide
  Sense strand starting at position 799 of SEQ ID NO: 1884258
gagguugacaguuauauug

SEQ ID NO: 2252131 - RNA, 19 nt, Artificial Sequence
  Description of Artificial Sequence: Synthetic oligonucleotide
  Antisense strand to SEQ ID NO: 2252130
caauauaacugucaaccuc

SEQ ID NO: 2252132 - RNA, 19 nt, Artificial Sequence
  Description of Artificial Sequence: Synthetic oligonucleotide
  Sense strand starting at position 842 of SEQ ID NO: 1884258
uuuggaagcacccgauuau

SEQ ID NO: 2252133 - RNA, 19 nt, Artificial Sequence
  Description of Artificial Sequence: Synthetic oligonucleotide
  Antisense strand to SEQ ID NO: 2252132
auaaucgggugcuuccaaa

SEQ ID NO: 2252134 - RNA, 19 nt, Artificial Sequence
  Description of Artificial Sequence: Synthetic oligonucleotide
  Sense strand starting at position 843 of SEQ ID NO: 1884258
uuggaagcacccgauuauu

SEQ ID NO: 2252135 - RNA, 19 nt, Artificial Sequence
  Description of Artificial Sequence: Synthetic oligonucleotide
  Antisense strand to SEQ ID NO: 2252134
aauaaucgggugcuuccaa

SEQ ID NO: 2252136 - RNA, 19 nt, Artificial Sequence
  Description of Artificial Sequence: Synthetic oligonucleotide
  Sense strand starting at position 853 of SEQ ID NO: 1884258
ccgauuauuugucucagcu

SEQ ID NO: 2252137 - RNA, 19 nt, Artificial Sequence
  Description of Artificial Sequence: Synthetic oligonucleotide
  Antisense strand to SEQ ID NO: 2252136
agcugagacaaauaaucgg

SEQ ID NO: 2252138 - RNA, 19 nt, Artificial Sequence
  Description of Artificial Sequence: Synthetic oligonucleotide
  Sense strand starting at position 857 of SEQ ID NO: 1884258
uuauuugucucagcuuuga

SEQ ID NO: 2252139 - RNA, 19 nt, Artificial Sequence
  Description of Artificial Sequence: Synthetic oligonucleotide
  Antisense strand to SEQ ID NO: 2252138
ucaaagcugagacaaauaa

SEQ ID NO: 2252140 - RNA, 19 nt, Artificial Sequence
  Description of Artificial Sequence: Synthetic oligonucleotide
  Sense strand starting at position 871 of SEQ ID NO: 1884258
uuugaugagggcuguggaa

SEQ ID NO: 2252141 - RNA, 19 nt, Artificial Sequence
  Description of Artificial Sequence: Synthetic oligonucleotide
  Antisense strand to SEQ ID NO: 2252140
uuccacagcccucaucaaa

SEQ ID NO: 2252142 - RNA, 19 nt, Artificial Sequence
  Description of Artificial Sequence: Synthetic oligonucleotide
  Sense strand starting at position 1113 of SEQ ID NO: 1884258
acucaaaucccaggcugau

SEQ ID NO: 2252143 - RNA, 19 nt, Artificial Sequence
  Description of Artificial Sequence: Synthetic oligonucleotide
  Antisense strand to SEQ ID NO: 2252142
aucagccugggauuugagu

SEQ ID NO: 2252144 - RNA, 19 nt, Artificial Sequence
  Description of Artificial Sequence: Synthetic oligonucleotide
  Sense strand starting at position 1150 of SEQ ID NO: 1884258
cugcacuuucuagaagauc

SEQ ID NO: 2252145 - RNA, 19 nt, Artificial Sequence
  Description of Artificial Sequence: Synthetic oligonucleotide
  Antisense strand to SEQ ID NO: 2252144
gaucuucuagaaagugcag

SEQ ID NO: 2252146 - RNA, 19 nt, Artificial Sequence
  Description of Artificial Sequence: Synthetic oligonucleotide
  Sense strand starting at position 1271 of SEQ ID NO: 1884258
agaggucagagcugggaau

SEQ ID NO: 2252147 - RNA, 19 nt, Artificial Sequence
  Description of Artificial Sequence: Synthetic oligonucleotide
  Antisense strand to SEQ ID NO: 2252146
auucccagcucugaccucu

SEQ ID NO: 2252148 - RNA, 19 nt, Artificial Sequence
  Description of Artificial Sequence: Synthetic oligonucleotide
  Sense strand starting at position 1285 of SEQ ID NO: 1884258
ggaaucgugagguaaagca

SEQ ID NO: 2252149 - RNA, 19 nt, Artificial Sequence
  Description of Artificial Sequence: Synthetic oligonucleotide
  Antisense strand to SEQ ID NO: 2252148
ugcuuuaccucacgauucc

SEQ ID NO: 2252150 - RNA, 19 nt, Artificial Sequence
  Description of Artificial Sequence: Synthetic oligonucleotide
  Sense strand starting at position 1416 of SEQ ID NO: 1884258
gccuccgugcuggcaaaua

SEQ ID NO: 2252151 - RNA, 19 nt, Artificial Sequence
  Description of Artificial Sequence: Synthetic oligonucleotide
  Antisense strand to SEQ ID NO: 2252150
uauuugccagcacggaggc

SEQ ID NO: 2252152 - RNA, 19 nt, Artificial Sequence
  Description of Artificial Sequence: Synthetic oligonucleotide
  Sense strand starting at position 1427 of SEQ ID NO: 1884258
ggcaaauauucguccagga

SEQ ID NO: 2252153 - RNA, 19 nt, Artificial Sequence
  Description of Artificial Sequence: Synthetic oligonucleotide
  Antisense strand to SEQ ID NO: 2252152
uccuggacgaauauuugcc

SEQ ID NO: 2252154 - RNA, 19 nt, Artificial Sequence
  Description of Artificial Sequence: Synthetic oligonucleotide
  Sense strand starting at position 1431 of SEQ ID NO: 1884258
aauauucguccaggaggca

SEQ ID NO: 2252155 - RNA, 19 nt, Artificial Sequence
  Description of Artificial Sequence: Synthetic oligonucleotide
  Antisense strand to SEQ ID NO: 2252154
ugccuccuggacgaauauu

SEQ ID NO: 2252156 - RNA, 19 nt, Artificial Sequence
  Description of Artificial Sequence: Synthetic oligonucleotide
  Sense strand starting at position 2539 of SEQ ID NO: 1884258
gaaaucgaacgccaagaua

SEQ ID NO: 2252157 - RNA, 19 nt, Artificial Sequence
  Description of Artificial Sequence: Synthetic oligonucleotide
  Antisense strand to SEQ ID NO: 2252156
uaucuuggcguucgauuuc

SEQ ID NO: 2252158 - RNA, 19 nt, Artificial Sequence
  Description of Artificial Sequence: Synthetic oligonucleotide
  Sense strand starting at position 2542 of SEQ ID NO: 1884258
aucgaacgccaagauaaua

SEQ ID NO: 2252159 - RNA, 19 nt, Artificial Sequence
  Description of Artificial Sequence: Synthetic oligonucleotide
  Antisense strand to SEQ ID NO: 2252158
uauuaucuuggcguucgau

SEQ ID NO: 2252160 - RNA, 19 nt, Artificial Sequence
  Description of Artificial Sequence: Synthetic oligonucleotide
  Sense strand starting at position 2615 of SEQ ID NO: 1884258
ugggccaagugcuuuaaca

SEQ ID NO: 2252161 - RNA, 19 nt, Artificial Sequence
  Description of Artificial Sequence: Synthetic oligonucleotide
  Antisense strand to SEQ ID NO: 2252160
uguuaaagcacuuggccca

SEQ ID NO: 2252162 - RNA, 19 nt, Artificial Sequence
  Description of Artificial Sequence: Synthetic oligonucleotide
  Sense strand starting at position 2622 of SEQ ID NO: 1884258
agugcuuuaacacgauaug

SEQ ID NO: 2252163 - RNA, 19 nt, Artificial Sequence
  Description of Artificial Sequence: Synthetic oligonucleotide
  Antisense strand to SEQ ID NO: 2252162
cauaucguguuaaagcacu

SEQ ID NO: 2252164 - RNA, 19 nt, Artificial Sequence
  Description of Artificial Sequence: Synthetic oligonucleotide
  Sense strand starting at position 2625 of SEQ ID NO: 1884258
gcuuuaacacgauaugccu

SEQ ID NO: 2252165 - RNA, 19 nt, Artificial Sequence
  Description of Artificial Sequence: Synthetic oligonucleotide
  Antisense strand to SEQ ID NO: 2252164
aggcauaucguguuaaagc

SEQ ID NO: 2252166 - RNA, 19 nt, Artificial Sequence
  Description of Artificial Sequence: Synthetic oligonucleotide
  Sense strand starting at position 2730 of SEQ ID NO: 1884258
ccaccuuuaccggaugagu

SEQ ID NO: 2252167 - RNA, 19 nt, Artificial Sequence
  Description of Artificial Sequence: Synthetic oligonucleotide
  Antisense strand to SEQ ID NO: 2252166
acucauccgguaaaggugg

SEQ ID NO: 2252168 - RNA, 19 nt, Artificial Sequence
  Description of Artificial Sequence: Synthetic oligonucleotide
  Sense strand starting at position 3153 of SEQ ID NO: 1884258
aguuuaacugcccacagua

SEQ ID NO: 2252169 - RNA, 19 nt, Artificial Sequence
  Description of Artificial Sequence: Synthetic oligonucleotide
  Antisense strand to SEQ ID NO: 2252168
uacugugggcaguuaaacu

SEQ ID NO: 2252170 - RNA, 19 nt, Artificial Sequence
  Description of Artificial Sequence: Synthetic oligonucleotide
  Sense strand starting at position 3186 of SEQ ID NO: 1884258
aggauuuguugccagaaac

SEQ ID NO: 2252171 - RNA, 19 nt, Artificial Sequence
  Description of Artificial Sequence: Synthetic oligonucleotide
  Antisense strand to SEQ ID NO: 2252170
guuucuggcaacaaauccu

SEQ ID NO: 2252172 - RNA, 19 nt, Artificial Sequence
  Description of Artificial Sequence: Synthetic oligonucleotide
  Sense strand starting at position 3214 of SEQ ID NO: 1884258
uuaaguuagaagugaauug

SEQ ID NO: 2252173 - RNA, 19 nt, Artificial Sequence
  Description of Artificial Sequence: Synthetic oligonucleotide
  Antisense strand to SEQ ID NO: 2252172
caauucacuucuaacuuaa

SEQ ID NO: 2252174 - RNA, 19 nt, Artificial Sequence
  Description of Artificial Sequence: Synthetic oligonucleotide
  Sense strand starting at position 3221 of SEQ ID NO: 1884258
agaagugaauuggugaagu

SEQ ID NO: 2252175 - RNA, 19 nt, Artificial Sequence
  Description of Artificial Sequence: Synthetic oligonucleotide
  Antisense strand to SEQ ID NO: 2252174
acuucaccaauucacuucu

SEQ ID NO: 2252176 - RNA, 19 nt, Artificial Sequence
  Description of Artificial Sequence: Synthetic oligonucleotide
  Sense strand starting at position 3232 of SEQ ID NO: 1884258
ggugaaguaacagguaaau

SEQ ID NO: 2252177 - RNA, 19 nt, Artificial Sequence
  Description of Artificial Sequence: Synthetic oligonucleotide
  Antisense strand to SEQ ID NO: 2252176
auuuaccuguuacuucacc

SEQ ID NO: 2252178 - RNA, 19 nt, Artificial Sequence
  Description of Artificial Sequence: Synthetic oligonucleotide
  Sense strand starting at position 3415 of SEQ ID NO: 1884258
ggaaauugucaugggcugu

SEQ ID NO: 2252179 - RNA, 19 nt, Artificial Sequence
  Description of Artificial Sequence: Synthetic oligonucleotide
  Antisense strand to SEQ ID NO: 2252178
acagcccaugacaauuucc

SEQ ID NO: 2252180 - RNA, 19 nt, Artificial Sequence
  Description of Artificial Sequence: Synthetic oligonucleotide
  Sense strand starting at position 3416 of SEQ ID NO: 1884258
gaaauugucaugggcuguu

SEQ ID NO: 2252181 - RNA, 19 nt, Artificial Sequence
  Description of Artificial Sequence: Synthetic oligonucleotide
  Antisense strand to SEQ ID NO: 2252180
aacagcccaugacaauuuc

SEQ ID NO: 2252182 - RNA, 19 nt, Artificial Sequence
  Description of Artificial Sequence: Synthetic oligonucleotide
  Sense strand starting at position 3483 of SEQ ID NO: 1884258
auaauucucucagugugua

SEQ ID NO: 2252183 - RNA, 19 nt, Artificial Sequence
  Description of Artificial Sequence: Synthetic oligonucleotide
  Antisense strand to SEQ ID NO: 2252182
uacacacugagagaauuau

SEQ ID NO: 2252184 - RNA, 19 nt, Artificial Sequence
  Description of Artificial Sequence: Synthetic oligonucleotide
  Sense strand starting at position 3539 of SEQ ID NO: 1884258
gauuaaagugucugucuga

SEQ ID NO: 2252185 - RNA, 19 nt, Artificial Sequence
  Description of Artificial Sequence: Synthetic oligonucleotide
  Antisense strand to SEQ ID NO: 2252184
ucagacagacacuuuaauc

SEQ ID NO: 2252186 - RNA, 19 nt, Artificial Sequence
  Description of Artificial Sequence: Synthetic oligonucleotide
  Sense strand starting at position 3540 of SEQ ID NO: 1884258
auuaaagugucugucugaa

SEQ ID NO: 2252187 - RNA, 19 nt, Artificial Sequence
  Description of Artificial Sequence: Synthetic oligonucleotide
  Antisense strand to SEQ ID NO: 2252186
uucagacagacacuuuaau

SEQ ID NO: 2252188 - RNA, 19 nt, Artificial Sequence
  Description of Artificial Sequence: Synthetic oligonucleotide
  Sense strand starting at position 3542 of SEQ ID NO: 1884258
uaaagugucugucugaaac

SEQ ID NO: 2252189 - RNA, 19 nt, Artificial Sequence
  Description of Artificial Sequence: Synthetic oligonucleotide
  Antisense strand to SEQ ID NO: 2252188
guuucagacagacacuuua

SEQ ID NO: 2252190 - RNA, 19 nt, Artificial Sequence
  Description of Artificial Sequence: Synthetic oligonucleotide
  Sense strand starting at position 3561 of SEQ ID NO: 1884258
ucaggagauuggguuguau

SEQ ID NO: 2252191 - RNA, 19 nt, Artificial Sequence
  Description of Artificial Sequence: Synthetic oligonucleotide
  Antisense strand to SEQ ID NO: 2252190
auacaacccaaucuccuga

SEQ ID NO: 2252192 - RNA, 19 nt, Artificial Sequence
  Description of Artificial Sequence: Synthetic oligonucleotide
  Sense strand starting at position 3714 of SEQ ID NO: 1884258
ucagauucuggacgugcaa

SEQ ID NO: 2252193 - RNA, 19 nt, Artificial Sequence
  Description of Artificial Sequence: Synthetic oligonucleotide
  Antisense strand to SEQ ID NO: 2252192
uugcacguccagaaucuga

SEQ ID NO: 2252194 - RNA, 19 nt, Artificial Sequence
  Description of Artificial Sequence: Synthetic oligonucleotide
  Sense strand starting at position 3906 of SEQ ID NO: 1884258
cccaacucccagugucaau

SEQ ID NO: 2252195 - RNA, 19 nt, Artificial Sequence
  Description of Artificial Sequence: Synthetic oligonucleotide
  Antisense strand to SEQ ID NO: 2252194
auugacacugggaguuggg

SEQ ID NO: 2252196 - RNA, 19 nt, Artificial Sequence
  Description of Artificial Sequence: Synthetic oligonucleotide
  Sense strand starting at position 98 of SEQ ID NO: 1884259
agaggagugcagugacaug

SEQ ID NO: 2252197 - RNA, 19 nt, Artificial Sequence
  Description of Artificial Sequence: Synthetic oligonucleotide
  Antisense strand to SEQ ID NO: 2252196
caugucacugcacuccucu

SEQ ID NO: 2252198 - RNA, 19 nt, Artificial Sequence
  Description of Artificial Sequence: Synthetic oligonucleotide
  Sense strand starting at position 773 of SEQ ID NO: 1884259
ugccuucugcacuaagaug

SEQ ID NO: 2252199 - RNA, 19 nt, Artificial Sequence
  Description of Artificial Sequence: Synthetic oligonucleotide
  Antisense strand to SEQ ID NO: 2252198
caucuuagugcagaaggca

SEQ ID NO: 2252200 - RNA, 19 nt, Artificial Sequence
  Description of Artificial Sequence: Synthetic oligonucleotide
  Sense strand starting at position 817 of SEQ ID NO: 1884259
gugagagauacgcaacuuu

SEQ ID NO: 2252201 - RNA, 19 nt, Artificial Sequence
  Description of Artificial Sequence: Synthetic oligonucleotide
  Antisense strand to SEQ ID NO: 2252200
aaaguugcguaucucucac

SEQ ID NO: 2252202 - RNA, 19 nt, Artificial Sequence
  Description of Artificial Sequence: Synthetic oligonucleotide
  Sense strand starting at position 863 of SEQ ID NO: 1884259
auugcagaguucuuaauug

SEQ ID NO: 2252203 - RNA, 19 nt, Artificial Sequence
  Description of Artificial Sequence: Synthetic oligonucleotide
  Antisense strand to SEQ ID NO: 2252202
caauuaagaacucugcaau

SEQ ID NO: 2252204 - RNA, 19 nt, Artificial Sequence
  Description of Artificial Sequence: Synthetic oligonucleotide
  Sense strand starting at position 870 of SEQ ID NO: 1884259
aguucuuaauuggccuaau

SEQ ID NO: 2252205 - RNA, 19 nt, Artificial Sequence
  Description of Artificial Sequence: Synthetic oligonucleotide
  Antisense strand to SEQ ID NO: 2252204
auuaggccaauuaagaacu

SEQ ID NO: 2252206 - RNA, 19 nt, Artificial Sequence
  Description of Artificial Sequence: Synthetic oligonucleotide
  Sense strand starting at position 1081 of SEQ ID NO: 1884259
gcagauuuaugggaagaaa

SEQ ID NO: 2252207 - RNA, 19 nt, Artificial Sequence
  Description of Artificial Sequence: Synthetic oligonucleotide
  Antisense strand to SEQ ID NO: 2252206
uuucuucccauaaaucugc

SEQ ID NO: 2252208 - RNA, 19 nt, Artificial Sequence
  Description of Artificial Sequence: Synthetic oligonucleotide
  Sense strand starting at position 1233 of SEQ ID NO: 1884259
acuguagugagucaacauu

SEQ ID NO: 2252209 - RNA, 19 nt, Artificial Sequence
  Description of Artificial Sequence: Synthetic oligonucleotide
  Antisense strand to SEQ ID NO: 2252208
aauguugacucacuacagu

SEQ ID NO: 2252210 - RNA, 19 nt, Artificial Sequence
  Description of Artificial Sequence: Synthetic oligonucleotide
  Sense strand starting at position 1323 of SEQ ID NO: 1884259
ggcaaaggucaacauguau

SEQ ID NO: 2252211 - RNA, 19 nt, Artificial Sequence
  Description of Artificial Sequence: Synthetic oligonucleotide
  Antisense strand to SEQ ID NO: 2252210
auacauguugaccuuugcc

SEQ ID NO: 2252212 - RNA, 19 nt, Artificial Sequence
  Description of Artificial Sequence: Synthetic oligonucleotide
  Sense strand starting at position 1338 of SEQ ID NO: 1884259
guaucaucuucuguaagua

SEQ ID NO: 2252213 - RNA, 19 nt, Artificial Sequence
  Description of Artificial Sequence: Synthetic oligonucleotide
  Antisense strand to SEQ ID NO: 2252212
uacuuacagaagaugauac

SEQ ID NO: 2252214 - RNA, 19 nt, Artificial Sequence
  Description of Artificial Sequence: Synthetic oligonucleotide
  Sense strand starting at position 1433 of SEQ ID NO: 1884259
ccaguaucuuaagcaugaa

SEQ ID NO: 2252215 - RNA, 19 nt, Artificial Sequence
  Description of Artificial Sequence: Synthetic oligonucleotide
  Antisense strand to SEQ ID NO: 2252214
uucaugcuuaagauacugg

SEQ ID NO: 2252216 - RNA, 19 nt, Artificial Sequence
  Description of Artificial Sequence: Synthetic oligonucleotide
  Sense strand starting at position 1472 of SEQ ID NO: 1884259
uuuguuuguuggucaaaga

SEQ ID NO: 2252217 - RNA, 19 nt, Artificial Sequence
  Description of Artificial Sequence: Synthetic oligonucleotide
  Antisense strand to SEQ ID NO: 2252216
ucuuugaccaacaaacaaa

SEQ ID NO: 2252218 - RNA, 19 nt, Artificial Sequence
  Description of Artificial Sequence: Synthetic oligonucleotide
  Sense strand starting at position 1473 of SEQ ID NO: 1884259
uuguuuguuggucaaagaa

SEQ ID NO: 2252219 - RNA, 19 nt, Artificial Sequence
  Description of Artificial Sequence: Synthetic oligonucleotide
  Antisense strand to SEQ ID NO: 2252218
uucuuugaccaacaaacaa

SEQ ID NO: 2252220 - RNA, 19 nt, Artificial Sequence
  Description of Artificial Sequence: Synthetic oligonucleotide
  Sense strand starting at position 1527 of SEQ ID NO: 1884259
guaugcucaguguauccaa

SEQ ID NO: 2252221 - RNA, 19 nt, Artificial Sequence
  Description of Artificial Sequence: Synthetic oligonucleotide
  Antisense strand to SEQ ID NO: 2252220
uuggauacacugagcauac

SEQ ID NO: 2252222 - RNA, 19 nt, Artificial Sequence
  Description of Artificial Sequence: Synthetic oligonucleotide
  Sense strand starting at position 1551 of SEQ ID NO: 1884259
aggcaugucagguacaaua

SEQ ID NO: 2252223 - RNA, 19 nt, Artificial Sequence
  Description of Artificial Sequence: Synthetic oligonucleotide
  Antisense strand to SEQ ID NO: 2252222
uauuguaccugacaugccu

SEQ ID NO: 2252224 - RNA, 19 nt, Artificial Sequence
  Description of Artificial Sequence: Synthetic oligonucleotide
  Sense strand starting at position 1553 of SEQ ID NO: 1884259
gcaugucagguacaauauu

SEQ ID NO: 2252225 - RNA, 19 nt, Artificial Sequence
  Description of Artificial Sequence: Synthetic oligonucleotide
  Antisense strand to SEQ ID NO: 2252224
aauauuguaccugacaugc

SEQ ID NO: 2252226 - RNA, 19 nt, Artificial Sequence
  Description of Artificial Sequence: Synthetic oligonucleotide
  Sense strand starting at position 1623 of SEQ ID NO: 1884259
aagaguaauugaucagagc

SEQ ID NO: 2252227 - RNA, 19 nt, Artificial Sequence
  Description of Artificial Sequence: Synthetic oligonucleotide
  Antisense strand to SEQ ID NO: 2252226
gcucugaucaauuacucuu

SEQ ID NO: 2252228 - RNA, 19 nt, Artificial Sequence
  Description of Artificial Sequence: Synthetic oligonucleotide
  Sense strand starting at position 1657 of SEQ ID NO: 1884259
agucaacuuccaugacugu

SEQ ID NO: 2252229 - RNA, 19 nt, Artificial Sequence
  Description of Artificial Sequence: Synthetic oligonucleotide
  Antisense strand to SEQ ID NO: 2252228
acagucauggaaguugacu

SEQ ID NO: 2252230 - RNA, 19 nt, Artificial Sequence
  Description of Artificial Sequence: Synthetic oligonucleotide
  Sense strand starting at position 1658 of SEQ ID NO: 1884259
gucaacuuccaugacuguu

SEQ ID NO: 2252231 - RNA, 19 nt, Artificial Sequence
  Description of Artificial Sequence: Synthetic oligonucleotide
  Antisense strand to SEQ ID NO: 2252230
aacagucauggaaguugac

SEQ ID NO: 2252232 - RNA, 19 nt, Artificial Sequence
  Description of Artificial Sequence: Synthetic oligonucleotide
  Sense strand starting at position 1664 of SEQ ID NO: 1884259
uuccaugacuguucggauu

SEQ ID NO: 2252233 - RNA, 19 nt, Artificial Sequence
  Description of Artificial Sequence: Synthetic oligonucleotide
  Antisense strand to SEQ ID NO: 2252232
aauccgaacagucauggaa

SEQ ID NO: 2252234 - RNA, 19 nt, Artificial Sequence
  Description of Artificial Sequence: Synthetic oligonucleotide
  Sense strand starting at position 1865 of SEQ ID NO: 1884259
acggacaauuuccacagua

SEQ ID NO: 2252235 - RNA, 19 nt, Artificial Sequence
  Description of Artificial Sequence: Synthetic oligonucleotide
  Antisense strand to SEQ ID NO: 2252234
uacuguggaaauuguccgu

SEQ ID NO: 2252236 - RNA, 19 nt, Artificial Sequence
  Description of Artificial Sequence: Synthetic oligonucleotide
  Sense strand starting at position 2986 of SEQ ID NO: 1884259
cggucuuguuacccuagaa

SEQ ID NO: 2252237 - RNA, 19 nt, Artificial Sequence
  Description of Artificial Sequence: Synthetic oligonucleotide
  Antisense strand to SEQ ID NO: 2252236
uucuaggguaacaagaccg

SEQ ID NO: 2252238 - RNA, 19 nt, Artificial Sequence
  Description of Artificial Sequence: Synthetic oligonucleotide
  Sense strand starting at position 3092 of SEQ ID NO: 1884259
gcaaguuccauuuggguua

SEQ ID NO: 2252239 - RNA, 19 nt, Artificial Sequence
  Description of Artificial Sequence: Synthetic oligonucleotide
  Antisense strand to SEQ ID NO: 2252238
uaacccaaauggaacuugc

SEQ ID NO: 2252240 - RNA, 19 nt, Artificial Sequence
  Description of Artificial Sequence: Synthetic oligonucleotide
  Sense strand starting at position 3140 of SEQ ID NO: 1884259
gauguaauuuaggaggagu

SEQ ID NO: 2252241 - RNA, 19 nt, Artificial Sequence
  Description of Artificial Sequence: Synthetic oligonucleotide
  Antisense strand to SEQ ID NO: 2252240
acuccuccuaaauuacauc

SEQ ID NO: 2252242 - RNA, 19 nt, Artificial Sequence
  Description of Artificial Sequence: Synthetic oligonucleotide
  Sense strand starting at position 3185 of SEQ ID NO: 1884259
cguuaauugguuuaucaga

SEQ ID NO: 2252243 - RNA, 19 nt, Artificial Sequence
  Description of Artificial Sequence: Synthetic oligonucleotide
  Antisense strand to SEQ ID NO: 2252242
ucugauaaaccaauuaacg

SEQ ID NO: 2252244 - RNA, 19 nt, Artificial Sequence
  Description of Artificial Sequence: Synthetic oligonucleotide
  Sense strand starting at position 3193 of SEQ ID NO: 1884259
gguuuaucagaauagccaa

SEQ ID NO: 2252245 - RNA, 19 nt, Artificial Sequence
  Description of Artificial Sequence: Synthetic oligonucleotide
  Antisense strand to SEQ ID NO: 2252244
uuggcuauucugauaaacc

SEQ ID NO: 2252246 - RNA, 19 nt, Artificial Sequence
  Description of Artificial Sequence: Synthetic oligonucleotide
  Sense strand starting at position 3240 of SEQ ID NO: 1884259
acgggaaauaggcaaguuu

SEQ ID NO: 2252247 - RNA, 19 nt, Artificial Sequence
  Description of Artificial Sequence: Synthetic oligonucleotide
  Antisense strand to SEQ ID NO: 2252246
aaacuugccuauuucccgu

SEQ ID NO: 2252248 - RNA, 19 nt, Artificial Sequence
  Description of Artificial Sequence: Synthetic oligonucleotide
  Sense strand starting at position 3356 of SEQ ID NO: 1884259
gcaaguacuuuagcuugaa

SEQ ID NO: 2252249 - RNA, 19 nt, Artificial Sequence
  Description of Artificial Sequence: Synthetic oligonucleotide
  Antisense strand to SEQ ID NO: 2252248
uucaagcuaaaguacuugc

SEQ ID NO: 2252250 - RNA, 19 nt, Artificial Sequence
  Description of Artificial Sequence: Synthetic oligonucleotide
  Sense strand starting at position 3359 of SEQ ID NO: 1884259
aguacuuuagcuugaaucu

SEQ ID NO: 2252251 - RNA, 19 nt, Artificial Sequence
  Description of Artificial Sequence: Synthetic oligonucleotide
  Antisense strand to SEQ ID NO: 2252250
agauucaagcuaaaguacu

SEQ ID NO: 2252252 - RNA, 19 nt, Artificial Sequence
  Description of Artificial Sequence: Synthetic oligonucleotide
  Sense strand starting at position 3360 of SEQ ID NO: 1884259
guacuuuagcuugaaucua

SEQ ID NO: 2252253 - RNA, 19 nt, Artificial Sequence
  Description of Artificial Sequence: Synthetic oligonucleotide
  Antisense strand to SEQ ID NO: 2252252
uagauucaagcuaaaguac

SEQ ID NO: 2252254 - RNA, 19 nt, Artificial Sequence
  Description of Artificial Sequence: Synthetic oligonucleotide
  Sense strand starting at position 3379 of SEQ ID NO: 1884259
gaauuuaaguugggacuaa

SEQ ID NO: 2252255 - RNA, 19 nt, Artificial Sequence
  Description of Artificial Sequence: Synthetic oligonucleotide
  Antisense strand to SEQ ID NO: 2252254
uuagucccaacuuaaauuc

SEQ ID NO: 2252256 - RNA, 19 nt, Artificial Sequence
  Description of Artificial Sequence: Synthetic oligonucleotide
  Sense strand starting at position 3408 of SEQ ID NO: 1884259
uucugaaauuuagaucguu

SEQ ID NO: 2252257 - RNA, 19 nt, Artificial Sequence
  Description of Artificial Sequence: Synthetic oligonucleotide
  Antisense strand to SEQ ID NO: 2252256
aacgaucuaaauuucagaa

SEQ ID NO: 2252258 - RNA, 19 nt, Artificial Sequence
  Description of Artificial Sequence: Synthetic oligonucleotide
  Sense strand starting at position 3566 of SEQ ID NO: 1884259
gaugaugacuguuucuaac

SEQ ID NO: 2252259 - RNA, 19 nt, Artificial Sequence
  Description of Artificial Sequence: Synthetic oligonucleotide
  Antisense strand to SEQ ID NO: 2252258
guuagaaacagucaucauc

SEQ ID NO: 2252260 - RNA, 19 nt, Artificial Sequence
  Description of Artificial Sequence: Synthetic oligonucleotide
  Sense strand starting at position 3568 of SEQ ID NO: 1884259
ugaugacuguuucuaacuu

SEQ ID NO: 2252261 - RNA, 19 nt, Artificial Sequence
  Description of Artificial Sequence: Synthetic oligonucleotide
  Antisense strand to SEQ ID NO: 2252260
aaguuagaaacagucauca

SEQ ID NO: 2252262 - RNA, 19 nt, Artificial Sequence
  Description of Artificial Sequence: Synthetic oligonucleotide
  Sense strand starting at position 3591 of SEQ ID NO: 1884259
ugagucaugcgugauugaa

SEQ ID NO: 2252263 - RNA, 19 nt, Artificial Sequence
  Description of Artificial Sequence: Synthetic oligonucleotide
  Antisense strand to SEQ ID NO: 2252262
uucaaucacgcaugacuca

SEQ ID NO: 2252264 - RNA, 19 nt, Artificial Sequence
  Description of Artificial Sequence: Synthetic oligonucleotide
  Sense strand starting at position 3809 of SEQ ID NO: 1884259
auuggagauuuguucgcuu

SEQ ID NO: 2252265 - RNA, 19 nt, Artificial Sequence
  Description of Artificial Sequence: Synthetic oligonucleotide
  Antisense strand to SEQ ID NO: 2252264
aagcgaacaaaucuccaau

SEQ ID NO: 2252266 - RNA, 19 nt, Artificial Sequence
  Description of Artificial Sequence: Synthetic oligonucleotide
  Sense strand starting at position 3811 of SEQ ID NO: 1884259
uggagauuuguucgcuuua

SEQ ID NO: 2252267 - RNA, 19 nt, Artificial Sequence
  Description of Artificial Sequence: Synthetic oligonucleotide
  Antisense strand to SEQ ID NO: 2252266
uaaagcgaacaaaucucca

SEQ ID NO: 2252268 - RNA, 19 nt, Artificial Sequence
  Description of Artificial Sequence: Synthetic oligonucleotide
  Sense strand starting at position 3812 of SEQ ID NO: 1884259
ggagauuuguucgcuuuaa

SEQ ID NO: 2252269 - RNA, 19 nt, Artificial Sequence
  Description of Artificial Sequence: Synthetic oligonucleotide
  Antisense strand to SEQ ID NO: 2252268
uuaaagcgaacaaaucucc

SEQ ID NO: 2252270 - RNA, 19 nt, Artificial Sequence
  Description of Artificial Sequence: Synthetic oligonucleotide
  Sense strand starting at position 3813 of SEQ ID NO: 1884259
gagauuuguucgcuuuaac

SEQ ID NO: 2252271 - RNA, 19 nt, Artificial Sequence
  Description of Artificial Sequence: Synthetic oligonucleotide
  Antisense strand to SEQ ID NO: 2252270
guuaaagcgaacaaaucuc

SEQ ID NO: 2252272 - RNA, 19 nt, Artificial Sequence
  Description of Artificial Sequence: Synthetic oligonucleotide
  Sense strand starting at position 3824 of SEQ ID NO: 1884259
gcuuuaaccuguuccagau

SEQ ID NO: 2252273 - RNA, 19 nt, Artificial Sequence
  Description of Artificial Sequence: Synthetic oligonucleotide
  Antisense strand to SEQ ID NO: 2252272
aucuggaacagguuaaagc

SEQ ID NO: 2252274 - RNA, 19 nt, Artificial Sequence
  Description of Artificial Sequence: Synthetic oligonucleotide
  Sense strand starting at position 3963 of SEQ ID NO: 1884259
acgguuugugggcaaugga

SEQ ID NO: 2252275 - RNA, 19 nt, Artificial Sequence
  Description of Artificial Sequence: Synthetic oligonucleotide
  Antisense strand to SEQ ID NO: 2252274
uccauugcccacaaaccgu

SEQ ID NO: 2252276 - RNA, 19 nt, Artificial Sequence
  Description of Artificial Sequence: Synthetic oligonucleotide
  Sense strand starting at position 3 of SEQ ID NO: 1884260
agaggagugcagugacaug

SEQ ID NO: 2252277 - RNA, 19 nt, Artificial Sequence
  Description of Artificial Sequence: Synthetic oligonucleotide
  Antisense strand to SEQ ID NO: 2252276
caugucacugcacuccucu

SEQ ID NO: 2252278 - RNA, 19 nt, Artificial Sequence
  Description of Artificial Sequence: Synthetic oligonucleotide
  Sense strand starting at position 678 of SEQ ID NO: 1884260
ugccuucugcacuaagaug

SEQ ID NO: 2252279 - RNA, 19 nt, Artificial Sequence
  Description of Artificial Sequence: Synthetic oligonucleotide
  Antisense strand to SEQ ID NO: 2252278
caucuuagugcagaaggca

SEQ ID NO: 2252280 - RNA, 19 nt, Artificial Sequence
  Description of Artificial Sequence: Synthetic oligonucleotide
  Sense strand starting at position 722 of SEQ ID NO: 1884260
gugagagauacgcaacuuu

SEQ ID NO: 2252281 - RNA, 19 nt, Artificial Sequence
  Description of Artificial Sequence: Synthetic oligonucleotide
  Antisense strand to SEQ ID NO: 2252280
aaaguugcguaucucucac

SEQ ID NO: 2252282 - RNA, 19 nt, Artificial Sequence
  Description of Artificial Sequence: Synthetic oligonucleotide
  Sense strand starting at position 768 of SEQ ID NO: 1884260
auugcagaguucuuaauug

SEQ ID NO: 2252283 - RNA, 19 nt, Artificial Sequence
  Description of Artificial Sequence: Synthetic oligonucleotide
  Antisense strand to SEQ ID NO: 2252282
caauuaagaacucugcaau

SEQ ID NO: 2252284 - RNA, 19 nt, Artificial Sequence
  Description of Artificial Sequence: Synthetic oligonucleotide
  Sense strand starting at position 775 of SEQ ID NO: 1884260
aguucuuaauuggccuaau

SEQ ID NO: 2252285 - RNA, 19 nt, Artificial Sequence
  Description of Artificial Sequence: Synthetic oligonucleotide
  Antisense strand to SEQ ID NO: 2252284
auuaggccaauuaagaacu

SEQ ID NO: 2252286 - RNA, 19 nt, Artificial Sequence
  Description of Artificial Sequence: Synthetic oligonucleotide
  Sense strand starting at position 986 of SEQ ID NO: 1884260
gcagauuuaugggaagaaa

SEQ ID NO: 2252287 - RNA, 19 nt, Artificial Sequence
  Description of Artificial Sequence: Synthetic oligonucleotide
  Antisense strand to SEQ ID NO: 2252286
uuucuucccauaaaucugc

SEQ ID NO: 2252288 - RNA, 19 nt, Artificial Sequence
  Description of Artificial Sequence: Synthetic oligonucleotide
  Sense strand starting at position 1138 of SEQ ID NO: 1884260
acuguagugagucaacauu

SEQ ID NO: 2252289 - RNA, 19 nt, Artificial Sequence
  Description of Artificial Sequence: Synthetic oligonucleotide
  Antisense strand to SEQ ID NO: 2252288
aauguugacucacuacagu

SEQ ID NO: 2252290 - RNA, 19 nt, Artificial Sequence
  Description of Artificial Sequence: Synthetic oligonucleotide
  Sense strand starting at position 1228 of SEQ ID NO: 1884260
ggcaaaggucaacauguau

SEQ ID NO: 2252291 - RNA, 19 nt, Artificial Sequence
  Description of Artificial Sequence: Synthetic oligonucleotide
  Antisense strand to SEQ ID NO: 2252290
auacauguugaccuuugcc

SEQ ID NO: 2252292 - RNA, 19 nt, Artificial Sequence
  Description of Artificial Sequence: Synthetic oligonucleotide
  Sense strand starting at position 1338 of SEQ ID NO: 1884260
ccaguaucuuaagcaugaa

SEQ ID NO: 2252293 - RNA, 19 nt, Artificial Sequence
  Description of Artificial Sequence: Synthetic oligonucleotide
  Antisense strand to SEQ ID NO: 2252292
uucaugcuuaagauacugg

SEQ ID NO: 2252294 - RNA, 19 nt, Artificial Sequence
  Description of Artificial Sequence: Synthetic oligonucleotide
  Sense strand starting at position 1377 of SEQ ID NO: 1884260
uuuguuuguuggucaaaga

SEQ ID NO: 2252295 - RNA, 19 nt, Artificial Sequence
  Description of Artificial Sequence: Synthetic oligonucleotide
  Antisense strand to SEQ ID NO: 2252294
ucuuugaccaacaaacaaa

SEQ ID NO: 2252296 - RNA, 19 nt, Artificial Sequence
  Description of Artificial Sequence: Synthetic oligonucleotide
  Sense strand starting at position 1378 of SEQ ID NO: 1884260
uuguuuguuggucaaagaa

SEQ ID NO: 2252297 - RNA, 19 nt, Artificial Sequence
  Description of Artificial Sequence: Synthetic oligonucleotide
  Antisense strand to SEQ ID NO: 2252296
uucuuugaccaacaaacaa

SEQ ID NO: 2252298 - RNA, 19 nt, Artificial Sequence
  Description of Artificial Sequence: Synthetic oligonucleotide
  Sense strand starting at position 1432 of SEQ ID NO: 1884260
guaugcucaguguauccaa

SEQ ID NO: 2252299 - RNA, 19 nt, Artificial Sequence
  Description of Artificial Sequence: Synthetic oligonucleotide
  Antisense strand to SEQ ID NO: 2252298
uuggauacacugagcauac

SEQ ID NO: 2252300 - RNA, 19 nt, Artificial Sequence
  Description of Artificial Sequence: Synthetic oligonucleotide
  Sense strand starting at position 1456 of SEQ ID NO: 1884260
aggcaugucagguacaaua

SEQ ID NO: 2252301 - RNA, 19 nt, Artificial Sequence
  Description of Artificial Sequence: Synthetic oligonucleotide
  Antisense strand to SEQ ID NO: 2252300
uauuguaccugacaugccu

SEQ ID NO: 2252302 - RNA, 19 nt, Artificial Sequence
  Description of Artificial Sequence: Synthetic oligonucleotide
  Sense strand starting at position 1458 of SEQ ID NO: 1884260
gcaugucagguacaauauu

SEQ ID NO: 2252303 - RNA, 19 nt, Artificial Sequence
  Description of Artificial Sequence: Synthetic oligonucleotide
  Antisense strand to SEQ ID NO: 2252302
aauauuguaccugacaugc

SEQ ID NO: 2252304 - RNA, 19 nt, Artificial Sequence
  Description of Artificial Sequence: Synthetic oligonucleotide
  Sense strand starting at position 1528 of SEQ ID NO: 1884260
aagaguaauugaucagagc

SEQ ID NO: 2252305 - RNA, 19 nt, Artificial Sequence
  Description of Artificial Sequence: Synthetic oligonucleotide
  Antisense strand to SEQ ID NO: 2252304
gcucugaucaauuacucuu

SEQ ID NO: 2252306 - RNA, 19 nt, Artificial Sequence
  Description of Artificial Sequence: Synthetic oligonucleotide
  Sense strand starting at position 1562 of SEQ ID NO: 1884260
agucaacuuccaugacugu

SEQ ID NO: 2252307 - RNA, 19 nt, Artificial Sequence
  Description of Artificial Sequence: Synthetic oligonucleotide
  Antisense strand to SEQ ID NO: 2252306
acagucauggaaguugacu

SEQ ID NO: 2252308 - RNA, 19 nt, Artificial Sequence
  Description of Artificial Sequence: Synthetic oligonucleotide
  Sense strand starting at position 1563 of SEQ ID NO: 1884260
gucaacuuccaugacuguu

SEQ ID NO: 2252309 - RNA, 19 nt, Artificial Sequence
  Description of Artificial Sequence: Synthetic oligonucleotide
  Antisense strand to SEQ ID NO: 2252308
aacagucauggaaguugac

SEQ ID NO: 2252310 - RNA, 19 nt, Artificial Sequence
  Description of Artificial Sequence: Synthetic oligonucleotide
  Sense strand starting at position 1569 of SEQ ID NO: 1884260
uuccaugacuguucggauu

SEQ ID NO: 2252311 - RNA, 19 nt, Artificial Sequence
  Description of Artificial Sequence: Synthetic oligonucleotide
  Antisense strand to SEQ ID NO: 2252310
aauccgaacagucauggaa

SEQ ID NO: 2252312 - RNA, 19 nt, Artificial Sequence
  Description of Artificial Sequence: Synthetic oligonucleotide
  Sense strand starting at position 1770 of SEQ ID NO: 1884260
acggacaauuuccacagua

SEQ ID NO: 2252313 - RNA, 19 nt, Artificial Sequence
  Description of Artificial Sequence: Synthetic oligonucleotide
  Antisense strand to SEQ ID NO: 2252312
uacuguggaaauuguccgu

SEQ ID NO: 2252314 - RNA, 19 nt, Artificial Sequence
  Description of Artificial Sequence: Synthetic oligonucleotide
  Sense strand starting at position 2997 of SEQ ID NO: 1884260
gcaaguuccauuuggguua

SEQ ID NO: 2252315 - RNA, 19 nt, Artificial Sequence
  Description of Artificial Sequence: Synthetic oligonucleotide
  Antisense strand to SEQ ID NO: 2252314
uaacccaaauggaacuugc

SEQ ID NO: 2252316 - RNA, 19 nt, Artificial Sequence
  Description of Artificial Sequence: Synthetic oligonucleotide
  Sense strand starting at position 3045 of SEQ ID NO: 1884260
gauguaauuuaggaggagu

SEQ ID NO: 2252317 - RNA, 19 nt, Artificial Sequence
  Description of Artificial Sequence: Synthetic oligonucleotide
  Antisense strand to SEQ ID NO: 2252316
acuccuccuaaauuacauc

SEQ ID NO: 2252318 - RNA, 19 nt, Artificial Sequence
  Description of Artificial Sequence: Synthetic oligonucleotide
  Sense strand starting at position 3090 of SEQ ID NO: 1884260
cguuaauugguuuaucaga

SEQ ID NO: 2252319 - RNA, 19 nt, Artificial Sequence
  Description of Artificial Sequence: Synthetic oligonucleotide
  Antisense strand to SEQ ID NO: 2252318
ucugauaaaccaauuaacg

SEQ ID NO: 2252320 - RNA, 19 nt, Artificial Sequence
  Description of Artificial Sequence: Synthetic oligonucleotide
  Sense strand starting at position 3098 of SEQ ID NO: 1884260
gguuuaucagaauagccaa

SEQ ID NO: 2252321 - RNA, 19 nt, Artificial Sequence
  Description of Artificial Sequence: Synthetic oligonucleotide
  Antisense strand to SEQ ID NO: 2252320
uuggcuauucugauaaacc

SEQ ID NO: 2252322 - RNA, 19 nt, Artificial Sequence
  Description of Artificial Sequence: Synthetic oligonucleotide
  Sense strand starting at position 3145 of SEQ ID NO: 1884260
acgggaaauaggcaaguuu

SEQ ID NO: 2252323 - RNA, 19 nt, Artificial Sequence
  Description of Artificial Sequence: Synthetic oligonucleotide
  Antisense strand to SEQ ID NO: 2252322
aaacuugccuauuucccgu

SEQ ID NO: 2252324 - RNA, 19 nt, Artificial Sequence
  Description of Artificial Sequence: Synthetic oligonucleotide
  Sense strand starting at position 3261 of SEQ ID NO: 1884260
gcaaguacuuuagcuugaa

SEQ ID NO: 2252325 - RNA, 19 nt, Artificial Sequence
  Description of Artificial Sequence: Synthetic oligonucleotide
  Antisense strand to SEQ ID NO: 2252324
uucaagcuaaaguacuugc

SEQ ID NO: 2252326 - RNA, 19 nt, Artificial Sequence
  Description of Artificial Sequence: Synthetic oligonucleotide
  Sense strand starting at position 3264 of SEQ ID NO: 1884260
aguacuuuagcuugaaucu

SEQ ID NO: 2252327 - RNA, 19 nt, Artificial Sequence
  Description of Artificial Sequence: Synthetic oligonucleotide
  Antisense strand to SEQ ID NO: 2252326
agauucaagcuaaaguacu

SEQ ID NO: 2252328 - RNA, 19 nt, Artificial Sequence
  Description of Artificial Sequence: Synthetic oligonucleotide
  Sense strand starting at position 3265 of SEQ ID NO: 1884260
guacuuuagcuugaaucua

SEQ ID NO: 2252329 - RNA, 19 nt, Artificial Sequence
  Description of Artificial Sequence: Synthetic oligonucleotide
  Antisense strand to SEQ ID NO: 2252328
uagauucaagcuaaaguac

SEQ ID NO: 2252330 - RNA, 19 nt, Artificial Sequence
  Description of Artificial Sequence: Synthetic oligonucleotide
  Sense strand starting at position 3284 of SEQ ID NO: 1884260
gaauuuaaguugggacuaa

SEQ ID NO: 2252331 - RNA, 19 nt, Artificial Sequence
  Description of Artificial Sequence: Synthetic oligonucleotide
  Antisense strand to SEQ ID NO: 2252330
uuagucccaacuuaaauuc

SEQ ID NO: 2252332 - RNA, 19 nt, Artificial Sequence
  Description of Artificial Sequence: Synthetic oligonucleotide
  Sense strand starting at position 3471 of SEQ ID NO: 1884260
gaugaugacuguuucuaac

SEQ ID NO: 2252333 - RNA, 19 nt, Artificial Sequence
  Description of Artificial Sequence: Synthetic oligonucleotide
  Antisense strand to SEQ ID NO: 2252332
guuagaaacagucaucauc

SEQ ID NO: 2252334 - RNA, 19 nt, Artificial Sequence
  Description of Artificial Sequence: Synthetic oligonucleotide
  Sense strand starting at position 3473 of SEQ ID NO: 1884260
ugaugacuguuucuaacuu

SEQ ID NO: 2252335 - RNA, 19 nt, Artificial Sequence
  Description of Artificial Sequence: Synthetic oligonucleotide
  Antisense strand to SEQ ID NO: 2252334
aaguuagaaacagucauca

SEQ ID NO: 2252336 - RNA, 19 nt, Artificial Sequence
  Description of Artificial Sequence: Synthetic oligonucleotide
  Sense strand starting at position 3496 of SEQ ID NO: 1884260
ugagucaugcgugauugaa

SEQ ID NO: 2252337 - RNA, 19 nt, Artificial Sequence
  Description of Artificial Sequence: Synthetic oligonucleotide
  Antisense strand to SEQ ID NO: 2252336
uucaaucacgcaugacuca

SEQ ID NO: 2252338 - RNA, 19 nt, Artificial Sequence
  Description of Artificial Sequence: Synthetic oligonucleotide
  Sense strand starting at position 3714 of SEQ ID NO: 1884260
auuggagauuuguucgcuu

SEQ ID NO: 2252339 - RNA, 19 nt, Artificial Sequence
  Description of Artificial Sequence: Synthetic oligonucleotide
  Antisense strand to SEQ ID NO: 2252338
aagcgaacaaaucuccaau

SEQ ID NO: 2252340 - RNA, 19 nt, Artificial Sequence
  Description of Artificial Sequence: Synthetic oligonucleotide
  Sense strand starting at position 3716 of SEQ ID NO: 1884260
uggagauuuguucgcuuua

SEQ ID NO: 2252341 - RNA, 19 nt, Artificial Sequence
  Description of Artificial Sequence: Synthetic oligonucleotide
  Antisense strand to SEQ ID NO: 2252340
uaaagcgaacaaaucucca

SEQ ID NO: 2252342 - RNA, 19 nt, Artificial Sequence
  Description of Artificial Sequence: Synthetic oligonucleotide
  Sense strand starting at position 3717 of SEQ ID NO: 1884260
ggagauuuguucgcuuuaa

SEQ ID NO: 2252343 - RNA, 19 nt, Artificial Sequence
  Description of Artificial Sequence: Synthetic oligonucleotide
  Antisense strand to SEQ ID NO: 2252342
uuaaagcgaacaaaucucc

SEQ ID NO: 2252344 - RNA, 19 nt, Artificial Sequence
  Description of Artificial Sequence: Synthetic oligonucleotide
  Sense strand starting at position 3718 of SEQ ID NO: 1884260
gagauuuguucgcuuuaac

SEQ ID NO: 2252345 - RNA, 19 nt, Artificial Sequence
  Description of Artificial Sequence: Synthetic oligonucleotide
  Antisense strand to SEQ ID NO: 2252344
guuaaagcgaacaaaucuc

SEQ ID NO: 2252346 - RNA, 19 nt, Artificial Sequence
  Description of Artificial Sequence: Synthetic oligonucleotide
  Sense strand starting at position 3729 of SEQ ID NO: 1884260
gcuuuaaccuguuccagau

SEQ ID NO: 2252347 - RNA, 19 nt, Artificial Sequence
  Description of Artificial Sequence: Synthetic oligonucleotide
  Antisense strand to SEQ ID NO: 2252346
aucuggaacagguuaaagc

SEQ ID NO: 2252348 - RNA, 19 nt, Artificial Sequence
  Description of Artificial Sequence: Synthetic oligonucleotide
  Sense strand starting at position 3868 of SEQ ID NO: 1884260
acgguuugugggcaaugga

SEQ ID NO: 2252349 - RNA, 19 nt, Artificial Sequence
  Description of Artificial Sequence: Synthetic oligonucleotide
  Antisense strand to SEQ ID NO: 2252348
uccauugcccacaaaccgu

SEQ ID NO: 2252350 - RNA, 19 nt, Artificial Sequence
  Description of Artificial Sequence: Synthetic oligonucleotide
  Sense strand starting at position 3935 of SEQ ID NO: 1884260
cccgaaauuucggugguaa

SEQ ID NO: 2252351 - RNA, 19 nt, Artificial Sequence
  Description of Artificial Sequence: Synthetic oligonucleotide
  Antisense strand to SEQ ID NO: 2252350
uuaccaccgaaauuucggg

SEQ ID NO: 2252352 - RNA, 19 nt, Artificial Sequence
  Description of Artificial Sequence: Synthetic oligonucleotide
  Sense strand starting at position 3936 of SEQ ID NO: 1884260
ccgaaauuucggugguaag

SEQ ID NO: 2252353 - RNA, 19 nt, Artificial Sequence
  Description of Artificial Sequence: Synthetic oligonucleotide
  Antisense strand to SEQ ID NO: 2252352
cuuaccaccgaaauuucgg

SEQ ID NO: 2252354 - RNA, 19 nt, Artificial Sequence
  Description of Artificial Sequence: Synthetic oligonucleotide
  Sense strand starting at position 3937 of SEQ ID NO: 1884260
cgaaauuucggugguaagu

SEQ ID NO: 2252355 - RNA, 19 nt, Artificial Sequence
  Description of Artificial Sequence: Synthetic oligonucleotide
  Antisense strand to SEQ ID NO: 2252354
acuuaccaccgaaauuucg

SEQ ID NO: 2252356 - RNA, 19 nt, Artificial Sequence
  Description of Artificial Sequence: Synthetic oligonucleotide
  Sense strand starting at position 20 of SEQ ID NO: 1884261
ugcauagacggucagacuu

SEQ ID NO: 2252357 - RNA, 19 nt, Artificial Sequence
  Description of Artificial Sequence: Synthetic oligonucleotide
  Antisense strand to SEQ ID NO: 2252356
aagucugaccgucuaugca

SEQ ID NO: 2252358 - RNA, 19 nt, Artificial Sequence
  Description of Artificial Sequence: Synthetic oligonucleotide
  Sense strand starting at position 28 of SEQ ID NO: 1884261
cggucagacuuauuaagca

SEQ ID NO: 2252359 - RNA, 19 nt, Artificial Sequence
  Description of Artificial Sequence: Synthetic oligonucleotide
  Antisense strand to SEQ ID NO: 2252358
ugcuuaauaagucugaccg

SEQ ID NO: 2252360 - RNA, 19 nt, Artificial Sequence
  Description of Artificial Sequence: Synthetic oligonucleotide
  Sense strand starting at position 388 of SEQ ID NO: 1884261
cgcauaugaacuugaugac

SEQ ID NO: 2252361 - RNA, 19 nt, Artificial Sequence
  Description of Artificial Sequence: Synthetic oligonucleotide
  Antisense strand to SEQ ID NO: 2252360
gucaucaaguucauaugcg

SEQ ID NO: 2252362 - RNA, 19 nt, Artificial Sequence
  Description of Artificial Sequence: Synthetic oligonucleotide
  Sense strand starting at position 400 of SEQ ID NO: 1884261
ugaugacaaagcuguugau

SEQ ID NO: 2252363 - RNA, 19 nt, Artificial Sequence
  Description of Artificial Sequence: Synthetic oligonucleotide
  Antisense strand to SEQ ID NO: 2252362
aucaacagcuuugucauca

SEQ ID NO: 2252364 - RNA, 19 nt, Artificial Sequence
  Description of Artificial Sequence: Synthetic oligonucleotide
  Sense strand starting at position 404 of SEQ ID NO: 1884261
gacaaagcuguugauuaac

SEQ ID NO: 2252365 - RNA, 19 nt, Artificial Sequence
  Description of Artificial Sequence: Synthetic oligonucleotide
  Antisense strand to SEQ ID NO: 2252364
guuaaucaacagcuuuguc

SEQ ID NO: 2252366 - RNA, 19 nt, Artificial Sequence
  Description of Artificial Sequence: Synthetic oligonucleotide
  Sense strand starting at position 434 of SEQ ID NO: 1884261
uagagugcacucugggaaa

SEQ ID NO: 2252367 - RNA, 19 nt, Artificial Sequence
  Description of Artificial Sequence: Synthetic oligonucleotide
  Antisense strand to SEQ ID NO: 2252366
uuucccagagugcacucua

SEQ ID NO: 2252368 - RNA, 19 nt, Artificial Sequence
  Description of Artificial Sequence: Synthetic oligonucleotide
  Sense strand starting at position 436 of SEQ ID NO: 1884261
gagugcacucugggaaaua

SEQ ID NO: 2252369 - RNA, 19 nt, Artificial Sequence
  Description of Artificial Sequence: Synthetic oligonucleotide
  Antisense strand to SEQ ID NO: 2252368
uauuucccagagugcacuc

SEQ ID NO: 2252370 - RNA, 19 nt, Artificial Sequence
  Description of Artificial Sequence: Synthetic oligonucleotide
  Sense strand starting at position 447 of SEQ ID NO: 1884261
gggaaauacuuccaggaac

SEQ ID NO: 2252371 - RNA, 19 nt, Artificial Sequence
  Description of Artificial Sequence: Synthetic oligonucleotide
  Antisense strand to SEQ ID NO: 2252370
guuccuggaaguauuuccc

SEQ ID NO: 2252372 - RNA, 19 nt, Artificial Sequence
  Description of Artificial Sequence: Synthetic oligonucleotide
  Sense strand starting at position 739 of SEQ ID NO: 1884261
guagguaugagcuaccaug

SEQ ID NO: 2252373 - RNA, 19 nt, Artificial Sequence
  Description of Artificial Sequence: Synthetic oligonucleotide
  Antisense strand to SEQ ID NO: 2252372
caugguagcucauaccuac

SEQ ID NO: 2252374 - RNA, 19 nt, Artificial Sequence
  Description of Artificial Sequence: Synthetic oligonucleotide
  Sense strand starting at position 877 of SEQ ID NO: 1884261
aguaguaauuugcucuuua

SEQ ID NO: 2252375 - RNA, 19 nt, Artificial Sequence
  Description of Artificial Sequence: Synthetic oligonucleotide
  Antisense strand to SEQ ID NO: 2252374
uaaagagcaaauuacuacu

SEQ ID NO: 2252376 - RNA, 19 nt, Artificial Sequence
  Description of Artificial Sequence: Synthetic oligonucleotide
  Sense strand starting at position 878 of SEQ ID NO: 1884261
guaguaauuugcucuuuaa

SEQ ID NO: 2252377 - RNA, 19 nt, Artificial Sequence
  Description of Artificial Sequence: Synthetic oligonucleotide
  Antisense strand to SEQ ID NO: 2252376
uuaaagagcaaauuacuac

SEQ ID NO: 2252378 - RNA, 19 nt, Artificial Sequence
  Description of Artificial Sequence: Synthetic oligonucleotide
  Sense strand starting at position 942 of SEQ ID NO: 1884261
aagacuuacguguaaagua

SEQ ID NO: 2252379 - RNA, 19 nt, Artificial Sequence
  Description of Artificial Sequence: Synthetic oligonucleotide
  Antisense strand to SEQ ID NO: 2252378
uacuuuacacguaagucuu

SEQ ID NO: 2252380 - RNA, 19 nt, Artificial Sequence
  Description of Artificial Sequence: Synthetic oligonucleotide
  Sense strand starting at position 947 of SEQ ID NO: 1884261
uuacguguaaaguaauugu

SEQ ID NO: 2252381 - RNA, 19 nt, Artificial Sequence
  Description of Artificial Sequence: Synthetic oligonucleotide
  Antisense strand to SEQ ID NO: 2252380
acaauuacuuuacacguaa

SEQ ID NO: 2252382 - RNA, 19 nt, Artificial Sequence
  Description of Artificial Sequence: Synthetic oligonucleotide
  Sense strand starting at position 965 of SEQ ID NO: 1884261
ucuccuuuccgagggauca

SEQ ID NO: 2252383 - RNA, 19 nt, Artificial Sequence
  Description of Artificial Sequence: Synthetic oligonucleotide
  Antisense strand to SEQ ID NO: 2252382
ugaucccucggaaaggaga

SEQ ID NO: 2252384 - RNA, 19 nt, Artificial Sequence
  Description of Artificial Sequence: Synthetic oligonucleotide
  Sense strand starting at position 966 of SEQ ID NO: 1884261
cuccuuuccgagggaucau

SEQ ID NO: 2252385 - RNA, 19 nt, Artificial Sequence
  Description of Artificial Sequence: Synthetic oligonucleotide
  Antisense strand to SEQ ID NO: 2252384
augaucccucggaaaggag

SEQ ID NO: 2252386 - RNA, 19 nt, Artificial Sequence
  Description of Artificial Sequence: Synthetic oligonucleotide
  Sense strand starting at position 967 of SEQ ID NO: 1884261
uccuuuccgagggaucauu

SEQ ID NO: 2252387 - RNA, 19 nt, Artificial Sequence
  Description of Artificial Sequence: Synthetic oligonucleotide
  Antisense strand to SEQ ID NO: 2252386
aaugaucccucggaaagga

SEQ ID NO: 2252388 - RNA, 19 nt, Artificial Sequence
  Description of Artificial Sequence: Synthetic oligonucleotide
  Sense strand starting at position 1000 of SEQ ID NO: 1884261
cgugcaaugcuggauuaag

SEQ ID NO: 2252389 - RNA, 19 nt, Artificial Sequence
  Description of Artificial Sequence: Synthetic oligonucleotide
  Antisense strand to SEQ ID NO: 2252388
cuuaauccagcauugcacg

SEQ ID NO: 2252390 - RNA, 19 nt, Artificial Sequence
  Description of Artificial Sequence: Synthetic oligonucleotide
  Sense strand starting at position 1008 of SEQ ID NO: 1884261
gcuggauuaagacauucgu

SEQ ID NO: 2252391 - RNA, 19 nt, Artificial Sequence
  Description of Artificial Sequence: Synthetic oligonucleotide
  Antisense strand to SEQ ID NO: 2252390
acgaaugucuuaauccagc

SEQ ID NO: 2252392 - RNA, 19 nt, Artificial Sequence
  Description of Artificial Sequence: Synthetic oligonucleotide
  Sense strand starting at position 1053 of SEQ ID NO: 1884261
ucugguuaacuuuagcaaa

SEQ ID NO: 2252393 - RNA, 19 nt, Artificial Sequence
  Description of Artificial Sequence: Synthetic oligonucleotide
  Antisense strand to SEQ ID NO: 2252392
uuugcuaaaguuaaccaga

SEQ ID NO: 2252394 - RNA, 19 nt, Artificial Sequence
  Description of Artificial Sequence: Synthetic oligonucleotide
  Sense strand starting at position 1055 of SEQ ID NO: 1884261
ugguuaacuuuagcaaauu

SEQ ID NO: 2252395 - RNA, 19 nt, Artificial Sequence
  Description of Artificial Sequence: Synthetic oligonucleotide
  Antisense strand to SEQ ID NO: 2252394
aauuugcuaaaguuaacca

SEQ ID NO: 2252396 - RNA, 19 nt, Artificial Sequence
  Description of Artificial Sequence: Synthetic oligonucleotide
  Sense strand starting at position 1135 of SEQ ID NO: 1884261
aaaguaugauuguuacagu

SEQ ID NO: 2252397 - RNA, 19 nt, Artificial Sequence
  Description of Artificial Sequence: Synthetic oligonucleotide
  Antisense strand to SEQ ID NO: 2252396
acuguaacaaucauacuuu

SEQ ID NO: 2252398 - RNA, 19 nt, Artificial Sequence
  Description of Artificial Sequence: Synthetic oligonucleotide
  Sense strand starting at position 1184 of SEQ ID NO: 1884261
aaacaauggccuugcugua

SEQ ID NO: 2252399 - RNA, 19 nt, Artificial Sequence
  Description of Artificial Sequence: Synthetic oligonucleotide
  Antisense strand to SEQ ID NO: 2252398
uacagcaaggccauuguuu

SEQ ID NO: 2252400 - RNA, 19 nt, Artificial Sequence
  Description of Artificial Sequence: Synthetic oligonucleotide
  Sense strand starting at position 1189 of SEQ ID NO: 1884261
auggccuugcuguaaucau

SEQ ID NO: 2252401 - RNA, 19 nt, Artificial Sequence
  Description of Artificial Sequence: Synthetic oligonucleotide
  Antisense strand to SEQ ID NO: 2252400
augauuacagcaaggccau

SEQ ID NO: 2252402 - RNA, 19 nt, Artificial Sequence
  Description of Artificial Sequence: Synthetic oligonucleotide
  Sense strand starting at position 1498 of SEQ ID NO: 1884261
gacauaggucagugucuga

SEQ ID NO: 2252403 - RNA, 19 nt, Artificial Sequence
  Description of Artificial Sequence: Synthetic oligonucleotide
  Antisense strand to SEQ ID NO: 2252402
ucagacacugaccuauguc

SEQ ID NO: 2252404 - RNA, 19 nt, Artificial Sequence
  Description of Artificial Sequence: Synthetic oligonucleotide
  Sense strand starting at position 1607 of SEQ ID NO: 1884261
aagguaacgcuggguaaga

SEQ ID NO: 2252405 - RNA, 19 nt, Artificial Sequence
  Description of Artificial Sequence: Synthetic oligonucleotide
  Antisense strand to SEQ ID NO: 2252404
ucuuacccagcguuaccuu

SEQ ID NO: 2252406 - RNA, 19 nt, Artificial Sequence
  Description of Artificial Sequence: Synthetic oligonucleotide
  Sense strand starting at position 1608 of SEQ ID NO: 1884261
agguaacgcuggguaagaa

SEQ ID NO: 2252407 - RNA, 19 nt, Artificial Sequence
  Description of Artificial Sequence: Synthetic oligonucleotide
  Antisense strand to SEQ ID NO: 2252406
uucuuacccagcguuaccu

SEQ ID NO: 2252408 - RNA, 19 nt, Artificial Sequence
  Description of Artificial Sequence: Synthetic oligonucleotide
  Sense strand starting at position 1609 of SEQ ID NO: 1884261
gguaacgcuggguaagaaa

SEQ ID NO: 2252409 - RNA, 19 nt, Artificial Sequence
  Description of Artificial Sequence: Synthetic oligonucleotide
  Antisense strand to SEQ ID NO: 2252408
uuucuuacccagcguuacc

SEQ ID NO: 2252410 - RNA, 19 nt, Artificial Sequence
  Description of Artificial Sequence: Synthetic oligonucleotide
  Sense strand starting at position 1628 of SEQ ID NO: 1884261
aucggcuuccgccagagaa

SEQ ID NO: 2252411 - RNA, 19 nt, Artificial Sequence
  Description of Artificial Sequence: Synthetic oligonucleotide
  Antisense strand to SEQ ID NO: 2252410
uucucuggcggaagccgau

SEQ ID NO: 2252412 - RNA, 19 nt, Artificial Sequence
  Description of Artificial Sequence: Synthetic oligonucleotide
  Sense strand starting at position 1630 of SEQ ID NO: 1884261
cggcuuccgccagagaaga

SEQ ID NO: 2252413 - RNA, 19 nt, Artificial Sequence
  Description of Artificial Sequence: Synthetic oligonucleotide
  Antisense strand to SEQ ID NO: 2252412
ucuucucuggcggaagccg

SEQ ID NO: 2252414 - RNA, 19 nt, Artificial Sequence
  Description of Artificial Sequence: Synthetic oligonucleotide
  Sense strand starting at position 1664 of SEQ ID NO: 1884261
agguccugugaauaacuua

SEQ ID NO: 2252415 - RNA, 19 nt, Artificial Sequence
  Description of Artificial Sequence: Synthetic oligonucleotide
  Antisense strand to SEQ ID NO: 2252414
uaaguuauucacaggaccu

SEQ ID NO: 2252416 - RNA, 19 nt, Artificial Sequence
  Description of Artificial Sequence: Synthetic oligonucleotide
  Sense strand starting at position 1749 of SEQ ID NO: 1884261
cucauugucugagugggau

SEQ ID NO: 2252417 - RNA, 19 nt, Artificial Sequence
  Description of Artificial Sequence: Synthetic oligonucleotide
  Antisense strand to SEQ ID NO: 2252416
aucccacucagacaaugag

SEQ ID NO: 2252418 - RNA, 19 nt, Artificial Sequence
  Description of Artificial Sequence: Synthetic oligonucleotide
  Sense strand starting at position 1769 of SEQ ID NO: 1884261
gaaagagucucacuugcag

SEQ ID NO: 2252419 - RNA, 19 nt, Artificial Sequence
  Description of Artificial Sequence: Synthetic oligonucleotide
  Antisense strand to SEQ ID NO: 2252418
cugcaagugagacucuuuc

SEQ ID NO: 2252420 - RNA, 19 nt, Artificial Sequence
  Description of Artificial Sequence: Synthetic oligonucleotide
  Sense strand starting at position 2095 of SEQ ID NO: 1884261
cuuacagaugccuggacuu

SEQ ID NO: 2252421 - RNA, 19 nt, Artificial Sequence
  Description of Artificial Sequence: Synthetic oligonucleotide
  Antisense strand to SEQ ID NO: 2252420
aaguccaggcaucuguaag

SEQ ID NO: 2252422 - RNA, 19 nt, Artificial Sequence
  Description of Artificial Sequence: Synthetic oligonucleotide
  Sense strand starting at position 2226 of SEQ ID NO: 1884261
ggaguucuucccagcgggu

SEQ ID NO: 2252423 - RNA, 19 nt, Artificial Sequence
  Description of Artificial Sequence: Synthetic oligonucleotide
  Antisense strand to SEQ ID NO: 2252422
acccgcugggaagaacucc

SEQ ID NO: 2252424 - RNA, 19 nt, Artificial Sequence
  Description of Artificial Sequence: Synthetic oligonucleotide
  Sense strand starting at position 2820 of SEQ ID NO: 1884261
acugauggucuugagucuu

SEQ ID NO: 2252425 - RNA, 19 nt, Artificial Sequence
  Description of Artificial Sequence: Synthetic oligonucleotide
  Antisense strand to SEQ ID NO: 2252424
aagacucaagaccaucagu

SEQ ID NO: 2252426 - RNA, 19 nt, Artificial Sequence
  Description of Artificial Sequence: Synthetic oligonucleotide
  Sense strand starting at position 2868 of SEQ ID NO: 1884261
guuauuguuacccaugggu

SEQ ID NO: 2252427 - RNA, 19 nt, Artificial Sequence
  Description of Artificial Sequence: Synthetic oligonucleotide
  Antisense strand to SEQ ID NO: 2252426
acccauggguaacaauaac

SEQ ID NO: 2252428 - RNA, 19 nt, Artificial Sequence
  Description of Artificial Sequence: Synthetic oligonucleotide
  Sense strand starting at position 2870 of SEQ ID NO: 1884261
uauuguuacccauggguau

SEQ ID NO: 2252429 - RNA, 19 nt, Artificial Sequence
  Description of Artificial Sequence: Synthetic oligonucleotide
  Antisense strand to SEQ ID NO: 2252428
auacccauggguaacaaua

SEQ ID NO: 2252430 - RNA, 19 nt, Artificial Sequence
  Description of Artificial Sequence: Synthetic oligonucleotide
  Sense strand starting at position 2871 of SEQ ID NO: 1884261
auuguuacccauggguauu

SEQ ID NO: 2252431 - RNA, 19 nt, Artificial Sequence
  Description of Artificial Sequence: Synthetic oligonucleotide
  Antisense strand to SEQ ID NO: 2252430
aauacccauggguaacaau

SEQ ID NO: 2252432 - RNA, 19 nt, Artificial Sequence
  Description of Artificial Sequence: Synthetic oligonucleotide
  Sense strand starting at position 2911 of SEQ ID NO: 1884261
caggaagauuuauaaaguc

SEQ ID NO: 2252433 - RNA, 19 nt, Artificial Sequence
  Description of Artificial Sequence: Synthetic oligonucleotide
  Antisense strand to SEQ ID NO: 2252432
gacuuuauaaaucuuccug

SEQ ID NO: 2252434 - RNA, 19 nt, Artificial Sequence
  Description of Artificial Sequence: Synthetic oligonucleotide
  Sense strand starting at position 3261 of SEQ ID NO: 1884261
guguguccuggagaaauca

SEQ ID NO: 2252435 - RNA, 19 nt, Artificial Sequence
  Description of Artificial Sequence: Synthetic oligonucleotide
  Antisense strand to SEQ ID NO: 2252434
ugauuucuccaggacacac

SEQ ID NO: 2252436 - RNA, 19 nt, Artificial Sequence
  Description of Artificial Sequence: Synthetic oligonucleotide
  Sense strand starting at position 157 of SEQ ID NO: 1884263
ccuaccuucugauuacgua

SEQ ID NO: 2252437 - RNA, 19 nt, Artificial Sequence
  Description of Artificial Sequence: Synthetic oligonucleotide
  Antisense strand to SEQ ID NO: 2252436
uacguaaucagaagguagg

SEQ ID NO: 2252438 - RNA, 19 nt, Artificial Sequence
  Description of Artificial Sequence: Synthetic oligonucleotide
  Sense strand starting at position 160 of SEQ ID NO: 1884263
accuucugauuacguagaa

SEQ ID NO: 2252439 - RNA, 19 nt, Artificial Sequence
  Description of Artificial Sequence: Synthetic oligonucleotide
  Antisense strand to SEQ ID NO: 2252438
uucuacguaaucagaaggu

SEQ ID NO: 2252440 - RNA, 19 nt, Artificial Sequence
  Description of Artificial Sequence: Synthetic oligonucleotide
  Sense strand starting at position 161 of SEQ ID NO: 1884263
ccuucugauuacguagaaa

SEQ ID NO: 2252441 - RNA, 19 nt, Artificial Sequence
  Description of Artificial Sequence: Synthetic oligonucleotide
  Antisense strand to SEQ ID NO: 2252440
uuucuacguaaucagaagg

SEQ ID NO: 2252442 - RNA, 19 nt, Artificial Sequence
  Description of Artificial Sequence: Synthetic oligonucleotide
  Sense strand starting at position 570 of SEQ ID NO: 1884263
aaagcauccgcgugacaca

SEQ ID NO: 2252443 - RNA, 19 nt, Artificial Sequence
  Description of Artificial Sequence: Synthetic oligonucleotide
  Antisense strand to SEQ ID NO: 2252442
ugugucacgcggaugcuuu

SEQ ID NO: 2252444 - RNA, 19 nt, Artificial Sequence
  Description of Artificial Sequence: Synthetic oligonucleotide
  Sense strand starting at position 1127 of SEQ ID NO: 1884263
gcagcucagcguguugaga

SEQ ID NO: 2252445 - RNA, 19 nt, Artificial Sequence
  Description of Artificial Sequence: Synthetic oligonucleotide
  Antisense strand to SEQ ID NO: 2252444
ucucaacacgcugagcugc

SEQ ID NO: 2252446 - RNA, 19 nt, Artificial Sequence
  Description of Artificial Sequence: Synthetic oligonucleotide
  Sense strand starting at position 1129 of SEQ ID NO: 1884263
agcucagcguguugagaaa

SEQ ID NO: 2252447 - RNA, 19 nt, Artificial Sequence
  Description of Artificial Sequence: Synthetic oligonucleotide
  Antisense strand to SEQ ID NO: 2252446
uuucucaacacgcugagcu

SEQ ID NO: 2252448 - RNA, 19 nt, Artificial Sequence
  Description of Artificial Sequence: Synthetic oligonucleotide
  Sense strand starting at position 1135 of SEQ ID NO: 1884263
gcguguugagaaagauguc

SEQ ID NO: 2252449 - RNA, 19 nt, Artificial Sequence
  Description of Artificial Sequence: Synthetic oligonucleotide
  Antisense strand to SEQ ID NO: 2252448
gacaucuuucucaacacgc

SEQ ID NO: 2252450 - RNA, 19 nt, Artificial Sequence
  Description of Artificial Sequence: Synthetic oligonucleotide
  Sense strand starting at position 1865 of SEQ ID NO: 1884263
ucgggagcuucuccgagaa

SEQ ID NO: 2252451 - RNA, 19 nt, Artificial Sequence
  Description of Artificial Sequence: Synthetic oligonucleotide
  Antisense strand to SEQ ID NO: 2252450
uucucggagaagcucccga

SEQ ID NO: 2252452 - RNA, 19 nt, Artificial Sequence
  Description of Artificial Sequence: Synthetic oligonucleotide
  Sense strand starting at position 1867 of SEQ ID NO: 1884263
gggagcuucuccgagaaac

SEQ ID NO: 2252453 - RNA, 19 nt, Artificial Sequence
  Description of Artificial Sequence: Synthetic oligonucleotide
  Antisense strand to SEQ ID NO: 2252452
guuucucggagaagcuccc

SEQ ID NO: 2252454 - RNA, 19 nt, Artificial Sequence
  Description of Artificial Sequence: Synthetic oligonucleotide
  Sense strand starting at position 1869 of SEQ ID NO: 1884263
gagcuucuccgagaaacag

SEQ ID NO: 2252455 - RNA, 19 nt, Artificial Sequence
  Description of Artificial Sequence: Synthetic oligonucleotide
  Antisense strand to SEQ ID NO: 2252454
cuguuucucggagaagcuc

SEQ ID NO: 2252456 - RNA, 19 nt, Artificial Sequence
  Description of Artificial Sequence: Synthetic oligonucleotide
  Sense strand starting at position 2054 of SEQ ID NO: 1884263
uuggcuuccuauucugauu

SEQ ID NO: 2252457 - RNA, 19 nt, Artificial Sequence
  Description of Artificial Sequence: Synthetic oligonucleotide
  Antisense strand to SEQ ID NO: 2252456
aaucagaauaggaagccaa

SEQ ID NO: 2252458 - RNA, 19 nt, Artificial Sequence
  Description of Artificial Sequence: Synthetic oligonucleotide
  Sense strand starting at position 2259 of SEQ ID NO: 1884263
cgcugacgugccuagauuu

SEQ ID NO: 2252459 - RNA, 19 nt, Artificial Sequence
  Description of Artificial Sequence: Synthetic oligonucleotide
  Antisense strand to SEQ ID NO: 2252458
aaaucuaggcacgucagcg

SEQ ID NO: 2252460 - RNA, 19 nt, Artificial Sequence
  Description of Artificial Sequence: Synthetic oligonucleotide
  Sense strand starting at position 2331 of SEQ ID NO: 1884263
gccucugacccuugggaua

SEQ ID NO: 2252461 - RNA, 19 nt, Artificial Sequence
  Description of Artificial Sequence: Synthetic oligonucleotide
  Antisense strand to SEQ ID NO: 2252460
uaucccaagggucagaggc

SEQ ID NO: 2252462 - RNA, 19 nt, Artificial Sequence
  Description of Artificial Sequence: Synthetic oligonucleotide
  Sense strand starting at position 2333 of SEQ ID NO: 1884263
cucugacccuugggauaau

SEQ ID NO: 2252463 - RNA, 19 nt, Artificial Sequence
  Description of Artificial Sequence: Synthetic oligonucleotide
  Antisense strand to SEQ ID NO: 2252462
auuaucccaagggucagag

SEQ ID NO: 2252464 - RNA, 19 nt, Artificial Sequence
  Description of Artificial Sequence: Synthetic oligonucleotide
  Sense strand starting at position 2334 of SEQ ID NO: 1884263
ucugacccuugggauaaua

SEQ ID NO: 2252465 - RNA, 19 nt, Artificial Sequence
  Description of Artificial Sequence: Synthetic oligonucleotide
  Antisense strand to SEQ ID NO: 2252464
uauuaucccaagggucaga

SEQ ID NO: 2252466 - RNA, 19 nt, Artificial Sequence
  Description of Artificial Sequence: Synthetic oligonucleotide
  Sense strand starting at position 2360 of SEQ ID NO: 1884263
aggaaauccuuggccaauu

SEQ ID NO: 2252467 - RNA, 19 nt, Artificial Sequence
  Description of Artificial Sequence: Synthetic oligonucleotide
  Antisense strand to SEQ ID NO: 2252466
aauuggccaaggauuuccu

SEQ ID NO: 2252468 - RNA, 19 nt, Artificial Sequence
  Description of Artificial Sequence: Synthetic oligonucleotide
  Sense strand starting at position 2480 of SEQ ID NO: 1884263
acacaaaucuccgagaaac

SEQ ID NO: 2252469 - RNA, 19 nt, Artificial Sequence
  Description of Artificial Sequence: Synthetic oligonucleotide
  Antisense strand to SEQ ID NO: 2252468
guuucucggagauuugugu

SEQ ID NO: 2252470 - RNA, 19 nt, Artificial Sequence
  Description of Artificial Sequence: Synthetic oligonucleotide
  Sense strand starting at position 2937 of SEQ ID NO: 1884263
guuuaccaucucuagugua

SEQ ID NO: 2252471 - RNA, 19 nt, Artificial Sequence
  Description of Artificial Sequence: Synthetic oligonucleotide
  Antisense strand to SEQ ID NO: 2252470
uacacuagagaugguaaac

SEQ ID NO: 2252472 - RNA, 19 nt, Artificial Sequence
  Description of Artificial Sequence: Synthetic oligonucleotide
  Sense strand starting at position 2947 of SEQ ID NO: 1884263
ucuaguguacacuaacaua

SEQ ID NO: 2252473 - RNA, 19 nt, Artificial Sequence
  Description of Artificial Sequence: Synthetic oligonucleotide
  Antisense strand to SEQ ID NO: 2252472
uauguuaguguacacuaga

SEQ ID NO: 2252474 - RNA, 19 nt, Artificial Sequence
  Description of Artificial Sequence: Synthetic oligonucleotide
  Sense strand starting at position 2985 of SEQ ID NO: 1884263
agaaguacgcuuuaggaca

SEQ ID NO: 2252475 - RNA, 19 nt, Artificial Sequence
  Description of Artificial Sequence: Synthetic oligonucleotide
  Antisense strand to SEQ ID NO: 2252474
uguccuaaagcguacuucu

SEQ ID NO: 2252476 - RNA, 19 nt, Artificial Sequence
  Description of Artificial Sequence: Synthetic oligonucleotide
  Sense strand starting at position 3086 of SEQ ID NO: 1884263
uuuacaaaggucugcuuua

SEQ ID NO: 2252477 - RNA, 19 nt, Artificial Sequence
  Description of Artificial Sequence: Synthetic oligonucleotide
  Antisense strand to SEQ ID NO: 2252476
uaaagcagaccuuuguaaa

SEQ ID NO: 2252478 - RNA, 19 nt, Artificial Sequence
  Description of Artificial Sequence: Synthetic oligonucleotide
  Sense strand starting at position 3087 of SEQ ID NO: 1884263
uuacaaaggucugcuuuau

SEQ ID NO: 2252479 - RNA, 19 nt, Artificial Sequence
  Description of Artificial Sequence: Synthetic oligonucleotide
  Antisense strand to SEQ ID NO: 2252478
auaaagcagaccuuuguaa

SEQ ID NO: 2252480 - RNA, 19 nt, Artificial Sequence
  Description of Artificial Sequence: Synthetic oligonucleotide
  Sense strand starting at position 3093 of SEQ ID NO: 1884263
aggucugcuuuaucacuga

SEQ ID NO: 2252481 - RNA, 19 nt, Artificial Sequence
  Description of Artificial Sequence: Synthetic oligonucleotide
  Antisense strand to SEQ ID NO: 2252480
ucagugauaaagcagaccu

SEQ ID NO: 2252482 - RNA, 19 nt, Artificial Sequence
  Description of Artificial Sequence: Synthetic oligonucleotide
  Sense strand starting at position 3097 of SEQ ID NO: 1884263
cugcuuuaucacugaauug

SEQ ID NO: 2252483 - RNA, 19 nt, Artificial Sequence
  Description of Artificial Sequence: Synthetic oligonucleotide
  Antisense strand to SEQ ID NO: 2252482
caauucagugauaaagcag

SEQ ID NO: 2252484 - RNA, 19 nt, Artificial Sequence
  Description of Artificial Sequence: Synthetic oligonucleotide
  Sense strand starting at position 3428 of SEQ ID NO: 1884263
guacccggccaucauuaau

SEQ ID NO: 2252485 - RNA, 19 nt, Artificial Sequence
  Description of Artificial Sequence: Synthetic oligonucleotide
  Antisense strand to SEQ ID NO: 2252484
auuaaugauggccggguac

SEQ ID NO: 2252486 - RNA, 19 nt, Artificial Sequence
  Description of Artificial Sequence: Synthetic oligonucleotide
  Sense strand starting at position 3461 of SEQ ID NO: 1884263
cuguauugcuuaccauaua

SEQ ID NO: 2252487 - RNA, 19 nt, Artificial Sequence
  Description of Artificial Sequence: Synthetic oligonucleotide
  Antisense strand to SEQ ID NO: 2252486
uauaugguaagcaauacag

SEQ ID NO: 2252488 - RNA, 19 nt, Artificial Sequence
  Description of Artificial Sequence: Synthetic oligonucleotide
  Sense strand starting at position 3529 of SEQ ID NO: 1884263
aguuaacacugcuugguau

SEQ ID NO: 2252489 - RNA, 19 nt, Artificial Sequence
  Description of Artificial Sequence: Synthetic oligonucleotide
  Antisense strand to SEQ ID NO: 2252488
auaccaagcaguguuaacu

SEQ ID NO: 2252490 - RNA, 19 nt, Artificial Sequence
  Description of Artificial Sequence: Synthetic oligonucleotide
  Sense strand starting at position 3530 of SEQ ID NO: 1884263
guuaacacugcuugguaua

SEQ ID NO: 2252491 - RNA, 19 nt, Artificial Sequence
  Description of Artificial Sequence: Synthetic oligonucleotide
  Antisense strand to SEQ ID NO: 2252490
uauaccaagcaguguuaac

SEQ ID NO: 2252492 - RNA, 19 nt, Artificial Sequence
  Description of Artificial Sequence: Synthetic oligonucleotide
  Sense strand starting at position 3531 of SEQ ID NO: 1884263
uuaacacugcuugguauaa

SEQ ID NO: 2252493 - RNA, 19 nt, Artificial Sequence
  Description of Artificial Sequence: Synthetic oligonucleotide
  Antisense strand to SEQ ID NO: 2252492
uuauaccaagcaguguuaa

SEQ ID NO: 2252494 - RNA, 19 nt, Artificial Sequence
  Description of Artificial Sequence: Synthetic oligonucleotide
  Sense strand starting at position 3562 of SEQ ID NO: 1884263
acaggauaaugcucccagu

SEQ ID NO: 2252495 - RNA, 19 nt, Artificial Sequence
  Description of Artificial Sequence: Synthetic oligonucleotide
  Antisense strand to SEQ ID NO: 2252494
acugggagcauuauccugu

SEQ ID NO: 2252496 - RNA, 19 nt, Artificial Sequence
  Description of Artificial Sequence: Synthetic oligonucleotide
  Sense strand starting at position 3565 of SEQ ID NO: 1884263
ggauaaugcucccaguacu

SEQ ID NO: 2252497 - RNA, 19 nt, Artificial Sequence
  Description of Artificial Sequence: Synthetic oligonucleotide
  Antisense strand to SEQ ID NO: 2252496
aguacugggagcauuaucc

SEQ ID NO: 2252498 - RNA, 19 nt, Artificial Sequence
  Description of Artificial Sequence: Synthetic oligonucleotide
  Sense strand starting at position 3591 of SEQ ID NO: 1884263
acacaaaccugcuagagaa

SEQ ID NO: 2252499 - RNA, 19 nt, Artificial Sequence
  Description of Artificial Sequence: Synthetic oligonucleotide
  Antisense strand to SEQ ID NO: 2252498
uucucuagcagguuugugu

SEQ ID NO: 2252500 - RNA, 19 nt, Artificial Sequence
  Description of Artificial Sequence: Synthetic oligonucleotide
  Sense strand starting at position 3615 of SEQ ID NO: 1884263
aacgauuauccaugauagu

SEQ ID NO: 2252501 - RNA, 19 nt, Artificial Sequence
  Description of Artificial Sequence: Synthetic oligonucleotide
  Antisense strand to SEQ ID NO: 2252500
acuaucauggauaaucguu

SEQ ID NO: 2252502 - RNA, 19 nt, Artificial Sequence
  Description of Artificial Sequence: Synthetic oligonucleotide
  Sense strand starting at position 3616 of SEQ ID NO: 1884263
acgauuauccaugauagua

SEQ ID NO: 2252503 - RNA, 19 nt, Artificial Sequence
  Description of Artificial Sequence: Synthetic oligonucleotide
  Antisense strand to SEQ ID NO: 2252502
uacuaucauggauaaucgu

SEQ ID NO: 2252504 - RNA, 19 nt, Artificial Sequence
  Description of Artificial Sequence: Synthetic oligonucleotide
  Sense strand starting at position 3618 of SEQ ID NO: 1884263
gauuauccaugauaguaug

SEQ ID NO: 2252505 - RNA, 19 nt, Artificial Sequence
  Description of Artificial Sequence: Synthetic oligonucleotide
  Antisense strand to SEQ ID NO: 2252504
cauacuaucauggauaauc

SEQ ID NO: 2252506 - RNA, 19 nt, Artificial Sequence
  Description of Artificial Sequence: Synthetic oligonucleotide
  Sense strand starting at position 3630 of SEQ ID NO: 1884263
uaguaugaggcaggaauaa

SEQ ID NO: 2252507 - RNA, 19 nt, Artificial Sequence
  Description of Artificial Sequence: Synthetic oligonucleotide
  Antisense strand to SEQ ID NO: 2252506
uuauuccugccucauacua

SEQ ID NO: 2252508 - RNA, 19 nt, Artificial Sequence
  Description of Artificial Sequence: Synthetic oligonucleotide
  Sense strand starting at position 3684 of SEQ ID NO: 1884263
uugguucuaugacacagaa

SEQ ID NO: 2252509 - RNA, 19 nt, Artificial Sequence
  Description of Artificial Sequence: Synthetic oligonucleotide
  Antisense strand to SEQ ID NO: 2252508
uucugugucauagaaccaa

SEQ ID NO: 2252510 - RNA, 19 nt, Artificial Sequence
  Description of Artificial Sequence: Synthetic oligonucleotide
  Sense strand starting at position 3707 of SEQ ID NO: 1884263
gcuugaucacagcacaauu

SEQ ID NO: 2252511 - RNA, 19 nt, Artificial Sequence
  Description of Artificial Sequence: Synthetic oligonucleotide
  Antisense strand to SEQ ID NO: 2252510
aauugugcugugaucaagc

SEQ ID NO: 2252512 - RNA, 19 nt, Artificial Sequence
  Description of Artificial Sequence: Synthetic oligonucleotide
  Sense strand starting at position 302 of SEQ ID NO: 1884262
ugagaacuccacugagcuc

SEQ ID NO: 2252513 - RNA, 19 nt, Artificial Sequence
  Description of Artificial Sequence: Synthetic oligonucleotide
  Antisense strand to SEQ ID NO: 2252512
gagcucaguggaguucuca

SEQ ID NO: 2252514 - RNA, 19 nt, Artificial Sequence
  Description of Artificial Sequence: Synthetic oligonucleotide
  Sense strand starting at position 368 of SEQ ID NO: 1884262
aguccuuguucccuggaca

SEQ ID NO: 2252515 - RNA, 19 nt, Artificial Sequence
  Description of Artificial Sequence: Synthetic oligonucleotide
  Antisense strand to SEQ ID NO: 2252514
uguccagggaacaaggacu

SEQ ID NO: 2252516 - RNA, 19 nt, Artificial Sequence
  Description of Artificial Sequence: Synthetic oligonucleotide
  Sense strand starting at position 478 of SEQ ID NO: 1884262
uaagaagucucuucgugaa

SEQ ID NO: 2252517 - RNA, 19 nt, Artificial Sequence
  Description of Artificial Sequence: Synthetic oligonucleotide
  Antisense strand to SEQ ID NO: 2252516
uucacgaagagacuucuua

SEQ ID NO: 2252518 - RNA, 19 nt, Artificial Sequence
  Description of Artificial Sequence: Synthetic oligonucleotide
  Sense strand starting at position 501 of SEQ ID NO: 1884262
aauggugaugauggcuaua

SEQ ID NO: 2252519 - RNA, 19 nt, Artificial Sequence
  Description of Artificial Sequence: Synthetic oligonucleotide
  Antisense strand to SEQ ID NO: 2252518
uauagccaucaucaccauu

SEQ ID NO: 2252520 - RNA, 19 nt, Artificial Sequence
  Description of Artificial Sequence: Synthetic oligonucleotide
  Sense strand starting at position 503 of SEQ ID NO: 1884262
uggugaugauggcuauaau

SEQ ID NO: 2252521 - RNA, 19 nt, Artificial Sequence
  Description of Artificial Sequence: Synthetic oligonucleotide
  Antisense strand to SEQ ID NO: 2252520
auuauagccaucaucacca

SEQ ID NO: 2252522 - RNA, 19 nt, Artificial Sequence
  Description of Artificial Sequence: Synthetic oligonucleotide
  Sense strand starting at position 504 of SEQ ID NO: 1884262
ggugaugauggcuauaaug

SEQ ID NO: 2252523 - RNA, 19 nt, Artificial Sequence
  Description of Artificial Sequence: Synthetic oligonucleotide
  Antisense strand to SEQ ID NO: 2252522
cauuauagccaucaucacc

SEQ ID NO: 2252524 - RNA, 19 nt, Artificial Sequence
  Description of Artificial Sequence: Synthetic oligonucleotide
  Sense strand starting at position 506 of SEQ ID NO: 1884262
ugaugauggcuauaaugca

SEQ ID NO: 2252525 - RNA, 19 nt, Artificial Sequence
  Description of Artificial Sequence: Synthetic oligonucleotide
  Antisense strand to SEQ ID NO: 2252524
ugcauuauagccaucauca

SEQ ID NO: 2252526 - RNA, 19 nt, Artificial Sequence
  Description of Artificial Sequence: Synthetic oligonucleotide
  Sense strand starting at position 604 of SEQ ID NO: 1884262
ccagaaauaggaugcauua

SEQ ID NO: 2252527 - RNA, 19 nt, Artificial Sequence
  Description of Artificial Sequence: Synthetic oligonucleotide
  Antisense strand to SEQ ID NO: 2252526
uaaugcauccuauuucugg

SEQ ID NO: 2252528 - RNA, 19 nt, Artificial Sequence
  Description of Artificial Sequence: Synthetic oligonucleotide
  Sense strand starting at position 650 of SEQ ID NO: 1884262
ggcagaggauaguuaacua

SEQ ID NO: 2252529 - RNA, 19 nt, Artificial Sequence
  Description of Artificial Sequence: Synthetic oligonucleotide
  Antisense strand to SEQ ID NO: 2252528
uaguuaacuauccucugcc

SEQ ID NO: 2252530 - RNA, 19 nt, Artificial Sequence
  Description of Artificial Sequence: Synthetic oligonucleotide
  Sense strand starting at position 660 of SEQ ID NO: 1884262
aguuaacuagccuguccaa

SEQ ID NO: 2252531 - RNA, 19 nt, Artificial Sequence
  Description of Artificial Sequence: Synthetic oligonucleotide
  Antisense strand to SEQ ID NO: 2252530
uuggacaggcuaguuaacu

SEQ ID NO: 2252532 - RNA, 19 nt, Artificial Sequence
  Description of Artificial Sequence: Synthetic oligonucleotide
  Sense strand starting at position 685 of SEQ ID NO: 1884262
gggacuaauagguggcaua

SEQ ID NO: 2252533 - RNA, 19 nt, Artificial Sequence
  Description of Artificial Sequence: Synthetic oligonucleotide
  Antisense strand to SEQ ID NO: 2252532
uaugccaccuauuaguccc

SEQ ID NO: 2252534 - RNA, 19 nt, Artificial Sequence
  Description of Artificial Sequence: Synthetic oligonucleotide
  Sense strand starting at position 764 of SEQ ID NO: 1884262
agugcaacaucaguacuua

SEQ ID NO: 2252535 - RNA, 19 nt, Artificial Sequence
  Description of Artificial Sequence: Synthetic oligonucleotide
  Antisense strand to SEQ ID NO: 2252534
uaaguacugauguugcacu

SEQ ID NO: 2252536 - RNA, 19 nt, Artificial Sequence
  Description of Artificial Sequence: Synthetic oligonucleotide
  Sense strand starting at position 765 of SEQ ID NO: 1884262
gugcaacaucaguacuuau

SEQ ID NO: 2252537 - RNA, 19 nt, Artificial Sequence
  Description of Artificial Sequence: Synthetic oligonucleotide
  Antisense strand to SEQ ID NO: 2252536
auaaguacugauguugcac

SEQ ID NO: 2252538 - RNA, 19 nt, Artificial Sequence
  Description of Artificial Sequence: Synthetic oligonucleotide
  Sense strand starting at position 1174 of SEQ ID NO: 1884262
ucaccacugcuaugucaua

SEQ ID NO: 2252539 - RNA, 19 nt, Artificial Sequence
  Description of Artificial Sequence: Synthetic oligonucleotide
  Antisense strand to SEQ ID NO: 2252538
uaugacauagcagugguga

SEQ ID NO: 2252540 - RNA, 19 nt, Artificial Sequence
  Description of Artificial Sequence: Synthetic oligonucleotide
  Sense strand starting at position 1181 of SEQ ID NO: 1884262
ugcuaugucauagggacau

SEQ ID NO: 2252541 - RNA, 19 nt, Artificial Sequence
  Description of Artificial Sequence: Synthetic oligonucleotide
  Antisense strand to SEQ ID NO: 2252540
augucccuaugacauagca

SEQ ID NO: 2252542 - RNA, 19 nt, Artificial Sequence
  Description of Artificial Sequence: Synthetic oligonucleotide
  Sense strand starting at position 1192 of SEQ ID NO: 1884262
agggacaugucuccugagu

SEQ ID NO: 2252543 - RNA, 19 nt, Artificial Sequence
  Description of Artificial Sequence: Synthetic oligonucleotide
  Antisense strand to SEQ ID NO: 2252542
acucaggagacaugucccu

SEQ ID NO: 2252544 - RNA, 19 nt, Artificial Sequence
  Description of Artificial Sequence: Synthetic oligonucleotide
  Sense strand starting at position 1198 of SEQ ID NO: 1884262
augucuccugaguggcaaa

SEQ ID NO: 2252545 - RNA, 19 nt, Artificial Sequence
  Description of Artificial Sequence: Synthetic oligonucleotide
  Antisense strand to SEQ ID NO: 2252544
uuugccacucaggagacau

SEQ ID NO: 2252546 - RNA, 19 nt, Artificial Sequence
  Description of Artificial Sequence: Synthetic oligonucleotide
  Sense strand starting at position 1284 of SEQ ID NO: 1884262
cuccucaguacuugggaga

SEQ ID NO: 2252547 - RNA, 19 nt, Artificial Sequence
  Description of Artificial Sequence: Synthetic oligonucleotide
  Antisense strand to SEQ ID NO: 2252546
ucucccaaguacugaggag

SEQ ID NO: 2252548 - RNA, 19 nt, Artificial Sequence
  Description of Artificial Sequence: Synthetic oligonucleotide
  Sense strand starting at position 1285 of SEQ ID NO: 1884262
uccucaguacuugggagaa

SEQ ID NO: 2252549 - RNA, 19 nt, Artificial Sequence
  Description of Artificial Sequence: Synthetic oligonucleotide
  Antisense strand to SEQ ID NO: 2252548
uucucccaaguacugagga

SEQ ID NO: 2252550 - RNA, 19 nt, Artificial Sequence
  Description of Artificial Sequence: Synthetic oligonucleotide
  Sense strand starting at position 1332 of SEQ ID NO: 1884262
ucagaagaucuggguauca

SEQ ID NO: 2252551 - RNA, 19 nt, Artificial Sequence
  Description of Artificial Sequence: Synthetic oligonucleotide
  Antisense strand to SEQ ID NO: 2252550
ugauacccagaucuucuga

SEQ ID NO: 2252552 - RNA, 19 nt, Artificial Sequence
  Description of Artificial Sequence: Synthetic oligonucleotide
  Sense strand starting at position 1344 of SEQ ID NO: 1884262
gguaucagcccugaaucga

SEQ ID NO: 2252553 - RNA, 19 nt, Artificial Sequence
  Description of Artificial Sequence: Synthetic oligonucleotide
  Antisense strand to SEQ ID NO: 2252552
ucgauucagggcugauacc

SEQ ID NO: 2252554 - RNA, 19 nt, Artificial Sequence
  Description of Artificial Sequence: Synthetic oligonucleotide
  Sense strand starting at position 1378 of SEQ ID NO: 1884262
gggcaagucauguaaccau

SEQ ID NO: 2252555 - RNA, 19 nt, Artificial Sequence
  Description of Artificial Sequence: Synthetic oligonucleotide
  Antisense strand to SEQ ID NO: 2252554
augguuacaugacuugccc

SEQ ID NO: 2252556 - RNA, 19 nt, Artificial Sequence
  Description of Artificial Sequence: Synthetic oligonucleotide
  Sense strand starting at position 1407 of SEQ ID NO: 1884262
cuccaaaggugguugacaa

SEQ ID NO: 2252557 - RNA, 19 nt, Artificial Sequence
  Description of Artificial Sequence: Synthetic oligonucleotide
  Antisense strand to SEQ ID NO: 2252556
uugucaaccaccuuuggag

SEQ ID NO: 2252558 - RNA, 19 nt, Artificial Sequence
  Description of Artificial Sequence: Synthetic oligonucleotide
  Sense strand starting at position 1408 of SEQ ID NO: 1884262
uccaaaggugguugacaaa

SEQ ID NO: 2252559 - RNA, 19 nt, Artificial Sequence
  Description of Artificial Sequence: Synthetic oligonucleotide
  Antisense strand to SEQ ID NO: 2252558
uuugucaaccaccuuugga

SEQ ID NO: 2252560 - RNA, 19 nt, Artificial Sequence
  Description of Artificial Sequence: Synthetic oligonucleotide
  Sense strand starting at position 1419 of SEQ ID NO: 1884262
uugacaaacugugcuacuu

SEQ ID NO: 2252561 - RNA, 19 nt, Artificial Sequence
  Description of Artificial Sequence: Synthetic oligonucleotide
  Antisense strand to SEQ ID NO: 2252560
aaguagcacaguuugucaa

SEQ ID NO: 2252562 - RNA, 19 nt, Artificial Sequence
  Description of Artificial Sequence: Synthetic oligonucleotide
  Sense strand starting at position 1427 of SEQ ID NO: 1884262
cugugcuacuucucuaaag

SEQ ID NO: 2252563 - RNA, 19 nt, Artificial Sequence
  Description of Artificial Sequence: Synthetic oligonucleotide
  Antisense strand to SEQ ID NO: 2252562
cuuuagagaaguagcacag

SEQ ID NO: 2252564 - RNA, 19 nt, Artificial Sequence
  Description of Artificial Sequence: Synthetic oligonucleotide
  Sense strand starting at position 1444 of SEQ ID NO: 1884262
agcuuccuguaccugaaua

SEQ ID NO: 2252565 - RNA, 19 nt, Artificial Sequence
  Description of Artificial Sequence: Synthetic oligonucleotide
  Antisense strand to SEQ ID NO: 2252564
uauucagguacaggaagcu

SEQ ID NO: 2252566 - RNA, 19 nt, Artificial Sequence
  Description of Artificial Sequence: Synthetic oligonucleotide
  Sense strand starting at position 1495 of SEQ ID NO: 1884262
agguuugguguuaguguuu

SEQ ID NO: 2252567 - RNA, 19 nt, Artificial Sequence
  Description of Artificial Sequence: Synthetic oligonucleotide
  Antisense strand to SEQ ID NO: 2252566
aaacacuaacaccaaaccu

SEQ ID NO: 2252568 - RNA, 19 nt, Artificial Sequence
  Description of Artificial Sequence: Synthetic oligonucleotide
  Sense strand starting at position 1598 of SEQ ID NO: 1884262
cagagacgcucaguaacau

SEQ ID NO: 2252569 - RNA, 19 nt, Artificial Sequence
  Description of Artificial Sequence: Synthetic oligonucleotide
  Antisense strand to SEQ ID NO: 2252568
auguuacugagcgucucug

SEQ ID NO: 2252570 - RNA, 19 nt, Artificial Sequence
  Description of Artificial Sequence: Synthetic oligonucleotide
  Sense strand starting at position 1599 of SEQ ID NO: 1884262
agagacgcucaguaacauu

SEQ ID NO: 2252571 - RNA, 19 nt, Artificial Sequence
  Description of Artificial Sequence: Synthetic oligonucleotide
  Antisense strand to SEQ ID NO: 2252570
aauguuacugagcgucucu

SEQ ID NO: 2252572 - RNA, 19 nt, Artificial Sequence
  Description of Artificial Sequence: Synthetic oligonucleotide
  Sense strand starting at position 1677 of SEQ ID NO: 1884262
cguugauacccacaacaau

SEQ ID NO: 2252573 - RNA, 19 nt, Artificial Sequence
  Description of Artificial Sequence: Synthetic oligonucleotide
  Antisense strand to SEQ ID NO: 2252572
auuguuguggguaucaacg

SEQ ID NO: 2252574 - RNA, 19 nt, Artificial Sequence
  Description of Artificial Sequence: Synthetic oligonucleotide
  Sense strand starting at position 1707 of SEQ ID NO: 1884262
gugggucagauaugacaug

SEQ ID NO: 2252575 - RNA, 19 nt, Artificial Sequence
  Description of Artificial Sequence: Synthetic oligonucleotide
  Antisense strand to SEQ ID NO: 2252574
caugucauaucugacccac

SEQ ID NO: 2252576 - RNA, 19 nt, Artificial Sequence
  Description of Artificial Sequence: Synthetic oligonucleotide
  Sense strand starting at position 1828 of SEQ ID NO: 1884262
gcagcuuagacagguuaag

SEQ ID NO: 2252577 - RNA, 19 nt, Artificial Sequence
  Description of Artificial Sequence: Synthetic oligonucleotide
  Antisense strand to SEQ ID NO: 2252576
cuuaaccugucuaagcugc

SEQ ID NO: 2252578 - RNA, 19 nt, Artificial Sequence
  Description of Artificial Sequence: Synthetic oligonucleotide
  Sense strand starting at position 1847 of SEQ ID NO: 1884262
ugacuugcccgggaucaga

SEQ ID NO: 2252579 - RNA, 19 nt, Artificial Sequence
  Description of Artificial Sequence: Synthetic oligonucleotide
  Antisense strand to SEQ ID NO: 2252578
ucugaucccgggcaaguca

SEQ ID NO: 2252580 - RNA, 19 nt, Artificial Sequence
  Description of Artificial Sequence: Synthetic oligonucleotide
  Sense strand starting at position 2169 of SEQ ID NO: 1884262
ccuaccuucugauuacgua

SEQ ID NO: 2252581 - RNA, 19 nt, Artificial Sequence
  Description of Artificial Sequence: Synthetic oligonucleotide
  Antisense strand to SEQ ID NO: 2252580
uacguaaucagaagguagg

SEQ ID NO: 2252582 - RNA, 19 nt, Artificial Sequence
  Description of Artificial Sequence: Synthetic oligonucleotide
  Sense strand starting at position 2173 of SEQ ID NO: 1884262
ccuucugauuacguagaaa

SEQ ID NO: 2252583 - RNA, 19 nt, Artificial Sequence
  Description of Artificial Sequence: Synthetic oligonucleotide
  Antisense strand to SEQ ID NO: 2252582
uuucuacguaaucagaagg

SEQ ID NO: 2252584 - RNA, 19 nt, Artificial Sequence
  Description of Artificial Sequence: Synthetic oligonucleotide
  Sense strand starting at position 3139 of SEQ ID NO: 1884262
gcagcucagcguguugaga

SEQ ID NO: 2252585 - RNA, 19 nt, Artificial Sequence
  Description of Artificial Sequence: Synthetic oligonucleotide
  Antisense strand to SEQ ID NO: 2252584
ucucaacacgcugagcugc

SEQ ID NO: 2252586 - RNA, 19 nt, Artificial Sequence
  Description of Artificial Sequence: Synthetic oligonucleotide
  Sense strand starting at position 3147 of SEQ ID NO: 1884262
gcguguugagaaagauguc

SEQ ID NO: 2252587 - RNA, 19 nt, Artificial Sequence
  Description of Artificial Sequence: Synthetic oligonucleotide
  Antisense strand to SEQ ID NO: 2252586
gacaucuuucucaacacgc

SEQ ID NO: 2252588 - RNA, 19 nt, Artificial Sequence
  Description of Artificial Sequence: Synthetic oligonucleotide
  Sense strand starting at position 3877 of SEQ ID NO: 1884262
ucgggagcuucuccgagaa

SEQ ID NO: 2252589 - RNA, 19 nt, Artificial Sequence
  Description of Artificial Sequence: Synthetic oligonucleotide
  Antisense strand to SEQ ID NO: 2252588
uucucggagaagcucccga

SEQ ID NO: 2252590 - RNA, 19 nt, Artificial Sequence
  Description of Artificial Sequence: Synthetic oligonucleotide
  Sense strand starting at position 3881 of SEQ ID NO: 1884262
gagcuucuccgagaaacag

SEQ ID NO: 2252591 - RNA, 19 nt, Artificial Sequence
  Description of Artificial Sequence: Synthetic oligonucleotide
  Antisense strand to SEQ ID NO: 2252590
cuguuucucggagaagcuc

SEQ ID NO: 2252592 - RNA, 19 nt, Artificial Sequence
  Description of Artificial Sequence: Synthetic oligonucleotide
  Sense strand starting at position 67 of SEQ ID NO: 1884264
aagauaagaucgcuuugau

SEQ ID NO: 2252593 - RNA, 19 nt, Artificial Sequence
  Description of Artificial Sequence: Synthetic oligonucleotide
  Antisense strand to SEQ ID NO: 2252592
aucaaagcgaucuuaucuu

SEQ ID NO: 2252594 - RNA, 19 nt, Artificial Sequence
  Description of Artificial Sequence: Synthetic oligonucleotide
  Sense strand starting at position 87 of SEQ ID NO: 1884264
gcugcuuuagacuggaacu

SEQ ID NO: 2252595 - RNA, 19 nt, Artificial Sequence
  Description of Artificial Sequence: Synthetic oligonucleotide
  Antisense strand to SEQ ID NO: 2252594
aguuccagucuaaagcagc

SEQ ID NO: 2252596 - RNA, 19 nt, Artificial Sequence
  Description of Artificial Sequence: Synthetic oligonucleotide
  Sense strand starting at position 89 of SEQ ID NO: 1884264
ugcuuuagacuggaacuca

SEQ ID NO: 2252597 - RNA, 19 nt, Artificial Sequence
  Description of Artificial Sequence: Synthetic oligonucleotide
  Antisense strand to SEQ ID NO: 2252596
ugaguuccagucuaaagca

SEQ ID NO: 2252598 - RNA, 19 nt, Artificial Sequence
  Description of Artificial Sequence: Synthetic oligonucleotide
  Sense strand starting at position 181 of SEQ ID NO: 1884264
gccaaaggucaggagugaa

SEQ ID NO: 2252599 - RNA, 19 nt, Artificial Sequence
  Description of Artificial Sequence: Synthetic oligonucleotide
  Antisense strand to SEQ ID NO: 2252598
uucacuccugaccuuuggc

SEQ ID NO: 2252600 - RNA, 19 nt, Artificial Sequence
  Description of Artificial Sequence: Synthetic oligonucleotide
  Sense strand starting at position 432 of SEQ ID NO: 1884264
ccaccuuuguuguugaguu

SEQ ID NO: 2252601 - RNA, 19 nt, Artificial Sequence
  Description of Artificial Sequence: Synthetic oligonucleotide
  Antisense strand to SEQ ID NO: 2252600
aacucaacaacaaaggugg

SEQ ID NO: 2252602 - RNA, 19 nt, Artificial Sequence
  Description of Artificial Sequence: Synthetic oligonucleotide
  Sense strand starting at position 442 of SEQ ID NO: 1884264
uguugaguuucuccuggac

SEQ ID NO: 2252603 - RNA, 19 nt, Artificial Sequence
  Description of Artificial Sequence: Synthetic oligonucleotide
  Antisense strand to SEQ ID NO: 2252602
guccaggagaaacucaaca

SEQ ID NO: 2252604 - RNA, 19 nt, Artificial Sequence
  Description of Artificial Sequence: Synthetic oligonucleotide
  Sense strand starting at position 628 of SEQ ID NO: 1884264
ccagguuagugauucugaa

SEQ ID NO: 2252605 - RNA, 19 nt, Artificial Sequence
  Description of Artificial Sequence: Synthetic oligonucleotide
  Antisense strand to SEQ ID NO: 2252604
uucagaaucacuaaccugg

SEQ ID NO: 2252606 - RNA, 19 nt, Artificial Sequence
  Description of Artificial Sequence: Synthetic oligonucleotide
  Sense strand starting at position 953 of SEQ ID NO: 1884264
agucauuaaagcugugaag

SEQ ID NO: 2252607 - RNA, 19 nt, Artificial Sequence
  Description of Artificial Sequence: Synthetic oligonucleotide
  Antisense strand to SEQ ID NO: 2252606
cuucacagcuuuaaugacu

SEQ ID NO: 2252608 - RNA, 19 nt, Artificial Sequence
  Description of Artificial Sequence: Synthetic oligonucleotide
  Sense strand starting at position 1062 of SEQ ID NO: 1884264
gagagaacacuuugcggaa

SEQ ID NO: 2252609 - RNA, 19 nt, Artificial Sequence
  Description of Artificial Sequence: Synthetic oligonucleotide
  Antisense strand to SEQ ID NO: 2252608
uuccgcaaaguguucucuc

SEQ ID NO: 2252610 - RNA, 19 nt, Artificial Sequence
  Description of Artificial Sequence: Synthetic oligonucleotide
  Sense strand starting at position 1204 of SEQ ID NO: 1884264
caugcauuucccugaggca

SEQ ID NO: 2252611 - RNA, 19 nt, Artificial Sequence
  Description of Artificial Sequence: Synthetic oligonucleotide
  Antisense strand to SEQ ID NO: 2252610
ugccucagggaaaugcaug

SEQ ID NO: 2252612 - RNA, 19 nt, Artificial Sequence
  Description of Artificial Sequence: Synthetic oligonucleotide
  Sense strand starting at position 1787 of SEQ ID NO: 1884264
ucggcucacuucuccaaga

SEQ ID NO: 2252613 - RNA, 19 nt, Artificial Sequence
  Description of Artificial Sequence: Synthetic oligonucleotide
  Antisense strand to SEQ ID NO: 2252612
ucuuggagaagugagccga

SEQ ID NO: 2252614 - RNA, 19 nt, Artificial Sequence
  Description of Artificial Sequence: Synthetic oligonucleotide
  Sense strand starting at position 1788 of SEQ ID NO: 1884264
cggcucacuucuccaagaa

SEQ ID NO: 2252615 - RNA, 19 nt, Artificial Sequence
  Description of Artificial Sequence: Synthetic oligonucleotide
  Antisense strand to SEQ ID NO: 2252614
uucuuggagaagugagccg

SEQ ID NO: 2252616 - RNA, 19 nt, Artificial Sequence
  Description of Artificial Sequence: Synthetic oligonucleotide
  Sense strand starting at position 1789 of SEQ ID NO: 1884264
ggcucacuucuccaagaag

SEQ ID NO: 2252617 - RNA, 19 nt, Artificial Sequence
  Description of Artificial Sequence: Synthetic oligonucleotide
  Antisense strand to SEQ ID NO: 2252616
cuucuuggagaagugagcc

SEQ ID NO: 2252618 - RNA, 19 nt, Artificial Sequence
  Description of Artificial Sequence: Synthetic oligonucleotide
  Sense strand starting at position 1792 of SEQ ID NO: 1884264
ucacuucuccaagaaggca

SEQ ID NO: 2252619 - RNA, 19 nt, Artificial Sequence
  Description of Artificial Sequence: Synthetic oligonucleotide
  Antisense strand to SEQ ID NO: 2252618
ugccuucuuggagaaguga

SEQ ID NO: 2252620 - RNA, 19 nt, Artificial Sequence
  Description of Artificial Sequence: Synthetic oligonucleotide
  Sense strand starting at position 1820 of SEQ ID NO: 1884264
gugugagaguauguauuaa

SEQ ID NO: 2252621 - RNA, 19 nt, Artificial Sequence
  Description of Artificial Sequence: Synthetic oligonucleotide
  Antisense strand to SEQ ID NO: 2252620
uuaauacauacucucacac

SEQ ID NO: 2252622 - RNA, 19 nt, Artificial Sequence
  Description of Artificial Sequence: Synthetic oligonucleotide
  Sense strand starting at position 1824 of SEQ ID NO: 1884264
gagaguauguauuaaggag

SEQ ID NO: 2252623 - RNA, 19 nt, Artificial Sequence
  Description of Artificial Sequence: Synthetic oligonucleotide
  Antisense strand to SEQ ID NO: 2252622
cuccuuaauacauacucuc

SEQ ID NO: 2252624 - RNA, 19 nt, Artificial Sequence
  Description of Artificial Sequence: Synthetic oligonucleotide
  Sense strand starting at position 1851 of SEQ ID NO: 1884264
gggugagaauguguauuaa

SEQ ID NO: 2252625 - RNA, 19 nt, Artificial Sequence
  Description of Artificial Sequence: Synthetic oligonucleotide
  Antisense strand to SEQ ID NO: 2252624
uuaauacacauucucaccc

SEQ ID NO: 2252626 - RNA, 19 nt, Artificial Sequence
  Description of Artificial Sequence: Synthetic oligonucleotide
  Sense strand starting at position 1974 of SEQ ID NO: 1884264
ggaggauggauguguguuu

SEQ ID NO: 2252627 - RNA, 19 nt, Artificial Sequence
  Description of Artificial Sequence: Synthetic oligonucleotide
  Antisense strand to SEQ ID NO: 2252626
aaacacacauccauccucc

SEQ ID NO: 2252628 - RNA, 19 nt, Artificial Sequence
  Description of Artificial Sequence: Synthetic oligonucleotide
  Sense strand starting at position 1979 of SEQ ID NO: 1884264
auggauguguguuugagga

SEQ ID NO: 2252629 - RNA, 19 nt, Artificial Sequence
  Description of Artificial Sequence: Synthetic oligonucleotide
  Antisense strand to SEQ ID NO: 2252628
uccucaaacacacauccau

SEQ ID NO: 2252630 - RNA, 19 nt, Artificial Sequence
  Description of Artificial Sequence: Synthetic oligonucleotide
  Sense strand starting at position 1984 of SEQ ID NO: 1884264
uguguguuugaggaggguu

SEQ ID NO: 2252631 - RNA, 19 nt, Artificial Sequence
  Description of Artificial Sequence: Synthetic oligonucleotide
  Antisense strand to SEQ ID NO: 2252630
aacccuccucaaacacaca

SEQ ID NO: 2252632 - RNA, 19 nt, Artificial Sequence
  Description of Artificial Sequence: Synthetic oligonucleotide
  Sense strand starting at position 2092 of SEQ ID NO: 1884264
ugguguguuuguguauaaa

SEQ ID NO: 2252633 - RNA, 19 nt, Artificial Sequence
  Description of Artificial Sequence: Synthetic oligonucleotide
  Antisense strand to SEQ ID NO: 2252632
uuuauacacaaacacacca

SEQ ID NO: 2252634 - RNA, 19 nt, Artificial Sequence
  Description of Artificial Sequence: Synthetic oligonucleotide
  Sense strand starting at position 2117 of SEQ ID NO: 1884264
uguguaauguggagacagu

SEQ ID NO: 2252635 - RNA, 19 nt, Artificial Sequence
  Description of Artificial Sequence: Synthetic oligonucleotide
  Antisense strand to SEQ ID NO: 2252634
acugucuccacauuacaca

SEQ ID NO: 2252636 - RNA, 19 nt, Artificial Sequence
  Description of Artificial Sequence: Synthetic oligonucleotide
  Sense strand starting at position 2377 of SEQ ID NO: 1884264
gaggaagguuggcagagau

SEQ ID NO: 2252637 - RNA, 19 nt, Artificial Sequence
  Description of Artificial Sequence: Synthetic oligonucleotide
  Antisense strand to SEQ ID NO: 2252636
aucucugccaaccuuccuc

SEQ ID NO: 2252638 - RNA, 19 nt, Artificial Sequence
  Description of Artificial Sequence: Synthetic oligonucleotide
  Sense strand starting at position 2457 of SEQ ID NO: 1884264
uggagucuucugcagucaa

SEQ ID NO: 2252639 - RNA, 19 nt, Artificial Sequence
  Description of Artificial Sequence: Synthetic oligonucleotide
  Antisense strand to SEQ ID NO: 2252638
uugacugcagaagacucca

SEQ ID NO: 2252640 - RNA, 19 nt, Artificial Sequence
  Description of Artificial Sequence: Synthetic oligonucleotide
  Sense strand starting at position 2568 of SEQ ID NO: 1884264
gggagugaguucuccucua

SEQ ID NO: 2252641 - RNA, 19 nt, Artificial Sequence
  Description of Artificial Sequence: Synthetic oligonucleotide
  Antisense strand to SEQ ID NO: 2252640
uagaggagaacucacuccc

SEQ ID NO: 2252642 - RNA, 19 nt, Artificial Sequence
  Description of Artificial Sequence: Synthetic oligonucleotide
  Sense strand starting at position 2573 of SEQ ID NO: 1884264
ugaguucuccucuagaguu

SEQ ID NO: 2252643 - RNA, 19 nt, Artificial Sequence
  Description of Artificial Sequence: Synthetic oligonucleotide
  Antisense strand to SEQ ID NO: 2252642
aacucuagaggagaacuca

SEQ ID NO: 2252644 - RNA, 19 nt, Artificial Sequence
  Description of Artificial Sequence: Synthetic oligonucleotide
  Sense strand starting at position 2676 of SEQ ID NO: 1884264
gacucucagcgguagcaau

SEQ ID NO: 2252645 - RNA, 19 nt, Artificial Sequence
  Description of Artificial Sequence: Synthetic oligonucleotide
  Antisense strand to SEQ ID NO: 2252644
auugcuaccgcugagaguc

SEQ ID NO: 2252646 - RNA, 19 nt, Artificial Sequence
  Description of Artificial Sequence: Synthetic oligonucleotide
  Sense strand starting at position 2740 of SEQ ID NO: 1884264
guuacaacuuucuugguca

SEQ ID NO: 2252647 - RNA, 19 nt, Artificial Sequence
  Description of Artificial Sequence: Synthetic oligonucleotide
  Antisense strand to SEQ ID NO: 2252646
ugaccaagaaaguuguaac

SEQ ID NO: 2252648 - RNA, 19 nt, Artificial Sequence
  Description of Artificial Sequence: Synthetic oligonucleotide
  Sense strand starting at position 2890 of SEQ ID NO: 1884264
gugcauguugcuuuacagu

SEQ ID NO: 2252649 - RNA, 19 nt, Artificial Sequence
  Description of Artificial Sequence: Synthetic oligonucleotide
  Antisense strand to SEQ ID NO: 2252648
acuguaaagcaacaugcac

SEQ ID NO: 2252650 - RNA, 19 nt, Artificial Sequence
  Description of Artificial Sequence: Synthetic oligonucleotide
  Sense strand starting at position 2936 of SEQ ID NO: 1884264
ucacuuuguccuuguaaga

SEQ ID NO: 2252651 - RNA, 19 nt, Artificial Sequence
  Description of Artificial Sequence: Synthetic oligonucleotide
  Antisense strand to SEQ ID NO: 2252650
ucuuacaaggacaaaguga

SEQ ID NO: 2252652 - RNA, 19 nt, Artificial Sequence
  Description of Artificial Sequence: Synthetic oligonucleotide
  Sense strand starting at position 2949 of SEQ ID NO: 1884264
guaagaacucaccgagaag

SEQ ID NO: 2252653 - RNA, 19 nt, Artificial Sequence
  Description of Artificial Sequence: Synthetic oligonucleotide
  Antisense strand to SEQ ID NO: 2252652
cuucucggugaguucuuac

SEQ ID NO: 2252654 - RNA, 19 nt, Artificial Sequence
  Description of Artificial Sequence: Synthetic oligonucleotide
  Sense strand starting at position 3006 of SEQ ID NO: 1884264
gggacccagguuuguauua

SEQ ID NO: 2252655 - RNA, 19 nt, Artificial Sequence
  Description of Artificial Sequence: Synthetic oligonucleotide
  Antisense strand to SEQ ID NO: 2252654
uaauacaaaccuggguccc

SEQ ID NO: 2252656 - RNA, 19 nt, Artificial Sequence
  Description of Artificial Sequence: Synthetic oligonucleotide
  Sense strand starting at position 3165 of SEQ ID NO: 1884264
aagaacuucuagucugaug

SEQ ID NO: 2252657 - RNA, 19 nt, Artificial Sequence
  Description of Artificial Sequence: Synthetic oligonucleotide
  Antisense strand to SEQ ID NO: 2252656
caucagacuagaaguucuu

SEQ ID NO: 2252658 - RNA, 19 nt, Artificial Sequence
  Description of Artificial Sequence: Synthetic oligonucleotide
  Sense strand starting at position 3167 of SEQ ID NO: 1884264
gaacuucuagucugauguu

SEQ ID NO: 2252659 - RNA, 19 nt, Artificial Sequence
  Description of Artificial Sequence: Synthetic oligonucleotide
  Antisense strand to SEQ ID NO: 2252658
aacaucagacuagaaguuc

SEQ ID NO: 2252660 - RNA, 19 nt, Artificial Sequence
  Description of Artificial Sequence: Synthetic oligonucleotide
  Sense strand starting at position 3518 of SEQ ID NO: 1884264
auguccacucuagaaaugu

SEQ ID NO: 2252661 - RNA, 19 nt, Artificial Sequence
  Description of Artificial Sequence: Synthetic oligonucleotide
  Antisense strand to SEQ ID NO: 2252660
acauuucuagaguggacau

SEQ ID NO: 2252662 - RNA, 19 nt, Artificial Sequence
  Description of Artificial Sequence: Synthetic oligonucleotide
  Sense strand starting at position 3528 of SEQ ID NO: 1884264
uagaaauguuaaguggcau

SEQ ID NO: 2252663 - RNA, 19 nt, Artificial Sequence
  Description of Artificial Sequence: Synthetic oligonucleotide
  Antisense strand to SEQ ID NO: 2252662
augccacuuaacauuucua

SEQ ID NO: 2252664 - RNA, 19 nt, Artificial Sequence
  Description of Artificial Sequence: Synthetic oligonucleotide
  Sense strand starting at position 3529 of SEQ ID NO: 1884264
agaaauguuaaguggcauu

SEQ ID NO: 2252665 - RNA, 19 nt, Artificial Sequence
  Description of Artificial Sequence: Synthetic oligonucleotide
  Antisense strand to SEQ ID NO: 2252664
aaugccacuuaacauuucu

SEQ ID NO: 2252666 - RNA, 19 nt, Artificial Sequence
  Description of Artificial Sequence: Synthetic oligonucleotide
  Sense strand starting at position 3639 of SEQ ID NO: 1884264
gcaggugaugagugccaga

SEQ ID NO: 2252667 - RNA, 19 nt, Artificial Sequence
  Description of Artificial Sequence: Synthetic oligonucleotide
  Antisense strand to SEQ ID NO: 2252666
ucuggcacucaucaccugc

SEQ ID NO: 2252668 - RNA, 19 nt, Artificial Sequence
  Description of Artificial Sequence: Synthetic oligonucleotide
  Sense strand starting at position 3759 of SEQ ID NO: 1884264
cuccuuacucuugggaaau

SEQ ID NO: 2252669 - RNA, 19 nt, Artificial Sequence
  Description of Artificial Sequence: Synthetic oligonucleotide
  Antisense strand to SEQ ID NO: 2252668
auuucccaagaguaaggag

SEQ ID NO: 2252670 - RNA, 19 nt, Artificial Sequence
  Description of Artificial Sequence: Synthetic oligonucleotide
  Sense strand starting at position 3761 of SEQ ID NO: 1884264
ccuuacucuugggaaauuu

SEQ ID NO: 2252671 - RNA, 19 nt, Artificial Sequence
  Description of Artificial Sequence: Synthetic oligonucleotide
  Antisense strand to SEQ ID NO: 2252670
aaauuucccaagaguaagg

SEQ ID NO: 2252672 - RNA, 19 nt, Artificial Sequence
  Description of Artificial Sequence: Synthetic oligonucleotide
  Sense strand starting at position 10 of SEQ ID NO: 1884265
gccagaggaugaucaauca

SEQ ID NO: 2252673 - RNA, 19 nt, Artificial Sequence
  Description of Artificial Sequence: Synthetic oligonucleotide
  Antisense strand to SEQ ID NO: 2252672
ugauugaucauccucuggc

SEQ ID NO: 2252674 - RNA, 19 nt, Artificial Sequence
  Description of Artificial Sequence: Synthetic oligonucleotide
  Sense strand starting at position 90 of SEQ ID NO: 1884265
guaggagcuauuugcaugu

SEQ ID NO: 2252675 - RNA, 19 nt, Artificial Sequence
  Description of Artificial Sequence: Synthetic oligonucleotide
  Antisense strand to SEQ ID NO: 2252674
acaugcaaauagcuccuac

SEQ ID NO: 2252676 - RNA, 19 nt, Artificial Sequence
  Description of Artificial Sequence: Synthetic oligonucleotide
  Sense strand starting at position 94 of SEQ ID NO: 1884265
gagcuauuugcaugucaaa

SEQ ID NO: 2252677 - RNA, 19 nt, Artificial Sequence
  Description of Artificial Sequence: Synthetic oligonucleotide
  Antisense strand to SEQ ID NO: 2252676
uuugacaugcaaauagcuc

SEQ ID NO: 2252678 - RNA, 19 nt, Artificial Sequence
  Description of Artificial Sequence: Synthetic oligonucleotide
  Sense strand starting at position 125 of SEQ ID NO: 1884265
cugguaauggacuagucuu

SEQ ID NO: 2252679 - RNA, 19 nt, Artificial Sequence
  Description of Artificial Sequence: Synthetic oligonucleotide
  Antisense strand to SEQ ID NO: 2252678
aagacuaguccauuaccag

SEQ ID NO: 2252680 - RNA, 19 nt, Artificial Sequence
  Description of Artificial Sequence: Synthetic oligonucleotide
  Sense strand starting at position 133 of SEQ ID NO: 1884265
ggacuagucuuaccagaaa

SEQ ID NO: 2252681 - RNA, 19 nt, Artificial Sequence
  Description of Artificial Sequence: Synthetic oligonucleotide
  Antisense strand to SEQ ID NO: 2252680
uuucugguaagacuagucc

SEQ ID NO: 2252682 - RNA, 19 nt, Artificial Sequence
  Description of Artificial Sequence: Synthetic oligonucleotide
  Sense strand starting at position 161 of SEQ ID NO: 1884265
caaagagucuggcugcaua

SEQ ID NO: 2252683 - RNA, 19 nt, Artificial Sequence
  Description of Artificial Sequence: Synthetic oligonucleotide
  Antisense strand to SEQ ID NO: 2252682
uaugcagccagacucuuug

SEQ ID NO: 2252684 - RNA, 19 nt, Artificial Sequence
  Description of Artificial Sequence: Synthetic oligonucleotide
  Sense strand starting at position 215 of SEQ ID NO: 1884265
gggcccaaauucuuaauau

SEQ ID NO: 2252685 - RNA, 19 nt, Artificial Sequence
  Description of Artificial Sequence: Synthetic oligonucleotide
  Antisense strand to SEQ ID NO: 2252684
auauuaagaauuugggccc

SEQ ID NO: 2252686 - RNA, 19 nt, Artificial Sequence
  Description of Artificial Sequence: Synthetic oligonucleotide
  Sense strand starting at position 226 of SEQ ID NO: 1884265
cuuaauauuuggcaaagga

SEQ ID NO: 2252687 - RNA, 19 nt, Artificial Sequence
  Description of Artificial Sequence: Synthetic oligonucleotide
  Antisense strand to SEQ ID NO: 2252686
uccuuugccaaauauuaag

SEQ ID NO: 2252688 - RNA, 19 nt, Artificial Sequence
  Description of Artificial Sequence: Synthetic oligonucleotide
  Sense strand starting at position 240 of SEQ ID NO: 1884265
aaggauguuucuuugagug

SEQ ID NO: 2252689 - RNA, 19 nt, Artificial Sequence
  Description of Artificial Sequence: Synthetic oligonucleotide
  Antisense strand to SEQ ID NO: 2252688
cacucaaagaaacauccuu

SEQ ID NO: 2252690 - RNA, 19 nt, Artificial Sequence
  Description of Artificial Sequence: Synthetic oligonucleotide
  Sense strand starting at position 323 of SEQ ID NO: 1884265
ggauaccuguacuugcaau

SEQ ID NO: 2252691 - RNA, 19 nt, Artificial Sequence
  Description of Artificial Sequence: Synthetic oligonucleotide
  Antisense strand to SEQ ID NO: 2252690
auugcaaguacagguaucc

SEQ ID NO: 2252692 - RNA, 19 nt, Artificial Sequence
  Description of Artificial Sequence: Synthetic oligonucleotide
  Sense strand starting at position 409 of SEQ ID NO: 1884265
uuaauugucuacguagaau

SEQ ID NO: 2252693 - RNA, 19 nt, Artificial Sequence
  Description of Artificial Sequence: Synthetic oligonucleotide
  Antisense strand to SEQ ID NO: 2252692
auucuacguagacaauuaa

SEQ ID NO: 2252694 - RNA, 19 nt, Artificial Sequence
  Description of Artificial Sequence: Synthetic oligonucleotide
  Sense strand starting at position 412 of SEQ ID NO: 1884265
auugucuacguagaauaca

SEQ ID NO: 2252695 - RNA, 19 nt, Artificial Sequence
  Description of Artificial Sequence: Synthetic oligonucleotide
  Antisense strand to SEQ ID NO: 2252694
uguauucuacguagacaau

SEQ ID NO: 2252696 - RNA, 19 nt, Artificial Sequence
  Description of Artificial Sequence: Synthetic oligonucleotide
  Sense strand starting at position 573 of SEQ ID NO: 1884265
cuugcugcuggcuaauuua

SEQ ID NO: 2252697 - RNA, 19 nt, Artificial Sequence
  Description of Artificial Sequence: Synthetic oligonucleotide
  Antisense strand to SEQ ID NO: 2252696
uaaauuagccagcagcaag

SEQ ID NO: 2252698 - RNA, 19 nt, Artificial Sequence
  Description of Artificial Sequence: Synthetic oligonucleotide
  Sense strand starting at position 672 of SEQ ID NO: 1884265
gggaguuggccagggugau

SEQ ID NO: 2252699 - RNA, 19 nt, Artificial Sequence
  Description of Artificial Sequence: Synthetic oligonucleotide
  Antisense strand to SEQ ID NO: 2252698
aucacccuggccaacuccc

SEQ ID NO: 2252700 - RNA, 19 nt, Artificial Sequence
  Description of Artificial Sequence: Synthetic oligonucleotide
  Sense strand starting at position 682 of SEQ ID NO: 1884265
cagggugaucucuaaaguu

SEQ ID NO: 2252701 - RNA, 19 nt, Artificial Sequence
  Description of Artificial Sequence: Synthetic oligonucleotide
  Antisense strand to SEQ ID NO: 2252700
aacuuuagagaucacccug

SEQ ID NO: 2252702 - RNA, 19 nt, Artificial Sequence
  Description of Artificial Sequence: Synthetic oligonucleotide
  Sense strand starting at position 739 of SEQ ID NO: 1884265
aucccaaagguguaauuau

SEQ ID NO: 2252703 - RNA, 19 nt, Artificial Sequence
  Description of Artificial Sequence: Synthetic oligonucleotide
  Antisense strand to SEQ ID NO: 2252702
auaauuacaccuuugggau

SEQ ID NO: 2252704 - RNA, 19 nt, Artificial Sequence
  Description of Artificial Sequence: Synthetic oligonucleotide
  Sense strand starting at position 846 of SEQ ID NO: 1884265
uccauucgucucgcacuau

SEQ ID NO: 2252705 - RNA, 19 nt, Artificial Sequence
  Description of Artificial Sequence: Synthetic oligonucleotide
  Antisense strand to SEQ ID NO: 2252704
auagugcgagacgaaugga

SEQ ID NO: 2252706 - RNA, 19 nt, Artificial Sequence
  Description of Artificial Sequence: Synthetic oligonucleotide
  Sense strand starting at position 948 of SEQ ID NO: 1884265
cuaucugcggauuaaaugu

SEQ ID NO: 2252707 - RNA, 19 nt, Artificial Sequence
  Description of Artificial Sequence: Synthetic oligonucleotide
  Antisense strand to SEQ ID NO: 2252706
acauuuaauccgcagauag

SEQ ID NO: 2252708 - RNA, 19 nt, Artificial Sequence
  Description of Artificial Sequence: Synthetic oligonucleotide
  Sense strand starting at position 1642 of SEQ ID NO: 1884265
aauggaaguuaccucagua

SEQ ID NO: 2252709 - RNA, 19 nt, Artificial Sequence
  Description of Artificial Sequence: Synthetic oligonucleotide
  Antisense strand to SEQ ID NO: 2252708
uacugagguaacuuccauu

SEQ ID NO: 2252710 - RNA, 19 nt, Artificial Sequence
  Description of Artificial Sequence: Synthetic oligonucleotide
  Sense strand starting at position 2726 of SEQ ID NO: 1884265
aaaguuaggguguacaagu

SEQ ID NO: 2252711 - RNA, 19 nt, Artificial Sequence
  Description of Artificial Sequence: Synthetic oligonucleotide
  Antisense strand to SEQ ID NO: 2252710
acuuguacacccuaacuuu

SEQ ID NO: 2252712 - RNA, 19 nt, Artificial Sequence
  Description of Artificial Sequence: Synthetic oligonucleotide
  Sense strand starting at position 2934 of SEQ ID NO: 1884265
cuuugagaacugugacuca

SEQ ID NO: 2252713 - RNA, 19 nt, Artificial Sequence
  Description of Artificial Sequence: Synthetic oligonucleotide
  Antisense strand to SEQ ID NO: 2252712
ugagucacaguucucaaag

SEQ ID NO: 2252714 - RNA, 19 nt, Artificial Sequence
  Description of Artificial Sequence: Synthetic oligonucleotide
  Sense strand starting at position 2937 of SEQ ID NO: 1884265
ugagaacugugacucagau

SEQ ID NO: 2252715 - RNA, 19 nt, Artificial Sequence
  Description of Artificial Sequence: Synthetic oligonucleotide
  Antisense strand to SEQ ID NO: 2252714
aucugagucacaguucuca

SEQ ID NO: 2252716 - RNA, 19 nt, Artificial Sequence
  Description of Artificial Sequence: Synthetic oligonucleotide
  Sense strand starting at position 2952 of SEQ ID NO: 1884265
agauuagguuuggucucua

SEQ ID NO: 2252717 - RNA, 19 nt, Artificial Sequence
  Description of Artificial Sequence: Synthetic oligonucleotide
  Antisense strand to SEQ ID NO: 2252716
uagagaccaaaccuaaucu

SEQ ID NO: 2252718 - RNA, 19 nt, Artificial Sequence
  Description of Artificial Sequence: Synthetic oligonucleotide
  Sense strand starting at position 2957 of SEQ ID NO: 1884265
agguuuggucucuaaggcu

SEQ ID NO: 2252719 - RNA, 19 nt, Artificial Sequence
  Description of Artificial Sequence: Synthetic oligonucleotide
  Antisense strand to SEQ ID NO: 2252718
agccuuagagaccaaaccu

SEQ ID NO: 2252720 - RNA, 19 nt, Artificial Sequence
  Description of Artificial Sequence: Synthetic oligonucleotide
  Sense strand starting at position 3020 of SEQ ID NO: 1884265
agcaauacagucugagaaa

SEQ ID NO: 2252721 - RNA, 19 nt, Artificial Sequence
  Description of Artificial Sequence: Synthetic oligonucleotide
  Antisense strand to SEQ ID NO: 2252720
uuucucagacuguauugcu

SEQ ID NO: 2252722 - RNA, 19 nt, Artificial Sequence
  Description of Artificial Sequence: Synthetic oligonucleotide
  Sense strand starting at position 3051 of SEQ ID NO: 1884265
caauuucgugauugugcga

SEQ ID NO: 2252723 - RNA, 19 nt, Artificial Sequence
  Description of Artificial Sequence: Synthetic oligonucleotide
  Antisense strand to SEQ ID NO: 2252722
ucgcacaaucacgaaauug

SEQ ID NO: 2252724 - RNA, 19 nt, Artificial Sequence
  Description of Artificial Sequence: Synthetic oligonucleotide
  Sense strand starting at position 3124 of SEQ ID NO: 1884265
ggcuauaaggugugacuua

SEQ ID NO: 2252725 - RNA, 19 nt, Artificial Sequence
  Description of Artificial Sequence: Synthetic oligonucleotide
  Antisense strand to SEQ ID NO: 2252724
uaagucacaccuuauagcc

SEQ ID NO: 2252726 - RNA, 19 nt, Artificial Sequence
  Description of Artificial Sequence: Synthetic oligonucleotide
  Sense strand starting at position 3158 of SEQ ID NO: 1884265
aaaccuguucugcauguga

SEQ ID NO: 2252727 - RNA, 19 nt, Artificial Sequence
  Description of Artificial Sequence: Synthetic oligonucleotide
  Antisense strand to SEQ ID NO: 2252726
ucacaugcagaacagguuu

SEQ ID NO: 2252728 - RNA, 19 nt, Artificial Sequence
  Description of Artificial Sequence: Synthetic oligonucleotide
  Sense strand starting at position 3199 of SEQ ID NO: 1884265
gugcaauacaaugggaaga

SEQ ID NO: 2252729 - RNA, 19 nt, Artificial Sequence
  Description of Artificial Sequence: Synthetic oligonucleotide
  Antisense strand to SEQ ID NO: 2252728
ucuucccauuguauugcac

SEQ ID NO: 2252730 - RNA, 19 nt, Artificial Sequence
  Description of Artificial Sequence: Synthetic oligonucleotide
  Sense strand starting at position 3243 of SEQ ID NO: 1884265
guaacacauugggcuauaa

SEQ ID NO: 2252731 - RNA, 19 nt, Artificial Sequence
  Description of Artificial Sequence: Synthetic oligonucleotide
  Antisense strand to SEQ ID NO: 2252730
uuauagcccaauguguuac

SEQ ID NO: 2252732 - RNA, 19 nt, Artificial Sequence
  Description of Artificial Sequence: Synthetic oligonucleotide
  Sense strand starting at position 3247 of SEQ ID NO: 1884265
cacauugggcuauaauguu

SEQ ID NO: 2252733 - RNA, 19 nt, Artificial Sequence
  Description of Artificial Sequence: Synthetic oligonucleotide
  Antisense strand to SEQ ID NO: 2252732
aacauuauagcccaaugug

SEQ ID NO: 2252734 - RNA, 19 nt, Artificial Sequence
  Description of Artificial Sequence: Synthetic oligonucleotide
  Sense strand starting at position 3273 of SEQ ID NO: 1884265
cuaugacaucgcuagucca

SEQ ID NO: 2252735 - RNA, 19 nt, Artificial Sequence
  Description of Artificial Sequence: Synthetic oligonucleotide
  Antisense strand to SEQ ID NO: 2252734
uggacuagcgaugucauag

SEQ ID NO: 2252736 - RNA, 19 nt, Artificial Sequence
  Description of Artificial Sequence: Synthetic oligonucleotide
  Sense strand starting at position 3280 of SEQ ID NO: 1884265
aucgcuaguccauaggaau

SEQ ID NO: 2252737 - RNA, 19 nt, Artificial Sequence
  Description of Artificial Sequence: Synthetic oligonucleotide
  Antisense strand to SEQ ID NO: 2252736
auuccuauggacuagcgau

SEQ ID NO: 2252738 - RNA, 19 nt, Artificial Sequence
  Description of Artificial Sequence: Synthetic oligonucleotide
  Sense strand starting at position 3386 of SEQ ID NO: 1884265
guauacgcuguuuaagaaa

SEQ ID NO: 2252739 - RNA, 19 nt, Artificial Sequence
  Description of Artificial Sequence: Synthetic oligonucleotide
  Antisense strand to SEQ ID NO: 2252738
uuucuuaaacagcguauac

SEQ ID NO: 2252740 - RNA, 19 nt, Artificial Sequence
  Description of Artificial Sequence: Synthetic oligonucleotide
  Sense strand starting at position 3451 of SEQ ID NO: 1884265
cagguuucugaagacuagu

SEQ ID NO: 2252741 - RNA, 19 nt, Artificial Sequence
  Description of Artificial Sequence: Synthetic oligonucleotide
  Antisense strand to SEQ ID NO: 2252740
acuagucuucagaaaccug

SEQ ID NO: 2252742 - RNA, 19 nt, Artificial Sequence
  Description of Artificial Sequence: Synthetic oligonucleotide
  Sense strand starting at position 3454 of SEQ ID NO: 1884265
guuucugaagacuaguauu

SEQ ID NO: 2252743 - RNA, 19 nt, Artificial Sequence
  Description of Artificial Sequence: Synthetic oligonucleotide
  Antisense strand to SEQ ID NO: 2252742
aauacuagucuucagaaac

SEQ ID NO: 2252744 - RNA, 19 nt, Artificial Sequence
  Description of Artificial Sequence: Synthetic oligonucleotide
  Sense strand starting at position 3457 of SEQ ID NO: 1884265
ucugaagacuaguauuuau

SEQ ID NO: 2252745 - RNA, 19 nt, Artificial Sequence
  Description of Artificial Sequence: Synthetic oligonucleotide
  Antisense strand to SEQ ID NO: 2252744
auaaauacuagucuucaga

SEQ ID NO: 2252746 - RNA, 19 nt, Artificial Sequence
  Description of Artificial Sequence: Synthetic oligonucleotide
  Sense strand starting at position 3561 of SEQ ID NO: 1884265
ccaaauacuucuccgaaag

SEQ ID NO: 2252747 - RNA, 19 nt, Artificial Sequence
  Description of Artificial Sequence: Synthetic oligonucleotide
  Antisense strand to SEQ ID NO: 2252746
cuuucggagaaguauuugg

SEQ ID NO: 2252748 - RNA, 19 nt, Artificial Sequence
  Description of Artificial Sequence: Synthetic oligonucleotide
  Sense strand starting at position 3585 of SEQ ID NO: 1884265
ggauucccagguuagcaau

SEQ ID NO: 2252749 - RNA, 19 nt, Artificial Sequence
  Description of Artificial Sequence: Synthetic oligonucleotide
  Antisense strand to SEQ ID NO: 2252748
auugcuaaccugggaaucc

SEQ ID NO: 2252750 - RNA, 19 nt, Artificial Sequence
  Description of Artificial Sequence: Synthetic oligonucleotide
  Sense strand starting at position 3744 of SEQ ID NO: 1884265
guggucucccaucacuaaa

SEQ ID NO: 2252751 - RNA, 19 nt, Artificial Sequence
  Description of Artificial Sequence: Synthetic oligonucleotide
  Antisense strand to SEQ ID NO: 2252750
uuuagugaugggagaccac

SEQ ID NO: 2252752 - RNA, 19 nt, Artificial Sequence
  Description of Artificial Sequence: Synthetic oligonucleotide
  Sense strand starting at position 16 of SEQ ID NO: 1884266
aggaaagaugaucgcuuga

SEQ ID NO: 2252753 - RNA, 19 nt, Artificial Sequence
  Description of Artificial Sequence: Synthetic oligonucleotide
  Antisense strand to SEQ ID NO: 2252752
ucaagcgaucaucuuuccu

SEQ ID NO: 2252754 - RNA, 19 nt, Artificial Sequence
  Description of Artificial Sequence: Synthetic oligonucleotide
  Sense strand starting at position 18 of SEQ ID NO: 1884266
gaaagaugaucgcuugagc

SEQ ID NO: 2252755 - RNA, 19 nt, Artificial Sequence
  Description of Artificial Sequence: Synthetic oligonucleotide
  Antisense strand to SEQ ID NO: 2252754
gcucaagcgaucaucuuuc

SEQ ID NO: 2252756 - RNA, 19 nt, Artificial Sequence
  Description of Artificial Sequence: Synthetic oligonucleotide
  Sense strand starting at position 160 of SEQ ID NO: 1884266
ugcaaugauugaucugauu

SEQ ID NO: 2252757 - RNA, 19 nt, Artificial Sequence
  Description of Artificial Sequence: Synthetic oligonucleotide
  Antisense strand to SEQ ID NO: 2252756
aaucagaucaaucauugca

SEQ ID NO: 2252758 - RNA, 19 nt, Artificial Sequence
  Description of Artificial Sequence: Synthetic oligonucleotide
  Sense strand starting at position 304 of SEQ ID NO: 1884266
auacacauugcugguagaa

SEQ ID NO: 2252759 - RNA, 19 nt, Artificial Sequence
  Description of Artificial Sequence: Synthetic oligonucleotide
  Antisense strand to SEQ ID NO: 2252758
uucuaccagcaauguguau

SEQ ID NO: 2252760 - RNA, 19 nt, Artificial Sequence
  Description of Artificial Sequence: Synthetic oligonucleotide
  Sense strand starting at position 336 of SEQ ID NO: 1884266
guguuaaugucucuauucu

SEQ ID NO: 2252761 - RNA, 19 nt, Artificial Sequence
  Description of Artificial Sequence: Synthetic oligonucleotide
  Antisense strand to SEQ ID NO: 2252760
agaauagagacauuaacac

SEQ ID NO: 2252762 - RNA, 19 nt, Artificial Sequence
  Description of Artificial Sequence: Synthetic oligonucleotide
  Sense strand starting at position 382 of SEQ ID NO: 1884266
ugacccacugcugauauua

SEQ ID NO: 2252763 - RNA, 19 nt, Artificial Sequence
  Description of Artificial Sequence: Synthetic oligonucleotide
  Antisense strand to SEQ ID NO: 2252762
uaauaucagcaguggguca

SEQ ID NO: 2252764 - RNA, 19 nt, Artificial Sequence
  Description of Artificial Sequence: Synthetic oligonucleotide
  Sense strand starting at position 413 of SEQ ID NO: 1884266
ucccauuuguuggaauguu

SEQ ID NO: 2252765 - RNA, 19 nt, Artificial Sequence
  Description of Artificial Sequence: Synthetic oligonucleotide
  Antisense strand to SEQ ID NO: 2252764
aacauuccaacaaauggga

SEQ ID NO: 2252766 - RNA, 19 nt, Artificial Sequence
  Description of Artificial Sequence: Synthetic oligonucleotide
  Sense strand starting at position 438 of SEQ ID NO: 1884266
gcggucaggagcuacaaua

SEQ ID NO: 2252767 - RNA, 19 nt, Artificial Sequence
  Description of Artificial Sequence: Synthetic oligonucleotide
  Antisense strand to SEQ ID NO: 2252766
uauuguagcuccugaccgc

SEQ ID NO: 2252768 - RNA, 19 nt, Artificial Sequence
  Description of Artificial Sequence: Synthetic oligonucleotide
  Sense strand starting at position 614 of SEQ ID NO: 1884266
aaguauuuguguguaugga

SEQ ID NO: 2252769 - RNA, 19 nt, Artificial Sequence
  Description of Artificial Sequence: Synthetic oligonucleotide
  Antisense strand to SEQ ID NO: 2252768
uccauacacacaaauacuu

SEQ ID NO: 2252770 - RNA, 19 nt, Artificial Sequence
  Description of Artificial Sequence: Synthetic oligonucleotide
  Sense strand starting at position 708 of SEQ ID NO: 1884266
gcccuuuacccugauacgu

SEQ ID NO: 2252771 - RNA, 19 nt, Artificial Sequence
  Description of Artificial Sequence: Synthetic oligonucleotide
  Antisense strand to SEQ ID NO: 2252770
acguaucaggguaaagggc

SEQ ID NO: 2252772 - RNA, 19 nt, Artificial Sequence
  Description of Artificial Sequence: Synthetic oligonucleotide
  Sense strand starting at position 717 of SEQ ID NO: 1884266
ccugauacguccuuuaaua

SEQ ID NO: 2252773 - RNA, 19 nt, Artificial Sequence
  Description of Artificial Sequence: Synthetic oligonucleotide
  Antisense strand to SEQ ID NO: 2252772
uauuaaaggacguaucagg

SEQ ID NO: 2252774 - RNA, 19 nt, Artificial Sequence
  Description of Artificial Sequence: Synthetic oligonucleotide
  Sense strand starting at position 719 of SEQ ID NO: 1884266
ugauacguccuuuaauauc

SEQ ID NO: 2252775 - RNA, 19 nt, Artificial Sequence
  Description of Artificial Sequence: Synthetic oligonucleotide
  Antisense strand to SEQ ID NO: 2252774
gauauuaaaggacguauca

SEQ ID NO: 2252776 - RNA, 19 nt, Artificial Sequence
  Description of Artificial Sequence: Synthetic oligonucleotide
  Sense strand starting at position 727 of SEQ ID NO: 1884266
ccuuuaauaucuucgcuga

SEQ ID NO: 2252777 - RNA, 19 nt, Artificial Sequence
  Description of Artificial Sequence: Synthetic oligonucleotide
  Antisense strand to SEQ ID NO: 2252776
ucagcgaagauauuaaagg

SEQ ID NO: 2252778 - RNA, 19 nt, Artificial Sequence
  Description of Artificial Sequence: Synthetic oligonucleotide
  Sense strand starting at position 775 of SEQ ID NO: 1884266
agaauuuaauacugggaau

SEQ ID NO: 2252779 - RNA, 19 nt, Artificial Sequence
  Description of Artificial Sequence: Synthetic oligonucleotide
  Antisense strand to SEQ ID NO: 2252778
auucccaguauuaaauucu

SEQ ID NO: 2252780 - RNA, 19 nt, Artificial Sequence
  Description of Artificial Sequence: Synthetic oligonucleotide
  Sense strand starting at position 1096 of SEQ ID NO: 1884266
acuucuauacgucaaagac

SEQ ID NO: 2252781 - RNA, 19 nt, Artificial Sequence
  Description of Artificial Sequence: Synthetic oligonucleotide
  Antisense strand to SEQ ID NO: 2252780
gucuuugacguauagaagu

SEQ ID NO: 2252782 - RNA, 19 nt, Artificial Sequence
  Description of Artificial Sequence: Synthetic oligonucleotide
  Sense strand starting at position 2181 of SEQ ID NO: 1884266
gggagucagcugagcguua

SEQ ID NO: 2252783 - RNA, 19 nt, Artificial Sequence
  Description of Artificial Sequence: Synthetic oligonucleotide
  Antisense strand to SEQ ID NO: 2252782
uaacgcucagcugacuccc

SEQ ID NO: 2252784 - RNA, 19 nt, Artificial Sequence
  Description of Artificial Sequence: Synthetic oligonucleotide
  Sense strand starting at position 2192 of SEQ ID NO: 1884266
gagcguuacccacguccau

SEQ ID NO: 2252785 - RNA, 19 nt, Artificial Sequence
  Description of Artificial Sequence: Synthetic oligonucleotide
  Antisense strand to SEQ ID NO: 2252784
auggacguggguaacgcuc

SEQ ID NO: 2252786 - RNA, 19 nt, Artificial Sequence
  Description of Artificial Sequence: Synthetic oligonucleotide
  Sense strand starting at position 2554 of SEQ ID NO: 1884266
ggauuaugggccuggagaa

SEQ ID NO: 2252787 - RNA, 19 nt, Artificial Sequence
  Description of Artificial Sequence: Synthetic oligonucleotide
  Antisense strand to SEQ ID NO: 2252786
uucuccaggcccauaaucc

SEQ ID NO: 2252788 - RNA, 19 nt, Artificial Sequence
  Description of Artificial Sequence: Synthetic oligonucleotide
  Sense strand starting at position 2665 of SEQ ID NO: 1884266
augggagaccguuaguuua

SEQ ID NO: 2252789 - RNA, 19 nt, Artificial Sequence
  Description of Artificial Sequence: Synthetic oligonucleotide
  Antisense strand to SEQ ID NO: 2252788
uaaacuaacggucucccau

SEQ ID NO: 2252790 - RNA, 19 nt, Artificial Sequence
  Description of Artificial Sequence: Synthetic oligonucleotide
  Sense strand starting at position 2667 of SEQ ID NO: 1884266
gggagaccguuaguuuaga

SEQ ID NO: 2252791 - RNA, 19 nt, Artificial Sequence
  Description of Artificial Sequence: Synthetic oligonucleotide
  Antisense strand to SEQ ID NO: 2252790
ucuaaacuaacggucuccc

SEQ ID NO: 2252792 - RNA, 19 nt, Artificial Sequence
  Description of Artificial Sequence: Synthetic oligonucleotide
  Sense strand starting at position 2694 of SEQ ID NO: 1884266
cugcauuaggcccaucaga

SEQ ID NO: 2252793 - RNA, 19 nt, Artificial Sequence
  Description of Artificial Sequence: Synthetic oligonucleotide
  Antisense strand to SEQ ID NO: 2252792
ucugaugggccuaaugcag

SEQ ID NO: 2252794 - RNA, 19 nt, Artificial Sequence
  Description of Artificial Sequence: Synthetic oligonucleotide
  Sense strand starting at position 2727 of SEQ ID NO: 1884266
gguuacucaugcugaaguu

SEQ ID NO: 2252795 - RNA, 19 nt, Artificial Sequence
  Description of Artificial Sequence: Synthetic oligonucleotide
  Antisense strand to SEQ ID NO: 2252794
aacuucagcaugaguaacc

SEQ ID NO: 2252796 - RNA, 19 nt, Artificial Sequence
  Description of Artificial Sequence: Synthetic oligonucleotide
  Sense strand starting at position 2915 of SEQ ID NO: 1884266
ccagccuaggcauaguaau

SEQ ID NO: 2252797 - RNA, 19 nt, Artificial Sequence
  Description of Artificial Sequence: Synthetic oligonucleotide
  Antisense strand to SEQ ID NO: 2252796
auuacuaugccuaggcugg

SEQ ID NO: 2252798 - RNA, 19 nt, Artificial Sequence
  Description of Artificial Sequence: Synthetic oligonucleotide
  Sense strand starting at position 3164 of SEQ ID NO: 1884266
gaagaagucccguguucuu

SEQ ID NO: 2252799 - RNA, 19 nt, Artificial Sequence
  Description of Artificial Sequence: Synthetic oligonucleotide
  Antisense strand to SEQ ID NO: 2252798
aagaacacgggacuucuuc

SEQ ID NO: 2252800 - RNA, 19 nt, Artificial Sequence
  Description of Artificial Sequence: Synthetic oligonucleotide
  Sense strand starting at position 3167 of SEQ ID NO: 1884266
gaagucccguguucuuuaa

SEQ ID NO: 2252801 - RNA, 19 nt, Artificial Sequence
  Description of Artificial Sequence: Synthetic oligonucleotide
  Antisense strand to SEQ ID NO: 2252800
uuaaagaacacgggacuuc

SEQ ID NO: 2252802 - RNA, 19 nt, Artificial Sequence
  Description of Artificial Sequence: Synthetic oligonucleotide
  Sense strand starting at position 3171 of SEQ ID NO: 1884266
ucccguguucuuuaaccuu

SEQ ID NO: 2252803 - RNA, 19 nt, Artificial Sequence
  Description of Artificial Sequence: Synthetic oligonucleotide
  Antisense strand to SEQ ID NO: 2252802
aagguuaaagaacacggga

SEQ ID NO: 2252804 - RNA, 19 nt, Artificial Sequence
  Description of Artificial Sequence: Synthetic oligonucleotide
  Sense strand starting at position 3307 of SEQ ID NO: 1884266
aaugaagcguugcccaauu

SEQ ID NO: 2252805 - RNA, 19 nt, Artificial Sequence
  Description of Artificial Sequence: Synthetic oligonucleotide
  Antisense strand to SEQ ID NO: 2252804
aauugggcaacgcuucauu

SEQ ID NO: 2252806 - RNA, 19 nt, Artificial Sequence
  Description of Artificial Sequence: Synthetic oligonucleotide
  Sense strand starting at position 3315 of SEQ ID NO: 1884266
guugcccaauuguagaauu

SEQ ID NO: 2252807 - RNA, 19 nt, Artificial Sequence
  Description of Artificial Sequence: Synthetic oligonucleotide
  Antisense strand to SEQ ID NO: 2252806
aauucuacaauugggcaac

SEQ ID NO: 2252808 - RNA, 19 nt, Artificial Sequence
  Description of Artificial Sequence: Synthetic oligonucleotide
  Sense strand starting at position 3323 of SEQ ID NO: 1884266
auuguagaauuggaacuaa

SEQ ID NO: 2252809 - RNA, 19 nt, Artificial Sequence
  Description of Artificial Sequence: Synthetic oligonucleotide
  Antisense strand to SEQ ID NO: 2252808
uuaguuccaauucuacaau

SEQ ID NO: 2252810 - RNA, 19 nt, Artificial Sequence
  Description of Artificial Sequence: Synthetic oligonucleotide
  Sense strand starting at position 3415 of SEQ ID NO: 1884266
ugagcagucuaaugaaaua

SEQ ID NO: 2252811 - RNA, 19 nt, Artificial Sequence
  Description of Artificial Sequence: Synthetic oligonucleotide
  Antisense strand to SEQ ID NO: 2252810
uauuucauuagacugcuca

SEQ ID NO: 2252812 - RNA, 19 nt, Artificial Sequence
  Description of Artificial Sequence: Synthetic oligonucleotide
  Sense strand starting at position 3474 of SEQ ID NO: 1884266
caauaaugucgccgguaga

SEQ ID NO: 2252813 - RNA, 19 nt, Artificial Sequence
  Description of Artificial Sequence: Synthetic oligonucleotide
  Antisense strand to SEQ ID NO: 2252812
ucuaccggcgacauuauug

SEQ ID NO: 2252814 - RNA, 19 nt, Artificial Sequence
  Description of Artificial Sequence: Synthetic oligonucleotide
  Sense strand starting at position 3848 of SEQ ID NO: 1884266
cgaagugaucuuuaauagc

SEQ ID NO: 2252815 - RNA, 19 nt, Artificial Sequence
  Description of Artificial Sequence: Synthetic oligonucleotide
  Antisense strand to SEQ ID NO: 2252814
gcuauuaaagaucacuucg

SEQ ID NO: 2252816 - RNA, 19 nt, Artificial Sequence
  Description of Artificial Sequence: Synthetic oligonucleotide
  Sense strand starting at position 3851 of SEQ ID NO: 1884266
agugaucuuuaauagccau

SEQ ID NO: 2252817 - RNA, 19 nt, Artificial Sequence
  Description of Artificial Sequence: Synthetic oligonucleotide
  Antisense strand to SEQ ID NO: 2252816
auggcuauuaaagaucacu

SEQ ID NO: 2252818 - RNA, 19 nt, Artificial Sequence
  Description of Artificial Sequence: Synthetic oligonucleotide
  Sense strand starting at position 3870 of SEQ ID NO: 1884266
cagccauagucucugagca

SEQ ID NO: 2252819 - RNA, 19 nt, Artificial Sequence
  Description of Artificial Sequence: Synthetic oligonucleotide
  Antisense strand to SEQ ID NO: 2252818
ugcucagagacuauggcug

SEQ ID NO: 2252820 - RNA, 19 nt, Artificial Sequence
  Description of Artificial Sequence: Synthetic oligonucleotide
  Sense strand starting at position 3871 of SEQ ID NO: 1884266
agccauagucucugagcaa

SEQ ID NO: 2252821 - RNA, 19 nt, Artificial Sequence
  Description of Artificial Sequence: Synthetic oligonucleotide
  Antisense strand to SEQ ID NO: 2252820
uugcucagagacuauggcu

SEQ ID NO: 2252822 - RNA, 19 nt, Artificial Sequence
  Description of Artificial Sequence: Synthetic oligonucleotide
  Sense strand starting at position 3872 of SEQ ID NO: 1884266
gccauagucucugagcaaa

SEQ ID NO: 2252823 - RNA, 19 nt, Artificial Sequence
  Description of Artificial Sequence: Synthetic oligonucleotide
  Antisense strand to SEQ ID NO: 2252822
uuugcucagagacuauggc

SEQ ID NO: 2252824 - RNA, 19 nt, Artificial Sequence
  Description of Artificial Sequence: Synthetic oligonucleotide
  Sense strand starting at position 3921 of SEQ ID NO: 1884266
gaaagccaugucugcucaa

SEQ ID NO: 2252825 - RNA, 19 nt, Artificial Sequence
  Description of Artificial Sequence: Synthetic oligonucleotide
  Antisense strand to SEQ ID NO: 2252824
uugagcagacauggcuuuc

SEQ ID NO: 2252826 - RNA, 19 nt, Artificial Sequence
  Description of Artificial Sequence: Synthetic oligonucleotide
  Sense strand starting at position 3924 of SEQ ID NO: 1884266
agccaugucugcucaaaug

SEQ ID NO: 2252827 - RNA, 19 nt, Artificial Sequence
  Description of Artificial Sequence: Synthetic oligonucleotide
  Antisense strand to SEQ ID NO: 2252826
cauuugagcagacauggcu

SEQ ID NO: 2252828 - RNA, 19 nt, Artificial Sequence
  Description of Artificial Sequence: Synthetic oligonucleotide
  Sense strand starting at position 3935 of SEQ ID NO: 1884266
cucaaaugcucucaacguu

SEQ ID NO: 2252829 - RNA, 19 nt, Artificial Sequence
  Description of Artificial Sequence: Synthetic oligonucleotide
  Antisense strand to SEQ ID NO: 2252828
aacguugagagcauuugag

SEQ ID NO: 2252830 - RNA, 19 nt, Artificial Sequence
  Description of Artificial Sequence: Synthetic oligonucleotide
  Sense strand starting at position 3977 of SEQ ID NO: 1884266
aggauaggcuuccacaguu

SEQ ID NO: 2252831 - RNA, 19 nt, Artificial Sequence
  Description of Artificial Sequence: Synthetic oligonucleotide
  Antisense strand to SEQ ID NO: 2252830
aacuguggaagccuauccu

SEQ ID NO: 2252832 - RNA, 19 nt, Artificial Sequence
  Description of Artificial Sequence: Synthetic oligonucleotide
  Sense strand starting at position 23 of SEQ ID NO: 1884267
uaugaaauggcuuggaucu

SEQ ID NO: 2252833 - RNA, 19 nt, Artificial Sequence
  Description of Artificial Sequence: Synthetic oligonucleotide
  Antisense strand to SEQ ID NO: 2252832
agauccaagccauuucaua

SEQ ID NO: 2252834 - RNA, 19 nt, Artificial Sequence
  Description of Artificial Sequence: Synthetic oligonucleotide
  Sense strand starting at position 29 of SEQ ID NO: 1884267
auggcuuggaucugaguga

SEQ ID NO: 2252835 - RNA, 19 nt, Artificial Sequence
  Description of Artificial Sequence: Synthetic oligonucleotide
  Antisense strand to SEQ ID NO: 2252834
ucacucagauccaagccau

SEQ ID NO: 2252836 - RNA, 19 nt, Artificial Sequence
  Description of Artificial Sequence: Synthetic oligonucleotide
  Sense strand starting at position 62 of SEQ ID NO: 1884267
aggaguggauccaggaaga

SEQ ID NO: 2252837 - RNA, 19 nt, Artificial Sequence
  Description of Artificial Sequence: Synthetic oligonucleotide
  Antisense strand to SEQ ID NO: 2252836
ucuuccuggauccacuccu

SEQ ID NO: 2252838 - RNA, 19 nt, Artificial Sequence
  Description of Artificial Sequence: Synthetic oligonucleotide
  Sense strand starting at position 136 of SEQ ID NO: 1884267
ugaugaaaguuuccaaucu

SEQ ID NO: 2252839 - RNA, 19 nt, Artificial Sequence
  Description of Artificial Sequence: Synthetic oligonucleotide
  Antisense strand to SEQ ID NO: 2252838
agauuggaaacuuucauca

SEQ ID NO: 2252840 - RNA, 19 nt, Artificial Sequence
  Description of Artificial Sequence: Synthetic oligonucleotide
  Sense strand starting at position 165 of SEQ ID NO: 1884267
cuguauugcccugaauaga

SEQ ID NO: 2252841 - RNA, 19 nt, Artificial Sequence
  Description of Artificial Sequence: Synthetic oligonucleotide
  Antisense strand to SEQ ID NO: 2252840
ucuauucagggcaauacag

SEQ ID NO: 2252842 - RNA, 19 nt, Artificial Sequence
  Description of Artificial Sequence: Synthetic oligonucleotide
  Sense strand starting at position 255 of SEQ ID NO: 1884267
gaaugugauuccuccuaag

SEQ ID NO: 2252843 - RNA, 19 nt, Artificial Sequence
  Description of Artificial Sequence: Synthetic oligonucleotide
  Antisense strand to SEQ ID NO: 2252842
cuuaggaggaaucacauuc

SEQ ID NO: 2252844 - RNA, 19 nt, Artificial Sequence
  Description of Artificial Sequence: Synthetic oligonucleotide
  Sense strand starting at position 362 of SEQ ID NO: 1884267
auaguaugaucacuguuac

SEQ ID NO: 2252845 - RNA, 19 nt, Artificial Sequence
  Description of Artificial Sequence: Synthetic oligonucleotide
  Antisense strand to SEQ ID NO: 2252844
guaacagugaucauacuau

SEQ ID NO: 2252846 - RNA, 19 nt, Artificial Sequence
  Description of Artificial Sequence: Synthetic oligonucleotide
  Sense strand starting at position 369 of SEQ ID NO: 1884267
gaucacuguuacgucauuu

SEQ ID NO: 2252847 - RNA, 19 nt, Artificial Sequence
  Description of Artificial Sequence: Synthetic oligonucleotide
  Antisense strand to SEQ ID NO: 2252846
aaaugacguaacagugauc

SEQ ID NO: 2252848 - RNA, 19 nt, Artificial Sequence
  Description of Artificial Sequence: Synthetic oligonucleotide
  Sense strand starting at position 373 of SEQ ID NO: 1884267
acuguuacgucauuugauu

SEQ ID NO: 2252849 - RNA, 19 nt, Artificial Sequence
  Description of Artificial Sequence: Synthetic oligonucleotide
  Antisense strand to SEQ ID NO: 2252848
aaucaaaugacguaacagu

SEQ ID NO: 2252850 - RNA, 19 nt, Artificial Sequence
  Description of Artificial Sequence: Synthetic oligonucleotide
  Sense strand starting at position 425 of SEQ ID NO: 1884267
guguuauagcugucugcca

SEQ ID NO: 2252851 - RNA, 19 nt, Artificial Sequence
  Description of Artificial Sequence: Synthetic oligonucleotide
  Antisense strand to SEQ ID NO: 2252850
uggcagacagcuauaacac

SEQ ID NO: 2252852 - RNA, 19 nt, Artificial Sequence
  Description of Artificial Sequence: Synthetic oligonucleotide
  Sense strand starting at position 531 of SEQ ID NO: 1884267
ugauaaguccagcacuuaa

SEQ ID NO: 2252853 - RNA, 19 nt, Artificial Sequence
  Description of Artificial Sequence: Synthetic oligonucleotide
  Antisense strand to SEQ ID NO: 2252852
uuaagugcuggacuuauca

SEQ ID NO: 2252854 - RNA, 19 nt, Artificial Sequence
  Description of Artificial Sequence: Synthetic oligonucleotide
  Sense strand starting at position 554 of SEQ ID NO: 1884267
ugugaauugaacugguuga

SEQ ID NO: 2252855 - RNA, 19 nt, Artificial Sequence
  Description of Artificial Sequence: Synthetic oligonucleotide
  Antisense strand to SEQ ID NO: 2252854
ucaaccaguucaauucaca

SEQ ID NO: 2252856 - RNA, 19 nt, Artificial Sequence
  Description of Artificial Sequence: Synthetic oligonucleotide
  Sense strand starting at position 555 of SEQ ID NO: 1884267
gugaauugaacugguugau

SEQ ID NO: 2252857 - RNA, 19 nt, Artificial Sequence
  Description of Artificial Sequence: Synthetic oligonucleotide
  Antisense strand to SEQ ID NO: 2252856
aucaaccaguucaauucac

SEQ ID NO: 2252858 - RNA, 19 nt, Artificial Sequence
  Description of Artificial Sequence: Synthetic oligonucleotide
  Sense strand starting at position 558 of SEQ ID NO: 1884267
aauugaacugguugauagu

SEQ ID NO: 2252859 - RNA, 19 nt, Artificial Sequence
  Description of Artificial Sequence: Synthetic oligonucleotide
  Antisense strand to SEQ ID NO: 2252858
acuaucaaccaguucaauu

SEQ ID NO: 2252860 - RNA, 19 nt, Artificial Sequence
  Description of Artificial Sequence: Synthetic oligonucleotide
  Sense strand starting at position 713 of SEQ ID NO: 1884267
uaggcuccucauuagugaa

SEQ ID NO: 2252861 - RNA, 19 nt, Artificial Sequence
  Description of Artificial Sequence: Synthetic oligonucleotide
  Antisense strand to SEQ ID NO: 2252860
uucacuaaugaggagccua

SEQ ID NO: 2252862 - RNA, 19 nt, Artificial Sequence
  Description of Artificial Sequence: Synthetic oligonucleotide
  Sense strand starting at position 759 of SEQ ID NO: 1884267
gggugugagugcaucaagu

SEQ ID NO: 2252863 - RNA, 19 nt, Artificial Sequence
  Description of Artificial Sequence: Synthetic oligonucleotide
  Antisense strand to SEQ ID NO: 2252862
acuugaugcacucacaccc

SEQ ID NO: 2252864 - RNA, 19 nt, Artificial Sequence
  Description of Artificial Sequence: Synthetic oligonucleotide
  Sense strand starting at position 808 of SEQ ID NO: 1884267
ucaguuggcaucgacauua

SEQ ID NO: 2252865 - RNA, 19 nt, Artificial Sequence
  Description of Artificial Sequence: Synthetic oligonucleotide
  Antisense strand to SEQ ID NO: 2252864
uaaugucgaugccaacuga

SEQ ID NO: 2252866 - RNA, 19 nt, Artificial Sequence
  Description of Artificial Sequence: Synthetic oligonucleotide
  Sense strand starting at position 1096 of SEQ ID NO: 1884267
guaauuuagaugugguagu

SEQ ID NO: 2252867 - RNA, 19 nt, Artificial Sequence
  Description of Artificial Sequence: Synthetic oligonucleotide
  Antisense strand to SEQ ID NO: 2252866
acuaccacaucuaaauuac

SEQ ID NO: 2252868 - RNA, 19 nt, Artificial Sequence
  Description of Artificial Sequence: Synthetic oligonucleotide
  Sense strand starting at position 1117 of SEQ ID NO: 1884267
uuaugccuggccuaugaau

SEQ ID NO: 2252869 - RNA, 19 nt, Artificial Sequence
  Description of Artificial Sequence: Synthetic oligonucleotide
  Antisense strand to SEQ ID NO: 2252868
auucauaggccaggcauaa

SEQ ID NO: 2252870 - RNA, 19 nt, Artificial Sequence
  Description of Artificial Sequence: Synthetic oligonucleotide
  Sense strand starting at position 1324 of SEQ ID NO: 1884267
ugaguugucucacucaagg

SEQ ID NO: 2252871 - RNA, 19 nt, Artificial Sequence
  Description of Artificial Sequence: Synthetic oligonucleotide
  Antisense strand to SEQ ID NO: 2252870
ccuugagugagacaacuca

SEQ ID NO: 2252872 - RNA, 19 nt, Artificial Sequence
  Description of Artificial Sequence: Synthetic oligonucleotide
  Sense strand starting at position 1395 of SEQ ID NO: 1884267
ugaggcacuguauaucuua

SEQ ID NO: 2252873 - RNA, 19 nt, Artificial Sequence
  Description of Artificial Sequence: Synthetic oligonucleotide
  Antisense strand to SEQ ID NO: 2252872
uaagauauacagugccuca

SEQ ID NO: 2252874 - RNA, 19 nt, Artificial Sequence
  Description of Artificial Sequence: Synthetic oligonucleotide
  Sense strand starting at position 1402 of SEQ ID NO: 1884267
cuguauaucuuaucucaga

SEQ ID NO: 2252875 - RNA, 19 nt, Artificial Sequence
  Description of Artificial Sequence: Synthetic oligonucleotide
  Antisense strand to SEQ ID NO: 2252874
ucugagauaagauauacag

SEQ ID NO: 2252876 - RNA, 19 nt, Artificial Sequence
  Description of Artificial Sequence: Synthetic oligonucleotide
  Sense strand starting at position 1422 of SEQ ID NO: 1884267
ugaaaugaauucuuaaguc

SEQ ID NO: 2252877 - RNA, 19 nt, Artificial Sequence
  Description of Artificial Sequence: Synthetic oligonucleotide
  Antisense strand to SEQ ID NO: 2252876
gacuuaagaauucauuuca

SEQ ID NO: 2252878 - RNA, 19 nt, Artificial Sequence
  Description of Artificial Sequence: Synthetic oligonucleotide
  Sense strand starting at position 1879 of SEQ ID NO: 1884267
aacauaugucugugacaag

SEQ ID NO: 2252879 - RNA, 19 nt, Artificial Sequence
  Description of Artificial Sequence: Synthetic oligonucleotide
  Antisense strand to SEQ ID NO: 2252878
cuugucacagacauauguu

SEQ ID NO: 2252880 - RNA, 19 nt, Artificial Sequence
  Description of Artificial Sequence: Synthetic oligonucleotide
  Sense strand starting at position 1952 of SEQ ID NO: 1884267
agcuaccuaucccugagau

SEQ ID NO: 2252881 - RNA, 19 nt, Artificial Sequence
  Description of Artificial Sequence: Synthetic oligonucleotide
  Antisense strand to SEQ ID NO: 2252880
aucucagggauagguagcu

SEQ ID NO: 2252882 - RNA, 19 nt, Artificial Sequence
  Description of Artificial Sequence: Synthetic oligonucleotide
  Sense strand starting at position 1953 of SEQ ID NO: 1884267
gcuaccuaucccugagaug

SEQ ID NO: 2252883 - RNA, 19 nt, Artificial Sequence
  Description of Artificial Sequence: Synthetic oligonucleotide
  Antisense strand to SEQ ID NO: 2252882
caucucagggauagguagc

SEQ ID NO: 2252884 - RNA, 19 nt, Artificial Sequence
  Description of Artificial Sequence: Synthetic oligonucleotide
  Sense strand starting at position 1985 of SEQ ID NO: 1884267
gugcccauuccaggagaca

SEQ ID NO: 2252885 - RNA, 19 nt, Artificial Sequence
  Description of Artificial Sequence: Synthetic oligonucleotide
  Antisense strand to SEQ ID NO: 2252884
ugucuccuggaaugggcac

SEQ ID NO: 2252886 - RNA, 19 nt, Artificial Sequence
  Description of Artificial Sequence: Synthetic oligonucleotide
  Sense strand starting at position 1986 of SEQ ID NO: 1884267
ugcccauuccaggagacau

SEQ ID NO: 2252887 - RNA, 19 nt, Artificial Sequence
  Description of Artificial Sequence: Synthetic oligonucleotide
  Antisense strand to SEQ ID NO: 2252886
augucuccuggaaugggca

SEQ ID NO: 2252888 - RNA, 19 nt, Artificial Sequence
  Description of Artificial Sequence: Synthetic oligonucleotide
  Sense strand starting at position 2216 of SEQ ID NO: 1884267
guggcauuugcugagcagu

SEQ ID NO: 2252889 - RNA, 19 nt, Artificial Sequence
  Description of Artificial Sequence: Synthetic oligonucleotide
  Antisense strand to SEQ ID NO: 2252888
acugcucagcaaaugccac

SEQ ID NO: 2252890 - RNA, 19 nt, Artificial Sequence
  Description of Artificial Sequence: Synthetic oligonucleotide
  Sense strand starting at position 2389 of SEQ ID NO: 1884267
uagagaguccuguaauucc

SEQ ID NO: 2252891 - RNA, 19 nt, Artificial Sequence
  Description of Artificial Sequence: Synthetic oligonucleotide
  Antisense strand to SEQ ID NO: 2252890
ggaauuacaggacucucua

SEQ ID NO: 2252892 - RNA, 19 nt, Artificial Sequence
  Description of Artificial Sequence: Synthetic oligonucleotide
  Sense strand starting at position 2427 of SEQ ID NO: 1884267
gcaagaacgaacugggaua

SEQ ID NO: 2252893 - RNA, 19 nt, Artificial Sequence
  Description of Artificial Sequence: Synthetic oligonucleotide
  Antisense strand to SEQ ID NO: 2252892
uaucccaguucguucuugc

SEQ ID NO: 2252894 - RNA, 19 nt, Artificial Sequence
  Description of Artificial Sequence: Synthetic oligonucleotide
  Sense strand starting at position 2757 of SEQ ID NO: 1884267
ucagcucugcucguuacua

SEQ ID NO: 2252895 - RNA, 19 nt, Artificial Sequence
  Description of Artificial Sequence: Synthetic oligonucleotide
  Antisense strand to SEQ ID NO: 2252894
uaguaacgagcagagcuga

SEQ ID NO: 2252896 - RNA, 19 nt, Artificial Sequence
  Description of Artificial Sequence: Synthetic oligonucleotide
  Sense strand starting at position 2907 of SEQ ID NO: 1884267
ggucaauugcacgaauucu

SEQ ID NO: 2252897 - RNA, 19 nt, Artificial Sequence
  Description of Artificial Sequence: Synthetic oligonucleotide
  Antisense strand to SEQ ID NO: 2252896
agaauucgugcaauugacc

SEQ ID NO: 2252898 - RNA, 19 nt, Artificial Sequence
  Description of Artificial Sequence: Synthetic oligonucleotide
  Sense strand starting at position 2953 of SEQ ID NO: 1884267
ccagacaaaucaccgugaa

SEQ ID NO: 2252899 - RNA, 19 nt, Artificial Sequence
  Description of Artificial Sequence: Synthetic oligonucleotide
  Antisense strand to SEQ ID NO: 2252898
uucacggugauuugucugg

SEQ ID NO: 2252900 - RNA, 19 nt, Artificial Sequence
  Description of Artificial Sequence: Synthetic oligonucleotide
  Sense strand starting at position 2954 of SEQ ID NO: 1884267
cagacaaaucaccgugaac

SEQ ID NO: 2252901 - RNA, 19 nt, Artificial Sequence
  Description of Artificial Sequence: Synthetic oligonucleotide
  Antisense strand to SEQ ID NO: 2252900
guucacggugauuugucug

SEQ ID NO: 2252902 - RNA, 19 nt, Artificial Sequence
  Description of Artificial Sequence: Synthetic oligonucleotide
  Sense strand starting at position 2979 of SEQ ID NO: 1884267
cugugcauugcuguccuaa

SEQ ID NO: 2252903 - RNA, 19 nt, Artificial Sequence
  Description of Artificial Sequence: Synthetic oligonucleotide
  Antisense strand to SEQ ID NO: 2252902
uuaggacagcaaugcacag

SEQ ID NO: 2252904 - RNA, 19 nt, Artificial Sequence
  Description of Artificial Sequence: Synthetic oligonucleotide
  Sense strand starting at position 3025 of SEQ ID NO: 1884267
aagauucugucauuugugu

SEQ ID NO: 2252905 - RNA, 19 nt, Artificial Sequence
  Description of Artificial Sequence: Synthetic oligonucleotide
  Antisense strand to SEQ ID NO: 2252904
acacaaaugacagaaucuu

SEQ ID NO: 2252906 - RNA, 19 nt, Artificial Sequence
  Description of Artificial Sequence: Synthetic oligonucleotide
  Sense strand starting at position 3030 of SEQ ID NO: 1884267
ucugucauuuguguuacau

SEQ ID NO: 2252907 - RNA, 19 nt, Artificial Sequence
  Description of Artificial Sequence: Synthetic oligonucleotide
  Antisense strand to SEQ ID NO: 2252906
auguaacacaaaugacaga

SEQ ID NO: 2252908 - RNA, 19 nt, Artificial Sequence
  Description of Artificial Sequence: Synthetic oligonucleotide
  Sense strand starting at position 3138 of SEQ ID NO: 1884267
ugacuuccaccaggguaaa

SEQ ID NO: 2252909 - RNA, 19 nt, Artificial Sequence
  Description of Artificial Sequence: Synthetic oligonucleotide
  Antisense strand to SEQ ID NO: 2252908
uuuacccugguggaaguca

SEQ ID NO: 2252910 - RNA, 19 nt, Artificial Sequence
  Description of Artificial Sequence: Synthetic oligonucleotide
  Sense strand starting at position 3161 of SEQ ID NO: 1884267
acugaucacugaguucuau

SEQ ID NO: 2252911 - RNA, 19 nt, Artificial Sequence
  Description of Artificial Sequence: Synthetic oligonucleotide
  Antisense strand to SEQ ID NO: 2252910
auagaacucagugaucagu

SEQ ID NO: 2252912 - RNA, 19 nt, Artificial Sequence
  Description of Artificial Sequence: Synthetic oligonucleotide
  Sense strand starting at position 51 of SEQ ID NO: 1884268
ugacuuccaccaggguaaa

SEQ ID NO: 2252913 - RNA, 19 nt, Artificial Sequence
  Description of Artificial Sequence: Synthetic oligonucleotide
  Antisense strand to SEQ ID NO: 2252912
uuuacccugguggaaguca

SEQ ID NO: 2252914 - RNA, 19 nt, Artificial Sequence
  Description of Artificial Sequence: Synthetic oligonucleotide
  Sense strand starting at position 74 of SEQ ID NO: 1884268
acugaucacugaguucuau

SEQ ID NO: 2252915 - RNA, 19 nt, Artificial Sequence
  Description of Artificial Sequence: Synthetic oligonucleotide
  Antisense strand to SEQ ID NO: 2252914
auagaacucagugaucagu

SEQ ID NO: 2252916 - RNA, 19 nt, Artificial Sequence
  Description of Artificial Sequence: Synthetic oligonucleotide
  Sense strand starting at position 241 of SEQ ID NO: 1884268
gugcaaucgugaucuggga

SEQ ID NO: 2252917 - RNA, 19 nt, Artificial Sequence
  Description of Artificial Sequence: Synthetic oligonucleotide
  Antisense strand to SEQ ID NO: 2252916
ucccagaucacgauugcac

SEQ ID NO: 2252918 - RNA, 19 nt, Artificial Sequence
  Description of Artificial Sequence: Synthetic oligonucleotide
  Sense strand starting at position 1053 of SEQ ID NO: 1884268
cucagacuaucauccggaa

SEQ ID NO: 2252919 - RNA, 19 nt, Artificial Sequence
  Description of Artificial Sequence: Synthetic oligonucleotide
  Antisense strand to SEQ ID NO: 2252918
uuccggaugauagucugag

SEQ ID NO: 2252920 - RNA, 19 nt, Artificial Sequence
  Description of Artificial Sequence: Synthetic oligonucleotide
  Sense strand starting at position 2227 of SEQ ID NO: 1884268
ggacgcuccguuucaaguu

SEQ ID NO: 2252921 - RNA, 19 nt, Artificial Sequence
  Description of Artificial Sequence: Synthetic oligonucleotide
  Antisense strand to SEQ ID NO: 2252920
aacuugaaacggagcgucc

SEQ ID NO: 2252922 - RNA, 19 nt, Artificial Sequence
  Description of Artificial Sequence: Synthetic oligonucleotide
  Sense strand starting at position 2876 of SEQ ID NO: 1884268
agcuucucaugauuagaaa

SEQ ID NO: 2252923 - RNA, 19 nt, Artificial Sequence
  Description of Artificial Sequence: Synthetic oligonucleotide
  Antisense strand to SEQ ID NO: 2252922
uuucuaaucaugagaagcu

SEQ ID NO: 2252924 - RNA, 19 nt, Artificial Sequence
  Description of Artificial Sequence: Synthetic oligonucleotide
  Sense strand starting at position 3015 of SEQ ID NO: 1884268
ucaagcgauccuugaauga

SEQ ID NO: 2252925 - RNA, 19 nt, Artificial Sequence
  Description of Artificial Sequence: Synthetic oligonucleotide
  Antisense strand to SEQ ID NO: 2252924
ucauucaaggaucgcuuga

SEQ ID NO: 2252926 - RNA, 19 nt, Artificial Sequence
  Description of Artificial Sequence: Synthetic oligonucleotide
  Sense strand starting at position 3026 of SEQ ID NO: 1884268
uugaaugauuucuaagcag

SEQ ID NO: 2252927 - RNA, 19 nt, Artificial Sequence
  Description of Artificial Sequence: Synthetic oligonucleotide
  Antisense strand to SEQ ID NO: 2252926
cugcuuagaaaucauucaa

SEQ ID NO: 2252928 - RNA, 19 nt, Artificial Sequence
  Description of Artificial Sequence: Synthetic oligonucleotide
  Sense strand starting at position 3038 of SEQ ID NO: 1884268
uaagcaguuccuugggaca

SEQ ID NO: 2252929 - RNA, 19 nt, Artificial Sequence
  Description of Artificial Sequence: Synthetic oligonucleotide
  Antisense strand to SEQ ID NO: 2252928
ugucccaaggaacugcuua

SEQ ID NO: 2252930 - RNA, 19 nt, Artificial Sequence
  Description of Artificial Sequence: Synthetic oligonucleotide
  Sense strand starting at position 3118 of SEQ ID NO: 1884268
uugaccuucugguuucgaa

SEQ ID NO: 2252931 - RNA, 19 nt, Artificial Sequence
  Description of Artificial Sequence: Synthetic oligonucleotide
  Antisense strand to SEQ ID NO: 2252930
uucgaaaccagaaggucaa

SEQ ID NO: 2252932 - RNA, 19 nt, Artificial Sequence
  Description of Artificial Sequence: Synthetic oligonucleotide
  Sense strand starting at position 3147 of SEQ ID NO: 1884268
uuuagauugugguuugcca

SEQ ID NO: 2252933 - RNA, 19 nt, Artificial Sequence
  Description of Artificial Sequence: Synthetic oligonucleotide
  Antisense strand to SEQ ID NO: 2252932
uggcaaaccacaaucuaaa

SEQ ID NO: 2252934 - RNA, 19 nt, Artificial Sequence
  Description of Artificial Sequence: Synthetic oligonucleotide
  Sense strand starting at position 3149 of SEQ ID NO: 1884268
uagauugugguuugccaaa

SEQ ID NO: 2252935 - RNA, 19 nt, Artificial Sequence
  Description of Artificial Sequence: Synthetic oligonucleotide
  Antisense strand to SEQ ID NO: 2252934
uuuggcaaaccacaaucua

SEQ ID NO: 2252936 - RNA, 19 nt, Artificial Sequence
  Description of Artificial Sequence: Synthetic oligonucleotide
  Sense strand starting at position 3203 of SEQ ID NO: 1884268
cgcaauuaugcccugcagu

SEQ ID NO: 2252937 - RNA, 19 nt, Artificial Sequence
  Description of Artificial Sequence: Synthetic oligonucleotide
  Antisense strand to SEQ ID NO: 2252936
acugcagggcauaauugcg

SEQ ID NO: 2252938 - RNA, 19 nt, Artificial Sequence
  Description of Artificial Sequence: Synthetic oligonucleotide
  Sense strand starting at position 3307 of SEQ ID NO: 1884268
ucuauugugucauuaaagu

SEQ ID NO: 2252939 - RNA, 19 nt, Artificial Sequence
  Description of Artificial Sequence: Synthetic oligonucleotide
  Antisense strand to SEQ ID NO: 2252938
acuuuaaugacacaauaga

SEQ ID NO: 2252940 - RNA, 19 nt, Artificial Sequence
  Description of Artificial Sequence: Synthetic oligonucleotide
  Sense strand starting at position 3315 of SEQ ID NO: 1884268
gucauuaaaguucgaugga

SEQ ID NO: 2252941 - RNA, 19 nt, Artificial Sequence
  Description of Artificial Sequence: Synthetic oligonucleotide
  Antisense strand to SEQ ID NO: 2252940
uccaucgaacuuuaaugac

SEQ ID NO: 2252942 - RNA, 19 nt, Artificial Sequence
  Description of Artificial Sequence: Synthetic oligonucleotide
  Sense strand starting at position 3318 of SEQ ID NO: 1884268
auuaaaguucgauggaagu

SEQ ID NO: 2252943 - RNA, 19 nt, Artificial Sequence
  Description of Artificial Sequence: Synthetic oligonucleotide
  Antisense strand to SEQ ID NO: 2252942
acuuccaucgaacuuuaau

SEQ ID NO: 2252944 - RNA, 19 nt, Artificial Sequence
  Description of Artificial Sequence: Synthetic oligonucleotide
  Sense strand starting at position 3324 of SEQ ID NO: 1884268
guucgauggaaguaucacu

SEQ ID NO: 2252945 - RNA, 19 nt, Artificial Sequence
  Description of Artificial Sequence: Synthetic oligonucleotide
  Antisense strand to SEQ ID NO: 2252944
agugauacuuccaucgaac

SEQ ID NO: 2252946 - RNA, 19 nt, Artificial Sequence
  Description of Artificial Sequence: Synthetic oligonucleotide
  Sense strand starting at position 3329 of SEQ ID NO: 1884268
auggaaguaucacuaugca

SEQ ID NO: 2252947 - RNA, 19 nt, Artificial Sequence
  Description of Artificial Sequence: Synthetic oligonucleotide
  Antisense strand to SEQ ID NO: 2252946
ugcauagugauacuuccau

SEQ ID NO: 2252948 - RNA, 19 nt, Artificial Sequence
  Description of Artificial Sequence: Synthetic oligonucleotide
  Sense strand starting at position 3404 of SEQ ID NO: 1884268
ggguauuaaugguuucuau

SEQ ID NO: 2252949 - RNA, 19 nt, Artificial Sequence
  Description of Artificial Sequence: Synthetic oligonucleotide
  Antisense strand to SEQ ID NO: 2252948
auagaaaccauuaauaccc

SEQ ID NO: 2252950 - RNA, 19 nt, Artificial Sequence
  Description of Artificial Sequence: Synthetic oligonucleotide
  Sense strand starting at position 3466 of SEQ ID NO: 1884268
gguggcucuggacagaaau

SEQ ID NO: 2252951 - RNA, 19 nt, Artificial Sequence
  Description of Artificial Sequence: Synthetic oligonucleotide
  Antisense strand to SEQ ID NO: 2252950
auuucuguccagagccacc

SEQ ID NO: 2252952 - RNA, 19 nt, Artificial Sequence
  Description of Artificial Sequence: Synthetic oligonucleotide
  Sense strand starting at position 3478 of SEQ ID NO: 1884268
cagaaauaauaggagucuu

SEQ ID NO: 2252953 - RNA, 19 nt, Artificial Sequence
  Description of Artificial Sequence: Synthetic oligonucleotide
  Antisense strand to SEQ ID NO: 2252952
aagacuccuauuauuucug

SEQ ID NO: 2252954 - RNA, 19 nt, Artificial Sequence
  Description of Artificial Sequence: Synthetic oligonucleotide
  Sense strand starting at position 3492 of SEQ ID NO: 1884268
gucuuuguauucccaggga

SEQ ID NO: 2252955 - RNA, 19 nt, Artificial Sequence
  Description of Artificial Sequence: Synthetic oligonucleotide
  Antisense strand to SEQ ID NO: 2252954
ucccugggaauacaaagac

SEQ ID NO: 2252956 - RNA, 19 nt, Artificial Sequence
  Description of Artificial Sequence: Synthetic oligonucleotide
  Sense strand starting at position 3495 of SEQ ID NO: 1884268
uuuguauucccagggaagc

SEQ ID NO: 2252957 - RNA, 19 nt, Artificial Sequence
  Description of Artificial Sequence: Synthetic oligonucleotide
  Antisense strand to SEQ ID NO: 2252956
gcuucccugggaauacaaa

SEQ ID NO: 2252958 - RNA, 19 nt, Artificial Sequence
  Description of Artificial Sequence: Synthetic oligonucleotide
  Sense strand starting at position 3496 of SEQ ID NO: 1884268
uuguauucccagggaagcu

SEQ ID NO: 2252959 - RNA, 19 nt, Artificial Sequence
  Description of Artificial Sequence: Synthetic oligonucleotide
  Antisense strand to SEQ ID NO: 2252958
agcuucccugggaauacaa

SEQ ID NO: 2252960 - RNA, 19 nt, Artificial Sequence
  Description of Artificial Sequence: Synthetic oligonucleotide
  Sense strand starting at position 3497 of SEQ ID NO: 1884268
uguauucccagggaagcuu

SEQ ID NO: 2252961 - RNA, 19 nt, Artificial Sequence
  Description of Artificial Sequence: Synthetic oligonucleotide
  Antisense strand to SEQ ID NO: 2252960
aagcuucccugggaauaca

SEQ ID NO: 2252962 - RNA, 19 nt, Artificial Sequence
  Description of Artificial Sequence: Synthetic oligonucleotide
  Sense strand starting at position 3548 of SEQ ID NO: 1884268
ugauguaagcacgguucua

SEQ ID NO: 2252963 - RNA, 19 nt, Artificial Sequence
  Description of Artificial Sequence: Synthetic oligonucleotide
  Antisense strand to SEQ ID NO: 2252962
uagaaccgugcuuacauca

SEQ ID NO: 2252964 - RNA, 19 nt, Artificial Sequence
  Description of Artificial Sequence: Synthetic oligonucleotide
  Sense strand starting at position 3561 of SEQ ID NO: 1884268
guucuaauuggacacaagu

SEQ ID NO: 2252965 - RNA, 19 nt, Artificial Sequence
  Description of Artificial Sequence: Synthetic oligonucleotide
  Antisense strand to SEQ ID NO: 2252964
acuuguguccaauuagaac

SEQ ID NO: 2252966 - RNA, 19 nt, Artificial Sequence
  Description of Artificial Sequence: Synthetic oligonucleotide
  Sense strand starting at position 3584 of SEQ ID NO: 1884268
gcuaacauccguuaucuaa

SEQ ID NO: 2252967 - RNA, 19 nt, Artificial Sequence
  Description of Artificial Sequence: Synthetic oligonucleotide
  Antisense strand to SEQ ID NO: 2252966
uuagauaacggauguuagc

SEQ ID NO: 2252968 - RNA, 19 nt, Artificial Sequence
  Description of Artificial Sequence: Synthetic oligonucleotide
  Sense strand starting at position 3617 of SEQ ID NO: 1884268
uugagaaguagguaaugua

SEQ ID NO: 2252969 - RNA, 19 nt, Artificial Sequence
  Description of Artificial Sequence: Synthetic oligonucleotide
  Antisense strand to SEQ ID NO: 2252968
uacauuaccuacuucucaa

SEQ ID NO: 2252970 - RNA, 19 nt, Artificial Sequence
  Description of Artificial Sequence: Synthetic oligonucleotide
  Sense strand starting at position 3676 of SEQ ID NO: 1884268
guccuuucuugauuggguu

SEQ ID NO: 2252971 - RNA, 19 nt, Artificial Sequence
  Description of Artificial Sequence: Synthetic oligonucleotide
  Antisense strand to SEQ ID NO: 2252970
aacccaaucaagaaaggac

SEQ ID NO: 2252972 - RNA, 19 nt, Artificial Sequence
  Description of Artificial Sequence: Synthetic oligonucleotide
  Sense strand starting at position 3694 of SEQ ID NO: 1884268
ucuuguguucuuuagcacu

SEQ ID NO: 2252973 - RNA, 19 nt, Artificial Sequence
  Description of Artificial Sequence: Synthetic oligonucleotide
  Antisense strand to SEQ ID NO: 2252972
agugcuaaagaacacaaga

SEQ ID NO: 2252974 - RNA, 19 nt, Artificial Sequence
  Description of Artificial Sequence: Synthetic oligonucleotide
  Sense strand starting at position 3867 of SEQ ID NO: 1884268
cccauuauaguuuauaguu

SEQ ID NO: 2252975 - RNA, 19 nt, Artificial Sequence
  Description of Artificial Sequence: Synthetic oligonucleotide
  Antisense strand to SEQ ID NO: 2252974
aacuauaaacuauaauggg

SEQ ID NO: 2252976 - RNA, 19 nt, Artificial Sequence
  Description of Artificial Sequence: Synthetic oligonucleotide
  Sense strand starting at position 3880 of SEQ ID NO: 1884268
auaguuguauucccuggaa

SEQ ID NO: 2252977 - RNA, 19 nt, Artificial Sequence
  Description of Artificial Sequence: Synthetic oligonucleotide
  Antisense strand to SEQ ID NO: 2252976
uuccagggaauacaacuau

SEQ ID NO: 2252978 - RNA, 19 nt, Artificial Sequence
  Description of Artificial Sequence: Synthetic oligonucleotide
  Sense strand starting at position 3882 of SEQ ID NO: 1884268
aguuguauucccuggaaua

SEQ ID NO: 2252979 - RNA, 19 nt, Artificial Sequence
  Description of Artificial Sequence: Synthetic oligonucleotide
  Antisense strand to SEQ ID NO: 2252978
uauuccagggaauacaacu

SEQ ID NO: 2252980 - RNA, 19 nt, Artificial Sequence
  Description of Artificial Sequence: Synthetic oligonucleotide
  Sense strand starting at position 3883 of SEQ ID NO: 1884268
guuguauucccuggaauau

SEQ ID NO: 2252981 - RNA, 19 nt, Artificial Sequence
  Description of Artificial Sequence: Synthetic oligonucleotide
  Antisense strand to SEQ ID NO: 2252980
auauuccagggaauacaac

SEQ ID NO: 2252982 - RNA, 19 nt, Artificial Sequence
  Description of Artificial Sequence: Synthetic oligonucleotide
  Sense strand starting at position 3884 of SEQ ID NO: 1884268
uuguauucccuggaauauu

SEQ ID NO: 2252983 - RNA, 19 nt, Artificial Sequence
  Description of Artificial Sequence: Synthetic oligonucleotide
  Antisense strand to SEQ ID NO: 2252982
aauauuccagggaauacaa

SEQ ID NO: 2252984 - RNA, 19 nt, Artificial Sequence
  Description of Artificial Sequence: Synthetic oligonucleotide
  Sense strand starting at position 3894 of SEQ ID NO: 1884268
uggaauauuuacugggauu

SEQ ID NO: 2252985 - RNA, 19 nt, Artificial Sequence
  Description of Artificial Sequence: Synthetic oligonucleotide
  Antisense strand to SEQ ID NO: 2252984
aaucccaguaaauauucca

SEQ ID NO: 2252986 - RNA, 19 nt, Artificial Sequence
  Description of Artificial Sequence: Synthetic oligonucleotide
  Sense strand starting at position 3906 of SEQ ID NO: 1884268
ugggauuaacugcaaagca

SEQ ID NO: 2252987 - RNA, 19 nt, Artificial Sequence
  Description of Artificial Sequence: Synthetic oligonucleotide
  Antisense strand to SEQ ID NO: 2252986
ugcuuugcaguuaauccca

SEQ ID NO: 2252988 - RNA, 19 nt, Artificial Sequence
  Description of Artificial Sequence: Synthetic oligonucleotide
  Sense strand starting at position 3922 of SEQ ID NO: 1884268
gcacucucagaugaauagu

SEQ ID NO: 2252989 - RNA, 19 nt, Artificial Sequence
  Description of Artificial Sequence: Synthetic oligonucleotide
  Antisense strand to SEQ ID NO: 2252988
acuauucaucugagagugc

SEQ ID NO: 2252990 - RNA, 19 nt, Artificial Sequence
  Description of Artificial Sequence: Synthetic oligonucleotide
  Sense strand starting at position 3925 of SEQ ID NO: 1884268
cucucagaugaauagugua

SEQ ID NO: 2252991 - RNA, 19 nt, Artificial Sequence
  Description of Artificial Sequence: Synthetic oligonucleotide
  Antisense strand to SEQ ID NO: 2252990
uacacuauucaucugagag

SEQ ID NO: 2252992 - RNA, 19 nt, Artificial Sequence
  Description of Artificial Sequence: Synthetic oligonucleotide
  Sense strand starting at position 12 of SEQ ID NO: 1884269
aguuaucagcugugucaaa

SEQ ID NO: 2252993 - RNA, 19 nt, Artificial Sequence
  Description of Artificial Sequence: Synthetic oligonucleotide
  Antisense strand to SEQ ID NO: 2252992
uuugacacagcugauaacu

SEQ ID NO: 2252994 - RNA, 19 nt, Artificial Sequence
  Description of Artificial Sequence: Synthetic oligonucleotide
  Sense strand starting at position 13 of SEQ ID NO: 1884269
guuaucagcugugucaaau

SEQ ID NO: 2252995 - RNA, 19 nt, Artificial Sequence
  Description of Artificial Sequence: Synthetic oligonucleotide
  Antisense strand to SEQ ID NO: 2252994
auuugacacagcugauaac

SEQ ID NO: 2252996 - RNA, 19 nt, Artificial Sequence
  Description of Artificial Sequence: Synthetic oligonucleotide
  Sense strand starting at position 26 of SEQ ID NO: 1884269
ucaaaugcugcugacaagu

SEQ ID NO: 2252997 - RNA, 19 nt, Artificial Sequence
  Description of Artificial Sequence: Synthetic oligonucleotide
  Antisense strand to SEQ ID NO: 2252996
acuugucagcagcauuuga

SEQ ID NO: 2252998 - RNA, 19 nt, Artificial Sequence
  Description of Artificial Sequence: Synthetic oligonucleotide
  Sense strand starting at position 48 of SEQ ID NO: 1884269
gaugaagacugagaaauaa

SEQ ID NO: 2252999 - RNA, 19 nt, Artificial Sequence
  Description of Artificial Sequence: Synthetic oligonucleotide
  Antisense strand to SEQ ID NO: 2252998
uuauuucucagucuucauc

SEQ ID NO: 2253000 - RNA, 19 nt, Artificial Sequence
  Description of Artificial Sequence: Synthetic oligonucleotide
  Sense strand starting at position 86 of SEQ ID NO: 1884269
ggaugcuacagaugaucuu

SEQ ID NO: 2253001 - RNA, 19 nt, Artificial Sequence
  Description of Artificial Sequence: Synthetic oligonucleotide
  Antisense strand to SEQ ID NO: 2253000
aagaucaucuguagcaucc

SEQ ID NO: 2253002 - RNA, 19 nt, Artificial Sequence
  Description of Artificial Sequence: Synthetic oligonucleotide
  Sense strand starting at position 89 of SEQ ID NO: 1884269
ugcuacagaugaucuugaa

SEQ ID NO: 2253003 - RNA, 19 nt, Artificial Sequence
  Description of Artificial Sequence: Synthetic oligonucleotide
  Antisense strand to SEQ ID NO: 2253002
uucaagaucaucuguagca

SEQ ID NO: 2253004 - RNA, 19 nt, Artificial Sequence
  Description of Artificial Sequence: Synthetic oligonucleotide
  Sense strand starting at position 110 of SEQ ID NO: 1884269
gguccagaagugugggaau

SEQ ID NO: 2253005 - RNA, 19 nt, Artificial Sequence
  Description of Artificial Sequence: Synthetic oligonucleotide
  Antisense strand to SEQ ID NO: 2253004
auucccacacuucuggacc

SEQ ID NO: 2253006 - RNA, 19 nt, Artificial Sequence
  Description of Artificial Sequence: Synthetic oligonucleotide
  Sense strand starting at position 112 of SEQ ID NO: 1884269
uccagaagugugggaauga

SEQ ID NO: 2253007 - RNA, 19 nt, Artificial Sequence
  Description of Artificial Sequence: Synthetic oligonucleotide
  Antisense strand to SEQ ID NO: 2253006
ucauucccacacuucugga

SEQ ID NO: 2253008 - RNA, 19 nt, Artificial Sequence
  Description of Artificial Sequence: Synthetic oligonucleotide
  Sense strand starting at position 113 of SEQ ID NO: 1884269
ccagaagugugggaaugaa

SEQ ID NO: 2253009 - RNA, 19 nt, Artificial Sequence
  Description of Artificial Sequence: Synthetic oligonucleotide
  Antisense strand to SEQ ID NO: 2253008
uucauucccacacuucugg

SEQ ID NO: 2253010 - RNA, 19 nt, Artificial Sequence
  Description of Artificial Sequence: Synthetic oligonucleotide
  Sense strand starting at position 125 of SEQ ID NO: 1884269
gaaugaagucuguggguuc

SEQ ID NO: 2253011 - RNA, 19 nt, Artificial Sequence
  Description of Artificial Sequence: Synthetic oligonucleotide
  Antisense strand to SEQ ID NO: 2253010
gaacccacagacuucauuc

SEQ ID NO: 2253012 - RNA, 19 nt, Artificial Sequence
  Description of Artificial Sequence: Synthetic oligonucleotide
  Sense strand starting at position 131 of SEQ ID NO: 1884269
agucuguggguucgagaga

SEQ ID NO: 2253013 - RNA, 19 nt, Artificial Sequence
  Description of Artificial Sequence: Synthetic oligonucleotide
  Antisense strand to SEQ ID NO: 2253012
ucucucgaacccacagacu

SEQ ID NO: 2253014 - RNA, 19 nt, Artificial Sequence
  Description of Artificial Sequence: Synthetic oligonucleotide
  Sense strand starting at position 615 of SEQ ID NO: 1884269
gggaguagcuaggaauaca

SEQ ID NO: 2253015 - RNA, 19 nt, Artificial Sequence
  Description of Artificial Sequence: Synthetic oligonucleotide
  Antisense strand to SEQ ID NO: 2253014
uguauuccuagcuacuccc

SEQ ID NO: 2253016 - RNA, 19 nt, Artificial Sequence
  Description of Artificial Sequence: Synthetic oligonucleotide
  Sense strand starting at position 663 of SEQ ID NO: 1884269
gagcaaaugguuuauacca

SEQ ID NO: 2253017 - RNA, 19 nt, Artificial Sequence
  Description of Artificial Sequence: Synthetic oligonucleotide
  Antisense strand to SEQ ID NO: 2253016
ugguauaaaccauuugcuc

SEQ ID NO: 2253018 - RNA, 19 nt, Artificial Sequence
  Description of Artificial Sequence: Synthetic oligonucleotide
  Sense strand starting at position 665 of SEQ ID NO: 1884269
gcaaaugguuuauaccaau

SEQ ID NO: 2253019 - RNA, 19 nt, Artificial Sequence
  Description of Artificial Sequence: Synthetic oligonucleotide
  Antisense strand to SEQ ID NO: 2253018
auugguauaaaccauuugc

SEQ ID NO: 2253020 - RNA, 19 nt, Artificial Sequence
  Description of Artificial Sequence: Synthetic oligonucleotide
  Sense strand starting at position 688 of SEQ ID NO: 1884269
gcagacaucuaguuaucaa

SEQ ID NO: 2253021 - RNA, 19 nt, Artificial Sequence
  Description of Artificial Sequence: Synthetic oligonucleotide
  Antisense strand to SEQ ID NO: 2253020
uugauaacuagaugucugc

SEQ ID NO: 2253022 - RNA, 19 nt, Artificial Sequence
  Description of Artificial Sequence: Synthetic oligonucleotide
  Sense strand starting at position 762 of SEQ ID NO: 1884269
guuguacuccucugauguu

SEQ ID NO: 2253023 - RNA, 19 nt, Artificial Sequence
  Description of Artificial Sequence: Synthetic oligonucleotide
  Antisense strand to SEQ ID NO: 2253022
aacaucagaggaguacaac

SEQ ID NO: 2253024 - RNA, 19 nt, Artificial Sequence
  Description of Artificial Sequence: Synthetic oligonucleotide
  Sense strand starting at position 812 of SEQ ID NO: 1884269
gaaauuacauguuaagaug

SEQ ID NO: 2253025 - RNA, 19 nt, Artificial Sequence
  Description of Artificial Sequence: Synthetic oligonucleotide
  Antisense strand to SEQ ID NO: 2253024
caucuuaacauguaauuuc

SEQ ID NO: 2253026 - RNA, 19 nt, Artificial Sequence
  Description of Artificial Sequence: Synthetic oligonucleotide
  Sense strand starting at position 823 of SEQ ID NO: 1884269
uuaagaugcuaccgaauuu

SEQ ID NO: 2253027 - RNA, 19 nt, Artificial Sequence
  Description of Artificial Sequence: Synthetic oligonucleotide
  Antisense strand to SEQ ID NO: 2253026
aaauucgguagcaucuuaa

SEQ ID NO: 2253028 - RNA, 19 nt, Artificial Sequence
  Description of Artificial Sequence: Synthetic oligonucleotide
  Sense strand starting at position 883 of SEQ ID NO: 1884269
aguuacugguaguuuaaga

SEQ ID NO: 2253029 - RNA, 19 nt, Artificial Sequence
  Description of Artificial Sequence: Synthetic oligonucleotide
  Antisense strand to SEQ ID NO: 2253028
ucuuaaacuaccaguaacu

SEQ ID NO: 2253030 - RNA, 19 nt, Artificial Sequence
  Description of Artificial Sequence: Synthetic oligonucleotide
  Sense strand starting at position 890 of SEQ ID NO: 1884269
gguaguuuaagagagcauu

SEQ ID NO: 2253031 - RNA, 19 nt, Artificial Sequence
  Description of Artificial Sequence: Synthetic oligonucleotide
  Antisense strand to SEQ ID NO: 2253030
aaugcucucuuaaacuacc

SEQ ID NO: 2253032 - RNA, 19 nt, Artificial Sequence
  Description of Artificial Sequence: Synthetic oligonucleotide
  Sense strand starting at position 965 of SEQ ID NO: 1884269
ggcagauggaugugacaaa

SEQ ID NO: 2253033 - RNA, 19 nt, Artificial Sequence
  Description of Artificial Sequence: Synthetic oligonucleotide
  Antisense strand to SEQ ID NO: 2253032
uuugucacauccaucugcc

SEQ ID NO: 2253034 - RNA, 19 nt, Artificial Sequence
  Description of Artificial Sequence: Synthetic oligonucleotide
  Sense strand starting at position 966 of SEQ ID NO: 1884269
gcagauggaugugacaaau

SEQ ID NO: 2253035 - RNA, 19 nt, Artificial Sequence
  Description of Artificial Sequence: Synthetic oligonucleotide
  Antisense strand to SEQ ID NO: 2253034
auuugucacauccaucugc

SEQ ID NO: 2253036 - RNA, 19 nt, Artificial Sequence
  Description of Artificial Sequence: Synthetic oligonucleotide
  Sense strand starting at position 1063 of SEQ ID NO: 1884269
uucuauuaggucuagcaau

SEQ ID NO: 2253037 - RNA, 19 nt, Artificial Sequence
  Description of Artificial Sequence: Synthetic oligonucleotide
  Antisense strand to SEQ ID NO: 2253036
auugcuagaccuaauagaa

SEQ ID NO: 2253038 - RNA, 19 nt, Artificial Sequence
  Description of Artificial Sequence: Synthetic oligonucleotide
  Sense strand starting at position 1069 of SEQ ID NO: 1884269
uaggucuagcaauaacgua

SEQ ID NO: 2253039 - RNA, 19 nt, Artificial Sequence
  Description of Artificial Sequence: Synthetic oligonucleotide
  Antisense strand to SEQ ID NO: 2253038
uacguuauugcuagaccua

SEQ ID NO: 2253040 - RNA, 19 nt, Artificial Sequence
  Description of Artificial Sequence: Synthetic oligonucleotide
  Sense strand starting at position 1081 of SEQ ID NO: 1884269
uaacguaacuucuuggaua

SEQ ID NO: 2253041 - RNA, 19 nt, Artificial Sequence
  Description of Artificial Sequence: Synthetic oligonucleotide
  Antisense strand to SEQ ID NO: 2253040
uauccaagaaguuacguua

SEQ ID NO: 2253042 - RNA, 19 nt, Artificial Sequence
  Description of Artificial Sequence: Synthetic oligonucleotide
  Sense strand starting at position 1100 of SEQ ID NO: 1884269
ccaaguaaaucaguuacuu

SEQ ID NO: 2253043 - RNA, 19 nt, Artificial Sequence
  Description of Artificial Sequence: Synthetic oligonucleotide
  Antisense strand to SEQ ID NO: 2253042
aaguaacugauuuacuugg

SEQ ID NO: 2253044 - RNA, 19 nt, Artificial Sequence
  Description of Artificial Sequence: Synthetic oligonucleotide
  Sense strand starting at position 1144 of SEQ ID NO: 1884269
uucugacuuguuuacuauu

SEQ ID NO: 2253045 - RNA, 19 nt, Artificial Sequence
  Description of Artificial Sequence: Synthetic oligonucleotide
  Antisense strand to SEQ ID NO: 2253044
aauaguaaacaagucagaa

SEQ ID NO: 2253046 - RNA, 19 nt, Artificial Sequence
  Description of Artificial Sequence: Synthetic oligonucleotide
  Sense strand starting at position 1161 of SEQ ID NO: 1884269
uuugccucuucuguguuaa

SEQ ID NO: 2253047 - RNA, 19 nt, Artificial Sequence
  Description of Artificial Sequence: Synthetic oligonucleotide
  Antisense strand to SEQ ID NO: 2253046
uuaacacagaagaggcaaa

SEQ ID NO: 2253048 - RNA, 19 nt, Artificial Sequence
  Description of Artificial Sequence: Synthetic oligonucleotide
  Sense strand starting at position 1162 of SEQ ID NO: 1884269
uugccucuucuguguuaau

SEQ ID NO: 2253049 - RNA, 19 nt, Artificial Sequence
  Description of Artificial Sequence: Synthetic oligonucleotide
  Antisense strand to SEQ ID NO: 2253048
auuaacacagaagaggcaa

SEQ ID NO: 2253050 - RNA, 19 nt, Artificial Sequence
  Description of Artificial Sequence: Synthetic oligonucleotide
  Sense strand starting at position 1163 of SEQ ID NO: 1884269
ugccucuucuguguuaauc

SEQ ID NO: 2253051 - RNA, 19 nt, Artificial Sequence
  Description of Artificial Sequence: Synthetic oligonucleotide
  Antisense strand to SEQ ID NO: 2253050
gauuaacacagaagaggca

SEQ ID NO: 2253052 - RNA, 19 nt, Artificial Sequence
  Description of Artificial Sequence: Synthetic oligonucleotide
  Sense strand starting at position 1171 of SEQ ID NO: 1884269
cuguguuaaucaccuaauu

SEQ ID NO: 2253053 - RNA, 19 nt, Artificial Sequence
  Description of Artificial Sequence: Synthetic oligonucleotide
  Antisense strand to SEQ ID NO: 2253052
aauuaggugauuaacacag

SEQ ID NO: 2253054 - RNA, 19 nt, Artificial Sequence
  Description of Artificial Sequence: Synthetic oligonucleotide
  Sense strand starting at position 1415 of SEQ ID NO: 1884269
ggacuucagcgaggaagaa

SEQ ID NO: 2253055 - RNA, 19 nt, Artificial Sequence
  Description of Artificial Sequence: Synthetic oligonucleotide
  Antisense strand to SEQ ID NO: 2253054
uucuuccucgcugaagucc

SEQ ID NO: 2253056 - RNA, 19 nt, Artificial Sequence
  Description of Artificial Sequence: Synthetic oligonucleotide
  Sense strand starting at position 1985 of SEQ ID NO: 1884269
gccuucugccuugaacaca

SEQ ID NO: 2253057 - RNA, 19 nt, Artificial Sequence
  Description of Artificial Sequence: Synthetic oligonucleotide
  Antisense strand to SEQ ID NO: 2253056
uguguucaaggcagaaggc

SEQ ID NO: 2253058 - RNA, 19 nt, Artificial Sequence
  Description of Artificial Sequence: Synthetic oligonucleotide
  Sense strand starting at position 2726 of SEQ ID NO: 1884269
gcggaaacugccgagguuu

SEQ ID NO: 2253059 - RNA, 19 nt, Artificial Sequence
  Description of Artificial Sequence: Synthetic oligonucleotide
  Antisense strand to SEQ ID NO: 2253058
aaaccucggcaguuuccgc

SEQ ID NO: 2253060 - RNA, 19 nt, Artificial Sequence
  Description of Artificial Sequence: Synthetic oligonucleotide
  Sense strand starting at position 3253 of SEQ ID NO: 1884269
agacucagugauggguaaa

SEQ ID NO: 2253061 - RNA, 19 nt, Artificial Sequence
  Description of Artificial Sequence: Synthetic oligonucleotide
  Antisense strand to SEQ ID NO: 2253060
uuuacccaucacugagucu

SEQ ID NO: 2253062 - RNA, 19 nt, Artificial Sequence
  Description of Artificial Sequence: Synthetic oligonucleotide
  Sense strand starting at position 3254 of SEQ ID NO: 1884269
gacucagugauggguaaau

SEQ ID NO: 2253063 - RNA, 19 nt, Artificial Sequence
  Description of Artificial Sequence: Synthetic oligonucleotide
  Antisense strand to SEQ ID NO: 2253062
auuuacccaucacugaguc

SEQ ID NO: 2253064 - RNA, 19 nt, Artificial Sequence
  Description of Artificial Sequence: Synthetic oligonucleotide
  Sense strand starting at position 3256 of SEQ ID NO: 1884269
cucagugauggguaaauug

SEQ ID NO: 2253065 - RNA, 19 nt, Artificial Sequence
  Description of Artificial Sequence: Synthetic oligonucleotide
  Antisense strand to SEQ ID NO: 2253064
caauuuacccaucacugag

SEQ ID NO: 2253066 - RNA, 19 nt, Artificial Sequence
  Description of Artificial Sequence: Synthetic oligonucleotide
  Sense strand starting at position 3949 of SEQ ID NO: 1884269
uuugauuauuugcgaguga

SEQ ID NO: 2253067 - RNA, 19 nt, Artificial Sequence
  Description of Artificial Sequence: Synthetic oligonucleotide
  Antisense strand to SEQ ID NO: 2253066
ucacucgcaaauaaucaaa

SEQ ID NO: 2253068 - RNA, 19 nt, Artificial Sequence
  Description of Artificial Sequence: Synthetic oligonucleotide
  Sense strand starting at position 3950 of SEQ ID NO: 1884269
uugauuauuugcgagugaa

SEQ ID NO: 2253069 - RNA, 19 nt, Artificial Sequence
  Description of Artificial Sequence: Synthetic oligonucleotide
  Antisense strand to SEQ ID NO: 2253068
uucacucgcaaauaaucaa

SEQ ID NO: 2253070 - RNA, 19 nt, Artificial Sequence
  Description of Artificial Sequence: Synthetic oligonucleotide
  Sense strand starting at position 3968 of SEQ ID NO: 1884269
aggaaucgaugggaugaga

SEQ ID NO: 2253071 - RNA, 19 nt, Artificial Sequence
  Description of Artificial Sequence: Synthetic oligonucleotide
  Antisense strand to SEQ ID NO: 2253070
ucucaucccaucgauuccu

SEQ ID NO: 2253072 - RNA, 19 nt, Artificial Sequence
  Description of Artificial Sequence: Synthetic oligonucleotide
  Sense strand starting at position 111 of SEQ ID NO: 1884270
guaggugucagugaaaccu

SEQ ID NO: 2253073 - RNA, 19 nt, Artificial Sequence
  Description of Artificial Sequence: Synthetic oligonucleotide
  Antisense strand to SEQ ID NO: 2253072
agguuucacugacaccuac

SEQ ID NO: 2253074 - RNA, 19 nt, Artificial Sequence
  Description of Artificial Sequence: Synthetic oligonucleotide
  Sense strand starting at position 1414 of SEQ ID NO: 1884270
cugcaaauaucauugcuga

SEQ ID NO: 2253075 - RNA, 19 nt, Artificial Sequence
  Description of Artificial Sequence: Synthetic oligonucleotide
  Antisense strand to SEQ ID NO: 2253074
ucagcaaugauauuugcag

SEQ ID NO: 2253076 - RNA, 19 nt, Artificial Sequence
  Description of Artificial Sequence: Synthetic oligonucleotide
  Sense strand starting at position 1457 of SEQ ID NO: 1884270
auaguuaaagcguauaaac

SEQ ID NO: 2253077 - RNA, 19 nt, Artificial Sequence
  Description of Artificial Sequence: Synthetic oligonucleotide
  Antisense strand to SEQ ID NO: 2253076
guuuauacgcuuuaacuau

SEQ ID NO: 2253078 - RNA, 19 nt, Artificial Sequence
  Description of Artificial Sequence: Synthetic oligonucleotide
  Sense strand starting at position 1632 of SEQ ID NO: 1884270
ccagauaugcaguguuauc

SEQ ID NO: 2253079 - RNA, 19 nt, Artificial Sequence
  Description of Artificial Sequence: Synthetic oligonucleotide
  Antisense strand to SEQ ID NO: 2253078
gauaacacugcauaucugg

SEQ ID NO: 2253080 - RNA, 19 nt, Artificial Sequence
  Description of Artificial Sequence: Synthetic oligonucleotide
  Sense strand starting at position 1752 of SEQ ID NO: 1884270
cucuguaaacuccacgaga

SEQ ID NO: 2253081 - RNA, 19 nt, Artificial Sequence
  Description of Artificial Sequence: Synthetic oligonucleotide
  Antisense strand to SEQ ID NO: 2253080
ucucguggaguuuacagag

SEQ ID NO: 2253082 - RNA, 19 nt, Artificial Sequence
  Description of Artificial Sequence: Synthetic oligonucleotide
  Sense strand starting at position 1820 of SEQ ID NO: 1884270
acuaguaguugcccuaaau

SEQ ID NO: 2253083 - RNA, 19 nt, Artificial Sequence
  Description of Artificial Sequence: Synthetic oligonucleotide
  Antisense strand to SEQ ID NO: 2253082
auuuagggcaacuacuagu

SEQ ID NO: 2253084 - RNA, 19 nt, Artificial Sequence
  Description of Artificial Sequence: Synthetic oligonucleotide
  Sense strand starting at position 2413 of SEQ ID NO: 1884270
guuaguuuggccucgcuaa

SEQ ID NO: 2253085 - RNA, 19 nt, Artificial Sequence
  Description of Artificial Sequence: Synthetic oligonucleotide
  Antisense strand to SEQ ID NO: 2253084
uuagcgaggccaaacuaac

SEQ ID NO: 2253086 - RNA, 19 nt, Artificial Sequence
  Description of Artificial Sequence: Synthetic oligonucleotide
  Sense strand starting at position 2786 of SEQ ID NO: 1884270
gggcuccuccuguguagaa

SEQ ID NO: 2253087 - RNA, 19 nt, Artificial Sequence
  Description of Artificial Sequence: Synthetic oligonucleotide
  Antisense strand to SEQ ID NO: 2253086
uucuacacaggaggagccc

SEQ ID NO: 2253088 - RNA, 19 nt, Artificial Sequence
  Description of Artificial Sequence: Synthetic oligonucleotide
  Sense strand starting at position 2788 of SEQ ID NO: 1884270
gcuccuccuguguagaaca

SEQ ID NO: 2253089 - RNA, 19 nt, Artificial Sequence
  Description of Artificial Sequence: Synthetic oligonucleotide
  Antisense strand to SEQ ID NO: 2253088
uguucuacacaggaggagc

SEQ ID NO: 2253090 - RNA, 19 nt, Artificial Sequence
  Description of Artificial Sequence: Synthetic oligonucleotide
  Sense strand starting at position 2819 of SEQ ID NO: 1884270
acaggucgucuuuauuacu

SEQ ID NO: 2253091 - RNA, 19 nt, Artificial Sequence
  Description of Artificial Sequence: Synthetic oligonucleotide
  Antisense strand to SEQ ID NO: 2253090
aguaauaaagacgaccugu

SEQ ID NO: 2253092 - RNA, 19 nt, Artificial Sequence
  Description of Artificial Sequence: Synthetic oligonucleotide
  Sense strand starting at position 3027 of SEQ ID NO: 1884270
uuagaaaucggauaagcga

SEQ ID NO: 2253093 - RNA, 19 nt, Artificial Sequence
  Description of Artificial Sequence: Synthetic oligonucleotide
  Antisense strand to SEQ ID NO: 2253092
ucgcuuauccgauuucuaa

SEQ ID NO: 2253094 - RNA, 19 nt, Artificial Sequence
  Description of Artificial Sequence: Synthetic oligonucleotide
  Sense strand starting at position 3186 of SEQ ID NO: 1884270
uuauuuaagugggauaaug

SEQ ID NO: 2253095 - RNA, 19 nt, Artificial Sequence
  Description of Artificial Sequence: Synthetic oligonucleotide
  Antisense strand to SEQ ID NO: 2253094
cauuaucccacuuaaauaa

SEQ ID NO: 2253096 - RNA, 19 nt, Artificial Sequence
  Description of Artificial Sequence: Synthetic oligonucleotide
  Sense strand starting at position 3194 of SEQ ID NO: 1884270
gugggauaaugauaaauac

SEQ ID NO: 2253097 - RNA, 19 nt, Artificial Sequence
  Description of Artificial Sequence: Synthetic oligonucleotide
  Antisense strand to SEQ ID NO: 2253096
guauuuaucauuaucccac

SEQ ID NO: 2253098 - RNA, 19 nt, Artificial Sequence
  Description of Artificial Sequence: Synthetic oligonucleotide
  Sense strand starting at position 3214 of SEQ ID NO: 1884270
ggccuuuggguuuaaauga

SEQ ID NO: 2253099 - RNA, 19 nt, Artificial Sequence
  Description of Artificial Sequence: Synthetic oligonucleotide
  Antisense strand to SEQ ID NO: 2253098
ucauuuaaacccaaaggcc

SEQ ID NO: 2253100 - RNA, 19 nt, Artificial Sequence
  Description of Artificial Sequence: Synthetic oligonucleotide
  Sense strand starting at position 3234 of SEQ ID NO: 1884270
uuuauuaauggugguacau

SEQ ID NO: 2253101 - RNA, 19 nt, Artificial Sequence
  Description of Artificial Sequence: Synthetic oligonucleotide
  Antisense strand to SEQ ID NO: 2253100
auguaccaccauuaauaaa

SEQ ID NO: 2253102 - RNA, 19 nt, Artificial Sequence
  Description of Artificial Sequence: Synthetic oligonucleotide
  Sense strand starting at position 3302 of SEQ ID NO: 1884270
ugcuuuguucuguacuuaa

SEQ ID NO: 2253103 - RNA, 19 nt, Artificial Sequence
  Description of Artificial Sequence: Synthetic oligonucleotide
  Antisense strand to SEQ ID NO: 2253102
uuaaguacagaacaaagca

SEQ ID NO: 2253104 - RNA, 19 nt, Artificial Sequence
  Description of Artificial Sequence: Synthetic oligonucleotide
  Sense strand starting at position 3305 of SEQ ID NO: 1884270
uuuguucuguacuuaaacu

SEQ ID NO: 2253105 - RNA, 19 nt, Artificial Sequence
  Description of Artificial Sequence: Synthetic oligonucleotide
  Antisense strand to SEQ ID NO: 2253104
aguuuaaguacagaacaaa

SEQ ID NO: 2253106 - RNA, 19 nt, Artificial Sequence
  Description of Artificial Sequence: Synthetic oligonucleotide
  Sense strand starting at position 3444 of SEQ ID NO: 1884270
ugauguuguaaagguaagu

SEQ ID NO: 2253107 - RNA, 19 nt, Artificial Sequence
  Description of Artificial Sequence: Synthetic oligonucleotide
  Antisense strand to SEQ ID NO: 2253106
acuuaccuuuacaacauca

SEQ ID NO: 2253108 - RNA, 19 nt, Artificial Sequence
  Description of Artificial Sequence: Synthetic oligonucleotide
  Sense strand starting at position 3480 of SEQ ID NO: 1884270
cuaacauguugucuagucu

SEQ ID NO: 2253109 - RNA, 19 nt, Artificial Sequence
  Description of Artificial Sequence: Synthetic oligonucleotide
  Antisense strand to SEQ ID NO: 2253108
agacuagacaacauguuag

SEQ ID NO: 2253110 - RNA, 19 nt, Artificial Sequence
  Description of Artificial Sequence: Synthetic oligonucleotide
  Sense strand starting at position 3484 of SEQ ID NO: 1884270
cauguugucuagucuaaag

SEQ ID NO: 2253111 - RNA, 19 nt, Artificial Sequence
  Description of Artificial Sequence: Synthetic oligonucleotide
  Antisense strand to SEQ ID NO: 2253110
cuuuagacuagacaacaug

SEQ ID NO: 2253112 - RNA, 19 nt, Artificial Sequence
  Description of Artificial Sequence: Synthetic oligonucleotide
  Sense strand starting at position 3486 of SEQ ID NO: 1884270
uguugucuagucuaaaguu

SEQ ID NO: 2253113 - RNA, 19 nt, Artificial Sequence
  Description of Artificial Sequence: Synthetic oligonucleotide
  Antisense strand to SEQ ID NO: 2253112
aacuuuagacuagacaaca

SEQ ID NO: 2253114 - RNA, 19 nt, Artificial Sequence
  Description of Artificial Sequence: Synthetic oligonucleotide
  Sense strand starting at position 3502 of SEQ ID NO: 1884270
guuuaauacuguguaucac

SEQ ID NO: 2253115 - RNA, 19 nt, Artificial Sequence
  Description of Artificial Sequence: Synthetic oligonucleotide
  Antisense strand to SEQ ID NO: 2253114
gugauacacaguauuaaac

SEQ ID NO: 2253116 - RNA, 19 nt, Artificial Sequence
  Description of Artificial Sequence: Synthetic oligonucleotide
  Sense strand starting at position 3503 of SEQ ID NO: 1884270
uuuaauacuguguaucacu

SEQ ID NO: 2253117 - RNA, 19 nt, Artificial Sequence
  Description of Artificial Sequence: Synthetic oligonucleotide
  Antisense strand to SEQ ID NO: 2253116
agugauacacaguauuaaa

SEQ ID NO: 2253118 - RNA, 19 nt, Artificial Sequence
  Description of Artificial Sequence: Synthetic oligonucleotide
  Sense strand starting at position 3544 of SEQ ID NO: 1884270
guaaguguugaauagcuuu

SEQ ID NO: 2253119 - RNA, 19 nt, Artificial Sequence
  Description of Artificial Sequence: Synthetic oligonucleotide
  Antisense strand to SEQ ID NO: 2253118
aaagcuauucaacacuuac

SEQ ID NO: 2253120 - RNA, 19 nt, Artificial Sequence
  Description of Artificial Sequence: Synthetic oligonucleotide
  Sense strand starting at position 3617 of SEQ ID NO: 1884270
gucaauacagggugaguua

SEQ ID NO: 2253121 - RNA, 19 nt, Artificial Sequence
  Description of Artificial Sequence: Synthetic oligonucleotide
  Antisense strand to SEQ ID NO: 2253120
uaacucacccuguauugac

SEQ ID NO: 2253122 - RNA, 19 nt, Artificial Sequence
  Description of Artificial Sequence: Synthetic oligonucleotide
  Sense strand starting at position 3620 of SEQ ID NO: 1884270
aauacagggugaguuauua

SEQ ID NO: 2253123 - RNA, 19 nt, Artificial Sequence
  Description of Artificial Sequence: Synthetic oligonucleotide
  Antisense strand to SEQ ID NO: 2253122
uaauaacucacccuguauu

SEQ ID NO: 2253124 - RNA, 19 nt, Artificial Sequence
  Description of Artificial Sequence: Synthetic oligonucleotide
  Sense strand starting at position 3624 of SEQ ID NO: 1884270
cagggugaguuauuaaaug

SEQ ID NO: 2253125 - RNA, 19 nt, Artificial Sequence
  Description of Artificial Sequence: Synthetic oligonucleotide
  Antisense strand to SEQ ID NO: 2253124
cauuuaauaacucacccug

SEQ ID NO: 2253126 - RNA, 19 nt, Artificial Sequence
  Description of Artificial Sequence: Synthetic oligonucleotide
  Sense strand starting at position 3638 of SEQ ID NO: 1884270
aaaugcuaguuguuagauc

SEQ ID NO: 2253127 - RNA, 19 nt, Artificial Sequence
  Description of Artificial Sequence: Synthetic oligonucleotide
  Antisense strand to SEQ ID NO: 2253126
gaucuaacaacuagcauuu

SEQ ID NO: 2253128 - RNA, 19 nt, Artificial Sequence
  Description of Artificial Sequence: Synthetic oligonucleotide
  Sense strand starting at position 3696 of SEQ ID NO: 1884270
cucagucauuccuuaguuu

SEQ ID NO: 2253129 - RNA, 19 nt, Artificial Sequence
  Description of Artificial Sequence: Synthetic oligonucleotide
  Antisense strand to SEQ ID NO: 2253128
aaacuaaggaaugacugag

SEQ ID NO: 2253130 - RNA, 19 nt, Artificial Sequence
  Description of Artificial Sequence: Synthetic oligonucleotide
  Sense strand starting at position 3729 of SEQ ID NO: 1884270
augcuauggauauggagau

SEQ ID NO: 2253131 - RNA, 19 nt, Artificial Sequence
  Description of Artificial Sequence: Synthetic oligonucleotide
  Antisense strand to SEQ ID NO: 2253130
aucuccauauccauagcau

SEQ ID NO: 2253132 - RNA, 19 nt, Artificial Sequence
  Description of Artificial Sequence: Synthetic oligonucleotide
  Sense strand starting at position 3780 of SEQ ID NO: 1884270
gaagacucacagcgugaua

SEQ ID NO: 2253133 - RNA, 19 nt, Artificial Sequence
  Description of Artificial Sequence: Synthetic oligonucleotide
  Antisense strand to SEQ ID NO: 2253132
uaucacgcugugagucuuc

SEQ ID NO: 2253134 - RNA, 19 nt, Artificial Sequence
  Description of Artificial Sequence: Synthetic oligonucleotide
  Sense strand starting at position 3782 of SEQ ID NO: 1884270
agacucacagcgugauagu

SEQ ID NO: 2253135 - RNA, 19 nt, Artificial Sequence
  Description of Artificial Sequence: Synthetic oligonucleotide
  Antisense strand to SEQ ID NO: 2253134
acuaucacgcugugagucu

SEQ ID NO: 2253136 - RNA, 19 nt, Artificial Sequence
  Description of Artificial Sequence: Synthetic oligonucleotide
  Sense strand starting at position 3797 of SEQ ID NO: 1884270
uagugugauaagugagacu

SEQ ID NO: 2253137 - RNA, 19 nt, Artificial Sequence
  Description of Artificial Sequence: Synthetic oligonucleotide
  Antisense strand to SEQ ID NO: 2253136
agucucacuuaucacacua

SEQ ID NO: 2253138 - RNA, 19 nt, Artificial Sequence
  Description of Artificial Sequence: Synthetic oligonucleotide
  Sense strand starting at position 3804 of SEQ ID NO: 1884270
auaagugagacuugcguaa

SEQ ID NO: 2253139 - RNA, 19 nt, Artificial Sequence
  Description of Artificial Sequence: Synthetic oligonucleotide
  Antisense strand to SEQ ID NO: 2253138
uuacgcaagucucacuuau

SEQ ID NO: 2253140 - RNA, 19 nt, Artificial Sequence
  Description of Artificial Sequence: Synthetic oligonucleotide
  Sense strand starting at position 3818 of SEQ ID NO: 1884270
cguaacacgcugugagaaa

SEQ ID NO: 2253141 - RNA, 19 nt, Artificial Sequence
  Description of Artificial Sequence: Synthetic oligonucleotide
  Antisense strand to SEQ ID NO: 2253140
uuucucacagcguguuacg

SEQ ID NO: 2253142 - RNA, 19 nt, Artificial Sequence
  Description of Artificial Sequence: Synthetic oligonucleotide
  Sense strand starting at position 3872 of SEQ ID NO: 1884270
gucacagaagucuacaguu

SEQ ID NO: 2253143 - RNA, 19 nt, Artificial Sequence
  Description of Artificial Sequence: Synthetic oligonucleotide
  Antisense strand to SEQ ID NO: 2253142
aacuguagacuucugugac

SEQ ID NO: 2253144 - RNA, 19 nt, Artificial Sequence
  Description of Artificial Sequence: Synthetic oligonucleotide
  Sense strand starting at position 3903 of SEQ ID NO: 1884270
gacaguaguuagccaagua

SEQ ID NO: 2253145 - RNA, 19 nt, Artificial Sequence
  Description of Artificial Sequence: Synthetic oligonucleotide
  Antisense strand to SEQ ID NO: 2253144
uacuuggcuaacuacuguc

SEQ ID NO: 2253146 - RNA, 19 nt, Artificial Sequence
  Description of Artificial Sequence: Synthetic oligonucleotide
  Sense strand starting at position 3973 of SEQ ID NO: 1884270
aguagcgugccauaaagau

SEQ ID NO: 2253147 - RNA, 19 nt, Artificial Sequence
  Description of Artificial Sequence: Synthetic oligonucleotide
  Antisense strand to SEQ ID NO: 2253146
aucuuuauggcacgcuacu

SEQ ID NO: 2253148 - RNA, 19 nt, Artificial Sequence
  Description of Artificial Sequence: Synthetic oligonucleotide
  Sense strand starting at position 3979 of SEQ ID NO: 1884270
gugccauaaagauggcuaa

SEQ ID NO: 2253149 - RNA, 19 nt, Artificial Sequence
  Description of Artificial Sequence: Synthetic oligonucleotide
  Antisense strand to SEQ ID NO: 2253148
uuagccaucuuuauggcac

SEQ ID NO: 2253150 - RNA, 19 nt, Artificial Sequence
  Description of Artificial Sequence: Synthetic oligonucleotide
  Sense strand starting at position 3980 of SEQ ID NO: 1884270
ugccauaaagauggcuaaa

SEQ ID NO: 2253151 - RNA, 19 nt, Artificial Sequence
  Description of Artificial Sequence: Synthetic oligonucleotide
  Antisense strand to SEQ ID NO: 2253150
uuuagccaucuuuauggca

SEQ ID NO: 2253152 - RNA, 19 nt, Artificial Sequence
  Description of Artificial Sequence: Synthetic oligonucleotide
  Sense strand starting at position 75 of SEQ ID NO: 1884271
aguucuaagguugggaagu

SEQ ID NO: 2253153 - RNA, 19 nt, Artificial Sequence
  Description of Artificial Sequence: Synthetic oligonucleotide
  Antisense strand to SEQ ID NO: 2253152
acuucccaaccuuagaacu

SEQ ID NO: 2253154 - RNA, 19 nt, Artificial Sequence
  Description of Artificial Sequence: Synthetic oligonucleotide
  Sense strand starting at position 104 of SEQ ID NO: 1884271
gucuuugucuacccagaau

SEQ ID NO: 2253155 - RNA, 19 nt, Artificial Sequence
  Description of Artificial Sequence: Synthetic oligonucleotide
  Antisense strand to SEQ ID NO: 2253154
auucuggguagacaaagac

SEQ ID NO: 2253156 - RNA, 19 nt, Artificial Sequence
  Description of Artificial Sequence: Synthetic oligonucleotide
  Sense strand starting at position 253 of SEQ ID NO: 1884271
ucccucuggccauaaugau

SEQ ID NO: 2253157 - RNA, 19 nt, Artificial Sequence
  Description of Artificial Sequence: Synthetic oligonucleotide
  Antisense strand to SEQ ID NO: 2253156
aucauuauggccagaggga

SEQ ID NO: 2253158 - RNA, 19 nt, Artificial Sequence
  Description of Artificial Sequence: Synthetic oligonucleotide
  Sense strand starting at position 322 of SEQ ID NO: 1884271
agggacuucugcuccauua

SEQ ID NO: 2253159 - RNA, 19 nt, Artificial Sequence
  Description of Artificial Sequence: Synthetic oligonucleotide
  Antisense strand to SEQ ID NO: 2253158
uaauggagcagaagucccu

SEQ ID NO: 2253160 - RNA, 19 nt, Artificial Sequence
  Description of Artificial Sequence: Synthetic oligonucleotide
  Sense strand starting at position 669 of SEQ ID NO: 1884271
uggacuuuccuuugaggua

SEQ ID NO: 2253161 - RNA, 19 nt, Artificial Sequence
  Description of Artificial Sequence: Synthetic oligonucleotide
  Antisense strand to SEQ ID NO: 2253160
uaccucaaaggaaagucca

SEQ ID NO: 2253162 - RNA, 19 nt, Artificial Sequence
  Description of Artificial Sequence: Synthetic oligonucleotide
  Sense strand starting at position 858 of SEQ ID NO: 1884271
gcuccuuccagauggaagu

SEQ ID NO: 2253163 - RNA, 19 nt, Artificial Sequence
  Description of Artificial Sequence: Synthetic oligonucleotide
  Antisense strand to SEQ ID NO: 2253162
acuuccaucuggaaggagc

SEQ ID NO: 2253164 - RNA, 19 nt, Artificial Sequence
  Description of Artificial Sequence: Synthetic oligonucleotide
  Sense strand starting at position 1219 of SEQ ID NO: 1884271
uaacuugaggccgggaaau

SEQ ID NO: 2253165 - RNA, 19 nt, Artificial Sequence
  Description of Artificial Sequence: Synthetic oligonucleotide
  Antisense strand to SEQ ID NO: 2253164
auuucccggccucaaguua

SEQ ID NO: 2253166 - RNA, 19 nt, Artificial Sequence
  Description of Artificial Sequence: Synthetic oligonucleotide
  Sense strand starting at position 1230 of SEQ ID NO: 1884271
cgggaaauuaucugucuca

SEQ ID NO: 2253167 - RNA, 19 nt, Artificial Sequence
  Description of Artificial Sequence: Synthetic oligonucleotide
  Antisense strand to SEQ ID NO: 2253166
ugagacagauaauuucccg

SEQ ID NO: 2253168 - RNA, 19 nt, Artificial Sequence
  Description of Artificial Sequence: Synthetic oligonucleotide
  Sense strand starting at position 1231 of SEQ ID NO: 1884271
gggaaauuaucugucucac

SEQ ID NO: 2253169 - RNA, 19 nt, Artificial Sequence
  Description of Artificial Sequence: Synthetic oligonucleotide
  Antisense strand to SEQ ID NO: 2253168
gugagacagauaauuuccc

SEQ ID NO: 2253170 - RNA, 19 nt, Artificial Sequence
  Description of Artificial Sequence: Synthetic oligonucleotide
  Sense strand starting at position 1374 of SEQ ID NO: 1884271
ccuuguggcggugacagau

SEQ ID NO: 2253171 - RNA, 19 nt, Artificial Sequence
  Description of Artificial Sequence: Synthetic oligonucleotide
  Antisense strand to SEQ ID NO: 2253170
aucugucaccgccacaagg

SEQ ID NO: 2253172 - RNA, 19 nt, Artificial Sequence
  Description of Artificial Sequence: Synthetic oligonucleotide
  Sense strand starting at position 1383 of SEQ ID NO: 1884271
ggugacagaucaguagagu

SEQ ID NO: 2253173 - RNA, 19 nt, Artificial Sequence
  Description of Artificial Sequence: Synthetic oligonucleotide
  Antisense strand to SEQ ID NO: 2253172
acucuacugaucugucacc

SEQ ID NO: 2253174 - RNA, 19 nt, Artificial Sequence
  Description of Artificial Sequence: Synthetic oligonucleotide
  Sense strand starting at position 1384 of SEQ ID NO: 1884271
gugacagaucaguagagug

SEQ ID NO: 2253175 - RNA, 19 nt, Artificial Sequence
  Description of Artificial Sequence: Synthetic oligonucleotide
  Antisense strand to SEQ ID NO: 2253174
cacucuacugaucugucac

SEQ ID NO: 2253176 - RNA, 19 nt, Artificial Sequence
  Description of Artificial Sequence: Synthetic oligonucleotide
  Sense strand starting at position 1389 of SEQ ID NO: 1884271
agaucaguagagugaauug

SEQ ID NO: 2253177 - RNA, 19 nt, Artificial Sequence
  Description of Artificial Sequence: Synthetic oligonucleotide
  Antisense strand to SEQ ID NO: 2253176
caauucacucuacugaucu

SEQ ID NO: 2253178 - RNA, 19 nt, Artificial Sequence
  Description of Artificial Sequence: Synthetic oligonucleotide
  Sense strand starting at position 1398 of SEQ ID NO: 1884271
gagugaauugcaggaguca

SEQ ID NO: 2253179 - RNA, 19 nt, Artificial Sequence
  Description of Artificial Sequence: Synthetic oligonucleotide
  Antisense strand to SEQ ID NO: 2253178
ugacuccugcaauucacuc

SEQ ID NO: 2253180 - RNA, 19 nt, Artificial Sequence
  Description of Artificial Sequence: Synthetic oligonucleotide
  Sense strand starting at position 1411 of SEQ ID NO: 1884271
gagucaguauugucgagau

SEQ ID NO: 2253181 - RNA, 19 nt, Artificial Sequence
  Description of Artificial Sequence: Synthetic oligonucleotide
  Antisense strand to SEQ ID NO: 2253180
aucucgacaauacugacuc

SEQ ID NO: 2253182 - RNA, 19 nt, Artificial Sequence
  Description of Artificial Sequence: Synthetic oligonucleotide
  Sense strand starting at position 1413 of SEQ ID NO: 1884271
gucaguauugucgagauug

SEQ ID NO: 2253183 - RNA, 19 nt, Artificial Sequence
  Description of Artificial Sequence: Synthetic oligonucleotide
  Antisense strand to SEQ ID NO: 2253182
caaucucgacaauacugac

SEQ ID NO: 2253184 - RNA, 19 nt, Artificial Sequence
  Description of Artificial Sequence: Synthetic oligonucleotide
  Sense strand starting at position 1415 of SEQ ID NO: 1884271
caguauugucgagauugua

SEQ ID NO: 2253185 - RNA, 19 nt, Artificial Sequence
  Description of Artificial Sequence: Synthetic oligonucleotide
  Antisense strand to SEQ ID NO: 2253184
uacaaucucgacaauacug

SEQ ID NO: 2253186 - RNA, 19 nt, Artificial Sequence
  Description of Artificial Sequence: Synthetic oligonucleotide
  Sense strand starting at position 1418 of SEQ ID NO: 1884271
uauugucgagauuguaacu

SEQ ID NO: 2253187 - RNA, 19 nt, Artificial Sequence
  Description of Artificial Sequence: Synthetic oligonucleotide
  Antisense strand to SEQ ID NO: 2253186
aguuacaaucucgacaaua

SEQ ID NO: 2253188 - RNA, 19 nt, Artificial Sequence
  Description of Artificial Sequence: Synthetic oligonucleotide
  Sense strand starting at position 1425 of SEQ ID NO: 1884271
gagauuguaacuugagguu

SEQ ID NO: 2253189 - RNA, 19 nt, Artificial Sequence
  Description of Artificial Sequence: Synthetic oligonucleotide
  Antisense strand to SEQ ID NO: 2253188
aaccucaaguuacaaucuc

SEQ ID NO: 2253190 - RNA, 19 nt, Artificial Sequence
  Description of Artificial Sequence: Synthetic oligonucleotide
  Sense strand starting at position 1439 of SEQ ID NO: 1884271
agguuuagauuccugggua

SEQ ID NO: 2253191 - RNA, 19 nt, Artificial Sequence
  Description of Artificial Sequence: Synthetic oligonucleotide
  Antisense strand to SEQ ID NO: 2253190
uacccaggaaucuaaaccu

SEQ ID NO: 2253192 - RNA, 19 nt, Artificial Sequence
  Description of Artificial Sequence: Synthetic oligonucleotide
  Sense strand starting at position 1442 of SEQ ID NO: 1884271
uuuagauuccuggguaaca

SEQ ID NO: 2253193 - RNA, 19 nt, Artificial Sequence
  Description of Artificial Sequence: Synthetic oligonucleotide
  Antisense strand to SEQ ID NO: 2253192
uguuacccaggaaucuaaa

SEQ ID NO: 2253194 - RNA, 19 nt, Artificial Sequence
  Description of Artificial Sequence: Synthetic oligonucleotide
  Sense strand starting at position 1443 of SEQ ID NO: 1884271
uuagauuccuggguaacag

SEQ ID NO: 2253195 - RNA, 19 nt, Artificial Sequence
  Description of Artificial Sequence: Synthetic oligonucleotide
  Antisense strand to SEQ ID NO: 2253194
cuguuacccaggaaucuaa

SEQ ID NO: 2253196 - RNA, 19 nt, Artificial Sequence
  Description of Artificial Sequence: Synthetic oligonucleotide
  Sense strand starting at position 1504 of SEQ ID NO: 1884271
gggccaacuuccuccaaga

SEQ ID NO: 2253197 - RNA, 19 nt, Artificial Sequence
  Description of Artificial Sequence: Synthetic oligonucleotide
  Antisense strand to SEQ ID NO: 2253196
ucuuggaggaaguuggccc

SEQ ID NO: 2253198 - RNA, 19 nt, Artificial Sequence
  Description of Artificial Sequence: Synthetic oligonucleotide
  Sense strand starting at position 2209 of SEQ ID NO: 1884271
gucgucauuccucaaagag

SEQ ID NO: 2253199 - RNA, 19 nt, Artificial Sequence
  Description of Artificial Sequence: Synthetic oligonucleotide
  Antisense strand to SEQ ID NO: 2253198
cucuuugaggaaugacgac

SEQ ID NO: 2253200 - RNA, 19 nt, Artificial Sequence
  Description of Artificial Sequence: Synthetic oligonucleotide
  Sense strand starting at position 2232 of SEQ ID NO: 1884271
aagggcuuugccgaauaaa

SEQ ID NO: 2253201 - RNA, 19 nt, Artificial Sequence
  Description of Artificial Sequence: Synthetic oligonucleotide
  Antisense strand to SEQ ID NO: 2253200
uuuauucggcaaagcccuu

SEQ ID NO: 2253202 - RNA, 19 nt, Artificial Sequence
  Description of Artificial Sequence: Synthetic oligonucleotide
  Sense strand starting at position 2359 of SEQ ID NO: 1884271
ggucucaagcuuuagaaau

SEQ ID NO: 2253203 - RNA, 19 nt, Artificial Sequence
  Description of Artificial Sequence: Synthetic oligonucleotide
  Antisense strand to SEQ ID NO: 2253202
auuucuaaagcuugagacc

SEQ ID NO: 2253204 - RNA, 19 nt, Artificial Sequence
  Description of Artificial Sequence: Synthetic oligonucleotide
  Sense strand starting at position 2545 of SEQ ID NO: 1884271
uggcuacucuauucuuaag

SEQ ID NO: 2253205 - RNA, 19 nt, Artificial Sequence
  Description of Artificial Sequence: Synthetic oligonucleotide
  Antisense strand to SEQ ID NO: 2253204
cuuaagaauagaguagcca

SEQ ID NO: 2253206 - RNA, 19 nt, Artificial Sequence
  Description of Artificial Sequence: Synthetic oligonucleotide
  Sense strand starting at position 2547 of SEQ ID NO: 1884271
gcuacucuauucuuaagag

SEQ ID NO: 2253207 - RNA, 19 nt, Artificial Sequence
  Description of Artificial Sequence: Synthetic oligonucleotide
  Antisense strand to SEQ ID NO: 2253206
cucuuaagaauagaguagc

SEQ ID NO: 2253208 - RNA, 19 nt, Artificial Sequence
  Description of Artificial Sequence: Synthetic oligonucleotide
  Sense strand starting at position 2695 of SEQ ID NO: 1884271
cccucugaugugcaucaga

SEQ ID NO: 2253209 - RNA, 19 nt, Artificial Sequence
  Description of Artificial Sequence: Synthetic oligonucleotide
  Antisense strand to SEQ ID NO: 2253208
ucugaugcacaucagaggg

SEQ ID NO: 2253210 - RNA, 19 nt, Artificial Sequence
  Description of Artificial Sequence: Synthetic oligonucleotide
  Sense strand starting at position 3193 of SEQ ID NO: 1884271
uguacuuauguguacugua

SEQ ID NO: 2253211 - RNA, 19 nt, Artificial Sequence
  Description of Artificial Sequence: Synthetic oligonucleotide
  Antisense strand to SEQ ID NO: 2253210
uacaguacacauaaguaca

SEQ ID NO: 2253212 - RNA, 19 nt, Artificial Sequence
  Description of Artificial Sequence: Synthetic oligonucleotide
  Sense strand starting at position 3198 of SEQ ID NO: 1884271
uuauguguacuguauucuu

SEQ ID NO: 2253213 - RNA, 19 nt, Artificial Sequence
  Description of Artificial Sequence: Synthetic oligonucleotide
  Antisense strand to SEQ ID NO: 2253212
aagaauacaguacacauaa

SEQ ID NO: 2253214 - RNA, 19 nt, Artificial Sequence
  Description of Artificial Sequence: Synthetic oligonucleotide
  Sense strand starting at position 3304 of SEQ ID NO: 1884271
ugucauaaguucucauuau

SEQ ID NO: 2253215 - RNA, 19 nt, Artificial Sequence
  Description of Artificial Sequence: Synthetic oligonucleotide
  Antisense strand to SEQ ID NO: 2253214
auaaugagaacuuaugaca

SEQ ID NO: 2253216 - RNA, 19 nt, Artificial Sequence
  Description of Artificial Sequence: Synthetic oligonucleotide
  Sense strand starting at position 3401 of SEQ ID NO: 1884271
uucccuggugcuuagaaca

SEQ ID NO: 2253217 - RNA, 19 nt, Artificial Sequence
  Description of Artificial Sequence: Synthetic oligonucleotide
  Antisense strand to SEQ ID NO: 2253216
uguucuaagcaccagggaa

SEQ ID NO: 2253218 - RNA, 19 nt, Artificial Sequence
  Description of Artificial Sequence: Synthetic oligonucleotide
  Sense strand starting at position 3489 of SEQ ID NO: 1884271
ugguguaaggccuaauaua

SEQ ID NO: 2253219 - RNA, 19 nt, Artificial Sequence
  Description of Artificial Sequence: Synthetic oligonucleotide
  Antisense strand to SEQ ID NO: 2253218
uauauuaggccuuacacca

SEQ ID NO: 2253220 - RNA, 19 nt, Artificial Sequence
  Description of Artificial Sequence: Synthetic oligonucleotide
  Sense strand starting at position 3539 of SEQ ID NO: 1884271
aacucaaagucguuauuga

SEQ ID NO: 2253221 - RNA, 19 nt, Artificial Sequence
  Description of Artificial Sequence: Synthetic oligonucleotide
  Antisense strand to SEQ ID NO: 2253220
ucaauaacgacuuugaguu

SEQ ID NO: 2253222 - RNA, 19 nt, Artificial Sequence
  Description of Artificial Sequence: Synthetic oligonucleotide
  Sense strand starting at position 3540 of SEQ ID NO: 1884271
acucaaagucguuauugaa

SEQ ID NO: 2253223 - RNA, 19 nt, Artificial Sequence
  Description of Artificial Sequence: Synthetic oligonucleotide
  Antisense strand to SEQ ID NO: 2253222
uucaauaacgacuuugagu

SEQ ID NO: 2253224 - RNA, 19 nt, Artificial Sequence
  Description of Artificial Sequence: Synthetic oligonucleotide
  Sense strand starting at position 3547 of SEQ ID NO: 1884271
gucguuauugaauaagcau

SEQ ID NO: 2253225 - RNA, 19 nt, Artificial Sequence
  Description of Artificial Sequence: Synthetic oligonucleotide
  Antisense strand to SEQ ID NO: 2253224
augcuuauucaauaacgac

SEQ ID NO: 2253226 - RNA, 19 nt, Artificial Sequence
  Description of Artificial Sequence: Synthetic oligonucleotide
  Sense strand starting at position 3577 of SEQ ID NO: 1884271
gaauuagacuguguaguua

SEQ ID NO: 2253227 - RNA, 19 nt, Artificial Sequence
  Description of Artificial Sequence: Synthetic oligonucleotide
  Antisense strand to SEQ ID NO: 2253226
uaacuacacagucuaauuc

SEQ ID NO: 2253228 - RNA, 19 nt, Artificial Sequence
  Description of Artificial Sequence: Synthetic oligonucleotide
  Sense strand starting at position 3828 of SEQ ID NO: 1884271
ggaguuggcucagaauuua

SEQ ID NO: 2253229 - RNA, 19 nt, Artificial Sequence
  Description of Artificial Sequence: Synthetic oligonucleotide
  Antisense strand to SEQ ID NO: 2253228
uaaauucugagccaacucc

SEQ ID NO: 2253230 - RNA, 19 nt, Artificial Sequence
  Description of Artificial Sequence: Synthetic oligonucleotide
  Sense strand starting at position 3870 of SEQ ID NO: 1884271
agagaaauaccuugcauuc

SEQ ID NO: 2253231 - RNA, 19 nt, Artificial Sequence
  Description of Artificial Sequence: Synthetic oligonucleotide
  Antisense strand to SEQ ID NO: 2253230
gaaugcaagguauuucucu

SEQ ID NO: 2253232 - RNA, 19 nt, Artificial Sequence
  Description of Artificial Sequence: Synthetic oligonucleotide
  Sense strand starting at position 72 of SEQ ID NO: 1884272
gauacagauuugggugaac

SEQ ID NO: 2253233 - RNA, 19 nt, Artificial Sequence
  Description of Artificial Sequence: Synthetic oligonucleotide
  Antisense strand to SEQ ID NO: 2253232
guucacccaaaucuguauc

SEQ ID NO: 2253234 - RNA, 19 nt, Artificial Sequence
  Description of Artificial Sequence: Synthetic oligonucleotide
  Sense strand starting at position 557 of SEQ ID NO: 1884272
gggcuaaucucagugaacg

SEQ ID NO: 2253235 - RNA, 19 nt, Artificial Sequence
  Description of Artificial Sequence: Synthetic oligonucleotide
  Antisense strand to SEQ ID NO: 2253234
cguucacugagauuagccc

SEQ ID NO: 2253236 - RNA, 19 nt, Artificial Sequence
  Description of Artificial Sequence: Synthetic oligonucleotide
  Sense strand starting at position 687 of SEQ ID NO: 1884272
ggagauugcuggccacaac

SEQ ID NO: 2253237 - RNA, 19 nt, Artificial Sequence
  Description of Artificial Sequence: Synthetic oligonucleotide
  Antisense strand to SEQ ID NO: 2253236
guuguggccagcaaucucc

SEQ ID NO: 2253238 - RNA, 19 nt, Artificial Sequence
  Description of Artificial Sequence: Synthetic oligonucleotide
  Sense strand starting at position 688 of SEQ ID NO: 1884272
gagauugcuggccacaaca

SEQ ID NO: 2253239 - RNA, 19 nt, Artificial Sequence
  Description of Artificial Sequence: Synthetic oligonucleotide
  Antisense strand to SEQ ID NO: 2253238
uguuguggccagcaaucuc

SEQ ID NO: 2253240 - RNA, 19 nt, Artificial Sequence
  Description of Artificial Sequence: Synthetic oligonucleotide
  Sense strand starting at position 729 of SEQ ID NO: 1884272
agucacaucuguuucccaa

SEQ ID NO: 2253241 - RNA, 19 nt, Artificial Sequence
  Description of Artificial Sequence: Synthetic oligonucleotide
  Antisense strand to SEQ ID NO: 2253240
uugggaaacagaugugacu

SEQ ID NO: 2253242 - RNA, 19 nt, Artificial Sequence
  Description of Artificial Sequence: Synthetic oligonucleotide
  Sense strand starting at position 736 of SEQ ID NO: 1884272
ucuguuucccaaugggaaa

SEQ ID NO: 2253243 - RNA, 19 nt, Artificial Sequence
  Description of Artificial Sequence: Synthetic oligonucleotide
  Antisense strand to SEQ ID NO: 2253242
uuucccauugggaaacaga

SEQ ID NO: 2253244 - RNA, 19 nt, Artificial Sequence
  Description of Artificial Sequence: Synthetic oligonucleotide
  Sense strand starting at position 783 of SEQ ID NO: 1884272
cggcaaagccaucagaagu

SEQ ID NO: 2253245 - RNA, 19 nt, Artificial Sequence
  Description of Artificial Sequence: Synthetic oligonucleotide
  Antisense strand to SEQ ID NO: 2253244
acuucugauggcuuugccg

SEQ ID NO: 2253246 - RNA, 19 nt, Artificial Sequence
  Description of Artificial Sequence: Synthetic oligonucleotide
  Sense strand starting at position 827 of SEQ ID NO: 1884272
gcgaaugucaucuggacaa

SEQ ID NO: 2253247 - RNA, 19 nt, Artificial Sequence
  Description of Artificial Sequence: Synthetic oligonucleotide
  Antisense strand to SEQ ID NO: 2253246
uuguccagaugacauucgc

SEQ ID NO: 2253248 - RNA, 19 nt, Artificial Sequence
  Description of Artificial Sequence: Synthetic oligonucleotide
  Sense strand starting at position 1037 of SEQ ID NO: 1884272
agagaaagcuuacugaagu

SEQ ID NO: 2253249 - RNA, 19 nt, Artificial Sequence
  Description of Artificial Sequence: Synthetic oligonucleotide
  Antisense strand to SEQ ID NO: 2253248
acuucaguaagcuuucucu

SEQ ID NO: 2253250 - RNA, 19 nt, Artificial Sequence
  Description of Artificial Sequence: Synthetic oligonucleotide
  Sense strand starting at position 1488 of SEQ ID NO: 1884272
caguuugggcucuaucuua

SEQ ID NO: 2253251 - RNA, 19 nt, Artificial Sequence
  Description of Artificial Sequence: Synthetic oligonucleotide
  Antisense strand to SEQ ID NO: 2253250
uaagauagagcccaaacug

SEQ ID NO: 2253252 - RNA, 19 nt, Artificial Sequence
  Description of Artificial Sequence: Synthetic oligonucleotide
  Sense strand starting at position 1554 of SEQ ID NO: 1884272
gguuccauaucugugaaac

SEQ ID NO: 2253253 - RNA, 19 nt, Artificial Sequence
  Description of Artificial Sequence: Synthetic oligonucleotide
  Antisense strand to SEQ ID NO: 2253252
guuucacagauauggaacc

SEQ ID NO: 2253254 - RNA, 19 nt, Artificial Sequence
  Description of Artificial Sequence: Synthetic oligonucleotide
  Sense strand starting at position 1555 of SEQ ID NO: 1884272
guuccauaucugugaaaca

SEQ ID NO: 2253255 - RNA, 19 nt, Artificial Sequence
  Description of Artificial Sequence: Synthetic oligonucleotide
  Antisense strand to SEQ ID NO: 2253254
uguuucacagauauggaac

SEQ ID NO: 2253256 - RNA, 19 nt, Artificial Sequence
  Description of Artificial Sequence: Synthetic oligonucleotide
  Sense strand starting at position 2023 of SEQ ID NO: 1884272
aauggaguuuacucgcaag

SEQ ID NO: 2253257 - RNA, 19 nt, Artificial Sequence
  Description of Artificial Sequence: Synthetic oligonucleotide
  Antisense strand to SEQ ID NO: 2253256
cuugcgaguaaacuccauu

SEQ ID NO: 2253258 - RNA, 19 nt, Artificial Sequence
  Description of Artificial Sequence: Synthetic oligonucleotide
  Sense strand starting at position 2029 of SEQ ID NO: 1884272
guuuacucgcaaggauaaa

SEQ ID NO: 2253259 - RNA, 19 nt, Artificial Sequence
  Description of Artificial Sequence: Synthetic oligonucleotide
  Antisense strand to SEQ ID NO: 2253258
uuuauccuugcgaguaaac

SEQ ID NO: 2253260 - RNA, 19 nt, Artificial Sequence
  Description of Artificial Sequence: Synthetic oligonucleotide
  Sense strand starting at position 2291 of SEQ ID NO: 1884272
gucuguguaacuuggagga

SEQ ID NO: 2253261 - RNA, 19 nt, Artificial Sequence
  Description of Artificial Sequence: Synthetic oligonucleotide
  Antisense strand to SEQ ID NO: 2253260
uccuccaaguuacacagac

SEQ ID NO: 2253262 - RNA, 19 nt, Artificial Sequence
  Description of Artificial Sequence: Synthetic oligonucleotide
  Sense strand starting at position 2638 of SEQ ID NO: 1884272
augcgaacucaguauccca

SEQ ID NO: 2253263 - RNA, 19 nt, Artificial Sequence
  Description of Artificial Sequence: Synthetic oligonucleotide
  Antisense strand to SEQ ID NO: 2253262
ugggauacugaguucgcau

SEQ ID NO: 2253264 - RNA, 19 nt, Artificial Sequence
  Description of Artificial Sequence: Synthetic oligonucleotide
  Sense strand starting at position 2683 of SEQ ID NO: 1884272
aguugcauacuguaugaau

SEQ ID NO: 2253265 - RNA, 19 nt, Artificial Sequence
  Description of Artificial Sequence: Synthetic oligonucleotide
  Antisense strand to SEQ ID NO: 2253264
auucauacaguaugcaacu

SEQ ID NO: 2253266 - RNA, 19 nt, Artificial Sequence
  Description of Artificial Sequence: Synthetic oligonucleotide
  Sense strand starting at position 2696 of SEQ ID NO: 1884272
augaauguugcuuaccuuu

SEQ ID NO: 2253267 - RNA, 19 nt, Artificial Sequence
  Description of Artificial Sequence: Synthetic oligonucleotide
  Antisense strand to SEQ ID NO: 2253266
aaagguaagcaacauucau

SEQ ID NO: 2253268 - RNA, 19 nt, Artificial Sequence
  Description of Artificial Sequence: Synthetic oligonucleotide
  Sense strand starting at position 3086 of SEQ ID NO: 1884272
gcacuaugucagcauauga

SEQ ID NO: 2253269 - RNA, 19 nt, Artificial Sequence
  Description of Artificial Sequence: Synthetic oligonucleotide
  Antisense strand to SEQ ID NO: 2253268
ucauaugcugacauagugc

SEQ ID NO: 2253270 - RNA, 19 nt, Artificial Sequence
  Description of Artificial Sequence: Synthetic oligonucleotide
  Sense strand starting at position 3108 of SEQ ID NO: 1884272
gacacucagguauauguuu

SEQ ID NO: 2253271 - RNA, 19 nt, Artificial Sequence
  Description of Artificial Sequence: Synthetic oligonucleotide
  Antisense strand to SEQ ID NO: 2253270
aaacauauaccugaguguc

SEQ ID NO: 2253272 - RNA, 19 nt, Artificial Sequence
  Description of Artificial Sequence: Synthetic oligonucleotide
  Sense strand starting at position 3115 of SEQ ID NO: 1884272
agguauauguuuccuacua

SEQ ID NO: 2253273 - RNA, 19 nt, Artificial Sequence
  Description of Artificial Sequence: Synthetic oligonucleotide
  Antisense strand to SEQ ID NO: 2253272
uaguaggaaacauauaccu

SEQ ID NO: 2253274 - RNA, 19 nt, Artificial Sequence
  Description of Artificial Sequence: Synthetic oligonucleotide
  Sense strand starting at position 3116 of SEQ ID NO: 1884272
gguauauguuuccuacuag

SEQ ID NO: 2253275 - RNA, 19 nt, Artificial Sequence
  Description of Artificial Sequence: Synthetic oligonucleotide
  Antisense strand to SEQ ID NO: 2253274
cuaguaggaaacauauacc

SEQ ID NO: 2253276 - RNA, 19 nt, Artificial Sequence
  Description of Artificial Sequence: Synthetic oligonucleotide
  Sense strand starting at position 3149 of SEQ ID NO: 1884272
uaaaucuaaguccgugaaa

SEQ ID NO: 2253277 - RNA, 19 nt, Artificial Sequence
  Description of Artificial Sequence: Synthetic oligonucleotide
  Antisense strand to SEQ ID NO: 2253276
uuucacggacuuagauuua

SEQ ID NO: 2253278 - RNA, 19 nt, Artificial Sequence
  Description of Artificial Sequence: Synthetic oligonucleotide
  Sense strand starting at position 3150 of SEQ ID NO: 1884272
aaaucuaaguccgugaaag

SEQ ID NO: 2253279 - RNA, 19 nt, Artificial Sequence
  Description of Artificial Sequence: Synthetic oligonucleotide
  Antisense strand to SEQ ID NO: 2253278
cuuucacggacuuagauuu

SEQ ID NO: 2253280 - RNA, 19 nt, Artificial Sequence
  Description of Artificial Sequence: Synthetic oligonucleotide
  Sense strand starting at position 3152 of SEQ ID NO: 1884272
aucuaaguccgugaaagca

SEQ ID NO: 2253281 - RNA, 19 nt, Artificial Sequence
  Description of Artificial Sequence: Synthetic oligonucleotide
  Antisense strand to SEQ ID NO: 2253280
ugcuuucacggacuuagau

SEQ ID NO: 2253282 - RNA, 19 nt, Artificial Sequence
  Description of Artificial Sequence: Synthetic oligonucleotide
  Sense strand starting at position 3180 of SEQ ID NO: 1884272
accauaccauccguauaua

SEQ ID NO: 2253283 - RNA, 19 nt, Artificial Sequence
  Description of Artificial Sequence: Synthetic oligonucleotide
  Antisense strand to SEQ ID NO: 2253282
uauauacggaugguauggu

SEQ ID NO: 2253284 - RNA, 19 nt, Artificial Sequence
  Description of Artificial Sequence: Synthetic oligonucleotide
  Sense strand starting at position 3206 of SEQ ID NO: 1884272
gcagcuccucaauaaaugu

SEQ ID NO: 2253285 - RNA, 19 nt, Artificial Sequence
  Description of Artificial Sequence: Synthetic oligonucleotide
  Antisense strand to SEQ ID NO: 2253284
acauuuauugaggagcugc

SEQ ID NO: 2253286 - RNA, 19 nt, Artificial Sequence
  Description of Artificial Sequence: Synthetic oligonucleotide
  Sense strand starting at position 3217 of SEQ ID NO: 1884272
auaaauguugaauguguga

SEQ ID NO: 2253287 - RNA, 19 nt, Artificial Sequence
  Description of Artificial Sequence: Synthetic oligonucleotide
  Antisense strand to SEQ ID NO: 2253286
ucacacauucaacauuuau

SEQ ID NO: 2253288 - RNA, 19 nt, Artificial Sequence
  Description of Artificial Sequence: Synthetic oligonucleotide
  Sense strand starting at position 3220 of SEQ ID NO: 1884272
aauguugaaugugugagua

SEQ ID NO: 2253289 - RNA, 19 nt, Artificial Sequence
  Description of Artificial Sequence: Synthetic oligonucleotide
  Antisense strand to SEQ ID NO: 2253288
uacucacacauucaacauu

SEQ ID NO: 2253290 - RNA, 19 nt, Artificial Sequence
  Description of Artificial Sequence: Synthetic oligonucleotide
  Sense strand starting at position 3224 of SEQ ID NO: 1884272
uugaaugugugaguaauac

SEQ ID NO: 2253291 - RNA, 19 nt, Artificial Sequence
  Description of Artificial Sequence: Synthetic oligonucleotide
  Antisense strand to SEQ ID NO: 2253290
guauuacucacacauucaa

SEQ ID NO: 2253292 - RNA, 19 nt, Artificial Sequence
  Description of Artificial Sequence: Synthetic oligonucleotide
  Sense strand starting at position 3350 of SEQ ID NO: 1884272
uggcuaacuugacuuugau

SEQ ID NO: 2253293 - RNA, 19 nt, Artificial Sequence
  Description of Artificial Sequence: Synthetic oligonucleotide
  Antisense strand to SEQ ID NO: 2253292
aucaaagucaaguuagcca

SEQ ID NO: 2253294 - RNA, 19 nt, Artificial Sequence
  Description of Artificial Sequence: Synthetic oligonucleotide
  Sense strand starting at position 3360 of SEQ ID NO: 1884272
gacuuugauucugcuuuga

SEQ ID NO: 2253295 - RNA, 19 nt, Artificial Sequence
  Description of Artificial Sequence: Synthetic oligonucleotide
  Antisense strand to SEQ ID NO: 2253294
ucaaagcagaaucaaaguc

SEQ ID NO: 2253296 - RNA, 19 nt, Artificial Sequence
  Description of Artificial Sequence: Synthetic oligonucleotide
  Sense strand starting at position 3368 of SEQ ID NO: 1884272
uucugcuuugaguaaguaa

SEQ ID NO: 2253297 - RNA, 19 nt, Artificial Sequence
  Description of Artificial Sequence: Synthetic oligonucleotide
  Antisense strand to SEQ ID NO: 2253296
uuacuuacucaaagcagaa

SEQ ID NO: 2253298 - RNA, 19 nt, Artificial Sequence
  Description of Artificial Sequence: Synthetic oligonucleotide
  Sense strand starting at position 3428 of SEQ ID NO: 1884272
uugggaauguucuuaacag

SEQ ID NO: 2253299 - RNA, 19 nt, Artificial Sequence
  Description of Artificial Sequence: Synthetic oligonucleotide
  Antisense strand to SEQ ID NO: 2253298
cuguuaagaacauucccaa

SEQ ID NO: 2253300 - RNA, 19 nt, Artificial Sequence
  Description of Artificial Sequence: Synthetic oligonucleotide
  Sense strand starting at position 3566 of SEQ ID NO: 1884272
augagcauaugguuacaua

SEQ ID NO: 2253301 - RNA, 19 nt, Artificial Sequence
  Description of Artificial Sequence: Synthetic oligonucleotide
  Antisense strand to SEQ ID NO: 2253300
uauguaaccauaugcucau

SEQ ID NO: 2253302 - RNA, 19 nt, Artificial Sequence
  Description of Artificial Sequence: Synthetic oligonucleotide
  Sense strand starting at position 3567 of SEQ ID NO: 1884272
ugagcauaugguuacauau

SEQ ID NO: 2253303 - RNA, 19 nt, Artificial Sequence
  Description of Artificial Sequence: Synthetic oligonucleotide
  Antisense strand to SEQ ID NO: 2253302
auauguaaccauaugcuca

SEQ ID NO: 2253304 - RNA, 19 nt, Artificial Sequence
  Description of Artificial Sequence: Synthetic oligonucleotide
  Sense strand starting at position 3591 of SEQ ID NO: 1884272
ggugcuuugaaagaauauu

SEQ ID NO: 2253305 - RNA, 19 nt, Artificial Sequence
  Description of Artificial Sequence: Synthetic oligonucleotide
  Antisense strand to SEQ ID NO: 2253304
aauauucuuucaaagcacc

SEQ ID NO: 2253306 - RNA, 19 nt, Artificial Sequence
  Description of Artificial Sequence: Synthetic oligonucleotide
  Sense strand starting at position 3615 of SEQ ID NO: 1884272
gcaccuugagaacauguaa

SEQ ID NO: 2253307 - RNA, 19 nt, Artificial Sequence
  Description of Artificial Sequence: Synthetic oligonucleotide
  Antisense strand to SEQ ID NO: 2253306
uuacauguucucaaggugc

SEQ ID NO: 2253308 - RNA, 19 nt, Artificial Sequence
  Description of Artificial Sequence: Synthetic oligonucleotide
  Sense strand starting at position 3644 of SEQ ID NO: 1884272
cauccuagucagcagaagu

SEQ ID NO: 2253309 - RNA, 19 nt, Artificial Sequence
  Description of Artificial Sequence: Synthetic oligonucleotide
  Antisense strand to SEQ ID NO: 2253308
acuucugcugacuaggaug

SEQ ID NO: 2253310 - RNA, 19 nt, Artificial Sequence
  Description of Artificial Sequence: Synthetic oligonucleotide
  Sense strand starting at position 3763 of SEQ ID NO: 1884272
ggaagaauuuaguaaguug

SEQ ID NO: 2253311 - RNA, 19 nt, Artificial Sequence
  Description of Artificial Sequence: Synthetic oligonucleotide
  Antisense strand to SEQ ID NO: 2253310
caacuuacuaaauucuucc

SEQ ID NO: 2253312 - RNA, 19 nt, Artificial Sequence
  Description of Artificial Sequence: Synthetic oligonucleotide
  Sense strand starting at position 16 of SEQ ID NO: 1884273
cucucuaugaggugaggau

SEQ ID NO: 2253313 - RNA, 19 nt, Artificial Sequence
  Description of Artificial Sequence: Synthetic oligonucleotide
  Antisense strand to SEQ ID NO: 2253312
auccucaccucauagagag

SEQ ID NO: 2253314 - RNA, 19 nt, Artificial Sequence
  Description of Artificial Sequence: Synthetic oligonucleotide
  Sense strand starting at position 104 of SEQ ID NO: 1884273
accuccuaaguuuaagagu

SEQ ID NO: 2253315 - RNA, 19 nt, Artificial Sequence
  Description of Artificial Sequence: Synthetic oligonucleotide
  Antisense strand to SEQ ID NO: 2253314
acucuuaaacuuaggaggu

SEQ ID NO: 2253316 - RNA, 19 nt, Artificial Sequence
  Description of Artificial Sequence: Synthetic oligonucleotide
  Sense strand starting at position 132 of SEQ ID NO: 1884273
gugugauagagcuggaaag

SEQ ID NO: 2253317 - RNA, 19 nt, Artificial Sequence
  Description of Artificial Sequence: Synthetic oligonucleotide
  Antisense strand to SEQ ID NO: 2253316
cuuuccagcucuaucacac

SEQ ID NO: 2253318 - RNA, 19 nt, Artificial Sequence
  Description of Artificial Sequence: Synthetic oligonucleotide
  Sense strand starting at position 133 of SEQ ID NO: 1884273
ugugauagagcuggaaagu

SEQ ID NO: 2253319 - RNA, 19 nt, Artificial Sequence
  Description of Artificial Sequence: Synthetic oligonucleotide
  Antisense strand to SEQ ID NO: 2253318
acuuuccagcucuaucaca

SEQ ID NO: 2253320 - RNA, 19 nt, Artificial Sequence
  Description of Artificial Sequence: Synthetic oligonucleotide
  Sense strand starting at position 134 of SEQ ID NO: 1884273
gugauagagcuggaaaguu

SEQ ID NO: 2253321 - RNA, 19 nt, Artificial Sequence
  Description of Artificial Sequence: Synthetic oligonucleotide
  Antisense strand to SEQ ID NO: 2253320
aacuuuccagcucuaucac

SEQ ID NO: 2253322 - RNA, 19 nt, Artificial Sequence
  Description of Artificial Sequence: Synthetic oligonucleotide
  Sense strand starting at position 157 of SEQ ID NO: 1884273
uuuccuuucuggucagaaa

SEQ ID NO: 2253323 - RNA, 19 nt, Artificial Sequence
  Description of Artificial Sequence: Synthetic oligonucleotide
  Antisense strand to SEQ ID NO: 2253322
uuucugaccagaaaggaaa

SEQ ID NO: 2253324 - RNA, 19 nt, Artificial Sequence
  Description of Artificial Sequence: Synthetic oligonucleotide
  Sense strand starting at position 158 of SEQ ID NO: 1884273
uuccuuucuggucagaaau

SEQ ID NO: 2253325 - RNA, 19 nt, Artificial Sequence
  Description of Artificial Sequence: Synthetic oligonucleotide
  Antisense strand to SEQ ID NO: 2253324
auuucugaccagaaaggaa

SEQ ID NO: 2253326 - RNA, 19 nt, Artificial Sequence
  Description of Artificial Sequence: Synthetic oligonucleotide
  Sense strand starting at position 168 of SEQ ID NO: 1884273
gucagaaaucaggguagcu

SEQ ID NO: 2253327 - RNA, 19 nt, Artificial Sequence
  Description of Artificial Sequence: Synthetic oligonucleotide
  Antisense strand to SEQ ID NO: 2253326
agcuacccugauuucugac

SEQ ID NO: 2253328 - RNA, 19 nt, Artificial Sequence
  Description of Artificial Sequence: Synthetic oligonucleotide
  Sense strand starting at position 207 of SEQ ID NO: 1884273
gggucaauuccauagucua

SEQ ID NO: 2253329 - RNA, 19 nt, Artificial Sequence
  Description of Artificial Sequence: Synthetic oligonucleotide
  Antisense strand to SEQ ID NO: 2253328
uagacuauggaauugaccc

SEQ ID NO: 2253330 - RNA, 19 nt, Artificial Sequence
  Description of Artificial Sequence: Synthetic oligonucleotide
  Sense strand starting at position 317 of SEQ ID NO: 1884273
cguguugacauacacaagu

SEQ ID NO: 2253331 - RNA, 19 nt, Artificial Sequence
  Description of Artificial Sequence: Synthetic oligonucleotide
  Antisense strand to SEQ ID NO: 2253330
acuuguguaugucaacacg

SEQ ID NO: 2253332 - RNA, 19 nt, Artificial Sequence
  Description of Artificial Sequence: Synthetic oligonucleotide
  Sense strand starting at position 328 of SEQ ID NO: 1884273
acacaaguuucgguuaaca

SEQ ID NO: 2253333 - RNA, 19 nt, Artificial Sequence
  Description of Artificial Sequence: Synthetic oligonucleotide
  Antisense strand to SEQ ID NO: 2253332
uguuaaccgaaacuugugu

SEQ ID NO: 2253334 - RNA, 19 nt, Artificial Sequence
  Description of Artificial Sequence: Synthetic oligonucleotide
  Sense strand starting at position 330 of SEQ ID NO: 1884273
acaaguuucgguuaacaug

SEQ ID NO: 2253335 - RNA, 19 nt, Artificial Sequence
  Description of Artificial Sequence: Synthetic oligonucleotide
  Antisense strand to SEQ ID NO: 2253334
cauguuaaccgaaacuugu

SEQ ID NO: 2253336 - RNA, 19 nt, Artificial Sequence
  Description of Artificial Sequence: Synthetic oligonucleotide
  Sense strand starting at position 336 of SEQ ID NO: 1884273
uucgguuaacaugguauca

SEQ ID NO: 2253337 - RNA, 19 nt, Artificial Sequence
  Description of Artificial Sequence: Synthetic oligonucleotide
  Antisense strand to SEQ ID NO: 2253336
ugauaccauguuaaccgaa

SEQ ID NO: 2253338 - RNA, 19 nt, Artificial Sequence
  Description of Artificial Sequence: Synthetic oligonucleotide
  Sense strand starting at position 363 of SEQ ID NO: 1884273
gaggacugccuguacuuaa

SEQ ID NO: 2253339 - RNA, 19 nt, Artificial Sequence
  Description of Artificial Sequence: Synthetic oligonucleotide
  Antisense strand to SEQ ID NO: 2253338
uuaaguacaggcaguccuc

SEQ ID NO: 2253340 - RNA, 19 nt, Artificial Sequence
  Description of Artificial Sequence: Synthetic oligonucleotide
  Sense strand starting at position 765 of SEQ ID NO: 1884273
uguacuacguuauuuccaa

SEQ ID NO: 2253341 - RNA, 19 nt, Artificial Sequence
  Description of Artificial Sequence: Synthetic oligonucleotide
  Antisense strand to SEQ ID NO: 2253340
uuggaaauaacguaguaca

SEQ ID NO: 2253342 - RNA, 19 nt, Artificial Sequence
  Description of Artificial Sequence: Synthetic oligonucleotide
  Sense strand starting at position 766 of SEQ ID NO: 1884273
guacuacguuauuuccaau

SEQ ID NO: 2253343 - RNA, 19 nt, Artificial Sequence
  Description of Artificial Sequence: Synthetic oligonucleotide
  Antisense strand to SEQ ID NO: 2253342
auuggaaauaacguaguac

SEQ ID NO: 2253344 - RNA, 19 nt, Artificial Sequence
  Description of Artificial Sequence: Synthetic oligonucleotide
  Sense strand starting at position 859 of SEQ ID NO: 1884273
ugaaauacagcucagcuua

SEQ ID NO: 2253345 - RNA, 19 nt, Artificial Sequence
  Description of Artificial Sequence: Synthetic oligonucleotide
  Antisense strand to SEQ ID NO: 2253344
uaagcugagcuguauuuca

SEQ ID NO: 2253346 - RNA, 19 nt, Artificial Sequence
  Description of Artificial Sequence: Synthetic oligonucleotide
  Sense strand starting at position 884 of SEQ ID NO: 1884273
ccauaaaguuggucccaaa

SEQ ID NO: 2253347 - RNA, 19 nt, Artificial Sequence
  Description of Artificial Sequence: Synthetic oligonucleotide
  Antisense strand to SEQ ID NO: 2253346
uuugggaccaacuuuaugg

SEQ ID NO: 2253348 - RNA, 19 nt, Artificial Sequence
  Description of Artificial Sequence: Synthetic oligonucleotide
  Sense strand starting at position 903 of SEQ ID NO: 1884273
gacguuuccuuauucgaag

SEQ ID NO: 2253349 - RNA, 19 nt, Artificial Sequence
  Description of Artificial Sequence: Synthetic oligonucleotide
  Antisense strand to SEQ ID NO: 2253348
cuucgaauaaggaaacguc

SEQ ID NO: 2253350 - RNA, 19 nt, Artificial Sequence
  Description of Artificial Sequence: Synthetic oligonucleotide
  Sense strand starting at position 970 of SEQ ID NO: 1884273
gaagacgacuuucuugaua

SEQ ID NO: 2253351 - RNA, 19 nt, Artificial Sequence
  Description of Artificial Sequence: Synthetic oligonucleotide
  Antisense strand to SEQ ID NO: 2253350
uaucaagaaagucgucuuc

SEQ ID NO: 2253352 - RNA, 19 nt, Artificial Sequence
  Description of Artificial Sequence: Synthetic oligonucleotide
  Sense strand starting at position 991 of SEQ ID NO: 1884273
ugugguuaucuguaugguc

SEQ ID NO: 2253353 - RNA, 19 nt, Artificial Sequence
  Description of Artificial Sequence: Synthetic oligonucleotide
  Antisense strand to SEQ ID NO: 2253352
gaccauacagauaaccaca

SEQ ID NO: 2253354 - RNA, 19 nt, Artificial Sequence
  Description of Artificial Sequence: Synthetic oligonucleotide
  Sense strand starting at position 1031 of SEQ ID NO: 1884273
guaccaagucaaggauaaa

SEQ ID NO: 2253355 - RNA, 19 nt, Artificial Sequence
  Description of Artificial Sequence: Synthetic oligonucleotide
  Antisense strand to SEQ ID NO: 2253354
uuuauccuugacuugguac

SEQ ID NO: 2253356 - RNA, 19 nt, Artificial Sequence
  Description of Artificial Sequence: Synthetic oligonucleotide
  Sense strand starting at position 1135 of SEQ ID NO: 1884273
ccgcucauuuaggaaggaa

SEQ ID NO: 2253357 - RNA, 19 nt, Artificial Sequence
  Description of Artificial Sequence: Synthetic oligonucleotide
  Antisense strand to SEQ ID NO: 2253356
uuccuuccuaaaugagcgg

SEQ ID NO: 2253358 - RNA, 19 nt, Artificial Sequence
  Description of Artificial Sequence: Synthetic oligonucleotide
  Sense strand starting at position 1164 of SEQ ID NO: 1884273
guggauaccuuagcucuga

SEQ ID NO: 2253359 - RNA, 19 nt, Artificial Sequence
  Description of Artificial Sequence: Synthetic oligonucleotide
  Antisense strand to SEQ ID NO: 2253358
ucagagcuaagguauccac

SEQ ID NO: 2253360 - RNA, 19 nt, Artificial Sequence
  Description of Artificial Sequence: Synthetic oligonucleotide
  Sense strand starting at position 1193 of SEQ ID NO: 1884273
cuaggaucccacgguucua

SEQ ID NO: 2253361 - RNA, 19 nt, Artificial Sequence
  Description of Artificial Sequence: Synthetic oligonucleotide
  Antisense strand to SEQ ID NO: 2253360
uagaaccgugggauccuag

SEQ ID NO: 2253362 - RNA, 19 nt, Artificial Sequence
  Description of Artificial Sequence: Synthetic oligonucleotide
  Sense strand starting at position 1204 of SEQ ID NO: 1884273
cgguucuacgcgaggaaga

SEQ ID NO: 2253363 - RNA, 19 nt, Artificial Sequence
  Description of Artificial Sequence: Synthetic oligonucleotide
  Antisense strand to SEQ ID NO: 2253362
ucuuccucgcguagaaccg

SEQ ID NO: 2253364 - RNA, 19 nt, Artificial Sequence
  Description of Artificial Sequence: Synthetic oligonucleotide
  Sense strand starting at position 1985 of SEQ ID NO: 1884273
agccucuagguguaaggaa

SEQ ID NO: 2253365 - RNA, 19 nt, Artificial Sequence
  Description of Artificial Sequence: Synthetic oligonucleotide
  Antisense strand to SEQ ID NO: 2253364
uuccuuacaccuagaggcu

SEQ ID NO: 2253366 - RNA, 19 nt, Artificial Sequence
  Description of Artificial Sequence: Synthetic oligonucleotide
  Sense strand starting at position 3168 of SEQ ID NO: 1884273
uguguuugcggaguuguua

SEQ ID NO: 2253367 - RNA, 19 nt, Artificial Sequence
  Description of Artificial Sequence: Synthetic oligonucleotide
  Antisense strand to SEQ ID NO: 2253366
uaacaacuccgcaaacaca

SEQ ID NO: 2253368 - RNA, 19 nt, Artificial Sequence
  Description of Artificial Sequence: Synthetic oligonucleotide
  Sense strand starting at position 3180 of SEQ ID NO: 1884273
guuguuaccugggcuuaga

SEQ ID NO: 2253369 - RNA, 19 nt, Artificial Sequence
  Description of Artificial Sequence: Synthetic oligonucleotide
  Antisense strand to SEQ ID NO: 2253368
ucuaagcccagguaacaac

SEQ ID NO: 2253370 - RNA, 19 nt, Artificial Sequence
  Description of Artificial Sequence: Synthetic oligonucleotide
  Sense strand starting at position 3499 of SEQ ID NO: 1884273
cugccuggcgugagaguua

SEQ ID NO: 2253371 - RNA, 19 nt, Artificial Sequence
  Description of Artificial Sequence: Synthetic oligonucleotide
  Antisense strand to SEQ ID NO: 2253370
uaacucucacgccaggcag

SEQ ID NO: 2253372 - RNA, 19 nt, Artificial Sequence
  Description of Artificial Sequence: Synthetic oligonucleotide
  Sense strand starting at position 3613 of SEQ ID NO: 1884273
uuguauuucugguuaucuc

SEQ ID NO: 2253373 - RNA, 19 nt, Artificial Sequence
  Description of Artificial Sequence: Synthetic oligonucleotide
  Antisense strand to SEQ ID NO: 2253372
gagauaaccagaaauacaa

SEQ ID NO: 2253374 - RNA, 19 nt, Artificial Sequence
  Description of Artificial Sequence: Synthetic oligonucleotide
  Sense strand starting at position 3673 of SEQ ID NO: 1884273
aaugucugcugauuguuau

SEQ ID NO: 2253375 - RNA, 19 nt, Artificial Sequence
  Description of Artificial Sequence: Synthetic oligonucleotide
  Antisense strand to SEQ ID NO: 2253374
auaacaaucagcagacauu

SEQ ID NO: 2253376 - RNA, 19 nt, Artificial Sequence
  Description of Artificial Sequence: Synthetic oligonucleotide
  Sense strand starting at position 3683 of SEQ ID NO: 1884273
gauuguuauugucuggaca

SEQ ID NO: 2253377 - RNA, 19 nt, Artificial Sequence
  Description of Artificial Sequence: Synthetic oligonucleotide
  Antisense strand to SEQ ID NO: 2253376
uguccagacaauaacaauc

SEQ ID NO: 2253378 - RNA, 19 nt, Artificial Sequence
  Description of Artificial Sequence: Synthetic oligonucleotide
  Sense strand starting at position 3684 of SEQ ID NO: 1884273
auuguuauugucuggacag

SEQ ID NO: 2253379 - RNA, 19 nt, Artificial Sequence
  Description of Artificial Sequence: Synthetic oligonucleotide
  Antisense strand to SEQ ID NO: 2253378
cuguccagacaauaacaau

SEQ ID NO: 2253380 - RNA, 19 nt, Artificial Sequence
  Description of Artificial Sequence: Synthetic oligonucleotide
  Sense strand starting at position 3686 of SEQ ID NO: 1884273
uguuauugucuggacaguu

SEQ ID NO: 2253381 - RNA, 19 nt, Artificial Sequence
  Description of Artificial Sequence: Synthetic oligonucleotide
  Antisense strand to SEQ ID NO: 2253380
aacuguccagacaauaaca

SEQ ID NO: 2253382 - RNA, 19 nt, Artificial Sequence
  Description of Artificial Sequence: Synthetic oligonucleotide
  Sense strand starting at position 3884 of SEQ ID NO: 1884273
uuugguuccugcguuauuu

SEQ ID NO: 2253383 - RNA, 19 nt, Artificial Sequence
  Description of Artificial Sequence: Synthetic oligonucleotide
  Antisense strand to SEQ ID NO: 2253382
aaauaacgcaggaaccaaa

SEQ ID NO: 2253384 - RNA, 19 nt, Artificial Sequence
  Description of Artificial Sequence: Synthetic oligonucleotide
  Sense strand starting at position 3925 of SEQ ID NO: 1884273
ggcaauaaaugcgucuaua

SEQ ID NO: 2253385 - RNA, 19 nt, Artificial Sequence
  Description of Artificial Sequence: Synthetic oligonucleotide
  Antisense strand to SEQ ID NO: 2253384
uauagacgcauuuauugcc

SEQ ID NO: 2253386 - RNA, 19 nt, Artificial Sequence
  Description of Artificial Sequence: Synthetic oligonucleotide
  Sense strand starting at position 3970 of SEQ ID NO: 1884273
cgaggaaauacguguuuag

SEQ ID NO: 2253387 - RNA, 19 nt, Artificial Sequence
  Description of Artificial Sequence: Synthetic oligonucleotide
  Antisense strand to SEQ ID NO: 2253386
cuaaacacguauuuccucg

SEQ ID NO: 2253388 - RNA, 19 nt, Artificial Sequence
  Description of Artificial Sequence: Synthetic oligonucleotide
  Sense strand starting at position 3973 of SEQ ID NO: 1884273
ggaaauacguguuuaggag

SEQ ID NO: 2253389 - RNA, 19 nt, Artificial Sequence
  Description of Artificial Sequence: Synthetic oligonucleotide
  Antisense strand to SEQ ID NO: 2253388
cuccuaaacacguauuucc

SEQ ID NO: 2253390 - RNA, 19 nt, Artificial Sequence
  Description of Artificial Sequence: Synthetic oligonucleotide
  Sense strand starting at position 3974 of SEQ ID NO: 1884273
gaaauacguguuuaggaga

SEQ ID NO: 2253391 - RNA, 19 nt, Artificial Sequence
  Description of Artificial Sequence: Synthetic oligonucleotide
  Antisense strand to SEQ ID NO: 2253390
ucuccuaaacacguauuuc

SEQ ID NO: 2253392 - RNA, 19 nt, Artificial Sequence
  Description of Artificial Sequence: Synthetic oligonucleotide
  Sense strand starting at position 349 of SEQ ID NO: 1884274
uuagaaaguuaggaaacaa

SEQ ID NO: 2253393 - RNA, 19 nt, Artificial Sequence
  Description of Artificial Sequence: Synthetic oligonucleotide
  Antisense strand to SEQ ID NO: 2253392
uuguuuccuaacuuucuaa

SEQ ID NO: 2253394 - RNA, 19 nt, Artificial Sequence
  Description of Artificial Sequence: Synthetic oligonucleotide
  Sense strand starting at position 957 of SEQ ID NO: 1884274
auguauagcuauguaccaa

SEQ ID NO: 2253395 - RNA, 19 nt, Artificial Sequence
  Description of Artificial Sequence: Synthetic oligonucleotide
  Antisense strand to SEQ ID NO: 2253394
uugguacauagcuauacau

SEQ ID NO: 2253396 - RNA, 19 nt, Artificial Sequence
  Description of Artificial Sequence: Synthetic oligonucleotide
  Sense strand starting at position 1117 of SEQ ID NO: 1884274
agcgcugaauacguaauuu

SEQ ID NO: 2253397 - RNA, 19 nt, Artificial Sequence
  Description of Artificial Sequence: Synthetic oligonucleotide
  Antisense strand to SEQ ID NO: 2253396
aaauuacguauucagcgcu

SEQ ID NO: 2253398 - RNA, 19 nt, Artificial Sequence
  Description of Artificial Sequence: Synthetic oligonucleotide
  Sense strand starting at position 1190 of SEQ ID NO: 1884274
agcaguuaccuuugaaaca

SEQ ID NO: 2253399 - RNA, 19 nt, Artificial Sequence
  Description of Artificial Sequence: Synthetic oligonucleotide
  Antisense strand to SEQ ID NO: 2253398
uguuucaaagguaacugcu

SEQ ID NO: 2253400 - RNA, 19 nt, Artificial Sequence
  Description of Artificial Sequence: Synthetic oligonucleotide
  Sense strand starting at position 1224 of SEQ ID NO: 1884274
agauauccggaaugugaag

SEQ ID NO: 2253401 - RNA, 19 nt, Artificial Sequence
  Description of Artificial Sequence: Synthetic oligonucleotide
  Antisense strand to SEQ ID NO: 2253400
cuucacauuccggauaucu

SEQ ID NO: 2253402 - RNA, 19 nt, Artificial Sequence
  Description of Artificial Sequence: Synthetic oligonucleotide
  Sense strand starting at position 1292 of SEQ ID NO: 1884274
aucccuaaaguucgaaaua

SEQ ID NO: 2253403 - RNA, 19 nt, Artificial Sequence
  Description of Artificial Sequence: Synthetic oligonucleotide
  Antisense strand to SEQ ID NO: 2253402
uauuucgaacuuuagggau

SEQ ID NO: 2253404 - RNA, 19 nt, Artificial Sequence
  Description of Artificial Sequence: Synthetic oligonucleotide
  Sense strand starting at position 1304 of SEQ ID NO: 1884274
cgaaauacgagcuacagaa

SEQ ID NO: 2253405 - RNA, 19 nt, Artificial Sequence
  Description of Artificial Sequence: Synthetic oligonucleotide
  Antisense strand to SEQ ID NO: 2253404
uucuguagcucguauuucg

SEQ ID NO: 2253406 - RNA, 19 nt, Artificial Sequence
  Description of Artificial Sequence: Synthetic oligonucleotide
  Sense strand starting at position 1336 of SEQ ID NO: 1884274
cuaacuugucuguagccua

SEQ ID NO: 2253407 - RNA, 19 nt, Artificial Sequence
  Description of Artificial Sequence: Synthetic oligonucleotide
  Antisense strand to SEQ ID NO: 2253406
uaggcuacagacaaguuag

SEQ ID NO: 2253408 - RNA, 19 nt, Artificial Sequence
  Description of Artificial Sequence: Synthetic oligonucleotide
  Sense strand starting at position 1525 of SEQ ID NO: 1884274
acagcaguccgcgugacaa

SEQ ID NO: 2253409 - RNA, 19 nt, Artificial Sequence
  Description of Artificial Sequence: Synthetic oligonucleotide
  Antisense strand to SEQ ID NO: 2253408
uugucacgcggacugcugu

SEQ ID NO: 2253410 - RNA, 19 nt, Artificial Sequence
  Description of Artificial Sequence: Synthetic oligonucleotide
  Sense strand starting at position 2119 of SEQ ID NO: 1884274
uggagguugugaguuacga

SEQ ID NO: 2253411 - RNA, 19 nt, Artificial Sequence
  Description of Artificial Sequence: Synthetic oligonucleotide
  Antisense strand to SEQ ID NO: 2253410
ucguaacucacaaccucca

SEQ ID NO: 2253412 - RNA, 19 nt, Artificial Sequence
  Description of Artificial Sequence: Synthetic oligonucleotide
  Sense strand starting at position 2289 of SEQ ID NO: 1884274
gcgccugauuugcuggaga

SEQ ID NO: 2253413 - RNA, 19 nt, Artificial Sequence
  Description of Artificial Sequence: Synthetic oligonucleotide
  Antisense strand to SEQ ID NO: 2253412
ucuccagcaaaucaggcgc

SEQ ID NO: 2253414 - RNA, 19 nt, Artificial Sequence
  Description of Artificial Sequence: Synthetic oligonucleotide
  Sense strand starting at position 2435 of SEQ ID NO: 1884274
ucaauugccucaucuggaa

SEQ ID NO: 2253415 - RNA, 19 nt, Artificial Sequence
  Description of Artificial Sequence: Synthetic oligonucleotide
  Antisense strand to SEQ ID NO: 2253414
uuccagaugaggcaauuga

SEQ ID NO: 2253416 - RNA, 19 nt, Artificial Sequence
  Description of Artificial Sequence: Synthetic oligonucleotide
  Sense strand starting at position 2495 of SEQ ID NO: 1884274
acagauaacuuucuguagu

SEQ ID NO: 2253417 - RNA, 19 nt, Artificial Sequence
  Description of Artificial Sequence: Synthetic oligonucleotide
  Antisense strand to SEQ ID NO: 2253416
acuacagaaaguuaucugu

SEQ ID NO: 2253418 - RNA, 19 nt, Artificial Sequence
  Description of Artificial Sequence: Synthetic oligonucleotide
  Sense strand starting at position 2505 of SEQ ID NO: 1884274
uucuguaguccucauacaa

SEQ ID NO: 2253419 - RNA, 19 nt, Artificial Sequence
  Description of Artificial Sequence: Synthetic oligonucleotide
  Antisense strand to SEQ ID NO: 2253418
uuguaugaggacuacagaa

SEQ ID NO: 2253420 - RNA, 19 nt, Artificial Sequence
  Description of Artificial Sequence: Synthetic oligonucleotide
  Sense strand starting at position 2520 of SEQ ID NO: 1884274
acaauuuacugagaacugu

SEQ ID NO: 2253421 - RNA, 19 nt, Artificial Sequence
  Description of Artificial Sequence: Synthetic oligonucleotide
  Antisense strand to SEQ ID NO: 2253420
acaguucucaguaaauugu

SEQ ID NO: 2253422 - RNA, 19 nt, Artificial Sequence
  Description of Artificial Sequence: Synthetic oligonucleotide
  Sense strand starting at position 2623 of SEQ ID NO: 1884274
ugcugagcugcgguguaaa

SEQ ID NO: 2253423 - RNA, 19 nt, Artificial Sequence
  Description of Artificial Sequence: Synthetic oligonucleotide
  Antisense strand to SEQ ID NO: 2253422
uuuacaccgcagcucagca

SEQ ID NO: 2253424 - RNA, 19 nt, Artificial Sequence
  Description of Artificial Sequence: Synthetic oligonucleotide
  Sense strand starting at position 2750 of SEQ ID NO: 1884274
guggguuacucagcugaca

SEQ ID NO: 2253425 - RNA, 19 nt, Artificial Sequence
  Description of Artificial Sequence: Synthetic oligonucleotide
  Antisense strand to SEQ ID NO: 2253424
ugucagcugaguaacccac

SEQ ID NO: 2253426 - RNA, 19 nt, Artificial Sequence
  Description of Artificial Sequence: Synthetic oligonucleotide
  Sense strand starting at position 2752 of SEQ ID NO: 1884274
ggguuacucagcugacaaa

SEQ ID NO: 2253427 - RNA, 19 nt, Artificial Sequence
  Description of Artificial Sequence: Synthetic oligonucleotide
  Antisense strand to SEQ ID NO: 2253426
uuugucagcugaguaaccc

SEQ ID NO: 2253428 - RNA, 19 nt, Artificial Sequence
  Description of Artificial Sequence: Synthetic oligonucleotide
  Sense strand starting at position 2809 of SEQ ID NO: 1884274
cgacuucuggcucagagga

SEQ ID NO: 2253429 - RNA, 19 nt, Artificial Sequence
  Description of Artificial Sequence: Synthetic oligonucleotide
  Antisense strand to SEQ ID NO: 2253428
uccucugagccagaagucg

SEQ ID NO: 2253430 - RNA, 19 nt, Artificial Sequence
  Description of Artificial Sequence: Synthetic oligonucleotide
  Sense strand starting at position 2921 of SEQ ID NO: 1884274
acgaacuauugagcauaca

SEQ ID NO: 2253431 - RNA, 19 nt, Artificial Sequence
  Description of Artificial Sequence: Synthetic oligonucleotide
  Antisense strand to SEQ ID NO: 2253430
uguaugcucaauaguucgu

SEQ ID NO: 2253432 - RNA, 19 nt, Artificial Sequence
  Description of Artificial Sequence: Synthetic oligonucleotide
  Sense strand starting at position 3053 of SEQ ID NO: 1884274
cuaugaugguaaucaucuu

SEQ ID NO: 2253433 - RNA, 19 nt, Artificial Sequence
  Description of Artificial Sequence: Synthetic oligonucleotide
  Antisense strand to SEQ ID NO: 2253432
aagaugauuaccaucauag

SEQ ID NO: 2253434 - RNA, 19 nt, Artificial Sequence
  Description of Artificial Sequence: Synthetic oligonucleotide
  Sense strand starting at position 3059 of SEQ ID NO: 1884274
ugguaaucaucuuugcauu

SEQ ID NO: 2253435 - RNA, 19 nt, Artificial Sequence
  Description of Artificial Sequence: Synthetic oligonucleotide
  Antisense strand to SEQ ID NO: 2253434
aaugcaaagaugauuacca

SEQ ID NO: 2253436 - RNA, 19 nt, Artificial Sequence
  Description of Artificial Sequence: Synthetic oligonucleotide
  Sense strand starting at position 3069 of SEQ ID NO: 1884274
cuuugcauuccugagccua

SEQ ID NO: 2253437 - RNA, 19 nt, Artificial Sequence
  Description of Artificial Sequence: Synthetic oligonucleotide
  Antisense strand to SEQ ID NO: 2253436
uaggcucaggaaugcaaag

SEQ ID NO: 2253438 - RNA, 19 nt, Artificial Sequence
  Description of Artificial Sequence: Synthetic oligonucleotide
  Sense strand starting at position 3071 of SEQ ID NO: 1884274
uugcauuccugagccuaga

SEQ ID NO: 2253439 - RNA, 19 nt, Artificial Sequence
  Description of Artificial Sequence: Synthetic oligonucleotide
  Antisense strand to SEQ ID NO: 2253438
ucuaggcucaggaaugcaa

SEQ ID NO: 2253440 - RNA, 19 nt, Artificial Sequence
  Description of Artificial Sequence: Synthetic oligonucleotide
  Sense strand starting at position 3086 of SEQ ID NO: 1884274
uagaauagggccugugaug

SEQ ID NO: 2253441 - RNA, 19 nt, Artificial Sequence
  Description of Artificial Sequence: Synthetic oligonucleotide
  Antisense strand to SEQ ID NO: 2253440
caucacaggcccuauucua

SEQ ID NO: 2253442 - RNA, 19 nt, Artificial Sequence
  Description of Artificial Sequence: Synthetic oligonucleotide
  Sense strand starting at position 3093 of SEQ ID NO: 1884274
gggccugugauggagacuu

SEQ ID NO: 2253443 - RNA, 19 nt, Artificial Sequence
  Description of Artificial Sequence: Synthetic oligonucleotide
  Antisense strand to SEQ ID NO: 2253442
aagucuccaucacaggccc

SEQ ID NO: 2253444 - RNA, 19 nt, Artificial Sequence
  Description of Artificial Sequence: Synthetic oligonucleotide
  Sense strand starting at position 3298 of SEQ ID NO: 1884274
ucaagugccagauaguuga

SEQ ID NO: 2253445 - RNA, 19 nt, Artificial Sequence
  Description of Artificial Sequence: Synthetic oligonucleotide
  Antisense strand to SEQ ID NO: 2253444
ucaacuaucuggcacuuga

SEQ ID NO: 2253446 - RNA, 19 nt, Artificial Sequence
  Description of Artificial Sequence: Synthetic oligonucleotide
  Sense strand starting at position 3301 of SEQ ID NO: 1884274
agugccagauaguugauaa

SEQ ID NO: 2253447 - RNA, 19 nt, Artificial Sequence
  Description of Artificial Sequence: Synthetic oligonucleotide
  Antisense strand to SEQ ID NO: 2253446
uuaucaacuaucuggcacu

SEQ ID NO: 2253448 - RNA, 19 nt, Artificial Sequence
  Description of Artificial Sequence: Synthetic oligonucleotide
  Sense strand starting at position 3302 of SEQ ID NO: 1884274
gugccagauaguugauaag

SEQ ID NO: 2253449 - RNA, 19 nt, Artificial Sequence
  Description of Artificial Sequence: Synthetic oligonucleotide
  Antisense strand to SEQ ID NO: 2253448
cuuaucaacuaucuggcac

SEQ ID NO: 2253450 - RNA, 19 nt, Artificial Sequence
  Description of Artificial Sequence: Synthetic oligonucleotide
  Sense strand starting at position 3314 of SEQ ID NO: 1884274
ugauaagggucuuuacgua

SEQ ID NO: 2253451 - RNA, 19 nt, Artificial Sequence
  Description of Artificial Sequence: Synthetic oligonucleotide
  Antisense strand to SEQ ID NO: 2253450
uacguaaagacccuuauca

SEQ ID NO: 2253452 - RNA, 19 nt, Artificial Sequence
  Description of Artificial Sequence: Synthetic oligonucleotide
  Sense strand starting at position 3367 of SEQ ID NO: 1884274
ugaaaucccucgucuacaa

SEQ ID NO: 2253453 - RNA, 19 nt, Artificial Sequence
  Description of Artificial Sequence: Synthetic oligonucleotide
  Antisense strand to SEQ ID NO: 2253452
uuguagacgagggauuuca

SEQ ID NO: 2253454 - RNA, 19 nt, Artificial Sequence
  Description of Artificial Sequence: Synthetic oligonucleotide
  Sense strand starting at position 3717 of SEQ ID NO: 1884274
acugauugaugaguagauu

SEQ ID NO: 2253455 - RNA, 19 nt, Artificial Sequence
  Description of Artificial Sequence: Synthetic oligonucleotide
  Antisense strand to SEQ ID NO: 2253454
aaucuacucaucaaucagu

SEQ ID NO: 2253456 - RNA, 19 nt, Artificial Sequence
  Description of Artificial Sequence: Synthetic oligonucleotide
  Sense strand starting at position 3773 of SEQ ID NO: 1884274
gcugacucugaccgacauu

SEQ ID NO: 2253457 - RNA, 19 nt, Artificial Sequence
  Description of Artificial Sequence: Synthetic oligonucleotide
  Antisense strand to SEQ ID NO: 2253456
aaugucggucagagucagc

SEQ ID NO: 2253458 - RNA, 19 nt, Artificial Sequence
  Description of Artificial Sequence: Synthetic oligonucleotide
  Sense strand starting at position 3802 of SEQ ID NO: 1884274
gcaagaaacuaugugcaca

SEQ ID NO: 2253459 - RNA, 19 nt, Artificial Sequence
  Description of Artificial Sequence: Synthetic oligonucleotide
  Antisense strand to SEQ ID NO: 2253458
ugugcacauaguuucuugc

SEQ ID NO: 2253460 - RNA, 19 nt, Artificial Sequence
  Description of Artificial Sequence: Synthetic oligonucleotide
  Sense strand starting at position 3957 of SEQ ID NO: 1884274
aaucuuugacucuggguau

SEQ ID NO: 2253461 - RNA, 19 nt, Artificial Sequence
  Description of Artificial Sequence: Synthetic oligonucleotide
  Antisense strand to SEQ ID NO: 2253460
auacccagagucaaagauu

SEQ ID NO: 2253462 - RNA, 19 nt, Artificial Sequence
  Description of Artificial Sequence: Synthetic oligonucleotide
  Sense strand starting at position 3961 of SEQ ID NO: 1884274
uuugacucuggguaugagu

SEQ ID NO: 2253463 - RNA, 19 nt, Artificial Sequence
  Description of Artificial Sequence: Synthetic oligonucleotide
  Antisense strand to SEQ ID NO: 2253462
acucauacccagagucaaa

SEQ ID NO: 2253464 - RNA, 19 nt, Artificial Sequence
  Description of Artificial Sequence: Synthetic oligonucleotide
  Sense strand starting at position 3963 of SEQ ID NO: 1884274
ugacucuggguaugaguaa

SEQ ID NO: 2253465 - RNA, 19 nt, Artificial Sequence
  Description of Artificial Sequence: Synthetic oligonucleotide
  Antisense strand to SEQ ID NO: 2253464
uuacucauacccagaguca

SEQ ID NO: 2253466 - RNA, 19 nt, Artificial Sequence
  Description of Artificial Sequence: Synthetic oligonucleotide
  Sense strand starting at position 3974 of SEQ ID NO: 1884274
augaguaauucccugucug

SEQ ID NO: 2253467 - RNA, 19 nt, Artificial Sequence
  Description of Artificial Sequence: Synthetic oligonucleotide
  Antisense strand to SEQ ID NO: 2253466
cagacagggaauuacucau

SEQ ID NO: 2253468 - RNA, 19 nt, Artificial Sequence
  Description of Artificial Sequence: Synthetic oligonucleotide
  Sense strand starting at position 3975 of SEQ ID NO: 1884274
ugaguaauucccugucuga

SEQ ID NO: 2253469 - RNA, 19 nt, Artificial Sequence
  Description of Artificial Sequence: Synthetic oligonucleotide
  Antisense strand to SEQ ID NO: 2253468
ucagacagggaauuacuca

SEQ ID NO: 2253470 - RNA, 19 nt, Artificial Sequence
  Description of Artificial Sequence: Synthetic oligonucleotide
  Sense strand starting at position 3982 of SEQ ID NO: 1884274
uucccugucugaucuuaca

SEQ ID NO: 2253471 - RNA, 19 nt, Artificial Sequence
  Description of Artificial Sequence: Synthetic oligonucleotide
  Antisense strand to SEQ ID NO: 2253470
uguaagaucagacagggaa

SEQ ID NO: 2253472 - RNA, 19 nt, Artificial Sequence
  Description of Artificial Sequence: Synthetic oligonucleotide
  Sense strand starting at position 81 of SEQ ID NO: 1884275
uacacagucuauggaugaa

SEQ ID NO: 2253473 - RNA, 19 nt, Artificial Sequence
  Description of Artificial Sequence: Synthetic oligonucleotide
  Antisense strand to SEQ ID NO: 2253472
uucauccauagacugugua

SEQ ID NO: 2253474 - RNA, 19 nt, Artificial Sequence
  Description of Artificial Sequence: Synthetic oligonucleotide
  Sense strand starting at position 184 of SEQ ID NO: 1884275
acaguugaguuuccucuga

SEQ ID NO: 2253475 - RNA, 19 nt, Artificial Sequence
  Description of Artificial Sequence: Synthetic oligonucleotide
  Antisense strand to SEQ ID NO: 2253474
ucagaggaaacucaacugu

SEQ ID NO: 2253476 - RNA, 19 nt, Artificial Sequence
  Description of Artificial Sequence: Synthetic oligonucleotide
  Sense strand starting at position 186 of SEQ ID NO: 1884275
aguugaguuuccucugaaa

SEQ ID NO: 2253477 - RNA, 19 nt, Artificial Sequence
  Description of Artificial Sequence: Synthetic oligonucleotide
  Antisense strand to SEQ ID NO: 2253476
uuucagaggaaacucaacu

SEQ ID NO: 2253478 - RNA, 19 nt, Artificial Sequence
  Description of Artificial Sequence: Synthetic oligonucleotide
  Sense strand starting at position 188 of SEQ ID NO: 1884275
uugaguuuccucugaaagg

SEQ ID NO: 2253479 - RNA, 19 nt, Artificial Sequence
  Description of Artificial Sequence: Synthetic oligonucleotide
  Antisense strand to SEQ ID NO: 2253478
ccuuucagaggaaacucaa

SEQ ID NO: 2253480 - RNA, 19 nt, Artificial Sequence
  Description of Artificial Sequence: Synthetic oligonucleotide
  Sense strand starting at position 319 of SEQ ID NO: 1884275
agucauagcuucuuccaag

SEQ ID NO: 2253481 - RNA, 19 nt, Artificial Sequence
  Description of Artificial Sequence: Synthetic oligonucleotide
  Antisense strand to SEQ ID NO: 2253480
cuuggaagaagcuaugacu

SEQ ID NO: 2253482 - RNA, 19 nt, Artificial Sequence
  Description of Artificial Sequence: Synthetic oligonucleotide
  Sense strand starting at position 320 of SEQ ID NO: 1884275
gucauagcuucuuccaaga

SEQ ID NO: 2253483 - RNA, 19 nt, Artificial Sequence
  Description of Artificial Sequence: Synthetic oligonucleotide
  Antisense strand to SEQ ID NO: 2253482
ucuuggaagaagcuaugac

SEQ ID NO: 2253484 - RNA, 19 nt, Artificial Sequence
  Description of Artificial Sequence: Synthetic oligonucleotide
  Sense strand starting at position 361 of SEQ ID NO: 1884275
ccauuaccucccuggaaga

SEQ ID NO: 2253485 - RNA, 19 nt, Artificial Sequence
  Description of Artificial Sequence: Synthetic oligonucleotide
  Antisense strand to SEQ ID NO: 2253484
ucuuccagggagguaaugg

SEQ ID NO: 2253486 - RNA, 19 nt, Artificial Sequence
  Description of Artificial Sequence: Synthetic oligonucleotide
  Sense strand starting at position 489 of SEQ ID NO: 1884275
uugaaaugaucccugguuc

SEQ ID NO: 2253487 - RNA, 19 nt, Artificial Sequence
  Description of Artificial Sequence: Synthetic oligonucleotide
  Antisense strand to SEQ ID NO: 2253486
gaaccagggaucauuucaa

SEQ ID NO: 2253488 - RNA, 19 nt, Artificial Sequence
  Description of Artificial Sequence: Synthetic oligonucleotide
  Sense strand starting at position 569 of SEQ ID NO: 1884275
gauguaaauacugguggga

SEQ ID NO: 2253489 - RNA, 19 nt, Artificial Sequence
  Description of Artificial Sequence: Synthetic oligonucleotide
  Antisense strand to SEQ ID NO: 2253488
ucccaccaguauuuacauc

SEQ ID NO: 2253490 - RNA, 19 nt, Artificial Sequence
  Description of Artificial Sequence: Synthetic oligonucleotide
  Sense strand starting at position 630 of SEQ ID NO: 1884275
acaggagacuuugaacaug

SEQ ID NO: 2253491 - RNA, 19 nt, Artificial Sequence
  Description of Artificial Sequence: Synthetic oligonucleotide
  Antisense strand to SEQ ID NO: 2253490
cauguucaaagucuccugu

SEQ ID NO: 2253492 - RNA, 19 nt, Artificial Sequence
  Description of Artificial Sequence: Synthetic oligonucleotide
  Sense strand starting at position 703 of SEQ ID NO: 1884275
cuggauacuuauugaggaa

SEQ ID NO: 2253493 - RNA, 19 nt, Artificial Sequence
  Description of Artificial Sequence: Synthetic oligonucleotide
  Antisense strand to SEQ ID NO: 2253492
uuccucaauaaguauccag

SEQ ID NO: 2253494 - RNA, 19 nt, Artificial Sequence
  Description of Artificial Sequence: Synthetic oligonucleotide
  Sense strand starting at position 755 of SEQ ID NO: 1884275
agaccuagcuggucauuaa

SEQ ID NO: 2253495 - RNA, 19 nt, Artificial Sequence
  Description of Artificial Sequence: Synthetic oligonucleotide
  Antisense strand to SEQ ID NO: 2253494
uuaaugaccagcuaggucu

SEQ ID NO: 2253496 - RNA, 19 nt, Artificial Sequence
  Description of Artificial Sequence: Synthetic oligonucleotide
  Sense strand starting at position 779 of SEQ ID NO: 1884275
caagaacuggucuaauugu

SEQ ID NO: 2253497 - RNA, 19 nt, Artificial Sequence
  Description of Artificial Sequence: Synthetic oligonucleotide
  Antisense strand to SEQ ID NO: 2253496
acaauuagaccaguucuug

SEQ ID NO: 2253498 - RNA, 19 nt, Artificial Sequence
  Description of Artificial Sequence: Synthetic oligonucleotide
  Sense strand starting at position 805 of SEQ ID NO: 1884275
gcuggauuaucacauccca

SEQ ID NO: 2253499 - RNA, 19 nt, Artificial Sequence
  Description of Artificial Sequence: Synthetic oligonucleotide
  Antisense strand to SEQ ID NO: 2253498
ugggaugugauaauccagc

SEQ ID NO: 2253500 - RNA, 19 nt, Artificial Sequence
  Description of Artificial Sequence: Synthetic oligonucleotide
  Sense strand starting at position 988 of SEQ ID NO: 1884275
ugguguaccuaccugugaa

SEQ ID NO: 2253501 - RNA, 19 nt, Artificial Sequence
  Description of Artificial Sequence: Synthetic oligonucleotide
  Antisense strand to SEQ ID NO: 2253500
uucacagguagguacacca

SEQ ID NO: 2253502 - RNA, 19 nt, Artificial Sequence
  Description of Artificial Sequence: Synthetic oligonucleotide
  Sense strand starting at position 989 of SEQ ID NO: 1884275
gguguaccuaccugugaac

SEQ ID NO: 2253503 - RNA, 19 nt, Artificial Sequence
  Description of Artificial Sequence: Synthetic oligonucleotide
  Antisense strand to SEQ ID NO: 2253502
guucacagguagguacacc

SEQ ID NO: 2253504 - RNA, 19 nt, Artificial Sequence
  Description of Artificial Sequence: Synthetic oligonucleotide
  Sense strand starting at position 991 of SEQ ID NO: 1884275
uguaccuaccugugaacuu

SEQ ID NO: 2253505 - RNA, 19 nt, Artificial Sequence
  Description of Artificial Sequence: Synthetic oligonucleotide
  Antisense strand to SEQ ID NO: 2253504
aaguucacagguagguaca

SEQ ID NO: 2253506 - RNA, 19 nt, Artificial Sequence
  Description of Artificial Sequence: Synthetic oligonucleotide
  Sense strand starting at position 1077 of SEQ ID NO: 1884275
ucccuagaggucuggaagu

SEQ ID NO: 2253507 - RNA, 19 nt, Artificial Sequence
  Description of Artificial Sequence: Synthetic oligonucleotide
  Antisense strand to SEQ ID NO: 2253506
acuuccagaccucuaggga

SEQ ID NO: 2253508 - RNA, 19 nt, Artificial Sequence
  Description of Artificial Sequence: Synthetic oligonucleotide
  Sense strand starting at position 1178 of SEQ ID NO: 1884275
aguccauguccaugugaca

SEQ ID NO: 2253509 - RNA, 19 nt, Artificial Sequence
  Description of Artificial Sequence: Synthetic oligonucleotide
  Antisense strand to SEQ ID NO: 2253508
ugucacauggacauggacu

SEQ ID NO: 2253510 - RNA, 19 nt, Artificial Sequence
  Description of Artificial Sequence: Synthetic oligonucleotide
  Sense strand starting at position 1406 of SEQ ID NO: 1884275
gagccuugagaaugaauuc

SEQ ID NO: 2253511 - RNA, 19 nt, Artificial Sequence
  Description of Artificial Sequence: Synthetic oligonucleotide
  Antisense strand to SEQ ID NO: 2253510
gaauucauucucaaggcuc

SEQ ID NO: 2253512 - RNA, 19 nt, Artificial Sequence
  Description of Artificial Sequence: Synthetic oligonucleotide
  Sense strand starting at position 1470 of SEQ ID NO: 1884275
gagugaucucuccggcucu

SEQ ID NO: 2253513 - RNA, 19 nt, Artificial Sequence
  Description of Artificial Sequence: Synthetic oligonucleotide
  Antisense strand to SEQ ID NO: 2253512
agagccggagagaucacuc

SEQ ID NO: 2253514 - RNA, 19 nt, Artificial Sequence
  Description of Artificial Sequence: Synthetic oligonucleotide
  Sense strand starting at position 1517 of SEQ ID NO: 1884275
cccucagaaggauguucua

SEQ ID NO: 2253515 - RNA, 19 nt, Artificial Sequence
  Description of Artificial Sequence: Synthetic oligonucleotide
  Antisense strand to SEQ ID NO: 2253514
uagaacauccuucugaggg

SEQ ID NO: 2253516 - RNA, 19 nt, Artificial Sequence
  Description of Artificial Sequence: Synthetic oligonucleotide
  Sense strand starting at position 1766 of SEQ ID NO: 1884275
cggugucauuguucucuga

SEQ ID NO: 2253517 - RNA, 19 nt, Artificial Sequence
  Description of Artificial Sequence: Synthetic oligonucleotide
  Antisense strand to SEQ ID NO: 2253516
ucagagaacaaugacaccg

SEQ ID NO: 2253518 - RNA, 19 nt, Artificial Sequence
  Description of Artificial Sequence: Synthetic oligonucleotide
  Sense strand starting at position 1768 of SEQ ID NO: 1884275
gugucauuguucucugacg

SEQ ID NO: 2253519 - RNA, 19 nt, Artificial Sequence
  Description of Artificial Sequence: Synthetic oligonucleotide
  Antisense strand to SEQ ID NO: 2253518
cgucagagaacaaugacac

SEQ ID NO: 2253520 - RNA, 19 nt, Artificial Sequence
  Description of Artificial Sequence: Synthetic oligonucleotide
  Sense strand starting at position 1769 of SEQ ID NO: 1884275
ugucauuguucucugacgu

SEQ ID NO: 2253521 - RNA, 19 nt, Artificial Sequence
  Description of Artificial Sequence: Synthetic oligonucleotide
  Antisense strand to SEQ ID NO: 2253520
acgucagagaacaaugaca

SEQ ID NO: 2253522 - RNA, 19 nt, Artificial Sequence
  Description of Artificial Sequence: Synthetic oligonucleotide
  Sense strand starting at position 1770 of SEQ ID NO: 1884275
gucauuguucucugacguc

SEQ ID NO: 2253523 - RNA, 19 nt, Artificial Sequence
  Description of Artificial Sequence: Synthetic oligonucleotide
  Antisense strand to SEQ ID NO: 2253522
gacgucagagaacaaugac

SEQ ID NO: 2253524 - RNA, 19 nt, Artificial Sequence
  Description of Artificial Sequence: Synthetic oligonucleotide
  Sense strand starting at position 2129 of SEQ ID NO: 1884275
gcgggcgccaauuaugauu

SEQ ID NO: 2253525 - RNA, 19 nt, Artificial Sequence
  Description of Artificial Sequence: Synthetic oligonucleotide
  Antisense strand to SEQ ID NO: 2253524
aaucauaauuggcgcccgc

SEQ ID NO: 2253526 - RNA, 19 nt, Artificial Sequence
  Description of Artificial Sequence: Synthetic oligonucleotide
  Sense strand starting at position 2135 of SEQ ID NO: 1884275
gccaauuaugauugggacu

SEQ ID NO: 2253527 - RNA, 19 nt, Artificial Sequence
  Description of Artificial Sequence: Synthetic oligonucleotide
  Antisense strand to SEQ ID NO: 2253526
agucccaaucauaauuggc

SEQ ID NO: 2253528 - RNA, 19 nt, Artificial Sequence
  Description of Artificial Sequence: Synthetic oligonucleotide
  Sense strand starting at position 2213 of SEQ ID NO: 1884275
gagaggagggcguguguuu

SEQ ID NO: 2253529 - RNA, 19 nt, Artificial Sequence
  Description of Artificial Sequence: Synthetic oligonucleotide
  Antisense strand to SEQ ID NO: 2253528
aaacacacgcccuccucuc

SEQ ID NO: 2253530 - RNA, 19 nt, Artificial Sequence
  Description of Artificial Sequence: Synthetic oligonucleotide
  Sense strand starting at position 2238 of SEQ ID NO: 1884275
guacguuaacgugaggauu

SEQ ID NO: 2253531 - RNA, 19 nt, Artificial Sequence
  Description of Artificial Sequence: Synthetic oligonucleotide
  Antisense strand to SEQ ID NO: 2253530
aauccucacguuaacguac

SEQ ID NO: 2253532 - RNA, 19 nt, Artificial Sequence
  Description of Artificial Sequence: Synthetic oligonucleotide
  Sense strand starting at position 2240 of SEQ ID NO: 1884275
acguuaacgugaggauuua

SEQ ID NO: 2253533 - RNA, 19 nt, Artificial Sequence
  Description of Artificial Sequence: Synthetic oligonucleotide
  Antisense strand to SEQ ID NO: 2253532
uaaauccucacguuaacgu

SEQ ID NO: 2253534 - RNA, 19 nt, Artificial Sequence
  Description of Artificial Sequence: Synthetic oligonucleotide
  Sense strand starting at position 2362 of SEQ ID NO: 1884275
cguguaagcgggcaucuuu

SEQ ID NO: 2253535 - RNA, 19 nt, Artificial Sequence
  Description of Artificial Sequence: Synthetic oligonucleotide
  Antisense strand to SEQ ID NO: 2253534
aaagaugcccgcuuacacg

SEQ ID NO: 2253536 - RNA, 19 nt, Artificial Sequence
  Description of Artificial Sequence: Synthetic oligonucleotide
  Sense strand starting at position 2371 of SEQ ID NO: 1884275
gggcaucuuugugagggaa

SEQ ID NO: 2253537 - RNA, 19 nt, Artificial Sequence
  Description of Artificial Sequence: Synthetic oligonucleotide
  Antisense strand to SEQ ID NO: 2253536
uucccucacaaagaugccc

SEQ ID NO: 2253538 - RNA, 19 nt, Artificial Sequence
  Description of Artificial Sequence: Synthetic oligonucleotide
  Sense strand starting at position 2374 of SEQ ID NO: 1884275
caucuuugugagggaaagu

SEQ ID NO: 2253539 - RNA, 19 nt, Artificial Sequence
  Description of Artificial Sequence: Synthetic oligonucleotide
  Antisense strand to SEQ ID NO: 2253538
acuuucccucacaaagaug

SEQ ID NO: 2253540 - RNA, 19 nt, Artificial Sequence
  Description of Artificial Sequence: Synthetic oligonucleotide
  Sense strand starting at position 2459 of SEQ ID NO: 1884275
cgugugugccguucuugua

SEQ ID NO: 2253541 - RNA, 19 nt, Artificial Sequence
  Description of Artificial Sequence: Synthetic oligonucleotide
  Antisense strand to SEQ ID NO: 2253540
uacaagaacggcacacacg

SEQ ID NO: 2253542 - RNA, 19 nt, Artificial Sequence
  Description of Artificial Sequence: Synthetic oligonucleotide
  Sense strand starting at position 2475 of SEQ ID NO: 1884275
guaggaguuuccgugagag

SEQ ID NO: 2253543 - RNA, 19 nt, Artificial Sequence
  Description of Artificial Sequence: Synthetic oligonucleotide
  Antisense strand to SEQ ID NO: 2253542
cucucacggaaacuccuac

SEQ ID NO: 2253544 - RNA, 19 nt, Artificial Sequence
  Description of Artificial Sequence: Synthetic oligonucleotide
  Sense strand starting at position 2477 of SEQ ID NO: 1884275
aggaguuuccgugagagug

SEQ ID NO: 2253545 - RNA, 19 nt, Artificial Sequence
  Description of Artificial Sequence: Synthetic oligonucleotide
  Antisense strand to SEQ ID NO: 2253544
cacucucacggaaacuccu

SEQ ID NO: 2253546 - RNA, 19 nt, Artificial Sequence
  Description of Artificial Sequence: Synthetic oligonucleotide
  Sense strand starting at position 2815 of SEQ ID NO: 1884275
gcucuagucucccucaaag

SEQ ID NO: 2253547 - RNA, 19 nt, Artificial Sequence
  Description of Artificial Sequence: Synthetic oligonucleotide
  Antisense strand to SEQ ID NO: 2253546
cuuugagggagacuagagc

SEQ ID NO: 2253548 - RNA, 19 nt, Artificial Sequence
  Description of Artificial Sequence: Synthetic oligonucleotide
  Sense strand starting at position 3030 of SEQ ID NO: 1884275
ucgggugagcagugugauu

SEQ ID NO: 2253549 - RNA, 19 nt, Artificial Sequence
  Description of Artificial Sequence: Synthetic oligonucleotide
  Antisense strand to SEQ ID NO: 2253548
aaucacacugcucacccga

SEQ ID NO: 2253550 - RNA, 19 nt, Artificial Sequence
  Description of Artificial Sequence: Synthetic oligonucleotide
  Sense strand starting at position 3551 of SEQ ID NO: 1884275
acugucuguggacauuaaa

SEQ ID NO: 2253551 - RNA, 19 nt, Artificial Sequence
  Description of Artificial Sequence: Synthetic oligonucleotide
  Antisense strand to SEQ ID NO: 2253550
uuuaauguccacagacagu

SEQ ID NO: 2253552 - RNA, 19 nt, Artificial Sequence
  Description of Artificial Sequence: Synthetic oligonucleotide
  Sense strand starting at position 19 of SEQ ID NO: 1884276
ugaaguagucucugagaau

SEQ ID NO: 2253553 - RNA, 19 nt, Artificial Sequence
  Description of Artificial Sequence: Synthetic oligonucleotide
  Antisense strand to SEQ ID NO: 2253552
auucucagagacuacuuca

SEQ ID NO: 2253554 - RNA, 19 nt, Artificial Sequence
  Description of Artificial Sequence: Synthetic oligonucleotide
  Sense strand starting at position 204 of SEQ ID NO: 1884276
agucaauaucugcauagag

SEQ ID NO: 2253555 - RNA, 19 nt, Artificial Sequence
  Description of Artificial Sequence: Synthetic oligonucleotide
  Antisense strand to SEQ ID NO: 2253554
cucuaugcagauauugacu

SEQ ID NO: 2253556 - RNA, 19 nt, Artificial Sequence
  Description of Artificial Sequence: Synthetic oligonucleotide
  Sense strand starting at position 334 of SEQ ID NO: 1884276
cuagaucugcaguaucaga

SEQ ID NO: 2253557 - RNA, 19 nt, Artificial Sequence
  Description of Artificial Sequence: Synthetic oligonucleotide
  Antisense strand to SEQ ID NO: 2253556
ucugauacugcagaucuag

SEQ ID NO: 2253558 - RNA, 19 nt, Artificial Sequence
  Description of Artificial Sequence: Synthetic oligonucleotide
  Sense strand starting at position 341 of SEQ ID NO: 1884276
ugcaguaucagacagguua

SEQ ID NO: 2253559 - RNA, 19 nt, Artificial Sequence
  Description of Artificial Sequence: Synthetic oligonucleotide
  Antisense strand to SEQ ID NO: 2253558
uaaccugucugauacugca

SEQ ID NO: 2253560 - RNA, 19 nt, Artificial Sequence
  Description of Artificial Sequence: Synthetic oligonucleotide
  Sense strand starting at position 420 of SEQ ID NO: 1884276
gguugcagggauuagcaau

SEQ ID NO: 2253561 - RNA, 19 nt, Artificial Sequence
  Description of Artificial Sequence: Synthetic oligonucleotide
  Antisense strand to SEQ ID NO: 2253560
auugcuaaucccugcaacc

SEQ ID NO: 2253562 - RNA, 19 nt, Artificial Sequence
  Description of Artificial Sequence: Synthetic oligonucleotide
  Sense strand starting at position 433 of SEQ ID NO: 1884276
agcaaugauagauguaaag

SEQ ID NO: 2253563 - RNA, 19 nt, Artificial Sequence
  Description of Artificial Sequence: Synthetic oligonucleotide
  Antisense strand to SEQ ID NO: 2253562
cuuuacaucuaucauugcu

SEQ ID NO: 2253564 - RNA, 19 nt, Artificial Sequence
  Description of Artificial Sequence: Synthetic oligonucleotide
  Sense strand starting at position 443 of SEQ ID NO: 1884276
gauguaaaguacccaggau

SEQ ID NO: 2253565 - RNA, 19 nt, Artificial Sequence
  Description of Artificial Sequence: Synthetic oligonucleotide
  Antisense strand to SEQ ID NO: 2253564
auccuggguacuuuacauc

SEQ ID NO: 2253566 - RNA, 19 nt, Artificial Sequence
  Description of Artificial Sequence: Synthetic oligonucleotide
  Sense strand starting at position 571 of SEQ ID NO: 1884276
uuggauuggucucuccaag

SEQ ID NO: 2253567 - RNA, 19 nt, Artificial Sequence
  Description of Artificial Sequence: Synthetic oligonucleotide
  Antisense strand to SEQ ID NO: 2253566
cuuggagagaccaauccaa

SEQ ID NO: 2253568 - RNA, 19 nt, Artificial Sequence
  Description of Artificial Sequence: Synthetic oligonucleotide
  Sense strand starting at position 653 of SEQ ID NO: 1884276
cuuauauagccuggaucca

SEQ ID NO: 2253569 - RNA, 19 nt, Artificial Sequence
  Description of Artificial Sequence: Synthetic oligonucleotide
  Antisense strand to SEQ ID NO: 2253568
uggauccaggcuauauaag

SEQ ID NO: 2253570 - RNA, 19 nt, Artificial Sequence
  Description of Artificial Sequence: Synthetic oligonucleotide
  Sense strand starting at position 793 of SEQ ID NO: 1884276
agguuauuuguuggccuaa

SEQ ID NO: 2253571 - RNA, 19 nt, Artificial Sequence
  Description of Artificial Sequence: Synthetic oligonucleotide
  Antisense strand to SEQ ID NO: 2253570
uuaggccaacaaauaaccu

SEQ ID NO: 2253572 - RNA, 19 nt, Artificial Sequence
  Description of Artificial Sequence: Synthetic oligonucleotide
  Sense strand starting at position 794 of SEQ ID NO: 1884276
gguuauuuguuggccuaaa

SEQ ID NO: 2253573 - RNA, 19 nt, Artificial Sequence
  Description of Artificial Sequence: Synthetic oligonucleotide
  Antisense strand to SEQ ID NO: 2253572
uuuaggccaacaaauaacc

SEQ ID NO: 2253574 - RNA, 19 nt, Artificial Sequence
  Description of Artificial Sequence: Synthetic oligonucleotide
  Sense strand starting at position 795 of SEQ ID NO: 1884276
guuauuuguuggccuaaau

SEQ ID NO: 2253575 - RNA, 19 nt, Artificial Sequence
  Description of Artificial Sequence: Synthetic oligonucleotide
  Antisense strand to SEQ ID NO: 2253574
auuuaggccaacaaauaac

SEQ ID NO: 2253576 - RNA, 19 nt, Artificial Sequence
  Description of Artificial Sequence: Synthetic oligonucleotide
  Sense strand starting at position 1119 of SEQ ID NO: 1884276
ggauccucaagcugggaua

SEQ ID NO: 2253577 - RNA, 19 nt, Artificial Sequence
  Description of Artificial Sequence: Synthetic oligonucleotide
  Antisense strand to SEQ ID NO: 2253576
uaucccagcuugaggaucc

SEQ ID NO: 2253578 - RNA, 19 nt, Artificial Sequence
  Description of Artificial Sequence: Synthetic oligonucleotide
  Sense strand starting at position 1270 of SEQ ID NO: 1884276
guagucuaacguuacauga

SEQ ID NO: 2253579 - RNA, 19 nt, Artificial Sequence
  Description of Artificial Sequence: Synthetic oligonucleotide
  Antisense strand to SEQ ID NO: 2253578
ucauguaacguuagacuac

SEQ ID NO: 2253580 - RNA, 19 nt, Artificial Sequence
  Description of Artificial Sequence: Synthetic oligonucleotide
  Sense strand starting at position 1274 of SEQ ID NO: 1884276
ucuaacguuacaugagaga

SEQ ID NO: 2253581 - RNA, 19 nt, Artificial Sequence
  Description of Artificial Sequence: Synthetic oligonucleotide
  Antisense strand to SEQ ID NO: 2253580
ucucucauguaacguuaga

SEQ ID NO: 2253582 - RNA, 19 nt, Artificial Sequence
  Description of Artificial Sequence: Synthetic oligonucleotide
  Sense strand starting at position 1289 of SEQ ID NO: 1884276
gagaauccacacuggucaa

SEQ ID NO: 2253583 - RNA, 19 nt, Artificial Sequence
  Description of Artificial Sequence: Synthetic oligonucleotide
  Antisense strand to SEQ ID NO: 2253582
uugaccaguguggauucuc

SEQ ID NO: 2253584 - RNA, 19 nt, Artificial Sequence
  Description of Artificial Sequence: Synthetic oligonucleotide
  Sense strand starting at position 1394 of SEQ ID NO: 1884276
gccuuaucagugcaaggag

SEQ ID NO: 2253585 - RNA, 19 nt, Artificial Sequence
  Description of Artificial Sequence: Synthetic oligonucleotide
  Antisense strand to SEQ ID NO: 2253584
cuccuugcacugauaaggc

SEQ ID NO: 2253586 - RNA, 19 nt, Artificial Sequence
  Description of Artificial Sequence: Synthetic oligonucleotide
  Sense strand starting at position 1485 of SEQ ID NO: 1884276
gagugugcuauuugucaga

SEQ ID NO: 2253587 - RNA, 19 nt, Artificial Sequence
  Description of Artificial Sequence: Synthetic oligonucleotide
  Antisense strand to SEQ ID NO: 2253586
ucugacaaauagcacacuc

SEQ ID NO: 2253588 - RNA, 19 nt, Artificial Sequence
  Description of Artificial Sequence: Synthetic oligonucleotide
  Sense strand starting at position 1487 of SEQ ID NO: 1884276
gugugcuauuugucagaga

SEQ ID NO: 2253589 - RNA, 19 nt, Artificial Sequence
  Description of Artificial Sequence: Synthetic oligonucleotide
  Antisense strand to SEQ ID NO: 2253588
ucucugacaaauagcacac

SEQ ID NO: 2253590 - RNA, 19 nt, Artificial Sequence
  Description of Artificial Sequence: Synthetic oligonucleotide
  Sense strand starting at position 1529 of SEQ ID NO: 1884276
ugcuguucacaggagaguu

SEQ ID NO: 2253591 - RNA, 19 nt, Artificial Sequence
  Description of Artificial Sequence: Synthetic oligonucleotide
  Antisense strand to SEQ ID NO: 2253590
aacucuccugugaacagca

SEQ ID NO: 2253592 - RNA, 19 nt, Artificial Sequence
  Description of Artificial Sequence: Synthetic oligonucleotide
  Sense strand starting at position 1556 of SEQ ID NO: 1884276
ugagaagcccuauagaugu

SEQ ID NO: 2253593 - RNA, 19 nt, Artificial Sequence
  Description of Artificial Sequence: Synthetic oligonucleotide
  Antisense strand to SEQ ID NO: 2253592
acaucuauagggcuucuca

SEQ ID NO: 2253594 - RNA, 19 nt, Artificial Sequence
  Description of Artificial Sequence: Synthetic oligonucleotide
  Sense strand starting at position 1562 of SEQ ID NO: 1884276
gcccuauagaugugaucag

SEQ ID NO: 2253595 - RNA, 19 nt, Artificial Sequence
  Description of Artificial Sequence: Synthetic oligonucleotide
  Antisense strand to SEQ ID NO: 2253594
cugaucacaucuauagggc

SEQ ID NO: 2253596 - RNA, 19 nt, Artificial Sequence
  Description of Artificial Sequence: Synthetic oligonucleotide
  Sense strand starting at position 1569 of SEQ ID NO: 1884276
agaugugaucaguguggaa

SEQ ID NO: 2253597 - RNA, 19 nt, Artificial Sequence
  Description of Artificial Sequence: Synthetic oligonucleotide
  Antisense strand to SEQ ID NO: 2253596
uuccacacugaucacaucu

SEQ ID NO: 2253598 - RNA, 19 nt, Artificial Sequence
  Description of Artificial Sequence: Synthetic oligonucleotide
  Sense strand starting at position 1692 of SEQ ID NO: 1884276
aauuguauucugcauggca

SEQ ID NO: 2253599 - RNA, 19 nt, Artificial Sequence
  Description of Artificial Sequence: Synthetic oligonucleotide
  Antisense strand to SEQ ID NO: 2253598
ugccaugcagaauacaauu

SEQ ID NO: 2253600 - RNA, 19 nt, Artificial Sequence
  Description of Artificial Sequence: Synthetic oligonucleotide
  Sense strand starting at position 2102 of SEQ ID NO: 1884276
guguauacccaauacagau

SEQ ID NO: 2253601 - RNA, 19 nt, Artificial Sequence
  Description of Artificial Sequence: Synthetic oligonucleotide
  Antisense strand to SEQ ID NO: 2253600
aucuguauuggguauacac

SEQ ID NO: 2253602 - RNA, 19 nt, Artificial Sequence
  Description of Artificial Sequence: Synthetic oligonucleotide
  Sense strand starting at position 2257 of SEQ ID NO: 1884276
gggcaaaucuaguuaccuu

SEQ ID NO: 2253603 - RNA, 19 nt, Artificial Sequence
  Description of Artificial Sequence: Synthetic oligonucleotide
  Antisense strand to SEQ ID NO: 2253602
aagguaacuagauuugccc

SEQ ID NO: 2253604 - RNA, 19 nt, Artificial Sequence
  Description of Artificial Sequence: Synthetic oligonucleotide
  Sense strand starting at position 2492 of SEQ ID NO: 1884276
acuacugucugugcaauuu

SEQ ID NO: 2253605 - RNA, 19 nt, Artificial Sequence
  Description of Artificial Sequence: Synthetic oligonucleotide
  Antisense strand to SEQ ID NO: 2253604
aaauugcacagacaguagu

SEQ ID NO: 2253606 - RNA, 19 nt, Artificial Sequence
  Description of Artificial Sequence: Synthetic oligonucleotide
  Sense strand starting at position 2657 of SEQ ID NO: 1884276
guaguuuguagucaauaau

SEQ ID NO: 2253607 - RNA, 19 nt, Artificial Sequence
  Description of Artificial Sequence: Synthetic oligonucleotide
  Antisense strand to SEQ ID NO: 2253606
auuauugacuacaaacuac

SEQ ID NO: 2253608 - RNA, 19 nt, Artificial Sequence
  Description of Artificial Sequence: Synthetic oligonucleotide
  Sense strand starting at position 2660 of SEQ ID NO: 1884276
guuuguagucaauaaugaa

SEQ ID NO: 2253609 - RNA, 19 nt, Artificial Sequence
  Description of Artificial Sequence: Synthetic oligonucleotide
  Antisense strand to SEQ ID NO: 2253608
uucauuauugacuacaaac

SEQ ID NO: 2253610 - RNA, 19 nt, Artificial Sequence
  Description of Artificial Sequence: Synthetic oligonucleotide
  Sense strand starting at position 2723 of SEQ ID NO: 1884276
ccaagaaauuuggaauucu

SEQ ID NO: 2253611 - RNA, 19 nt, Artificial Sequence
  Description of Artificial Sequence: Synthetic oligonucleotide
  Antisense strand to SEQ ID NO: 2253610
agaauuccaaauuucuugg

SEQ ID NO: 2253612 - RNA, 19 nt, Artificial Sequence
  Description of Artificial Sequence: Synthetic oligonucleotide
  Sense strand starting at position 2888 of SEQ ID NO: 1884276
aaugaugaaugauagagau

SEQ ID NO: 2253613 - RNA, 19 nt, Artificial Sequence
  Description of Artificial Sequence: Synthetic oligonucleotide
  Antisense strand to SEQ ID NO: 2253612
aucucuaucauucaucauu

SEQ ID NO: 2253614 - RNA, 19 nt, Artificial Sequence
  Description of Artificial Sequence: Synthetic oligonucleotide
  Sense strand starting at position 3513 of SEQ ID NO: 1884276
aguaaaucuuuaccaugua

SEQ ID NO: 2253615 - RNA, 19 nt, Artificial Sequence
  Description of Artificial Sequence: Synthetic oligonucleotide
  Antisense strand to SEQ ID NO: 2253614
uacaugguaaagauuuacu

SEQ ID NO: 2253616 - RNA, 19 nt, Artificial Sequence
  Description of Artificial Sequence: Synthetic oligonucleotide
  Sense strand starting at position 3546 of SEQ ID NO: 1884276
aaaggucuuugagcacuga

SEQ ID NO: 2253617 - RNA, 19 nt, Artificial Sequence
  Description of Artificial Sequence: Synthetic oligonucleotide
  Antisense strand to SEQ ID NO: 2253616
ucagugcucaaagaccuuu

SEQ ID NO: 2253618 - RNA, 19 nt, Artificial Sequence
  Description of Artificial Sequence: Synthetic oligonucleotide
  Sense strand starting at position 3547 of SEQ ID NO: 1884276
aaggucuuugagcacugaa

SEQ ID NO: 2253619 - RNA, 19 nt, Artificial Sequence
  Description of Artificial Sequence: Synthetic oligonucleotide
  Antisense strand to SEQ ID NO: 2253618
uucagugcucaaagaccuu

SEQ ID NO: 2253620 - RNA, 19 nt, Artificial Sequence
  Description of Artificial Sequence: Synthetic oligonucleotide
  Sense strand starting at position 3550 of SEQ ID NO: 1884276
gucuuugagcacugaaaca

SEQ ID NO: 2253621 - RNA, 19 nt, Artificial Sequence
  Description of Artificial Sequence: Synthetic oligonucleotide
  Antisense strand to SEQ ID NO: 2253620
uguuucagugcucaaagac

SEQ ID NO: 2253622 - RNA, 19 nt, Artificial Sequence
  Description of Artificial Sequence: Synthetic oligonucleotide
  Sense strand starting at position 3626 of SEQ ID NO: 1884276
uuugaagcuguauacaaga

SEQ ID NO: 2253623 - RNA, 19 nt, Artificial Sequence
  Description of Artificial Sequence: Synthetic oligonucleotide
  Antisense strand to SEQ ID NO: 2253622
ucuuguauacagcuucaaa

SEQ ID NO: 2253624 - RNA, 19 nt, Artificial Sequence
  Description of Artificial Sequence: Synthetic oligonucleotide
  Sense strand starting at position 3631 of SEQ ID NO: 1884276
agcuguauacaagaauguu

SEQ ID NO: 2253625 - RNA, 19 nt, Artificial Sequence
  Description of Artificial Sequence: Synthetic oligonucleotide
  Antisense strand to SEQ ID NO: 2253624
aacauucuuguauacagcu

SEQ ID NO: 2253626 - RNA, 19 nt, Artificial Sequence
  Description of Artificial Sequence: Synthetic oligonucleotide
  Sense strand starting at position 3760 of SEQ ID NO: 1884276
agaacauacacgugguaca

SEQ ID NO: 2253627 - RNA, 19 nt, Artificial Sequence
  Description of Artificial Sequence: Synthetic oligonucleotide
  Antisense strand to SEQ ID NO: 2253626
uguaccacguguauguucu

SEQ ID NO: 2253628 - RNA, 19 nt, Artificial Sequence
  Description of Artificial Sequence: Synthetic oligonucleotide
  Sense strand starting at position 3761 of SEQ ID NO: 1884276
gaacauacacgugguacau

SEQ ID NO: 2253629 - RNA, 19 nt, Artificial Sequence
  Description of Artificial Sequence: Synthetic oligonucleotide
  Antisense strand to SEQ ID NO: 2253628
auguaccacguguauguuc

SEQ ID NO: 2253630 - RNA, 19 nt, Artificial Sequence
  Description of Artificial Sequence: Synthetic oligonucleotide
  Sense strand starting at position 3935 of SEQ ID NO: 1884276
uguucuguaccugacauca

SEQ ID NO: 2253631 - RNA, 19 nt, Artificial Sequence
  Description of Artificial Sequence: Synthetic oligonucleotide
  Antisense strand to SEQ ID NO: 2253630
ugaugucagguacagaaca

SEQ ID NO: 2253632 - RNA, 19 nt, Artificial Sequence
  Description of Artificial Sequence: Synthetic oligonucleotide
  Sense strand starting at position 468 of SEQ ID NO: 1884277
aggaguaugcauugaacca

SEQ ID NO: 2253633 - RNA, 19 nt, Artificial Sequence
  Description of Artificial Sequence: Synthetic oligonucleotide
  Antisense strand to SEQ ID NO: 2253632
ugguucaaugcauacuccu

SEQ ID NO: 2253634 - RNA, 19 nt, Artificial Sequence
  Description of Artificial Sequence: Synthetic oligonucleotide
  Sense strand starting at position 977 of SEQ ID NO: 1884277
ugaccagcucuuuagugau

SEQ ID NO: 2253635 - RNA, 19 nt, Artificial Sequence
  Description of Artificial Sequence: Synthetic oligonucleotide
  Antisense strand to SEQ ID NO: 2253634
aucacuaaagagcugguca

SEQ ID NO: 2253636 - RNA, 19 nt, Artificial Sequence
  Description of Artificial Sequence: Synthetic oligonucleotide
  Sense strand starting at position 1002 of SEQ ID NO: 1884277
cuagacaacugucuaaugu

SEQ ID NO: 2253637 - RNA, 19 nt, Artificial Sequence
  Description of Artificial Sequence: Synthetic oligonucleotide
  Antisense strand to SEQ ID NO: 2253636
acauuagacaguugucuag

SEQ ID NO: 2253638 - RNA, 19 nt, Artificial Sequence
  Description of Artificial Sequence: Synthetic oligonucleotide
  Sense strand starting at position 1041 of SEQ ID NO: 1884277
cagaaagucuuggauuuga

SEQ ID NO: 2253639 - RNA, 19 nt, Artificial Sequence
  Description of Artificial Sequence: Synthetic oligonucleotide
  Antisense strand to SEQ ID NO: 2253638
ucaaauccaagacuuucug

SEQ ID NO: 2253640 - RNA, 19 nt, Artificial Sequence
  Description of Artificial Sequence: Synthetic oligonucleotide
  Sense strand starting at position 1109 of SEQ ID NO: 1884277
uacuuaaccuaguuggagu

SEQ ID NO: 2253641 - RNA, 19 nt, Artificial Sequence
  Description of Artificial Sequence: Synthetic oligonucleotide
  Antisense strand to SEQ ID NO: 2253640
acuccaacuagguuaagua

SEQ ID NO: 2253642 - RNA, 19 nt, Artificial Sequence
  Description of Artificial Sequence: Synthetic oligonucleotide
  Sense strand starting at position 1133 of SEQ ID NO: 1884277
gggcuuggaguccagagua

SEQ ID NO: 2253643 - RNA, 19 nt, Artificial Sequence
  Description of Artificial Sequence: Synthetic oligonucleotide
  Antisense strand to SEQ ID NO: 2253642
uacucuggacuccaagccc

SEQ ID NO: 2253644 - RNA, 19 nt, Artificial Sequence
  Description of Artificial Sequence: Synthetic oligonucleotide
  Sense strand starting at position 1170 of SEQ ID NO: 1884277
auugacaaguguuuacacu

SEQ ID NO: 2253645 - RNA, 19 nt, Artificial Sequence
  Description of Artificial Sequence: Synthetic oligonucleotide
  Antisense strand to SEQ ID NO: 2253644
aguguaaacacuugucaau

SEQ ID NO: 2253646 - RNA, 19 nt, Artificial Sequence
  Description of Artificial Sequence: Synthetic oligonucleotide
  Sense strand starting at position 1171 of SEQ ID NO: 1884277
uugacaaguguuuacacuu

SEQ ID NO: 2253647 - RNA, 19 nt, Artificial Sequence
  Description of Artificial Sequence: Synthetic oligonucleotide
  Antisense strand to SEQ ID NO: 2253646
aaguguaaacacuugucaa

SEQ ID NO: 2253648 - RNA, 19 nt, Artificial Sequence
  Description of Artificial Sequence: Synthetic oligonucleotide
  Sense strand starting at position 1179 of SEQ ID NO: 1884277
uguuuacacuuggucagaa

SEQ ID NO: 2253649 - RNA, 19 nt, Artificial Sequence
  Description of Artificial Sequence: Synthetic oligonucleotide
  Antisense strand to SEQ ID NO: 2253648
uucugaccaaguguaaaca

SEQ ID NO: 2253650 - RNA, 19 nt, Artificial Sequence
  Description of Artificial Sequence: Synthetic oligonucleotide
  Sense strand starting at position 1181 of SEQ ID NO: 1884277
uuuacacuuggucagaacu

SEQ ID NO: 2253651 - RNA, 19 nt, Artificial Sequence
  Description of Artificial Sequence: Synthetic oligonucleotide
  Antisense strand to SEQ ID NO: 2253650
aguucugaccaaguguaaa

SEQ ID NO: 2253652 - RNA, 19 nt, Artificial Sequence
  Description of Artificial Sequence: Synthetic oligonucleotide
  Sense strand starting at position 1322 of SEQ ID NO: 1884277
gcugauuggcuccaaccaa

SEQ ID NO: 2253653 - RNA, 19 nt, Artificial Sequence
  Description of Artificial Sequence: Synthetic oligonucleotide
  Antisense strand to SEQ ID NO: 2253652
uugguuggagccaaucagc

SEQ ID NO: 2253654 - RNA, 19 nt, Artificial Sequence
  Description of Artificial Sequence: Synthetic oligonucleotide
  Sense strand starting at position 1465 of SEQ ID NO: 1884277
uguaaacaggagugacuau

SEQ ID NO: 2253655 - RNA, 19 nt, Artificial Sequence
  Description of Artificial Sequence: Synthetic oligonucleotide
  Antisense strand to SEQ ID NO: 2253654
auagucacuccuguuuaca

SEQ ID NO: 2253656 - RNA, 19 nt, Artificial Sequence
  Description of Artificial Sequence: Synthetic oligonucleotide
  Sense strand starting at position 1503 of SEQ ID NO: 1884277
agagauauauguuuaugug

SEQ ID NO: 2253657 - RNA, 19 nt, Artificial Sequence
  Description of Artificial Sequence: Synthetic oligonucleotide
  Antisense strand to SEQ ID NO: 2253656
cacauaaacauauaucucu

SEQ ID NO: 2253658 - RNA, 19 nt, Artificial Sequence
  Description of Artificial Sequence: Synthetic oligonucleotide
  Sense strand starting at position 1504 of SEQ ID NO: 1884277
gagauauauguuuaugugu

SEQ ID NO: 2253659 - RNA, 19 nt, Artificial Sequence
  Description of Artificial Sequence: Synthetic oligonucleotide
  Antisense strand to SEQ ID NO: 2253658
acacauaaacauauaucuc

SEQ ID NO: 2253660 - RNA, 19 nt, Artificial Sequence
  Description of Artificial Sequence: Synthetic oligonucleotide
  Sense strand starting at position 1548 of SEQ ID NO: 1884277
cuccuagacucauuugugu

SEQ ID NO: 2253661 - RNA, 19 nt, Artificial Sequence
  Description of Artificial Sequence: Synthetic oligonucleotide
  Antisense strand to SEQ ID NO: 2253660
acacaaaugagucuaggag

SEQ ID NO: 2253662 - RNA, 19 nt, Artificial Sequence
  Description of Artificial Sequence: Synthetic oligonucleotide
  Sense strand starting at position 1550 of SEQ ID NO: 1884277
ccuagacucauuugugugu

SEQ ID NO: 2253663 - RNA, 19 nt, Artificial Sequence
  Description of Artificial Sequence: Synthetic oligonucleotide
  Antisense strand to SEQ ID NO: 2253662
acacacaaaugagucuagg

SEQ ID NO: 2253664 - RNA, 19 nt, Artificial Sequence
  Description of Artificial Sequence: Synthetic oligonucleotide
  Sense strand starting at position 1997 of SEQ ID NO: 1884277
uguuccuaggguuauaaga

SEQ ID NO: 2253665 - RNA, 19 nt, Artificial Sequence
  Description of Artificial Sequence: Synthetic oligonucleotide
  Antisense strand to SEQ ID NO: 2253664
ucuuauaacccuaggaaca

SEQ ID NO: 2253666 - RNA, 19 nt, Artificial Sequence
  Description of Artificial Sequence: Synthetic oligonucleotide
  Sense strand starting at position 2023 of SEQ ID NO: 1884277
gugagcuggaguuagaagu

SEQ ID NO: 2253667 - RNA, 19 nt, Artificial Sequence
  Description of Artificial Sequence: Synthetic oligonucleotide
  Antisense strand to SEQ ID NO: 2253666
acuucuaacuccagcucac

SEQ ID NO: 2253668 - RNA, 19 nt, Artificial Sequence
  Description of Artificial Sequence: Synthetic oligonucleotide
  Sense strand starting at position 2029 of SEQ ID NO: 1884277
uggaguuagaaguaauagu

SEQ ID NO: 2253669 - RNA, 19 nt, Artificial Sequence
  Description of Artificial Sequence: Synthetic oligonucleotide
  Antisense strand to SEQ ID NO: 2253668
acuauuacuucuaacucca

SEQ ID NO: 2253670 - RNA, 19 nt, Artificial Sequence
  Description of Artificial Sequence: Synthetic oligonucleotide
  Sense strand starting at position 2089 of SEQ ID NO: 1884277
ugaaguagucucugagaau

SEQ ID NO: 2253671 - RNA, 19 nt, Artificial Sequence
  Description of Artificial Sequence: Synthetic oligonucleotide
  Antisense strand to SEQ ID NO: 2253670
auucucagagacuacuuca

SEQ ID NO: 2253672 - RNA, 19 nt, Artificial Sequence
  Description of Artificial Sequence: Synthetic oligonucleotide
  Sense strand starting at position 2274 of SEQ ID NO: 1884277
agucaauaucugcauagag

SEQ ID NO: 2253673 - RNA, 19 nt, Artificial Sequence
  Description of Artificial Sequence: Synthetic oligonucleotide
  Antisense strand to SEQ ID NO: 2253672
cucuaugcagauauugacu

SEQ ID NO: 2253674 - RNA, 19 nt, Artificial Sequence
  Description of Artificial Sequence: Synthetic oligonucleotide
  Sense strand starting at position 2404 of SEQ ID NO: 1884277
cuagaucugcaguaucaga

SEQ ID NO: 2253675 - RNA, 19 nt, Artificial Sequence
  Description of Artificial Sequence: Synthetic oligonucleotide
  Antisense strand to SEQ ID NO: 2253674
ucugauacugcagaucuag

SEQ ID NO: 2253676 - RNA, 19 nt, Artificial Sequence
  Description of Artificial Sequence: Synthetic oligonucleotide
  Sense strand starting at position 2411 of SEQ ID NO: 1884277
ugcaguaucagacagguua

SEQ ID NO: 2253677 - RNA, 19 nt, Artificial Sequence
  Description of Artificial Sequence: Synthetic oligonucleotide
  Antisense strand to SEQ ID NO: 2253676
uaaccugucugauacugca

SEQ ID NO: 2253678 - RNA, 19 nt, Artificial Sequence
  Description of Artificial Sequence: Synthetic oligonucleotide
  Sense strand starting at position 2490 of SEQ ID NO: 1884277
gguugcagggauuagcaau

SEQ ID NO: 2253679 - RNA, 19 nt, Artificial Sequence
  Description of Artificial Sequence: Synthetic oligonucleotide
  Antisense strand to SEQ ID NO: 2253678
auugcuaaucccugcaacc

SEQ ID NO: 2253680 - RNA, 19 nt, Artificial Sequence
  Description of Artificial Sequence: Synthetic oligonucleotide
  Sense strand starting at position 2503 of SEQ ID NO: 1884277
agcaaugauagauguaaag

SEQ ID NO: 2253681 - RNA, 19 nt, Artificial Sequence
  Description of Artificial Sequence: Synthetic oligonucleotide
  Antisense strand to SEQ ID NO: 2253680
cuuuacaucuaucauugcu

SEQ ID NO: 2253682 - RNA, 19 nt, Artificial Sequence
  Description of Artificial Sequence: Synthetic oligonucleotide
  Sense strand starting at position 2513 of SEQ ID NO: 1884277
gauguaaaguacccaggau

SEQ ID NO: 2253683 - RNA, 19 nt, Artificial Sequence
  Description of Artificial Sequence: Synthetic oligonucleotide
  Antisense strand to SEQ ID NO: 2253682
auccuggguacuuuacauc

SEQ ID NO: 2253684 - RNA, 19 nt, Artificial Sequence
  Description of Artificial Sequence: Synthetic oligonucleotide
  Sense strand starting at position 2641 of SEQ ID NO: 1884277
uuggauuggucucuccaag

SEQ ID NO: 2253685 - RNA, 19 nt, Artificial Sequence
  Description of Artificial Sequence: Synthetic oligonucleotide
  Antisense strand to SEQ ID NO: 2253684
cuuggagagaccaauccaa

SEQ ID NO: 2253686 - RNA, 19 nt, Artificial Sequence
  Description of Artificial Sequence: Synthetic oligonucleotide
  Sense strand starting at position 2723 of SEQ ID NO: 1884277
cuuauauagccuggaucca

SEQ ID NO: 2253687 - RNA, 19 nt, Artificial Sequence
  Description of Artificial Sequence: Synthetic oligonucleotide
  Antisense strand to SEQ ID NO: 2253686
uggauccaggcuauauaag

SEQ ID NO: 2253688 - RNA, 19 nt, Artificial Sequence
  Description of Artificial Sequence: Synthetic oligonucleotide
  Sense strand starting at position 2863 of SEQ ID NO: 1884277
agguuauuuguuggccuaa

SEQ ID NO: 2253689 - RNA, 19 nt, Artificial Sequence
  Description of Artificial Sequence: Synthetic oligonucleotide
  Antisense strand to SEQ ID NO: 2253688
uuaggccaacaaauaaccu

SEQ ID NO: 2253690 - RNA, 19 nt, Artificial Sequence
  Description of Artificial Sequence: Synthetic oligonucleotide
  Sense strand starting at position 2864 of SEQ ID NO: 1884277
gguuauuuguuggccuaaa

SEQ ID NO: 2253691 - RNA, 19 nt, Artificial Sequence
  Description of Artificial Sequence: Synthetic oligonucleotide
  Antisense strand to SEQ ID NO: 2253690
uuuaggccaacaaauaacc

SEQ ID NO: 2253692 - RNA, 19 nt, Artificial Sequence
  Description of Artificial Sequence: Synthetic oligonucleotide
  Sense strand starting at position 2865 of SEQ ID NO: 1884277
guuauuuguuggccuaaau

SEQ ID NO: 2253693 - RNA, 19 nt, Artificial Sequence
  Description of Artificial Sequence: Synthetic oligonucleotide
  Antisense strand to SEQ ID NO: 2253692
auuuaggccaacaaauaac

SEQ ID NO: 2253694 - RNA, 19 nt, Artificial Sequence
  Description of Artificial Sequence: Synthetic oligonucleotide
  Sense strand starting at position 3189 of SEQ ID NO: 1884277
ggauccucaagcugggaua

SEQ ID NO: 2253695 - RNA, 19 nt, Artificial Sequence
  Description of Artificial Sequence: Synthetic oligonucleotide
  Antisense strand to SEQ ID NO: 2253694
uaucccagcuugaggaucc

SEQ ID NO: 2253696 - RNA, 19 nt, Artificial Sequence
  Description of Artificial Sequence: Synthetic oligonucleotide
  Sense strand starting at position 3344 of SEQ ID NO: 1884277
ucuaacguuacaugagaga

SEQ ID NO: 2253697 - RNA, 19 nt, Artificial Sequence
  Description of Artificial Sequence: Synthetic oligonucleotide
  Antisense strand to SEQ ID NO: 2253696
ucucucauguaacguuaga

SEQ ID NO: 2253698 - RNA, 19 nt, Artificial Sequence
  Description of Artificial Sequence: Synthetic oligonucleotide
  Sense strand starting at position 3359 of SEQ ID NO: 1884277
gagaauccacacuggucaa

SEQ ID NO: 2253699 - RNA, 19 nt, Artificial Sequence
  Description of Artificial Sequence: Synthetic oligonucleotide
  Antisense strand to SEQ ID NO: 2253698
uugaccaguguggauucuc

SEQ ID NO: 2253700 - RNA, 19 nt, Artificial Sequence
  Description of Artificial Sequence: Synthetic oligonucleotide
  Sense strand starting at position 3464 of SEQ ID NO: 1884277
gccuuaucagugcaaggag

SEQ ID NO: 2253701 - RNA, 19 nt, Artificial Sequence
  Description of Artificial Sequence: Synthetic oligonucleotide
  Antisense strand to SEQ ID NO: 2253700
cuccuugcacugauaaggc

SEQ ID NO: 2253702 - RNA, 19 nt, Artificial Sequence
  Description of Artificial Sequence: Synthetic oligonucleotide
  Sense strand starting at position 3555 of SEQ ID NO: 1884277
gagugugcuauuugucaga

SEQ ID NO: 2253703 - RNA, 19 nt, Artificial Sequence
  Description of Artificial Sequence: Synthetic oligonucleotide
  Antisense strand to SEQ ID NO: 2253702
ucugacaaauagcacacuc

SEQ ID NO: 2253704 - RNA, 19 nt, Artificial Sequence
  Description of Artificial Sequence: Synthetic oligonucleotide
  Sense strand starting at position 3557 of SEQ ID NO: 1884277
gugugcuauuugucagaga

SEQ ID NO: 2253705 - RNA, 19 nt, Artificial Sequence
  Description of Artificial Sequence: Synthetic oligonucleotide
  Antisense strand to SEQ ID NO: 2253704
ucucugacaaauagcacac

SEQ ID NO: 2253706 - RNA, 19 nt, Artificial Sequence
  Description of Artificial Sequence: Synthetic oligonucleotide
  Sense strand starting at position 3599 of SEQ ID NO: 1884277
ugcuguucacaggagaguu

SEQ ID NO: 2253707 - RNA, 19 nt, Artificial Sequence
  Description of Artificial Sequence: Synthetic oligonucleotide
  Antisense strand to SEQ ID NO: 2253706
aacucuccugugaacagca

SEQ ID NO: 2253708 - RNA, 19 nt, Artificial Sequence
  Description of Artificial Sequence: Synthetic oligonucleotide
  Sense strand starting at position 3626 of SEQ ID NO: 1884277
ugagaagcccuauagaugu

SEQ ID NO: 2253709 - RNA, 19 nt, Artificial Sequence
  Description of Artificial Sequence: Synthetic oligonucleotide
  Antisense strand to SEQ ID NO: 2253708
acaucuauagggcuucuca

SEQ ID NO: 2253710 - RNA, 19 nt, Artificial Sequence
  Description of Artificial Sequence: Synthetic oligonucleotide
  Sense strand starting at position 3639 of SEQ ID NO: 1884277
agaugugaucaguguggaa

SEQ ID NO: 2253711 - RNA, 19 nt, Artificial Sequence
  Description of Artificial Sequence: Synthetic oligonucleotide
  Antisense strand to SEQ ID NO: 2253710
uuccacacugaucacaucu

SEQ ID NO: 2253712 - RNA, 19 nt, Artificial Sequence
  Description of Artificial Sequence: Synthetic oligonucleotide
  Sense strand starting at position 122 of SEQ ID NO: 1884278
aguguuacaucauuccaaa

SEQ ID NO: 2253713 - RNA, 19 nt, Artificial Sequence
  Description of Artificial Sequence: Synthetic oligonucleotide
  Antisense strand to SEQ ID NO: 2253712
uuuggaaugauguaacacu

SEQ ID NO: 2253714 - RNA, 19 nt, Artificial Sequence
  Description of Artificial Sequence: Synthetic oligonucleotide
  Sense strand starting at position 202 of SEQ ID NO: 1884278
ggucguguguauuucuaua

SEQ ID NO: 2253715 - RNA, 19 nt, Artificial Sequence
  Description of Artificial Sequence: Synthetic oligonucleotide
  Antisense strand to SEQ ID NO: 2253714
uauagaaauacacacgacc

SEQ ID NO: 2253716 - RNA, 19 nt, Artificial Sequence
  Description of Artificial Sequence: Synthetic oligonucleotide
  Sense strand starting at position 204 of SEQ ID NO: 1884278
ucguguguauuucuauaua

SEQ ID NO: 2253717 - RNA, 19 nt, Artificial Sequence
  Description of Artificial Sequence: Synthetic oligonucleotide
  Antisense strand to SEQ ID NO: 2253716
uauauagaaauacacacga

SEQ ID NO: 2253718 - RNA, 19 nt, Artificial Sequence
  Description of Artificial Sequence: Synthetic oligonucleotide
  Sense strand starting at position 306 of SEQ ID NO: 1884278
cuauacacaucguuuggaa

SEQ ID NO: 2253719 - RNA, 19 nt, Artificial Sequence
  Description of Artificial Sequence: Synthetic oligonucleotide
  Antisense strand to SEQ ID NO: 2253718
uuccaaacgauguguauag

SEQ ID NO: 2253720 - RNA, 19 nt, Artificial Sequence
  Description of Artificial Sequence: Synthetic oligonucleotide
  Sense strand starting at position 308 of SEQ ID NO: 1884278
auacacaucguuuggaagu

SEQ ID NO: 2253721 - RNA, 19 nt, Artificial Sequence
  Description of Artificial Sequence: Synthetic oligonucleotide
  Antisense strand to SEQ ID NO: 2253720
acuuccaaacgauguguau

SEQ ID NO: 2253722 - RNA, 19 nt, Artificial Sequence
  Description of Artificial Sequence: Synthetic oligonucleotide
  Sense strand starting at position 352 of SEQ ID NO: 1884278
acguaucuaucuuuacauu

SEQ ID NO: 2253723 - RNA, 19 nt, Artificial Sequence
  Description of Artificial Sequence: Synthetic oligonucleotide
  Antisense strand to SEQ ID NO: 2253722
aauguaaagauagauacgu

SEQ ID NO: 2253724 - RNA, 19 nt, Artificial Sequence
  Description of Artificial Sequence: Synthetic oligonucleotide
  Sense strand starting at position 387 of SEQ ID NO: 1884278
gcaaacuuagcagguugaa

SEQ ID NO: 2253725 - RNA, 19 nt, Artificial Sequence
  Description of Artificial Sequence: Synthetic oligonucleotide
  Antisense strand to SEQ ID NO: 2253724
uucaaccugcuaaguuugc

SEQ ID NO: 2253726 - RNA, 19 nt, Artificial Sequence
  Description of Artificial Sequence: Synthetic oligonucleotide
  Sense strand starting at position 482 of SEQ ID NO: 1884278
gucucaccagccugaaauc

SEQ ID NO: 2253727 - RNA, 19 nt, Artificial Sequence
  Description of Artificial Sequence: Synthetic oligonucleotide
  Antisense strand to SEQ ID NO: 2253726
gauuucaggcuggugagac

SEQ ID NO: 2253728 - RNA, 19 nt, Artificial Sequence
  Description of Artificial Sequence: Synthetic oligonucleotide
  Sense strand starting at position 518 of SEQ ID NO: 1884278
guguccaucuggucuuaac

SEQ ID NO: 2253729 - RNA, 19 nt, Artificial Sequence
  Description of Artificial Sequence: Synthetic oligonucleotide
  Antisense strand to SEQ ID NO: 2253728
guuaagaccagauggacac

SEQ ID NO: 2253730 - RNA, 19 nt, Artificial Sequence
  Description of Artificial Sequence: Synthetic oligonucleotide
  Sense strand starting at position 579 of SEQ ID NO: 1884278
gcauuucccgauggcugua

SEQ ID NO: 2253731 - RNA, 19 nt, Artificial Sequence
  Description of Artificial Sequence: Synthetic oligonucleotide
  Antisense strand to SEQ ID NO: 2253730
uacagccaucgggaaaugc

SEQ ID NO: 2253732 - RNA, 19 nt, Artificial Sequence
  Description of Artificial Sequence: Synthetic oligonucleotide
  Sense strand starting at position 584 of SEQ ID NO: 1884278
ucccgauggcuguaguacu

SEQ ID NO: 2253733 - RNA, 19 nt, Artificial Sequence
  Description of Artificial Sequence: Synthetic oligonucleotide
  Antisense strand to SEQ ID NO: 2253732
aguacuacagccaucggga

SEQ ID NO: 2253734 - RNA, 19 nt, Artificial Sequence
  Description of Artificial Sequence: Synthetic oligonucleotide
  Sense strand starting at position 606 of SEQ ID NO: 1884278
ggucccagcuucuuacuau

SEQ ID NO: 2253735 - RNA, 19 nt, Artificial Sequence
  Description of Artificial Sequence: Synthetic oligonucleotide
  Antisense strand to SEQ ID NO: 2253734
auaguaagaagcugggacc

SEQ ID NO: 2253736 - RNA, 19 nt, Artificial Sequence
  Description of Artificial Sequence: Synthetic oligonucleotide
  Sense strand starting at position 618 of SEQ ID NO: 1884278
uuacuauuagcugaaguuu

SEQ ID NO: 2253737 - RNA, 19 nt, Artificial Sequence
  Description of Artificial Sequence: Synthetic oligonucleotide
  Antisense strand to SEQ ID NO: 2253736
aaacuucagcuaauaguaa

SEQ ID NO: 2253738 - RNA, 19 nt, Artificial Sequence
  Description of Artificial Sequence: Synthetic oligonucleotide
  Sense strand starting at position 629 of SEQ ID NO: 1884278
ugaaguuugcccugagguc

SEQ ID NO: 2253739 - RNA, 19 nt, Artificial Sequence
  Description of Artificial Sequence: Synthetic oligonucleotide
  Antisense strand to SEQ ID NO: 2253738
gaccucagggcaaacuuca

SEQ ID NO: 2253740 - RNA, 19 nt, Artificial Sequence
  Description of Artificial Sequence: Synthetic oligonucleotide
  Sense strand starting at position 719 of SEQ ID NO: 1884278
ucuuccaagucugcuaaga

SEQ ID NO: 2253741 - RNA, 19 nt, Artificial Sequence
  Description of Artificial Sequence: Synthetic oligonucleotide
  Antisense strand to SEQ ID NO: 2253740
ucuuagcagacuuggaaga

SEQ ID NO: 2253742 - RNA, 19 nt, Artificial Sequence
  Description of Artificial Sequence: Synthetic oligonucleotide
  Sense strand starting at position 729 of SEQ ID NO: 1884278
cugcuaagagucugcuuau

SEQ ID NO: 2253743 - RNA, 19 nt, Artificial Sequence
  Description of Artificial Sequence: Synthetic oligonucleotide
  Antisense strand to SEQ ID NO: 2253742
auaagcagacucuuagcag

SEQ ID NO: 2253744 - RNA, 19 nt, Artificial Sequence
  Description of Artificial Sequence: Synthetic oligonucleotide
  Sense strand starting at position 730 of SEQ ID NO: 1884278
ugcuaagagucugcuuauc

SEQ ID NO: 2253745 - RNA, 19 nt, Artificial Sequence
  Description of Artificial Sequence: Synthetic oligonucleotide
  Antisense strand to SEQ ID NO: 2253744
gauaagcagacucuuagca

SEQ ID NO: 2253746 - RNA, 19 nt, Artificial Sequence
  Description of Artificial Sequence: Synthetic oligonucleotide
  Sense strand starting at position 758 of SEQ ID NO: 1884278
ugcugagagucuccagagu

SEQ ID NO: 2253747 - RNA, 19 nt, Artificial Sequence
  Description of Artificial Sequence: Synthetic oligonucleotide
  Antisense strand to SEQ ID NO: 2253746
acucuggagacucucagca

SEQ ID NO: 2253748 - RNA, 19 nt, Artificial Sequence
  Description of Artificial Sequence: Synthetic oligonucleotide
  Sense strand starting at position 834 of SEQ ID NO: 1884278
agaggcaagucucugguua

SEQ ID NO: 2253749 - RNA, 19 nt, Artificial Sequence
  Description of Artificial Sequence: Synthetic oligonucleotide
  Antisense strand to SEQ ID NO: 2253748
uaaccagagacuugccucu

SEQ ID NO: 2253750 - RNA, 19 nt, Artificial Sequence
  Description of Artificial Sequence: Synthetic oligonucleotide
  Sense strand starting at position 835 of SEQ ID NO: 1884278
gaggcaagucucugguuau

SEQ ID NO: 2253751 - RNA, 19 nt, Artificial Sequence
  Description of Artificial Sequence: Synthetic oligonucleotide
  Antisense strand to SEQ ID NO: 2253750
auaaccagagacuugccuc

SEQ ID NO: 2253752 - RNA, 19 nt, Artificial Sequence
  Description of Artificial Sequence: Synthetic oligonucleotide
  Sense strand starting at position 881 of SEQ ID NO: 1884278
gcgugacccauugaaggua

SEQ ID NO: 2253753 - RNA, 19 nt, Artificial Sequence
  Description of Artificial Sequence: Synthetic oligonucleotide
  Antisense strand to SEQ ID NO: 2253752
uaccuucaaugggucacgc

SEQ ID NO: 2253754 - RNA, 19 nt, Artificial Sequence
  Description of Artificial Sequence: Synthetic oligonucleotide
  Sense strand starting at position 897 of SEQ ID NO: 1884278
guaacuuuaguguguuacu

SEQ ID NO: 2253755 - RNA, 19 nt, Artificial Sequence
  Description of Artificial Sequence: Synthetic oligonucleotide
  Antisense strand to SEQ ID NO: 2253754
aguaacacacuaaaguuac

SEQ ID NO: 2253756 - RNA, 19 nt, Artificial Sequence
  Description of Artificial Sequence: Synthetic oligonucleotide
  Sense strand starting at position 1280 of SEQ ID NO: 1884278
caggacauggucugaggua

SEQ ID NO: 2253757 - RNA, 19 nt, Artificial Sequence
  Description of Artificial Sequence: Synthetic oligonucleotide
  Antisense strand to SEQ ID NO: 2253756
uaccucagaccauguccug

SEQ ID NO: 2253758 - RNA, 19 nt, Artificial Sequence
  Description of Artificial Sequence: Synthetic oligonucleotide
  Sense strand starting at position 1358 of SEQ ID NO: 1884278
ggguguauccuccacggua

SEQ ID NO: 2253759 - RNA, 19 nt, Artificial Sequence
  Description of Artificial Sequence: Synthetic oligonucleotide
  Antisense strand to SEQ ID NO: 2253758
uaccguggaggauacaccc

SEQ ID NO: 2253760 - RNA, 19 nt, Artificial Sequence
  Description of Artificial Sequence: Synthetic oligonucleotide
  Sense strand starting at position 2081 of SEQ ID NO: 1884278
gggacuuagugacaacaga

SEQ ID NO: 2253761 - RNA, 19 nt, Artificial Sequence
  Description of Artificial Sequence: Synthetic oligonucleotide
  Antisense strand to SEQ ID NO: 2253760
ucuguugucacuaaguccc

SEQ ID NO: 2253762 - RNA, 19 nt, Artificial Sequence
  Description of Artificial Sequence: Synthetic oligonucleotide
  Sense strand starting at position 2089 of SEQ ID NO: 1884278
gugacaacagaauguacaa

SEQ ID NO: 2253763 - RNA, 19 nt, Artificial Sequence
  Description of Artificial Sequence: Synthetic oligonucleotide
  Antisense strand to SEQ ID NO: 2253762
uuguacauucuguugucac

SEQ ID NO: 2253764 - RNA, 19 nt, Artificial Sequence
  Description of Artificial Sequence: Synthetic oligonucleotide
  Sense strand starting at position 2120 of SEQ ID NO: 1884278
caagacuuguguuucugca

SEQ ID NO: 2253765 - RNA, 19 nt, Artificial Sequence
  Description of Artificial Sequence: Synthetic oligonucleotide
  Antisense strand to SEQ ID NO: 2253764
ugcagaaacacaagucuug

SEQ ID NO: 2253766 - RNA, 19 nt, Artificial Sequence
  Description of Artificial Sequence: Synthetic oligonucleotide
  Sense strand starting at position 2127 of SEQ ID NO: 1884278
uguguuucugcagugcuga

SEQ ID NO: 2253767 - RNA, 19 nt, Artificial Sequence
  Description of Artificial Sequence: Synthetic oligonucleotide
  Antisense strand to SEQ ID NO: 2253766
ucagcacugcagaaacaca

SEQ ID NO: 2253768 - RNA, 19 nt, Artificial Sequence
  Description of Artificial Sequence: Synthetic oligonucleotide
  Sense strand starting at position 2238 of SEQ ID NO: 1884278
caguaauucuggccagccu

SEQ ID NO: 2253769 - RNA, 19 nt, Artificial Sequence
  Description of Artificial Sequence: Synthetic oligonucleotide
  Antisense strand to SEQ ID NO: 2253768
aggcuggccagaauuacug

SEQ ID NO: 2253770 - RNA, 19 nt, Artificial Sequence
  Description of Artificial Sequence: Synthetic oligonucleotide
  Sense strand starting at position 2335 of SEQ ID NO: 1884278
cgagauggcgacuguaauc

SEQ ID NO: 2253771 - RNA, 19 nt, Artificial Sequence
  Description of Artificial Sequence: Synthetic oligonucleotide
  Antisense strand to SEQ ID NO: 2253770
gauuacagucgccaucucg

SEQ ID NO: 2253772 - RNA, 19 nt, Artificial Sequence
  Description of Artificial Sequence: Synthetic oligonucleotide
  Sense strand starting at position 2340 of SEQ ID NO: 1884278
uggcgacuguaaucaauac

SEQ ID NO: 2253773 - RNA, 19 nt, Artificial Sequence
  Description of Artificial Sequence: Synthetic oligonucleotide
  Antisense strand to SEQ ID NO: 2253772
guauugauuacagucgcca

SEQ ID NO: 2253774 - RNA, 19 nt, Artificial Sequence
  Description of Artificial Sequence: Synthetic oligonucleotide
  Sense strand starting at position 2341 of SEQ ID NO: 1884278
ggcgacuguaaucaauaca

SEQ ID NO: 2253775 - RNA, 19 nt, Artificial Sequence
  Description of Artificial Sequence: Synthetic oligonucleotide
  Antisense strand to SEQ ID NO: 2253774
uguauugauuacagucgcc

SEQ ID NO: 2253776 - RNA, 19 nt, Artificial Sequence
  Description of Artificial Sequence: Synthetic oligonucleotide
  Sense strand starting at position 2543 of SEQ ID NO: 1884278
uugagucucuugccuuaaa

SEQ ID NO: 2253777 - RNA, 19 nt, Artificial Sequence
  Description of Artificial Sequence: Synthetic oligonucleotide
  Antisense strand to SEQ ID NO: 2253776
uuuaaggcaagagacucaa

SEQ ID NO: 2253778 - RNA, 19 nt, Artificial Sequence
  Description of Artificial Sequence: Synthetic oligonucleotide
  Sense strand starting at position 2656 of SEQ ID NO: 1884278
gcucuacugucaucacacu

SEQ ID NO: 2253779 - RNA, 19 nt, Artificial Sequence
  Description of Artificial Sequence: Synthetic oligonucleotide
  Antisense strand to SEQ ID NO: 2253778
agugugaugacaguagagc

SEQ ID NO: 2253780 - RNA, 19 nt, Artificial Sequence
  Description of Artificial Sequence: Synthetic oligonucleotide
  Sense strand starting at position 3331 of SEQ ID NO: 1884278
gagguccauccauauagua

SEQ ID NO: 2253781 - RNA, 19 nt, Artificial Sequence
  Description of Artificial Sequence: Synthetic oligonucleotide
  Antisense strand to SEQ ID NO: 2253780
uacuauauggauggaccuc

SEQ ID NO: 2253782 - RNA, 19 nt, Artificial Sequence
  Description of Artificial Sequence: Synthetic oligonucleotide
  Sense strand starting at position 3407 of SEQ ID NO: 1884278
agcagauauuguuuaucca

SEQ ID NO: 2253783 - RNA, 19 nt, Artificial Sequence
  Description of Artificial Sequence: Synthetic oligonucleotide
  Antisense strand to SEQ ID NO: 2253782
uggauaaacaauaucugcu

SEQ ID NO: 2253784 - RNA, 19 nt, Artificial Sequence
  Description of Artificial Sequence: Synthetic oligonucleotide
  Sense strand starting at position 3408 of SEQ ID NO: 1884278
gcagauauuguuuauccaa

SEQ ID NO: 2253785 - RNA, 19 nt, Artificial Sequence
  Description of Artificial Sequence: Synthetic oligonucleotide
  Antisense strand to SEQ ID NO: 2253784
uuggauaaacaauaucugc

SEQ ID NO: 2253786 - RNA, 19 nt, Artificial Sequence
  Description of Artificial Sequence: Synthetic oligonucleotide
  Sense strand starting at position 3626 of SEQ ID NO: 1884278
caugauagugcauguuugu

SEQ ID NO: 2253787 - RNA, 19 nt, Artificial Sequence
  Description of Artificial Sequence: Synthetic oligonucleotide
  Antisense strand to SEQ ID NO: 2253786
acaaacaugcacuaucaug

SEQ ID NO: 2253788 - RNA, 19 nt, Artificial Sequence
  Description of Artificial Sequence: Synthetic oligonucleotide
  Sense strand starting at position 3629 of SEQ ID NO: 1884278
gauagugcauguuuguaau

SEQ ID NO: 2253789 - RNA, 19 nt, Artificial Sequence
  Description of Artificial Sequence: Synthetic oligonucleotide
  Antisense strand to SEQ ID NO: 2253788
auuacaaacaugcacuauc

SEQ ID NO: 2253790 - RNA, 19 nt, Artificial Sequence
  Description of Artificial Sequence: Synthetic oligonucleotide
  Sense strand starting at position 3848 of SEQ ID NO: 1884278
uuggguauaccucagagua

SEQ ID NO: 2253791 - RNA, 19 nt, Artificial Sequence
  Description of Artificial Sequence: Synthetic oligonucleotide
  Antisense strand to SEQ ID NO: 2253790
uacucugagguauacccaa

SEQ ID NO: 2253792 - RNA, 19 nt, Artificial Sequence
  Description of Artificial Sequence: Synthetic oligonucleotide
  Sense strand starting at position 381 of SEQ ID NO: 1884279
caaagugguguggagaauu

SEQ ID NO: 2253793 - RNA, 19 nt, Artificial Sequence
  Description of Artificial Sequence: Synthetic oligonucleotide
  Antisense strand to SEQ ID NO: 2253792
aauucuccacaccacuuug

SEQ ID NO: 2253794 - RNA, 19 nt, Artificial Sequence
  Description of Artificial Sequence: Synthetic oligonucleotide
  Sense strand starting at position 391 of SEQ ID NO: 1884279
uggagaauucagugggucu

SEQ ID NO: 2253795 - RNA, 19 nt, Artificial Sequence
  Description of Artificial Sequence: Synthetic oligonucleotide
  Antisense strand to SEQ ID NO: 2253794
agacccacugaauucucca

SEQ ID NO: 2253796 - RNA, 19 nt, Artificial Sequence
  Description of Artificial Sequence: Synthetic oligonucleotide
  Sense strand starting at position 394 of SEQ ID NO: 1884279
agaauucagugggucuagu

SEQ ID NO: 2253797 - RNA, 19 nt, Artificial Sequence
  Description of Artificial Sequence: Synthetic oligonucleotide
  Antisense strand to SEQ ID NO: 2253796
acuagacccacugaauucu

SEQ ID NO: 2253798 - RNA, 19 nt, Artificial Sequence
  Description of Artificial Sequence: Synthetic oligonucleotide
  Sense strand starting at position 507 of SEQ ID NO: 1884279
gcaacauaugcauauagau

SEQ ID NO: 2253799 - RNA, 19 nt, Artificial Sequence
  Description of Artificial Sequence: Synthetic oligonucleotide
  Antisense strand to SEQ ID NO: 2253798
aucuauaugcauauguugc

SEQ ID NO: 2253800 - RNA, 19 nt, Artificial Sequence
  Description of Artificial Sequence: Synthetic oligonucleotide
  Sense strand starting at position 632 of SEQ ID NO: 1884279
auaagaauguuggcuuuau

SEQ ID NO: 2253801 - RNA, 19 nt, Artificial Sequence
  Description of Artificial Sequence: Synthetic oligonucleotide
  Antisense strand to SEQ ID NO: 2253800
auaaagccaacauucuuau

SEQ ID NO: 2253802 - RNA, 19 nt, Artificial Sequence
  Description of Artificial Sequence: Synthetic oligonucleotide
  Sense strand starting at position 633 of SEQ ID NO: 1884279
uaagaauguuggcuuuaug

SEQ ID NO: 2253803 - RNA, 19 nt, Artificial Sequence
  Description of Artificial Sequence: Synthetic oligonucleotide
  Antisense strand to SEQ ID NO: 2253802
cauaaagccaacauucuua

SEQ ID NO: 2253804 - RNA, 19 nt, Artificial Sequence
  Description of Artificial Sequence: Synthetic oligonucleotide
  Sense strand starting at position 785 of SEQ ID NO: 1884279
accaacuguccauaagguu

SEQ ID NO: 2253805 - RNA, 19 nt, Artificial Sequence
  Description of Artificial Sequence: Synthetic oligonucleotide
  Antisense strand to SEQ ID NO: 2253804
aaccuuauggacaguuggu

SEQ ID NO: 2253806 - RNA, 19 nt, Artificial Sequence
  Description of Artificial Sequence: Synthetic oligonucleotide
  Sense strand starting at position 930 of SEQ ID NO: 1884279
augaguuugguuuauggau

SEQ ID NO: 2253807 - RNA, 19 nt, Artificial Sequence
  Description of Artificial Sequence: Synthetic oligonucleotide
  Antisense strand to SEQ ID NO: 2253806
auccauaaaccaaacucau

SEQ ID NO: 2253808 - RNA, 19 nt, Artificial Sequence
  Description of Artificial Sequence: Synthetic oligonucleotide
  Sense strand starting at position 1017 of SEQ ID NO: 1884279
ucugauguaccacagaguu

SEQ ID NO: 2253809 - RNA, 19 nt, Artificial Sequence
  Description of Artificial Sequence: Synthetic oligonucleotide
  Antisense strand to SEQ ID NO: 2253808
aacucugugguacaucaga

SEQ ID NO: 2253810 - RNA, 19 nt, Artificial Sequence
  Description of Artificial Sequence: Synthetic oligonucleotide
  Sense strand starting at position 1094 of SEQ ID NO: 1884279
ugaauucucugacauuuag

SEQ ID NO: 2253811 - RNA, 19 nt, Artificial Sequence
  Description of Artificial Sequence: Synthetic oligonucleotide
  Antisense strand to SEQ ID NO: 2253810
cuaaaugucagagaauuca

SEQ ID NO: 2253812 - RNA, 19 nt, Artificial Sequence
  Description of Artificial Sequence: Synthetic oligonucleotide
  Sense strand starting at position 1104 of SEQ ID NO: 1884279
gacauuuaguaaggacuga

SEQ ID NO: 2253813 - RNA, 19 nt, Artificial Sequence
  Description of Artificial Sequence: Synthetic oligonucleotide
  Antisense strand to SEQ ID NO: 2253812
ucaguccuuacuaaauguc

SEQ ID NO: 2253814 - RNA, 19 nt, Artificial Sequence
  Description of Artificial Sequence: Synthetic oligonucleotide
  Sense strand starting at position 1120 of SEQ ID NO: 1884279
ugaacuguggcacaaugau

SEQ ID NO: 2253815 - RNA, 19 nt, Artificial Sequence
  Description of Artificial Sequence: Synthetic oligonucleotide
  Antisense strand to SEQ ID NO: 2253814
aucauugugccacaguuca

SEQ ID NO: 2253816 - RNA, 19 nt, Artificial Sequence
  Description of Artificial Sequence: Synthetic oligonucleotide
  Sense strand starting at position 1199 of SEQ ID NO: 1884279
uugauuugugaguguaggu

SEQ ID NO: 2253817 - RNA, 19 nt, Artificial Sequence
  Description of Artificial Sequence: Synthetic oligonucleotide
  Antisense strand to SEQ ID NO: 2253816
accuacacucacaaaucaa

SEQ ID NO: 2253818 - RNA, 19 nt, Artificial Sequence
  Description of Artificial Sequence: Synthetic oligonucleotide
  Sense strand starting at position 1349 of SEQ ID NO: 1884279
uguacugugaggcaugaau

SEQ ID NO: 2253819 - RNA, 19 nt, Artificial Sequence
  Description of Artificial Sequence: Synthetic oligonucleotide
  Antisense strand to SEQ ID NO: 2253818
auucaugccucacaguaca

SEQ ID NO: 2253820 - RNA, 19 nt, Artificial Sequence
  Description of Artificial Sequence: Synthetic oligonucleotide
  Sense strand starting at position 1351 of SEQ ID NO: 1884279
uacugugaggcaugaauua

SEQ ID NO: 2253821 - RNA, 19 nt, Artificial Sequence
  Description of Artificial Sequence: Synthetic oligonucleotide
  Antisense strand to SEQ ID NO: 2253820
uaauucaugccucacagua

SEQ ID NO: 2253822 - RNA, 19 nt, Artificial Sequence
  Description of Artificial Sequence: Synthetic oligonucleotide
  Sense strand starting at position 1525 of SEQ ID NO: 1884279
guugacuugugguuaaaga

SEQ ID NO: 2253823 - RNA, 19 nt, Artificial Sequence
  Description of Artificial Sequence: Synthetic oligonucleotide
  Antisense strand to SEQ ID NO: 2253822
ucuuuaaccacaagucaac

SEQ ID NO: 2253824 - RNA, 19 nt, Artificial Sequence
  Description of Artificial Sequence: Synthetic oligonucleotide
  Sense strand starting at position 1526 of SEQ ID NO: 1884279
uugacuugugguuaaagau

SEQ ID NO: 2253825 - RNA, 19 nt, Artificial Sequence
  Description of Artificial Sequence: Synthetic oligonucleotide
  Antisense strand to SEQ ID NO: 2253824
aucuuuaaccacaagucaa

SEQ ID NO: 2253826 - RNA, 19 nt, Artificial Sequence
  Description of Artificial Sequence: Synthetic oligonucleotide
  Sense strand starting at position 1535 of SEQ ID NO: 1884279
gguuaaagauugucccaca

SEQ ID NO: 2253827 - RNA, 19 nt, Artificial Sequence
  Description of Artificial Sequence: Synthetic oligonucleotide
  Antisense strand to SEQ ID NO: 2253826
ugugggacaaucuuuaacc

SEQ ID NO: 2253828 - RNA, 19 nt, Artificial Sequence
  Description of Artificial Sequence: Synthetic oligonucleotide
  Sense strand starting at position 1609 of SEQ ID NO: 1884279
ugaugucacacaggaaguu

SEQ ID NO: 2253829 - RNA, 19 nt, Artificial Sequence
  Description of Artificial Sequence: Synthetic oligonucleotide
  Antisense strand to SEQ ID NO: 2253828
aacuuccugugugacauca

SEQ ID NO: 2253830 - RNA, 19 nt, Artificial Sequence
  Description of Artificial Sequence: Synthetic oligonucleotide
  Sense strand starting at position 1814 of SEQ ID NO: 1884279
ucacaagauuucuauguga

SEQ ID NO: 2253831 - RNA, 19 nt, Artificial Sequence
  Description of Artificial Sequence: Synthetic oligonucleotide
  Antisense strand to SEQ ID NO: 2253830
ucacauagaaaucuuguga

SEQ ID NO: 2253832 - RNA, 19 nt, Artificial Sequence
  Description of Artificial Sequence: Synthetic oligonucleotide
  Sense strand starting at position 1827 of SEQ ID NO: 1884279
augugaguucucugauaau

SEQ ID NO: 2253833 - RNA, 19 nt, Artificial Sequence
  Description of Artificial Sequence: Synthetic oligonucleotide
  Antisense strand to SEQ ID NO: 2253832
auuaucagagaacucacau

SEQ ID NO: 2253834 - RNA, 19 nt, Artificial Sequence
  Description of Artificial Sequence: Synthetic oligonucleotide
  Sense strand starting at position 1836 of SEQ ID NO: 1884279
cucugauaauggguaaagu

SEQ ID NO: 2253835 - RNA, 19 nt, Artificial Sequence
  Description of Artificial Sequence: Synthetic oligonucleotide
  Antisense strand to SEQ ID NO: 2253834
acuuuacccauuaucagag

SEQ ID NO: 2253836 - RNA, 19 nt, Artificial Sequence
  Description of Artificial Sequence: Synthetic oligonucleotide
  Sense strand starting at position 2008 of SEQ ID NO: 1884279
guagaaugugaugguucaa

SEQ ID NO: 2253837 - RNA, 19 nt, Artificial Sequence
  Description of Artificial Sequence: Synthetic oligonucleotide
  Antisense strand to SEQ ID NO: 2253836
uugaaccaucacauucuac

SEQ ID NO: 2253838 - RNA, 19 nt, Artificial Sequence
  Description of Artificial Sequence: Synthetic oligonucleotide
  Sense strand starting at position 2053 of SEQ ID NO: 1884279
ucaugagaugucuacuuug

SEQ ID NO: 2253839 - RNA, 19 nt, Artificial Sequence
  Description of Artificial Sequence: Synthetic oligonucleotide
  Antisense strand to SEQ ID NO: 2253838
caaaguagacaucucauga

SEQ ID NO: 2253840 - RNA, 19 nt, Artificial Sequence
  Description of Artificial Sequence: Synthetic oligonucleotide
  Sense strand starting at position 2056 of SEQ ID NO: 1884279
ugagaugucuacuuugauu

SEQ ID NO: 2253841 - RNA, 19 nt, Artificial Sequence
  Description of Artificial Sequence: Synthetic oligonucleotide
  Antisense strand to SEQ ID NO: 2253840
aaucaaaguagacaucuca

SEQ ID NO: 2253842 - RNA, 19 nt, Artificial Sequence
  Description of Artificial Sequence: Synthetic oligonucleotide
  Sense strand starting at position 2058 of SEQ ID NO: 1884279
agaugucuacuuugauuga

SEQ ID NO: 2253843 - RNA, 19 nt, Artificial Sequence
  Description of Artificial Sequence: Synthetic oligonucleotide
  Antisense strand to SEQ ID NO: 2253842
ucaaucaaaguagacaucu

SEQ ID NO: 2253844 - RNA, 19 nt, Artificial Sequence
  Description of Artificial Sequence: Synthetic oligonucleotide
  Sense strand starting at position 2071 of SEQ ID NO: 1884279
gauugacuucuuugaugua

SEQ ID NO: 2253845 - RNA, 19 nt, Artificial Sequence
  Description of Artificial Sequence: Synthetic oligonucleotide
  Antisense strand to SEQ ID NO: 2253844
uacaucaaagaagucaauc

SEQ ID NO: 2253846 - RNA, 19 nt, Artificial Sequence
  Description of Artificial Sequence: Synthetic oligonucleotide
  Sense strand starting at position 2094 of SEQ ID NO: 1884279
aauuguugaugaguaacca

SEQ ID NO: 2253847 - RNA, 19 nt, Artificial Sequence
  Description of Artificial Sequence: Synthetic oligonucleotide
  Antisense strand to SEQ ID NO: 2253846
ugguuacucaucaacaauu

SEQ ID NO: 2253848 - RNA, 19 nt, Artificial Sequence
  Description of Artificial Sequence: Synthetic oligonucleotide
  Sense strand starting at position 2382 of SEQ ID NO: 1884279
ucauuaaauccuuagugug

SEQ ID NO: 2253849 - RNA, 19 nt, Artificial Sequence
  Description of Artificial Sequence: Synthetic oligonucleotide
  Antisense strand to SEQ ID NO: 2253848
cacacuaaggauuuaauga

SEQ ID NO: 2253850 - RNA, 19 nt, Artificial Sequence
  Description of Artificial Sequence: Synthetic oligonucleotide
  Sense strand starting at position 2721 of SEQ ID NO: 1884279
aauauaaccugucuggguu

SEQ ID NO: 2253851 - RNA, 19 nt, Artificial Sequence
  Description of Artificial Sequence: Synthetic oligonucleotide
  Antisense strand to SEQ ID NO: 2253850
aacccagacagguuauauu

SEQ ID NO: 2253852 - RNA, 19 nt, Artificial Sequence
  Description of Artificial Sequence: Synthetic oligonucleotide
  Sense strand starting at position 2873 of SEQ ID NO: 1884279
auacauuucucucaggaag

SEQ ID NO: 2253853 - RNA, 19 nt, Artificial Sequence
  Description of Artificial Sequence: Synthetic oligonucleotide
  Antisense strand to SEQ ID NO: 2253852
cuuccugagagaaauguau

SEQ ID NO: 2253854 - RNA, 19 nt, Artificial Sequence
  Description of Artificial Sequence: Synthetic oligonucleotide
  Sense strand starting at position 2875 of SEQ ID NO: 1884279
acauuucucucaggaagaa

SEQ ID NO: 2253855 - RNA, 19 nt, Artificial Sequence
  Description of Artificial Sequence: Synthetic oligonucleotide
  Antisense strand to SEQ ID NO: 2253854
uucuuccugagagaaaugu

SEQ ID NO: 2253856 - RNA, 19 nt, Artificial Sequence
  Description of Artificial Sequence: Synthetic oligonucleotide
  Sense strand starting at position 2915 of SEQ ID NO: 1884279
guuauagucugucuauuug

SEQ ID NO: 2253857 - RNA, 19 nt, Artificial Sequence
  Description of Artificial Sequence: Synthetic oligonucleotide
  Antisense strand to SEQ ID NO: 2253856
caaauagacagacuauaac

SEQ ID NO: 2253858 - RNA, 19 nt, Artificial Sequence
  Description of Artificial Sequence: Synthetic oligonucleotide
  Sense strand starting at position 3014 of SEQ ID NO: 1884279
ugugguguucuccaaacac

SEQ ID NO: 2253859 - RNA, 19 nt, Artificial Sequence
  Description of Artificial Sequence: Synthetic oligonucleotide
  Antisense strand to SEQ ID NO: 2253858
guguuuggagaacaccaca

SEQ ID NO: 2253860 - RNA, 19 nt, Artificial Sequence
  Description of Artificial Sequence: Synthetic oligonucleotide
  Sense strand starting at position 3328 of SEQ ID NO: 1884279
gccacaauaccuggcaaau

SEQ ID NO: 2253861 - RNA, 19 nt, Artificial Sequence
  Description of Artificial Sequence: Synthetic oligonucleotide
  Antisense strand to SEQ ID NO: 2253860
auuugccagguauuguggc

SEQ ID NO: 2253862 - RNA, 19 nt, Artificial Sequence
  Description of Artificial Sequence: Synthetic oligonucleotide
  Sense strand starting at position 3436 of SEQ ID NO: 1884279
gucaucuuagucuaucaga

SEQ ID NO: 2253863 - RNA, 19 nt, Artificial Sequence
  Description of Artificial Sequence: Synthetic oligonucleotide
  Antisense strand to SEQ ID NO: 2253862
ucugauagacuaagaugac

SEQ ID NO: 2253864 - RNA, 19 nt, Artificial Sequence
  Description of Artificial Sequence: Synthetic oligonucleotide
  Sense strand starting at position 3449 of SEQ ID NO: 1884279
aucagaguuguuuaguaau

SEQ ID NO: 2253865 - RNA, 19 nt, Artificial Sequence
  Description of Artificial Sequence: Synthetic oligonucleotide
  Antisense strand to SEQ ID NO: 2253864
auuacuaaacaacucugau

SEQ ID NO: 2253866 - RNA, 19 nt, Artificial Sequence
  Description of Artificial Sequence: Synthetic oligonucleotide
  Sense strand starting at position 3722 of SEQ ID NO: 1884279
gcagaauuauaagcaaggu

SEQ ID NO: 2253867 - RNA, 19 nt, Artificial Sequence
  Description of Artificial Sequence: Synthetic oligonucleotide
  Antisense strand to SEQ ID NO: 2253866
accuugcuuauaauucugc

SEQ ID NO: 2253868 - RNA, 19 nt, Artificial Sequence
  Description of Artificial Sequence: Synthetic oligonucleotide
  Sense strand starting at position 3726 of SEQ ID NO: 1884279
aauuauaagcaaggugaga

SEQ ID NO: 2253869 - RNA, 19 nt, Artificial Sequence
  Description of Artificial Sequence: Synthetic oligonucleotide
  Antisense strand to SEQ ID NO: 2253868
ucucaccuugcuuauaauu

SEQ ID NO: 2253870 - RNA, 19 nt, Artificial Sequence
  Description of Artificial Sequence: Synthetic oligonucleotide
  Sense strand starting at position 3728 of SEQ ID NO: 1884279
uuauaagcaaggugagaaa

SEQ ID NO: 2253871 - RNA, 19 nt, Artificial Sequence
  Description of Artificial Sequence: Synthetic oligonucleotide
  Antisense strand to SEQ ID NO: 2253870
uuucucaccuugcuuauaa

SEQ ID NO: 2253872 - RNA, 19 nt, Artificial Sequence
  Description of Artificial Sequence: Synthetic oligonucleotide
  Sense strand starting at position 523 of SEQ ID NO: 1884280
uucuuacucuguugucaau

SEQ ID NO: 2253873 - RNA, 19 nt, Artificial Sequence
  Description of Artificial Sequence: Synthetic oligonucleotide
  Antisense strand to SEQ ID NO: 2253872
auugacaacagaguaagaa

SEQ ID NO: 2253874 - RNA, 19 nt, Artificial Sequence
  Description of Artificial Sequence: Synthetic oligonucleotide
  Sense strand starting at position 529 of SEQ ID NO: 1884280
cucuguugucaaugcagca

SEQ ID NO: 2253875 - RNA, 19 nt, Artificial Sequence
  Description of Artificial Sequence: Synthetic oligonucleotide
  Antisense strand to SEQ ID NO: 2253874
ugcugcauugacaacagag

SEQ ID NO: 2253876 - RNA, 19 nt, Artificial Sequence
  Description of Artificial Sequence: Synthetic oligonucleotide
  Sense strand starting at position 583 of SEQ ID NO: 1884280
guucuugacucugccacaa

SEQ ID NO: 2253877 - RNA, 19 nt, Artificial Sequence
  Description of Artificial Sequence: Synthetic oligonucleotide
  Antisense strand to SEQ ID NO: 2253876
uuguggcagagucaagaac

SEQ ID NO: 2253878 - RNA, 19 nt, Artificial Sequence
  Description of Artificial Sequence: Synthetic oligonucleotide
  Sense strand starting at position 615 of SEQ ID NO: 1884280
ugucaacagucacuuaaca

SEQ ID NO: 2253879 - RNA, 19 nt, Artificial Sequence
  Description of Artificial Sequence: Synthetic oligonucleotide
  Antisense strand to SEQ ID NO: 2253878
uguuaagugacuguugaca

SEQ ID NO: 2253880 - RNA, 19 nt, Artificial Sequence
  Description of Artificial Sequence: Synthetic oligonucleotide
  Sense strand starting at position 620 of SEQ ID NO: 1884280
acagucacuuaacauguua

SEQ ID NO: 2253881 - RNA, 19 nt, Artificial Sequence
  Description of Artificial Sequence: Synthetic oligonucleotide
  Antisense strand to SEQ ID NO: 2253880
uaacauguuaagugacugu

SEQ ID NO: 2253882 - RNA, 19 nt, Artificial Sequence
  Description of Artificial Sequence: Synthetic oligonucleotide
  Sense strand starting at position 722 of SEQ ID NO: 1884280
accucugauucuguaagau

SEQ ID NO: 2253883 - RNA, 19 nt, Artificial Sequence
  Description of Artificial Sequence: Synthetic oligonucleotide
  Antisense strand to SEQ ID NO: 2253882
aucuuacagaaucagaggu

SEQ ID NO: 2253884 - RNA, 19 nt, Artificial Sequence
  Description of Artificial Sequence: Synthetic oligonucleotide
  Sense strand starting at position 762 of SEQ ID NO: 1884280
ucucuaguugugcugcaau

SEQ ID NO: 2253885 - RNA, 19 nt, Artificial Sequence
  Description of Artificial Sequence: Synthetic oligonucleotide
  Antisense strand to SEQ ID NO: 2253884
auugcagcacaacuagaga

SEQ ID NO: 2253886 - RNA, 19 nt, Artificial Sequence
  Description of Artificial Sequence: Synthetic oligonucleotide
  Sense strand starting at position 765 of SEQ ID NO: 1884280
cuaguugugcugcaauaug

SEQ ID NO: 2253887 - RNA, 19 nt, Artificial Sequence
  Description of Artificial Sequence: Synthetic oligonucleotide
  Antisense strand to SEQ ID NO: 2253886
cauauugcagcacaacuag

SEQ ID NO: 2253888 - RNA, 19 nt, Artificial Sequence
  Description of Artificial Sequence: Synthetic oligonucleotide
  Sense strand starting at position 1020 of SEQ ID NO: 1884280
ucccauccgugcucuagau

SEQ ID NO: 2253889 - RNA, 19 nt, Artificial Sequence
  Description of Artificial Sequence: Synthetic oligonucleotide
  Antisense strand to SEQ ID NO: 2253888
aucuagagcacggauggga

SEQ ID NO: 2253890 - RNA, 19 nt, Artificial Sequence
  Description of Artificial Sequence: Synthetic oligonucleotide
  Sense strand starting at position 1029 of SEQ ID NO: 1884280
ugcucuagaucucuaauga

SEQ ID NO: 2253891 - RNA, 19 nt, Artificial Sequence
  Description of Artificial Sequence: Synthetic oligonucleotide
  Antisense strand to SEQ ID NO: 2253890
ucauuagagaucuagagca

SEQ ID NO: 2253892 - RNA, 19 nt, Artificial Sequence
  Description of Artificial Sequence: Synthetic oligonucleotide
  Sense strand starting at position 1030 of SEQ ID NO: 1884280
gcucuagaucucuaaugag

SEQ ID NO: 2253893 - RNA, 19 nt, Artificial Sequence
  Description of Artificial Sequence: Synthetic oligonucleotide
  Antisense strand to SEQ ID NO: 2253892
cucauuagagaucuagagc

SEQ ID NO: 2253894 - RNA, 19 nt, Artificial Sequence
  Description of Artificial Sequence: Synthetic oligonucleotide
  Sense strand starting at position 1033 of SEQ ID NO: 1884280
cuagaucucuaaugagguc

SEQ ID NO: 2253895 - RNA, 19 nt, Artificial Sequence
  Description of Artificial Sequence: Synthetic oligonucleotide
  Antisense strand to SEQ ID NO: 2253894
gaccucauuagagaucuag

SEQ ID NO: 2253896 - RNA, 19 nt, Artificial Sequence
  Description of Artificial Sequence: Synthetic oligonucleotide
  Sense strand starting at position 1042 of SEQ ID NO: 1884280
uaaugaggucucggcccaa

SEQ ID NO: 2253897 - RNA, 19 nt, Artificial Sequence
  Description of Artificial Sequence: Synthetic oligonucleotide
  Antisense strand to SEQ ID NO: 2253896
uugggccgagaccucauua

SEQ ID NO: 2253898 - RNA, 19 nt, Artificial Sequence
  Description of Artificial Sequence: Synthetic oligonucleotide
  Sense strand starting at position 1168 of SEQ ID NO: 1884280
uucgaauccucauccaaga

SEQ ID NO: 2253899 - RNA, 19 nt, Artificial Sequence
  Description of Artificial Sequence: Synthetic oligonucleotide
  Antisense strand to SEQ ID NO: 2253898
ucuuggaugaggauucgaa

SEQ ID NO: 2253900 - RNA, 19 nt, Artificial Sequence
  Description of Artificial Sequence: Synthetic oligonucleotide
  Sense strand starting at position 1224 of SEQ ID NO: 1884280
agcugcaccgucuggaaau

SEQ ID NO: 2253901 - RNA, 19 nt, Artificial Sequence
  Description of Artificial Sequence: Synthetic oligonucleotide
  Antisense strand to SEQ ID NO: 2253900
auuuccagacggugcagcu

SEQ ID NO: 2253902 - RNA, 19 nt, Artificial Sequence
  Description of Artificial Sequence: Synthetic oligonucleotide
  Sense strand starting at position 1903 of SEQ ID NO: 1884280
ccaggcuguaccggagaaa

SEQ ID NO: 2253903 - RNA, 19 nt, Artificial Sequence
  Description of Artificial Sequence: Synthetic oligonucleotide
  Antisense strand to SEQ ID NO: 2253902
uuucuccgguacagccugg

SEQ ID NO: 2253904 - RNA, 19 nt, Artificial Sequence
  Description of Artificial Sequence: Synthetic oligonucleotide
  Sense strand starting at position 2022 of SEQ ID NO: 1884280
gccgcucccuuagaaagua

SEQ ID NO: 2253905 - RNA, 19 nt, Artificial Sequence
  Description of Artificial Sequence: Synthetic oligonucleotide
  Antisense strand to SEQ ID NO: 2253904
uacuuucuaagggagcggc

SEQ ID NO: 2253906 - RNA, 19 nt, Artificial Sequence
  Description of Artificial Sequence: Synthetic oligonucleotide
  Sense strand starting at position 2065 of SEQ ID NO: 1884280
cgcgccgcucccugagaaa

SEQ ID NO: 2253907 - RNA, 19 nt, Artificial Sequence
  Description of Artificial Sequence: Synthetic oligonucleotide
  Antisense strand to SEQ ID NO: 2253906
uuucucagggagcggcgcg

SEQ ID NO: 2253908 - RNA, 19 nt, Artificial Sequence
  Description of Artificial Sequence: Synthetic oligonucleotide
  Sense strand starting at position 2111 of SEQ ID NO: 1884280
cgcgccgcuccuuuagaaa

SEQ ID NO: 2253909 - RNA, 19 nt, Artificial Sequence
  Description of Artificial Sequence: Synthetic oligonucleotide
  Antisense strand to SEQ ID NO: 2253908
uuucuaaaggagcggcgcg

SEQ ID NO: 2253910 - RNA, 19 nt, Artificial Sequence
  Description of Artificial Sequence: Synthetic oligonucleotide
  Sense strand starting at position 2123 of SEQ ID NO: 1884280
uuagaaacggccugagguu

SEQ ID NO: 2253911 - RNA, 19 nt, Artificial Sequence
  Description of Artificial Sequence: Synthetic oligonucleotide
  Antisense strand to SEQ ID NO: 2253910
aaccucaggccguuucuaa

SEQ ID NO: 2253912 - RNA, 19 nt, Artificial Sequence
  Description of Artificial Sequence: Synthetic oligonucleotide
  Sense strand starting at position 2154 of SEQ ID NO: 1884280
gguaguuaguucccagaug

SEQ ID NO: 2253913 - RNA, 19 nt, Artificial Sequence
  Description of Artificial Sequence: Synthetic oligonucleotide
  Antisense strand to SEQ ID NO: 2253912
caucugggaacuaacuacc

SEQ ID NO: 2253914 - RNA, 19 nt, Artificial Sequence
  Description of Artificial Sequence: Synthetic oligonucleotide
  Sense strand starting at position 2168 of SEQ ID NO: 1884280
agaugcaccgagugcaaua

SEQ ID NO: 2253915 - RNA, 19 nt, Artificial Sequence
  Description of Artificial Sequence: Synthetic oligonucleotide
  Antisense strand to SEQ ID NO: 2253914
uauugcacucggugcaucu

SEQ ID NO: 2253916 - RNA, 19 nt, Artificial Sequence
  Description of Artificial Sequence: Synthetic oligonucleotide
  Sense strand starting at position 2194 of SEQ ID NO: 1884280
uuuauucguuagcugaaau

SEQ ID NO: 2253917 - RNA, 19 nt, Artificial Sequence
  Description of Artificial Sequence: Synthetic oligonucleotide
  Antisense strand to SEQ ID NO: 2253916
auuucagcuaacgaauaaa

SEQ ID NO: 2253918 - RNA, 19 nt, Artificial Sequence
  Description of Artificial Sequence: Synthetic oligonucleotide
  Sense strand starting at position 2235 of SEQ ID NO: 1884280
acagguuucuuaugaauua

SEQ ID NO: 2253919 - RNA, 19 nt, Artificial Sequence
  Description of Artificial Sequence: Synthetic oligonucleotide
  Antisense strand to SEQ ID NO: 2253918
uaauucauaagaaaccugu

SEQ ID NO: 2253920 - RNA, 19 nt, Artificial Sequence
  Description of Artificial Sequence: Synthetic oligonucleotide
  Sense strand starting at position 2262 of SEQ ID NO: 1884280
ugaugauuuggcuguccuc

SEQ ID NO: 2253921 - RNA, 19 nt, Artificial Sequence
  Description of Artificial Sequence: Synthetic oligonucleotide
  Antisense strand to SEQ ID NO: 2253920
gaggacagccaaaucauca

SEQ ID NO: 2253922 - RNA, 19 nt, Artificial Sequence
  Description of Artificial Sequence: Synthetic oligonucleotide
  Sense strand starting at position 2285 of SEQ ID NO: 1884280
cuuccucguuuggcagaau

SEQ ID NO: 2253923 - RNA, 19 nt, Artificial Sequence
  Description of Artificial Sequence: Synthetic oligonucleotide
  Antisense strand to SEQ ID NO: 2253922
auucugccaaacgaggaag

SEQ ID NO: 2253924 - RNA, 19 nt, Artificial Sequence
  Description of Artificial Sequence: Synthetic oligonucleotide
  Sense strand starting at position 2286 of SEQ ID NO: 1884280
uuccucguuuggcagaauu

SEQ ID NO: 2253925 - RNA, 19 nt, Artificial Sequence
  Description of Artificial Sequence: Synthetic oligonucleotide
  Antisense strand to SEQ ID NO: 2253924
aauucugccaaacgaggaa

SEQ ID NO: 2253926 - RNA, 19 nt, Artificial Sequence
  Description of Artificial Sequence: Synthetic oligonucleotide
  Sense strand starting at position 2413 of SEQ ID NO: 1884280
ggacgcucacccugagaaa

SEQ ID NO: 2253927 - RNA, 19 nt, Artificial Sequence
  Description of Artificial Sequence: Synthetic oligonucleotide
  Antisense strand to SEQ ID NO: 2253926
uuucucagggugagcgucc

SEQ ID NO: 2253928 - RNA, 19 nt, Artificial Sequence
  Description of Artificial Sequence: Synthetic oligonucleotide
  Sense strand starting at position 2457 of SEQ ID NO: 1884280
ccuguacacuguuguaaag

SEQ ID NO: 2253929 - RNA, 19 nt, Artificial Sequence
  Description of Artificial Sequence: Synthetic oligonucleotide
  Antisense strand to SEQ ID NO: 2253928
cuuuacaacaguguacagg

SEQ ID NO: 2253930 - RNA, 19 nt, Artificial Sequence
  Description of Artificial Sequence: Synthetic oligonucleotide
  Sense strand starting at position 2459 of SEQ ID NO: 1884280
uguacacuguuguaaagau

SEQ ID NO: 2253931 - RNA, 19 nt, Artificial Sequence
  Description of Artificial Sequence: Synthetic oligonucleotide
  Antisense strand to SEQ ID NO: 2253930
aucuuuacaacaguguaca

SEQ ID NO: 2253932 - RNA, 19 nt, Artificial Sequence
  Description of Artificial Sequence: Synthetic oligonucleotide
  Sense strand starting at position 2504 of SEQ ID NO: 1884280
uuuguuaaaccacguaaua

SEQ ID NO: 2253933 - RNA, 19 nt, Artificial Sequence
  Description of Artificial Sequence: Synthetic oligonucleotide
  Antisense strand to SEQ ID NO: 2253932
uauuacgugguuuaacaaa

SEQ ID NO: 2253934 - RNA, 19 nt, Artificial Sequence
  Description of Artificial Sequence: Synthetic oligonucleotide
  Sense strand starting at position 2557 of SEQ ID NO: 1884280
ucaggaguauguuggaucu

SEQ ID NO: 2253935 - RNA, 19 nt, Artificial Sequence
  Description of Artificial Sequence: Synthetic oligonucleotide
  Antisense strand to SEQ ID NO: 2253934
agauccaacauacuccuga

SEQ ID NO: 2253936 - RNA, 19 nt, Artificial Sequence
  Description of Artificial Sequence: Synthetic oligonucleotide
  Sense strand starting at position 2559 of SEQ ID NO: 1884280
aggaguauguuggaucucu

SEQ ID NO: 2253937 - RNA, 19 nt, Artificial Sequence
  Description of Artificial Sequence: Synthetic oligonucleotide
  Antisense strand to SEQ ID NO: 2253936
agagauccaacauacuccu

SEQ ID NO: 2253938 - RNA, 19 nt, Artificial Sequence
  Description of Artificial Sequence: Synthetic oligonucleotide
  Sense strand starting at position 2639 of SEQ ID NO: 1884280
aaacguacguucucacuua

SEQ ID NO: 2253939 - RNA, 19 nt, Artificial Sequence
  Description of Artificial Sequence: Synthetic oligonucleotide
  Antisense strand to SEQ ID NO: 2253938
uaagugagaacguacguuu

SEQ ID NO: 2253940 - RNA, 19 nt, Artificial Sequence
  Description of Artificial Sequence: Synthetic oligonucleotide
  Sense strand starting at position 2640 of SEQ ID NO: 1884280
aacguacguucucacuuau

SEQ ID NO: 2253941 - RNA, 19 nt, Artificial Sequence
  Description of Artificial Sequence: Synthetic oligonucleotide
  Antisense strand to SEQ ID NO: 2253940
auaagugagaacguacguu

SEQ ID NO: 2253942 - RNA, 19 nt, Artificial Sequence
  Description of Artificial Sequence: Synthetic oligonucleotide
  Sense strand starting at position 2914 of SEQ ID NO: 1884280
uuugcagucucagcuauuu

SEQ ID NO: 2253943 - RNA, 19 nt, Artificial Sequence
  Description of Artificial Sequence: Synthetic oligonucleotide
  Antisense strand to SEQ ID NO: 2253942
aaauagcugagacugcaaa

SEQ ID NO: 2253944 - RNA, 19 nt, Artificial Sequence
  Description of Artificial Sequence: Synthetic oligonucleotide
  Sense strand starting at position 3171 of SEQ ID NO: 1884280
gcuauugaaguuuaaguua

SEQ ID NO: 2253945 - RNA, 19 nt, Artificial Sequence
  Description of Artificial Sequence: Synthetic oligonucleotide
  Antisense strand to SEQ ID NO: 2253944
uaacuuaaacuucaauagc

SEQ ID NO: 2253946 - RNA, 19 nt, Artificial Sequence
  Description of Artificial Sequence: Synthetic oligonucleotide
  Sense strand starting at position 3569 of SEQ ID NO: 1884280
ugaugauaaucccacuugu

SEQ ID NO: 2253947 - RNA, 19 nt, Artificial Sequence
  Description of Artificial Sequence: Synthetic oligonucleotide
  Antisense strand to SEQ ID NO: 2253946
acaagugggauuaucauca

SEQ ID NO: 2253948 - RNA, 19 nt, Artificial Sequence
  Description of Artificial Sequence: Synthetic oligonucleotide
  Sense strand starting at position 3660 of SEQ ID NO: 1884280
agaagacaucauggcaagu

SEQ ID NO: 2253949 - RNA, 19 nt, Artificial Sequence
  Description of Artificial Sequence: Synthetic oligonucleotide
  Antisense strand to SEQ ID NO: 2253948
acuugccaugaugucuucu

SEQ ID NO: 2253950 - RNA, 19 nt, Artificial Sequence
  Description of Artificial Sequence: Synthetic oligonucleotide
  Sense strand starting at position 3671 of SEQ ID NO: 1884280
uggcaaguacaguaaugau

SEQ ID NO: 2253951 - RNA, 19 nt, Artificial Sequence
  Description of Artificial Sequence: Synthetic oligonucleotide
  Antisense strand to SEQ ID NO: 2253950
aucauuacuguacuugcca

SEQ ID NO: 2253952 - RNA, 19 nt, Artificial Sequence
  Description of Artificial Sequence: Synthetic oligonucleotide
  Sense strand starting at position 154 of SEQ ID NO: 1884281
gugccuuacauaugguaag

SEQ ID NO: 2253953 - RNA, 19 nt, Artificial Sequence
  Description of Artificial Sequence: Synthetic oligonucleotide
  Antisense strand to SEQ ID NO: 2253952
cuuaccauauguaaggcac

SEQ ID NO: 2253954 - RNA, 19 nt, Artificial Sequence
  Description of Artificial Sequence: Synthetic oligonucleotide
  Sense strand starting at position 349 of SEQ ID NO: 1884281
ugcacuuaugacuaccuga

SEQ ID NO: 2253955 - RNA, 19 nt, Artificial Sequence
  Description of Artificial Sequence: Synthetic oligonucleotide
  Antisense strand to SEQ ID NO: 2253954
ucagguagucauaagugca

SEQ ID NO: 2253956 - RNA, 19 nt, Artificial Sequence
  Description of Artificial Sequence: Synthetic oligonucleotide
  Sense strand starting at position 384 of SEQ ID NO: 1884281
uauuguucguugucuauuu

SEQ ID NO: 2253957 - RNA, 19 nt, Artificial Sequence
  Description of Artificial Sequence: Synthetic oligonucleotide
  Antisense strand to SEQ ID NO: 2253956
aaauagacaacgaacaaua

SEQ ID NO: 2253958 - RNA, 19 nt, Artificial Sequence
  Description of Artificial Sequence: Synthetic oligonucleotide
  Sense strand starting at position 447 of SEQ ID NO: 1884281
gcugcucuauuuccagaga

SEQ ID NO: 2253959 - RNA, 19 nt, Artificial Sequence
  Description of Artificial Sequence: Synthetic oligonucleotide
  Antisense strand to SEQ ID NO: 2253958
ucucuggaaauagagcagc

SEQ ID NO: 2253960 - RNA, 19 nt, Artificial Sequence
  Description of Artificial Sequence: Synthetic oligonucleotide
  Sense strand starting at position 458 of SEQ ID NO: 1884281
uccagagauuucugacuca

SEQ ID NO: 2253961 - RNA, 19 nt, Artificial Sequence
  Description of Artificial Sequence: Synthetic oligonucleotide
  Antisense strand to SEQ ID NO: 2253960
ugagucagaaaucucugga

SEQ ID NO: 2253962 - RNA, 19 nt, Artificial Sequence
  Description of Artificial Sequence: Synthetic oligonucleotide
  Sense strand starting at position 639 of SEQ ID NO: 1884281
gugacuuguccuuggacac

SEQ ID NO: 2253963 - RNA, 19 nt, Artificial Sequence
  Description of Artificial Sequence: Synthetic oligonucleotide
  Antisense strand to SEQ ID NO: 2253962
guguccaaggacaagucac

SEQ ID NO: 2253964 - RNA, 19 nt, Artificial Sequence
  Description of Artificial Sequence: Synthetic oligonucleotide
  Sense strand starting at position 776 of SEQ ID NO: 1884281
cgagcuccuguauaaauac

SEQ ID NO: 2253965 - RNA, 19 nt, Artificial Sequence
  Description of Artificial Sequence: Synthetic oligonucleotide
  Antisense strand to SEQ ID NO: 2253964
guauuuauacaggagcucg

SEQ ID NO: 2253966 - RNA, 19 nt, Artificial Sequence
  Description of Artificial Sequence: Synthetic oligonucleotide
  Sense strand starting at position 796 of SEQ ID NO: 1884281
cccugaagugugcacagua

SEQ ID NO: 2253967 - RNA, 19 nt, Artificial Sequence
  Description of Artificial Sequence: Synthetic oligonucleotide
  Antisense strand to SEQ ID NO: 2253966
uacugugcacacuucaggg

SEQ ID NO: 2253968 - RNA, 19 nt, Artificial Sequence
  Description of Artificial Sequence: Synthetic oligonucleotide
  Sense strand starting at position 850 of SEQ ID NO: 1884281
cggaguuugagaggcauua

SEQ ID NO: 2253969 - RNA, 19 nt, Artificial Sequence
  Description of Artificial Sequence: Synthetic oligonucleotide
  Antisense strand to SEQ ID NO: 2253968
uaaugccucucaaacuccg

SEQ ID NO: 2253970 - RNA, 19 nt, Artificial Sequence
  Description of Artificial Sequence: Synthetic oligonucleotide
  Sense strand starting at position 860 of SEQ ID NO: 1884281
gaggcauuauagucuagua

SEQ ID NO: 2253971 - RNA, 19 nt, Artificial Sequence
  Description of Artificial Sequence: Synthetic oligonucleotide
  Antisense strand to SEQ ID NO: 2253970
uacuagacuauaaugccuc

SEQ ID NO: 2253972 - RNA, 19 nt, Artificial Sequence
  Description of Artificial Sequence: Synthetic oligonucleotide
  Sense strand starting at position 862 of SEQ ID NO: 1884281
ggcauuauagucuaguaau

SEQ ID NO: 2253973 - RNA, 19 nt, Artificial Sequence
  Description of Artificial Sequence: Synthetic oligonucleotide
  Antisense strand to SEQ ID NO: 2253972
auuacuagacuauaaugcc

SEQ ID NO: 2253974 - RNA, 19 nt, Artificial Sequence
  Description of Artificial Sequence: Synthetic oligonucleotide
  Sense strand starting at position 921 of SEQ ID NO: 1884281
agcagucagauacgaugau

SEQ ID NO: 2253975 - RNA, 19 nt, Artificial Sequence
  Description of Artificial Sequence: Synthetic oligonucleotide
  Antisense strand to SEQ ID NO: 2253974
aucaucguaucugacugcu

SEQ ID NO: 2253976 - RNA, 19 nt, Artificial Sequence
  Description of Artificial Sequence: Synthetic oligonucleotide
  Sense strand starting at position 1017 of SEQ ID NO: 1884281
cugaaagcuuccucugcaa

SEQ ID NO: 2253977 - RNA, 19 nt, Artificial Sequence
  Description of Artificial Sequence: Synthetic oligonucleotide
  Antisense strand to SEQ ID NO: 2253976
uugcagaggaagcuuucag

SEQ ID NO: 2253978 - RNA, 19 nt, Artificial Sequence
  Description of Artificial Sequence: Synthetic oligonucleotide
  Sense strand starting at position 1112 of SEQ ID NO: 1884281
cuaucaaguuuagugacaa

SEQ ID NO: 2253979 - RNA, 19 nt, Artificial Sequence
  Description of Artificial Sequence: Synthetic oligonucleotide
  Antisense strand to SEQ ID NO: 2253978
uugucacuaaacuugauag

SEQ ID NO: 2253980 - RNA, 19 nt, Artificial Sequence
  Description of Artificial Sequence: Synthetic oligonucleotide
  Sense strand starting at position 1152 of SEQ ID NO: 1884281
uccagugugguauagaauc

SEQ ID NO: 2253981 - RNA, 19 nt, Artificial Sequence
  Description of Artificial Sequence: Synthetic oligonucleotide
  Antisense strand to SEQ ID NO: 2253980
gauucuauaccacacugga

SEQ ID NO: 2253982 - RNA, 19 nt, Artificial Sequence
  Description of Artificial Sequence: Synthetic oligonucleotide
  Sense strand starting at position 1336 of SEQ ID NO: 1884281
ccuagugcugugggaacaa

SEQ ID NO: 2253983 - RNA, 19 nt, Artificial Sequence
  Description of Artificial Sequence: Synthetic oligonucleotide
  Antisense strand to SEQ ID NO: 2253982
uuguucccacagcacuagg

SEQ ID NO: 2253984 - RNA, 19 nt, Artificial Sequence
  Description of Artificial Sequence: Synthetic oligonucleotide
  Sense strand starting at position 1412 of SEQ ID NO: 1884281
gcagcaacugguuaucuua

SEQ ID NO: 2253985 - RNA, 19 nt, Artificial Sequence
  Description of Artificial Sequence: Synthetic oligonucleotide
  Antisense strand to SEQ ID NO: 2253984
uaagauaaccaguugcugc

SEQ ID NO: 2253986 - RNA, 19 nt, Artificial Sequence
  Description of Artificial Sequence: Synthetic oligonucleotide
  Sense strand starting at position 1414 of SEQ ID NO: 1884281
agcaacugguuaucuuaua

SEQ ID NO: 2253987 - RNA, 19 nt, Artificial Sequence
  Description of Artificial Sequence: Synthetic oligonucleotide
  Antisense strand to SEQ ID NO: 2253986
uauaagauaaccaguugcu

SEQ ID NO: 2253988 - RNA, 19 nt, Artificial Sequence
  Description of Artificial Sequence: Synthetic oligonucleotide
  Sense strand starting at position 1415 of SEQ ID NO: 1884281
gcaacugguuaucuuauaa

SEQ ID NO: 2253989 - RNA, 19 nt, Artificial Sequence
  Description of Artificial Sequence: Synthetic oligonucleotide
  Antisense strand to SEQ ID NO: 2253988
uuauaagauaaccaguugc

SEQ ID NO: 2253990 - RNA, 19 nt, Artificial Sequence
  Description of Artificial Sequence: Synthetic oligonucleotide
  Sense strand starting at position 1428 of SEQ ID NO: 1884281
uuauaaauguguccacgau

SEQ ID NO: 2253991 - RNA, 19 nt, Artificial Sequence
  Description of Artificial Sequence: Synthetic oligonucleotide
  Antisense strand to SEQ ID NO: 2253990
aucguggacacauuuauaa

SEQ ID NO: 2253992 - RNA, 19 nt, Artificial Sequence
  Description of Artificial Sequence: Synthetic oligonucleotide
  Sense strand starting at position 1429 of SEQ ID NO: 1884281
uauaaauguguccacgaug

SEQ ID NO: 2253993 - RNA, 19 nt, Artificial Sequence
  Description of Artificial Sequence: Synthetic oligonucleotide
  Antisense strand to SEQ ID NO: 2253992
caucguggacacauuuaua

SEQ ID NO: 2253994 - RNA, 19 nt, Artificial Sequence
  Description of Artificial Sequence: Synthetic oligonucleotide
  Sense strand starting at position 1432 of SEQ ID NO: 1884281
aaauguguccacgaugacu

SEQ ID NO: 2253995 - RNA, 19 nt, Artificial Sequence
  Description of Artificial Sequence: Synthetic oligonucleotide
  Antisense strand to SEQ ID NO: 2253994
agucaucguggacacauuu

SEQ ID NO: 2253996 - RNA, 19 nt, Artificial Sequence
  Description of Artificial Sequence: Synthetic oligonucleotide
  Sense strand starting at position 1440 of SEQ ID NO: 1884281
ccacgaugacuuggucacu

SEQ ID NO: 2253997 - RNA, 19 nt, Artificial Sequence
  Description of Artificial Sequence: Synthetic oligonucleotide
  Antisense strand to SEQ ID NO: 2253996
agugaccaagucaucgugg

SEQ ID NO: 2253998 - RNA, 19 nt, Artificial Sequence
  Description of Artificial Sequence: Synthetic oligonucleotide
  Sense strand starting at position 1443 of SEQ ID NO: 1884281
cgaugacuuggucacuugu

SEQ ID NO: 2253999 - RNA, 19 nt, Artificial Sequence
  Description of Artificial Sequence: Synthetic oligonucleotide
  Antisense strand to SEQ ID NO: 2253998
acaagugaccaagucaucg

SEQ ID NO: 2254000 - RNA, 19 nt, Artificial Sequence
  Description of Artificial Sequence: Synthetic oligonucleotide
  Sense strand starting at position 1485 of SEQ ID NO: 1884281
ggauuccuauucucugaga

SEQ ID NO: 2254001 - RNA, 19 nt, Artificial Sequence
  Description of Artificial Sequence: Synthetic oligonucleotide
  Antisense strand to SEQ ID NO: 2254000
ucucagagaauaggaaucc

SEQ ID NO: 2254002 - RNA, 19 nt, Artificial Sequence
  Description of Artificial Sequence: Synthetic oligonucleotide
  Sense strand starting at position 1486 of SEQ ID NO: 1884281
gauuccuauucucugagag

SEQ ID NO: 2254003 - RNA, 19 nt, Artificial Sequence
  Description of Artificial Sequence: Synthetic oligonucleotide
  Antisense strand to SEQ ID NO: 2254002
cucucagagaauaggaauc

SEQ ID NO: 2254004 - RNA, 19 nt, Artificial Sequence
  Description of Artificial Sequence: Synthetic oligonucleotide
  Sense strand starting at position 1572 of SEQ ID NO: 1884281
ucccuuuaucacggaagaa

SEQ ID NO: 2254005 - RNA, 19 nt, Artificial Sequence
  Description of Artificial Sequence: Synthetic oligonucleotide
  Antisense strand to SEQ ID NO: 2254004
uucuuccgugauaaaggga

SEQ ID NO: 2254006 - RNA, 19 nt, Artificial Sequence
  Description of Artificial Sequence: Synthetic oligonucleotide
  Sense strand starting at position 2323 of SEQ ID NO: 1884281
cuuccucacguguucguua

SEQ ID NO: 2254007 - RNA, 19 nt, Artificial Sequence
  Description of Artificial Sequence: Synthetic oligonucleotide
  Antisense strand to SEQ ID NO: 2254006
uaacgaacacgugaggaag

SEQ ID NO: 2254008 - RNA, 19 nt, Artificial Sequence
  Description of Artificial Sequence: Synthetic oligonucleotide
  Sense strand starting at position 2722 of SEQ ID NO: 1884281
aacggugauccggauaaac

SEQ ID NO: 2254009 - RNA, 19 nt, Artificial Sequence
  Description of Artificial Sequence: Synthetic oligonucleotide
  Antisense strand to SEQ ID NO: 2254008
guuuauccggaucaccguu

SEQ ID NO: 2254010 - RNA, 19 nt, Artificial Sequence
  Description of Artificial Sequence: Synthetic oligonucleotide
  Sense strand starting at position 2724 of SEQ ID NO: 1884281
cggugauccggauaaacau

SEQ ID NO: 2254011 - RNA, 19 nt, Artificial Sequence
  Description of Artificial Sequence: Synthetic oligonucleotide
  Antisense strand to SEQ ID NO: 2254010
auguuuauccggaucaccg

SEQ ID NO: 2254012 - RNA, 19 nt, Artificial Sequence
  Description of Artificial Sequence: Synthetic oligonucleotide
  Sense strand starting at position 3258 of SEQ ID NO: 1884281
acacucucguaagcagaaa

SEQ ID NO: 2254013 - RNA, 19 nt, Artificial Sequence
  Description of Artificial Sequence: Synthetic oligonucleotide
  Antisense strand to SEQ ID NO: 2254012
uuucugcuuacgagagugu

SEQ ID NO: 2254014 - RNA, 19 nt, Artificial Sequence
  Description of Artificial Sequence: Synthetic oligonucleotide
  Sense strand starting at position 3552 of SEQ ID NO: 1884281
ugggaauauuaggcuuuaa

SEQ ID NO: 2254015 - RNA, 19 nt, Artificial Sequence
  Description of Artificial Sequence: Synthetic oligonucleotide
  Antisense strand to SEQ ID NO: 2254014
uuaaagccuaauauuccca

SEQ ID NO: 2254016 - RNA, 19 nt, Artificial Sequence
  Description of Artificial Sequence: Synthetic oligonucleotide
  Sense strand starting at position 3564 of SEQ ID NO: 1884281
gcuuuaauucgagaucuga

SEQ ID NO: 2254017 - RNA, 19 nt, Artificial Sequence
  Description of Artificial Sequence: Synthetic oligonucleotide
  Antisense strand to SEQ ID NO: 2254016
ucagaucucgaauuaaagc

SEQ ID NO: 2254018 - RNA, 19 nt, Artificial Sequence
  Description of Artificial Sequence: Synthetic oligonucleotide
  Sense strand starting at position 3573 of SEQ ID NO: 1884281
cgagaucugagcugguuaa

SEQ ID NO: 2254019 - RNA, 19 nt, Artificial Sequence
  Description of Artificial Sequence: Synthetic oligonucleotide
  Antisense strand to SEQ ID NO: 2254018
uuaaccagcucagaucucg

SEQ ID NO: 2254020 - RNA, 19 nt, Artificial Sequence
  Description of Artificial Sequence: Synthetic oligonucleotide
  Sense strand starting at position 3574 of SEQ ID NO: 1884281
gagaucugagcugguuaaa

SEQ ID NO: 2254021 - RNA, 19 nt, Artificial Sequence
  Description of Artificial Sequence: Synthetic oligonucleotide
  Antisense strand to SEQ ID NO: 2254020
uuuaaccagcucagaucuc

SEQ ID NO: 2254022 - RNA, 19 nt, Artificial Sequence
  Description of Artificial Sequence: Synthetic oligonucleotide
  Sense strand starting at position 3712 of SEQ ID NO: 1884281
uuguaaaggcuguaccaua

SEQ ID NO: 2254023 - RNA, 19 nt, Artificial Sequence
  Description of Artificial Sequence: Synthetic oligonucleotide
  Antisense strand to SEQ ID NO: 2254022
uaugguacagccuuuacaa

SEQ ID NO: 2254024 - RNA, 19 nt, Artificial Sequence
  Description of Artificial Sequence: Synthetic oligonucleotide
  Sense strand starting at position 3923 of SEQ ID NO: 1884281
uuaagugaguuucuaggua

SEQ ID NO: 2254025 - RNA, 19 nt, Artificial Sequence
  Description of Artificial Sequence: Synthetic oligonucleotide
  Antisense strand to SEQ ID NO: 2254024
uaccuagaaacucacuuaa

SEQ ID NO: 2254026 - RNA, 19 nt, Artificial Sequence
  Description of Artificial Sequence: Synthetic oligonucleotide
  Sense strand starting at position 3927 of SEQ ID NO: 1884281
gugaguuucuagguauacc

SEQ ID NO: 2254027 - RNA, 19 nt, Artificial Sequence
  Description of Artificial Sequence: Synthetic oligonucleotide
  Antisense strand to SEQ ID NO: 2254026
gguauaccuagaaacucac

SEQ ID NO: 2254028 - RNA, 19 nt, Artificial Sequence
  Description of Artificial Sequence: Synthetic oligonucleotide
  Sense strand starting at position 3930 of SEQ ID NO: 1884281
aguuucuagguauaccuua

SEQ ID NO: 2254029 - RNA, 19 nt, Artificial Sequence
  Description of Artificial Sequence: Synthetic oligonucleotide
  Antisense strand to SEQ ID NO: 2254028
uaagguauaccuagaaacu

SEQ ID NO: 2254030 - RNA, 19 nt, Artificial Sequence
  Description of Artificial Sequence: Synthetic oligonucleotide
  Sense strand starting at position 3963 of SEQ ID NO: 1884281
agguacaugucaucuguua

SEQ ID NO: 2254031 - RNA, 19 nt, Artificial Sequence
  Description of Artificial Sequence: Synthetic oligonucleotide
  Antisense strand to SEQ ID NO: 2254030
uaacagaugacauguaccu

SEQ ID NO: 2254032 - RNA, 19 nt, Artificial Sequence
  Description of Artificial Sequence: Synthetic oligonucleotide
  Sense strand starting at position 337 of SEQ ID NO: 1884282
cuuccuaaggcugaaugau

SEQ ID NO: 2254033 - RNA, 19 nt, Artificial Sequence
  Description of Artificial Sequence: Synthetic oligonucleotide
  Antisense strand to SEQ ID NO: 2254032
aucauucagccuuaggaag

SEQ ID NO: 2254034 - RNA, 19 nt, Artificial Sequence
  Description of Artificial Sequence: Synthetic oligonucleotide
  Sense strand starting at position 358 of SEQ ID NO: 1884282
ucuauuguauaugacacau

SEQ ID NO: 2254035 - RNA, 19 nt, Artificial Sequence
  Description of Artificial Sequence: Synthetic oligonucleotide
  Antisense strand to SEQ ID NO: 2254034
augugucauauacaauaga

SEQ ID NO: 2254036 - RNA, 19 nt, Artificial Sequence
  Description of Artificial Sequence: Synthetic oligonucleotide
  Sense strand starting at position 508 of SEQ ID NO: 1884282
agugguacugcuggaucau

SEQ ID NO: 2254037 - RNA, 19 nt, Artificial Sequence
  Description of Artificial Sequence: Synthetic oligonucleotide
  Antisense strand to SEQ ID NO: 2254036
augauccagcaguaccacu

SEQ ID NO: 2254038 - RNA, 19 nt, Artificial Sequence
  Description of Artificial Sequence: Synthetic oligonucleotide
  Sense strand starting at position 797 of SEQ ID NO: 1884282
gccuguaacccucgucacu

SEQ ID NO: 2254039 - RNA, 19 nt, Artificial Sequence
  Description of Artificial Sequence: Synthetic oligonucleotide
  Antisense strand to SEQ ID NO: 2254038
agugacgaggguuacaggc

SEQ ID NO: 2254040 - RNA, 19 nt, Artificial Sequence
  Description of Artificial Sequence: Synthetic oligonucleotide
  Sense strand starting at position 985 of SEQ ID NO: 1884282
ucaaguucucuccaugaug

SEQ ID NO: 2254041 - RNA, 19 nt, Artificial Sequence
  Description of Artificial Sequence: Synthetic oligonucleotide
  Antisense strand to SEQ ID NO: 2254040
caucauggagagaacuuga

SEQ ID NO: 2254042 - RNA, 19 nt, Artificial Sequence
  Description of Artificial Sequence: Synthetic oligonucleotide
  Sense strand starting at position 987 of SEQ ID NO: 1884282
aaguucucuccaugaugag

SEQ ID NO: 2254043 - RNA, 19 nt, Artificial Sequence
  Description of Artificial Sequence: Synthetic oligonucleotide
  Antisense strand to SEQ ID NO: 2254042
cucaucauggagagaacuu

SEQ ID NO: 2254044 - RNA, 19 nt, Artificial Sequence
  Description of Artificial Sequence: Synthetic oligonucleotide
  Sense strand starting at position 1126 of SEQ ID NO: 1884282
aagaaauauuucgguggca

SEQ ID NO: 2254045 - RNA, 19 nt, Artificial Sequence
  Description of Artificial Sequence: Synthetic oligonucleotide
  Antisense strand to SEQ ID NO: 2254044
ugccaccgaaauauuucuu

SEQ ID NO: 2254046 - RNA, 19 nt, Artificial Sequence
  Description of Artificial Sequence: Synthetic oligonucleotide
  Sense strand starting at position 1305 of SEQ ID NO: 1884282
uaguaaagcuaaugaagga

SEQ ID NO: 2254047 - RNA, 19 nt, Artificial Sequence
  Description of Artificial Sequence: Synthetic oligonucleotide
  Antisense strand to SEQ ID NO: 2254046
uccuucauuagcuuuacua

SEQ ID NO: 2254048 - RNA, 19 nt, Artificial Sequence
  Description of Artificial Sequence: Synthetic oligonucleotide
  Sense strand starting at position 1333 of SEQ ID NO: 1884282
ugaagagcugccgauguaa

SEQ ID NO: 2254049 - RNA, 19 nt, Artificial Sequence
  Description of Artificial Sequence: Synthetic oligonucleotide
  Antisense strand to SEQ ID NO: 2254048
uuacaucggcagcucuuca

SEQ ID NO: 2254050 - RNA, 19 nt, Artificial Sequence
  Description of Artificial Sequence: Synthetic oligonucleotide
  Sense strand starting at position 1398 of SEQ ID NO: 1884282
acuauuuccucagaaggaa

SEQ ID NO: 2254051 - RNA, 19 nt, Artificial Sequence
  Description of Artificial Sequence: Synthetic oligonucleotide
  Antisense strand to SEQ ID NO: 2254050
uuccuucugaggaaauagu

SEQ ID NO: 2254052 - RNA, 19 nt, Artificial Sequence
  Description of Artificial Sequence: Synthetic oligonucleotide
  Sense strand starting at position 1437 of SEQ ID NO: 1884282
guaauaaggccuugugcaa

SEQ ID NO: 2254053 - RNA, 19 nt, Artificial Sequence
  Description of Artificial Sequence: Synthetic oligonucleotide
  Antisense strand to SEQ ID NO: 2254052
uugcacaaggccuuauuac

SEQ ID NO: 2254054 - RNA, 19 nt, Artificial Sequence
  Description of Artificial Sequence: Synthetic oligonucleotide
  Sense strand starting at position 1449 of SEQ ID NO: 1884282
ugugcaaguuucugacucu

SEQ ID NO: 2254055 - RNA, 19 nt, Artificial Sequence
  Description of Artificial Sequence: Synthetic oligonucleotide
  Antisense strand to SEQ ID NO: 2254054
agagucagaaacuugcaca

SEQ ID NO: 2254056 - RNA, 19 nt, Artificial Sequence
  Description of Artificial Sequence: Synthetic oligonucleotide
  Sense strand starting at position 1450 of SEQ ID NO: 1884282
gugcaaguuucugacucuu

SEQ ID NO: 2254057 - RNA, 19 nt, Artificial Sequence
  Description of Artificial Sequence: Synthetic oligonucleotide
  Antisense strand to SEQ ID NO: 2254056
aagagucagaaacuugcac

SEQ ID NO: 2254058 - RNA, 19 nt, Artificial Sequence
  Description of Artificial Sequence: Synthetic oligonucleotide
  Sense strand starting at position 1452 of SEQ ID NO: 1884282
gcaaguuucugacucuuaa

SEQ ID NO: 2254059 - RNA, 19 nt, Artificial Sequence
  Description of Artificial Sequence: Synthetic oligonucleotide
  Antisense strand to SEQ ID NO: 2254058
uuaagagucagaaacuugc

SEQ ID NO: 2254060 - RNA, 19 nt, Artificial Sequence
  Description of Artificial Sequence: Synthetic oligonucleotide
  Sense strand starting at position 1462 of SEQ ID NO: 1884282
gacucuuaaggaugugaau

SEQ ID NO: 2254061 - RNA, 19 nt, Artificial Sequence
  Description of Artificial Sequence: Synthetic oligonucleotide
  Antisense strand to SEQ ID NO: 2254060
auucacauccuuaagaguc

SEQ ID NO: 2254062 - RNA, 19 nt, Artificial Sequence
  Description of Artificial Sequence: Synthetic oligonucleotide
  Sense strand starting at position 1464 of SEQ ID NO: 1884282
cucuuaaggaugugaaugu

SEQ ID NO: 2254063 - RNA, 19 nt, Artificial Sequence
  Description of Artificial Sequence: Synthetic oligonucleotide
  Antisense strand to SEQ ID NO: 2254062
acauucacauccuuaagag

SEQ ID NO: 2254064 - RNA, 19 nt, Artificial Sequence
  Description of Artificial Sequence: Synthetic oligonucleotide
  Sense strand starting at position 1465 of SEQ ID NO: 1884282
ucuuaaggaugugaaugua

SEQ ID NO: 2254065 - RNA, 19 nt, Artificial Sequence
  Description of Artificial Sequence: Synthetic oligonucleotide
  Antisense strand to SEQ ID NO: 2254064
uacauucacauccuuaaga

SEQ ID NO: 2254066 - RNA, 19 nt, Artificial Sequence
  Description of Artificial Sequence: Synthetic oligonucleotide
  Sense strand starting at position 1473 of SEQ ID NO: 1884282
augugaauguacugccuua

SEQ ID NO: 2254067 - RNA, 19 nt, Artificial Sequence
  Description of Artificial Sequence: Synthetic oligonucleotide
  Antisense strand to SEQ ID NO: 2254066
uaaggcaguacauucacau

SEQ ID NO: 2254068 - RNA, 19 nt, Artificial Sequence
  Description of Artificial Sequence: Synthetic oligonucleotide
  Sense strand starting at position 1537 of SEQ ID NO: 1884282
ucaugaagguauccuugca

SEQ ID NO: 2254069 - RNA, 19 nt, Artificial Sequence
  Description of Artificial Sequence: Synthetic oligonucleotide
  Antisense strand to SEQ ID NO: 2254068
ugcaaggauaccuucauga

SEQ ID NO: 2254070 - RNA, 19 nt, Artificial Sequence
  Description of Artificial Sequence: Synthetic oligonucleotide
  Sense strand starting at position 1542 of SEQ ID NO: 1884282
aagguauccuugcaagugu

SEQ ID NO: 2254071 - RNA, 19 nt, Artificial Sequence
  Description of Artificial Sequence: Synthetic oligonucleotide
  Antisense strand to SEQ ID NO: 2254070
acacuugcaaggauaccuu

SEQ ID NO: 2254072 - RNA, 19 nt, Artificial Sequence
  Description of Artificial Sequence: Synthetic oligonucleotide
  Sense strand starting at position 1630 of SEQ ID NO: 1884282
ggaagcgcuuccucagacu

SEQ ID NO: 2254073 - RNA, 19 nt, Artificial Sequence
  Description of Artificial Sequence: Synthetic oligonucleotide
  Antisense strand to SEQ ID NO: 2254072
agucugaggaagcgcuucc

SEQ ID NO: 2254074 - RNA, 19 nt, Artificial Sequence
  Description of Artificial Sequence: Synthetic oligonucleotide
  Sense strand starting at position 1713 of SEQ ID NO: 1884282
caaagauccuccggguucu

SEQ ID NO: 2254075 - RNA, 19 nt, Artificial Sequence
  Description of Artificial Sequence: Synthetic oligonucleotide
  Antisense strand to SEQ ID NO: 2254074
agaacccggaggaucuuug

SEQ ID NO: 2254076 - RNA, 19 nt, Artificial Sequence
  Description of Artificial Sequence: Synthetic oligonucleotide
  Sense strand starting at position 2613 of SEQ ID NO: 1884282
cccggcuuuccaggaggua

SEQ ID NO: 2254077 - RNA, 19 nt, Artificial Sequence
  Description of Artificial Sequence: Synthetic oligonucleotide
  Antisense strand to SEQ ID NO: 2254076
uaccuccuggaaagccggg

SEQ ID NO: 2254078 - RNA, 19 nt, Artificial Sequence
  Description of Artificial Sequence: Synthetic oligonucleotide
  Sense strand starting at position 2646 of SEQ ID NO: 1884282
ccuccuucccagggacaaa

SEQ ID NO: 2254079 - RNA, 19 nt, Artificial Sequence
  Description of Artificial Sequence: Synthetic oligonucleotide
  Antisense strand to SEQ ID NO: 2254078
uuugucccugggaaggagg

SEQ ID NO: 2254080 - RNA, 19 nt, Artificial Sequence
  Description of Artificial Sequence: Synthetic oligonucleotide
  Sense strand starting at position 2758 of SEQ ID NO: 1884282
ccguauuugcuguacacaa

SEQ ID NO: 2254081 - RNA, 19 nt, Artificial Sequence
  Description of Artificial Sequence: Synthetic oligonucleotide
  Antisense strand to SEQ ID NO: 2254080
uuguguacagcaaauacgg

SEQ ID NO: 2254082 - RNA, 19 nt, Artificial Sequence
  Description of Artificial Sequence: Synthetic oligonucleotide
  Sense strand starting at position 2801 of SEQ ID NO: 1884282
ugcggagguauuuguuaag

SEQ ID NO: 2254083 - RNA, 19 nt, Artificial Sequence
  Description of Artificial Sequence: Synthetic oligonucleotide
  Antisense strand to SEQ ID NO: 2254082
cuuaacaaauaccuccgca

SEQ ID NO: 2254084 - RNA, 19 nt, Artificial Sequence
  Description of Artificial Sequence: Synthetic oligonucleotide
  Sense strand starting at position 2804 of SEQ ID NO: 1884282
ggagguauuuguuaagcac

SEQ ID NO: 2254085 - RNA, 19 nt, Artificial Sequence
  Description of Artificial Sequence: Synthetic oligonucleotide
  Antisense strand to SEQ ID NO: 2254084
gugcuuaacaaauaccucc

SEQ ID NO: 2254086 - RNA, 19 nt, Artificial Sequence
  Description of Artificial Sequence: Synthetic oligonucleotide
  Sense strand starting at position 3492 of SEQ ID NO: 1884282
gcccaagaguugucauuuc

SEQ ID NO: 2254087 - RNA, 19 nt, Artificial Sequence
  Description of Artificial Sequence: Synthetic oligonucleotide
  Antisense strand to SEQ ID NO: 2254086
gaaaugacaacucuugggc

SEQ ID NO: 2254088 - RNA, 19 nt, Artificial Sequence
  Description of Artificial Sequence: Synthetic oligonucleotide
  Sense strand starting at position 3499 of SEQ ID NO: 1884282
aguugucauuucuguagca

SEQ ID NO: 2254089 - RNA, 19 nt, Artificial Sequence
  Description of Artificial Sequence: Synthetic oligonucleotide
  Antisense strand to SEQ ID NO: 2254088
ugcuacagaaaugacaacu

SEQ ID NO: 2254090 - RNA, 19 nt, Artificial Sequence
  Description of Artificial Sequence: Synthetic oligonucleotide
  Sense strand starting at position 3504 of SEQ ID NO: 1884282
ucauuucuguagcaaagca

SEQ ID NO: 2254091 - RNA, 19 nt, Artificial Sequence
  Description of Artificial Sequence: Synthetic oligonucleotide
  Antisense strand to SEQ ID NO: 2254090
ugcuuugcuacagaaauga

SEQ ID NO: 2254092 - RNA, 19 nt, Artificial Sequence
  Description of Artificial Sequence: Synthetic oligonucleotide
  Sense strand starting at position 3520 of SEQ ID NO: 1884282
gcagcuaagcaauauucuu

SEQ ID NO: 2254093 - RNA, 19 nt, Artificial Sequence
  Description of Artificial Sequence: Synthetic oligonucleotide
  Antisense strand to SEQ ID NO: 2254092
aagaauauugcuuagcugc

SEQ ID NO: 2254094 - RNA, 19 nt, Artificial Sequence
  Description of Artificial Sequence: Synthetic oligonucleotide
  Sense strand starting at position 3548 of SEQ ID NO: 1884282
accuaaaugugauuaggug

SEQ ID NO: 2254095 - RNA, 19 nt, Artificial Sequence
  Description of Artificial Sequence: Synthetic oligonucleotide
  Antisense strand to SEQ ID NO: 2254094
caccuaaucacauuuaggu

SEQ ID NO: 2254096 - RNA, 19 nt, Artificial Sequence
  Description of Artificial Sequence: Synthetic oligonucleotide
  Sense strand starting at position 3563 of SEQ ID NO: 1884282
ggugcagcaucauuaagaa

SEQ ID NO: 2254097 - RNA, 19 nt, Artificial Sequence
  Description of Artificial Sequence: Synthetic oligonucleotide
  Antisense strand to SEQ ID NO: 2254096
uucuuaaugaugcugcacc

SEQ ID NO: 2254098 - RNA, 19 nt, Artificial Sequence
  Description of Artificial Sequence: Synthetic oligonucleotide
  Sense strand starting at position 3927 of SEQ ID NO: 1884282
uggauuacuugaugaacau

SEQ ID NO: 2254099 - RNA, 19 nt, Artificial Sequence
  Description of Artificial Sequence: Synthetic oligonucleotide
  Antisense strand to SEQ ID NO: 2254098
auguucaucaaguaaucca

SEQ ID NO: 2254100 - RNA, 19 nt, Artificial Sequence
  Description of Artificial Sequence: Synthetic oligonucleotide
  Sense strand starting at position 3963 of SEQ ID NO: 1884282
auugauaucagacgaguuc

SEQ ID NO: 2254101 - RNA, 19 nt, Artificial Sequence
  Description of Artificial Sequence: Synthetic oligonucleotide
  Antisense strand to SEQ ID NO: 2254100
gaacucgucugauaucaau

SEQ ID NO: 2254102 - RNA, 19 nt, Artificial Sequence
  Description of Artificial Sequence: Synthetic oligonucleotide
  Sense strand starting at position 3964 of SEQ ID NO: 1884282
uugauaucagacgaguucu

SEQ ID NO: 2254103 - RNA, 19 nt, Artificial Sequence
  Description of Artificial Sequence: Synthetic oligonucleotide
  Antisense strand to SEQ ID NO: 2254102
agaacucgucugauaucaa

SEQ ID NO: 2254104 - RNA, 19 nt, Artificial Sequence
  Description of Artificial Sequence: Synthetic oligonucleotide
  Sense strand starting at position 3974 of SEQ ID NO: 1884282
acgaguucuuucugugacu

SEQ ID NO: 2254105 - RNA, 19 nt, Artificial Sequence
  Description of Artificial Sequence: Synthetic oligonucleotide
  Antisense strand to SEQ ID NO: 2254104
agucacagaaagaacucgu

SEQ ID NO: 2254106 - RNA, 19 nt, Artificial Sequence
  Description of Artificial Sequence: Synthetic oligonucleotide
  Sense strand starting at position 3975 of SEQ ID NO: 1884282
cgaguucuuucugugacug

SEQ ID NO: 2254107 - RNA, 19 nt, Artificial Sequence
  Description of Artificial Sequence: Synthetic oligonucleotide
  Antisense strand to SEQ ID NO: 2254106
cagucacagaaagaacucg

SEQ ID NO: 2254108 - RNA, 19 nt, Artificial Sequence
  Description of Artificial Sequence: Synthetic oligonucleotide
  Sense strand starting at position 3976 of SEQ ID NO: 1884282
gaguucuuucugugacuga

SEQ ID NO: 2254109 - RNA, 19 nt, Artificial Sequence
  Description of Artificial Sequence: Synthetic oligonucleotide
  Antisense strand to SEQ ID NO: 2254108
ucagucacagaaagaacuc

SEQ ID NO: 2254110 - RNA, 19 nt, Artificial Sequence
  Description of Artificial Sequence: Synthetic oligonucleotide
  Sense strand starting at position 3980 of SEQ ID NO: 1884282
ucuuucugugacugaggga

SEQ ID NO: 2254111 - RNA, 19 nt, Artificial Sequence
  Description of Artificial Sequence: Synthetic oligonucleotide
  Antisense strand to SEQ ID NO: 2254110
ucccucagucacagaaaga

SEQ ID NO: 2254112 - RNA, 19 nt, Artificial Sequence
  Description of Artificial Sequence: Synthetic oligonucleotide
  Sense strand starting at position 115 of SEQ ID NO: 1884283
gccuguccugggcgugaau

SEQ ID NO: 2254113 - RNA, 19 nt, Artificial Sequence
  Description of Artificial Sequence: Synthetic oligonucleotide
  Antisense strand to SEQ ID NO: 2254112
auucacgcccaggacaggc

SEQ ID NO: 2254114 - RNA, 19 nt, Artificial Sequence
  Description of Artificial Sequence: Synthetic oligonucleotide
  Sense strand starting at position 163 of SEQ ID NO: 1884283
ucccgacuucuccgacgaa

SEQ ID NO: 2254115 - RNA, 19 nt, Artificial Sequence
  Description of Artificial Sequence: Synthetic oligonucleotide
  Antisense strand to SEQ ID NO: 2254114
uucgucggagaagucggga

SEQ ID NO: 2254116 - RNA, 19 nt, Artificial Sequence
  Description of Artificial Sequence: Synthetic oligonucleotide
  Sense strand starting at position 164 of SEQ ID NO: 1884283
cccgacuucuccgacgaaa

SEQ ID NO: 2254117 - RNA, 19 nt, Artificial Sequence
  Description of Artificial Sequence: Synthetic oligonucleotide
  Antisense strand to SEQ ID NO: 2254116
uuucgucggagaagucggg

SEQ ID NO: 2254118 - RNA, 19 nt, Artificial Sequence
  Description of Artificial Sequence: Synthetic oligonucleotide
  Sense strand starting at position 166 of SEQ ID NO: 1884283
cgacuucuccgacgaaaca

SEQ ID NO: 2254119 - RNA, 19 nt, Artificial Sequence
  Description of Artificial Sequence: Synthetic oligonucleotide
  Antisense strand to SEQ ID NO: 2254118
uguuucgucggagaagucg

SEQ ID NO: 2254120 - RNA, 19 nt, Artificial Sequence
  Description of Artificial Sequence: Synthetic oligonucleotide
  Sense strand starting at position 258 of SEQ ID NO: 1884283
uggaguacggcuugaaacu

SEQ ID NO: 2254121 - RNA, 19 nt, Artificial Sequence
  Description of Artificial Sequence: Synthetic oligonucleotide
  Antisense strand to SEQ ID NO: 2254120
aguuucaagccguacucca

SEQ ID NO: 2254122 - RNA, 19 nt, Artificial Sequence
  Description of Artificial Sequence: Synthetic oligonucleotide
  Sense strand starting at position 434 of SEQ ID NO: 1884283
gaacauguuugcgccaaca

SEQ ID NO: 2254123 - RNA, 19 nt, Artificial Sequence
  Description of Artificial Sequence: Synthetic oligonucleotide
  Antisense strand to SEQ ID NO: 2254122
uguuggcgcaaacauguuc

SEQ ID NO: 2254124 - RNA, 19 nt, Artificial Sequence
  Description of Artificial Sequence: Synthetic oligonucleotide
  Sense strand starting at position 650 of SEQ ID NO: 1884283
cauucucgccguugggaaa

SEQ ID NO: 2254125 - RNA, 19 nt, Artificial Sequence
  Description of Artificial Sequence: Synthetic oligonucleotide
  Antisense strand to SEQ ID NO: 2254124
uuucccaacggcgagaaug

SEQ ID NO: 2254126 - RNA, 19 nt, Artificial Sequence
  Description of Artificial Sequence: Synthetic oligonucleotide
  Sense strand starting at position 899 of SEQ ID NO: 1884283
cgacuuuggaaccguauuu

SEQ ID NO: 2254127 - RNA, 19 nt, Artificial Sequence
  Description of Artificial Sequence: Synthetic oligonucleotide
  Antisense strand to SEQ ID NO: 2254126
aaauacgguuccaaagucg

SEQ ID NO: 2254128 - RNA, 19 nt, Artificial Sequence
  Description of Artificial Sequence: Synthetic oligonucleotide
  Sense strand starting at position 969 of SEQ ID NO: 1884283
gggcuuucauaucgaaagg

SEQ ID NO: 2254129 - RNA, 19 nt, Artificial Sequence
  Description of Artificial Sequence: Synthetic oligonucleotide
  Antisense strand to SEQ ID NO: 2254128
ccuuucgauaugaaagccc

SEQ ID NO: 2254130 - RNA, 19 nt, Artificial Sequence
  Description of Artificial Sequence: Synthetic oligonucleotide
  Sense strand starting at position 1172 of SEQ ID NO: 1884283
gguaguggucccagugcga

SEQ ID NO: 2254131 - RNA, 19 nt, Artificial Sequence
  Description of Artificial Sequence: Synthetic oligonucleotide
  Antisense strand to SEQ ID NO: 2254130
ucgcacugggaccacuacc

SEQ ID NO: 2254132 - RNA, 19 nt, Artificial Sequence
  Description of Artificial Sequence: Synthetic oligonucleotide
  Sense strand starting at position 1487 of SEQ ID NO: 1884283
acugcuucuuagggcagaa

SEQ ID NO: 2254133 - RNA, 19 nt, Artificial Sequence
  Description of Artificial Sequence: Synthetic oligonucleotide
  Antisense strand to SEQ ID NO: 2254132
uucugcccuaagaagcagu

SEQ ID NO: 2254134 - RNA, 19 nt, Artificial Sequence
  Description of Artificial Sequence: Synthetic oligonucleotide
  Sense strand starting at position 2414 of SEQ ID NO: 1884283
ccgcucuaauuuccucaga

SEQ ID NO: 2254135 - RNA, 19 nt, Artificial Sequence
  Description of Artificial Sequence: Synthetic oligonucleotide
  Antisense strand to SEQ ID NO: 2254134
ucugaggaaauuagagcgg

SEQ ID NO: 2254136 - RNA, 19 nt, Artificial Sequence
  Description of Artificial Sequence: Synthetic oligonucleotide
  Sense strand starting at position 2415 of SEQ ID NO: 1884283
cgcucuaauuuccucagau

SEQ ID NO: 2254137 - RNA, 19 nt, Artificial Sequence
  Description of Artificial Sequence: Synthetic oligonucleotide
  Antisense strand to SEQ ID NO: 2254136
aucugaggaaauuagagcg

SEQ ID NO: 2254138 - RNA, 19 nt, Artificial Sequence
  Description of Artificial Sequence: Synthetic oligonucleotide
  Sense strand starting at position 2567 of SEQ ID NO: 1884283
gucacauguuuccucuguu

SEQ ID NO: 2254139 - RNA, 19 nt, Artificial Sequence
  Description of Artificial Sequence: Synthetic oligonucleotide
  Antisense strand to SEQ ID NO: 2254138
aacagaggaaacaugugac

SEQ ID NO: 2254140 - RNA, 19 nt, Artificial Sequence
  Description of Artificial Sequence: Synthetic oligonucleotide
  Sense strand starting at position 2568 of SEQ ID NO: 1884283
ucacauguuuccucuguuu

SEQ ID NO: 2254141 - RNA, 19 nt, Artificial Sequence
  Description of Artificial Sequence: Synthetic oligonucleotide
  Antisense strand to SEQ ID NO: 2254140
aaacagaggaaacauguga

SEQ ID NO: 2254142 - RNA, 19 nt, Artificial Sequence
  Description of Artificial Sequence: Synthetic oligonucleotide
  Sense strand starting at position 2673 of SEQ ID NO: 1884283
uccaucaauugucaauguu

SEQ ID NO: 2254143 - RNA, 19 nt, Artificial Sequence
  Description of Artificial Sequence: Synthetic oligonucleotide
  Antisense strand to SEQ ID NO: 2254142
aacauugacaauugaugga

SEQ ID NO: 2254144 - RNA, 19 nt, Artificial Sequence
  Description of Artificial Sequence: Synthetic oligonucleotide
  Sense strand starting at position 2699 of SEQ ID NO: 1884283
cgcaaucaaucaguuauuu

SEQ ID NO: 2254145 - RNA, 19 nt, Artificial Sequence
  Description of Artificial Sequence: Synthetic oligonucleotide
  Antisense strand to SEQ ID NO: 2254144
aaauaacugauugauugcg

SEQ ID NO: 2254146 - RNA, 19 nt, Artificial Sequence
  Description of Artificial Sequence: Synthetic oligonucleotide
  Sense strand starting at position 2708 of SEQ ID NO: 1884283
ucaguuauuugucagcucu

SEQ ID NO: 2254147 - RNA, 19 nt, Artificial Sequence
  Description of Artificial Sequence: Synthetic oligonucleotide
  Antisense strand to SEQ ID NO: 2254146
agagcugacaaauaacuga

SEQ ID NO: 2254148 - RNA, 19 nt, Artificial Sequence
  Description of Artificial Sequence: Synthetic oligonucleotide
  Sense strand starting at position 2715 of SEQ ID NO: 1884283
uuugucagcucuugucaau

SEQ ID NO: 2254149 - RNA, 19 nt, Artificial Sequence
  Description of Artificial Sequence: Synthetic oligonucleotide
  Antisense strand to SEQ ID NO: 2254148
auugacaagagcugacaaa

SEQ ID NO: 2254150 - RNA, 19 nt, Artificial Sequence
  Description of Artificial Sequence: Synthetic oligonucleotide
  Sense strand starting at position 2727 of SEQ ID NO: 1884283
ugucaauccucccgugauu

SEQ ID NO: 2254151 - RNA, 19 nt, Artificial Sequence
  Description of Artificial Sequence: Synthetic oligonucleotide
  Antisense strand to SEQ ID NO: 2254150
aaucacgggaggauugaca

SEQ ID NO: 2254152 - RNA, 19 nt, Artificial Sequence
  Description of Artificial Sequence: Synthetic oligonucleotide
  Sense strand starting at position 2729 of SEQ ID NO: 1884283
ucaauccucccgugauuua

SEQ ID NO: 2254153 - RNA, 19 nt, Artificial Sequence
  Description of Artificial Sequence: Synthetic oligonucleotide
  Antisense strand to SEQ ID NO: 2254152
uaaaucacgggaggauuga

SEQ ID NO: 2254154 - RNA, 19 nt, Artificial Sequence
  Description of Artificial Sequence: Synthetic oligonucleotide
  Sense strand starting at position 2739 of SEQ ID NO: 1884283
cgugauuuaugucagcuuu

SEQ ID NO: 2254155 - RNA, 19 nt, Artificial Sequence
  Description of Artificial Sequence: Synthetic oligonucleotide
  Antisense strand to SEQ ID NO: 2254154
aaagcugacauaaaucacg

SEQ ID NO: 2254156 - RNA, 19 nt, Artificial Sequence
  Description of Artificial Sequence: Synthetic oligonucleotide
  Sense strand starting at position 3467 of SEQ ID NO: 1884283
ggcugcucucucgaauuua

SEQ ID NO: 2254157 - RNA, 19 nt, Artificial Sequence
  Description of Artificial Sequence: Synthetic oligonucleotide
  Antisense strand to SEQ ID NO: 2254156
uaaauucgagagagcagcc

SEQ ID NO: 2254158 - RNA, 19 nt, Artificial Sequence
  Description of Artificial Sequence: Synthetic oligonucleotide
  Sense strand starting at position 3569 of SEQ ID NO: 1884283
gcggguucuuccagggaag

SEQ ID NO: 2254159 - RNA, 19 nt, Artificial Sequence
  Description of Artificial Sequence: Synthetic oligonucleotide
  Antisense strand to SEQ ID NO: 2254158
cuucccuggaagaacccgc

SEQ ID NO: 2254160 - RNA, 19 nt, Artificial Sequence
  Description of Artificial Sequence: Synthetic oligonucleotide
  Sense strand starting at position 3628 of SEQ ID NO: 1884283
cucggguuguuugggaaga

SEQ ID NO: 2254161 - RNA, 19 nt, Artificial Sequence
  Description of Artificial Sequence: Synthetic oligonucleotide
  Antisense strand to SEQ ID NO: 2254160
ucuucccaaacaacccgag

SEQ ID NO: 2254162 - RNA, 19 nt, Artificial Sequence
  Description of Artificial Sequence: Synthetic oligonucleotide
  Sense strand starting at position 3629 of SEQ ID NO: 1884283
ucggguuguuugggaagaa

SEQ ID NO: 2254163 - RNA, 19 nt, Artificial Sequence
  Description of Artificial Sequence: Synthetic oligonucleotide
  Antisense strand to SEQ ID NO: 2254162
uucuucccaaacaacccga

SEQ ID NO: 2254164 - RNA, 19 nt, Artificial Sequence
  Description of Artificial Sequence: Synthetic oligonucleotide
  Sense strand starting at position 3630 of SEQ ID NO: 1884283
cggguuguuugggaagaaa

SEQ ID NO: 2254165 - RNA, 19 nt, Artificial Sequence
  Description of Artificial Sequence: Synthetic oligonucleotide
  Antisense strand to SEQ ID NO: 2254164
uuucuucccaaacaacccg

SEQ ID NO: 2254166 - RNA, 19 nt, Artificial Sequence
  Description of Artificial Sequence: Synthetic oligonucleotide
  Sense strand starting at position 3833 of SEQ ID NO: 1884283
cuuagaagacuuugaaucu

SEQ ID NO: 2254167 - RNA, 19 nt, Artificial Sequence
  Description of Artificial Sequence: Synthetic oligonucleotide
  Antisense strand to SEQ ID NO: 2254166
agauucaaagucuucuaag

SEQ ID NO: 2254168 - RNA, 19 nt, Artificial Sequence
  Description of Artificial Sequence: Synthetic oligonucleotide
  Sense strand starting at position 34 of SEQ ID NO: 1884284
gggagugacuaugaauaga

SEQ ID NO: 2254169 - RNA, 19 nt, Artificial Sequence
  Description of Artificial Sequence: Synthetic oligonucleotide
  Antisense strand to SEQ ID NO: 2254168
ucuauucauagucacuccc

SEQ ID NO: 2254170 - RNA, 19 nt, Artificial Sequence
  Description of Artificial Sequence: Synthetic oligonucleotide
  Sense strand starting at position 154 of SEQ ID NO: 1884284
aaguguaggcuuuacagua

SEQ ID NO: 2254171 - RNA, 19 nt, Artificial Sequence
  Description of Artificial Sequence: Synthetic oligonucleotide
  Antisense strand to SEQ ID NO: 2254170
uacuguaaagccuacacuu

SEQ ID NO: 2254172 - RNA, 19 nt, Artificial Sequence
  Description of Artificial Sequence: Synthetic oligonucleotide
  Sense strand starting at position 159 of SEQ ID NO: 1884284
uaggcuuuacaguauguga

SEQ ID NO: 2254173 - RNA, 19 nt, Artificial Sequence
  Description of Artificial Sequence: Synthetic oligonucleotide
  Antisense strand to SEQ ID NO: 2254172
ucacauacuguaaagccua

SEQ ID NO: 2254174 - RNA, 19 nt, Artificial Sequence
  Description of Artificial Sequence: Synthetic oligonucleotide
  Sense strand starting at position 161 of SEQ ID NO: 1884284
ggcuuuacaguaugugaau

SEQ ID NO: 2254175 - RNA, 19 nt, Artificial Sequence
  Description of Artificial Sequence: Synthetic oligonucleotide
  Antisense strand to SEQ ID NO: 2254174
auucacauacuguaaagcc

SEQ ID NO: 2254176 - RNA, 19 nt, Artificial Sequence
  Description of Artificial Sequence: Synthetic oligonucleotide
  Sense strand starting at position 162 of SEQ ID NO: 1884284
gcuuuacaguaugugaauu

SEQ ID NO: 2254177 - RNA, 19 nt, Artificial Sequence
  Description of Artificial Sequence: Synthetic oligonucleotide
  Antisense strand to SEQ ID NO: 2254176
aauucacauacuguaaagc

SEQ ID NO: 2254178 - RNA, 19 nt, Artificial Sequence
  Description of Artificial Sequence: Synthetic oligonucleotide
  Sense strand starting at position 335 of SEQ ID NO: 1884284
ugaucaugguugcucuuua

SEQ ID NO: 2254179 - RNA, 19 nt, Artificial Sequence
  Description of Artificial Sequence: Synthetic oligonucleotide
  Antisense strand to SEQ ID NO: 2254178
uaaagagcaaccaugauca

SEQ ID NO: 2254180 - RNA, 19 nt, Artificial Sequence
  Description of Artificial Sequence: Synthetic oligonucleotide
  Sense strand starting at position 336 of SEQ ID NO: 1884284
gaucaugguugcucuuuau

SEQ ID NO: 2254181 - RNA, 19 nt, Artificial Sequence
  Description of Artificial Sequence: Synthetic oligonucleotide
  Antisense strand to SEQ ID NO: 2254180
auaaagagcaaccaugauc

SEQ ID NO: 2254182 - RNA, 19 nt, Artificial Sequence
  Description of Artificial Sequence: Synthetic oligonucleotide
  Sense strand starting at position 340 of SEQ ID NO: 1884284
augguugcucuuuauaaac

SEQ ID NO: 2254183 - RNA, 19 nt, Artificial Sequence
  Description of Artificial Sequence: Synthetic oligonucleotide
  Antisense strand to SEQ ID NO: 2254182
guuuauaaagagcaaccau

SEQ ID NO: 2254184 - RNA, 19 nt, Artificial Sequence
  Description of Artificial Sequence: Synthetic oligonucleotide
  Sense strand starting at position 498 of SEQ ID NO: 1884284
cugggaugagaauguaucu

SEQ ID NO: 2254185 - RNA, 19 nt, Artificial Sequence
  Description of Artificial Sequence: Synthetic oligonucleotide
  Antisense strand to SEQ ID NO: 2254184
agauacauucucaucccag

SEQ ID NO: 2254186 - RNA, 19 nt, Artificial Sequence
  Description of Artificial Sequence: Synthetic oligonucleotide
  Sense strand starting at position 583 of SEQ ID NO: 1884284
uggguuguaguuugugaaa

SEQ ID NO: 2254187 - RNA, 19 nt, Artificial Sequence
  Description of Artificial Sequence: Synthetic oligonucleotide
  Antisense strand to SEQ ID NO: 2254186
uuucacaaacuacaaccca

SEQ ID NO: 2254188 - RNA, 19 nt, Artificial Sequence
  Description of Artificial Sequence: Synthetic oligonucleotide
  Sense strand starting at position 695 of SEQ ID NO: 1884284
ggccaugaaugagccaauu

SEQ ID NO: 2254189 - RNA, 19 nt, Artificial Sequence
  Description of Artificial Sequence: Synthetic oligonucleotide
  Antisense strand to SEQ ID NO: 2254188
aauuggcucauucauggcc

SEQ ID NO: 2254190 - RNA, 19 nt, Artificial Sequence
  Description of Artificial Sequence: Synthetic oligonucleotide
  Sense strand starting at position 996 of SEQ ID NO: 1884284
auguacauuucuugaauga

SEQ ID NO: 2254191 - RNA, 19 nt, Artificial Sequence
  Description of Artificial Sequence: Synthetic oligonucleotide
  Antisense strand to SEQ ID NO: 2254190
ucauucaagaaauguacau

SEQ ID NO: 2254192 - RNA, 19 nt, Artificial Sequence
  Description of Artificial Sequence: Synthetic oligonucleotide
  Sense strand starting at position 1207 of SEQ ID NO: 1884284
aggaguuugccagggaaag

SEQ ID NO: 2254193 - RNA, 19 nt, Artificial Sequence
  Description of Artificial Sequence: Synthetic oligonucleotide
  Antisense strand to SEQ ID NO: 2254192
cuuucccuggcaaacuccu

SEQ ID NO: 2254194 - RNA, 19 nt, Artificial Sequence
  Description of Artificial Sequence: Synthetic oligonucleotide
  Sense strand starting at position 1208 of SEQ ID NO: 1884284
ggaguuugccagggaaaga

SEQ ID NO: 2254195 - RNA, 19 nt, Artificial Sequence
  Description of Artificial Sequence: Synthetic oligonucleotide
  Antisense strand to SEQ ID NO: 2254194
ucuuucccuggcaaacucc

SEQ ID NO: 2254196 - RNA, 19 nt, Artificial Sequence
  Description of Artificial Sequence: Synthetic oligonucleotide
  Sense strand starting at position 1345 of SEQ ID NO: 1884284
gaggacaagugagagauaa

SEQ ID NO: 2254197 - RNA, 19 nt, Artificial Sequence
  Description of Artificial Sequence: Synthetic oligonucleotide
  Antisense strand to SEQ ID NO: 2254196
uuaucucucacuuguccuc

SEQ ID NO: 2254198 - RNA, 19 nt, Artificial Sequence
  Description of Artificial Sequence: Synthetic oligonucleotide
  Sense strand starting at position 1425 of SEQ ID NO: 1884284
aacugacucccguaggaau

SEQ ID NO: 2254199 - RNA, 19 nt, Artificial Sequence
  Description of Artificial Sequence: Synthetic oligonucleotide
  Antisense strand to SEQ ID NO: 2254198
auuccuacgggagucaguu

SEQ ID NO: 2254200 - RNA, 19 nt, Artificial Sequence
  Description of Artificial Sequence: Synthetic oligonucleotide
  Sense strand starting at position 1512 of SEQ ID NO: 1884284
agaagaguuucuccucuga

SEQ ID NO: 2254201 - RNA, 19 nt, Artificial Sequence
  Description of Artificial Sequence: Synthetic oligonucleotide
  Antisense strand to SEQ ID NO: 2254200
ucagaggagaaacucuucu

SEQ ID NO: 2254202 - RNA, 19 nt, Artificial Sequence
  Description of Artificial Sequence: Synthetic oligonucleotide
  Sense strand starting at position 1514 of SEQ ID NO: 1884284
aagaguuucuccucugagu

SEQ ID NO: 2254203 - RNA, 19 nt, Artificial Sequence
  Description of Artificial Sequence: Synthetic oligonucleotide
  Antisense strand to SEQ ID NO: 2254202
acucagaggagaaacucuu

SEQ ID NO: 2254204 - RNA, 19 nt, Artificial Sequence
  Description of Artificial Sequence: Synthetic oligonucleotide
  Sense strand starting at position 2042 of SEQ ID NO: 1884284
uccggucuccuccagcaaa

SEQ ID NO: 2254205 - RNA, 19 nt, Artificial Sequence
  Description of Artificial Sequence: Synthetic oligonucleotide
  Antisense strand to SEQ ID NO: 2254204
uuugcuggaggagaccgga

SEQ ID NO: 2254206 - RNA, 19 nt, Artificial Sequence
  Description of Artificial Sequence: Synthetic oligonucleotide
  Sense strand starting at position 2087 of SEQ ID NO: 1884284
gaccuuccgcucugaaaug

SEQ ID NO: 2254207 - RNA, 19 nt, Artificial Sequence
  Description of Artificial Sequence: Synthetic oligonucleotide
  Antisense strand to SEQ ID NO: 2254206
cauuucagagcggaagguc

SEQ ID NO: 2254208 - RNA, 19 nt, Artificial Sequence
  Description of Artificial Sequence: Synthetic oligonucleotide
  Sense strand starting at position 2098 of SEQ ID NO: 1884284
cugaaaugcuuccuggcau

SEQ ID NO: 2254209 - RNA, 19 nt, Artificial Sequence
  Description of Artificial Sequence: Synthetic oligonucleotide
  Antisense strand to SEQ ID NO: 2254208
augccaggaagcauuucag

SEQ ID NO: 2254210 - RNA, 19 nt, Artificial Sequence
  Description of Artificial Sequence: Synthetic oligonucleotide
  Sense strand starting at position 2199 of SEQ ID NO: 1884284
ggacaauucucuucccuga

SEQ ID NO: 2254211 - RNA, 19 nt, Artificial Sequence
  Description of Artificial Sequence: Synthetic oligonucleotide
  Antisense strand to SEQ ID NO: 2254210
ucagggaagagaauugucc

SEQ ID NO: 2254212 - RNA, 19 nt, Artificial Sequence
  Description of Artificial Sequence: Synthetic oligonucleotide
  Sense strand starting at position 2232 of SEQ ID NO: 1884284
acagcucuccuagacauga

SEQ ID NO: 2254213 - RNA, 19 nt, Artificial Sequence
  Description of Artificial Sequence: Synthetic oligonucleotide
  Antisense strand to SEQ ID NO: 2254212
ucaugucuaggagagcugu

SEQ ID NO: 2254214 - RNA, 19 nt, Artificial Sequence
  Description of Artificial Sequence: Synthetic oligonucleotide
  Sense strand starting at position 2297 of SEQ ID NO: 1884284
ggcuauaauuagguuuguu

SEQ ID NO: 2254215 - RNA, 19 nt, Artificial Sequence
  Description of Artificial Sequence: Synthetic oligonucleotide
  Antisense strand to SEQ ID NO: 2254214
aacaaaccuaauuauagcc

SEQ ID NO: 2254216 - RNA, 19 nt, Artificial Sequence
  Description of Artificial Sequence: Synthetic oligonucleotide
  Sense strand starting at position 2332 of SEQ ID NO: 1884284
uagucuuguugacuaggaa

SEQ ID NO: 2254217 - RNA, 19 nt, Artificial Sequence
  Description of Artificial Sequence: Synthetic oligonucleotide
  Antisense strand to SEQ ID NO: 2254216
uuccuagucaacaagacua

SEQ ID NO: 2254218 - RNA, 19 nt, Artificial Sequence
  Description of Artificial Sequence: Synthetic oligonucleotide
  Sense strand starting at position 2435 of SEQ ID NO: 1884284
ggaaauuagcuuuggacac

SEQ ID NO: 2254219 - RNA, 19 nt, Artificial Sequence
  Description of Artificial Sequence: Synthetic oligonucleotide
  Antisense strand to SEQ ID NO: 2254218
guguccaaagcuaauuucc

SEQ ID NO: 2254220 - RNA, 19 nt, Artificial Sequence
  Description of Artificial Sequence: Synthetic oligonucleotide
  Sense strand starting at position 2522 of SEQ ID NO: 1884284
uuuagcaaacagugacaau

SEQ ID NO: 2254221 - RNA, 19 nt, Artificial Sequence
  Description of Artificial Sequence: Synthetic oligonucleotide
  Antisense strand to SEQ ID NO: 2254220
auugucacuguuugcuaaa

SEQ ID NO: 2254222 - RNA, 19 nt, Artificial Sequence
  Description of Artificial Sequence: Synthetic oligonucleotide
  Sense strand starting at position 2602 of SEQ ID NO: 1884284
gacccuuagcgguacaaca

SEQ ID NO: 2254223 - RNA, 19 nt, Artificial Sequence
  Description of Artificial Sequence: Synthetic oligonucleotide
  Antisense strand to SEQ ID NO: 2254222
uguuguaccgcuaaggguc

SEQ ID NO: 2254224 - RNA, 19 nt, Artificial Sequence
  Description of Artificial Sequence: Synthetic oligonucleotide
  Sense strand starting at position 2640 of SEQ ID NO: 1884284
guccauuagcucugauaga

SEQ ID NO: 2254225 - RNA, 19 nt, Artificial Sequence
  Description of Artificial Sequence: Synthetic oligonucleotide
  Antisense strand to SEQ ID NO: 2254224
ucuaucagagcuaauggac

SEQ ID NO: 2254226 - RNA, 19 nt, Artificial Sequence
  Description of Artificial Sequence: Synthetic oligonucleotide
  Sense strand starting at position 2679 of SEQ ID NO: 1884284
aauauaacagucgaguauu

SEQ ID NO: 2254227 - RNA, 19 nt, Artificial Sequence
  Description of Artificial Sequence: Synthetic oligonucleotide
  Antisense strand to SEQ ID NO: 2254226
aauacucgacuguuauauu

SEQ ID NO: 2254228 - RNA, 19 nt, Artificial Sequence
  Description of Artificial Sequence: Synthetic oligonucleotide
  Sense strand starting at position 2802 of SEQ ID NO: 1884284
ucuuucucauugcucgaaa

SEQ ID NO: 2254229 - RNA, 19 nt, Artificial Sequence
  Description of Artificial Sequence: Synthetic oligonucleotide
  Antisense strand to SEQ ID NO: 2254228
uuucgagcaaugagaaaga

SEQ ID NO: 2254230 - RNA, 19 nt, Artificial Sequence
  Description of Artificial Sequence: Synthetic oligonucleotide
  Sense strand starting at position 2803 of SEQ ID NO: 1884284
cuuucucauugcucgaaau

SEQ ID NO: 2254231 - RNA, 19 nt, Artificial Sequence
  Description of Artificial Sequence: Synthetic oligonucleotide
  Antisense strand to SEQ ID NO: 2254230
auuucgagcaaugagaaag

SEQ ID NO: 2254232 - RNA, 19 nt, Artificial Sequence
  Description of Artificial Sequence: Synthetic oligonucleotide
  Sense strand starting at position 3298 of SEQ ID NO: 1884284
ggcggcucgcaagucauaa

SEQ ID NO: 2254233 - RNA, 19 nt, Artificial Sequence
  Description of Artificial Sequence: Synthetic oligonucleotide
  Antisense strand to SEQ ID NO: 2254232
uuaugacuugcgagccgcc

SEQ ID NO: 2254234 - RNA, 19 nt, Artificial Sequence
  Description of Artificial Sequence: Synthetic oligonucleotide
  Sense strand starting at position 3419 of SEQ ID NO: 1884284
cgcggugcugacagagaaa

SEQ ID NO: 2254235 - RNA, 19 nt, Artificial Sequence
  Description of Artificial Sequence: Synthetic oligonucleotide
  Antisense strand to SEQ ID NO: 2254234
uuucucugucagcaccgcg

SEQ ID NO: 2254236 - RNA, 19 nt, Artificial Sequence
  Description of Artificial Sequence: Synthetic oligonucleotide
  Sense strand starting at position 3521 of SEQ ID NO: 1884284
aaucaucgcgcagauagaa

SEQ ID NO: 2254237 - RNA, 19 nt, Artificial Sequence
  Description of Artificial Sequence: Synthetic oligonucleotide
  Antisense strand to SEQ ID NO: 2254236
uucuaucugcgcgaugauu

SEQ ID NO: 2254238 - RNA, 19 nt, Artificial Sequence
  Description of Artificial Sequence: Synthetic oligonucleotide
  Sense strand starting at position 3836 of SEQ ID NO: 1884284
gugagaagacugcagucuu

SEQ ID NO: 2254239 - RNA, 19 nt, Artificial Sequence
  Description of Artificial Sequence: Synthetic oligonucleotide
  Antisense strand to SEQ ID NO: 2254238
aagacugcagucuucucac

SEQ ID NO: 2254240 - RNA, 19 nt, Artificial Sequence
  Description of Artificial Sequence: Synthetic oligonucleotide
  Sense strand starting at position 3843 of SEQ ID NO: 1884284
gacugcagucuuugaaauu

SEQ ID NO: 2254241 - RNA, 19 nt, Artificial Sequence
  Description of Artificial Sequence: Synthetic oligonucleotide
  Antisense strand to SEQ ID NO: 2254240
aauuucaaagacugcaguc

SEQ ID NO: 2254242 - RNA, 19 nt, Artificial Sequence
  Description of Artificial Sequence: Synthetic oligonucleotide
  Sense strand starting at position 3862 of SEQ ID NO: 1884284
cagcguuaauaauuuguga

SEQ ID NO: 2254243 - RNA, 19 nt, Artificial Sequence
  Description of Artificial Sequence: Synthetic oligonucleotide
  Antisense strand to SEQ ID NO: 2254242
ucacaaauuauuaacgcug

SEQ ID NO: 2254244 - RNA, 19 nt, Artificial Sequence
  Description of Artificial Sequence: Synthetic oligonucleotide
  Sense strand starting at position 3864 of SEQ ID NO: 1884284
gcguuaauaauuugugacu

SEQ ID NO: 2254245 - RNA, 19 nt, Artificial Sequence
  Description of Artificial Sequence: Synthetic oligonucleotide
  Antisense strand to SEQ ID NO: 2254244
agucacaaauuauuaacgc

SEQ ID NO: 2254246 - RNA, 19 nt, Artificial Sequence
  Description of Artificial Sequence: Synthetic oligonucleotide
  Sense strand starting at position 3865 of SEQ ID NO: 1884284
cguuaauaauuugugacuu

SEQ ID NO: 2254247 - RNA, 19 nt, Artificial Sequence
  Description of Artificial Sequence: Synthetic oligonucleotide
  Antisense strand to SEQ ID NO: 2254246
aagucacaaauuauuaacg

SEQ ID NO: 2254248 - RNA, 19 nt, Artificial Sequence
  Description of Artificial Sequence: Synthetic oligonucleotide
  Sense strand starting at position 43 of SEQ ID NO: 1884285
cuccgcuucccuggaagaa

SEQ ID NO: 2254249 - RNA, 19 nt, Artificial Sequence
  Description of Artificial Sequence: Synthetic oligonucleotide
  Antisense strand to SEQ ID NO: 2254248
uucuuccagggaagcggag

SEQ ID NO: 2254250 - RNA, 19 nt, Artificial Sequence
  Description of Artificial Sequence: Synthetic oligonucleotide
  Sense strand starting at position 133 of SEQ ID NO: 1884285
ccgacucggcguuccaaua

SEQ ID NO: 2254251 - RNA, 19 nt, Artificial Sequence
  Description of Artificial Sequence: Synthetic oligonucleotide
  Antisense strand to SEQ ID NO: 2254250
uauuggaacgccgagucgg

SEQ ID NO: 2254252 - RNA, 19 nt, Artificial Sequence
  Description of Artificial Sequence: Synthetic oligonucleotide
  Sense strand starting at position 676 of SEQ ID NO: 1884285
gcacuuuacucucgcuauu

SEQ ID NO: 2254253 - RNA, 19 nt, Artificial Sequence
  Description of Artificial Sequence: Synthetic oligonucleotide
  Antisense strand to SEQ ID NO: 2254252
aauagcgagaguaaagugc

SEQ ID NO: 2254254 - RNA, 19 nt, Artificial Sequence
  Description of Artificial Sequence: Synthetic oligonucleotide
  Sense strand starting at position 851 of SEQ ID NO: 1884285
gucgcacccgccuuguaau

SEQ ID NO: 2254255 - RNA, 19 nt, Artificial Sequence
  Description of Artificial Sequence: Synthetic oligonucleotide
  Antisense strand to SEQ ID NO: 2254254
auuacaaggcgggugcgac

SEQ ID NO: 2254256 - RNA, 19 nt, Artificial Sequence
  Description of Artificial Sequence: Synthetic oligonucleotide
  Sense strand starting at position 927 of SEQ ID NO: 1884285
auugauugcggucgaggaa

SEQ ID NO: 2254257 - RNA, 19 nt, Artificial Sequence
  Description of Artificial Sequence: Synthetic oligonucleotide
  Antisense strand to SEQ ID NO: 2254256
uuccucgaccgcaaucaau

SEQ ID NO: 2254258 - RNA, 19 nt, Artificial Sequence
  Description of Artificial Sequence: Synthetic oligonucleotide
  Sense strand starting at position 940 of SEQ ID NO: 1884285
gaggaacauugacaauuga

SEQ ID NO: 2254259 - RNA, 19 nt, Artificial Sequence
  Description of Artificial Sequence: Synthetic oligonucleotide
  Antisense strand to SEQ ID NO: 2254258
ucaauugucaauguuccuc

SEQ ID NO: 2254260 - RNA, 19 nt, Artificial Sequence
  Description of Artificial Sequence: Synthetic oligonucleotide
  Sense strand starting at position 1196 of SEQ ID NO: 1884285
cgcggaaucugaggaaauu

SEQ ID NO: 2254261 - RNA, 19 nt, Artificial Sequence
  Description of Artificial Sequence: Synthetic oligonucleotide
  Antisense strand to SEQ ID NO: 2254260
aauuuccucagauuccgcg

SEQ ID NO: 2254262 - RNA, 19 nt, Artificial Sequence
  Description of Artificial Sequence: Synthetic oligonucleotide
  Sense strand starting at position 2124 of SEQ ID NO: 1884285
cucgcuuucugcccuaaga

SEQ ID NO: 2254263 - RNA, 19 nt, Artificial Sequence
  Description of Artificial Sequence: Synthetic oligonucleotide
  Antisense strand to SEQ ID NO: 2254262
ucuuagggcagaaagcgag

SEQ ID NO: 2254264 - RNA, 19 nt, Artificial Sequence
  Description of Artificial Sequence: Synthetic oligonucleotide
  Sense strand starting at position 2126 of SEQ ID NO: 1884285
cgcuuucugcccuaagaag

SEQ ID NO: 2254265 - RNA, 19 nt, Artificial Sequence
  Description of Artificial Sequence: Synthetic oligonucleotide
  Antisense strand to SEQ ID NO: 2254264
cuucuuagggcagaaagcg

SEQ ID NO: 2254266 - RNA, 19 nt, Artificial Sequence
  Description of Artificial Sequence: Synthetic oligonucleotide
  Sense strand starting at position 2208 of SEQ ID NO: 1884285
cagcgcgcucucuggaaau

SEQ ID NO: 2254267 - RNA, 19 nt, Artificial Sequence
  Description of Artificial Sequence: Synthetic oligonucleotide
  Antisense strand to SEQ ID NO: 2254266
auuuccagagagcgcgcug

SEQ ID NO: 2254268 - RNA, 19 nt, Artificial Sequence
  Description of Artificial Sequence: Synthetic oligonucleotide
  Sense strand starting at position 2327 of SEQ ID NO: 1884285
caaucaaggugcugaagau

SEQ ID NO: 2254269 - RNA, 19 nt, Artificial Sequence
  Description of Artificial Sequence: Synthetic oligonucleotide
  Antisense strand to SEQ ID NO: 2254268
aucuucagcaccuugauug

SEQ ID NO: 2254270 - RNA, 19 nt, Artificial Sequence
  Description of Artificial Sequence: Synthetic oligonucleotide
  Sense strand starting at position 2638 of SEQ ID NO: 1884285
acuuguuucuccuuucgau

SEQ ID NO: 2254271 - RNA, 19 nt, Artificial Sequence
  Description of Artificial Sequence: Synthetic oligonucleotide
  Antisense strand to SEQ ID NO: 2254270
aucgaaaggagaaacaagu

SEQ ID NO: 2254272 - RNA, 19 nt, Artificial Sequence
  Description of Artificial Sequence: Synthetic oligonucleotide
  Sense strand starting at position 2642 of SEQ ID NO: 1884285
guuucuccuuucgauauga

SEQ ID NO: 2254273 - RNA, 19 nt, Artificial Sequence
  Description of Artificial Sequence: Synthetic oligonucleotide
  Antisense strand to SEQ ID NO: 2254272
ucauaucgaaaggagaaac

SEQ ID NO: 2254274 - RNA, 19 nt, Artificial Sequence
  Description of Artificial Sequence: Synthetic oligonucleotide
  Sense strand starting at position 2644 of SEQ ID NO: 1884285
uucuccuuucgauaugaaa

SEQ ID NO: 2254275 - RNA, 19 nt, Artificial Sequence
  Description of Artificial Sequence: Synthetic oligonucleotide
  Antisense strand to SEQ ID NO: 2254274
uuucauaucgaaaggagaa

SEQ ID NO: 2254276 - RNA, 19 nt, Artificial Sequence
  Description of Artificial Sequence: Synthetic oligonucleotide
  Sense strand starting at position 2709 of SEQ ID NO: 1884285
ggaggucugaaauacgguu

SEQ ID NO: 2254277 - RNA, 19 nt, Artificial Sequence
  Description of Artificial Sequence: Synthetic oligonucleotide
  Antisense strand to SEQ ID NO: 2254276
aaccguauuucagaccucc

SEQ ID NO: 2254278 - RNA, 19 nt, Artificial Sequence
  Description of Artificial Sequence: Synthetic oligonucleotide
  Sense strand starting at position 2739 of SEQ ID NO: 1884285
guccuucguauccgcagaa

SEQ ID NO: 2254279 - RNA, 19 nt, Artificial Sequence
  Description of Artificial Sequence: Synthetic oligonucleotide
  Antisense strand to SEQ ID NO: 2254278
uucugcggauacgaaggac

SEQ ID NO: 2254280 - RNA, 19 nt, Artificial Sequence
  Description of Artificial Sequence: Synthetic oligonucleotide
  Sense strand starting at position 2798 of SEQ ID NO: 1884285
agcccuuacucugaagaau

SEQ ID NO: 2254281 - RNA, 19 nt, Artificial Sequence
  Description of Artificial Sequence: Synthetic oligonucleotide
  Antisense strand to SEQ ID NO: 2254280
auucuucagaguaagggcu

SEQ ID NO: 2254282 - RNA, 19 nt, Artificial Sequence
  Description of Artificial Sequence: Synthetic oligonucleotide
  Sense strand starting at position 2812 of SEQ ID NO: 1884285
agaauuaaggaguguuugu

SEQ ID NO: 2254283 - RNA, 19 nt, Artificial Sequence
  Description of Artificial Sequence: Synthetic oligonucleotide
  Antisense strand to SEQ ID NO: 2254282
acaaacacuccuuaauucu

SEQ ID NO: 2254284 - RNA, 19 nt, Artificial Sequence
  Description of Artificial Sequence: Synthetic oligonucleotide
  Sense strand starting at position 2838 of SEQ ID NO: 1884285
ggguacaguucugggucua

SEQ ID NO: 2254285 - RNA, 19 nt, Artificial Sequence
  Description of Artificial Sequence: Synthetic oligonucleotide
  Antisense strand to SEQ ID NO: 2254284
uagacccagaacuguaccc

SEQ ID NO: 2254286 - RNA, 19 nt, Artificial Sequence
  Description of Artificial Sequence: Synthetic oligonucleotide
  Sense strand starting at position 2893 of SEQ ID NO: 1884285
cuaguuagcgcucagagag

SEQ ID NO: 2254287 - RNA, 19 nt, Artificial Sequence
  Description of Artificial Sequence: Synthetic oligonucleotide
  Antisense strand to SEQ ID NO: 2254286
cucucugagcgcuaacuag

SEQ ID NO: 2254288 - RNA, 19 nt, Artificial Sequence
  Description of Artificial Sequence: Synthetic oligonucleotide
  Sense strand starting at position 2951 of SEQ ID NO: 1884285
ggagcaaucugcugccuuu

SEQ ID NO: 2254289 - RNA, 19 nt, Artificial Sequence
  Description of Artificial Sequence: Synthetic oligonucleotide
  Antisense strand to SEQ ID NO: 2254288
aaaggcagcagauugcucc

SEQ ID NO: 2254290 - RNA, 19 nt, Artificial Sequence
  Description of Artificial Sequence: Synthetic oligonucleotide
  Sense strand starting at position 2976 of SEQ ID NO: 1884285
ggcgagaauguuugugagu

SEQ ID NO: 2254291 - RNA, 19 nt, Artificial Sequence
  Description of Artificial Sequence: Synthetic oligonucleotide
  Antisense strand to SEQ ID NO: 2254290
acucacaaacauucucgcc

SEQ ID NO: 2254292 - RNA, 19 nt, Artificial Sequence
  Description of Artificial Sequence: Synthetic oligonucleotide
  Sense strand starting at position 2977 of SEQ ID NO: 1884285
gcgagaauguuugugagug

SEQ ID NO: 2254293 - RNA, 19 nt, Artificial Sequence
  Description of Artificial Sequence: Synthetic oligonucleotide
  Antisense strand to SEQ ID NO: 2254292
cacucacaaacauucucgc

SEQ ID NO: 2254294 - RNA, 19 nt, Artificial Sequence
  Description of Artificial Sequence: Synthetic oligonucleotide
  Sense strand starting at position 3055 of SEQ ID NO: 1884285
gcuguugcggagaggcauu

SEQ ID NO: 2254295 - RNA, 19 nt, Artificial Sequence
  Description of Artificial Sequence: Synthetic oligonucleotide
  Antisense strand to SEQ ID NO: 2254294
aaugccucuccgcaacagc

SEQ ID NO: 2254296 - RNA, 19 nt, Artificial Sequence
  Description of Artificial Sequence: Synthetic oligonucleotide
  Sense strand starting at position 3188 of SEQ ID NO: 1884285
gcgcaaacauguucgcaga

SEQ ID NO: 2254297 - RNA, 19 nt, Artificial Sequence
  Description of Artificial Sequence: Synthetic oligonucleotide
  Antisense strand to SEQ ID NO: 2254296
ucugcgaacauguuugcgc

SEQ ID NO: 2254298 - RNA, 19 nt, Artificial Sequence
  Description of Artificial Sequence: Synthetic oligonucleotide
  Sense strand starting at position 3189 of SEQ ID NO: 1884285
cgcaaacauguucgcagau

SEQ ID NO: 2254299 - RNA, 19 nt, Artificial Sequence
  Description of Artificial Sequence: Synthetic oligonucleotide
  Antisense strand to SEQ ID NO: 2254298
aucugcgaacauguuugcg

SEQ ID NO: 2254300 - RNA, 19 nt, Artificial Sequence
  Description of Artificial Sequence: Synthetic oligonucleotide
  Sense strand starting at position 3448 of SEQ ID NO: 1884285
ggguguuucgucggagaag

SEQ ID NO: 2254301 - RNA, 19 nt, Artificial Sequence
  Description of Artificial Sequence: Synthetic oligonucleotide
  Antisense strand to SEQ ID NO: 2254300
cuucuccgacgaaacaccc

SEQ ID NO: 2254302 - RNA, 19 nt, Artificial Sequence
  Description of Artificial Sequence: Synthetic oligonucleotide
  Sense strand starting at position 3449 of SEQ ID NO: 1884285
gguguuucgucggagaagu

SEQ ID NO: 2254303 - RNA, 19 nt, Artificial Sequence
  Description of Artificial Sequence: Synthetic oligonucleotide
  Antisense strand to SEQ ID NO: 2254302
acuucuccgacgaaacacc

SEQ ID NO: 2254304 - RNA, 19 nt, Artificial Sequence
  Description of Artificial Sequence: Synthetic oligonucleotide
  Sense strand starting at position 3450 of SEQ ID NO: 1884285
guguuucgucggagaaguc

SEQ ID NO: 2254305 - RNA, 19 nt, Artificial Sequence
  Description of Artificial Sequence: Synthetic oligonucleotide
  Antisense strand to SEQ ID NO: 2254304
gacuucuccgacgaaacac

SEQ ID NO: 2254306 - RNA, 19 nt, Artificial Sequence
  Description of Artificial Sequence: Synthetic oligonucleotide
  Sense strand starting at position 3702 of SEQ ID NO: 1884285
gcgggauuaauguggaugu

SEQ ID NO: 2254307 - RNA, 19 nt, Artificial Sequence
  Description of Artificial Sequence: Synthetic oligonucleotide
  Antisense strand to SEQ ID NO: 2254306
acauccacauuaaucccgc

SEQ ID NO: 2254308 - RNA, 19 nt, Artificial Sequence
  Description of Artificial Sequence: Synthetic oligonucleotide
  Sense strand starting at position 3706 of SEQ ID NO: 1884285
gauuaauguggaugugaac

SEQ ID NO: 2254309 - RNA, 19 nt, Artificial Sequence
  Description of Artificial Sequence: Synthetic oligonucleotide
  Antisense strand to SEQ ID NO: 2254308
guucacauccacauuaauc

SEQ ID NO: 2254310 - RNA, 19 nt, Artificial Sequence
  Description of Artificial Sequence: Synthetic oligonucleotide
  Sense strand starting at position 353 of SEQ ID NO: 1884288
ugaccugucaggcggauua

SEQ ID NO: 2254311 - RNA, 19 nt, Artificial Sequence
  Description of Artificial Sequence: Synthetic oligonucleotide
  Antisense strand to SEQ ID NO: 2254310
uaauccgccugacagguca

SEQ ID NO: 2254312 - RNA, 19 nt, Artificial Sequence
  Description of Artificial Sequence: Synthetic oligonucleotide
  Sense strand starting at position 364 of SEQ ID NO: 1884288
gcggauuaucuucgaggga

SEQ ID NO: 2254313 - RNA, 19 nt, Artificial Sequence
  Description of Artificial Sequence: Synthetic oligonucleotide
  Antisense strand to SEQ ID NO: 2254312
ucccucgaagauaauccgc

SEQ ID NO: 2254314 - RNA, 19 nt, Artificial Sequence
  Description of Artificial Sequence: Synthetic oligonucleotide
  Sense strand starting at position 365 of SEQ ID NO: 1884288
cggauuaucuucgagggag

SEQ ID NO: 2254315 - RNA, 19 nt, Artificial Sequence
  Description of Artificial Sequence: Synthetic oligonucleotide
  Antisense strand to SEQ ID NO: 2254314
cucccucgaagauaauccg

SEQ ID NO: 2254316 - RNA, 19 nt, Artificial Sequence
  Description of Artificial Sequence: Synthetic oligonucleotide
  Sense strand starting at position 367 of SEQ ID NO: 1884288
gauuaucuucgagggagau

SEQ ID NO: 2254317 - RNA, 19 nt, Artificial Sequence
  Description of Artificial Sequence: Synthetic oligonucleotide
  Antisense strand to SEQ ID NO: 2254316
aucucccucgaagauaauc

SEQ ID NO: 2254318 - RNA, 19 nt, Artificial Sequence
  Description of Artificial Sequence: Synthetic oligonucleotide
  Sense strand starting at position 368 of SEQ ID NO: 1884288
auuaucuucgagggagauu

SEQ ID NO: 2254319 - RNA, 19 nt, Artificial Sequence
  Description of Artificial Sequence: Synthetic oligonucleotide
  Antisense strand to SEQ ID NO: 2254318
aaucucccucgaagauaau

SEQ ID NO: 2254320 - RNA, 19 nt, Artificial Sequence
  Description of Artificial Sequence: Synthetic oligonucleotide
  Sense strand starting at position 418 of SEQ ID NO: 1884288
uuuguuugaugugacaacu

SEQ ID NO: 2254321 - RNA, 19 nt, Artificial Sequence
  Description of Artificial Sequence: Synthetic oligonucleotide
  Antisense strand to SEQ ID NO: 2254320
aguugucacaucaaacaaa

SEQ ID NO: 2254322 - RNA, 19 nt, Artificial Sequence
  Description of Artificial Sequence: Synthetic oligonucleotide
  Sense strand starting at position 436 of SEQ ID NO: 1884288
ucugauaggcguugauuua

SEQ ID NO: 2254323 - RNA, 19 nt, Artificial Sequence
  Description of Artificial Sequence: Synthetic oligonucleotide
  Antisense strand to SEQ ID NO: 2254322
uaaaucaacgccuaucaga

SEQ ID NO: 2254324 - RNA, 19 nt, Artificial Sequence
  Description of Artificial Sequence: Synthetic oligonucleotide
  Sense strand starting at position 443 of SEQ ID NO: 1884288
ggcguugauuuacuuacaa

SEQ ID NO: 2254325 - RNA, 19 nt, Artificial Sequence
  Description of Artificial Sequence: Synthetic oligonucleotide
  Antisense strand to SEQ ID NO: 2254324
uuguaaguaaaucaacgcc

SEQ ID NO: 2254326 - RNA, 19 nt, Artificial Sequence
  Description of Artificial Sequence: Synthetic oligonucleotide
  Sense strand starting at position 559 of SEQ ID NO: 1884288
uagccaucucgacagugaa

SEQ ID NO: 2254327 - RNA, 19 nt, Artificial Sequence
  Description of Artificial Sequence: Synthetic oligonucleotide
  Antisense strand to SEQ ID NO: 2254326
uucacugucgagauggcua

SEQ ID NO: 2254328 - RNA, 19 nt, Artificial Sequence
  Description of Artificial Sequence: Synthetic oligonucleotide
  Sense strand starting at position 759 of SEQ ID NO: 1884288
aggccuggcgcagaguaau

SEQ ID NO: 2254329 - RNA, 19 nt, Artificial Sequence
  Description of Artificial Sequence: Synthetic oligonucleotide
  Antisense strand to SEQ ID NO: 2254328
auuacucugcgccaggccu

SEQ ID NO: 2254330 - RNA, 19 nt, Artificial Sequence
  Description of Artificial Sequence: Synthetic oligonucleotide
  Sense strand starting at position 1079 of SEQ ID NO: 1884288
guaauaagcugcuggaauu

SEQ ID NO: 2254331 - RNA, 19 nt, Artificial Sequence
  Description of Artificial Sequence: Synthetic oligonucleotide
  Antisense strand to SEQ ID NO: 2254330
aauuccagcagcuuauuac

SEQ ID NO: 2254332 - RNA, 19 nt, Artificial Sequence
  Description of Artificial Sequence: Synthetic oligonucleotide
  Sense strand starting at position 1326 of SEQ ID NO: 1884288
ggauaagagugcuucacag

SEQ ID NO: 2254333 - RNA, 19 nt, Artificial Sequence
  Description of Artificial Sequence: Synthetic oligonucleotide
  Antisense strand to SEQ ID NO: 2254332
cugugaagcacucuuaucc

SEQ ID NO: 2254334 - RNA, 19 nt, Artificial Sequence
  Description of Artificial Sequence: Synthetic oligonucleotide
  Sense strand starting at position 1667 of SEQ ID NO: 1884288
aaagaaugccuaggagcaa

SEQ ID NO: 2254335 - RNA, 19 nt, Artificial Sequence
  Description of Artificial Sequence: Synthetic oligonucleotide
  Antisense strand to SEQ ID NO: 2254334
uugcuccuaggcauucuuu

SEQ ID NO: 2254336 - RNA, 19 nt, Artificial Sequence
  Description of Artificial Sequence: Synthetic oligonucleotide
  Sense strand starting at position 1668 of SEQ ID NO: 1884288
aagaaugccuaggagcaaa

SEQ ID NO: 2254337 - RNA, 19 nt, Artificial Sequence
  Description of Artificial Sequence: Synthetic oligonucleotide
  Antisense strand to SEQ ID NO: 2254336
uuugcuccuaggcauucuu

SEQ ID NO: 2254338 - RNA, 19 nt, Artificial Sequence
  Description of Artificial Sequence: Synthetic oligonucleotide
  Sense strand starting at position 2026 of SEQ ID NO: 1884288
cuaagucguuccgaggaag

SEQ ID NO: 2254339 - RNA, 19 nt, Artificial Sequence
  Description of Artificial Sequence: Synthetic oligonucleotide
  Antisense strand to SEQ ID NO: 2254338
cuuccucggaacgacuuag

SEQ ID NO: 2254340 - RNA, 19 nt, Artificial Sequence
  Description of Artificial Sequence: Synthetic oligonucleotide
  Sense strand starting at position 2067 of SEQ ID NO: 1884288
cccucuaauuucugcgagu

SEQ ID NO: 2254341 - RNA, 19 nt, Artificial Sequence
  Description of Artificial Sequence: Synthetic oligonucleotide
  Antisense strand to SEQ ID NO: 2254340
acucgcagaaauuagaggg

SEQ ID NO: 2254342 - RNA, 19 nt, Artificial Sequence
  Description of Artificial Sequence: Synthetic oligonucleotide
  Sense strand starting at position 2068 of SEQ ID NO: 1884288
ccucuaauuucugcgaguu

SEQ ID NO: 2254343 - RNA, 19 nt, Artificial Sequence
  Description of Artificial Sequence: Synthetic oligonucleotide
  Antisense strand to SEQ ID NO: 2254342
aacucgcagaaauuagagg

SEQ ID NO: 2254344 - RNA, 19 nt, Artificial Sequence
  Description of Artificial Sequence: Synthetic oligonucleotide
  Sense strand starting at position 2069 of SEQ ID NO: 1884288
cucuaauuucugcgaguuc

SEQ ID NO: 2254345 - RNA, 19 nt, Artificial Sequence
  Description of Artificial Sequence: Synthetic oligonucleotide
  Antisense strand to SEQ ID NO: 2254344
gaacucgcagaaauuagag

SEQ ID NO: 2254346 - RNA, 19 nt, Artificial Sequence
  Description of Artificial Sequence: Synthetic oligonucleotide
  Sense strand starting at position 2271 of SEQ ID NO: 1884288
cuccgcuucccuggaagaa

SEQ ID NO: 2254347 - RNA, 19 nt, Artificial Sequence
  Description of Artificial Sequence: Synthetic oligonucleotide
  Antisense strand to SEQ ID NO: 2254346
uucuuccagggaagcggag

SEQ ID NO: 2254348 - RNA, 19 nt, Artificial Sequence
  Description of Artificial Sequence: Synthetic oligonucleotide
  Sense strand starting at position 2361 of SEQ ID NO: 1884288
ccgacucggcguuccaaua

SEQ ID NO: 2254349 - RNA, 19 nt, Artificial Sequence
  Description of Artificial Sequence: Synthetic oligonucleotide
  Antisense strand to SEQ ID NO: 2254348
uauuggaacgccgagucgg

SEQ ID NO: 2254350 - RNA, 19 nt, Artificial Sequence
  Description of Artificial Sequence: Synthetic oligonucleotide
  Sense strand starting at position 2904 of SEQ ID NO: 1884288
gcacuuuacucucgcuauu

SEQ ID NO: 2254351 - RNA, 19 nt, Artificial Sequence
  Description of Artificial Sequence: Synthetic oligonucleotide
  Antisense strand to SEQ ID NO: 2254350
aauagcgagaguaaagugc

SEQ ID NO: 2254352 - RNA, 19 nt, Artificial Sequence
  Description of Artificial Sequence: Synthetic oligonucleotide
  Sense strand starting at position 3079 of SEQ ID NO: 1884288
gucgcacccgccuuguaau

SEQ ID NO: 2254353 - RNA, 19 nt, Artificial Sequence
  Description of Artificial Sequence: Synthetic oligonucleotide
  Antisense strand to SEQ ID NO: 2254352
auuacaaggcgggugcgac

SEQ ID NO: 2254354 - RNA, 19 nt, Artificial Sequence
  Description of Artificial Sequence: Synthetic oligonucleotide
  Sense strand starting at position 3155 of SEQ ID NO: 1884288
auugauugcggucgaggaa

SEQ ID NO: 2254355 - RNA, 19 nt, Artificial Sequence
  Description of Artificial Sequence: Synthetic oligonucleotide
  Antisense strand to SEQ ID NO: 2254354
uuccucgaccgcaaucaau

SEQ ID NO: 2254356 - RNA, 19 nt, Artificial Sequence
  Description of Artificial Sequence: Synthetic oligonucleotide
  Sense strand starting at position 3168 of SEQ ID NO: 1884288
gaggaacauugacaauuga

SEQ ID NO: 2254357 - RNA, 19 nt, Artificial Sequence
  Description of Artificial Sequence: Synthetic oligonucleotide
  Antisense strand to SEQ ID NO: 2254356
ucaauugucaauguuccuc

SEQ ID NO: 2254358 - RNA, 19 nt, Artificial Sequence
  Description of Artificial Sequence: Synthetic oligonucleotide
  Sense strand starting at position 3424 of SEQ ID NO: 1884288
cgcggaaucugaggaaauu

SEQ ID NO: 2254359 - RNA, 19 nt, Artificial Sequence
  Description of Artificial Sequence: Synthetic oligonucleotide
  Antisense strand to SEQ ID NO: 2254358
aauuuccucagauuccgcg

SEQ ID NO: 2254360 - RNA, 19 nt, Artificial Sequence
  Description of Artificial Sequence: Synthetic oligonucleotide
  Sense strand starting at position 57 of SEQ ID NO: 1884287
aggccuggcgcagaguaau

SEQ ID NO: 2254361 - RNA, 19 nt, Artificial Sequence
  Description of Artificial Sequence: Synthetic oligonucleotide
  Antisense strand to SEQ ID NO: 2254360
auuacucugcgccaggccu

SEQ ID NO: 2254362 - RNA, 19 nt, Artificial Sequence
  Description of Artificial Sequence: Synthetic oligonucleotide
  Sense strand starting at position 377 of SEQ ID NO: 1884287
guaauaagcugcuggaauu

SEQ ID NO: 2254363 - RNA, 19 nt, Artificial Sequence
  Description of Artificial Sequence: Synthetic oligonucleotide
  Antisense strand to SEQ ID NO: 2254362
aauuccagcagcuuauuac

SEQ ID NO: 2254364 - RNA, 19 nt, Artificial Sequence
  Description of Artificial Sequence: Synthetic oligonucleotide
  Sense strand starting at position 624 of SEQ ID NO: 1884287
ggauaagagugcuucacag

SEQ ID NO: 2254365 - RNA, 19 nt, Artificial Sequence
  Description of Artificial Sequence: Synthetic oligonucleotide
  Antisense strand to SEQ ID NO: 2254364
cugugaagcacucuuaucc

SEQ ID NO: 2254366 - RNA, 19 nt, Artificial Sequence
  Description of Artificial Sequence: Synthetic oligonucleotide
  Sense strand starting at position 965 of SEQ ID NO: 1884287
aaagaaugccuaggagcaa

SEQ ID NO: 2254367 - RNA, 19 nt, Artificial Sequence
  Description of Artificial Sequence: Synthetic oligonucleotide
  Antisense strand to SEQ ID NO: 2254366
uugcuccuaggcauucuuu

SEQ ID NO: 2254368 - RNA, 19 nt, Artificial Sequence
  Description of Artificial Sequence: Synthetic oligonucleotide
  Sense strand starting at position 966 of SEQ ID NO: 1884287
aagaaugccuaggagcaaa

SEQ ID NO: 2254369 - RNA, 19 nt, Artificial Sequence
  Description of Artificial Sequence: Synthetic oligonucleotide
  Antisense strand to SEQ ID NO: 2254368
uuugcuccuaggcauucuu

SEQ ID NO: 2254370 - RNA, 19 nt, Artificial Sequence
  Description of Artificial Sequence: Synthetic oligonucleotide
  Sense strand starting at position 1324 of SEQ ID NO: 1884287
cuaagucguuccgaggaag

SEQ ID NO: 2254371 - RNA, 19 nt, Artificial Sequence
  Description of Artificial Sequence: Synthetic oligonucleotide
  Antisense strand to SEQ ID NO: 2254370
cuuccucggaacgacuuag

SEQ ID NO: 2254372 - RNA, 19 nt, Artificial Sequence
  Description of Artificial Sequence: Synthetic oligonucleotide
  Sense strand starting at position 1365 of SEQ ID NO: 1884287
cccucuaauuucugcgagu

SEQ ID NO: 2254373 - RNA, 19 nt, Artificial Sequence
  Description of Artificial Sequence: Synthetic oligonucleotide
  Antisense strand to SEQ ID NO: 2254372
acucgcagaaauuagaggg

SEQ ID NO: 2254374 - RNA, 19 nt, Artificial Sequence
  Description of Artificial Sequence: Synthetic oligonucleotide
  Sense strand starting at position 1366 of SEQ ID NO: 1884287
ccucuaauuucugcgaguu

SEQ ID NO: 2254375 - RNA, 19 nt, Artificial Sequence
  Description of Artificial Sequence: Synthetic oligonucleotide
  Antisense strand to SEQ ID NO: 2254374
aacucgcagaaauuagagg

SEQ ID NO: 2254376 - RNA, 19 nt, Artificial Sequence
  Description of Artificial Sequence: Synthetic oligonucleotide
  Sense strand starting at position 1367 of SEQ ID NO: 1884287
cucuaauuucugcgaguuc

SEQ ID NO: 2254377 - RNA, 19 nt, Artificial Sequence
  Description of Artificial Sequence: Synthetic oligonucleotide
  Antisense strand to SEQ ID NO: 2254376
gaacucgcagaaauuagag

SEQ ID NO: 2254378 - RNA, 19 nt, Artificial Sequence
  Description of Artificial Sequence: Synthetic oligonucleotide
  Sense strand starting at position 1569 of SEQ ID NO: 1884287
cuccgcuucccuggaagaa

SEQ ID NO: 2254379 - RNA, 19 nt, Artificial Sequence
  Description of Artificial Sequence: Synthetic oligonucleotide
  Antisense strand to SEQ ID NO: 2254378
uucuuccagggaagcggag

SEQ ID NO: 2254380 - RNA, 19 nt, Artificial Sequence
  Description of Artificial Sequence: Synthetic oligonucleotide
  Sense strand starting at position 1659 of SEQ ID NO: 1884287
ccgacucggcguuccaaua

SEQ ID NO: 2254381 - RNA, 19 nt, Artificial Sequence
  Description of Artificial Sequence: Synthetic oligonucleotide
  Antisense strand to SEQ ID NO: 2254380
uauuggaacgccgagucgg

SEQ ID NO: 2254382 - RNA, 19 nt, Artificial Sequence
  Description of Artificial Sequence: Synthetic oligonucleotide
  Sense strand starting at position 2202 of SEQ ID NO: 1884287
gcacuuuacucucgcuauu

SEQ ID NO: 2254383 - RNA, 19 nt, Artificial Sequence
  Description of Artificial Sequence: Synthetic oligonucleotide
  Antisense strand to SEQ ID NO: 2254382
aauagcgagaguaaagugc

SEQ ID NO: 2254384 - RNA, 19 nt, Artificial Sequence
  Description of Artificial Sequence: Synthetic oligonucleotide
  Sense strand starting at position 2377 of SEQ ID NO: 1884287
gucgcacccgccuuguaau

SEQ ID NO: 2254385 - RNA, 19 nt, Artificial Sequence
  Description of Artificial Sequence: Synthetic oligonucleotide
  Antisense strand to SEQ ID NO: 2254384
auuacaaggcgggugcgac

SEQ ID NO: 2254386 - RNA, 19 nt, Artificial Sequence
  Description of Artificial Sequence: Synthetic oligonucleotide
  Sense strand starting at position 2453 of SEQ ID NO: 1884287
auugauugcggucgaggaa

SEQ ID NO: 2254387 - RNA, 19 nt, Artificial Sequence
  Description of Artificial Sequence: Synthetic oligonucleotide
  Antisense strand to SEQ ID NO: 2254386
uuccucgaccgcaaucaau

SEQ ID NO: 2254388 - RNA, 19 nt, Artificial Sequence
  Description of Artificial Sequence: Synthetic oligonucleotide
  Sense strand starting at position 2466 of SEQ ID NO: 1884287
gaggaacauugacaauuga

SEQ ID NO: 2254389 - RNA, 19 nt, Artificial Sequence
  Description of Artificial Sequence: Synthetic oligonucleotide
  Antisense strand to SEQ ID NO: 2254388
ucaauugucaauguuccuc

SEQ ID NO: 2254390 - RNA, 19 nt, Artificial Sequence
  Description of Artificial Sequence: Synthetic oligonucleotide
  Sense strand starting at position 2722 of SEQ ID NO: 1884287
cgcggaaucugaggaaauu

SEQ ID NO: 2254391 - RNA, 19 nt, Artificial Sequence
  Description of Artificial Sequence: Synthetic oligonucleotide
  Antisense strand to SEQ ID NO: 2254390
aauuuccucagauuccgcg

SEQ ID NO: 2254392 - RNA, 19 nt, Artificial Sequence
  Description of Artificial Sequence: Synthetic oligonucleotide
  Sense strand starting at position 3650 of SEQ ID NO: 1884287
cucgcuuucugcccuaaga

SEQ ID NO: 2254393 - RNA, 19 nt, Artificial Sequence
  Description of Artificial Sequence: Synthetic oligonucleotide
  Antisense strand to SEQ ID NO: 2254392
ucuuagggcagaaagcgag

SEQ ID NO: 2254394 - RNA, 19 nt, Artificial Sequence
  Description of Artificial Sequence: Synthetic oligonucleotide
  Sense strand starting at position 3652 of SEQ ID NO: 1884287
cgcuuucugcccuaagaag

SEQ ID NO: 2254395 - RNA, 19 nt, Artificial Sequence
  Description of Artificial Sequence: Synthetic oligonucleotide
  Antisense strand to SEQ ID NO: 2254394
cuucuuagggcagaaagcg

SEQ ID NO: 2254396 - RNA, 19 nt, Artificial Sequence
  Description of Artificial Sequence: Synthetic oligonucleotide
  Sense strand starting at position 3734 of SEQ ID NO: 1884287
cagcgcgcucucuggaaau

SEQ ID NO: 2254397 - RNA, 19 nt, Artificial Sequence
  Description of Artificial Sequence: Synthetic oligonucleotide
  Antisense strand to SEQ ID NO: 2254396
auuuccagagagcgcgcug

SEQ ID NO: 2254398 - RNA, 19 nt, Artificial Sequence
  Description of Artificial Sequence: Synthetic oligonucleotide
  Sense strand starting at position 3853 of SEQ ID NO: 1884287
caaucaaggugcugaagau

SEQ ID NO: 2254399 - RNA, 19 nt, Artificial Sequence
  Description of Artificial Sequence: Synthetic oligonucleotide
  Antisense strand to SEQ ID NO: 2254398
aucuucagcaccuugauug

SEQ ID NO: 2254400 - RNA, 19 nt, Artificial Sequence
  Description of Artificial Sequence: Synthetic oligonucleotide
  Sense strand starting at position 45 of SEQ ID NO: 1884289
gggaaauacucccuggcaa

SEQ ID NO: 2254401 - RNA, 19 nt, Artificial Sequence
  Description of Artificial Sequence: Synthetic oligonucleotide
  Antisense strand to SEQ ID NO: 2254400
uugccagggaguauuuccc

SEQ ID NO: 2254402 - RNA, 19 nt, Artificial Sequence
  Description of Artificial Sequence: Synthetic oligonucleotide
  Sense strand starting at position 46 of SEQ ID NO: 1884289
ggaaauacucccuggcaag

SEQ ID NO: 2254403 - RNA, 19 nt, Artificial Sequence
  Description of Artificial Sequence: Synthetic oligonucleotide
  Antisense strand to SEQ ID NO: 2254402
cuugccagggaguauuucc

SEQ ID NO: 2254404 - RNA, 19 nt, Artificial Sequence
  Description of Artificial Sequence: Synthetic oligonucleotide
  Sense strand starting at position 47 of SEQ ID NO: 1884289
gaaauacucccuggcaagu

SEQ ID NO: 2254405 - RNA, 19 nt, Artificial Sequence
  Description of Artificial Sequence: Synthetic oligonucleotide
  Antisense strand to SEQ ID NO: 2254404
acuugccagggaguauuuc

SEQ ID NO: 2254406 - RNA, 19 nt, Artificial Sequence
  Description of Artificial Sequence: Synthetic oligonucleotide
  Sense strand starting at position 474 of SEQ ID NO: 1884289
ugaccugucaggcggauua

SEQ ID NO: 2254407 - RNA, 19 nt, Artificial Sequence
  Description of Artificial Sequence: Synthetic oligonucleotide
  Antisense strand to SEQ ID NO: 2254406
uaauccgccugacagguca

SEQ ID NO: 2254408 - RNA, 19 nt, Artificial Sequence
  Description of Artificial Sequence: Synthetic oligonucleotide
  Sense strand starting at position 485 of SEQ ID NO: 1884289
gcggauuaucuucgaggga

SEQ ID NO: 2254409 - RNA, 19 nt, Artificial Sequence
  Description of Artificial Sequence: Synthetic oligonucleotide
  Antisense strand to SEQ ID NO: 2254408
ucccucgaagauaauccgc

SEQ ID NO: 2254410 - RNA, 19 nt, Artificial Sequence
  Description of Artificial Sequence: Synthetic oligonucleotide
  Sense strand starting at position 486 of SEQ ID NO: 1884289
cggauuaucuucgagggag

SEQ ID NO: 2254411 - RNA, 19 nt, Artificial Sequence
  Description of Artificial Sequence: Synthetic oligonucleotide
  Antisense strand to SEQ ID NO: 2254410
cucccucgaagauaauccg

SEQ ID NO: 2254412 - RNA, 19 nt, Artificial Sequence
  Description of Artificial Sequence: Synthetic oligonucleotide
  Sense strand starting at position 488 of SEQ ID NO: 1884289
gauuaucuucgagggagau

SEQ ID NO: 2254413 - RNA, 19 nt, Artificial Sequence
  Description of Artificial Sequence: Synthetic oligonucleotide
  Antisense strand to SEQ ID NO: 2254412
aucucccucgaagauaauc

SEQ ID NO: 2254414 - RNA, 19 nt, Artificial Sequence
  Description of Artificial Sequence: Synthetic oligonucleotide
  Sense strand starting at position 489 of SEQ ID NO: 1884289
auuaucuucgagggagauu

SEQ ID NO: 2254415 - RNA, 19 nt, Artificial Sequence
  Description of Artificial Sequence: Synthetic oligonucleotide
  Antisense strand to SEQ ID NO: 2254414
aaucucccucgaagauaau

SEQ ID NO: 2254416 - RNA, 19 nt, Artificial Sequence
  Description of Artificial Sequence: Synthetic oligonucleotide
  Sense strand starting at position 539 of SEQ ID NO: 1884289
uuuguuugaugugacaacu

SEQ ID NO: 2254417 - RNA, 19 nt, Artificial Sequence
  Description of Artificial Sequence: Synthetic oligonucleotide
  Antisense strand to SEQ ID NO: 2254416
aguugucacaucaaacaaa

SEQ ID NO: 2254418 - RNA, 19 nt, Artificial Sequence
  Description of Artificial Sequence: Synthetic oligonucleotide
  Sense strand starting at position 557 of SEQ ID NO: 1884289
ucugauaggcguugauuua

SEQ ID NO: 2254419 - RNA, 19 nt, Artificial Sequence
  Description of Artificial Sequence: Synthetic oligonucleotide
  Antisense strand to SEQ ID NO: 2254418
uaaaucaacgccuaucaga

SEQ ID NO: 2254420 - RNA, 19 nt, Artificial Sequence
  Description of Artificial Sequence: Synthetic oligonucleotide
  Sense strand starting at position 564 of SEQ ID NO: 1884289
ggcguugauuuacuuacaa

SEQ ID NO: 2254421 - RNA, 19 nt, Artificial Sequence
  Description of Artificial Sequence: Synthetic oligonucleotide
  Antisense strand to SEQ ID NO: 2254420
uuguaaguaaaucaacgcc

SEQ ID NO: 2254422 - RNA, 19 nt, Artificial Sequence
  Description of Artificial Sequence: Synthetic oligonucleotide
  Sense strand starting at position 680 of SEQ ID NO: 1884289
uagccaucucgacagugaa

SEQ ID NO: 2254423 - RNA, 19 nt, Artificial Sequence
  Description of Artificial Sequence: Synthetic oligonucleotide
  Antisense strand to SEQ ID NO: 2254422
uucacugucgagauggcua

SEQ ID NO: 2254424 - RNA, 19 nt, Artificial Sequence
  Description of Artificial Sequence: Synthetic oligonucleotide
  Sense strand starting at position 880 of SEQ ID NO: 1884289
aggccuggcgcagaguaau

SEQ ID NO: 2254425 - RNA, 19 nt, Artificial Sequence
  Description of Artificial Sequence: Synthetic oligonucleotide
  Antisense strand to SEQ ID NO: 2254424
auuacucugcgccaggccu

SEQ ID NO: 2254426 - RNA, 19 nt, Artificial Sequence
  Description of Artificial Sequence: Synthetic oligonucleotide
  Sense strand starting at position 1200 of SEQ ID NO: 1884289
guaauaagcugcuggaauu

SEQ ID NO: 2254427 - RNA, 19 nt, Artificial Sequence
  Description of Artificial Sequence: Synthetic oligonucleotide
  Antisense strand to SEQ ID NO: 2254426
aauuccagcagcuuauuac

SEQ ID NO: 2254428 - RNA, 19 nt, Artificial Sequence
  Description of Artificial Sequence: Synthetic oligonucleotide
  Sense strand starting at position 1447 of SEQ ID NO: 1884289
ggauaagagugcuucacag

SEQ ID NO: 2254429 - RNA, 19 nt, Artificial Sequence
  Description of Artificial Sequence: Synthetic oligonucleotide
  Antisense strand to SEQ ID NO: 2254428
cugugaagcacucuuaucc

SEQ ID NO: 2254430 - RNA, 19 nt, Artificial Sequence
  Description of Artificial Sequence: Synthetic oligonucleotide
  Sense strand starting at position 1788 of SEQ ID NO: 1884289
aaagaaugccuaggagcaa

SEQ ID NO: 2254431 - RNA, 19 nt, Artificial Sequence
  Description of Artificial Sequence: Synthetic oligonucleotide
  Antisense strand to SEQ ID NO: 2254430
uugcuccuaggcauucuuu

SEQ ID NO: 2254432 - RNA, 19 nt, Artificial Sequence
  Description of Artificial Sequence: Synthetic oligonucleotide
  Sense strand starting at position 1789 of SEQ ID NO: 1884289
aagaaugccuaggagcaaa

SEQ ID NO: 2254433 - RNA, 19 nt, Artificial Sequence
  Description of Artificial Sequence: Synthetic oligonucleotide
  Antisense strand to SEQ ID NO: 2254432
uuugcuccuaggcauucuu

SEQ ID NO: 2254434 - RNA, 19 nt, Artificial Sequence
  Description of Artificial Sequence: Synthetic oligonucleotide
  Sense strand starting at position 2147 of SEQ ID NO: 1884289
cuaagucguuccgaggaag

SEQ ID NO: 2254435 - RNA, 19 nt, Artificial Sequence
  Description of Artificial Sequence: Synthetic oligonucleotide
  Antisense strand to SEQ ID NO: 2254434
cuuccucggaacgacuuag

SEQ ID NO: 2254436 - RNA, 19 nt, Artificial Sequence
  Description of Artificial Sequence: Synthetic oligonucleotide
  Sense strand starting at position 2188 of SEQ ID NO: 1884289
cccucuaauuucugcgagu

SEQ ID NO: 2254437 - RNA, 19 nt, Artificial Sequence
  Description of Artificial Sequence: Synthetic oligonucleotide
  Antisense strand to SEQ ID NO: 2254436
acucgcagaaauuagaggg

SEQ ID NO: 2254438 - RNA, 19 nt, Artificial Sequence
  Description of Artificial Sequence: Synthetic oligonucleotide
  Sense strand starting at position 2189 of SEQ ID NO: 1884289
ccucuaauuucugcgaguu

SEQ ID NO: 2254439 - RNA, 19 nt, Artificial Sequence
  Description of Artificial Sequence: Synthetic oligonucleotide
  Antisense strand to SEQ ID NO: 2254438
aacucgcagaaauuagagg

SEQ ID NO: 2254440 - RNA, 19 nt, Artificial Sequence
  Description of Artificial Sequence: Synthetic oligonucleotide
  Sense strand starting at position 2190 of SEQ ID NO: 1884289
cucuaauuucugcgaguuc

SEQ ID NO: 2254441 - RNA, 19 nt, Artificial Sequence
  Description of Artificial Sequence: Synthetic oligonucleotide
  Antisense strand to SEQ ID NO: 2254440
gaacucgcagaaauuagag

SEQ ID NO: 2254442 - RNA, 19 nt, Artificial Sequence
  Description of Artificial Sequence: Synthetic oligonucleotide
  Sense strand starting at position 2392 of SEQ ID NO: 1884289
cuccgcuucccuggaagaa

SEQ ID NO: 2254443 - RNA, 19 nt, Artificial Sequence
  Description of Artificial Sequence: Synthetic oligonucleotide
  Antisense strand to SEQ ID NO: 2254442
uucuuccagggaagcggag

SEQ ID NO: 2254444 - RNA, 19 nt, Artificial Sequence
  Description of Artificial Sequence: Synthetic oligonucleotide
  Sense strand starting at position 2482 of SEQ ID NO: 1884289
ccgacucggcguuccaaua

SEQ ID NO: 2254445 - RNA, 19 nt, Artificial Sequence
  Description of Artificial Sequence: Synthetic oligonucleotide
  Antisense strand to SEQ ID NO: 2254444
uauuggaacgccgagucgg

SEQ ID NO: 2254446 - RNA, 19 nt, Artificial Sequence
  Description of Artificial Sequence: Synthetic oligonucleotide
  Sense strand starting at position 3025 of SEQ ID NO: 1884289
gcacuuuacucucgcuauu

SEQ ID NO: 2254447 - RNA, 19 nt, Artificial Sequence
  Description of Artificial Sequence: Synthetic oligonucleotide
  Antisense strand to SEQ ID NO: 2254446
aauagcgagaguaaagugc

SEQ ID NO: 2254448 - RNA, 19 nt, Artificial Sequence
  Description of Artificial Sequence: Synthetic oligonucleotide
  Sense strand starting at position 3200 of SEQ ID NO: 1884289
gucgcacccgccuuguaau

SEQ ID NO: 2254449 - RNA, 19 nt, Artificial Sequence
  Description of Artificial Sequence: Synthetic oligonucleotide
  Antisense strand to SEQ ID NO: 2254448
auuacaaggcgggugcgac

SEQ ID NO: 2254450 - RNA, 19 nt, Artificial Sequence
  Description of Artificial Sequence: Synthetic oligonucleotide
  Sense strand starting at position 3276 of SEQ ID NO: 1884289
auugauugcggucgaggaa

SEQ ID NO: 2254451 - RNA, 19 nt, Artificial Sequence
  Description of Artificial Sequence: Synthetic oligonucleotide
  Antisense strand to SEQ ID NO: 2254450
uuccucgaccgcaaucaau

SEQ ID NO: 2254452 - RNA, 19 nt, Artificial Sequence
  Description of Artificial Sequence: Synthetic oligonucleotide
  Sense strand starting at position 3289 of SEQ ID NO: 1884289
gaggaacauugacaauuga

SEQ ID NO: 2254453 - RNA, 19 nt, Artificial Sequence
  Description of Artificial Sequence: Synthetic oligonucleotide
  Antisense strand to SEQ ID NO: 2254452
ucaauugucaauguuccuc

SEQ ID NO: 2254454 - RNA, 19 nt, Artificial Sequence
  Description of Artificial Sequence: Synthetic oligonucleotide
  Sense strand starting at position 3545 of SEQ ID NO: 1884289
cgcggaaucugaggaaauu

SEQ ID NO: 2254455 - RNA, 19 nt, Artificial Sequence
  Description of Artificial Sequence: Synthetic oligonucleotide
  Antisense strand to SEQ ID NO: 2254454
aauuuccucagauuccgcg

SEQ ID NO: 2254456 - RNA, 19 nt, Artificial Sequence
  Description of Artificial Sequence: Synthetic oligonucleotide
  Sense strand starting at position 220 of SEQ ID NO: 1884286
guaauaagcugcuggaauu

SEQ ID NO: 2254457 - RNA, 19 nt, Artificial Sequence
  Description of Artificial Sequence: Synthetic oligonucleotide
  Antisense strand to SEQ ID NO: 2254456
aauuccagcagcuuauuac

SEQ ID NO: 2254458 - RNA, 19 nt, Artificial Sequence
  Description of Artificial Sequence: Synthetic oligonucleotide
  Sense strand starting at position 467 of SEQ ID NO: 1884286
ggauaagagugcuucacag

SEQ ID NO: 2254459 - RNA, 19 nt, Artificial Sequence
  Description of Artificial Sequence: Synthetic oligonucleotide
  Antisense strand to SEQ ID NO: 2254458
cugugaagcacucuuaucc

SEQ ID NO: 2254460 - RNA, 19 nt, Artificial Sequence
  Description of Artificial Sequence: Synthetic oligonucleotide
  Sense strand starting at position 808 of SEQ ID NO: 1884286
aaagaaugccuaggagcaa

SEQ ID NO: 2254461 - RNA, 19 nt, Artificial Sequence
  Description of Artificial Sequence: Synthetic oligonucleotide
  Antisense strand to SEQ ID NO: 2254460
uugcuccuaggcauucuuu

SEQ ID NO: 2254462 - RNA, 19 nt, Artificial Sequence
  Description of Artificial Sequence: Synthetic oligonucleotide
  Sense strand starting at position 809 of SEQ ID NO: 1884286
aagaaugccuaggagcaaa

SEQ ID NO: 2254463 - RNA, 19 nt, Artificial Sequence
  Description of Artificial Sequence: Synthetic oligonucleotide
  Antisense strand to SEQ ID NO: 2254462
uuugcuccuaggcauucuu

SEQ ID NO: 2254464 - RNA, 19 nt, Artificial Sequence
  Description of Artificial Sequence: Synthetic oligonucleotide
  Sense strand starting at position 1167 of SEQ ID NO: 1884286
cuaagucguuccgaggaag

SEQ ID NO: 2254465 - RNA, 19 nt, Artificial Sequence
  Description of Artificial Sequence: Synthetic oligonucleotide
  Antisense strand to SEQ ID NO: 2254464
cuuccucggaacgacuuag

SEQ ID NO: 2254466 - RNA, 19 nt, Artificial Sequence
  Description of Artificial Sequence: Synthetic oligonucleotide
  Sense strand starting at position 1208 of SEQ ID NO: 1884286
cccucuaauuucugcgagu

SEQ ID NO: 2254467 - RNA, 19 nt, Artificial Sequence
  Description of Artificial Sequence: Synthetic oligonucleotide
  Antisense strand to SEQ ID NO: 2254466
acucgcagaaauuagaggg

SEQ ID NO: 2254468 - RNA, 19 nt, Artificial Sequence
  Description of Artificial Sequence: Synthetic oligonucleotide
  Sense strand starting at position 1209 of SEQ ID NO: 1884286
ccucuaauuucugcgaguu

SEQ ID NO: 2254469 - RNA, 19 nt, Artificial Sequence
  Description of Artificial Sequence: Synthetic oligonucleotide
  Antisense strand to SEQ ID NO: 2254468
aacucgcagaaauuagagg

SEQ ID NO: 2254470 - RNA, 19 nt, Artificial Sequence
  Description of Artificial Sequence: Synthetic oligonucleotide
  Sense strand starting at position 1210 of SEQ ID NO: 1884286
cucuaauuucugcgaguuc

SEQ ID NO: 2254471 - RNA, 19 nt, Artificial Sequence
  Description of Artificial Sequence: Synthetic oligonucleotide
  Antisense strand to SEQ ID NO: 2254470
gaacucgcagaaauuagag

SEQ ID NO: 2254472 - RNA, 19 nt, Artificial Sequence
  Description of Artificial Sequence: Synthetic oligonucleotide
  Sense strand starting at position 1412 of SEQ ID NO: 1884286
cuccgcuucccuggaagaa

SEQ ID NO: 2254473 - RNA, 19 nt, Artificial Sequence
  Description of Artificial Sequence: Synthetic oligonucleotide
  Antisense strand to SEQ ID NO: 2254472
uucuuccagggaagcggag

SEQ ID NO: 2254474 - RNA, 19 nt, Artificial Sequence
  Description of Artificial Sequence: Synthetic oligonucleotide
  Sense strand starting at position 1502 of SEQ ID NO: 1884286
ccgacucggcguuccaaua

SEQ ID NO: 2254475 - RNA, 19 nt, Artificial Sequence
  Description of Artificial Sequence: Synthetic oligonucleotide
  Antisense strand to SEQ ID NO: 2254474
uauuggaacgccgagucgg

SEQ ID NO: 2254476 - RNA, 19 nt, Artificial Sequence
  Description of Artificial Sequence: Synthetic oligonucleotide
  Sense strand starting at position 2045 of SEQ ID NO: 1884286
gcacuuuacucucgcuauu

SEQ ID NO: 2254477 - RNA, 19 nt, Artificial Sequence
  Description of Artificial Sequence: Synthetic oligonucleotide
  Antisense strand to SEQ ID NO: 2254476
aauagcgagaguaaagugc

SEQ ID NO: 2254478 - RNA, 19 nt, Artificial Sequence
  Description of Artificial Sequence: Synthetic oligonucleotide
  Sense strand starting at position 2220 of SEQ ID NO: 1884286
gucgcacccgccuuguaau

SEQ ID NO: 2254479 - RNA, 19 nt, Artificial Sequence
  Description of Artificial Sequence: Synthetic oligonucleotide
  Antisense strand to SEQ ID NO: 2254478
auuacaaggcgggugcgac

SEQ ID NO: 2254480 - RNA, 19 nt, Artificial Sequence
  Description of Artificial Sequence: Synthetic oligonucleotide
  Sense strand starting at position 2296 of SEQ ID NO: 1884286
auugauugcggucgaggaa

SEQ ID NO: 2254481 - RNA, 19 nt, Artificial Sequence
  Description of Artificial Sequence: Synthetic oligonucleotide
  Antisense strand to SEQ ID NO: 2254480
uuccucgaccgcaaucaau

SEQ ID NO: 2254482 - RNA, 19 nt, Artificial Sequence
  Description of Artificial Sequence: Synthetic oligonucleotide
  Sense strand starting at position 2309 of SEQ ID NO: 1884286
gaggaacauugacaauuga

SEQ ID NO: 2254483 - RNA, 19 nt, Artificial Sequence
  Description of Artificial Sequence: Synthetic oligonucleotide
  Antisense strand to SEQ ID NO: 2254482
ucaauugucaauguuccuc

SEQ ID NO: 2254484 - RNA, 19 nt, Artificial Sequence
  Description of Artificial Sequence: Synthetic oligonucleotide
  Sense strand starting at position 2565 of SEQ ID NO: 1884286
cgcggaaucugaggaaauu

SEQ ID NO: 2254485 - RNA, 19 nt, Artificial Sequence
  Description of Artificial Sequence: Synthetic oligonucleotide
  Antisense strand to SEQ ID NO: 2254484
aauuuccucagauuccgcg

SEQ ID NO: 2254486 - RNA, 19 nt, Artificial Sequence
  Description of Artificial Sequence: Synthetic oligonucleotide
  Sense strand starting at position 3493 of SEQ ID NO: 1884286
cucgcuuucugcccuaaga

SEQ ID NO: 2254487 - RNA, 19 nt, Artificial Sequence
  Description of Artificial Sequence: Synthetic oligonucleotide
  Antisense strand to SEQ ID NO: 2254486
ucuuagggcagaaagcgag

SEQ ID NO: 2254488 - RNA, 19 nt, Artificial Sequence
  Description of Artificial Sequence: Synthetic oligonucleotide
  Sense strand starting at position 3495 of SEQ ID NO: 1884286
cgcuuucugcccuaagaag

SEQ ID NO: 2254489 - RNA, 19 nt, Artificial Sequence
  Description of Artificial Sequence: Synthetic oligonucleotide
  Antisense strand to SEQ ID NO: 2254488
cuucuuagggcagaaagcg

SEQ ID NO: 2254490 - RNA, 19 nt, Artificial Sequence
  Description of Artificial Sequence: Synthetic oligonucleotide
  Sense strand starting at position 3577 of SEQ ID NO: 1884286
cagcgcgcucucuggaaau

SEQ ID NO: 2254491 - RNA, 19 nt, Artificial Sequence
  Description of Artificial Sequence: Synthetic oligonucleotide
  Antisense strand to SEQ ID NO: 2254490
auuuccagagagcgcgcug

SEQ ID NO: 2254492 - RNA, 19 nt, Artificial Sequence
  Description of Artificial Sequence: Synthetic oligonucleotide
  Sense strand starting at position 3696 of SEQ ID NO: 1884286
caaucaaggugcugaagau

SEQ ID NO: 2254493 - RNA, 19 nt, Artificial Sequence
  Description of Artificial Sequence: Synthetic oligonucleotide
  Antisense strand to SEQ ID NO: 2254492
aucuucagcaccuugauug

SEQ ID NO: 2254494 - RNA, 19 nt, Artificial Sequence
  Description of Artificial Sequence: Synthetic oligonucleotide
  Sense strand starting at position 29 of SEQ ID NO: 1884290
acguuacagcuaugaaauu

SEQ ID NO: 2254495 - RNA, 19 nt, Artificial Sequence
  Description of Artificial Sequence: Synthetic oligonucleotide
  Antisense strand to SEQ ID NO: 2254494
aauuucauagcuguaacgu

SEQ ID NO: 2254496 - RNA, 19 nt, Artificial Sequence
  Description of Artificial Sequence: Synthetic oligonucleotide
  Sense strand starting at position 187 of SEQ ID NO: 1884290
agaggacuuugccaugagu

SEQ ID NO: 2254497 - RNA, 19 nt, Artificial Sequence
  Description of Artificial Sequence: Synthetic oligonucleotide
  Antisense strand to SEQ ID NO: 2254496
acucauggcaaaguccucu

SEQ ID NO: 2254498 - RNA, 19 nt, Artificial Sequence
  Description of Artificial Sequence: Synthetic oligonucleotide
  Sense strand starting at position 189 of SEQ ID NO: 1884290
aggacuuugccaugaguuu

SEQ ID NO: 2254499 - RNA, 19 nt, Artificial Sequence
  Description of Artificial Sequence: Synthetic oligonucleotide
  Antisense strand to SEQ ID NO: 2254498
aaacucauggcaaaguccu

SEQ ID NO: 2254500 - RNA, 19 nt, Artificial Sequence
  Description of Artificial Sequence: Synthetic oligonucleotide
  Sense strand starting at position 190 of SEQ ID NO: 1884290
ggacuuugccaugaguuuc

SEQ ID NO: 2254501 - RNA, 19 nt, Artificial Sequence
  Description of Artificial Sequence: Synthetic oligonucleotide
  Antisense strand to SEQ ID NO: 2254500
gaaacucauggcaaagucc

SEQ ID NO: 2254502 - RNA, 19 nt, Artificial Sequence
  Description of Artificial Sequence: Synthetic oligonucleotide
  Sense strand starting at position 196 of SEQ ID NO: 1884290
ugccaugaguuucugggaa

SEQ ID NO: 2254503 - RNA, 19 nt, Artificial Sequence
  Description of Artificial Sequence: Synthetic oligonucleotide
  Antisense strand to SEQ ID NO: 2254502
uucccagaaacucauggca

SEQ ID NO: 2254504 - RNA, 19 nt, Artificial Sequence
  Description of Artificial Sequence: Synthetic oligonucleotide
  Sense strand starting at position 198 of SEQ ID NO: 1884290
ccaugaguuucugggaacu

SEQ ID NO: 2254505 - RNA, 19 nt, Artificial Sequence
  Description of Artificial Sequence: Synthetic oligonucleotide
  Antisense strand to SEQ ID NO: 2254504
aguucccagaaacucaugg

SEQ ID NO: 2254506 - RNA, 19 nt, Artificial Sequence
  Description of Artificial Sequence: Synthetic oligonucleotide
  Sense strand starting at position 333 of SEQ ID NO: 1884290
gggaaauacucccuggcaa

SEQ ID NO: 2254507 - RNA, 19 nt, Artificial Sequence
  Description of Artificial Sequence: Synthetic oligonucleotide
  Antisense strand to SEQ ID NO: 2254506
uugccagggaguauuuccc

SEQ ID NO: 2254508 - RNA, 19 nt, Artificial Sequence
  Description of Artificial Sequence: Synthetic oligonucleotide
  Sense strand starting at position 334 of SEQ ID NO: 1884290
ggaaauacucccuggcaag

SEQ ID NO: 2254509 - RNA, 19 nt, Artificial Sequence
  Description of Artificial Sequence: Synthetic oligonucleotide
  Antisense strand to SEQ ID NO: 2254508
cuugccagggaguauuucc

SEQ ID NO: 2254510 - RNA, 19 nt, Artificial Sequence
  Description of Artificial Sequence: Synthetic oligonucleotide
  Sense strand starting at position 335 of SEQ ID NO: 1884290
gaaauacucccuggcaagu

SEQ ID NO: 2254511 - RNA, 19 nt, Artificial Sequence
  Description of Artificial Sequence: Synthetic oligonucleotide
  Antisense strand to SEQ ID NO: 2254510
acuugccagggaguauuuc

SEQ ID NO: 2254512 - RNA, 19 nt, Artificial Sequence
  Description of Artificial Sequence: Synthetic oligonucleotide
  Sense strand starting at position 762 of SEQ ID NO: 1884290
ugaccugucaggcggauua

SEQ ID NO: 2254513 - RNA, 19 nt, Artificial Sequence
  Description of Artificial Sequence: Synthetic oligonucleotide
  Antisense strand to SEQ ID NO: 2254512
uaauccgccugacagguca

SEQ ID NO: 2254514 - RNA, 19 nt, Artificial Sequence
  Description of Artificial Sequence: Synthetic oligonucleotide
  Sense strand starting at position 773 of SEQ ID NO: 1884290
gcggauuaucuucgaggga

SEQ ID NO: 2254515 - RNA, 19 nt, Artificial Sequence
  Description of Artificial Sequence: Synthetic oligonucleotide
  Antisense strand to SEQ ID NO: 2254514
ucccucgaagauaauccgc

SEQ ID NO: 2254516 - RNA, 19 nt, Artificial Sequence
  Description of Artificial Sequence: Synthetic oligonucleotide
  Sense strand starting at position 774 of SEQ ID NO: 1884290
cggauuaucuucgagggag

SEQ ID NO: 2254517 - RNA, 19 nt, Artificial Sequence
  Description of Artificial Sequence: Synthetic oligonucleotide
  Antisense strand to SEQ ID NO: 2254516
cucccucgaagauaauccg

SEQ ID NO: 2254518 - RNA, 19 nt, Artificial Sequence
  Description of Artificial Sequence: Synthetic oligonucleotide
  Sense strand starting at position 776 of SEQ ID NO: 1884290
gauuaucuucgagggagau

SEQ ID NO: 2254519 - RNA, 19 nt, Artificial Sequence
  Description of Artificial Sequence: Synthetic oligonucleotide
  Antisense strand to SEQ ID NO: 2254518
aucucccucgaagauaauc

SEQ ID NO: 2254520 - RNA, 19 nt, Artificial Sequence
  Description of Artificial Sequence: Synthetic oligonucleotide
  Sense strand starting at position 777 of SEQ ID NO: 1884290
auuaucuucgagggagauu

SEQ ID NO: 2254521 - RNA, 19 nt, Artificial Sequence
  Description of Artificial Sequence: Synthetic oligonucleotide
  Antisense strand to SEQ ID NO: 2254520
aaucucccucgaagauaau

SEQ ID NO: 2254522 - RNA, 19 nt, Artificial Sequence
  Description of Artificial Sequence: Synthetic oligonucleotide
  Sense strand starting at position 827 of SEQ ID NO: 1884290
uuuguuugaugugacaacu

SEQ ID NO: 2254523 - RNA, 19 nt, Artificial Sequence
  Description of Artificial Sequence: Synthetic oligonucleotide
  Antisense strand to SEQ ID NO: 2254522
aguugucacaucaaacaaa

SEQ ID NO: 2254524 - RNA, 19 nt, Artificial Sequence
  Description of Artificial Sequence: Synthetic oligonucleotide
  Sense strand starting at position 845 of SEQ ID NO: 1884290
ucugauaggcguugauuua

SEQ ID NO: 2254525 - RNA, 19 nt, Artificial Sequence
  Description of Artificial Sequence: Synthetic oligonucleotide
  Antisense strand to SEQ ID NO: 2254524
uaaaucaacgccuaucaga

SEQ ID NO: 2254526 - RNA, 19 nt, Artificial Sequence
  Description of Artificial Sequence: Synthetic oligonucleotide
  Sense strand starting at position 852 of SEQ ID NO: 1884290
ggcguugauuuacuuacaa

SEQ ID NO: 2254527 - RNA, 19 nt, Artificial Sequence
  Description of Artificial Sequence: Synthetic oligonucleotide
  Antisense strand to SEQ ID NO: 2254526
uuguaaguaaaucaacgcc

SEQ ID NO: 2254528 - RNA, 19 nt, Artificial Sequence
  Description of Artificial Sequence: Synthetic oligonucleotide
  Sense strand starting at position 968 of SEQ ID NO: 1884290
uagccaucucgacagugaa

SEQ ID NO: 2254529 - RNA, 19 nt, Artificial Sequence
  Description of Artificial Sequence: Synthetic oligonucleotide
  Antisense strand to SEQ ID NO: 2254528
uucacugucgagauggcua

SEQ ID NO: 2254530 - RNA, 19 nt, Artificial Sequence
  Description of Artificial Sequence: Synthetic oligonucleotide
  Sense strand starting at position 1168 of SEQ ID NO: 1884290
aggccuggcgcagaguaau

SEQ ID NO: 2254531 - RNA, 19 nt, Artificial Sequence
  Description of Artificial Sequence: Synthetic oligonucleotide
  Antisense strand to SEQ ID NO: 2254530
auuacucugcgccaggccu

SEQ ID NO: 2254532 - RNA, 19 nt, Artificial Sequence
  Description of Artificial Sequence: Synthetic oligonucleotide
  Sense strand starting at position 1488 of SEQ ID NO: 1884290
guaauaagcugcuggaauu

SEQ ID NO: 2254533 - RNA, 19 nt, Artificial Sequence
  Description of Artificial Sequence: Synthetic oligonucleotide
  Antisense strand to SEQ ID NO: 2254532
aauuccagcagcuuauuac

SEQ ID NO: 2254534 - RNA, 19 nt, Artificial Sequence
  Description of Artificial Sequence: Synthetic oligonucleotide
  Sense strand starting at position 1735 of SEQ ID NO: 1884290
ggauaagagugcuucacag

SEQ ID NO: 2254535 - RNA, 19 nt, Artificial Sequence
  Description of Artificial Sequence: Synthetic oligonucleotide
  Antisense strand to SEQ ID NO: 2254534
cugugaagcacucuuaucc

SEQ ID NO: 2254536 - RNA, 19 nt, Artificial Sequence
  Description of Artificial Sequence: Synthetic oligonucleotide
  Sense strand starting at position 2076 of SEQ ID NO: 1884290
aaagaaugccuaggagcaa

SEQ ID NO: 2254537 - RNA, 19 nt, Artificial Sequence
  Description of Artificial Sequence: Synthetic oligonucleotide
  Antisense strand to SEQ ID NO: 2254536
uugcuccuaggcauucuuu

SEQ ID NO: 2254538 - RNA, 19 nt, Artificial Sequence
  Description of Artificial Sequence: Synthetic oligonucleotide
  Sense strand starting at position 2077 of SEQ ID NO: 1884290
aagaaugccuaggagcaaa

SEQ ID NO: 2254539 - RNA, 19 nt, Artificial Sequence
  Description of Artificial Sequence: Synthetic oligonucleotide
  Antisense strand to SEQ ID NO: 2254538
uuugcuccuaggcauucuu

SEQ ID NO: 2254540 - RNA, 19 nt, Artificial Sequence
  Description of Artificial Sequence: Synthetic oligonucleotide
  Sense strand starting at position 2435 of SEQ ID NO: 1884290
cuaagucguuccgaggaag

SEQ ID NO: 2254541 - RNA, 19 nt, Artificial Sequence
  Description of Artificial Sequence: Synthetic oligonucleotide
  Antisense strand to SEQ ID NO: 2254540
cuuccucggaacgacuuag

SEQ ID NO: 2254542 - RNA, 19 nt, Artificial Sequence
  Description of Artificial Sequence: Synthetic oligonucleotide
  Sense strand starting at position 2476 of SEQ ID NO: 1884290
cccucuaauuucugcgagu

SEQ ID NO: 2254543 - RNA, 19 nt, Artificial Sequence
  Description of Artificial Sequence: Synthetic oligonucleotide
  Antisense strand to SEQ ID NO: 2254542
acucgcagaaauuagaggg

SEQ ID NO: 2254544 - RNA, 19 nt, Artificial Sequence
  Description of Artificial Sequence: Synthetic oligonucleotide
  Sense strand starting at position 2477 of SEQ ID NO: 1884290
ccucuaauuucugcgaguu

SEQ ID NO: 2254545 - RNA, 19 nt, Artificial Sequence
  Description of Artificial Sequence: Synthetic oligonucleotide
  Antisense strand to SEQ ID NO: 2254544
aacucgcagaaauuagagg

SEQ ID NO: 2254546 - RNA, 19 nt, Artificial Sequence
  Description of Artificial Sequence: Synthetic oligonucleotide
  Sense strand starting at position 2478 of SEQ ID NO: 1884290
cucuaauuucugcgaguuc

SEQ ID NO: 2254547 - RNA, 19 nt, Artificial Sequence
  Description of Artificial Sequence: Synthetic oligonucleotide
  Antisense strand to SEQ ID NO: 2254546
gaacucgcagaaauuagag

SEQ ID NO: 2254548 - RNA, 19 nt, Artificial Sequence
  Description of Artificial Sequence: Synthetic oligonucleotide
  Sense strand starting at position 2680 of SEQ ID NO: 1884290
cuccgcuucccuggaagaa

SEQ ID NO: 2254549 - RNA, 19 nt, Artificial Sequence
  Description of Artificial Sequence: Synthetic oligonucleotide
  Antisense strand to SEQ ID NO: 2254548
uucuuccagggaagcggag

SEQ ID NO: 2254550 - RNA, 19 nt, Artificial Sequence
  Description of Artificial Sequence: Synthetic oligonucleotide
  Sense strand starting at position 2770 of SEQ ID NO: 1884290
ccgacucggcguuccaaua

SEQ ID NO: 2254551 - RNA, 19 nt, Artificial Sequence
  Description of Artificial Sequence: Synthetic oligonucleotide
  Antisense strand to SEQ ID NO: 2254550
uauuggaacgccgagucgg

SEQ ID NO: 2254552 - RNA, 19 nt, Artificial Sequence
  Description of Artificial Sequence: Synthetic oligonucleotide
  Sense strand starting at position 3313 of SEQ ID NO: 1884290
gcacuuuacucucgcuauu

SEQ ID NO: 2254553 - RNA, 19 nt, Artificial Sequence
  Description of Artificial Sequence: Synthetic oligonucleotide
  Antisense strand to SEQ ID NO: 2254552
aauagcgagaguaaagugc

SEQ ID NO: 2254554 - RNA, 19 nt, Artificial Sequence
  Description of Artificial Sequence: Synthetic oligonucleotide
  Sense strand starting at position 3488 of SEQ ID NO: 1884290
gucgcacccgccuuguaau

SEQ ID NO: 2254555 - RNA, 19 nt, Artificial Sequence
  Description of Artificial Sequence: Synthetic oligonucleotide
  Antisense strand to SEQ ID NO: 2254554
auuacaaggcgggugcgac

SEQ ID NO: 2254556 - RNA, 19 nt, Artificial Sequence
  Description of Artificial Sequence: Synthetic oligonucleotide
  Sense strand starting at position 3564 of SEQ ID NO: 1884290
auugauugcggucgaggaa

SEQ ID NO: 2254557 - RNA, 19 nt, Artificial Sequence
  Description of Artificial Sequence: Synthetic oligonucleotide
  Antisense strand to SEQ ID NO: 2254556
uuccucgaccgcaaucaau

SEQ ID NO: 2254558 - RNA, 19 nt, Artificial Sequence
  Description of Artificial Sequence: Synthetic oligonucleotide
  Sense strand starting at position 3577 of SEQ ID NO: 1884290
gaggaacauugacaauuga

SEQ ID NO: 2254559 - RNA, 19 nt, Artificial Sequence
  Description of Artificial Sequence: Synthetic oligonucleotide
  Antisense strand to SEQ ID NO: 2254558
ucaauugucaauguuccuc

SEQ ID NO: 2254560 - RNA, 19 nt, Artificial Sequence
  Description of Artificial Sequence: Synthetic oligonucleotide
  Sense strand starting at position 3833 of SEQ ID NO: 1884290
cgcggaaucugaggaaauu

SEQ ID NO: 2254561 - RNA, 19 nt, Artificial Sequence
  Description of Artificial Sequence: Synthetic oligonucleotide
  Antisense strand to SEQ ID NO: 2254560
aauuuccucagauuccgcg

SEQ ID NO: 2254562 - RNA, 19 nt, Artificial Sequence
  Description of Artificial Sequence: Synthetic oligonucleotide
  Sense strand starting at position 90 of SEQ ID NO: 1884291
aggugagaccaguguucug

SEQ ID NO: 2254563 - RNA, 19 nt, Artificial Sequence
  Description of Artificial Sequence: Synthetic oligonucleotide
  Antisense strand to SEQ ID NO: 2254562
cagaacacuggucucaccu

SEQ ID NO: 2254564 - RNA, 19 nt, Artificial Sequence
  Description of Artificial Sequence: Synthetic oligonucleotide
  Sense strand starting at position 157 of SEQ ID NO: 1884291
guggguacucugggaguau

SEQ ID NO: 2254565 - RNA, 19 nt, Artificial Sequence
  Description of Artificial Sequence: Synthetic oligonucleotide
  Antisense strand to SEQ ID NO: 2254564
auacucccagaguacccac

SEQ ID NO: 2254566 - RNA, 19 nt, Artificial Sequence
  Description of Artificial Sequence: Synthetic oligonucleotide
  Sense strand starting at position 158 of SEQ ID NO: 1884291
uggguacucugggaguaua

SEQ ID NO: 2254567 - RNA, 19 nt, Artificial Sequence
  Description of Artificial Sequence: Synthetic oligonucleotide
  Antisense strand to SEQ ID NO: 2254566
uauacucccagaguaccca

SEQ ID NO: 2254568 - RNA, 19 nt, Artificial Sequence
  Description of Artificial Sequence: Synthetic oligonucleotide
  Sense strand starting at position 161 of SEQ ID NO: 1884291
guacucugggaguauaauu

SEQ ID NO: 2254569 - RNA, 19 nt, Artificial Sequence
  Description of Artificial Sequence: Synthetic oligonucleotide
  Antisense strand to SEQ ID NO: 2254568
aauuauacucccagaguac

SEQ ID NO: 2254570 - RNA, 19 nt, Artificial Sequence
  Description of Artificial Sequence: Synthetic oligonucleotide
  Sense strand starting at position 168 of SEQ ID NO: 1884291
gggaguauaauuggucagu

SEQ ID NO: 2254571 - RNA, 19 nt, Artificial Sequence
  Description of Artificial Sequence: Synthetic oligonucleotide
  Antisense strand to SEQ ID NO: 2254570
acugaccaauuauacuccc

SEQ ID NO: 2254572 - RNA, 19 nt, Artificial Sequence
  Description of Artificial Sequence: Synthetic oligonucleotide
  Sense strand starting at position 169 of SEQ ID NO: 1884291
ggaguauaauuggucaguc

SEQ ID NO: 2254573 - RNA, 19 nt, Artificial Sequence
  Description of Artificial Sequence: Synthetic oligonucleotide
  Antisense strand to SEQ ID NO: 2254572
gacugaccaauuauacucc

SEQ ID NO: 2254574 - RNA, 19 nt, Artificial Sequence
  Description of Artificial Sequence: Synthetic oligonucleotide
  Sense strand starting at position 834 of SEQ ID NO: 1884291
gagggaauguucuuugucu

SEQ ID NO: 2254575 - RNA, 19 nt, Artificial Sequence
  Description of Artificial Sequence: Synthetic oligonucleotide
  Antisense strand to SEQ ID NO: 2254574
agacaaagaacauucccuc

SEQ ID NO: 2254576 - RNA, 19 nt, Artificial Sequence
  Description of Artificial Sequence: Synthetic oligonucleotide
  Sense strand starting at position 835 of SEQ ID NO: 1884291
agggaauguucuuugucuc

SEQ ID NO: 2254577 - RNA, 19 nt, Artificial Sequence
  Description of Artificial Sequence: Synthetic oligonucleotide
  Antisense strand to SEQ ID NO: 2254576
gagacaaagaacauucccu

SEQ ID NO: 2254578 - RNA, 19 nt, Artificial Sequence
  Description of Artificial Sequence: Synthetic oligonucleotide
  Sense strand starting at position 836 of SEQ ID NO: 1884291
gggaauguucuuugucucu

SEQ ID NO: 2254579 - RNA, 19 nt, Artificial Sequence
  Description of Artificial Sequence: Synthetic oligonucleotide
  Antisense strand to SEQ ID NO: 2254578
agagacaaagaacauuccc

SEQ ID NO: 2254580 - RNA, 19 nt, Artificial Sequence
  Description of Artificial Sequence: Synthetic oligonucleotide
  Sense strand starting at position 860 of SEQ ID NO: 1884291
ggcucugaguuccucacau

SEQ ID NO: 2254581 - RNA, 19 nt, Artificial Sequence
  Description of Artificial Sequence: Synthetic oligonucleotide
  Antisense strand to SEQ ID NO: 2254580
augugaggaacucagagcc

SEQ ID NO: 2254582 - RNA, 19 nt, Artificial Sequence
  Description of Artificial Sequence: Synthetic oligonucleotide
  Sense strand starting at position 892 of SEQ ID NO: 1884291
cuuagugagcaguguccau

SEQ ID NO: 2254583 - RNA, 19 nt, Artificial Sequence
  Description of Artificial Sequence: Synthetic oligonucleotide
  Antisense strand to SEQ ID NO: 2254582
auggacacugcucacuaag

SEQ ID NO: 2254584 - RNA, 19 nt, Artificial Sequence
  Description of Artificial Sequence: Synthetic oligonucleotide
  Sense strand starting at position 1436 of SEQ ID NO: 1884291
ccuagcucuugcucagagu

SEQ ID NO: 2254585 - RNA, 19 nt, Artificial Sequence
  Description of Artificial Sequence: Synthetic oligonucleotide
  Antisense strand to SEQ ID NO: 2254584
acucugagcaagagcuagg

SEQ ID NO: 2254586 - RNA, 19 nt, Artificial Sequence
  Description of Artificial Sequence: Synthetic oligonucleotide
  Sense strand starting at position 1437 of SEQ ID NO: 1884291
cuagcucuugcucagaguu

SEQ ID NO: 2254587 - RNA, 19 nt, Artificial Sequence
  Description of Artificial Sequence: Synthetic oligonucleotide
  Antisense strand to SEQ ID NO: 2254586
aacucugagcaagagcuag

SEQ ID NO: 2254588 - RNA, 19 nt, Artificial Sequence
  Description of Artificial Sequence: Synthetic oligonucleotide
  Sense strand starting at position 1541 of SEQ ID NO: 1884291
agagcugagaucuguaagu

SEQ ID NO: 2254589 - RNA, 19 nt, Artificial Sequence
  Description of Artificial Sequence: Synthetic oligonucleotide
  Antisense strand to SEQ ID NO: 2254588
acuuacagaucucagcucu

SEQ ID NO: 2254590 - RNA, 19 nt, Artificial Sequence
  Description of Artificial Sequence: Synthetic oligonucleotide
  Sense strand starting at position 1543 of SEQ ID NO: 1884291
agcugagaucuguaaguug

SEQ ID NO: 2254591 - RNA, 19 nt, Artificial Sequence
  Description of Artificial Sequence: Synthetic oligonucleotide
  Antisense strand to SEQ ID NO: 2254590
caacuuacagaucucagcu

SEQ ID NO: 2254592 - RNA, 19 nt, Artificial Sequence
  Description of Artificial Sequence: Synthetic oligonucleotide
  Sense strand starting at position 1866 of SEQ ID NO: 1884291
ccuguuucugugcuuugua

SEQ ID NO: 2254593 - RNA, 19 nt, Artificial Sequence
  Description of Artificial Sequence: Synthetic oligonucleotide
  Antisense strand to SEQ ID NO: 2254592
uacaaagcacagaaacagg

SEQ ID NO: 2254594 - RNA, 19 nt, Artificial Sequence
  Description of Artificial Sequence: Synthetic oligonucleotide
  Sense strand starting at position 1869 of SEQ ID NO: 1884291
guuucugugcuuuguacua

SEQ ID NO: 2254595 - RNA, 19 nt, Artificial Sequence
  Description of Artificial Sequence: Synthetic oligonucleotide
  Antisense strand to SEQ ID NO: 2254594
uaguacaaagcacagaaac

SEQ ID NO: 2254596 - RNA, 19 nt, Artificial Sequence
  Description of Artificial Sequence: Synthetic oligonucleotide
  Sense strand starting at position 2453 of SEQ ID NO: 1884291
ggaggaaacuucugacacu

SEQ ID NO: 2254597 - RNA, 19 nt, Artificial Sequence
  Description of Artificial Sequence: Synthetic oligonucleotide
  Antisense strand to SEQ ID NO: 2254596
agugucagaaguuuccucc

SEQ ID NO: 2254598 - RNA, 19 nt, Artificial Sequence
  Description of Artificial Sequence: Synthetic oligonucleotide
  Sense strand starting at position 2465 of SEQ ID NO: 1884291
ugacacuugcuuuagucua

SEQ ID NO: 2254599 - RNA, 19 nt, Artificial Sequence
  Description of Artificial Sequence: Synthetic oligonucleotide
  Antisense strand to SEQ ID NO: 2254598
uagacuaaagcaaguguca

SEQ ID NO: 2254600 - RNA, 19 nt, Artificial Sequence
  Description of Artificial Sequence: Synthetic oligonucleotide
  Sense strand starting at position 2470 of SEQ ID NO: 1884291
cuugcuuuagucuagguuu

SEQ ID NO: 2254601 - RNA, 19 nt, Artificial Sequence
  Description of Artificial Sequence: Synthetic oligonucleotide
  Antisense strand to SEQ ID NO: 2254600
aaaccuagacuaaagcaag

SEQ ID NO: 2254602 - RNA, 19 nt, Artificial Sequence
  Description of Artificial Sequence: Synthetic oligonucleotide
  Sense strand starting at position 2527 of SEQ ID NO: 1884291
gauguuuauuaaggacauu

SEQ ID NO: 2254603 - RNA, 19 nt, Artificial Sequence
  Description of Artificial Sequence: Synthetic oligonucleotide
  Antisense strand to SEQ ID NO: 2254602
aauguccuuaauaaacauc

SEQ ID NO: 2254604 - RNA, 19 nt, Artificial Sequence
  Description of Artificial Sequence: Synthetic oligonucleotide
  Sense strand starting at position 2562 of SEQ ID NO: 1884291
ggcucauacucggcucuau

SEQ ID NO: 2254605 - RNA, 19 nt, Artificial Sequence
  Description of Artificial Sequence: Synthetic oligonucleotide
  Antisense strand to SEQ ID NO: 2254604
auagagccgaguaugagcc

SEQ ID NO: 2254606 - RNA, 19 nt, Artificial Sequence
  Description of Artificial Sequence: Synthetic oligonucleotide
  Sense strand starting at position 2880 of SEQ ID NO: 1884291
gucccagaacugugggaaa

SEQ ID NO: 2254607 - RNA, 19 nt, Artificial Sequence
  Description of Artificial Sequence: Synthetic oligonucleotide
  Antisense strand to SEQ ID NO: 2254606
uuucccacaguucugggac

SEQ ID NO: 2254608 - RNA, 19 nt, Artificial Sequence
  Description of Artificial Sequence: Synthetic oligonucleotide
  Sense strand starting at position 3072 of SEQ ID NO: 1884291
gcaguucuucccgaagcca

SEQ ID NO: 2254609 - RNA, 19 nt, Artificial Sequence
  Description of Artificial Sequence: Synthetic oligonucleotide
  Antisense strand to SEQ ID NO: 2254608
uggcuucgggaagaacugc

SEQ ID NO: 2254610 - RNA, 19 nt, Artificial Sequence
  Description of Artificial Sequence: Synthetic oligonucleotide
  Sense strand starting at position 3222 of SEQ ID NO: 1884291
agaaucagauccuggaagu

SEQ ID NO: 2254611 - RNA, 19 nt, Artificial Sequence
  Description of Artificial Sequence: Synthetic oligonucleotide
  Antisense strand to SEQ ID NO: 2254610
acuuccaggaucugauucu

SEQ ID NO: 2254612 - RNA, 19 nt, Artificial Sequence
  Description of Artificial Sequence: Synthetic oligonucleotide
  Sense strand starting at position 3277 of SEQ ID NO: 1884291
caguguccauaucuggaua

SEQ ID NO: 2254613 - RNA, 19 nt, Artificial Sequence
  Description of Artificial Sequence: Synthetic oligonucleotide
  Antisense strand to SEQ ID NO: 2254612
uauccagauauggacacug

SEQ ID NO: 2254614 - RNA, 19 nt, Artificial Sequence
  Description of Artificial Sequence: Synthetic oligonucleotide
  Sense strand starting at position 3321 of SEQ ID NO: 1884291
cagcgagucuuaccaccuu

SEQ ID NO: 2254615 - RNA, 19 nt, Artificial Sequence
  Description of Artificial Sequence: Synthetic oligonucleotide
  Antisense strand to SEQ ID NO: 2254614
aaggugguaagacucgcug

SEQ ID NO: 2254616 - RNA, 19 nt, Artificial Sequence
  Description of Artificial Sequence: Synthetic oligonucleotide
  Sense strand starting at position 3473 of SEQ ID NO: 1884291
cuccuugugagacagagua

SEQ ID NO: 2254617 - RNA, 19 nt, Artificial Sequence
  Description of Artificial Sequence: Synthetic oligonucleotide
  Antisense strand to SEQ ID NO: 2254616
uacucugucucacaaggag

SEQ ID NO: 2254618 - RNA, 19 nt, Artificial Sequence
  Description of Artificial Sequence: Synthetic oligonucleotide
  Sense strand starting at position 3486 of SEQ ID NO: 1884291
agaguaaaucuaugucucu

SEQ ID NO: 2254619 - RNA, 19 nt, Artificial Sequence
  Description of Artificial Sequence: Synthetic oligonucleotide
  Antisense strand to SEQ ID NO: 2254618
agagacauagauuuacucu

SEQ ID NO: 2254620 - RNA, 19 nt, Artificial Sequence
  Description of Artificial Sequence: Synthetic oligonucleotide
  Sense strand starting at position 3489 of SEQ ID NO: 1884291
guaaaucuaugucucuaac

SEQ ID NO: 2254621 - RNA, 19 nt, Artificial Sequence
  Description of Artificial Sequence: Synthetic oligonucleotide
  Antisense strand to SEQ ID NO: 2254620
guuagagacauagauuuac

SEQ ID NO: 2254622 - RNA, 19 nt, Artificial Sequence
  Description of Artificial Sequence: Synthetic oligonucleotide
  Sense strand starting at position 3574 of SEQ ID NO: 1884291
ugaggguccguguguaguu

SEQ ID NO: 2254623 - RNA, 19 nt, Artificial Sequence
  Description of Artificial Sequence: Synthetic oligonucleotide
  Antisense strand to SEQ ID NO: 2254622
aacuacacacggacccuca

SEQ ID NO: 2254624 - RNA, 19 nt, Artificial Sequence
  Description of Artificial Sequence: Synthetic oligonucleotide
  Sense strand starting at position 3579 of SEQ ID NO: 1884291
guccguguguaguucagaa

SEQ ID NO: 2254625 - RNA, 19 nt, Artificial Sequence
  Description of Artificial Sequence: Synthetic oligonucleotide
  Antisense strand to SEQ ID NO: 2254624
uucugaacuacacacggac

SEQ ID NO: 2254626 - RNA, 19 nt, Artificial Sequence
  Description of Artificial Sequence: Synthetic oligonucleotide
  Sense strand starting at position 3581 of SEQ ID NO: 1884291
ccguguguaguucagaaag

SEQ ID NO: 2254627 - RNA, 19 nt, Artificial Sequence
  Description of Artificial Sequence: Synthetic oligonucleotide
  Antisense strand to SEQ ID NO: 2254626
cuuucugaacuacacacgg

SEQ ID NO: 2254628 - RNA, 19 nt, Artificial Sequence
  Description of Artificial Sequence: Synthetic oligonucleotide
  Sense strand starting at position 3601 of SEQ ID NO: 1884291
gugugauacccaggaacuu

SEQ ID NO: 2254629 - RNA, 19 nt, Artificial Sequence
  Description of Artificial Sequence: Synthetic oligonucleotide
  Antisense strand to SEQ ID NO: 2254628
aaguuccuggguaucacac

SEQ ID NO: 2254630 - RNA, 19 nt, Artificial Sequence
  Description of Artificial Sequence: Synthetic oligonucleotide
  Sense strand starting at position 3619 of SEQ ID NO: 1884291
ucuggaugcucuccauuga

SEQ ID NO: 2254631 - RNA, 19 nt, Artificial Sequence
  Description of Artificial Sequence: Synthetic oligonucleotide
  Antisense strand to SEQ ID NO: 2254630
ucaauggagagcauccaga

SEQ ID NO: 2254632 - RNA, 19 nt, Artificial Sequence
  Description of Artificial Sequence: Synthetic oligonucleotide
  Sense strand starting at position 3698 of SEQ ID NO: 1884291
ugugguucccucuauauuc

SEQ ID NO: 2254633 - RNA, 19 nt, Artificial Sequence
  Description of Artificial Sequence: Synthetic oligonucleotide
  Antisense strand to SEQ ID NO: 2254632
gaauauagagggaaccaca

SEQ ID NO: 2254634 - RNA, 19 nt, Artificial Sequence
  Description of Artificial Sequence: Synthetic oligonucleotide
  Sense strand starting at position 3818 of SEQ ID NO: 1884291
cguuguagauggguagaau

SEQ ID NO: 2254635 - RNA, 19 nt, Artificial Sequence
  Description of Artificial Sequence: Synthetic oligonucleotide
  Antisense strand to SEQ ID NO: 2254634
auucuacccaucuacaacg

SEQ ID NO: 2254636 - RNA, 19 nt, Artificial Sequence
  Description of Artificial Sequence: Synthetic oligonucleotide
  Sense strand starting at position 3819 of SEQ ID NO: 1884291
guuguagauggguagaaua

SEQ ID NO: 2254637 - RNA, 19 nt, Artificial Sequence
  Description of Artificial Sequence: Synthetic oligonucleotide
  Antisense strand to SEQ ID NO: 2254636
uauucuacccaucuacaac

SEQ ID NO: 2254638 - RNA, 19 nt, Artificial Sequence
  Description of Artificial Sequence: Synthetic oligonucleotide
  Sense strand starting at position 3821 of SEQ ID NO: 1884291
uguagauggguagaauagu

SEQ ID NO: 2254639 - RNA, 19 nt, Artificial Sequence
  Description of Artificial Sequence: Synthetic oligonucleotide
  Antisense strand to SEQ ID NO: 2254638
acuauucuacccaucuaca

SEQ ID NO: 2254640 - RNA, 19 nt, Artificial Sequence
  Description of Artificial Sequence: Synthetic oligonucleotide
  Sense strand starting at position 3981 of SEQ ID NO: 1884291
aggugaaggacuggugauu

SEQ ID NO: 2254641 - RNA, 19 nt, Artificial Sequence
  Description of Artificial Sequence: Synthetic oligonucleotide
  Antisense strand to SEQ ID NO: 2254640
aaucaccaguccuucaccu

SEQ ID NO: 2254642 - RNA, 19 nt, Artificial Sequence
  Description of Artificial Sequence: Synthetic oligonucleotide
  Sense strand starting at position 116 of SEQ ID NO: 1884292
gcuccaagacugugugaag

SEQ ID NO: 2254643 - RNA, 19 nt, Artificial Sequence
  Description of Artificial Sequence: Synthetic oligonucleotide
  Antisense strand to SEQ ID NO: 2254642
cuucacacagucuuggagc

SEQ ID NO: 2254644 - RNA, 19 nt, Artificial Sequence
  Description of Artificial Sequence: Synthetic oligonucleotide
  Sense strand starting at position 216 of SEQ ID NO: 1884292
ggauguuuauuaccaccuu

SEQ ID NO: 2254645 - RNA, 19 nt, Artificial Sequence
  Description of Artificial Sequence: Synthetic oligonucleotide
  Antisense strand to SEQ ID NO: 2254644
aaggugguaauaaacaucc

SEQ ID NO: 2254646 - RNA, 19 nt, Artificial Sequence
  Description of Artificial Sequence: Synthetic oligonucleotide
  Sense strand starting at position 315 of SEQ ID NO: 1884292
ugcugugccagccauugaa

SEQ ID NO: 2254647 - RNA, 19 nt, Artificial Sequence
  Description of Artificial Sequence: Synthetic oligonucleotide
  Antisense strand to SEQ ID NO: 2254646
uucaauggcuggcacagca

SEQ ID NO: 2254648 - RNA, 19 nt, Artificial Sequence
  Description of Artificial Sequence: Synthetic oligonucleotide
  Sense strand starting at position 374 of SEQ ID NO: 1884292
agauguuccugauaauuug

SEQ ID NO: 2254649 - RNA, 19 nt, Artificial Sequence
  Description of Artificial Sequence: Synthetic oligonucleotide
  Antisense strand to SEQ ID NO: 2254648
caaauuaucaggaacaucu

SEQ ID NO: 2254650 - RNA, 19 nt, Artificial Sequence
  Description of Artificial Sequence: Synthetic oligonucleotide
  Sense strand starting at position 382 of SEQ ID NO: 1884292
cugauaauuuguuagguga

SEQ ID NO: 2254651 - RNA, 19 nt, Artificial Sequence
  Description of Artificial Sequence: Synthetic oligonucleotide
  Antisense strand to SEQ ID NO: 2254650
ucaccuaacaaauuaucag

SEQ ID NO: 2254652 - RNA, 19 nt, Artificial Sequence
  Description of Artificial Sequence: Synthetic oligonucleotide
  Sense strand starting at position 384 of SEQ ID NO: 1884292
gauaauuuguuaggugaca

SEQ ID NO: 2254653 - RNA, 19 nt, Artificial Sequence
  Description of Artificial Sequence: Synthetic oligonucleotide
  Antisense strand to SEQ ID NO: 2254652
ugucaccuaacaaauuauc

SEQ ID NO: 2254654 - RNA, 19 nt, Artificial Sequence
  Description of Artificial Sequence: Synthetic oligonucleotide
  Sense strand starting at position 414 of SEQ ID NO: 1884292
cagacuggcacgugucaua

SEQ ID NO: 2254655 - RNA, 19 nt, Artificial Sequence
  Description of Artificial Sequence: Synthetic oligonucleotide
  Antisense strand to SEQ ID NO: 2254654
uaugacacgugccagucug

SEQ ID NO: 2254656 - RNA, 19 nt, Artificial Sequence
  Description of Artificial Sequence: Synthetic oligonucleotide
  Sense strand starting at position 685 of SEQ ID NO: 1884292
gcagaaguacucugauucu

SEQ ID NO: 2254657 - RNA, 19 nt, Artificial Sequence
  Description of Artificial Sequence: Synthetic oligonucleotide
  Antisense strand to SEQ ID NO: 2254656
agaaucagaguacuucugc

SEQ ID NO: 2254658 - RNA, 19 nt, Artificial Sequence
  Description of Artificial Sequence: Synthetic oligonucleotide
  Sense strand starting at position 700 of SEQ ID NO: 1884292
uucuaaauucugggacucu

SEQ ID NO: 2254659 - RNA, 19 nt, Artificial Sequence
  Description of Artificial Sequence: Synthetic oligonucleotide
  Antisense strand to SEQ ID NO: 2254658
agagucccagaauuuagaa

SEQ ID NO: 2254660 - RNA, 19 nt, Artificial Sequence
  Description of Artificial Sequence: Synthetic oligonucleotide
  Sense strand starting at position 755 of SEQ ID NO: 1884292
ugcccucuccuggagucau

SEQ ID NO: 2254661 - RNA, 19 nt, Artificial Sequence
  Description of Artificial Sequence: Synthetic oligonucleotide
  Antisense strand to SEQ ID NO: 2254660
augacuccaggagagggca

SEQ ID NO: 2254662 - RNA, 19 nt, Artificial Sequence
  Description of Artificial Sequence: Synthetic oligonucleotide
  Sense strand starting at position 763 of SEQ ID NO: 1884292
ccuggagucauacaguguu

SEQ ID NO: 2254663 - RNA, 19 nt, Artificial Sequence
  Description of Artificial Sequence: Synthetic oligonucleotide
  Antisense strand to SEQ ID NO: 2254662
aacacuguaugacuccagg

SEQ ID NO: 2254664 - RNA, 19 nt, Artificial Sequence
  Description of Artificial Sequence: Synthetic oligonucleotide
  Sense strand starting at position 860 of SEQ ID NO: 1884292
cccucuggccuggaucauu

SEQ ID NO: 2254665 - RNA, 19 nt, Artificial Sequence
  Description of Artificial Sequence: Synthetic oligonucleotide
  Antisense strand to SEQ ID NO: 2254664
aaugauccaggccagaggg

SEQ ID NO: 2254666 - RNA, 19 nt, Artificial Sequence
  Description of Artificial Sequence: Synthetic oligonucleotide
  Sense strand starting at position 916 of SEQ ID NO: 1884292
ugggaaagucugggaguga

SEQ ID NO: 2254667 - RNA, 19 nt, Artificial Sequence
  Description of Artificial Sequence: Synthetic oligonucleotide
  Antisense strand to SEQ ID NO: 2254666
ucacucccagacuuuccca

SEQ ID NO: 2254668 - RNA, 19 nt, Artificial Sequence
  Description of Artificial Sequence: Synthetic oligonucleotide
  Sense strand starting at position 1177 of SEQ ID NO: 1884292
ggguaaagauccucagguu

SEQ ID NO: 2254669 - RNA, 19 nt, Artificial Sequence
  Description of Artificial Sequence: Synthetic oligonucleotide
  Antisense strand to SEQ ID NO: 2254668
aaccugaggaucuuuaccc

SEQ ID NO: 2254670 - RNA, 19 nt, Artificial Sequence
  Description of Artificial Sequence: Synthetic oligonucleotide
  Sense strand starting at position 1178 of SEQ ID NO: 1884292
gguaaagauccucagguug

SEQ ID NO: 2254671 - RNA, 19 nt, Artificial Sequence
  Description of Artificial Sequence: Synthetic oligonucleotide
  Antisense strand to SEQ ID NO: 2254670
caaccugaggaucuuuacc

SEQ ID NO: 2254672 - RNA, 19 nt, Artificial Sequence
  Description of Artificial Sequence: Synthetic oligonucleotide
  Sense strand starting at position 1201 of SEQ ID NO: 1884292
gguccugaugucugacagu

SEQ ID NO: 2254673 - RNA, 19 nt, Artificial Sequence
  Description of Artificial Sequence: Synthetic oligonucleotide
  Antisense strand to SEQ ID NO: 2254672
acugucagacaucaggacc

SEQ ID NO: 2254674 - RNA, 19 nt, Artificial Sequence
  Description of Artificial Sequence: Synthetic oligonucleotide
  Sense strand starting at position 1210 of SEQ ID NO: 1884292
gucugacagucugugaugu

SEQ ID NO: 2254675 - RNA, 19 nt, Artificial Sequence
  Description of Artificial Sequence: Synthetic oligonucleotide
  Antisense strand to SEQ ID NO: 2254674
acaucacagacugucagac

SEQ ID NO: 2254676 - RNA, 19 nt, Artificial Sequence
  Description of Artificial Sequence: Synthetic oligonucleotide
  Sense strand starting at position 1421 of SEQ ID NO: 1884292
agaagauucuucuuucuga

SEQ ID NO: 2254677 - RNA, 19 nt, Artificial Sequence
  Description of Artificial Sequence: Synthetic oligonucleotide
  Antisense strand to SEQ ID NO: 2254676
ucagaaagaagaaucuucu

SEQ ID NO: 2254678 - RNA, 19 nt, Artificial Sequence
  Description of Artificial Sequence: Synthetic oligonucleotide
  Sense strand starting at position 1642 of SEQ ID NO: 1884292
ggauuagcacucuagguua

SEQ ID NO: 2254679 - RNA, 19 nt, Artificial Sequence
  Description of Artificial Sequence: Synthetic oligonucleotide
  Antisense strand to SEQ ID NO: 2254678
uaaccuagagugcuaaucc

SEQ ID NO: 2254680 - RNA, 19 nt, Artificial Sequence
  Description of Artificial Sequence: Synthetic oligonucleotide
  Sense strand starting at position 1644 of SEQ ID NO: 1884292
auuagcacucuagguuaaa

SEQ ID NO: 2254681 - RNA, 19 nt, Artificial Sequence
  Description of Artificial Sequence: Synthetic oligonucleotide
  Antisense strand to SEQ ID NO: 2254680
uuuaaccuagagugcuaau

SEQ ID NO: 2254682 - RNA, 19 nt, Artificial Sequence
  Description of Artificial Sequence: Synthetic oligonucleotide
  Sense strand starting at position 1645 of SEQ ID NO: 1884292
uuagcacucuagguuaaag

SEQ ID NO: 2254683 - RNA, 19 nt, Artificial Sequence
  Description of Artificial Sequence: Synthetic oligonucleotide
  Antisense strand to SEQ ID NO: 2254682
cuuuaaccuagagugcuaa

SEQ ID NO: 2254684 - RNA, 19 nt, Artificial Sequence
  Description of Artificial Sequence: Synthetic oligonucleotide
  Sense strand starting at position 1685 of SEQ ID NO: 1884292
cugagaugcccaggacaaa

SEQ ID NO: 2254685 - RNA, 19 nt, Artificial Sequence
  Description of Artificial Sequence: Synthetic oligonucleotide
  Antisense strand to SEQ ID NO: 2254684
uuuguccugggcaucucag

SEQ ID NO: 2254686 - RNA, 19 nt, Artificial Sequence
  Description of Artificial Sequence: Synthetic oligonucleotide
  Sense strand starting at position 1989 of SEQ ID NO: 1884292
ucgaauucgcacuaaauau

SEQ ID NO: 2254687 - RNA, 19 nt, Artificial Sequence
  Description of Artificial Sequence: Synthetic oligonucleotide
  Antisense strand to SEQ ID NO: 2254686
auauuuagugcgaauucga

SEQ ID NO: 2254688 - RNA, 19 nt, Artificial Sequence
  Description of Artificial Sequence: Synthetic oligonucleotide
  Sense strand starting at position 2665 of SEQ ID NO: 1884292
guccguuggccagaucaac

SEQ ID NO: 2254689 - RNA, 19 nt, Artificial Sequence
  Description of Artificial Sequence: Synthetic oligonucleotide
  Antisense strand to SEQ ID NO: 2254688
guugaucuggccaacggac

SEQ ID NO: 2254690 - RNA, 19 nt, Artificial Sequence
  Description of Artificial Sequence: Synthetic oligonucleotide
  Sense strand starting at position 2744 of SEQ ID NO: 1884292
uucuauuggccguagcaga

SEQ ID NO: 2254691 - RNA, 19 nt, Artificial Sequence
  Description of Artificial Sequence: Synthetic oligonucleotide
  Antisense strand to SEQ ID NO: 2254690
ucugcuacggccaauagaa

SEQ ID NO: 2254692 - RNA, 19 nt, Artificial Sequence
  Description of Artificial Sequence: Synthetic oligonucleotide
  Sense strand starting at position 3190 of SEQ ID NO: 1884292
agauguuagaaccggguua

SEQ ID NO: 2254693 - RNA, 19 nt, Artificial Sequence
  Description of Artificial Sequence: Synthetic oligonucleotide
  Antisense strand to SEQ ID NO: 2254692
uaacccgguucuaacaucu

SEQ ID NO: 2254694 - RNA, 19 nt, Artificial Sequence
  Description of Artificial Sequence: Synthetic oligonucleotide
  Sense strand starting at position 3192 of SEQ ID NO: 1884292
auguuagaaccggguuaca

SEQ ID NO: 2254695 - RNA, 19 nt, Artificial Sequence
  Description of Artificial Sequence: Synthetic oligonucleotide
  Antisense strand to SEQ ID NO: 2254694
uguaacccgguucuaacau

SEQ ID NO: 2254696 - RNA, 19 nt, Artificial Sequence
  Description of Artificial Sequence: Synthetic oligonucleotide
  Sense strand starting at position 3195 of SEQ ID NO: 1884292
uuagaaccggguuacauua

SEQ ID NO: 2254697 - RNA, 19 nt, Artificial Sequence
  Description of Artificial Sequence: Synthetic oligonucleotide
  Antisense strand to SEQ ID NO: 2254696
uaauguaacccgguucuaa

SEQ ID NO: 2254698 - RNA, 19 nt, Artificial Sequence
  Description of Artificial Sequence: Synthetic oligonucleotide
  Sense strand starting at position 3212 of SEQ ID NO: 1884292
uaggauccagguuguuaga

SEQ ID NO: 2254699 - RNA, 19 nt, Artificial Sequence
  Description of Artificial Sequence: Synthetic oligonucleotide
  Antisense strand to SEQ ID NO: 2254698
ucuaacaaccuggauccua

SEQ ID NO: 2254700 - RNA, 19 nt, Artificial Sequence
  Description of Artificial Sequence: Synthetic oligonucleotide
  Sense strand starting at position 3214 of SEQ ID NO: 1884292
ggauccagguuguuagaau

SEQ ID NO: 2254701 - RNA, 19 nt, Artificial Sequence
  Description of Artificial Sequence: Synthetic oligonucleotide
  Antisense strand to SEQ ID NO: 2254700
auucuaacaaccuggaucc

SEQ ID NO: 2254702 - RNA, 19 nt, Artificial Sequence
  Description of Artificial Sequence: Synthetic oligonucleotide
  Sense strand starting at position 3223 of SEQ ID NO: 1884292
uuguuagaaucagacauuu

SEQ ID NO: 2254703 - RNA, 19 nt, Artificial Sequence
  Description of Artificial Sequence: Synthetic oligonucleotide
  Antisense strand to SEQ ID NO: 2254702
aaaugucugauucuaacaa

SEQ ID NO: 2254704 - RNA, 19 nt, Artificial Sequence
  Description of Artificial Sequence: Synthetic oligonucleotide
  Sense strand starting at position 3264 of SEQ ID NO: 1884292
gcuagaauugaguguuauu

SEQ ID NO: 2254705 - RNA, 19 nt, Artificial Sequence
  Description of Artificial Sequence: Synthetic oligonucleotide
  Antisense strand to SEQ ID NO: 2254704
aauaacacucaauucuagc

SEQ ID NO: 2254706 - RNA, 19 nt, Artificial Sequence
  Description of Artificial Sequence: Synthetic oligonucleotide
  Sense strand starting at position 3353 of SEQ ID NO: 1884292
agaacaaauuccugauuug

SEQ ID NO: 2254707 - RNA, 19 nt, Artificial Sequence
  Description of Artificial Sequence: Synthetic oligonucleotide
  Antisense strand to SEQ ID NO: 2254706
caaaucaggaauuuguucu

SEQ ID NO: 2254708 - RNA, 19 nt, Artificial Sequence
  Description of Artificial Sequence: Synthetic oligonucleotide
  Sense strand starting at position 3421 of SEQ ID NO: 1884292
augcuagaaggugauagua

SEQ ID NO: 2254709 - RNA, 19 nt, Artificial Sequence
  Description of Artificial Sequence: Synthetic oligonucleotide
  Antisense strand to SEQ ID NO: 2254708
uacuaucaccuucuagcau

SEQ ID NO: 2254710 - RNA, 19 nt, Artificial Sequence
  Description of Artificial Sequence: Synthetic oligonucleotide
  Sense strand starting at position 3429 of SEQ ID NO: 1884292
aggugauaguaguuuggaa

SEQ ID NO: 2254711 - RNA, 19 nt, Artificial Sequence
  Description of Artificial Sequence: Synthetic oligonucleotide
  Antisense strand to SEQ ID NO: 2254710
uuccaaacuacuaucaccu

SEQ ID NO: 2254712 - RNA, 19 nt, Artificial Sequence
  Description of Artificial Sequence: Synthetic oligonucleotide
  Sense strand starting at position 3431 of SEQ ID NO: 1884292
gugauaguaguuuggaaac

SEQ ID NO: 2254713 - RNA, 19 nt, Artificial Sequence
  Description of Artificial Sequence: Synthetic oligonucleotide
  Antisense strand to SEQ ID NO: 2254712
guuuccaaacuacuaucac

SEQ ID NO: 2254714 - RNA, 19 nt, Artificial Sequence
  Description of Artificial Sequence: Synthetic oligonucleotide
  Sense strand starting at position 3814 of SEQ ID NO: 1884292
ggugguaaauucucaucac

SEQ ID NO: 2254715 - RNA, 19 nt, Artificial Sequence
  Description of Artificial Sequence: Synthetic oligonucleotide
  Antisense strand to SEQ ID NO: 2254714
gugaugagaauuuaccacc

SEQ ID NO: 2254716 - RNA, 19 nt, Artificial Sequence
  Description of Artificial Sequence: Synthetic oligonucleotide
  Sense strand starting at position 3835 of SEQ ID NO: 1884292
aaauaugaguguuugaggu

SEQ ID NO: 2254717 - RNA, 19 nt, Artificial Sequence
  Description of Artificial Sequence: Synthetic oligonucleotide
  Antisense strand to SEQ ID NO: 2254716
accucaaacacucauauuu

SEQ ID NO: 2254718 - RNA, 19 nt, Artificial Sequence
  Description of Artificial Sequence: Synthetic oligonucleotide
  Sense strand starting at position 3856 of SEQ ID NO: 1884292
uggcuauccuaauuagcuu

SEQ ID NO: 2254719 - RNA, 19 nt, Artificial Sequence
  Description of Artificial Sequence: Synthetic oligonucleotide
  Antisense strand to SEQ ID NO: 2254718
aagcuaauuaggauagcca

SEQ ID NO: 2254720 - RNA, 19 nt, Artificial Sequence
  Description of Artificial Sequence: Synthetic oligonucleotide
  Sense strand starting at position 3912 of SEQ ID NO: 1884292
cuugguaucccauaaguau

SEQ ID NO: 2254721 - RNA, 19 nt, Artificial Sequence
  Description of Artificial Sequence: Synthetic oligonucleotide
  Antisense strand to SEQ ID NO: 2254720
auacuuaugggauaccaag

SEQ ID NO: 2254722 - RNA, 19 nt, Artificial Sequence
  Description of Artificial Sequence: Synthetic oligonucleotide
  Sense strand starting at position 355 of SEQ ID NO: 1884293
cuaugaaauucggcaaaua

SEQ ID NO: 2254723 - RNA, 19 nt, Artificial Sequence
  Description of Artificial Sequence: Synthetic oligonucleotide
  Antisense strand to SEQ ID NO: 2254722
uauuugccgaauuucauag

SEQ ID NO: 2254724 - RNA, 19 nt, Artificial Sequence
  Description of Artificial Sequence: Synthetic oligonucleotide
  Sense strand starting at position 439 of SEQ ID NO: 1884293
gcuauauugucagcuacag

SEQ ID NO: 2254725 - RNA, 19 nt, Artificial Sequence
  Description of Artificial Sequence: Synthetic oligonucleotide
  Antisense strand to SEQ ID NO: 2254724
cuguagcugacaauauagc

SEQ ID NO: 2254726 - RNA, 19 nt, Artificial Sequence
  Description of Artificial Sequence: Synthetic oligonucleotide
  Sense strand starting at position 485 of SEQ ID NO: 1884293
ggugaauucuaacuuggau

SEQ ID NO: 2254727 - RNA, 19 nt, Artificial Sequence
  Description of Artificial Sequence: Synthetic oligonucleotide
  Antisense strand to SEQ ID NO: 2254726
auccaaguuagaauucacc

SEQ ID NO: 2254728 - RNA, 19 nt, Artificial Sequence
  Description of Artificial Sequence: Synthetic oligonucleotide
  Sense strand starting at position 512 of SEQ ID NO: 1884293
ugguuuaaguccuugacug

SEQ ID NO: 2254729 - RNA, 19 nt, Artificial Sequence
  Description of Artificial Sequence: Synthetic oligonucleotide
  Antisense strand to SEQ ID NO: 2254728
cagucaaggacuuaaacca

SEQ ID NO: 2254730 - RNA, 19 nt, Artificial Sequence
  Description of Artificial Sequence: Synthetic oligonucleotide
  Sense strand starting at position 513 of SEQ ID NO: 1884293
gguuuaaguccuugacuga

SEQ ID NO: 2254731 - RNA, 19 nt, Artificial Sequence
  Description of Artificial Sequence: Synthetic oligonucleotide
  Antisense strand to SEQ ID NO: 2254730
ucagucaaggacuuaaacc

SEQ ID NO: 2254732 - RNA, 19 nt, Artificial Sequence
  Description of Artificial Sequence: Synthetic oligonucleotide
  Sense strand starting at position 514 of SEQ ID NO: 1884293
guuuaaguccuugacugau

SEQ ID NO: 2254733 - RNA, 19 nt, Artificial Sequence
  Description of Artificial Sequence: Synthetic oligonucleotide
  Antisense strand to SEQ ID NO: 2254732
aucagucaaggacuuaaac

SEQ ID NO: 2254734 - RNA, 19 nt, Artificial Sequence
  Description of Artificial Sequence: Synthetic oligonucleotide
  Sense strand starting at position 516 of SEQ ID NO: 1884293
uuaaguccuugacugauua

SEQ ID NO: 2254735 - RNA, 19 nt, Artificial Sequence
  Description of Artificial Sequence: Synthetic oligonucleotide
  Antisense strand to SEQ ID NO: 2254734
uaaucagucaaggacuuaa

SEQ ID NO: 2254736 - RNA, 19 nt, Artificial Sequence
  Description of Artificial Sequence: Synthetic oligonucleotide
  Sense strand starting at position 531 of SEQ ID NO: 1884293
auuacaaucugaccgugaa

SEQ ID NO: 2254737 - RNA, 19 nt, Artificial Sequence
  Description of Artificial Sequence: Synthetic oligonucleotide
  Antisense strand to SEQ ID NO: 2254736
uucacggucagauuguaau

SEQ ID NO: 2254738 - RNA, 19 nt, Artificial Sequence
  Description of Artificial Sequence: Synthetic oligonucleotide
  Sense strand starting at position 532 of SEQ ID NO: 1884293
uuacaaucugaccgugaag

SEQ ID NO: 2254739 - RNA, 19 nt, Artificial Sequence
  Description of Artificial Sequence: Synthetic oligonucleotide
  Antisense strand to SEQ ID NO: 2254738
cuucacggucagauuguaa

SEQ ID NO: 2254740 - RNA, 19 nt, Artificial Sequence
  Description of Artificial Sequence: Synthetic oligonucleotide
  Sense strand starting at position 573 of SEQ ID NO: 1884293
uguccagauucuccguaaa

SEQ ID NO: 2254741 - RNA, 19 nt, Artificial Sequence
  Description of Artificial Sequence: Synthetic oligonucleotide
  Antisense strand to SEQ ID NO: 2254740
uuuacggagaaucuggaca

SEQ ID NO: 2254742 - RNA, 19 nt, Artificial Sequence
  Description of Artificial Sequence: Synthetic oligonucleotide
  Sense strand starting at position 575 of SEQ ID NO: 1884293
uccagauucuccguaaauu

SEQ ID NO: 2254743 - RNA, 19 nt, Artificial Sequence
  Description of Artificial Sequence: Synthetic oligonucleotide
  Antisense strand to SEQ ID NO: 2254742
aauuuacggagaaucugga

SEQ ID NO: 2254744 - RNA, 19 nt, Artificial Sequence
  Description of Artificial Sequence: Synthetic oligonucleotide
  Sense strand starting at position 576 of SEQ ID NO: 1884293
ccagauucuccguaaauuc

SEQ ID NO: 2254745 - RNA, 19 nt, Artificial Sequence
  Description of Artificial Sequence: Synthetic oligonucleotide
  Antisense strand to SEQ ID NO: 2254744
gaauuuacggagaaucugg

SEQ ID NO: 2254746 - RNA, 19 nt, Artificial Sequence
  Description of Artificial Sequence: Synthetic oligonucleotide
  Sense strand starting at position 747 of SEQ ID NO: 1884293
gaauaaauggcacgucaca

SEQ ID NO: 2254747 - RNA, 19 nt, Artificial Sequence
  Description of Artificial Sequence: Synthetic oligonucleotide
  Antisense strand to SEQ ID NO: 2254746
ugugacgugccauuuauuc

SEQ ID NO: 2254748 - RNA, 19 nt, Artificial Sequence
  Description of Artificial Sequence: Synthetic oligonucleotide
  Sense strand starting at position 763 of SEQ ID NO: 1884293
acagguuagcucuaggauu

SEQ ID NO: 2254749 - RNA, 19 nt, Artificial Sequence
  Description of Artificial Sequence: Synthetic oligonucleotide
  Antisense strand to SEQ ID NO: 2254748
aauccuagagcuaaccugu

SEQ ID NO: 2254750 - RNA, 19 nt, Artificial Sequence
  Description of Artificial Sequence: Synthetic oligonucleotide
  Sense strand starting at position 829 of SEQ ID NO: 1884293
uuggaaaggcucugcaagu

SEQ ID NO: 2254751 - RNA, 19 nt, Artificial Sequence
  Description of Artificial Sequence: Synthetic oligonucleotide
  Antisense strand to SEQ ID NO: 2254750
acuugcagagccuuuccaa

SEQ ID NO: 2254752 - RNA, 19 nt, Artificial Sequence
  Description of Artificial Sequence: Synthetic oligonucleotide
  Sense strand starting at position 830 of SEQ ID NO: 1884293
uggaaaggcucugcaaguu

SEQ ID NO: 2254753 - RNA, 19 nt, Artificial Sequence
  Description of Artificial Sequence: Synthetic oligonucleotide
  Antisense strand to SEQ ID NO: 2254752
aacuugcagagccuuucca

SEQ ID NO: 2254754 - RNA, 19 nt, Artificial Sequence
  Description of Artificial Sequence: Synthetic oligonucleotide
  Sense strand starting at position 854 of SEQ ID NO: 1884293
cagaaagaacgauguuauu

SEQ ID NO: 2254755 - RNA, 19 nt, Artificial Sequence
  Description of Artificial Sequence: Synthetic oligonucleotide
  Antisense strand to SEQ ID NO: 2254754
aauaacaucguucuuucug

SEQ ID NO: 2254756 - RNA, 19 nt, Artificial Sequence
  Description of Artificial Sequence: Synthetic oligonucleotide
  Sense strand starting at position 954 of SEQ ID NO: 1884293
ucagaugauagcuguaaga

SEQ ID NO: 2254757 - RNA, 19 nt, Artificial Sequence
  Description of Artificial Sequence: Synthetic oligonucleotide
  Antisense strand to SEQ ID NO: 2254756
ucuuacagcuaucaucuga

SEQ ID NO: 2254758 - RNA, 19 nt, Artificial Sequence
  Description of Artificial Sequence: Synthetic oligonucleotide
  Sense strand starting at position 2164 of SEQ ID NO: 1884293
gcgaguugccugguuaacu

SEQ ID NO: 2254759 - RNA, 19 nt, Artificial Sequence
  Description of Artificial Sequence: Synthetic oligonucleotide
  Antisense strand to SEQ ID NO: 2254758
aguuaaccaggcaacucgc

SEQ ID NO: 2254760 - RNA, 19 nt, Artificial Sequence
  Description of Artificial Sequence: Synthetic oligonucleotide
  Sense strand starting at position 2363 of SEQ ID NO: 1884293
gcuuaacuugguggguaua

SEQ ID NO: 2254761 - RNA, 19 nt, Artificial Sequence
  Description of Artificial Sequence: Synthetic oligonucleotide
  Antisense strand to SEQ ID NO: 2254760
uauacccaccaaguuaagc

SEQ ID NO: 2254762 - RNA, 19 nt, Artificial Sequence
  Description of Artificial Sequence: Synthetic oligonucleotide
  Sense strand starting at position 2364 of SEQ ID NO: 1884293
cuuaacuugguggguauaa

SEQ ID NO: 2254763 - RNA, 19 nt, Artificial Sequence
  Description of Artificial Sequence: Synthetic oligonucleotide
  Antisense strand to SEQ ID NO: 2254762
uuauacccaccaaguuaag

SEQ ID NO: 2254764 - RNA, 19 nt, Artificial Sequence
  Description of Artificial Sequence: Synthetic oligonucleotide
  Sense strand starting at position 2365 of SEQ ID NO: 1884293
uuaacuugguggguauaaa

SEQ ID NO: 2254765 - RNA, 19 nt, Artificial Sequence
  Description of Artificial Sequence: Synthetic oligonucleotide
  Antisense strand to SEQ ID NO: 2254764
uuuauacccaccaaguuaa

SEQ ID NO: 2254766 - RNA, 19 nt, Artificial Sequence
  Description of Artificial Sequence: Synthetic oligonucleotide
  Sense strand starting at position 2856 of SEQ ID NO: 1884293
cgcuacucuuguuugagga

SEQ ID NO: 2254767 - RNA, 19 nt, Artificial Sequence
  Description of Artificial Sequence: Synthetic oligonucleotide
  Antisense strand to SEQ ID NO: 2254766
uccucaaacaagaguagcg

SEQ ID NO: 2254768 - RNA, 19 nt, Artificial Sequence
  Description of Artificial Sequence: Synthetic oligonucleotide
  Sense strand starting at position 2863 of SEQ ID NO: 1884293
cuuguuugaggaggugauu

SEQ ID NO: 2254769 - RNA, 19 nt, Artificial Sequence
  Description of Artificial Sequence: Synthetic oligonucleotide
  Antisense strand to SEQ ID NO: 2254768
aaucaccuccucaaacaag

SEQ ID NO: 2254770 - RNA, 19 nt, Artificial Sequence
  Description of Artificial Sequence: Synthetic oligonucleotide
  Sense strand starting at position 2902 of SEQ ID NO: 1884293
caagguggccuuuggagaa

SEQ ID NO: 2254771 - RNA, 19 nt, Artificial Sequence
  Description of Artificial Sequence: Synthetic oligonucleotide
  Antisense strand to SEQ ID NO: 2254770
uucuccaaaggccaccuug

SEQ ID NO: 2254772 - RNA, 19 nt, Artificial Sequence
  Description of Artificial Sequence: Synthetic oligonucleotide
  Sense strand starting at position 2919 of SEQ ID NO: 1884293
aagggaacagcucgggauu

SEQ ID NO: 2254773 - RNA, 19 nt, Artificial Sequence
  Description of Artificial Sequence: Synthetic oligonucleotide
  Antisense strand to SEQ ID NO: 2254772
aaucccgagcuguucccuu

SEQ ID NO: 2254774 - RNA, 19 nt, Artificial Sequence
  Description of Artificial Sequence: Synthetic oligonucleotide
  Sense strand starting at position 3004 of SEQ ID NO: 1884293
guuguagggucucucauaa

SEQ ID NO: 2254775 - RNA, 19 nt, Artificial Sequence
  Description of Artificial Sequence: Synthetic oligonucleotide
  Antisense strand to SEQ ID NO: 2254774
uuaugagagacccuacaac

SEQ ID NO: 2254776 - RNA, 19 nt, Artificial Sequence
  Description of Artificial Sequence: Synthetic oligonucleotide
  Sense strand starting at position 3116 of SEQ ID NO: 1884293
ggaagacugcaccauguuu

SEQ ID NO: 2254777 - RNA, 19 nt, Artificial Sequence
  Description of Artificial Sequence: Synthetic oligonucleotide
  Antisense strand to SEQ ID NO: 2254776
aaacauggugcagucuucc

SEQ ID NO: 2254778 - RNA, 19 nt, Artificial Sequence
  Description of Artificial Sequence: Synthetic oligonucleotide
  Sense strand starting at position 3125 of SEQ ID NO: 1884293
caccauguuuaaguaagga

SEQ ID NO: 2254779 - RNA, 19 nt, Artificial Sequence
  Description of Artificial Sequence: Synthetic oligonucleotide
  Antisense strand to SEQ ID NO: 2254778
uccuuacuuaaacauggug

SEQ ID NO: 2254780 - RNA, 19 nt, Artificial Sequence
  Description of Artificial Sequence: Synthetic oligonucleotide
  Sense strand starting at position 3146 of SEQ ID NO: 1884293
ugugaaugcuuacuuaaac

SEQ ID NO: 2254781 - RNA, 19 nt, Artificial Sequence
  Description of Artificial Sequence: Synthetic oligonucleotide
  Antisense strand to SEQ ID NO: 2254780
guuuaaguaagcauucaca

SEQ ID NO: 2254782 - RNA, 19 nt, Artificial Sequence
  Description of Artificial Sequence: Synthetic oligonucleotide
  Sense strand starting at position 3158 of SEQ ID NO: 1884293
cuuaaaccauguuuaagua

SEQ ID NO: 2254783 - RNA, 19 nt, Artificial Sequence
  Description of Artificial Sequence: Synthetic oligonucleotide
  Antisense strand to SEQ ID NO: 2254782
uacuuaaacaugguuuaag

SEQ ID NO: 2254784 - RNA, 19 nt, Artificial Sequence
  Description of Artificial Sequence: Synthetic oligonucleotide
  Sense strand starting at position 3162 of SEQ ID NO: 1884293
aaccauguuuaaguaagga

SEQ ID NO: 2254785 - RNA, 19 nt, Artificial Sequence
  Description of Artificial Sequence: Synthetic oligonucleotide
  Antisense strand to SEQ ID NO: 2254784
uccuuacuuaaacaugguu

SEQ ID NO: 2254786 - RNA, 19 nt, Artificial Sequence
  Description of Artificial Sequence: Synthetic oligonucleotide
  Sense strand starting at position 3198 of SEQ ID NO: 1884293
cugguuauuugguaggaga

SEQ ID NO: 2254787 - RNA, 19 nt, Artificial Sequence
  Description of Artificial Sequence: Synthetic oligonucleotide
  Antisense strand to SEQ ID NO: 2254786
ucuccuaccaaauaaccag

SEQ ID NO: 2254788 - RNA, 19 nt, Artificial Sequence
  Description of Artificial Sequence: Synthetic oligonucleotide
  Sense strand starting at position 3201 of SEQ ID NO: 1884293
guuauuugguaggagauac

SEQ ID NO: 2254789 - RNA, 19 nt, Artificial Sequence
  Description of Artificial Sequence: Synthetic oligonucleotide
  Antisense strand to SEQ ID NO: 2254788
guaucuccuaccaaauaac

SEQ ID NO: 2254790 - RNA, 19 nt, Artificial Sequence
  Description of Artificial Sequence: Synthetic oligonucleotide
  Sense strand starting at position 3223 of SEQ ID NO: 1884293
ccaggcucucacugcuaau

SEQ ID NO: 2254791 - RNA, 19 nt, Artificial Sequence
  Description of Artificial Sequence: Synthetic oligonucleotide
  Antisense strand to SEQ ID NO: 2254790
auuagcagugagagccugg

SEQ ID NO: 2254792 - RNA, 19 nt, Artificial Sequence
  Description of Artificial Sequence: Synthetic oligonucleotide
  Sense strand starting at position 3417 of SEQ ID NO: 1884293
auggcuugaugagcaauua

SEQ ID NO: 2254793 - RNA, 19 nt, Artificial Sequence
  Description of Artificial Sequence: Synthetic oligonucleotide
  Antisense strand to SEQ ID NO: 2254792
uaauugcucaucaagccau

SEQ ID NO: 2254794 - RNA, 19 nt, Artificial Sequence
  Description of Artificial Sequence: Synthetic oligonucleotide
  Sense strand starting at position 3418 of SEQ ID NO: 1884293
uggcuugaugagcaauuau

SEQ ID NO: 2254795 - RNA, 19 nt, Artificial Sequence
  Description of Artificial Sequence: Synthetic oligonucleotide
  Antisense strand to SEQ ID NO: 2254794
auaauugcucaucaagcca

SEQ ID NO: 2254796 - RNA, 19 nt, Artificial Sequence
  Description of Artificial Sequence: Synthetic oligonucleotide
  Sense strand starting at position 3448 of SEQ ID NO: 1884293
ugaguaguagccgaccaau

SEQ ID NO: 2254797 - RNA, 19 nt, Artificial Sequence
  Description of Artificial Sequence: Synthetic oligonucleotide
  Antisense strand to SEQ ID NO: 2254796
auuggucggcuacuacuca

SEQ ID NO: 2254798 - RNA, 19 nt, Artificial Sequence
  Description of Artificial Sequence: Synthetic oligonucleotide
  Sense strand starting at position 3618 of SEQ ID NO: 1884293
ucaagugccuccuuuagaa

SEQ ID NO: 2254799 - RNA, 19 nt, Artificial Sequence
  Description of Artificial Sequence: Synthetic oligonucleotide
  Antisense strand to SEQ ID NO: 2254798
uucuaaaggaggcacuuga

SEQ ID NO: 2254800 - RNA, 19 nt, Artificial Sequence
  Description of Artificial Sequence: Synthetic oligonucleotide
  Sense strand starting at position 3664 of SEQ ID NO: 1884293
uguauauccacucgggaga

SEQ ID NO: 2254801 - RNA, 19 nt, Artificial Sequence
  Description of Artificial Sequence: Synthetic oligonucleotide
  Antisense strand to SEQ ID NO: 2254800
ucucccgaguggauauaca

SEQ ID NO: 2254802 - RNA, 19 nt, Artificial Sequence
  Description of Artificial Sequence: Synthetic oligonucleotide
  Sense strand starting at position 146 of SEQ ID NO: 1884294
agcccauaggguuaguauu

SEQ ID NO: 2254803 - RNA, 19 nt, Artificial Sequence
  Description of Artificial Sequence: Synthetic oligonucleotide
  Antisense strand to SEQ ID NO: 2254802
aauacuaacccuaugggcu

SEQ ID NO: 2254804 - RNA, 19 nt, Artificial Sequence
  Description of Artificial Sequence: Synthetic oligonucleotide
  Sense strand starting at position 148 of SEQ ID NO: 1884294
cccauaggguuaguauuau

SEQ ID NO: 2254805 - RNA, 19 nt, Artificial Sequence
  Description of Artificial Sequence: Synthetic oligonucleotide
  Antisense strand to SEQ ID NO: 2254804
auaauacuaacccuauggg

SEQ ID NO: 2254806 - RNA, 19 nt, Artificial Sequence
  Description of Artificial Sequence: Synthetic oligonucleotide
  Sense strand starting at position 154 of SEQ ID NO: 1884294
ggguuaguauuauuaucag

SEQ ID NO: 2254807 - RNA, 19 nt, Artificial Sequence
  Description of Artificial Sequence: Synthetic oligonucleotide
  Antisense strand to SEQ ID NO: 2254806
cugauaauaauacuaaccc

SEQ ID NO: 2254808 - RNA, 19 nt, Artificial Sequence
  Description of Artificial Sequence: Synthetic oligonucleotide
  Sense strand starting at position 361 of SEQ ID NO: 1884294
cacagcuguccuggagaca

SEQ ID NO: 2254809 - RNA, 19 nt, Artificial Sequence
  Description of Artificial Sequence: Synthetic oligonucleotide
  Antisense strand to SEQ ID NO: 2254808
ugucuccaggacagcugug

SEQ ID NO: 2254810 - RNA, 19 nt, Artificial Sequence
  Description of Artificial Sequence: Synthetic oligonucleotide
  Sense strand starting at position 390 of SEQ ID NO: 1884294
accaauugcucuuucguaa

SEQ ID NO: 2254811 - RNA, 19 nt, Artificial Sequence
  Description of Artificial Sequence: Synthetic oligonucleotide
  Antisense strand to SEQ ID NO: 2254810
uuacgaaagagcaauuggu

SEQ ID NO: 2254812 - RNA, 19 nt, Artificial Sequence
  Description of Artificial Sequence: Synthetic oligonucleotide
  Sense strand starting at position 393 of SEQ ID NO: 1884294
aauugcucuuucguaagau

SEQ ID NO: 2254813 - RNA, 19 nt, Artificial Sequence
  Description of Artificial Sequence: Synthetic oligonucleotide
  Antisense strand to SEQ ID NO: 2254812
aucuuacgaaagagcaauu

SEQ ID NO: 2254814 - RNA, 19 nt, Artificial Sequence
  Description of Artificial Sequence: Synthetic oligonucleotide
  Sense strand starting at position 478 of SEQ ID NO: 1884294
guuuccuaugcucaaaugu

SEQ ID NO: 2254815 - RNA, 19 nt, Artificial Sequence
  Description of Artificial Sequence: Synthetic oligonucleotide
  Antisense strand to SEQ ID NO: 2254814
acauuugagcauaggaaac

SEQ ID NO: 2254816 - RNA, 19 nt, Artificial Sequence
  Description of Artificial Sequence: Synthetic oligonucleotide
  Sense strand starting at position 487 of SEQ ID NO: 1884294
gcucaaauguacuuggaaa

SEQ ID NO: 2254817 - RNA, 19 nt, Artificial Sequence
  Description of Artificial Sequence: Synthetic oligonucleotide
  Antisense strand to SEQ ID NO: 2254816
uuuccaaguacauuugagc

SEQ ID NO: 2254818 - RNA, 19 nt, Artificial Sequence
  Description of Artificial Sequence: Synthetic oligonucleotide
  Sense strand starting at position 915 of SEQ ID NO: 1884294
cuuuaaagguucccaggaa

SEQ ID NO: 2254819 - RNA, 19 nt, Artificial Sequence
  Description of Artificial Sequence: Synthetic oligonucleotide
  Antisense strand to SEQ ID NO: 2254818
uuccugggaaccuuuaaag

SEQ ID NO: 2254820 - RNA, 19 nt, Artificial Sequence
  Description of Artificial Sequence: Synthetic oligonucleotide
  Sense strand starting at position 1123 of SEQ ID NO: 1884294
ggaauauucuaagugcucu

SEQ ID NO: 2254821 - RNA, 19 nt, Artificial Sequence
  Description of Artificial Sequence: Synthetic oligonucleotide
  Antisense strand to SEQ ID NO: 2254820
agagcacuuagaauauucc

SEQ ID NO: 2254822 - RNA, 19 nt, Artificial Sequence
  Description of Artificial Sequence: Synthetic oligonucleotide
  Sense strand starting at position 1161 of SEQ ID NO: 1884294
guggcugcgcugaaaggua

SEQ ID NO: 2254823 - RNA, 19 nt, Artificial Sequence
  Description of Artificial Sequence: Synthetic oligonucleotide
  Antisense strand to SEQ ID NO: 2254822
uaccuuucagcgcagccac

SEQ ID NO: 2254824 - RNA, 19 nt, Artificial Sequence
  Description of Artificial Sequence: Synthetic oligonucleotide
  Sense strand starting at position 1209 of SEQ ID NO: 1884294
aucugacacuggucaagau

SEQ ID NO: 2254825 - RNA, 19 nt, Artificial Sequence
  Description of Artificial Sequence: Synthetic oligonucleotide
  Antisense strand to SEQ ID NO: 2254824
aucuugaccagugucagau

SEQ ID NO: 2254826 - RNA, 19 nt, Artificial Sequence
  Description of Artificial Sequence: Synthetic oligonucleotide
  Sense strand starting at position 1938 of SEQ ID NO: 1884294
gggcgauugcgccucccua

SEQ ID NO: 2254827 - RNA, 19 nt, Artificial Sequence
  Description of Artificial Sequence: Synthetic oligonucleotide
  Antisense strand to SEQ ID NO: 2254826
uagggaggcgcaaucgccc

SEQ ID NO: 2254828 - RNA, 19 nt, Artificial Sequence
  Description of Artificial Sequence: Synthetic oligonucleotide
  Sense strand starting at position 1939 of SEQ ID NO: 1884294
ggcgauugcgccucccuaa

SEQ ID NO: 2254829 - RNA, 19 nt, Artificial Sequence
  Description of Artificial Sequence: Synthetic oligonucleotide
  Antisense strand to SEQ ID NO: 2254828
uuagggaggcgcaaucgcc

SEQ ID NO: 2254830 - RNA, 19 nt, Artificial Sequence
  Description of Artificial Sequence: Synthetic oligonucleotide
  Sense strand starting at position 1952 of SEQ ID NO: 1884294
cccuaacuaugggugaaga

SEQ ID NO: 2254831 - RNA, 19 nt, Artificial Sequence
  Description of Artificial Sequence: Synthetic oligonucleotide
  Antisense strand to SEQ ID NO: 2254830
ucuucacccauaguuaggg

SEQ ID NO: 2254832 - RNA, 19 nt, Artificial Sequence
  Description of Artificial Sequence: Synthetic oligonucleotide
  Sense strand starting at position 2106 of SEQ ID NO: 1884294
uagaccugagucugaauca

SEQ ID NO: 2254833 - RNA, 19 nt, Artificial Sequence
  Description of Artificial Sequence: Synthetic oligonucleotide
  Antisense strand to SEQ ID NO: 2254832
ugauucagacucaggucua

SEQ ID NO: 2254834 - RNA, 19 nt, Artificial Sequence
  Description of Artificial Sequence: Synthetic oligonucleotide
  Sense strand starting at position 2426 of SEQ ID NO: 1884294
uacaguuuguggguaaauu

SEQ ID NO: 2254835 - RNA, 19 nt, Artificial Sequence
  Description of Artificial Sequence: Synthetic oligonucleotide
  Antisense strand to SEQ ID NO: 2254834
aauuuacccacaaacugua

SEQ ID NO: 2254836 - RNA, 19 nt, Artificial Sequence
  Description of Artificial Sequence: Synthetic oligonucleotide
  Sense strand starting at position 2550 of SEQ ID NO: 1884294
gcucauuauccucacaguu

SEQ ID NO: 2254837 - RNA, 19 nt, Artificial Sequence
  Description of Artificial Sequence: Synthetic oligonucleotide
  Antisense strand to SEQ ID NO: 2254836
aacugugaggauaaugagc

SEQ ID NO: 2254838 - RNA, 19 nt, Artificial Sequence
  Description of Artificial Sequence: Synthetic oligonucleotide
  Sense strand starting at position 2552 of SEQ ID NO: 1884294
ucauuauccucacaguuga

SEQ ID NO: 2254839 - RNA, 19 nt, Artificial Sequence
  Description of Artificial Sequence: Synthetic oligonucleotide
  Antisense strand to SEQ ID NO: 2254838
ucaacugugaggauaauga

SEQ ID NO: 2254840 - RNA, 19 nt, Artificial Sequence
  Description of Artificial Sequence: Synthetic oligonucleotide
  Sense strand starting at position 2595 of SEQ ID NO: 1884294
aucaaucauuuguggaguu

SEQ ID NO: 2254841 - RNA, 19 nt, Artificial Sequence
  Description of Artificial Sequence: Synthetic oligonucleotide
  Antisense strand to SEQ ID NO: 2254840
aacuccacaaaugauugau

SEQ ID NO: 2254842 - RNA, 19 nt, Artificial Sequence
  Description of Artificial Sequence: Synthetic oligonucleotide
  Sense strand starting at position 2596 of SEQ ID NO: 1884294
ucaaucauuuguggaguuu

SEQ ID NO: 2254843 - RNA, 19 nt, Artificial Sequence
  Description of Artificial Sequence: Synthetic oligonucleotide
  Antisense strand to SEQ ID NO: 2254842
aaacuccacaaaugauuga

SEQ ID NO: 2254844 - RNA, 19 nt, Artificial Sequence
  Description of Artificial Sequence: Synthetic oligonucleotide
  Sense strand starting at position 2620 of SEQ ID NO: 1884294
guauaaugaugugucaauu

SEQ ID NO: 2254845 - RNA, 19 nt, Artificial Sequence
  Description of Artificial Sequence: Synthetic oligonucleotide
  Antisense strand to SEQ ID NO: 2254844
aauugacacaucauuauac

SEQ ID NO: 2254846 - RNA, 19 nt, Artificial Sequence
  Description of Artificial Sequence: Synthetic oligonucleotide
  Sense strand starting at position 2794 of SEQ ID NO: 1884294
uuccaauucugaggacaag

SEQ ID NO: 2254847 - RNA, 19 nt, Artificial Sequence
  Description of Artificial Sequence: Synthetic oligonucleotide
  Antisense strand to SEQ ID NO: 2254846
cuuguccucagaauuggaa

SEQ ID NO: 2254848 - RNA, 19 nt, Artificial Sequence
  Description of Artificial Sequence: Synthetic oligonucleotide
  Sense strand starting at position 2878 of SEQ ID NO: 1884294
aggaaagacuugcaaggua

SEQ ID NO: 2254849 - RNA, 19 nt, Artificial Sequence
  Description of Artificial Sequence: Synthetic oligonucleotide
  Antisense strand to SEQ ID NO: 2254848
uaccuugcaagucuuuccu

SEQ ID NO: 2254850 - RNA, 19 nt, Artificial Sequence
  Description of Artificial Sequence: Synthetic oligonucleotide
  Sense strand starting at position 2955 of SEQ ID NO: 1884294
ggagcacagcugugucuau

SEQ ID NO: 2254851 - RNA, 19 nt, Artificial Sequence
  Description of Artificial Sequence: Synthetic oligonucleotide
  Antisense strand to SEQ ID NO: 2254850
auagacacagcugugcucc

SEQ ID NO: 2254852 - RNA, 19 nt, Artificial Sequence
  Description of Artificial Sequence: Synthetic oligonucleotide
  Sense strand starting at position 2964 of SEQ ID NO: 1884294
cugugucuaucucugugua

SEQ ID NO: 2254853 - RNA, 19 nt, Artificial Sequence
  Description of Artificial Sequence: Synthetic oligonucleotide
  Antisense strand to SEQ ID NO: 2254852
uacacagagauagacacag

SEQ ID NO: 2254854 - RNA, 19 nt, Artificial Sequence
  Description of Artificial Sequence: Synthetic oligonucleotide
  Sense strand starting at position 2965 of SEQ ID NO: 1884294
ugugucuaucucuguguaa

SEQ ID NO: 2254855 - RNA, 19 nt, Artificial Sequence
  Description of Artificial Sequence: Synthetic oligonucleotide
  Antisense strand to SEQ ID NO: 2254854
uuacacagagauagacaca

SEQ ID NO: 2254856 - RNA, 19 nt, Artificial Sequence
  Description of Artificial Sequence: Synthetic oligonucleotide
  Sense strand starting at position 2966 of SEQ ID NO: 1884294
gugucuaucucuguguaau

SEQ ID NO: 2254857 - RNA, 19 nt, Artificial Sequence
  Description of Artificial Sequence: Synthetic oligonucleotide
  Antisense strand to SEQ ID NO: 2254856
auuacacagagauagacac

SEQ ID NO: 2254858 - RNA, 19 nt, Artificial Sequence
  Description of Artificial Sequence: Synthetic oligonucleotide
  Sense strand starting at position 2967 of SEQ ID NO: 1884294
ugucuaucucuguguaaua

SEQ ID NO: 2254859 - RNA, 19 nt, Artificial Sequence
  Description of Artificial Sequence: Synthetic oligonucleotide
  Antisense strand to SEQ ID NO: 2254858
uauuacacagagauagaca

SEQ ID NO: 2254860 - RNA, 19 nt, Artificial Sequence
  Description of Artificial Sequence: Synthetic oligonucleotide
  Sense strand starting at position 2968 of SEQ ID NO: 1884294
gucuaucucuguguaauaa

SEQ ID NO: 2254861 - RNA, 19 nt, Artificial Sequence
  Description of Artificial Sequence: Synthetic oligonucleotide
  Antisense strand to SEQ ID NO: 2254860
uuauuacacagagauagac

SEQ ID NO: 2254862 - RNA, 19 nt, Artificial Sequence
  Description of Artificial Sequence: Synthetic oligonucleotide
  Sense strand starting at position 2969 of SEQ ID NO: 1884294
ucuaucucuguguaauaac

SEQ ID NO: 2254863 - RNA, 19 nt, Artificial Sequence
  Description of Artificial Sequence: Synthetic oligonucleotide
  Antisense strand to SEQ ID NO: 2254862
guuauuacacagagauaga

SEQ ID NO: 2254864 - RNA, 19 nt, Artificial Sequence
  Description of Artificial Sequence: Synthetic oligonucleotide
  Sense strand starting at position 3014 of SEQ ID NO: 1884294
gguguuaugagaugaacuu

SEQ ID NO: 2254865 - RNA, 19 nt, Artificial Sequence
  Description of Artificial Sequence: Synthetic oligonucleotide
  Antisense strand to SEQ ID NO: 2254864
aaguucaucucauaacacc

SEQ ID NO: 2254866 - RNA, 19 nt, Artificial Sequence
  Description of Artificial Sequence: Synthetic oligonucleotide
  Sense strand starting at position 3015 of SEQ ID NO: 1884294
guguuaugagaugaacuuc

SEQ ID NO: 2254867 - RNA, 19 nt, Artificial Sequence
  Description of Artificial Sequence: Synthetic oligonucleotide
  Antisense strand to SEQ ID NO: 2254866
gaaguucaucucauaacac

SEQ ID NO: 2254868 - RNA, 19 nt, Artificial Sequence
  Description of Artificial Sequence: Synthetic oligonucleotide
  Sense strand starting at position 3107 of SEQ ID NO: 1884294
auucucugaucccagguaa

SEQ ID NO: 2254869 - RNA, 19 nt, Artificial Sequence
  Description of Artificial Sequence: Synthetic oligonucleotide
  Antisense strand to SEQ ID NO: 2254868
uuaccugggaucagagaau

SEQ ID NO: 2254870 - RNA, 19 nt, Artificial Sequence
  Description of Artificial Sequence: Synthetic oligonucleotide
  Sense strand starting at position 3424 of SEQ ID NO: 1884294
uuguuagggcugcauaaau

SEQ ID NO: 2254871 - RNA, 19 nt, Artificial Sequence
  Description of Artificial Sequence: Synthetic oligonucleotide
  Antisense strand to SEQ ID NO: 2254870
auuuaugcagcccuaacaa

SEQ ID NO: 2254872 - RNA, 19 nt, Artificial Sequence
  Description of Artificial Sequence: Synthetic oligonucleotide
  Sense strand starting at position 3762 of SEQ ID NO: 1884294
gugagaaacuuagugucaa

SEQ ID NO: 2254873 - RNA, 19 nt, Artificial Sequence
  Description of Artificial Sequence: Synthetic oligonucleotide
  Antisense strand to SEQ ID NO: 2254872
uugacacuaaguuucucac

SEQ ID NO: 2254874 - RNA, 19 nt, Artificial Sequence
  Description of Artificial Sequence: Synthetic oligonucleotide
  Sense strand starting at position 3773 of SEQ ID NO: 1884294
agugucaacuaagaaauga

SEQ ID NO: 2254875 - RNA, 19 nt, Artificial Sequence
  Description of Artificial Sequence: Synthetic oligonucleotide
  Antisense strand to SEQ ID NO: 2254874
ucauuucuuaguugacacu

SEQ ID NO: 2254876 - RNA, 19 nt, Artificial Sequence
  Description of Artificial Sequence: Synthetic oligonucleotide
  Sense strand starting at position 3912 of SEQ ID NO: 1884294
uaacuucuccaguaagacg

SEQ ID NO: 2254877 - RNA, 19 nt, Artificial Sequence
  Description of Artificial Sequence: Synthetic oligonucleotide
  Antisense strand to SEQ ID NO: 2254876
cgucuuacuggagaaguua

SEQ ID NO: 2254878 - RNA, 19 nt, Artificial Sequence
  Description of Artificial Sequence: Synthetic oligonucleotide
  Sense strand starting at position 3923 of SEQ ID NO: 1884294
guaagacguauuugguauu

SEQ ID NO: 2254879 - RNA, 19 nt, Artificial Sequence
  Description of Artificial Sequence: Synthetic oligonucleotide
  Antisense strand to SEQ ID NO: 2254878
aauaccaaauacgucuuac

SEQ ID NO: 2254880 - RNA, 19 nt, Artificial Sequence
  Description of Artificial Sequence: Synthetic oligonucleotide
  Sense strand starting at position 3926 of SEQ ID NO: 1884294
agacguauuugguauucca

SEQ ID NO: 2254881 - RNA, 19 nt, Artificial Sequence
  Description of Artificial Sequence: Synthetic oligonucleotide
  Antisense strand to SEQ ID NO: 2254880
uggaauaccaaauacgucu

SEQ ID NO: 2254882 - RNA, 19 nt, Artificial Sequence
  Description of Artificial Sequence: Synthetic oligonucleotide
  Sense strand starting at position 191 of SEQ ID NO: 1884295
aggugaggaucugcaagua

SEQ ID NO: 2254883 - RNA, 19 nt, Artificial Sequence
  Description of Artificial Sequence: Synthetic oligonucleotide
  Antisense strand to SEQ ID NO: 2254882
uacuugcagauccucaccu

SEQ ID NO: 2254884 - RNA, 19 nt, Artificial Sequence
  Description of Artificial Sequence: Synthetic oligonucleotide
  Sense strand starting at position 250 of SEQ ID NO: 1884295
gaggacuauuucuaaguag

SEQ ID NO: 2254885 - RNA, 19 nt, Artificial Sequence
  Description of Artificial Sequence: Synthetic oligonucleotide
  Antisense strand to SEQ ID NO: 2254884
cuacuuagaaauaguccuc

SEQ ID NO: 2254886 - RNA, 19 nt, Artificial Sequence
  Description of Artificial Sequence: Synthetic oligonucleotide
  Sense strand starting at position 261 of SEQ ID NO: 1884295
cuaaguagacauggugaaa

SEQ ID NO: 2254887 - RNA, 19 nt, Artificial Sequence
  Description of Artificial Sequence: Synthetic oligonucleotide
  Antisense strand to SEQ ID NO: 2254886
uuucaccaugucuacuuag

SEQ ID NO: 2254888 - RNA, 19 nt, Artificial Sequence
  Description of Artificial Sequence: Synthetic oligonucleotide
  Sense strand starting at position 305 of SEQ ID NO: 1884295
gagggaaugagcugacauu

SEQ ID NO: 2254889 - RNA, 19 nt, Artificial Sequence
  Description of Artificial Sequence: Synthetic oligonucleotide
  Antisense strand to SEQ ID NO: 2254888
aaugucagcucauucccuc

SEQ ID NO: 2254890 - RNA, 19 nt, Artificial Sequence
  Description of Artificial Sequence: Synthetic oligonucleotide
  Sense strand starting at position 314 of SEQ ID NO: 1884295
agcugacauucuuuccaag

SEQ ID NO: 2254891 - RNA, 19 nt, Artificial Sequence
  Description of Artificial Sequence: Synthetic oligonucleotide
  Antisense strand to SEQ ID NO: 2254890
cuuggaaagaaugucagcu

SEQ ID NO: 2254892 - RNA, 19 nt, Artificial Sequence
  Description of Artificial Sequence: Synthetic oligonucleotide
  Sense strand starting at position 316 of SEQ ID NO: 1884295
cugacauucuuuccaagga

SEQ ID NO: 2254893 - RNA, 19 nt, Artificial Sequence
  Description of Artificial Sequence: Synthetic oligonucleotide
  Antisense strand to SEQ ID NO: 2254892
uccuuggaaagaaugucag

SEQ ID NO: 2254894 - RNA, 19 nt, Artificial Sequence
  Description of Artificial Sequence: Synthetic oligonucleotide
  Sense strand starting at position 406 of SEQ ID NO: 1884295
ucaguaucugugcugccua

SEQ ID NO: 2254895 - RNA, 19 nt, Artificial Sequence
  Description of Artificial Sequence: Synthetic oligonucleotide
  Antisense strand to SEQ ID NO: 2254894
uaggcagcacagauacuga

SEQ ID NO: 2254896 - RNA, 19 nt, Artificial Sequence
  Description of Artificial Sequence: Synthetic oligonucleotide
  Sense strand starting at position 432 of SEQ ID NO: 1884295
agucacuagccacauauga

SEQ ID NO: 2254897 - RNA, 19 nt, Artificial Sequence
  Description of Artificial Sequence: Synthetic oligonucleotide
  Antisense strand to SEQ ID NO: 2254896
ucauauguggcuagugacu

SEQ ID NO: 2254898 - RNA, 19 nt, Artificial Sequence
  Description of Artificial Sequence: Synthetic oligonucleotide
  Sense strand starting at position 469 of SEQ ID NO: 1884295
gcuugcaugcuauaaagaa

SEQ ID NO: 2254899 - RNA, 19 nt, Artificial Sequence
  Description of Artificial Sequence: Synthetic oligonucleotide
  Antisense strand to SEQ ID NO: 2254898
uucuuuauagcaugcaagc

SEQ ID NO: 2254900 - RNA, 19 nt, Artificial Sequence
  Description of Artificial Sequence: Synthetic oligonucleotide
  Sense strand starting at position 537 of SEQ ID NO: 1884295
guagcuagugacuaucuua

SEQ ID NO: 2254901 - RNA, 19 nt, Artificial Sequence
  Description of Artificial Sequence: Synthetic oligonucleotide
  Antisense strand to SEQ ID NO: 2254900
uaagauagucacuagcuac

SEQ ID NO: 2254902 - RNA, 19 nt, Artificial Sequence
  Description of Artificial Sequence: Synthetic oligonucleotide
  Sense strand starting at position 544 of SEQ ID NO: 1884295
gugacuaucuuauuggaau

SEQ ID NO: 2254903 - RNA, 19 nt, Artificial Sequence
  Description of Artificial Sequence: Synthetic oligonucleotide
  Antisense strand to SEQ ID NO: 2254902
auuccaauaagauagucac

SEQ ID NO: 2254904 - RNA, 19 nt, Artificial Sequence
  Description of Artificial Sequence: Synthetic oligonucleotide
  Sense strand starting at position 692 of SEQ ID NO: 1884295
uuaugagauuugggaaaug

SEQ ID NO: 2254905 - RNA, 19 nt, Artificial Sequence
  Description of Artificial Sequence: Synthetic oligonucleotide
  Antisense strand to SEQ ID NO: 2254904
cauuucccaaaucucauaa

SEQ ID NO: 2254906 - RNA, 19 nt, Artificial Sequence
  Description of Artificial Sequence: Synthetic oligonucleotide
  Sense strand starting at position 704 of SEQ ID NO: 1884295
ggaaauggcaggugucuga

SEQ ID NO: 2254907 - RNA, 19 nt, Artificial Sequence
  Description of Artificial Sequence: Synthetic oligonucleotide
  Antisense strand to SEQ ID NO: 2254906
ucagacaccugccauuucc

SEQ ID NO: 2254908 - RNA, 19 nt, Artificial Sequence
  Description of Artificial Sequence: Synthetic oligonucleotide
  Sense strand starting at position 935 of SEQ ID NO: 1884295
guguguauuuaugucagag

SEQ ID NO: 2254909 - RNA, 19 nt, Artificial Sequence
  Description of Artificial Sequence: Synthetic oligonucleotide
  Antisense strand to SEQ ID NO: 2254908
cucugacauaaauacacac

SEQ ID NO: 2254910 - RNA, 19 nt, Artificial Sequence
  Description of Artificial Sequence: Synthetic oligonucleotide
  Sense strand starting at position 947 of SEQ ID NO: 1884295
gucagaguuauguguauuu

SEQ ID NO: 2254911 - RNA, 19 nt, Artificial Sequence
  Description of Artificial Sequence: Synthetic oligonucleotide
  Antisense strand to SEQ ID NO: 2254910
aaauacacauaacucugac

SEQ ID NO: 2254912 - RNA, 19 nt, Artificial Sequence
  Description of Artificial Sequence: Synthetic oligonucleotide
  Sense strand starting at position 1470 of SEQ ID NO: 1884295
uggagauauaaauaugcgu

SEQ ID NO: 2254913 - RNA, 19 nt, Artificial Sequence
  Description of Artificial Sequence: Synthetic oligonucleotide
  Antisense strand to SEQ ID NO: 2254912
acgcauauuuauaucucca

SEQ ID NO: 2254914 - RNA, 19 nt, Artificial Sequence
  Description of Artificial Sequence: Synthetic oligonucleotide
  Sense strand starting at position 1499 of SEQ ID NO: 1884295
ggagccuuccguaggcaga

SEQ ID NO: 2254915 - RNA, 19 nt, Artificial Sequence
  Description of Artificial Sequence: Synthetic oligonucleotide
  Antisense strand to SEQ ID NO: 2254914
ucugccuacggaaggcucc

SEQ ID NO: 2254916 - RNA, 19 nt, Artificial Sequence
  Description of Artificial Sequence: Synthetic oligonucleotide
  Sense strand starting at position 1634 of SEQ ID NO: 1884295
guuacaggccuccaaauaa

SEQ ID NO: 2254917 - RNA, 19 nt, Artificial Sequence
  Description of Artificial Sequence: Synthetic oligonucleotide
  Antisense strand to SEQ ID NO: 2254916
uuauuuggaggccuguaac

SEQ ID NO: 2254918 - RNA, 19 nt, Artificial Sequence
  Description of Artificial Sequence: Synthetic oligonucleotide
  Sense strand starting at position 1661 of SEQ ID NO: 1884295
ggcaguaugcucucgucua

SEQ ID NO: 2254919 - RNA, 19 nt, Artificial Sequence
  Description of Artificial Sequence: Synthetic oligonucleotide
  Antisense strand to SEQ ID NO: 2254918
uagacgagagcauacugcc

SEQ ID NO: 2254920 - RNA, 19 nt, Artificial Sequence
  Description of Artificial Sequence: Synthetic oligonucleotide
  Sense strand starting at position 1665 of SEQ ID NO: 1884295
guaugcucucgucuagcca

SEQ ID NO: 2254921 - RNA, 19 nt, Artificial Sequence
  Description of Artificial Sequence: Synthetic oligonucleotide
  Antisense strand to SEQ ID NO: 2254920
uggcuagacgagagcauac

SEQ ID NO: 2254922 - RNA, 19 nt, Artificial Sequence
  Description of Artificial Sequence: Synthetic oligonucleotide
  Sense strand starting at position 1690 of SEQ ID NO: 1884295
aguagucaccuguaauaca

SEQ ID NO: 2254923 - RNA, 19 nt, Artificial Sequence
  Description of Artificial Sequence: Synthetic oligonucleotide
  Antisense strand to SEQ ID NO: 2254922
uguauuacaggugacuacu

SEQ ID NO: 2254924 - RNA, 19 nt, Artificial Sequence
  Description of Artificial Sequence: Synthetic oligonucleotide
  Sense strand starting at position 1743 of SEQ ID NO: 1884295
gaaugaugucacgggaagu

SEQ ID NO: 2254925 - RNA, 19 nt, Artificial Sequence
  Description of Artificial Sequence: Synthetic oligonucleotide
  Antisense strand to SEQ ID NO: 2254924
acuucccgugacaucauuc

SEQ ID NO: 2254926 - RNA, 19 nt, Artificial Sequence
  Description of Artificial Sequence: Synthetic oligonucleotide
  Sense strand starting at position 1744 of SEQ ID NO: 1884295
aaugaugucacgggaagua

SEQ ID NO: 2254927 - RNA, 19 nt, Artificial Sequence
  Description of Artificial Sequence: Synthetic oligonucleotide
  Antisense strand to SEQ ID NO: 2254926
uacuucccgugacaucauu

SEQ ID NO: 2254928 - RNA, 19 nt, Artificial Sequence
  Description of Artificial Sequence: Synthetic oligonucleotide
  Sense strand starting at position 1808 of SEQ ID NO: 1884295
acagcuguuccacauagau

SEQ ID NO: 2254929 - RNA, 19 nt, Artificial Sequence
  Description of Artificial Sequence: Synthetic oligonucleotide
  Antisense strand to SEQ ID NO: 2254928
aucuauguggaacagcugu

SEQ ID NO: 2254930 - RNA, 19 nt, Artificial Sequence
  Description of Artificial Sequence: Synthetic oligonucleotide
  Sense strand starting at position 1837 of SEQ ID NO: 1884295
ucgggaaucacuugaguca

SEQ ID NO: 2254931 - RNA, 19 nt, Artificial Sequence
  Description of Artificial Sequence: Synthetic oligonucleotide
  Antisense strand to SEQ ID NO: 2254930
ugacucaagugauucccga

SEQ ID NO: 2254932 - RNA, 19 nt, Artificial Sequence
  Description of Artificial Sequence: Synthetic oligonucleotide
  Sense strand starting at position 1838 of SEQ ID NO: 1884295
cgggaaucacuugagucau

SEQ ID NO: 2254933 - RNA, 19 nt, Artificial Sequence
  Description of Artificial Sequence: Synthetic oligonucleotide
  Antisense strand to SEQ ID NO: 2254932
augacucaagugauucccg

SEQ ID NO: 2254934 - RNA, 19 nt, Artificial Sequence
  Description of Artificial Sequence: Synthetic oligonucleotide
  Sense strand starting at position 1840 of SEQ ID NO: 1884295
ggaaucacuugagucaucu

SEQ ID NO: 2254935 - RNA, 19 nt, Artificial Sequence
  Description of Artificial Sequence: Synthetic oligonucleotide
  Antisense strand to SEQ ID NO: 2254934
agaugacucaagugauucc

SEQ ID NO: 2254936 - RNA, 19 nt, Artificial Sequence
  Description of Artificial Sequence: Synthetic oligonucleotide
  Sense strand starting at position 1844 of SEQ ID NO: 1884295
ucacuugagucaucuagac

SEQ ID NO: 2254937 - RNA, 19 nt, Artificial Sequence
  Description of Artificial Sequence: Synthetic oligonucleotide
  Antisense strand to SEQ ID NO: 2254936
gucuagaugacucaaguga

SEQ ID NO: 2254938 - RNA, 19 nt, Artificial Sequence
  Description of Artificial Sequence: Synthetic oligonucleotide
  Sense strand starting at position 2260 of SEQ ID NO: 1884295
cauuccaggcuguaagauu

SEQ ID NO: 2254939 - RNA, 19 nt, Artificial Sequence
  Description of Artificial Sequence: Synthetic oligonucleotide
  Antisense strand to SEQ ID NO: 2254938
aaucuuacagccuggaaug

SEQ ID NO: 2254940 - RNA, 19 nt, Artificial Sequence
  Description of Artificial Sequence: Synthetic oligonucleotide
  Sense strand starting at position 2279 of SEQ ID NO: 1884295
gaugcuguccaugaucaua

SEQ ID NO: 2254941 - RNA, 19 nt, Artificial Sequence
  Description of Artificial Sequence: Synthetic oligonucleotide
  Antisense strand to SEQ ID NO: 2254940
uaugaucauggacagcauc

SEQ ID NO: 2254942 - RNA, 19 nt, Artificial Sequence
  Description of Artificial Sequence: Synthetic oligonucleotide
  Sense strand starting at position 2592 of SEQ ID NO: 1884295
aauaccuggccaggugaua

SEQ ID NO: 2254943 - RNA, 19 nt, Artificial Sequence
  Description of Artificial Sequence: Synthetic oligonucleotide
  Antisense strand to SEQ ID NO: 2254942
uaucaccuggccagguauu

SEQ ID NO: 2254944 - RNA, 19 nt, Artificial Sequence
  Description of Artificial Sequence: Synthetic oligonucleotide
  Sense strand starting at position 2784 of SEQ ID NO: 1884295
ccaugucuuccagggaaac

SEQ ID NO: 2254945 - RNA, 19 nt, Artificial Sequence
  Description of Artificial Sequence: Synthetic oligonucleotide
  Antisense strand to SEQ ID NO: 2254944
guuucccuggaagacaugg

SEQ ID NO: 2254946 - RNA, 19 nt, Artificial Sequence
  Description of Artificial Sequence: Synthetic oligonucleotide
  Sense strand starting at position 2785 of SEQ ID NO: 1884295
caugucuuccagggaaaca

SEQ ID NO: 2254947 - RNA, 19 nt, Artificial Sequence
  Description of Artificial Sequence: Synthetic oligonucleotide
  Antisense strand to SEQ ID NO: 2254946
uguuucccuggaagacaug

SEQ ID NO: 2254948 - RNA, 19 nt, Artificial Sequence
  Description of Artificial Sequence: Synthetic oligonucleotide
  Sense strand starting at position 2796 of SEQ ID NO: 1884295
gggaaacauuucuacucua

SEQ ID NO: 2254949 - RNA, 19 nt, Artificial Sequence
  Description of Artificial Sequence: Synthetic oligonucleotide
  Antisense strand to SEQ ID NO: 2254948
uagaguagaaauguuuccc

SEQ ID NO: 2254950 - RNA, 19 nt, Artificial Sequence
  Description of Artificial Sequence: Synthetic oligonucleotide
  Sense strand starting at position 2964 of SEQ ID NO: 1884295
agguacuugccauagagua

SEQ ID NO: 2254951 - RNA, 19 nt, Artificial Sequence
  Description of Artificial Sequence: Synthetic oligonucleotide
  Antisense strand to SEQ ID NO: 2254950
uacucuauggcaaguaccu

SEQ ID NO: 2254952 - RNA, 19 nt, Artificial Sequence
  Description of Artificial Sequence: Synthetic oligonucleotide
  Sense strand starting at position 3093 of SEQ ID NO: 1884295
aggaauuagaggugaagcu

SEQ ID NO: 2254953 - RNA, 19 nt, Artificial Sequence
  Description of Artificial Sequence: Synthetic oligonucleotide
  Antisense strand to SEQ ID NO: 2254952
agcuucaccucuaauuccu

SEQ ID NO: 2254954 - RNA, 19 nt, Artificial Sequence
  Description of Artificial Sequence: Synthetic oligonucleotide
  Sense strand starting at position 3117 of SEQ ID NO: 1884295
ugcuuacaucgcguguaaa

SEQ ID NO: 2254955 - RNA, 19 nt, Artificial Sequence
  Description of Artificial Sequence: Synthetic oligonucleotide
  Antisense strand to SEQ ID NO: 2254954
uuuacacgcgauguaagca

SEQ ID NO: 2254956 - RNA, 19 nt, Artificial Sequence
  Description of Artificial Sequence: Synthetic oligonucleotide
  Sense strand starting at position 3312 of SEQ ID NO: 1884295
acugaucuccaagacguua

SEQ ID NO: 2254957 - RNA, 19 nt, Artificial Sequence
  Description of Artificial Sequence: Synthetic oligonucleotide
  Antisense strand to SEQ ID NO: 2254956
uaacgucuuggagaucagu

SEQ ID NO: 2254958 - RNA, 19 nt, Artificial Sequence
  Description of Artificial Sequence: Synthetic oligonucleotide
  Sense strand starting at position 3317 of SEQ ID NO: 1884295
ucuccaagacguuagguaa

SEQ ID NO: 2254959 - RNA, 19 nt, Artificial Sequence
  Description of Artificial Sequence: Synthetic oligonucleotide
  Antisense strand to SEQ ID NO: 2254958
uuaccuaacgucuuggaga

SEQ ID NO: 2254960 - RNA, 19 nt, Artificial Sequence
  Description of Artificial Sequence: Synthetic oligonucleotide
  Sense strand starting at position 3321 of SEQ ID NO: 1884295
caagacguuagguaaguua

SEQ ID NO: 2254961 - RNA, 19 nt, Artificial Sequence
  Description of Artificial Sequence: Synthetic oligonucleotide
  Antisense strand to SEQ ID NO: 2254960
uaacuuaccuaacgucuug

SEQ ID NO: 2254962 - RNA, 19 nt, Artificial Sequence
  Description of Artificial Sequence: Synthetic oligonucleotide
  Sense strand starting at position 253 of SEQ ID NO: 1884296
uuugaaugagaguagcauu

SEQ ID NO: 2254963 - RNA, 19 nt, Artificial Sequence
  Description of Artificial Sequence: Synthetic oligonucleotide
  Antisense strand to SEQ ID NO: 2254962
aaugcuacucucauucaaa

SEQ ID NO: 2254964 - RNA, 19 nt, Artificial Sequence
  Description of Artificial Sequence: Synthetic oligonucleotide
  Sense strand starting at position 326 of SEQ ID NO: 1884296
acauuaggacuuuauuguu

SEQ ID NO: 2254965 - RNA, 19 nt, Artificial Sequence
  Description of Artificial Sequence: Synthetic oligonucleotide
  Antisense strand to SEQ ID NO: 2254964
aacaauaaaguccuaaugu

SEQ ID NO: 2254966 - RNA, 19 nt, Artificial Sequence
  Description of Artificial Sequence: Synthetic oligonucleotide
  Sense strand starting at position 346 of SEQ ID NO: 1884296
guaacaaacuacuugggau

SEQ ID NO: 2254967 - RNA, 19 nt, Artificial Sequence
  Description of Artificial Sequence: Synthetic oligonucleotide
  Antisense strand to SEQ ID NO: 2254966
aucccaaguaguuuguuac

SEQ ID NO: 2254968 - RNA, 19 nt, Artificial Sequence
  Description of Artificial Sequence: Synthetic oligonucleotide
  Sense strand starting at position 382 of SEQ ID NO: 1884296
cugauauacgaguaucuau

SEQ ID NO: 2254969 - RNA, 19 nt, Artificial Sequence
  Description of Artificial Sequence: Synthetic oligonucleotide
  Antisense strand to SEQ ID NO: 2254968
auagauacucguauaucag

SEQ ID NO: 2254970 - RNA, 19 nt, Artificial Sequence
  Description of Artificial Sequence: Synthetic oligonucleotide
  Sense strand starting at position 385 of SEQ ID NO: 1884296
auauacgaguaucuauaca

SEQ ID NO: 2254971 - RNA, 19 nt, Artificial Sequence
  Description of Artificial Sequence: Synthetic oligonucleotide
  Antisense strand to SEQ ID NO: 2254970
uguauagauacucguauau

SEQ ID NO: 2254972 - RNA, 19 nt, Artificial Sequence
  Description of Artificial Sequence: Synthetic oligonucleotide
  Sense strand starting at position 635 of SEQ ID NO: 1884296
uuucuagaaccucggaauu

SEQ ID NO: 2254973 - RNA, 19 nt, Artificial Sequence
  Description of Artificial Sequence: Synthetic oligonucleotide
  Antisense strand to SEQ ID NO: 2254972
aauuccgagguucuagaaa

SEQ ID NO: 2254974 - RNA, 19 nt, Artificial Sequence
  Description of Artificial Sequence: Synthetic oligonucleotide
  Sense strand starting at position 637 of SEQ ID NO: 1884296
ucuagaaccucggaauuua

SEQ ID NO: 2254975 - RNA, 19 nt, Artificial Sequence
  Description of Artificial Sequence: Synthetic oligonucleotide
  Antisense strand to SEQ ID NO: 2254974
uaaauuccgagguucuaga

SEQ ID NO: 2254976 - RNA, 19 nt, Artificial Sequence
  Description of Artificial Sequence: Synthetic oligonucleotide
  Sense strand starting at position 788 of SEQ ID NO: 1884296
agguaagcauuaccauuau

SEQ ID NO: 2254977 - RNA, 19 nt, Artificial Sequence
  Description of Artificial Sequence: Synthetic oligonucleotide
  Antisense strand to SEQ ID NO: 2254976
auaaugguaaugcuuaccu

SEQ ID NO: 2254978 - RNA, 19 nt, Artificial Sequence
  Description of Artificial Sequence: Synthetic oligonucleotide
  Sense strand starting at position 837 of SEQ ID NO: 1884296
agcuaagaucagcaagguu

SEQ ID NO: 2254979 - RNA, 19 nt, Artificial Sequence
  Description of Artificial Sequence: Synthetic oligonucleotide
  Antisense strand to SEQ ID NO: 2254978
aaccuugcugaucuuagcu

SEQ ID NO: 2254980 - RNA, 19 nt, Artificial Sequence
  Description of Artificial Sequence: Synthetic oligonucleotide
  Sense strand starting at position 887 of SEQ ID NO: 1884296
ccaaauuccugagcuagga

SEQ ID NO: 2254981 - RNA, 19 nt, Artificial Sequence
  Description of Artificial Sequence: Synthetic oligonucleotide
  Antisense strand to SEQ ID NO: 2254980
uccuagcucaggaauuugg

SEQ ID NO: 2254982 - RNA, 19 nt, Artificial Sequence
  Description of Artificial Sequence: Synthetic oligonucleotide
  Sense strand starting at position 1072 of SEQ ID NO: 1884296
aguccagucuaucuugaau

SEQ ID NO: 2254983 - RNA, 19 nt, Artificial Sequence
  Description of Artificial Sequence: Synthetic oligonucleotide
  Antisense strand to SEQ ID NO: 2254982
auucaagauagacuggacu

SEQ ID NO: 2254984 - RNA, 19 nt, Artificial Sequence
  Description of Artificial Sequence: Synthetic oligonucleotide
  Sense strand starting at position 1370 of SEQ ID NO: 1884296
accuauauggcucaucaga

SEQ ID NO: 2254985 - RNA, 19 nt, Artificial Sequence
  Description of Artificial Sequence: Synthetic oligonucleotide
  Antisense strand to SEQ ID NO: 2254984
ucugaugagccauauaggu

SEQ ID NO: 2254986 - RNA, 19 nt, Artificial Sequence
  Description of Artificial Sequence: Synthetic oligonucleotide
  Sense strand starting at position 1372 of SEQ ID NO: 1884296
cuauauggcucaucagaag

SEQ ID NO: 2254987 - RNA, 19 nt, Artificial Sequence
  Description of Artificial Sequence: Synthetic oligonucleotide
  Antisense strand to SEQ ID NO: 2254986
cuucugaugagccauauag

SEQ ID NO: 2254988 - RNA, 19 nt, Artificial Sequence
  Description of Artificial Sequence: Synthetic oligonucleotide
  Sense strand starting at position 1378 of SEQ ID NO: 1884296
ggcucaucagaaggauucu

SEQ ID NO: 2254989 - RNA, 19 nt, Artificial Sequence
  Description of Artificial Sequence: Synthetic oligonucleotide
  Antisense strand to SEQ ID NO: 2254988
agaauccuucugaugagcc

SEQ ID NO: 2254990 - RNA, 19 nt, Artificial Sequence
  Description of Artificial Sequence: Synthetic oligonucleotide
  Sense strand starting at position 1507 of SEQ ID NO: 1884296
agaagucucuccuuucuga

SEQ ID NO: 2254991 - RNA, 19 nt, Artificial Sequence
  Description of Artificial Sequence: Synthetic oligonucleotide
  Antisense strand to SEQ ID NO: 2254990
ucagaaaggagagacuucu

SEQ ID NO: 2254992 - RNA, 19 nt, Artificial Sequence
  Description of Artificial Sequence: Synthetic oligonucleotide
  Sense strand starting at position 1666 of SEQ ID NO: 1884296
aaagcauuugcuggcugau

SEQ ID NO: 2254993 - RNA, 19 nt, Artificial Sequence
  Description of Artificial Sequence: Synthetic oligonucleotide
  Antisense strand to SEQ ID NO: 2254992
aucagccagcaaaugcuuu

SEQ ID NO: 2254994 - RNA, 19 nt, Artificial Sequence
  Description of Artificial Sequence: Synthetic oligonucleotide
  Sense strand starting at position 1740 of SEQ ID NO: 1884296
cugcauuuccacuguguuu

SEQ ID NO: 2254995 - RNA, 19 nt, Artificial Sequence
  Description of Artificial Sequence: Synthetic oligonucleotide
  Antisense strand to SEQ ID NO: 2254994
aaacacaguggaaaugcag

SEQ ID NO: 2254996 - RNA, 19 nt, Artificial Sequence
  Description of Artificial Sequence: Synthetic oligonucleotide
  Sense strand starting at position 1742 of SEQ ID NO: 1884296
gcauuuccacuguguuuau

SEQ ID NO: 2254997 - RNA, 19 nt, Artificial Sequence
  Description of Artificial Sequence: Synthetic oligonucleotide
  Antisense strand to SEQ ID NO: 2254996
auaaacacaguggaaaugc

SEQ ID NO: 2254998 - RNA, 19 nt, Artificial Sequence
  Description of Artificial Sequence: Synthetic oligonucleotide
  Sense strand starting at position 1863 of SEQ ID NO: 1884296
ucgagcggucacuacaaga

SEQ ID NO: 2254999 - RNA, 19 nt, Artificial Sequence
  Description of Artificial Sequence: Synthetic oligonucleotide
  Antisense strand to SEQ ID NO: 2254998
ucuuguagugaccgcucga

SEQ ID NO: 2255000 - RNA, 19 nt, Artificial Sequence
  Description of Artificial Sequence: Synthetic oligonucleotide
  Sense strand starting at position 1915 of SEQ ID NO: 1884296
agauaugcucuaugcaaag

SEQ ID NO: 2255001 - RNA, 19 nt, Artificial Sequence
  Description of Artificial Sequence: Synthetic oligonucleotide
  Antisense strand to SEQ ID NO: 2255000
cuuugcauagagcauaucu

SEQ ID NO: 2255002 - RNA, 19 nt, Artificial Sequence
  Description of Artificial Sequence: Synthetic oligonucleotide
  Sense strand starting at position 2037 of SEQ ID NO: 1884296
agcuguuucccugagagaa

SEQ ID NO: 2255003 - RNA, 19 nt, Artificial Sequence
  Description of Artificial Sequence: Synthetic oligonucleotide
  Antisense strand to SEQ ID NO: 2255002
uucucucagggaaacagcu

SEQ ID NO: 2255004 - RNA, 19 nt, Artificial Sequence
  Description of Artificial Sequence: Synthetic oligonucleotide
  Sense strand starting at position 2212 of SEQ ID NO: 1884296
cuccaugugugauugaaag

SEQ ID NO: 2255005 - RNA, 19 nt, Artificial Sequence
  Description of Artificial Sequence: Synthetic oligonucleotide
  Antisense strand to SEQ ID NO: 2255004
cuuucaaucacacauggag

SEQ ID NO: 2255006 - RNA, 19 nt, Artificial Sequence
  Description of Artificial Sequence: Synthetic oligonucleotide
  Sense strand starting at position 2214 of SEQ ID NO: 1884296
ccaugugugauugaaagug

SEQ ID NO: 2255007 - RNA, 19 nt, Artificial Sequence
  Description of Artificial Sequence: Synthetic oligonucleotide
  Antisense strand to SEQ ID NO: 2255006
cacuuucaaucacacaugg

SEQ ID NO: 2255008 - RNA, 19 nt, Artificial Sequence
  Description of Artificial Sequence: Synthetic oligonucleotide
  Sense strand starting at position 2219 of SEQ ID NO: 1884296
ugugauugaaaguguaaua

SEQ ID NO: 2255009 - RNA, 19 nt, Artificial Sequence
  Description of Artificial Sequence: Synthetic oligonucleotide
  Antisense strand to SEQ ID NO: 2255008
uauuacacuuucaaucaca

SEQ ID NO: 2255010 - RNA, 19 nt, Artificial Sequence
  Description of Artificial Sequence: Synthetic oligonucleotide
  Sense strand starting at position 2253 of SEQ ID NO: 1884296
aagaacacuguguguagaa

SEQ ID NO: 2255011 - RNA, 19 nt, Artificial Sequence
  Description of Artificial Sequence: Synthetic oligonucleotide
  Antisense strand to SEQ ID NO: 2255010
uucuacacacaguguucuu

SEQ ID NO: 2255012 - RNA, 19 nt, Artificial Sequence
  Description of Artificial Sequence: Synthetic oligonucleotide
  Sense strand starting at position 2254 of SEQ ID NO: 1884296
agaacacuguguguagaau

SEQ ID NO: 2255013 - RNA, 19 nt, Artificial Sequence
  Description of Artificial Sequence: Synthetic oligonucleotide
  Antisense strand to SEQ ID NO: 2255012
auucuacacacaguguucu

SEQ ID NO: 2255014 - RNA, 19 nt, Artificial Sequence
  Description of Artificial Sequence: Synthetic oligonucleotide
  Sense strand starting at position 2255 of SEQ ID NO: 1884296
gaacacuguguguagaauu

SEQ ID NO: 2255015 - RNA, 19 nt, Artificial Sequence
  Description of Artificial Sequence: Synthetic oligonucleotide
  Antisense strand to SEQ ID NO: 2255014
aauucuacacacaguguuc

SEQ ID NO: 2255016 - RNA, 19 nt, Artificial Sequence
  Description of Artificial Sequence: Synthetic oligonucleotide
  Sense strand starting at position 2334 of SEQ ID NO: 1884296
agggcaaucuugguagaga

SEQ ID NO: 2255017 - RNA, 19 nt, Artificial Sequence
  Description of Artificial Sequence: Synthetic oligonucleotide
  Antisense strand to SEQ ID NO: 2255016
ucucuaccaagauugcccu

SEQ ID NO: 2255018 - RNA, 19 nt, Artificial Sequence
  Description of Artificial Sequence: Synthetic oligonucleotide
  Sense strand starting at position 2595 of SEQ ID NO: 1884296
gccugugugcauguuugua

SEQ ID NO: 2255019 - RNA, 19 nt, Artificial Sequence
  Description of Artificial Sequence: Synthetic oligonucleotide
  Antisense strand to SEQ ID NO: 2255018
uacaaacaugcacacaggc

SEQ ID NO: 2255020 - RNA, 19 nt, Artificial Sequence
  Description of Artificial Sequence: Synthetic oligonucleotide
  Sense strand starting at position 2619 of SEQ ID NO: 1884296
ucuggauugccuggaauag

SEQ ID NO: 2255021 - RNA, 19 nt, Artificial Sequence
  Description of Artificial Sequence: Synthetic oligonucleotide
  Antisense strand to SEQ ID NO: 2255020
cuauuccaggcaauccaga

SEQ ID NO: 2255022 - RNA, 19 nt, Artificial Sequence
  Description of Artificial Sequence: Synthetic oligonucleotide
  Sense strand starting at position 2679 of SEQ ID NO: 1884296
uuaaauuacuguccaaagu

SEQ ID NO: 2255023 - RNA, 19 nt, Artificial Sequence
  Description of Artificial Sequence: Synthetic oligonucleotide
  Antisense strand to SEQ ID NO: 2255022
acuuuggacaguaauuuaa

SEQ ID NO: 2255024 - RNA, 19 nt, Artificial Sequence
  Description of Artificial Sequence: Synthetic oligonucleotide
  Sense strand starting at position 2738 of SEQ ID NO: 1884296
agcaaagcaccugauuaau

SEQ ID NO: 2255025 - RNA, 19 nt, Artificial Sequence
  Description of Artificial Sequence: Synthetic oligonucleotide
  Antisense strand to SEQ ID NO: 2255024
auuaaucaggugcuuugcu

SEQ ID NO: 2255026 - RNA, 19 nt, Artificial Sequence
  Description of Artificial Sequence: Synthetic oligonucleotide
  Sense strand starting at position 2985 of SEQ ID NO: 1884296
guugaagugcugggaggaa

SEQ ID NO: 2255027 - RNA, 19 nt, Artificial Sequence
  Description of Artificial Sequence: Synthetic oligonucleotide
  Antisense strand to SEQ ID NO: 2255026
uuccucccagcacuucaac

SEQ ID NO: 2255028 - RNA, 19 nt, Artificial Sequence
  Description of Artificial Sequence: Synthetic oligonucleotide
  Sense strand starting at position 3104 of SEQ ID NO: 1884296
ggucucucuuugguaauuu

SEQ ID NO: 2255029 - RNA, 19 nt, Artificial Sequence
  Description of Artificial Sequence: Synthetic oligonucleotide
  Antisense strand to SEQ ID NO: 2255028
aaauuaccaaagagagacc

SEQ ID NO: 2255030 - RNA, 19 nt, Artificial Sequence
  Description of Artificial Sequence: Synthetic oligonucleotide
  Sense strand starting at position 3186 of SEQ ID NO: 1884296
agagaaacuuucccuuugu

SEQ ID NO: 2255031 - RNA, 19 nt, Artificial Sequence
  Description of Artificial Sequence: Synthetic oligonucleotide
  Antisense strand to SEQ ID NO: 2255030
acaaagggaaaguuucucu

SEQ ID NO: 2255032 - RNA, 19 nt, Artificial Sequence
  Description of Artificial Sequence: Synthetic oligonucleotide
  Sense strand starting at position 3630 of SEQ ID NO: 1884296
acugguaugcagcauugaa

SEQ ID NO: 2255033 - RNA, 19 nt, Artificial Sequence
  Description of Artificial Sequence: Synthetic oligonucleotide
  Antisense strand to SEQ ID NO: 2255032
uucaaugcugcauaccagu

SEQ ID NO: 2255034 - RNA, 19 nt, Artificial Sequence
  Description of Artificial Sequence: Synthetic oligonucleotide
  Sense strand starting at position 3780 of SEQ ID NO: 1884296
cagaguaguguuugaagag

SEQ ID NO: 2255035 - RNA, 19 nt, Artificial Sequence
  Description of Artificial Sequence: Synthetic oligonucleotide
  Antisense strand to SEQ ID NO: 2255034
cucuucaaacacuacucug

SEQ ID NO: 2255036 - RNA, 19 nt, Artificial Sequence
  Description of Artificial Sequence: Synthetic oligonucleotide
  Sense strand starting at position 3812 of SEQ ID NO: 1884296
gcuuuagauuggccauaag

SEQ ID NO: 2255037 - RNA, 19 nt, Artificial Sequence
  Description of Artificial Sequence: Synthetic oligonucleotide
  Antisense strand to SEQ ID NO: 2255036
cuuauggccaaucuaaagc

SEQ ID NO: 2255038 - RNA, 19 nt, Artificial Sequence
  Description of Artificial Sequence: Synthetic oligonucleotide
  Sense strand starting at position 3879 of SEQ ID NO: 1884296
gcaggaugcccuugagaug

SEQ ID NO: 2255039 - RNA, 19 nt, Artificial Sequence
  Description of Artificial Sequence: Synthetic oligonucleotide
  Antisense strand to SEQ ID NO: 2255038
caucucaagggcauccugc

SEQ ID NO: 2255040 - RNA, 19 nt, Artificial Sequence
  Description of Artificial Sequence: Synthetic oligonucleotide
  Sense strand starting at position 3950 of SEQ ID NO: 1884296
ggauauccagccugaaauu

SEQ ID NO: 2255041 - RNA, 19 nt, Artificial Sequence
  Description of Artificial Sequence: Synthetic oligonucleotide
  Antisense strand to SEQ ID NO: 2255040
aauuucaggcuggauaucc

SEQ ID NO: 2255042 - RNA, 19 nt, Artificial Sequence
  Description of Artificial Sequence: Synthetic oligonucleotide
  Sense strand starting at position 465 of SEQ ID NO: 1884297
agaguccuacucuguaaag

SEQ ID NO: 2255043 - RNA, 19 nt, Artificial Sequence
  Description of Artificial Sequence: Synthetic oligonucleotide
  Antisense strand to SEQ ID NO: 2255042
cuuuacagaguaggacucu

SEQ ID NO: 2255044 - RNA, 19 nt, Artificial Sequence
  Description of Artificial Sequence: Synthetic oligonucleotide
  Sense strand starting at position 530 of SEQ ID NO: 1884297
gagauaguaugcucugcca

SEQ ID NO: 2255045 - RNA, 19 nt, Artificial Sequence
  Description of Artificial Sequence: Synthetic oligonucleotide
  Antisense strand to SEQ ID NO: 2255044
uggcagagcauacuaucuc

SEQ ID NO: 2255046 - RNA, 19 nt, Artificial Sequence
  Description of Artificial Sequence: Synthetic oligonucleotide
  Sense strand starting at position 581 of SEQ ID NO: 1884297
cguaguagcaaguauucca

SEQ ID NO: 2255047 - RNA, 19 nt, Artificial Sequence
  Description of Artificial Sequence: Synthetic oligonucleotide
  Antisense strand to SEQ ID NO: 2255046
uggaauacuugcuacuacg

SEQ ID NO: 2255048 - RNA, 19 nt, Artificial Sequence
  Description of Artificial Sequence: Synthetic oligonucleotide
  Sense strand starting at position 586 of SEQ ID NO: 1884297
uagcaaguauuccaggguu

SEQ ID NO: 2255049 - RNA, 19 nt, Artificial Sequence
  Description of Artificial Sequence: Synthetic oligonucleotide
  Antisense strand to SEQ ID NO: 2255048
aacccuggaauacuugcua

SEQ ID NO: 2255050 - RNA, 19 nt, Artificial Sequence
  Description of Artificial Sequence: Synthetic oligonucleotide
  Sense strand starting at position 588 of SEQ ID NO: 1884297
gcaaguauuccaggguuuc

SEQ ID NO: 2255051 - RNA, 19 nt, Artificial Sequence
  Description of Artificial Sequence: Synthetic oligonucleotide
  Antisense strand to SEQ ID NO: 2255050
gaaacccuggaauacuugc

SEQ ID NO: 2255052 - RNA, 19 nt, Artificial Sequence
  Description of Artificial Sequence: Synthetic oligonucleotide
  Sense strand starting at position 609 of SEQ ID NO: 1884297
gccauaauccaccgaguca

SEQ ID NO: 2255053 - RNA, 19 nt, Artificial Sequence
  Description of Artificial Sequence: Synthetic oligonucleotide
  Antisense strand to SEQ ID NO: 2255052
ugacucgguggauuauggc

SEQ ID NO: 2255054 - RNA, 19 nt, Artificial Sequence
  Description of Artificial Sequence: Synthetic oligonucleotide
  Sense strand starting at position 644 of SEQ ID NO: 1884297
ccagguaaucugcauucuu

SEQ ID NO: 2255055 - RNA, 19 nt, Artificial Sequence
  Description of Artificial Sequence: Synthetic oligonucleotide
  Antisense strand to SEQ ID NO: 2255054
aagaaugcagauuaccugg

SEQ ID NO: 2255056 - RNA, 19 nt, Artificial Sequence
  Description of Artificial Sequence: Synthetic oligonucleotide
  Sense strand starting at position 729 of SEQ ID NO: 1884297
gucucucuuuccuacguga

SEQ ID NO: 2255057 - RNA, 19 nt, Artificial Sequence
  Description of Artificial Sequence: Synthetic oligonucleotide
  Antisense strand to SEQ ID NO: 2255056
ucacguaggaaagagagac

SEQ ID NO: 2255058 - RNA, 19 nt, Artificial Sequence
  Description of Artificial Sequence: Synthetic oligonucleotide
  Sense strand starting at position 892 of SEQ ID NO: 1884297
ugcuguaccuggcgaaguu

SEQ ID NO: 2255059 - RNA, 19 nt, Artificial Sequence
  Description of Artificial Sequence: Synthetic oligonucleotide
  Antisense strand to SEQ ID NO: 2255058
aacuucgccagguacagca

SEQ ID NO: 2255060 - RNA, 19 nt, Artificial Sequence
  Description of Artificial Sequence: Synthetic oligonucleotide
  Sense strand starting at position 893 of SEQ ID NO: 1884297
gcuguaccuggcgaaguuu

SEQ ID NO: 2255061 - RNA, 19 nt, Artificial Sequence
  Description of Artificial Sequence: Synthetic oligonucleotide
  Antisense strand to SEQ ID NO: 2255060
aaacuucgccagguacagc

SEQ ID NO: 2255062 - RNA, 19 nt, Artificial Sequence
  Description of Artificial Sequence: Synthetic oligonucleotide
  Sense strand starting at position 1342 of SEQ ID NO: 1884297
guugggaaucgcuguggga

SEQ ID NO: 2255063 - RNA, 19 nt, Artificial Sequence
  Description of Artificial Sequence: Synthetic oligonucleotide
  Antisense strand to SEQ ID NO: 2255062
ucccacagcgauucccaac

SEQ ID NO: 2255064 - RNA, 19 nt, Artificial Sequence
  Description of Artificial Sequence: Synthetic oligonucleotide
  Sense strand starting at position 1344 of SEQ ID NO: 1884297
ugggaaucgcugugggaaa

SEQ ID NO: 2255065 - RNA, 19 nt, Artificial Sequence
  Description of Artificial Sequence: Synthetic oligonucleotide
  Antisense strand to SEQ ID NO: 2255064
uuucccacagcgauuccca

SEQ ID NO: 2255066 - RNA, 19 nt, Artificial Sequence
  Description of Artificial Sequence: Synthetic oligonucleotide
  Sense strand starting at position 1345 of SEQ ID NO: 1884297
gggaaucgcugugggaaau

SEQ ID NO: 2255067 - RNA, 19 nt, Artificial Sequence
  Description of Artificial Sequence: Synthetic oligonucleotide
  Antisense strand to SEQ ID NO: 2255066
auuucccacagcgauuccc

SEQ ID NO: 2255068 - RNA, 19 nt, Artificial Sequence
  Description of Artificial Sequence: Synthetic oligonucleotide
  Sense strand starting at position 1346 of SEQ ID NO: 1884297
ggaaucgcugugggaaaua

SEQ ID NO: 2255069 - RNA, 19 nt, Artificial Sequence
  Description of Artificial Sequence: Synthetic oligonucleotide
  Antisense strand to SEQ ID NO: 2255068
uauuucccacagcgauucc

SEQ ID NO: 2255070 - RNA, 19 nt, Artificial Sequence
  Description of Artificial Sequence: Synthetic oligonucleotide
  Sense strand starting at position 1528 of SEQ ID NO: 1884297
ggaccagaguucuuguucu

SEQ ID NO: 2255071 - RNA, 19 nt, Artificial Sequence
  Description of Artificial Sequence: Synthetic oligonucleotide
  Antisense strand to SEQ ID NO: 2255070
agaacaagaacucuggucc

SEQ ID NO: 2255072 - RNA, 19 nt, Artificial Sequence
  Description of Artificial Sequence: Synthetic oligonucleotide
  Sense strand starting at position 1534 of SEQ ID NO: 1884297
gaguucuuguucucagcuu

SEQ ID NO: 2255073 - RNA, 19 nt, Artificial Sequence
  Description of Artificial Sequence: Synthetic oligonucleotide
  Antisense strand to SEQ ID NO: 2255072
aagcugagaacaagaacuc

SEQ ID NO: 2255074 - RNA, 19 nt, Artificial Sequence
  Description of Artificial Sequence: Synthetic oligonucleotide
  Sense strand starting at position 2809 of SEQ ID NO: 1884297
aggcgaguuucgaaaucag

SEQ ID NO: 2255075 - RNA, 19 nt, Artificial Sequence
  Description of Artificial Sequence: Synthetic oligonucleotide
  Antisense strand to SEQ ID NO: 2255074
cugauuucgaaacucgccu

SEQ ID NO: 2255076 - RNA, 19 nt, Artificial Sequence
  Description of Artificial Sequence: Synthetic oligonucleotide
  Sense strand starting at position 2974 of SEQ ID NO: 1884297
cguggaacaugauugagga

SEQ ID NO: 2255077 - RNA, 19 nt, Artificial Sequence
  Description of Artificial Sequence: Synthetic oligonucleotide
  Antisense strand to SEQ ID NO: 2255076
uccucaaucauguuccacg

SEQ ID NO: 2255078 - RNA, 19 nt, Artificial Sequence
  Description of Artificial Sequence: Synthetic oligonucleotide
  Sense strand starting at position 3030 of SEQ ID NO: 1884297
cguccucaguucugagacu

SEQ ID NO: 2255079 - RNA, 19 nt, Artificial Sequence
  Description of Artificial Sequence: Synthetic oligonucleotide
  Antisense strand to SEQ ID NO: 2255078
agucucagaacugaggacg

SEQ ID NO: 2255080 - RNA, 19 nt, Artificial Sequence
  Description of Artificial Sequence: Synthetic oligonucleotide
  Sense strand starting at position 3310 of SEQ ID NO: 1884297
guuccagccucuccugauu

SEQ ID NO: 2255081 - RNA, 19 nt, Artificial Sequence
  Description of Artificial Sequence: Synthetic oligonucleotide
  Antisense strand to SEQ ID NO: 2255080
aaucaggagaggcuggaac

SEQ ID NO: 2255082 - RNA, 19 nt, Artificial Sequence
  Description of Artificial Sequence: Synthetic oligonucleotide
  Sense strand starting at position 3322 of SEQ ID NO: 1884297
ccugauuucugccaucuug

SEQ ID NO: 2255083 - RNA, 19 nt, Artificial Sequence
  Description of Artificial Sequence: Synthetic oligonucleotide
  Antisense strand to SEQ ID NO: 2255082
caagauggcagaaaucagg

SEQ ID NO: 2255084 - RNA, 19 nt, Artificial Sequence
  Description of Artificial Sequence: Synthetic oligonucleotide
  Sense strand starting at position 3357 of SEQ ID NO: 1884297
ggcacuuaauuccaugaca

SEQ ID NO: 2255085 - RNA, 19 nt, Artificial Sequence
  Description of Artificial Sequence: Synthetic oligonucleotide
  Antisense strand to SEQ ID NO: 2255084
ugucauggaauuaagugcc

SEQ ID NO: 2255086 - RNA, 19 nt, Artificial Sequence
  Description of Artificial Sequence: Synthetic oligonucleotide
  Sense strand starting at position 3449 of SEQ ID NO: 1884297
uucccauugucacccugau

SEQ ID NO: 2255087 - RNA, 19 nt, Artificial Sequence
  Description of Artificial Sequence: Synthetic oligonucleotide
  Antisense strand to SEQ ID NO: 2255086
aucagggugacaaugggaa

SEQ ID NO: 2255088 - RNA, 19 nt, Artificial Sequence
  Description of Artificial Sequence: Synthetic oligonucleotide
  Sense strand starting at position 3526 of SEQ ID NO: 1884297
augcuaucccaucaguaug

SEQ ID NO: 2255089 - RNA, 19 nt, Artificial Sequence
  Description of Artificial Sequence: Synthetic oligonucleotide
  Antisense strand to SEQ ID NO: 2255088
cauacugaugggauagcau

SEQ ID NO: 2255090 - RNA, 19 nt, Artificial Sequence
  Description of Artificial Sequence: Synthetic oligonucleotide
  Sense strand starting at position 3536 of SEQ ID NO: 1884297
aucaguauguccgaagcca

SEQ ID NO: 2255091 - RNA, 19 nt, Artificial Sequence
  Description of Artificial Sequence: Synthetic oligonucleotide
  Antisense strand to SEQ ID NO: 2255090
uggcuucggacauacugau

SEQ ID NO: 2255092 - RNA, 19 nt, Artificial Sequence
  Description of Artificial Sequence: Synthetic oligonucleotide
  Sense strand starting at position 3611 of SEQ ID NO: 1884297
gccuguuucugcuggacca

SEQ ID NO: 2255093 - RNA, 19 nt, Artificial Sequence
  Description of Artificial Sequence: Synthetic oligonucleotide
  Antisense strand to SEQ ID NO: 2255092
ugguccagcagaaacaggc

SEQ ID NO: 2255094 - RNA, 19 nt, Artificial Sequence
  Description of Artificial Sequence: Synthetic oligonucleotide
  Sense strand starting at position 3818 of SEQ ID NO: 1884297
gacuccaugucguuuguau

SEQ ID NO: 2255095 - RNA, 19 nt, Artificial Sequence
  Description of Artificial Sequence: Synthetic oligonucleotide
  Antisense strand to SEQ ID NO: 2255094
auacaaacgacauggaguc

SEQ ID NO: 2255096 - RNA, 19 nt, Artificial Sequence
  Description of Artificial Sequence: Synthetic oligonucleotide
  Sense strand starting at position 3876 of SEQ ID NO: 1884297
auagguuaagccuggcauu

SEQ ID NO: 2255097 - RNA, 19 nt, Artificial Sequence
  Description of Artificial Sequence: Synthetic oligonucleotide
  Antisense strand to SEQ ID NO: 2255096
aaugccaggcuuaaccuau

SEQ ID NO: 2255098 - RNA, 19 nt, Artificial Sequence
  Description of Artificial Sequence: Synthetic oligonucleotide
  Sense strand starting at position 3948 of SEQ ID NO: 1884297
ucaugagucccuggcucuu

SEQ ID NO: 2255099 - RNA, 19 nt, Artificial Sequence
  Description of Artificial Sequence: Synthetic oligonucleotide
  Antisense strand to SEQ ID NO: 2255098
aagagccagggacucauga

SEQ ID NO: 2255100 - RNA, 19 nt, Artificial Sequence
  Description of Artificial Sequence: Synthetic oligonucleotide
  Sense strand starting at position 3961 of SEQ ID NO: 1884297
gcucuucccugccucagaa

SEQ ID NO: 2255101 - RNA, 19 nt, Artificial Sequence
  Description of Artificial Sequence: Synthetic oligonucleotide
  Antisense strand to SEQ ID NO: 2255100
uucugaggcagggaagagc

SEQ ID NO: 2255102 - RNA, 19 nt, Artificial Sequence
  Description of Artificial Sequence: Synthetic oligonucleotide
  Sense strand starting at position 3965 of SEQ ID NO: 1884297
uucccugccucagaaaugu

SEQ ID NO: 2255103 - RNA, 19 nt, Artificial Sequence
  Description of Artificial Sequence: Synthetic oligonucleotide
  Antisense strand to SEQ ID NO: 2255102
acauuucugaggcagggaa

SEQ ID NO: 2255104 - RNA, 19 nt, Artificial Sequence
  Description of Artificial Sequence: Synthetic oligonucleotide
  Sense strand starting at position 72 of SEQ ID NO: 1884298
agauaacuccaaggugugu

SEQ ID NO: 2255105 - RNA, 19 nt, Artificial Sequence
  Description of Artificial Sequence: Synthetic oligonucleotide
  Antisense strand to SEQ ID NO: 2255104
acacaccuuggaguuaucu

SEQ ID NO: 2255106 - RNA, 19 nt, Artificial Sequence
  Description of Artificial Sequence: Synthetic oligonucleotide
  Sense strand starting at position 113 of SEQ ID NO: 1884298
ggugccauuaguugagaca

SEQ ID NO: 2255107 - RNA, 19 nt, Artificial Sequence
  Description of Artificial Sequence: Synthetic oligonucleotide
  Antisense strand to SEQ ID NO: 2255106
ugucucaacuaauggcacc

SEQ ID NO: 2255108 - RNA, 19 nt, Artificial Sequence
  Description of Artificial Sequence: Synthetic oligonucleotide
  Sense strand starting at position 251 of SEQ ID NO: 1884298
cgaggagagauacggaauu

SEQ ID NO: 2255109 - RNA, 19 nt, Artificial Sequence
  Description of Artificial Sequence: Synthetic oligonucleotide
  Antisense strand to SEQ ID NO: 2255108
aauuccguaucucuccucg

SEQ ID NO: 2255110 - RNA, 19 nt, Artificial Sequence
  Description of Artificial Sequence: Synthetic oligonucleotide
  Sense strand starting at position 372 of SEQ ID NO: 1884298
ugaucucacuugucauuau

SEQ ID NO: 2255111 - RNA, 19 nt, Artificial Sequence
  Description of Artificial Sequence: Synthetic oligonucleotide
  Antisense strand to SEQ ID NO: 2255110
auaaugacaagugagauca

SEQ ID NO: 2255112 - RNA, 19 nt, Artificial Sequence
  Description of Artificial Sequence: Synthetic oligonucleotide
  Sense strand starting at position 382 of SEQ ID NO: 1884298
ugucauuauuugcucagca

SEQ ID NO: 2255113 - RNA, 19 nt, Artificial Sequence
  Description of Artificial Sequence: Synthetic oligonucleotide
  Antisense strand to SEQ ID NO: 2255112
ugcugagcaaauaaugaca

SEQ ID NO: 2255114 - RNA, 19 nt, Artificial Sequence
  Description of Artificial Sequence: Synthetic oligonucleotide
  Sense strand starting at position 383 of SEQ ID NO: 1884298
gucauuauuugcucagcau

SEQ ID NO: 2255115 - RNA, 19 nt, Artificial Sequence
  Description of Artificial Sequence: Synthetic oligonucleotide
  Antisense strand to SEQ ID NO: 2255114
augcugagcaaauaaugac

SEQ ID NO: 2255116 - RNA, 19 nt, Artificial Sequence
  Description of Artificial Sequence: Synthetic oligonucleotide
  Sense strand starting at position 470 of SEQ ID NO: 1884298
aggcauaugcaguaaauau

SEQ ID NO: 2255117 - RNA, 19 nt, Artificial Sequence
  Description of Artificial Sequence: Synthetic oligonucleotide
  Antisense strand to SEQ ID NO: 2255116
auauuuacugcauaugccu

SEQ ID NO: 2255118 - RNA, 19 nt, Artificial Sequence
  Description of Artificial Sequence: Synthetic oligonucleotide
  Sense strand starting at position 703 of SEQ ID NO: 1884298
ggucaaaugcugcagggaa

SEQ ID NO: 2255119 - RNA, 19 nt, Artificial Sequence
  Description of Artificial Sequence: Synthetic oligonucleotide
  Antisense strand to SEQ ID NO: 2255118
uucccugcagcauuugacc

SEQ ID NO: 2255120 - RNA, 19 nt, Artificial Sequence
  Description of Artificial Sequence: Synthetic oligonucleotide
  Sense strand starting at position 741 of SEQ ID NO: 1884298
ggguccguccauuaagacu

SEQ ID NO: 2255121 - RNA, 19 nt, Artificial Sequence
  Description of Artificial Sequence: Synthetic oligonucleotide
  Antisense strand to SEQ ID NO: 2255120
agucuuaauggacggaccc

SEQ ID NO: 2255122 - RNA, 19 nt, Artificial Sequence
  Description of Artificial Sequence: Synthetic oligonucleotide
  Sense strand starting at position 904 of SEQ ID NO: 1884298
gggagugacggcugagaaa

SEQ ID NO: 2255123 - RNA, 19 nt, Artificial Sequence
  Description of Artificial Sequence: Synthetic oligonucleotide
  Antisense strand to SEQ ID NO: 2255122
uuucucagccgucacuccc

SEQ ID NO: 2255124 - RNA, 19 nt, Artificial Sequence
  Description of Artificial Sequence: Synthetic oligonucleotide
  Sense strand starting at position 945 of SEQ ID NO: 1884298
ggcuguugcgggcuuaagu

SEQ ID NO: 2255125 - RNA, 19 nt, Artificial Sequence
  Description of Artificial Sequence: Synthetic oligonucleotide
  Antisense strand to SEQ ID NO: 2255124
acuuaagcccgcaacagcc

SEQ ID NO: 2255126 - RNA, 19 nt, Artificial Sequence
  Description of Artificial Sequence: Synthetic oligonucleotide
  Sense strand starting at position 2343 of SEQ ID NO: 1884298
aguggugguuggaaggaaa

SEQ ID NO: 2255127 - RNA, 19 nt, Artificial Sequence
  Description of Artificial Sequence: Synthetic oligonucleotide
  Antisense strand to SEQ ID NO: 2255126
uuuccuuccaaccaccacu

SEQ ID NO: 2255128 - RNA, 19 nt, Artificial Sequence
  Description of Artificial Sequence: Synthetic oligonucleotide
  Sense strand starting at position 2358 of SEQ ID NO: 1884298
gaaauuuguugcccuguca

SEQ ID NO: 2255129 - RNA, 19 nt, Artificial Sequence
  Description of Artificial Sequence: Synthetic oligonucleotide
  Antisense strand to SEQ ID NO: 2255128
ugacagggcaacaaauuuc

SEQ ID NO: 2255130 - RNA, 19 nt, Artificial Sequence
  Description of Artificial Sequence: Synthetic oligonucleotide
  Sense strand starting at position 2369 of SEQ ID NO: 1884298
cccugucauuucgcaagua

SEQ ID NO: 2255131 - RNA, 19 nt, Artificial Sequence
  Description of Artificial Sequence: Synthetic oligonucleotide
  Antisense strand to SEQ ID NO: 2255130
uacuugcgaaaugacaggg

SEQ ID NO: 2255132 - RNA, 19 nt, Artificial Sequence
  Description of Artificial Sequence: Synthetic oligonucleotide
  Sense strand starting at position 2451 of SEQ ID NO: 1884298
gcgccaacucuuuaauaau

SEQ ID NO: 2255133 - RNA, 19 nt, Artificial Sequence
  Description of Artificial Sequence: Synthetic oligonucleotide
  Antisense strand to SEQ ID NO: 2255132
auuauuaaagaguuggcgc

SEQ ID NO: 2255134 - RNA, 19 nt, Artificial Sequence
  Description of Artificial Sequence: Synthetic oligonucleotide
  Sense strand starting at position 2513 of SEQ ID NO: 1884298
auauaucaguacuuuggua

SEQ ID NO: 2255135 - RNA, 19 nt, Artificial Sequence
  Description of Artificial Sequence: Synthetic oligonucleotide
  Antisense strand to SEQ ID NO: 2255134
uaccaaaguacugauauau

SEQ ID NO: 2255136 - RNA, 19 nt, Artificial Sequence
  Description of Artificial Sequence: Synthetic oligonucleotide
  Sense strand starting at position 2515 of SEQ ID NO: 1884298
auaucaguacuuugguaag

SEQ ID NO: 2255137 - RNA, 19 nt, Artificial Sequence
  Description of Artificial Sequence: Synthetic oligonucleotide
  Antisense strand to SEQ ID NO: 2255136
cuuaccaaaguacugauau

SEQ ID NO: 2255138 - RNA, 19 nt, Artificial Sequence
  Description of Artificial Sequence: Synthetic oligonucleotide
  Sense strand starting at position 2911 of SEQ ID NO: 1884298
uucgucuuaccaggaaacu

SEQ ID NO: 2255139 - RNA, 19 nt, Artificial Sequence
  Description of Artificial Sequence: Synthetic oligonucleotide
  Antisense strand to SEQ ID NO: 2255138
aguuuccugguaagacgaa

SEQ ID NO: 2255140 - RNA, 19 nt, Artificial Sequence
  Description of Artificial Sequence: Synthetic oligonucleotide
  Sense strand starting at position 2912 of SEQ ID NO: 1884298
ucgucuuaccaggaaacua

SEQ ID NO: 2255141 - RNA, 19 nt, Artificial Sequence
  Description of Artificial Sequence: Synthetic oligonucleotide
  Antisense strand to SEQ ID NO: 2255140
uaguuuccugguaagacga

SEQ ID NO: 2255142 - RNA, 19 nt, Artificial Sequence
  Description of Artificial Sequence: Synthetic oligonucleotide
  Sense strand starting at position 2957 of SEQ ID NO: 1884298
gugaacacauuugggaaau

SEQ ID NO: 2255143 - RNA, 19 nt, Artificial Sequence
  Description of Artificial Sequence: Synthetic oligonucleotide
  Antisense strand to SEQ ID NO: 2255142
auuucccaaauguguucac

SEQ ID NO: 2255144 - RNA, 19 nt, Artificial Sequence
  Description of Artificial Sequence: Synthetic oligonucleotide
  Sense strand starting at position 2958 of SEQ ID NO: 1884298
ugaacacauuugggaaauu

SEQ ID NO: 2255145 - RNA, 19 nt, Artificial Sequence
  Description of Artificial Sequence: Synthetic oligonucleotide
  Antisense strand to SEQ ID NO: 2255144
aauuucccaaauguguuca

SEQ ID NO: 2255146 - RNA, 19 nt, Artificial Sequence
  Description of Artificial Sequence: Synthetic oligonucleotide
  Sense strand starting at position 2967 of SEQ ID NO: 1884298
uugggaaauucuucugauc

SEQ ID NO: 2255147 - RNA, 19 nt, Artificial Sequence
  Description of Artificial Sequence: Synthetic oligonucleotide
  Antisense strand to SEQ ID NO: 2255146
gaucagaagaauuucccaa

SEQ ID NO: 2255148 - RNA, 19 nt, Artificial Sequence
  Description of Artificial Sequence: Synthetic oligonucleotide
  Sense strand starting at position 2996 of SEQ ID NO: 1884298
ucucuugagguacaguaaa

SEQ ID NO: 2255149 - RNA, 19 nt, Artificial Sequence
  Description of Artificial Sequence: Synthetic oligonucleotide
  Antisense strand to SEQ ID NO: 2255148
uuuacuguaccucaagaga

SEQ ID NO: 2255150 - RNA, 19 nt, Artificial Sequence
  Description of Artificial Sequence: Synthetic oligonucleotide
  Sense strand starting at position 3004 of SEQ ID NO: 1884298
gguacaguaaauugucuuu

SEQ ID NO: 2255151 - RNA, 19 nt, Artificial Sequence
  Description of Artificial Sequence: Synthetic oligonucleotide
  Antisense strand to SEQ ID NO: 2255150
aaagacaauuuacuguacc

SEQ ID NO: 2255152 - RNA, 19 nt, Artificial Sequence
  Description of Artificial Sequence: Synthetic oligonucleotide
  Sense strand starting at position 3007 of SEQ ID NO: 1884298
acaguaaauugucuuugac

SEQ ID NO: 2255153 - RNA, 19 nt, Artificial Sequence
  Description of Artificial Sequence: Synthetic oligonucleotide
  Antisense strand to SEQ ID NO: 2255152
gucaaagacaauuuacugu

SEQ ID NO: 2255154 - RNA, 19 nt, Artificial Sequence
  Description of Artificial Sequence: Synthetic oligonucleotide
  Sense strand starting at position 3009 of SEQ ID NO: 1884298
aguaaauugucuuugacuu

SEQ ID NO: 2255155 - RNA, 19 nt, Artificial Sequence
  Description of Artificial Sequence: Synthetic oligonucleotide
  Antisense strand to SEQ ID NO: 2255154
aagucaaagacaauuuacu

SEQ ID NO: 2255156 - RNA, 19 nt, Artificial Sequence
  Description of Artificial Sequence: Synthetic oligonucleotide
  Sense strand starting at position 3010 of SEQ ID NO: 1884298
guaaauugucuuugacuuc

SEQ ID NO: 2255157 - RNA, 19 nt, Artificial Sequence
  Description of Artificial Sequence: Synthetic oligonucleotide
  Antisense strand to SEQ ID NO: 2255156
gaagucaaagacaauuuac

SEQ ID NO: 2255158 - RNA, 19 nt, Artificial Sequence
  Description of Artificial Sequence: Synthetic oligonucleotide
  Sense strand starting at position 3058 of SEQ ID NO: 1884298
ucuacugaguuccuaugau

SEQ ID NO: 2255159 - RNA, 19 nt, Artificial Sequence
  Description of Artificial Sequence: Synthetic oligonucleotide
  Antisense strand to SEQ ID NO: 2255158
aucauaggaacucaguaga

SEQ ID NO: 2255160 - RNA, 19 nt, Artificial Sequence
  Description of Artificial Sequence: Synthetic oligonucleotide
  Sense strand starting at position 3219 of SEQ ID NO: 1884298
aaaguuaauugccugagga

SEQ ID NO: 2255161 - RNA, 19 nt, Artificial Sequence
  Description of Artificial Sequence: Synthetic oligonucleotide
  Antisense strand to SEQ ID NO: 2255160
uccucaggcaauuaacuuu

SEQ ID NO: 2255162 - RNA, 19 nt, Artificial Sequence
  Description of Artificial Sequence: Synthetic oligonucleotide
  Sense strand starting at position 3220 of SEQ ID NO: 1884298
aaguuaauugccugaggau

SEQ ID NO: 2255163 - RNA, 19 nt, Artificial Sequence
  Description of Artificial Sequence: Synthetic oligonucleotide
  Antisense strand to SEQ ID NO: 2255162
auccucaggcaauuaacuu

SEQ ID NO: 2255164 - RNA, 19 nt, Artificial Sequence
  Description of Artificial Sequence: Synthetic oligonucleotide
  Sense strand starting at position 3221 of SEQ ID NO: 1884298
aguuaauugccugaggaua

SEQ ID NO: 2255165 - RNA, 19 nt, Artificial Sequence
  Description of Artificial Sequence: Synthetic oligonucleotide
  Antisense strand to SEQ ID NO: 2255164
uauccucaggcaauuaacu

SEQ ID NO: 2255166 - RNA, 19 nt, Artificial Sequence
  Description of Artificial Sequence: Synthetic oligonucleotide
  Sense strand starting at position 3346 of SEQ ID NO: 1884298
aagucugagcccggaacaa

SEQ ID NO: 2255167 - RNA, 19 nt, Artificial Sequence
  Description of Artificial Sequence: Synthetic oligonucleotide
  Antisense strand to SEQ ID NO: 2255166
uuguuccgggcucagacuu

SEQ ID NO: 2255168 - RNA, 19 nt, Artificial Sequence
  Description of Artificial Sequence: Synthetic oligonucleotide
  Sense strand starting at position 3385 of SEQ ID NO: 1884298
gcaauuuguggcgggaguu

SEQ ID NO: 2255169 - RNA, 19 nt, Artificial Sequence
  Description of Artificial Sequence: Synthetic oligonucleotide
  Antisense strand to SEQ ID NO: 2255168
aacucccgccacaaauugc

SEQ ID NO: 2255170 - RNA, 19 nt, Artificial Sequence
  Description of Artificial Sequence: Synthetic oligonucleotide
  Sense strand starting at position 3386 of SEQ ID NO: 1884298
caauuuguggcgggaguuu

SEQ ID NO: 2255171 - RNA, 19 nt, Artificial Sequence
  Description of Artificial Sequence: Synthetic oligonucleotide
  Antisense strand to SEQ ID NO: 2255170
aaacucccgccacaaauug

SEQ ID NO: 2255172 - RNA, 19 nt, Artificial Sequence
  Description of Artificial Sequence: Synthetic oligonucleotide
  Sense strand starting at position 3481 of SEQ ID NO: 1884298
ucuuacauccuugggaaug

SEQ ID NO: 2255173 - RNA, 19 nt, Artificial Sequence
  Description of Artificial Sequence: Synthetic oligonucleotide
  Antisense strand to SEQ ID NO: 2255172
cauucccaaggauguaaga

SEQ ID NO: 2255174 - RNA, 19 nt, Artificial Sequence
  Description of Artificial Sequence: Synthetic oligonucleotide
  Sense strand starting at position 3617 of SEQ ID NO: 1884298
gugcguagaggagaaauaa

SEQ ID NO: 2255175 - RNA, 19 nt, Artificial Sequence
  Description of Artificial Sequence: Synthetic oligonucleotide
  Antisense strand to SEQ ID NO: 2255174
uuauuucuccucuacgcac

SEQ ID NO: 2255176 - RNA, 19 nt, Artificial Sequence
  Description of Artificial Sequence: Synthetic oligonucleotide
  Sense strand starting at position 3625 of SEQ ID NO: 1884298
aggagaaauaagcgguuaa

SEQ ID NO: 2255177 - RNA, 19 nt, Artificial Sequence
  Description of Artificial Sequence: Synthetic oligonucleotide
  Antisense strand to SEQ ID NO: 2255176
uuaaccgcuuauuucuccu

SEQ ID NO: 2255178 - RNA, 19 nt, Artificial Sequence
  Description of Artificial Sequence: Synthetic oligonucleotide
  Sense strand starting at position 3626 of SEQ ID NO: 1884298
ggagaaauaagcgguuaau

SEQ ID NO: 2255179 - RNA, 19 nt, Artificial Sequence
  Description of Artificial Sequence: Synthetic oligonucleotide
  Antisense strand to SEQ ID NO: 2255178
auuaaccgcuuauuucucc

SEQ ID NO: 2255180 - RNA, 19 nt, Artificial Sequence
  Description of Artificial Sequence: Synthetic oligonucleotide
  Sense strand starting at position 3629 of SEQ ID NO: 1884298
gaaauaagcgguuaauauu

SEQ ID NO: 2255181 - RNA, 19 nt, Artificial Sequence
  Description of Artificial Sequence: Synthetic oligonucleotide
  Antisense strand to SEQ ID NO: 2255180
aauauuaaccgcuuauuuc

SEQ ID NO: 2255182 - RNA, 19 nt, Artificial Sequence
  Description of Artificial Sequence: Synthetic oligonucleotide
  Sense strand starting at position 3966 of SEQ ID NO: 1884298
uucugaugucuagaauauu

SEQ ID NO: 2255183 - RNA, 19 nt, Artificial Sequence
  Description of Artificial Sequence: Synthetic oligonucleotide
  Antisense strand to SEQ ID NO: 2255182
aauauucuagacaucagaa

SEQ ID NO: 2255184 - RNA, 19 nt, Artificial Sequence
  Description of Artificial Sequence: Synthetic oligonucleotide
  Sense strand starting at position 46 of SEQ ID NO: 1884299
gaccuaguauuugacagua

SEQ ID NO: 2255185 - RNA, 19 nt, Artificial Sequence
  Description of Artificial Sequence: Synthetic oligonucleotide
  Antisense strand to SEQ ID NO: 2255184
uacugucaaauacuagguc

SEQ ID NO: 2255186 - RNA, 19 nt, Artificial Sequence
  Description of Artificial Sequence: Synthetic oligonucleotide
  Sense strand starting at position 119 of SEQ ID NO: 1884299
ggagcauaacuggguuguu

SEQ ID NO: 2255187 - RNA, 19 nt, Artificial Sequence
  Description of Artificial Sequence: Synthetic oligonucleotide
  Antisense strand to SEQ ID NO: 2255186
aacaacccaguuaugcucc

SEQ ID NO: 2255188 - RNA, 19 nt, Artificial Sequence
  Description of Artificial Sequence: Synthetic oligonucleotide
  Sense strand starting at position 120 of SEQ ID NO: 1884299
gagcauaacuggguuguuu

SEQ ID NO: 2255189 - RNA, 19 nt, Artificial Sequence
  Description of Artificial Sequence: Synthetic oligonucleotide
  Antisense strand to SEQ ID NO: 2255188
aaacaacccaguuaugcuc

SEQ ID NO: 2255190 - RNA, 19 nt, Artificial Sequence
  Description of Artificial Sequence: Synthetic oligonucleotide
  Sense strand starting at position 386 of SEQ ID NO: 1884299
ucagguucugugcgugcaa

SEQ ID NO: 2255191 - RNA, 19 nt, Artificial Sequence
  Description of Artificial Sequence: Synthetic oligonucleotide
  Antisense strand to SEQ ID NO: 2255190
uugcacgcacagaaccuga

SEQ ID NO: 2255192 - RNA, 19 nt, Artificial Sequence
  Description of Artificial Sequence: Synthetic oligonucleotide
  Sense strand starting at position 387 of SEQ ID NO: 1884299
cagguucugugcgugcaaa

SEQ ID NO: 2255193 - RNA, 19 nt, Artificial Sequence
  Description of Artificial Sequence: Synthetic oligonucleotide
  Antisense strand to SEQ ID NO: 2255192
uuugcacgcacagaaccug

SEQ ID NO: 2255194 - RNA, 19 nt, Artificial Sequence
  Description of Artificial Sequence: Synthetic oligonucleotide
  Sense strand starting at position 388 of SEQ ID NO: 1884299
agguucugugcgugcaaau

SEQ ID NO: 2255195 - RNA, 19 nt, Artificial Sequence
  Description of Artificial Sequence: Synthetic oligonucleotide
  Antisense strand to SEQ ID NO: 2255194
auuugcacgcacagaaccu

SEQ ID NO: 2255196 - RNA, 19 nt, Artificial Sequence
  Description of Artificial Sequence: Synthetic oligonucleotide
  Sense strand starting at position 389 of SEQ ID NO: 1884299
gguucugugcgugcaaauc

SEQ ID NO: 2255197 - RNA, 19 nt, Artificial Sequence
  Description of Artificial Sequence: Synthetic oligonucleotide
  Antisense strand to SEQ ID NO: 2255196
gauuugcacgcacagaacc

SEQ ID NO: 2255198 - RNA, 19 nt, Artificial Sequence
  Description of Artificial Sequence: Synthetic oligonucleotide
  Sense strand starting at position 414 of SEQ ID NO: 1884299
ucugauggccagugucaga

SEQ ID NO: 2255199 - RNA, 19 nt, Artificial Sequence
  Description of Artificial Sequence: Synthetic oligonucleotide
  Antisense strand to SEQ ID NO: 2255198
ucugacacuggccaucaga

SEQ ID NO: 2255200 - RNA, 19 nt, Artificial Sequence
  Description of Artificial Sequence: Synthetic oligonucleotide
  Sense strand starting at position 431 of SEQ ID NO: 1884299
gaggcagugccaugucaag

SEQ ID NO: 2255201 - RNA, 19 nt, Artificial Sequence
  Description of Artificial Sequence: Synthetic oligonucleotide
  Antisense strand to SEQ ID NO: 2255200
cuugacauggcacugccuc

SEQ ID NO: 2255202 - RNA, 19 nt, Artificial Sequence
  Description of Artificial Sequence: Synthetic oligonucleotide
  Sense strand starting at position 570 of SEQ ID NO: 1884299
ggugaucucaggugccaga

SEQ ID NO: 2255203 - RNA, 19 nt, Artificial Sequence
  Description of Artificial Sequence: Synthetic oligonucleotide
  Antisense strand to SEQ ID NO: 2255202
ucuggcaccugagaucacc

SEQ ID NO: 2255204 - RNA, 19 nt, Artificial Sequence
  Description of Artificial Sequence: Synthetic oligonucleotide
  Sense strand starting at position 722 of SEQ ID NO: 1884299
ugaggaaguugggugauca

SEQ ID NO: 2255205 - RNA, 19 nt, Artificial Sequence
  Description of Artificial Sequence: Synthetic oligonucleotide
  Antisense strand to SEQ ID NO: 2255204
ugaucacccaacuuccuca

SEQ ID NO: 2255206 - RNA, 19 nt, Artificial Sequence
  Description of Artificial Sequence: Synthetic oligonucleotide
  Sense strand starting at position 723 of SEQ ID NO: 1884299
gaggaaguugggugaucau

SEQ ID NO: 2255207 - RNA, 19 nt, Artificial Sequence
  Description of Artificial Sequence: Synthetic oligonucleotide
  Antisense strand to SEQ ID NO: 2255206
augaucacccaacuuccuc

SEQ ID NO: 2255208 - RNA, 19 nt, Artificial Sequence
  Description of Artificial Sequence: Synthetic oligonucleotide
  Sense strand starting at position 726 of SEQ ID NO: 1884299
gaaguugggugaucaugca

SEQ ID NO: 2255209 - RNA, 19 nt, Artificial Sequence
  Description of Artificial Sequence: Synthetic oligonucleotide
  Antisense strand to SEQ ID NO: 2255208
ugcaugaucacccaacuuc

SEQ ID NO: 2255210 - RNA, 19 nt, Artificial Sequence
  Description of Artificial Sequence: Synthetic oligonucleotide
  Sense strand starting at position 963 of SEQ ID NO: 1884299
guuuccuuauuuguuugaa

SEQ ID NO: 2255211 - RNA, 19 nt, Artificial Sequence
  Description of Artificial Sequence: Synthetic oligonucleotide
  Antisense strand to SEQ ID NO: 2255210
uucaaacaaauaaggaaac

SEQ ID NO: 2255212 - RNA, 19 nt, Artificial Sequence
  Description of Artificial Sequence: Synthetic oligonucleotide
  Sense strand starting at position 1011 of SEQ ID NO: 1884299
uauggagcaguuuguuuaa

SEQ ID NO: 2255213 - RNA, 19 nt, Artificial Sequence
  Description of Artificial Sequence: Synthetic oligonucleotide
  Antisense strand to SEQ ID NO: 2255212
uuaaacaaacugcuccaua

SEQ ID NO: 2255214 - RNA, 19 nt, Artificial Sequence
  Description of Artificial Sequence: Synthetic oligonucleotide
  Sense strand starting at position 1112 of SEQ ID NO: 1884299
gccgguuaucaagacagac

SEQ ID NO: 2255215 - RNA, 19 nt, Artificial Sequence
  Description of Artificial Sequence: Synthetic oligonucleotide
  Antisense strand to SEQ ID NO: 2255214
gucugucuugauaaccggc

SEQ ID NO: 2255216 - RNA, 19 nt, Artificial Sequence
  Description of Artificial Sequence: Synthetic oligonucleotide
  Sense strand starting at position 1142 of SEQ ID NO: 1884299
caaucuggguuuccgaaau

SEQ ID NO: 2255217 - RNA, 19 nt, Artificial Sequence
  Description of Artificial Sequence: Synthetic oligonucleotide
  Antisense strand to SEQ ID NO: 2255216
auuucggaaacccagauug

SEQ ID NO: 2255218 - RNA, 19 nt, Artificial Sequence
  Description of Artificial Sequence: Synthetic oligonucleotide
  Sense strand starting at position 1509 of SEQ ID NO: 1884299
cugugcacuggucgggaaa

SEQ ID NO: 2255219 - RNA, 19 nt, Artificial Sequence
  Description of Artificial Sequence: Synthetic oligonucleotide
  Antisense strand to SEQ ID NO: 2255218
uuucccgaccagugcacag

SEQ ID NO: 2255220 - RNA, 19 nt, Artificial Sequence
  Description of Artificial Sequence: Synthetic oligonucleotide
  Sense strand starting at position 1535 of SEQ ID NO: 1884299
ggcagaaucccucauucga

SEQ ID NO: 2255221 - RNA, 19 nt, Artificial Sequence
  Description of Artificial Sequence: Synthetic oligonucleotide
  Antisense strand to SEQ ID NO: 2255220
ucgaaugagggauucugcc

SEQ ID NO: 2255222 - RNA, 19 nt, Artificial Sequence
  Description of Artificial Sequence: Synthetic oligonucleotide
  Sense strand starting at position 1555 of SEQ ID NO: 1884299
gcaggugggcuguauacaa

SEQ ID NO: 2255223 - RNA, 19 nt, Artificial Sequence
  Description of Artificial Sequence: Synthetic oligonucleotide
  Antisense strand to SEQ ID NO: 2255222
uuguauacagcccaccugc

SEQ ID NO: 2255224 - RNA, 19 nt, Artificial Sequence
  Description of Artificial Sequence: Synthetic oligonucleotide
  Sense strand starting at position 1574 of SEQ ID NO: 1884299
cccaaaguguaucagggaa

SEQ ID NO: 2255225 - RNA, 19 nt, Artificial Sequence
  Description of Artificial Sequence: Synthetic oligonucleotide
  Antisense strand to SEQ ID NO: 2255224
uucccugauacacuuuggg

SEQ ID NO: 2255226 - RNA, 19 nt, Artificial Sequence
  Description of Artificial Sequence: Synthetic oligonucleotide
  Sense strand starting at position 2008 of SEQ ID NO: 1884299
ccuugcccucugugacaaa

SEQ ID NO: 2255227 - RNA, 19 nt, Artificial Sequence
  Description of Artificial Sequence: Synthetic oligonucleotide
  Antisense strand to SEQ ID NO: 2255226
uuugucacagagggcaagg

SEQ ID NO: 2255228 - RNA, 19 nt, Artificial Sequence
  Description of Artificial Sequence: Synthetic oligonucleotide
  Sense strand starting at position 2228 of SEQ ID NO: 1884299
gcacgaaagagcuauucuu

SEQ ID NO: 2255229 - RNA, 19 nt, Artificial Sequence
  Description of Artificial Sequence: Synthetic oligonucleotide
  Antisense strand to SEQ ID NO: 2255228
aagaauagcucuuucgugc

SEQ ID NO: 2255230 - RNA, 19 nt, Artificial Sequence
  Description of Artificial Sequence: Synthetic oligonucleotide
  Sense strand starting at position 2244 of SEQ ID NO: 1884299
cuucucaauucgccaagga

SEQ ID NO: 2255231 - RNA, 19 nt, Artificial Sequence
  Description of Artificial Sequence: Synthetic oligonucleotide
  Antisense strand to SEQ ID NO: 2255230
uccuuggcgaauugagaag

SEQ ID NO: 2255232 - RNA, 19 nt, Artificial Sequence
  Description of Artificial Sequence: Synthetic oligonucleotide
  Sense strand starting at position 2248 of SEQ ID NO: 1884299
ucaauucgccaaggaggaa

SEQ ID NO: 2255233 - RNA, 19 nt, Artificial Sequence
  Description of Artificial Sequence: Synthetic oligonucleotide
  Antisense strand to SEQ ID NO: 2255232
uuccuccuuggcgaauuga

SEQ ID NO: 2255234 - RNA, 19 nt, Artificial Sequence
  Description of Artificial Sequence: Synthetic oligonucleotide
  Sense strand starting at position 2405 of SEQ ID NO: 1884299
ccagguaugucaucucgcu

SEQ ID NO: 2255235 - RNA, 19 nt, Artificial Sequence
  Description of Artificial Sequence: Synthetic oligonucleotide
  Antisense strand to SEQ ID NO: 2255234
agcgagaugacauaccugg

SEQ ID NO: 2255236 - RNA, 19 nt, Artificial Sequence
  Description of Artificial Sequence: Synthetic oligonucleotide
  Sense strand starting at position 2409 of SEQ ID NO: 1884299
guaugucaucucgcugagu

SEQ ID NO: 2255237 - RNA, 19 nt, Artificial Sequence
  Description of Artificial Sequence: Synthetic oligonucleotide
  Antisense strand to SEQ ID NO: 2255236
acucagcgagaugacauac

SEQ ID NO: 2255238 - RNA, 19 nt, Artificial Sequence
  Description of Artificial Sequence: Synthetic oligonucleotide
  Sense strand starting at position 2781 of SEQ ID NO: 1884299
ggccguguagucagccaga

SEQ ID NO: 2255239 - RNA, 19 nt, Artificial Sequence
  Description of Artificial Sequence: Synthetic oligonucleotide
  Antisense strand to SEQ ID NO: 2255238
ucuggcugacuacacggcc

SEQ ID NO: 2255240 - RNA, 19 nt, Artificial Sequence
  Description of Artificial Sequence: Synthetic oligonucleotide
  Sense strand starting at position 2920 of SEQ ID NO: 1884299
ggaugauggucucugcuaa

SEQ ID NO: 2255241 - RNA, 19 nt, Artificial Sequence
  Description of Artificial Sequence: Synthetic oligonucleotide
  Antisense strand to SEQ ID NO: 2255240
uuagcagagaccaucaucc

SEQ ID NO: 2255242 - RNA, 19 nt, Artificial Sequence
  Description of Artificial Sequence: Synthetic oligonucleotide
  Sense strand starting at position 2921 of SEQ ID NO: 1884299
gaugauggucucugcuaag

SEQ ID NO: 2255243 - RNA, 19 nt, Artificial Sequence
  Description of Artificial Sequence: Synthetic oligonucleotide
  Antisense strand to SEQ ID NO: 2255242
cuuagcagagaccaucauc

SEQ ID NO: 2255244 - RNA, 19 nt, Artificial Sequence
  Description of Artificial Sequence: Synthetic oligonucleotide
  Sense strand starting at position 3270 of SEQ ID NO: 1884299
gccugagggcuucggcuau

SEQ ID NO: 2255245 - RNA, 19 nt, Artificial Sequence
  Description of Artificial Sequence: Synthetic oligonucleotide
  Antisense strand to SEQ ID NO: 2255244
auagccgaagcccucaggc

SEQ ID NO: 2255246 - RNA, 19 nt, Artificial Sequence
  Description of Artificial Sequence: Synthetic oligonucleotide
  Sense strand starting at position 3609 of SEQ ID NO: 1884299
gggacugucuagagaugug

SEQ ID NO: 2255247 - RNA, 19 nt, Artificial Sequence
  Description of Artificial Sequence: Synthetic oligonucleotide
  Antisense strand to SEQ ID NO: 2255246
cacaucucuagacaguccc

SEQ ID NO: 2255248 - RNA, 19 nt, Artificial Sequence
  Description of Artificial Sequence: Synthetic oligonucleotide
  Sense strand starting at position 3612 of SEQ ID NO: 1884299
acugucuagagauguguua

SEQ ID NO: 2255249 - RNA, 19 nt, Artificial Sequence
  Description of Artificial Sequence: Synthetic oligonucleotide
  Antisense strand to SEQ ID NO: 2255248
uaacacaucucuagacagu

SEQ ID NO: 2255250 - RNA, 19 nt, Artificial Sequence
  Description of Artificial Sequence: Synthetic oligonucleotide
  Sense strand starting at position 3619 of SEQ ID NO: 1884299
agagauguguuaggacaga

SEQ ID NO: 2255251 - RNA, 19 nt, Artificial Sequence
  Description of Artificial Sequence: Synthetic oligonucleotide
  Antisense strand to SEQ ID NO: 2255250
ucuguccuaacacaucucu

SEQ ID NO: 2255252 - RNA, 19 nt, Artificial Sequence
  Description of Artificial Sequence: Synthetic oligonucleotide
  Sense strand starting at position 3697 of SEQ ID NO: 1884299
ccugguuggcagggauaau

SEQ ID NO: 2255253 - RNA, 19 nt, Artificial Sequence
  Description of Artificial Sequence: Synthetic oligonucleotide
  Antisense strand to SEQ ID NO: 2255252
auuaucccugccaaccagg

SEQ ID NO: 2255254 - RNA, 19 nt, Artificial Sequence
  Description of Artificial Sequence: Synthetic oligonucleotide
  Sense strand starting at position 3709 of SEQ ID NO: 1884299
ggauaaugauaauagcaaa

SEQ ID NO: 2255255 - RNA, 19 nt, Artificial Sequence
  Description of Artificial Sequence: Synthetic oligonucleotide
  Antisense strand to SEQ ID NO: 2255254
uuugcuauuaucauuaucc

SEQ ID NO: 2255256 - RNA, 19 nt, Artificial Sequence
  Description of Artificial Sequence: Synthetic oligonucleotide
  Sense strand starting at position 3773 of SEQ ID NO: 1884299
gccagaaagcagggaaauu

SEQ ID NO: 2255257 - RNA, 19 nt, Artificial Sequence
  Description of Artificial Sequence: Synthetic oligonucleotide
  Antisense strand to SEQ ID NO: 2255256
aauuucccugcuuucuggc

SEQ ID NO: 2255258 - RNA, 19 nt, Artificial Sequence
  Description of Artificial Sequence: Synthetic oligonucleotide
  Sense strand starting at position 3880 of SEQ ID NO: 1884299
gggccuaucaagggacaca

SEQ ID NO: 2255259 - RNA, 19 nt, Artificial Sequence
  Description of Artificial Sequence: Synthetic oligonucleotide
  Antisense strand to SEQ ID NO: 2255258
ugugucccuugauaggccc

SEQ ID NO: 2255260 - RNA, 19 nt, Artificial Sequence
  Description of Artificial Sequence: Synthetic oligonucleotide
  Sense strand starting at position 3912 of SEQ ID NO: 1884299
gccuacagucuuugggaga

SEQ ID NO: 2255261 - RNA, 19 nt, Artificial Sequence
  Description of Artificial Sequence: Synthetic oligonucleotide
  Antisense strand to SEQ ID NO: 2255260
ucucccaaagacuguaggc

SEQ ID NO: 2255262 - RNA, 19 nt, Artificial Sequence
  Description of Artificial Sequence: Synthetic oligonucleotide
  Sense strand starting at position 3917 of SEQ ID NO: 1884299
cagucuuugggagagcaga

SEQ ID NO: 2255263 - RNA, 19 nt, Artificial Sequence
  Description of Artificial Sequence: Synthetic oligonucleotide
  Antisense strand to SEQ ID NO: 2255262
ucugcucucccaaagacug

SEQ ID NO: 2255264 - RNA, 19 nt, Artificial Sequence
  Description of Artificial Sequence: Synthetic oligonucleotide
  Sense strand starting at position 31 of SEQ ID NO: 1884300
ugugaaugcacuugcagau

SEQ ID NO: 2255265 - RNA, 19 nt, Artificial Sequence
  Description of Artificial Sequence: Synthetic oligonucleotide
  Antisense strand to SEQ ID NO: 2255264
aucugcaagugcauucaca

SEQ ID NO: 2255266 - RNA, 19 nt, Artificial Sequence
  Description of Artificial Sequence: Synthetic oligonucleotide
  Sense strand starting at position 41 of SEQ ID NO: 1884300
cuugcagauggcuguaauc

SEQ ID NO: 2255267 - RNA, 19 nt, Artificial Sequence
  Description of Artificial Sequence: Synthetic oligonucleotide
  Antisense strand to SEQ ID NO: 2255266
gauuacagccaucugcaag

SEQ ID NO: 2255268 - RNA, 19 nt, Artificial Sequence
  Description of Artificial Sequence: Synthetic oligonucleotide
  Sense strand starting at position 43 of SEQ ID NO: 1884300
ugcagauggcuguaaucac

SEQ ID NO: 2255269 - RNA, 19 nt, Artificial Sequence
  Description of Artificial Sequence: Synthetic oligonucleotide
  Antisense strand to SEQ ID NO: 2255268
gugauuacagccaucugca

SEQ ID NO: 2255270 - RNA, 19 nt, Artificial Sequence
  Description of Artificial Sequence: Synthetic oligonucleotide
  Sense strand starting at position 74 of SEQ ID NO: 1884300
acuuaacauuuguaaagag

SEQ ID NO: 2255271 - RNA, 19 nt, Artificial Sequence
  Description of Artificial Sequence: Synthetic oligonucleotide
  Antisense strand to SEQ ID NO: 2255270
cucuuuacaaauguuaagu

SEQ ID NO: 2255272 - RNA, 19 nt, Artificial Sequence
  Description of Artificial Sequence: Synthetic oligonucleotide
  Sense strand starting at position 190 of SEQ ID NO: 1884300
gagaguaaagagugcagaa

SEQ ID NO: 2255273 - RNA, 19 nt, Artificial Sequence
  Description of Artificial Sequence: Synthetic oligonucleotide
  Antisense strand to SEQ ID NO: 2255272
uucugcacucuuuacucuc

SEQ ID NO: 2255274 - RNA, 19 nt, Artificial Sequence
  Description of Artificial Sequence: Synthetic oligonucleotide
  Sense strand starting at position 356 of SEQ ID NO: 1884300
ccaggugagcuuuaaagcu

SEQ ID NO: 2255275 - RNA, 19 nt, Artificial Sequence
  Description of Artificial Sequence: Synthetic oligonucleotide
  Antisense strand to SEQ ID NO: 2255274
agcuuuaaagcucaccugg

SEQ ID NO: 2255276 - RNA, 19 nt, Artificial Sequence
  Description of Artificial Sequence: Synthetic oligonucleotide
  Sense strand starting at position 445 of SEQ ID NO: 1884300
acuggauguccauggauuc

SEQ ID NO: 2255277 - RNA, 19 nt, Artificial Sequence
  Description of Artificial Sequence: Synthetic oligonucleotide
  Antisense strand to SEQ ID NO: 2255276
gaauccauggacauccagu

SEQ ID NO: 2255278 - RNA, 19 nt, Artificial Sequence
  Description of Artificial Sequence: Synthetic oligonucleotide
  Sense strand starting at position 456 of SEQ ID NO: 1884300
auggauucuguuggaggaa

SEQ ID NO: 2255279 - RNA, 19 nt, Artificial Sequence
  Description of Artificial Sequence: Synthetic oligonucleotide
  Antisense strand to SEQ ID NO: 2255278
uuccuccaacagaauccau

SEQ ID NO: 2255280 - RNA, 19 nt, Artificial Sequence
  Description of Artificial Sequence: Synthetic oligonucleotide
  Sense strand starting at position 676 of SEQ ID NO: 1884300
guuguaaauucuccaggca

SEQ ID NO: 2255281 - RNA, 19 nt, Artificial Sequence
  Description of Artificial Sequence: Synthetic oligonucleotide
  Antisense strand to SEQ ID NO: 2255280
ugccuggagaauuuacaac

SEQ ID NO: 2255282 - RNA, 19 nt, Artificial Sequence
  Description of Artificial Sequence: Synthetic oligonucleotide
  Sense strand starting at position 706 of SEQ ID NO: 1884300
ggguaauuauagcccaagu

SEQ ID NO: 2255283 - RNA, 19 nt, Artificial Sequence
  Description of Artificial Sequence: Synthetic oligonucleotide
  Antisense strand to SEQ ID NO: 2255282
acuugggcuauaauuaccc

SEQ ID NO: 2255284 - RNA, 19 nt, Artificial Sequence
  Description of Artificial Sequence: Synthetic oligonucleotide
  Sense strand starting at position 708 of SEQ ID NO: 1884300
guaauuauagcccaaguug

SEQ ID NO: 2255285 - RNA, 19 nt, Artificial Sequence
  Description of Artificial Sequence: Synthetic oligonucleotide
  Antisense strand to SEQ ID NO: 2255284
caacuugggcuauaauuac

SEQ ID NO: 2255286 - RNA, 19 nt, Artificial Sequence
  Description of Artificial Sequence: Synthetic oligonucleotide
  Sense strand starting at position 834 of SEQ ID NO: 1884300
ucacaauggccuugaguca

SEQ ID NO: 2255287 - RNA, 19 nt, Artificial Sequence
  Description of Artificial Sequence: Synthetic oligonucleotide
  Antisense strand to SEQ ID NO: 2255286
ugacucaaggccauuguga

SEQ ID NO: 2255288 - RNA, 19 nt, Artificial Sequence
  Description of Artificial Sequence: Synthetic oligonucleotide
  Sense strand starting at position 835 of SEQ ID NO: 1884300
cacaauggccuugagucau

SEQ ID NO: 2255289 - RNA, 19 nt, Artificial Sequence
  Description of Artificial Sequence: Synthetic oligonucleotide
  Antisense strand to SEQ ID NO: 2255288
augacucaaggccauugug

SEQ ID NO: 2255290 - RNA, 19 nt, Artificial Sequence
  Description of Artificial Sequence: Synthetic oligonucleotide
  Sense strand starting at position 889 of SEQ ID NO: 1884300
ugggcugcucaugagucaa

SEQ ID NO: 2255291 - RNA, 19 nt, Artificial Sequence
  Description of Artificial Sequence: Synthetic oligonucleotide
  Antisense strand to SEQ ID NO: 2255290
uugacucaugagcagccca

SEQ ID NO: 2255292 - RNA, 19 nt, Artificial Sequence
  Description of Artificial Sequence: Synthetic oligonucleotide
  Sense strand starting at position 1030 of SEQ ID NO: 1884300
gcaccuguguauuucuauu

SEQ ID NO: 2255293 - RNA, 19 nt, Artificial Sequence
  Description of Artificial Sequence: Synthetic oligonucleotide
  Antisense strand to SEQ ID NO: 2255292
aauagaaauacacaggugc

SEQ ID NO: 2255294 - RNA, 19 nt, Artificial Sequence
  Description of Artificial Sequence: Synthetic oligonucleotide
  Sense strand starting at position 1083 of SEQ ID NO: 1884300
ucucuaauucuagauugug

SEQ ID NO: 2255295 - RNA, 19 nt, Artificial Sequence
  Description of Artificial Sequence: Synthetic oligonucleotide
  Antisense strand to SEQ ID NO: 2255294
cacaaucuagaauuagaga

SEQ ID NO: 2255296 - RNA, 19 nt, Artificial Sequence
  Description of Artificial Sequence: Synthetic oligonucleotide
  Sense strand starting at position 1089 of SEQ ID NO: 1884300
auucuagauuguguguuga

SEQ ID NO: 2255297 - RNA, 19 nt, Artificial Sequence
  Description of Artificial Sequence: Synthetic oligonucleotide
  Antisense strand to SEQ ID NO: 2255296
ucaacacacaaucuagaau

SEQ ID NO: 2255298 - RNA, 19 nt, Artificial Sequence
  Description of Artificial Sequence: Synthetic oligonucleotide
  Sense strand starting at position 1091 of SEQ ID NO: 1884300
ucuagauuguguguugaau

SEQ ID NO: 2255299 - RNA, 19 nt, Artificial Sequence
  Description of Artificial Sequence: Synthetic oligonucleotide
  Antisense strand to SEQ ID NO: 2255298
auucaacacacaaucuaga

SEQ ID NO: 2255300 - RNA, 19 nt, Artificial Sequence
  Description of Artificial Sequence: Synthetic oligonucleotide
  Sense strand starting at position 1102 of SEQ ID NO: 1884300
uguugaauucauggaguga

SEQ ID NO: 2255301 - RNA, 19 nt, Artificial Sequence
  Description of Artificial Sequence: Synthetic oligonucleotide
  Antisense strand to SEQ ID NO: 2255300
ucacuccaugaauucaaca

SEQ ID NO: 2255302 - RNA, 19 nt, Artificial Sequence
  Description of Artificial Sequence: Synthetic oligonucleotide
  Sense strand starting at position 1838 of SEQ ID NO: 1884300
cgugcucugagguauucuu

SEQ ID NO: 2255303 - RNA, 19 nt, Artificial Sequence
  Description of Artificial Sequence: Synthetic oligonucleotide
  Antisense strand to SEQ ID NO: 2255302
aagaauaccucagagcacg

SEQ ID NO: 2255304 - RNA, 19 nt, Artificial Sequence
  Description of Artificial Sequence: Synthetic oligonucleotide
  Sense strand starting at position 1850 of SEQ ID NO: 1884300
uauucuucccugugggcaa

SEQ ID NO: 2255305 - RNA, 19 nt, Artificial Sequence
  Description of Artificial Sequence: Synthetic oligonucleotide
  Antisense strand to SEQ ID NO: 2255304
uugcccacagggaagaaua

SEQ ID NO: 2255306 - RNA, 19 nt, Artificial Sequence
  Description of Artificial Sequence: Synthetic oligonucleotide
  Sense strand starting at position 2165 of SEQ ID NO: 1884300
ggcacaugccaucaaauga

SEQ ID NO: 2255307 - RNA, 19 nt, Artificial Sequence
  Description of Artificial Sequence: Synthetic oligonucleotide
  Antisense strand to SEQ ID NO: 2255306
ucauuugauggcaugugcc

SEQ ID NO: 2255308 - RNA, 19 nt, Artificial Sequence
  Description of Artificial Sequence: Synthetic oligonucleotide
  Sense strand starting at position 2228 of SEQ ID NO: 1884300
cggagcuucccauaaugaa

SEQ ID NO: 2255309 - RNA, 19 nt, Artificial Sequence
  Description of Artificial Sequence: Synthetic oligonucleotide
  Antisense strand to SEQ ID NO: 2255308
uucauuaugggaagcuccg

SEQ ID NO: 2255310 - RNA, 19 nt, Artificial Sequence
  Description of Artificial Sequence: Synthetic oligonucleotide
  Sense strand starting at position 2484 of SEQ ID NO: 1884300
agaaccaucuauggaacaa

SEQ ID NO: 2255311 - RNA, 19 nt, Artificial Sequence
  Description of Artificial Sequence: Synthetic oligonucleotide
  Antisense strand to SEQ ID NO: 2255310
uuguuccauagaugguucu

SEQ ID NO: 2255312 - RNA, 19 nt, Artificial Sequence
  Description of Artificial Sequence: Synthetic oligonucleotide
  Sense strand starting at position 2895 of SEQ ID NO: 1884300
gagguuaagcacuguuucu

SEQ ID NO: 2255313 - RNA, 19 nt, Artificial Sequence
  Description of Artificial Sequence: Synthetic oligonucleotide
  Antisense strand to SEQ ID NO: 2255312
agaaacagugcuuaaccuc

SEQ ID NO: 2255314 - RNA, 19 nt, Artificial Sequence
  Description of Artificial Sequence: Synthetic oligonucleotide
  Sense strand starting at position 2901 of SEQ ID NO: 1884300
aagcacuguuucuugagua

SEQ ID NO: 2255315 - RNA, 19 nt, Artificial Sequence
  Description of Artificial Sequence: Synthetic oligonucleotide
  Antisense strand to SEQ ID NO: 2255314
uacucaagaaacagugcuu

SEQ ID NO: 2255316 - RNA, 19 nt, Artificial Sequence
  Description of Artificial Sequence: Synthetic oligonucleotide
  Sense strand starting at position 3005 of SEQ ID NO: 1884300
gcccucucaggccagaaau

SEQ ID NO: 2255317 - RNA, 19 nt, Artificial Sequence
  Description of Artificial Sequence: Synthetic oligonucleotide
  Antisense strand to SEQ ID NO: 2255316
auuucuggccugagagggc

SEQ ID NO: 2255318 - RNA, 19 nt, Artificial Sequence
  Description of Artificial Sequence: Synthetic oligonucleotide
  Sense strand starting at position 3178 of SEQ ID NO: 1884300
acacaauguugguuguuua

SEQ ID NO: 2255319 - RNA, 19 nt, Artificial Sequence
  Description of Artificial Sequence: Synthetic oligonucleotide
  Antisense strand to SEQ ID NO: 2255318
uaaacaaccaacauugugu

SEQ ID NO: 2255320 - RNA, 19 nt, Artificial Sequence
  Description of Artificial Sequence: Synthetic oligonucleotide
  Sense strand starting at position 3181 of SEQ ID NO: 1884300
caauguugguuguuuacca

SEQ ID NO: 2255321 - RNA, 19 nt, Artificial Sequence
  Description of Artificial Sequence: Synthetic oligonucleotide
  Antisense strand to SEQ ID NO: 2255320
ugguaaacaaccaacauug

SEQ ID NO: 2255322 - RNA, 19 nt, Artificial Sequence
  Description of Artificial Sequence: Synthetic oligonucleotide
  Sense strand starting at position 3182 of SEQ ID NO: 1884300
aauguugguuguuuaccaa

SEQ ID NO: 2255323 - RNA, 19 nt, Artificial Sequence
  Description of Artificial Sequence: Synthetic oligonucleotide
  Antisense strand to SEQ ID NO: 2255322
uugguaaacaaccaacauu

SEQ ID NO: 2255324 - RNA, 19 nt, Artificial Sequence
  Description of Artificial Sequence: Synthetic oligonucleotide
  Sense strand starting at position 3185 of SEQ ID NO: 1884300
guugguuguuuaccaacaa

SEQ ID NO: 2255325 - RNA, 19 nt, Artificial Sequence
  Description of Artificial Sequence: Synthetic oligonucleotide
  Antisense strand to SEQ ID NO: 2255324
uuguugguaaacaaccaac

SEQ ID NO: 2255326 - RNA, 19 nt, Artificial Sequence
  Description of Artificial Sequence: Synthetic oligonucleotide
  Sense strand starting at position 3189 of SEQ ID NO: 1884300
guuguuuaccaacaaagau

SEQ ID NO: 2255327 - RNA, 19 nt, Artificial Sequence
  Description of Artificial Sequence: Synthetic oligonucleotide
  Antisense strand to SEQ ID NO: 2255326
aucuuuguugguaaacaac

SEQ ID NO: 2255328 - RNA, 19 nt, Artificial Sequence
  Description of Artificial Sequence: Synthetic oligonucleotide
  Sense strand starting at position 3203 of SEQ ID NO: 1884300
aagauaaguggauggaguu

SEQ ID NO: 2255329 - RNA, 19 nt, Artificial Sequence
  Description of Artificial Sequence: Synthetic oligonucleotide
  Antisense strand to SEQ ID NO: 2255328
aacuccauccacuuaucuu

SEQ ID NO: 2255330 - RNA, 19 nt, Artificial Sequence
  Description of Artificial Sequence: Synthetic oligonucleotide
  Sense strand starting at position 3204 of SEQ ID NO: 1884300
agauaaguggauggaguua

SEQ ID NO: 2255331 - RNA, 19 nt, Artificial Sequence
  Description of Artificial Sequence: Synthetic oligonucleotide
  Antisense strand to SEQ ID NO: 2255330
uaacuccauccacuuaucu

SEQ ID NO: 2255332 - RNA, 19 nt, Artificial Sequence
  Description of Artificial Sequence: Synthetic oligonucleotide
  Sense strand starting at position 3219 of SEQ ID NO: 1884300
guuacauaauccucuguac

SEQ ID NO: 2255333 - RNA, 19 nt, Artificial Sequence
  Description of Artificial Sequence: Synthetic oligonucleotide
  Antisense strand to SEQ ID NO: 2255332
guacagaggauuauguaac

SEQ ID NO: 2255334 - RNA, 19 nt, Artificial Sequence
  Description of Artificial Sequence: Synthetic oligonucleotide
  Sense strand starting at position 3295 of SEQ ID NO: 1884300
ggagcacuguuccuggcau

SEQ ID NO: 2255335 - RNA, 19 nt, Artificial Sequence
  Description of Artificial Sequence: Synthetic oligonucleotide
  Antisense strand to SEQ ID NO: 2255334
augccaggaacagugcucc

SEQ ID NO: 2255336 - RNA, 19 nt, Artificial Sequence
  Description of Artificial Sequence: Synthetic oligonucleotide
  Sense strand starting at position 3463 of SEQ ID NO: 1884300
acagacuugugccuaaaug

SEQ ID NO: 2255337 - RNA, 19 nt, Artificial Sequence
  Description of Artificial Sequence: Synthetic oligonucleotide
  Antisense strand to SEQ ID NO: 2255336
cauuuaggcacaagucugu

SEQ ID NO: 2255338 - RNA, 19 nt, Artificial Sequence
  Description of Artificial Sequence: Synthetic oligonucleotide
  Sense strand starting at position 3793 of SEQ ID NO: 1884300
uucuguaggccuugaaugu

SEQ ID NO: 2255339 - RNA, 19 nt, Artificial Sequence
  Description of Artificial Sequence: Synthetic oligonucleotide
  Antisense strand to SEQ ID NO: 2255338
acauucaaggccuacagaa

SEQ ID NO: 2255340 - RNA, 19 nt, Artificial Sequence
  Description of Artificial Sequence: Synthetic oligonucleotide
  Sense strand starting at position 3794 of SEQ ID NO: 1884300
ucuguaggccuugaauguu

SEQ ID NO: 2255341 - RNA, 19 nt, Artificial Sequence
  Description of Artificial Sequence: Synthetic oligonucleotide
  Antisense strand to SEQ ID NO: 2255340
aacauucaaggccuacaga

SEQ ID NO: 2255342 - RNA, 19 nt, Artificial Sequence
  Description of Artificial Sequence: Synthetic oligonucleotide
  Sense strand starting at position 3917 of SEQ ID NO: 1884300
caggcagguucuuuggaua

SEQ ID NO: 2255343 - RNA, 19 nt, Artificial Sequence
  Description of Artificial Sequence: Synthetic oligonucleotide
  Antisense strand to SEQ ID NO: 2255342
uauccaaagaaccugccug

SEQ ID NO: 2255344 - RNA, 19 nt, Artificial Sequence
  Description of Artificial Sequence: Synthetic oligonucleotide
  Sense strand starting at position 42 of SEQ ID NO: 1884301
ucuucugauuccucgaaga

SEQ ID NO: 2255345 - RNA, 19 nt, Artificial Sequence
  Description of Artificial Sequence: Synthetic oligonucleotide
  Antisense strand to SEQ ID NO: 2255344
ucuucgaggaaucagaaga

SEQ ID NO: 2255346 - RNA, 19 nt, Artificial Sequence
  Description of Artificial Sequence: Synthetic oligonucleotide
  Sense strand starting at position 44 of SEQ ID NO: 1884301
uucugauuccucgaagaca

SEQ ID NO: 2255347 - RNA, 19 nt, Artificial Sequence
  Description of Artificial Sequence: Synthetic oligonucleotide
  Antisense strand to SEQ ID NO: 2255346
ugucuucgaggaaucagaa

SEQ ID NO: 2255348 - RNA, 19 nt, Artificial Sequence
  Description of Artificial Sequence: Synthetic oligonucleotide
  Sense strand starting at position 47 of SEQ ID NO: 1884301
ugauuccucgaagacaugu

SEQ ID NO: 2255349 - RNA, 19 nt, Artificial Sequence
  Description of Artificial Sequence: Synthetic oligonucleotide
  Antisense strand to SEQ ID NO: 2255348
acaugucuucgaggaauca

SEQ ID NO: 2255350 - RNA, 19 nt, Artificial Sequence
  Description of Artificial Sequence: Synthetic oligonucleotide
  Sense strand starting at position 240 of SEQ ID NO: 1884301
ugcucuugugcguucucaa

SEQ ID NO: 2255351 - RNA, 19 nt, Artificial Sequence
  Description of Artificial Sequence: Synthetic oligonucleotide
  Antisense strand to SEQ ID NO: 2255350
uugagaacgcacaagagca

SEQ ID NO: 2255352 - RNA, 19 nt, Artificial Sequence
  Description of Artificial Sequence: Synthetic oligonucleotide
  Sense strand starting at position 241 of SEQ ID NO: 1884301
gcucuugugcguucucaag

SEQ ID NO: 2255353 - RNA, 19 nt, Artificial Sequence
  Description of Artificial Sequence: Synthetic oligonucleotide
  Antisense strand to SEQ ID NO: 2255352
cuugagaacgcacaagagc

SEQ ID NO: 2255354 - RNA, 19 nt, Artificial Sequence
  Description of Artificial Sequence: Synthetic oligonucleotide
  Sense strand starting at position 402 of SEQ ID NO: 1884301
auauuaggugcugaaauca

SEQ ID NO: 2255355 - RNA, 19 nt, Artificial Sequence
  Description of Artificial Sequence: Synthetic oligonucleotide
  Antisense strand to SEQ ID NO: 2255354
ugauuucagcaccuaauau

SEQ ID NO: 2255356 - RNA, 19 nt, Artificial Sequence
  Description of Artificial Sequence: Synthetic oligonucleotide
  Sense strand starting at position 458 of SEQ ID NO: 1884301
aaaggauuacucuggguac

SEQ ID NO: 2255357 - RNA, 19 nt, Artificial Sequence
  Description of Artificial Sequence: Synthetic oligonucleotide
  Antisense strand to SEQ ID NO: 2255356
guacccagaguaauccuuu

SEQ ID NO: 2255358 - RNA, 19 nt, Artificial Sequence
  Description of Artificial Sequence: Synthetic oligonucleotide
  Sense strand starting at position 461 of SEQ ID NO: 1884301
ggauuacucuggguacugu

SEQ ID NO: 2255359 - RNA, 19 nt, Artificial Sequence
  Description of Artificial Sequence: Synthetic oligonucleotide
  Antisense strand to SEQ ID NO: 2255358
acaguacccagaguaaucc

SEQ ID NO: 2255360 - RNA, 19 nt, Artificial Sequence
  Description of Artificial Sequence: Synthetic oligonucleotide
  Sense strand starting at position 471 of SEQ ID NO: 1884301
ggguacuguguugagaaca

SEQ ID NO: 2255361 - RNA, 19 nt, Artificial Sequence
  Description of Artificial Sequence: Synthetic oligonucleotide
  Antisense strand to SEQ ID NO: 2255360
uguucucaacacaguaccc

SEQ ID NO: 2255362 - RNA, 19 nt, Artificial Sequence
  Description of Artificial Sequence: Synthetic oligonucleotide
  Sense strand starting at position 518 of SEQ ID NO: 1884301
cuauuaaaguagucaagga

SEQ ID NO: 2255363 - RNA, 19 nt, Artificial Sequence
  Description of Artificial Sequence: Synthetic oligonucleotide
  Antisense strand to SEQ ID NO: 2255362
uccuugacuacuuuaauag

SEQ ID NO: 2255364 - RNA, 19 nt, Artificial Sequence
  Description of Artificial Sequence: Synthetic oligonucleotide
  Sense strand starting at position 545 of SEQ ID NO: 1884301
ggugguggcccagauuaac

SEQ ID NO: 2255365 - RNA, 19 nt, Artificial Sequence
  Description of Artificial Sequence: Synthetic oligonucleotide
  Antisense strand to SEQ ID NO: 2255364
guuaaucugggccaccacc

SEQ ID NO: 2255366 - RNA, 19 nt, Artificial Sequence
  Description of Artificial Sequence: Synthetic oligonucleotide
  Sense strand starting at position 623 of SEQ ID NO: 1884301
ugugacagaacuuggugaa

SEQ ID NO: 2255367 - RNA, 19 nt, Artificial Sequence
  Description of Artificial Sequence: Synthetic oligonucleotide
  Antisense strand to SEQ ID NO: 2255366
uucaccaaguucugucaca

SEQ ID NO: 2255368 - RNA, 19 nt, Artificial Sequence
  Description of Artificial Sequence: Synthetic oligonucleotide
  Sense strand starting at position 624 of SEQ ID NO: 1884301
gugacagaacuuggugaaa

SEQ ID NO: 2255369 - RNA, 19 nt, Artificial Sequence
  Description of Artificial Sequence: Synthetic oligonucleotide
  Antisense strand to SEQ ID NO: 2255368
uuucaccaaguucugucac

SEQ ID NO: 2255370 - RNA, 19 nt, Artificial Sequence
  Description of Artificial Sequence: Synthetic oligonucleotide
  Sense strand starting at position 674 of SEQ ID NO: 1884301
ucaagucuugcucaugacu

SEQ ID NO: 2255371 - RNA, 19 nt, Artificial Sequence
  Description of Artificial Sequence: Synthetic oligonucleotide
  Antisense strand to SEQ ID NO: 2255370
agucaugagcaagacuuga

SEQ ID NO: 2255372 - RNA, 19 nt, Artificial Sequence
  Description of Artificial Sequence: Synthetic oligonucleotide
  Sense strand starting at position 785 of SEQ ID NO: 1884301
aaucuauagguuuggaacu

SEQ ID NO: 2255373 - RNA, 19 nt, Artificial Sequence
  Description of Artificial Sequence: Synthetic oligonucleotide
  Antisense strand to SEQ ID NO: 2255372
aguuccaaaccuauagauu

SEQ ID NO: 2255374 - RNA, 19 nt, Artificial Sequence
  Description of Artificial Sequence: Synthetic oligonucleotide
  Sense strand starting at position 865 of SEQ ID NO: 1884301
aaagaagucugggcuggau

SEQ ID NO: 2255375 - RNA, 19 nt, Artificial Sequence
  Description of Artificial Sequence: Synthetic oligonucleotide
  Antisense strand to SEQ ID NO: 2255374
auccagcccagacuucuuu

SEQ ID NO: 2255376 - RNA, 19 nt, Artificial Sequence
  Description of Artificial Sequence: Synthetic oligonucleotide
  Sense strand starting at position 867 of SEQ ID NO: 1884301
agaagucugggcuggauau

SEQ ID NO: 2255377 - RNA, 19 nt, Artificial Sequence
  Description of Artificial Sequence: Synthetic oligonucleotide
  Antisense strand to SEQ ID NO: 2255376
auauccagcccagacuucu

SEQ ID NO: 2255378 - RNA, 19 nt, Artificial Sequence
  Description of Artificial Sequence: Synthetic oligonucleotide
  Sense strand starting at position 868 of SEQ ID NO: 1884301
gaagucugggcuggauaua

SEQ ID NO: 2255379 - RNA, 19 nt, Artificial Sequence
  Description of Artificial Sequence: Synthetic oligonucleotide
  Antisense strand to SEQ ID NO: 2255378
uauauccagcccagacuuc

SEQ ID NO: 2255380 - RNA, 19 nt, Artificial Sequence
  Description of Artificial Sequence: Synthetic oligonucleotide
  Sense strand starting at position 959 of SEQ ID NO: 1884301
aacagauacugagagaaga

SEQ ID NO: 2255381 - RNA, 19 nt, Artificial Sequence
  Description of Artificial Sequence: Synthetic oligonucleotide
  Antisense strand to SEQ ID NO: 2255380
ucuucucucaguaucuguu

SEQ ID NO: 2255382 - RNA, 19 nt, Artificial Sequence
  Description of Artificial Sequence: Synthetic oligonucleotide
  Sense strand starting at position 1092 of SEQ ID NO: 1884301
aggagagugaguugacaua

SEQ ID NO: 2255383 - RNA, 19 nt, Artificial Sequence
  Description of Artificial Sequence: Synthetic oligonucleotide
  Antisense strand to SEQ ID NO: 2255382
uaugucaacucacucuccu

SEQ ID NO: 2255384 - RNA, 19 nt, Artificial Sequence
  Description of Artificial Sequence: Synthetic oligonucleotide
  Sense strand starting at position 1239 of SEQ ID NO: 1884301
aagaaugaaugggaaguaa

SEQ ID NO: 2255385 - RNA, 19 nt, Artificial Sequence
  Description of Artificial Sequence: Synthetic oligonucleotide
  Antisense strand to SEQ ID NO: 2255384
uuacuucccauucauucuu

SEQ ID NO: 2255386 - RNA, 19 nt, Artificial Sequence
  Description of Artificial Sequence: Synthetic oligonucleotide
  Sense strand starting at position 1363 of SEQ ID NO: 1884301
aggaauuggcagugggaaa

SEQ ID NO: 2255387 - RNA, 19 nt, Artificial Sequence
  Description of Artificial Sequence: Synthetic oligonucleotide
  Antisense strand to SEQ ID NO: 2255386
uuucccacugccaauuccu

SEQ ID NO: 2255388 - RNA, 19 nt, Artificial Sequence
  Description of Artificial Sequence: Synthetic oligonucleotide
  Sense strand starting at position 1695 of SEQ ID NO: 1884301
ugcgaugguggguaugaga

SEQ ID NO: 2255389 - RNA, 19 nt, Artificial Sequence
  Description of Artificial Sequence: Synthetic oligonucleotide
  Antisense strand to SEQ ID NO: 2255388
ucucauacccaccaucgca

SEQ ID NO: 2255390 - RNA, 19 nt, Artificial Sequence
  Description of Artificial Sequence: Synthetic oligonucleotide
  Sense strand starting at position 1940 of SEQ ID NO: 1884301
cggcuucuccaucacaaca

SEQ ID NO: 2255391 - RNA, 19 nt, Artificial Sequence
  Description of Artificial Sequence: Synthetic oligonucleotide
  Antisense strand to SEQ ID NO: 2255390
uguugugauggagaagccg

SEQ ID NO: 2255392 - RNA, 19 nt, Artificial Sequence
  Description of Artificial Sequence: Synthetic oligonucleotide
  Sense strand starting at position 2339 of SEQ ID NO: 1884301
gaaggauucccgggaggca

SEQ ID NO: 2255393 - RNA, 19 nt, Artificial Sequence
  Description of Artificial Sequence: Synthetic oligonucleotide
  Antisense strand to SEQ ID NO: 2255392
ugccucccgggaauccuuc

SEQ ID NO: 2255394 - RNA, 19 nt, Artificial Sequence
  Description of Artificial Sequence: Synthetic oligonucleotide
  Sense strand starting at position 2481 of SEQ ID NO: 1884301
aaccguuaacgcgcauuaa

SEQ ID NO: 2255395 - RNA, 19 nt, Artificial Sequence
  Description of Artificial Sequence: Synthetic oligonucleotide
  Antisense strand to SEQ ID NO: 2255394
uuaaugcgcguuaacgguu

SEQ ID NO: 2255396 - RNA, 19 nt, Artificial Sequence
  Description of Artificial Sequence: Synthetic oligonucleotide
  Sense strand starting at position 2484 of SEQ ID NO: 1884301
cguuaacgcgcauuaaucu

SEQ ID NO: 2255397 - RNA, 19 nt, Artificial Sequence
  Description of Artificial Sequence: Synthetic oligonucleotide
  Antisense strand to SEQ ID NO: 2255396
agauuaaugcgcguuaacg

SEQ ID NO: 2255398 - RNA, 19 nt, Artificial Sequence
  Description of Artificial Sequence: Synthetic oligonucleotide
  Sense strand starting at position 2549 of SEQ ID NO: 1884301
agaggcugaggcuaagauu

SEQ ID NO: 2255399 - RNA, 19 nt, Artificial Sequence
  Description of Artificial Sequence: Synthetic oligonucleotide
  Antisense strand to SEQ ID NO: 2255398
aaucuuagccucagccucu

SEQ ID NO: 2255400 - RNA, 19 nt, Artificial Sequence
  Description of Artificial Sequence: Synthetic oligonucleotide
  Sense strand starting at position 2594 of SEQ ID NO: 1884301
gucacaguuagugaugaau

SEQ ID NO: 2255401 - RNA, 19 nt, Artificial Sequence
  Description of Artificial Sequence: Synthetic oligonucleotide
  Antisense strand to SEQ ID NO: 2255400
auucaucacuaacugugac

SEQ ID NO: 2255402 - RNA, 19 nt, Artificial Sequence
  Description of Artificial Sequence: Synthetic oligonucleotide
  Sense strand starting at position 2631 of SEQ ID NO: 1884301
guuucuugacacugaaaua

SEQ ID NO: 2255403 - RNA, 19 nt, Artificial Sequence
  Description of Artificial Sequence: Synthetic oligonucleotide
  Antisense strand to SEQ ID NO: 2255402
uauuucagugucaagaaac

SEQ ID NO: 2255404 - RNA, 19 nt, Artificial Sequence
  Description of Artificial Sequence: Synthetic oligonucleotide
  Sense strand starting at position 2780 of SEQ ID NO: 1884301
gugcaauacuuacuacaga

SEQ ID NO: 2255405 - RNA, 19 nt, Artificial Sequence
  Description of Artificial Sequence: Synthetic oligonucleotide
  Antisense strand to SEQ ID NO: 2255404
ucuguaguaaguauugcac

SEQ ID NO: 2255406 - RNA, 19 nt, Artificial Sequence
  Description of Artificial Sequence: Synthetic oligonucleotide
  Sense strand starting at position 2828 of SEQ ID NO: 1884301
uggucagaucagugaccca

SEQ ID NO: 2255407 - RNA, 19 nt, Artificial Sequence
  Description of Artificial Sequence: Synthetic oligonucleotide
  Antisense strand to SEQ ID NO: 2255406
ugggucacugaucugacca

SEQ ID NO: 2255408 - RNA, 19 nt, Artificial Sequence
  Description of Artificial Sequence: Synthetic oligonucleotide
  Sense strand starting at position 3191 of SEQ ID NO: 1884301
ugagauuacaggcgucaga

SEQ ID NO: 2255409 - RNA, 19 nt, Artificial Sequence
  Description of Artificial Sequence: Synthetic oligonucleotide
  Antisense strand to SEQ ID NO: 2255408
ucugacgccuguaaucuca

SEQ ID NO: 2255410 - RNA, 19 nt, Artificial Sequence
  Description of Artificial Sequence: Synthetic oligonucleotide
  Sense strand starting at position 3677 of SEQ ID NO: 1884301
ugaccuggguucuugaaag

SEQ ID NO: 2255411 - RNA, 19 nt, Artificial Sequence
  Description of Artificial Sequence: Synthetic oligonucleotide
  Antisense strand to SEQ ID NO: 2255410
cuuucaagaacccagguca

SEQ ID NO: 2255412 - RNA, 19 nt, Artificial Sequence
  Description of Artificial Sequence: Synthetic oligonucleotide
  Sense strand starting at position 3766 of SEQ ID NO: 1884301
aauuacuauguaugaggua

SEQ ID NO: 2255413 - RNA, 19 nt, Artificial Sequence
  Description of Artificial Sequence: Synthetic oligonucleotide
  Antisense strand to SEQ ID NO: 2255412
uaccucauacauaguaauu

SEQ ID NO: 2255414 - RNA, 19 nt, Artificial Sequence
  Description of Artificial Sequence: Synthetic oligonucleotide
  Sense strand starting at position 3877 of SEQ ID NO: 1884301
uguaauuaggaaugugaug

SEQ ID NO: 2255415 - RNA, 19 nt, Artificial Sequence
  Description of Artificial Sequence: Synthetic oligonucleotide
  Antisense strand to SEQ ID NO: 2255414
caucacauuccuaauuaca

SEQ ID NO: 2255416 - RNA, 19 nt, Artificial Sequence
  Description of Artificial Sequence: Synthetic oligonucleotide
  Sense strand starting at position 3889 of SEQ ID NO: 1884301
ugugaugagugucuugaag

SEQ ID NO: 2255417 - RNA, 19 nt, Artificial Sequence
  Description of Artificial Sequence: Synthetic oligonucleotide
  Antisense strand to SEQ ID NO: 2255416
cuucaagacacucaucaca

SEQ ID NO: 2255418 - RNA, 19 nt, Artificial Sequence
  Description of Artificial Sequence: Synthetic oligonucleotide
  Sense strand starting at position 3895 of SEQ ID NO: 1884301
gagugucuugaaggagaug

SEQ ID NO: 2255419 - RNA, 19 nt, Artificial Sequence
  Description of Artificial Sequence: Synthetic oligonucleotide
  Antisense strand to SEQ ID NO: 2255418
caucuccuucaagacacuc

SEQ ID NO: 2255420 - RNA, 19 nt, Artificial Sequence
  Description of Artificial Sequence: Synthetic oligonucleotide
  Sense strand starting at position 3907 of SEQ ID NO: 1884301
ggagauguaccgggagcua

SEQ ID NO: 2255421 - RNA, 19 nt, Artificial Sequence
  Description of Artificial Sequence: Synthetic oligonucleotide
  Antisense strand to SEQ ID NO: 2255420
uagcucccgguacaucucc

SEQ ID NO: 2255422 - RNA, 19 nt, Artificial Sequence
  Description of Artificial Sequence: Synthetic oligonucleotide
  Sense strand starting at position 3976 of SEQ ID NO: 1884301
gugacaauucagugaggga

SEQ ID NO: 2255423 - RNA, 19 nt, Artificial Sequence
  Description of Artificial Sequence: Synthetic oligonucleotide
  Antisense strand to SEQ ID NO: 2255422
ucccucacugaauugucac

SEQ ID NO: 2255424 - RNA, 19 nt, Artificial Sequence
  Description of Artificial Sequence: Synthetic oligonucleotide
  Sense strand starting at position 219 of SEQ ID NO: 1884302
agcagaacauccguauaca

SEQ ID NO: 2255425 - RNA, 19 nt, Artificial Sequence
  Description of Artificial Sequence: Synthetic oligonucleotide
  Antisense strand to SEQ ID NO: 2255424
uguauacggauguucugcu

SEQ ID NO: 2255426 - RNA, 19 nt, Artificial Sequence
  Description of Artificial Sequence: Synthetic oligonucleotide
  Sense strand starting at position 220 of SEQ ID NO: 1884302
gcagaacauccguauacau

SEQ ID NO: 2255427 - RNA, 19 nt, Artificial Sequence
  Description of Artificial Sequence: Synthetic oligonucleotide
  Antisense strand to SEQ ID NO: 2255426
auguauacggauguucugc

SEQ ID NO: 2255428 - RNA, 19 nt, Artificial Sequence
  Description of Artificial Sequence: Synthetic oligonucleotide
  Sense strand starting at position 434 of SEQ ID NO: 1884302
cacgacuguuaauagacua

SEQ ID NO: 2255429 - RNA, 19 nt, Artificial Sequence
  Description of Artificial Sequence: Synthetic oligonucleotide
  Antisense strand to SEQ ID NO: 2255428
uagucuauuaacagucgug

SEQ ID NO: 2255430 - RNA, 19 nt, Artificial Sequence
  Description of Artificial Sequence: Synthetic oligonucleotide
  Sense strand starting at position 517 of SEQ ID NO: 1884302
aaagcuauggugugggauu

SEQ ID NO: 2255431 - RNA, 19 nt, Artificial Sequence
  Description of Artificial Sequence: Synthetic oligonucleotide
  Antisense strand to SEQ ID NO: 2255430
aaucccacaccauagcuuu

SEQ ID NO: 2255432 - RNA, 19 nt, Artificial Sequence
  Description of Artificial Sequence: Synthetic oligonucleotide
  Sense strand starting at position 518 of SEQ ID NO: 1884302
aagcuauggugugggauuu

SEQ ID NO: 2255433 - RNA, 19 nt, Artificial Sequence
  Description of Artificial Sequence: Synthetic oligonucleotide
  Antisense strand to SEQ ID NO: 2255432
aaaucccacaccauagcuu

SEQ ID NO: 2255434 - RNA, 19 nt, Artificial Sequence
  Description of Artificial Sequence: Synthetic oligonucleotide
  Sense strand starting at position 561 of SEQ ID NO: 1884302
ccaggagagccugguucuu

SEQ ID NO: 2255435 - RNA, 19 nt, Artificial Sequence
  Description of Artificial Sequence: Synthetic oligonucleotide
  Antisense strand to SEQ ID NO: 2255434
aagaaccaggcucuccugg

SEQ ID NO: 2255436 - RNA, 19 nt, Artificial Sequence
  Description of Artificial Sequence: Synthetic oligonucleotide
  Sense strand starting at position 652 of SEQ ID NO: 1884302
acaaaugacuuguauggau

SEQ ID NO: 2255437 - RNA, 19 nt, Artificial Sequence
  Description of Artificial Sequence: Synthetic oligonucleotide
  Antisense strand to SEQ ID NO: 2255436
auccauacaagucauuugu

SEQ ID NO: 2255438 - RNA, 19 nt, Artificial Sequence
  Description of Artificial Sequence: Synthetic oligonucleotide
  Sense strand starting at position 655 of SEQ ID NO: 1884302
aaugacuuguauggauaau

SEQ ID NO: 2255439 - RNA, 19 nt, Artificial Sequence
  Description of Artificial Sequence: Synthetic oligonucleotide
  Antisense strand to SEQ ID NO: 2255438
auuauccauacaagucauu

SEQ ID NO: 2255440 - RNA, 19 nt, Artificial Sequence
  Description of Artificial Sequence: Synthetic oligonucleotide
  Sense strand starting at position 702 of SEQ ID NO: 1884302
gggcaagcaucguuaagag

SEQ ID NO: 2255441 - RNA, 19 nt, Artificial Sequence
  Description of Artificial Sequence: Synthetic oligonucleotide
  Antisense strand to SEQ ID NO: 2255440
cucuuaacgaugcuugccc

SEQ ID NO: 2255442 - RNA, 19 nt, Artificial Sequence
  Description of Artificial Sequence: Synthetic oligonucleotide
  Sense strand starting at position 719 of SEQ ID NO: 1884302
agagcucuuccagacaacu

SEQ ID NO: 2255443 - RNA, 19 nt, Artificial Sequence
  Description of Artificial Sequence: Synthetic oligonucleotide
  Antisense strand to SEQ ID NO: 2255442
aguugucuggaagagcucu

SEQ ID NO: 2255444 - RNA, 19 nt, Artificial Sequence
  Description of Artificial Sequence: Synthetic oligonucleotide
  Sense strand starting at position 1241 of SEQ ID NO: 1884302
aaaugaaaccgugagcucu

SEQ ID NO: 2255445 - RNA, 19 nt, Artificial Sequence
  Description of Artificial Sequence: Synthetic oligonucleotide
  Antisense strand to SEQ ID NO: 2255444
agagcucacgguuucauuu

SEQ ID NO: 2255446 - RNA, 19 nt, Artificial Sequence
  Description of Artificial Sequence: Synthetic oligonucleotide
  Sense strand starting at position 1251 of SEQ ID NO: 1884302
gugagcucucaucaaaguc

SEQ ID NO: 2255447 - RNA, 19 nt, Artificial Sequence
  Description of Artificial Sequence: Synthetic oligonucleotide
  Antisense strand to SEQ ID NO: 2255446
gacuuugaugagagcucac

SEQ ID NO: 2255448 - RNA, 19 nt, Artificial Sequence
  Description of Artificial Sequence: Synthetic oligonucleotide
  Sense strand starting at position 1395 of SEQ ID NO: 1884302
cgaucuaaucuuggaagca

SEQ ID NO: 2255449 - RNA, 19 nt, Artificial Sequence
  Description of Artificial Sequence: Synthetic oligonucleotide
  Antisense strand to SEQ ID NO: 2255448
ugcuuccaagauuagaucg

SEQ ID NO: 2255450 - RNA, 19 nt, Artificial Sequence
  Description of Artificial Sequence: Synthetic oligonucleotide
  Sense strand starting at position 1441 of SEQ ID NO: 1884302
uuaagagaauccuguagag

SEQ ID NO: 2255451 - RNA, 19 nt, Artificial Sequence
  Description of Artificial Sequence: Synthetic oligonucleotide
  Antisense strand to SEQ ID NO: 2255450
cucuacaggauucucuuaa

SEQ ID NO: 2255452 - RNA, 19 nt, Artificial Sequence
  Description of Artificial Sequence: Synthetic oligonucleotide
  Sense strand starting at position 1476 of SEQ ID NO: 1884302
gaauuaacgugagccugaa

SEQ ID NO: 2255453 - RNA, 19 nt, Artificial Sequence
  Description of Artificial Sequence: Synthetic oligonucleotide
  Antisense strand to SEQ ID NO: 2255452
uucaggcucacguuaauuc

SEQ ID NO: 2255454 - RNA, 19 nt, Artificial Sequence
  Description of Artificial Sequence: Synthetic oligonucleotide
  Sense strand starting at position 1569 of SEQ ID NO: 1884302
cgcggucucccuggugaaa

SEQ ID NO: 2255455 - RNA, 19 nt, Artificial Sequence
  Description of Artificial Sequence: Synthetic oligonucleotide
  Antisense strand to SEQ ID NO: 2255454
uuucaccagggagaccgcg

SEQ ID NO: 2255456 - RNA, 19 nt, Artificial Sequence
  Description of Artificial Sequence: Synthetic oligonucleotide
  Sense strand starting at position 1693 of SEQ ID NO: 1884302
ggcgggaagcgcuuucgaa

SEQ ID NO: 2255457 - RNA, 19 nt, Artificial Sequence
  Description of Artificial Sequence: Synthetic oligonucleotide
  Antisense strand to SEQ ID NO: 2255456
uucgaaagcgcuucccgcc

SEQ ID NO: 2255458 - RNA, 19 nt, Artificial Sequence
  Description of Artificial Sequence: Synthetic oligonucleotide
  Sense strand starting at position 1694 of SEQ ID NO: 1884302
gcgggaagcgcuuucgaaa

SEQ ID NO: 2255459 - RNA, 19 nt, Artificial Sequence
  Description of Artificial Sequence: Synthetic oligonucleotide
  Antisense strand to SEQ ID NO: 2255458
uuucgaaagcgcuucccgc

SEQ ID NO: 2255460 - RNA, 19 nt, Artificial Sequence
  Description of Artificial Sequence: Synthetic oligonucleotide
  Sense strand starting at position 2095 of SEQ ID NO: 1884302
cggcaaggaugauugaauu

SEQ ID NO: 2255461 - RNA, 19 nt, Artificial Sequence
  Description of Artificial Sequence: Synthetic oligonucleotide
  Antisense strand to SEQ ID NO: 2255460
aauucaaucauccuugccg

SEQ ID NO: 2255462 - RNA, 19 nt, Artificial Sequence
  Description of Artificial Sequence: Synthetic oligonucleotide
  Sense strand starting at position 2202 of SEQ ID NO: 1884302
ugcguuucugcccuuagaa

SEQ ID NO: 2255463 - RNA, 19 nt, Artificial Sequence
  Description of Artificial Sequence: Synthetic oligonucleotide
  Antisense strand to SEQ ID NO: 2255462
uucuaagggcagaaacgca

SEQ ID NO: 2255464 - RNA, 19 nt, Artificial Sequence
  Description of Artificial Sequence: Synthetic oligonucleotide
  Sense strand starting at position 2204 of SEQ ID NO: 1884302
cguuucugcccuuagaaga

SEQ ID NO: 2255465 - RNA, 19 nt, Artificial Sequence
  Description of Artificial Sequence: Synthetic oligonucleotide
  Antisense strand to SEQ ID NO: 2255464
ucuucuaagggcagaaacg

SEQ ID NO: 2255466 - RNA, 19 nt, Artificial Sequence
  Description of Artificial Sequence: Synthetic oligonucleotide
  Sense strand starting at position 2221 of SEQ ID NO: 1884302
gaucuuacauaugagaagu

SEQ ID NO: 2255467 - RNA, 19 nt, Artificial Sequence
  Description of Artificial Sequence: Synthetic oligonucleotide
  Antisense strand to SEQ ID NO: 2255466
acuucucauauguaagauc

SEQ ID NO: 2255468 - RNA, 19 nt, Artificial Sequence
  Description of Artificial Sequence: Synthetic oligonucleotide
  Sense strand starting at position 2223 of SEQ ID NO: 1884302
ucuuacauaugagaaguca

SEQ ID NO: 2255469 - RNA, 19 nt, Artificial Sequence
  Description of Artificial Sequence: Synthetic oligonucleotide
  Antisense strand to SEQ ID NO: 2255468
ugacuucucauauguaaga

SEQ ID NO: 2255470 - RNA, 19 nt, Artificial Sequence
  Description of Artificial Sequence: Synthetic oligonucleotide
  Sense strand starting at position 2270 of SEQ ID NO: 1884302
guaauauuaaucgguggca

SEQ ID NO: 2255471 - RNA, 19 nt, Artificial Sequence
  Description of Artificial Sequence: Synthetic oligonucleotide
  Antisense strand to SEQ ID NO: 2255470
ugccaccgauuaauauuac

SEQ ID NO: 2255472 - RNA, 19 nt, Artificial Sequence
  Description of Artificial Sequence: Synthetic oligonucleotide
  Sense strand starting at position 2272 of SEQ ID NO: 1884302
aauauuaaucgguggcacu

SEQ ID NO: 2255473 - RNA, 19 nt, Artificial Sequence
  Description of Artificial Sequence: Synthetic oligonucleotide
  Antisense strand to SEQ ID NO: 2255472
agugccaccgauuaauauu

SEQ ID NO: 2255474 - RNA, 19 nt, Artificial Sequence
  Description of Artificial Sequence: Synthetic oligonucleotide
  Sense strand starting at position 2273 of SEQ ID NO: 1884302
auauuaaucgguggcacua

SEQ ID NO: 2255475 - RNA, 19 nt, Artificial Sequence
  Description of Artificial Sequence: Synthetic oligonucleotide
  Antisense strand to SEQ ID NO: 2255474
uagugccaccgauuaauau

SEQ ID NO: 2255476 - RNA, 19 nt, Artificial Sequence
  Description of Artificial Sequence: Synthetic oligonucleotide
  Sense strand starting at position 2439 of SEQ ID NO: 1884302
accugauuauguccaguau

SEQ ID NO: 2255477 - RNA, 19 nt, Artificial Sequence
  Description of Artificial Sequence: Synthetic oligonucleotide
  Antisense strand to SEQ ID NO: 2255476
auacuggacauaaucaggu

SEQ ID NO: 2255478 - RNA, 19 nt, Artificial Sequence
  Description of Artificial Sequence: Synthetic oligonucleotide
  Sense strand starting at position 2440 of SEQ ID NO: 1884302
ccugauuauguccaguauc

SEQ ID NO: 2255479 - RNA, 19 nt, Artificial Sequence
  Description of Artificial Sequence: Synthetic oligonucleotide
  Antisense strand to SEQ ID NO: 2255478
gauacuggacauaaucagg

SEQ ID NO: 2255480 - RNA, 19 nt, Artificial Sequence
  Description of Artificial Sequence: Synthetic oligonucleotide
  Sense strand starting at position 2484 of SEQ ID NO: 1884302
cacguacgcuuacugauaa

SEQ ID NO: 2255481 - RNA, 19 nt, Artificial Sequence
  Description of Artificial Sequence: Synthetic oligonucleotide
  Antisense strand to SEQ ID NO: 2255480
uuaucaguaagcguacgug

SEQ ID NO: 2255482 - RNA, 19 nt, Artificial Sequence
  Description of Artificial Sequence: Synthetic oligonucleotide
  Sense strand starting at position 3580 of SEQ ID NO: 1884302
gguauaagaugaucccauu

SEQ ID NO: 2255483 - RNA, 19 nt, Artificial Sequence
  Description of Artificial Sequence: Synthetic oligonucleotide
  Antisense strand to SEQ ID NO: 2255482
aaugggaucaucuuauacc

SEQ ID NO: 2255484 - RNA, 19 nt, Artificial Sequence
  Description of Artificial Sequence: Synthetic oligonucleotide
  Sense strand starting at position 3583 of SEQ ID NO: 1884302
auaagaugaucccauuaug

SEQ ID NO: 2255485 - RNA, 19 nt, Artificial Sequence
  Description of Artificial Sequence: Synthetic oligonucleotide
  Antisense strand to SEQ ID NO: 2255484
cauaaugggaucaucuuau

SEQ ID NO: 2255486 - RNA, 19 nt, Artificial Sequence
  Description of Artificial Sequence: Synthetic oligonucleotide
  Sense strand starting at position 3622 of SEQ ID NO: 1884302
aaacaaaguuaugugugua

SEQ ID NO: 2255487 - RNA, 19 nt, Artificial Sequence
  Description of Artificial Sequence: Synthetic oligonucleotide
  Antisense strand to SEQ ID NO: 2255486
uacacacauaacuuuguuu

SEQ ID NO: 2255488 - RNA, 19 nt, Artificial Sequence
  Description of Artificial Sequence: Synthetic oligonucleotide
  Sense strand starting at position 3625 of SEQ ID NO: 1884302
caaaguuauguguguaugu

SEQ ID NO: 2255489 - RNA, 19 nt, Artificial Sequence
  Description of Artificial Sequence: Synthetic oligonucleotide
  Antisense strand to SEQ ID NO: 2255488
acauacacacauaacuuug

SEQ ID NO: 2255490 - RNA, 19 nt, Artificial Sequence
  Description of Artificial Sequence: Synthetic oligonucleotide
  Sense strand starting at position 3627 of SEQ ID NO: 1884302
aaguuauguguguaugugu

SEQ ID NO: 2255491 - RNA, 19 nt, Artificial Sequence
  Description of Artificial Sequence: Synthetic oligonucleotide
  Antisense strand to SEQ ID NO: 2255490
acacauacacacauaacuu

SEQ ID NO: 2255492 - RNA, 19 nt, Artificial Sequence
  Description of Artificial Sequence: Synthetic oligonucleotide
  Sense strand starting at position 3651 of SEQ ID NO: 1884302
gauguuaaaggauguuaac

SEQ ID NO: 2255493 - RNA, 19 nt, Artificial Sequence
  Description of Artificial Sequence: Synthetic oligonucleotide
  Antisense strand to SEQ ID NO: 2255492
guuaacauccuuuaacauc

SEQ ID NO: 2255494 - RNA, 19 nt, Artificial Sequence
  Description of Artificial Sequence: Synthetic oligonucleotide
  Sense strand starting at position 3654 of SEQ ID NO: 1884302
guuaaaggauguuaacauu

SEQ ID NO: 2255495 - RNA, 19 nt, Artificial Sequence
  Description of Artificial Sequence: Synthetic oligonucleotide
  Antisense strand to SEQ ID NO: 2255494
aauguuaacauccuuuaac

SEQ ID NO: 2255496 - RNA, 19 nt, Artificial Sequence
  Description of Artificial Sequence: Synthetic oligonucleotide
  Sense strand starting at position 3775 of SEQ ID NO: 1884302
uuguacuucucaguuagau

SEQ ID NO: 2255497 - RNA, 19 nt, Artificial Sequence
  Description of Artificial Sequence: Synthetic oligonucleotide
  Antisense strand to SEQ ID NO: 2255496
aucuaacugagaaguacaa

SEQ ID NO: 2255498 - RNA, 19 nt, Artificial Sequence
  Description of Artificial Sequence: Synthetic oligonucleotide
  Sense strand starting at position 3785 of SEQ ID NO: 1884302
caguuagauugaggauaaa

SEQ ID NO: 2255499 - RNA, 19 nt, Artificial Sequence
  Description of Artificial Sequence: Synthetic oligonucleotide
  Antisense strand to SEQ ID NO: 2255498
uuuauccucaaucuaacug

SEQ ID NO: 2255500 - RNA, 19 nt, Artificial Sequence
  Description of Artificial Sequence: Synthetic oligonucleotide
  Sense strand starting at position 3822 of SEQ ID NO: 1884302
auuagagcugagcgugaua

SEQ ID NO: 2255501 - RNA, 19 nt, Artificial Sequence
  Description of Artificial Sequence: Synthetic oligonucleotide
  Antisense strand to SEQ ID NO: 2255500
uaucacgcucagcucuaau

SEQ ID NO: 2255502 - RNA, 19 nt, Artificial Sequence
  Description of Artificial Sequence: Synthetic oligonucleotide
  Sense strand starting at position 3831 of SEQ ID NO: 1884302
gagcgugauagccaacagu

SEQ ID NO: 2255503 - RNA, 19 nt, Artificial Sequence
  Description of Artificial Sequence: Synthetic oligonucleotide
  Antisense strand to SEQ ID NO: 2255502
acuguuggcuaucacgcuc

SEQ ID NO: 2255504 - RNA, 19 nt, Artificial Sequence
  Description of Artificial Sequence: Synthetic oligonucleotide
  Sense strand starting at position 45 of SEQ ID NO: 1884303
aggaaagacgauugcagau

SEQ ID NO: 2255505 - RNA, 19 nt, Artificial Sequence
  Description of Artificial Sequence: Synthetic oligonucleotide
  Antisense strand to SEQ ID NO: 2255504
aucugcaaucgucuuuccu

SEQ ID NO: 2255506 - RNA, 19 nt, Artificial Sequence
  Description of Artificial Sequence: Synthetic oligonucleotide
  Sense strand starting at position 177 of SEQ ID NO: 1884303
gugagauuaaauggcuugu

SEQ ID NO: 2255507 - RNA, 19 nt, Artificial Sequence
  Description of Artificial Sequence: Synthetic oligonucleotide
  Antisense strand to SEQ ID NO: 2255506
acaagccauuuaaucucac

SEQ ID NO: 2255508 - RNA, 19 nt, Artificial Sequence
  Description of Artificial Sequence: Synthetic oligonucleotide
  Sense strand starting at position 181 of SEQ ID NO: 1884303
gauuaaauggcuugugcag

SEQ ID NO: 2255509 - RNA, 19 nt, Artificial Sequence
  Description of Artificial Sequence: Synthetic oligonucleotide
  Antisense strand to SEQ ID NO: 2255508
cugcacaagccauuuaauc

SEQ ID NO: 2255510 - RNA, 19 nt, Artificial Sequence
  Description of Artificial Sequence: Synthetic oligonucleotide
  Sense strand starting at position 236 of SEQ ID NO: 1884303
ccacaaaccucugagaaag

SEQ ID NO: 2255511 - RNA, 19 nt, Artificial Sequence
  Description of Artificial Sequence: Synthetic oligonucleotide
  Antisense strand to SEQ ID NO: 2255510
cuuucucagagguuugugg

SEQ ID NO: 2255512 - RNA, 19 nt, Artificial Sequence
  Description of Artificial Sequence: Synthetic oligonucleotide
  Sense strand starting at position 238 of SEQ ID NO: 1884303
acaaaccucugagaaagaa

SEQ ID NO: 2255513 - RNA, 19 nt, Artificial Sequence
  Description of Artificial Sequence: Synthetic oligonucleotide
  Antisense strand to SEQ ID NO: 2255512
uucuuucucagagguuugu

SEQ ID NO: 2255514 - RNA, 19 nt, Artificial Sequence
  Description of Artificial Sequence: Synthetic oligonucleotide
  Sense strand starting at position 297 of SEQ ID NO: 1884303
acaguuaaaggaugugcau

SEQ ID NO: 2255515 - RNA, 19 nt, Artificial Sequence
  Description of Artificial Sequence: Synthetic oligonucleotide
  Antisense strand to SEQ ID NO: 2255514
augcacauccuuuaacugu

SEQ ID NO: 2255516 - RNA, 19 nt, Artificial Sequence
  Description of Artificial Sequence: Synthetic oligonucleotide
  Sense strand starting at position 445 of SEQ ID NO: 1884303
ggauuucucgugcaucugu

SEQ ID NO: 2255517 - RNA, 19 nt, Artificial Sequence
  Description of Artificial Sequence: Synthetic oligonucleotide
  Antisense strand to SEQ ID NO: 2255516
acagaugcacgagaaaucc

SEQ ID NO: 2255518 - RNA, 19 nt, Artificial Sequence
  Description of Artificial Sequence: Synthetic oligonucleotide
  Sense strand starting at position 867 of SEQ ID NO: 1884303
cgaugguuugggcgaugaa

SEQ ID NO: 2255519 - RNA, 19 nt, Artificial Sequence
  Description of Artificial Sequence: Synthetic oligonucleotide
  Antisense strand to SEQ ID NO: 2255518
uucaucgcccaaaccaucg

SEQ ID NO: 2255520 - RNA, 19 nt, Artificial Sequence
  Description of Artificial Sequence: Synthetic oligonucleotide
  Sense strand starting at position 868 of SEQ ID NO: 1884303
gaugguuugggcgaugaag

SEQ ID NO: 2255521 - RNA, 19 nt, Artificial Sequence
  Description of Artificial Sequence: Synthetic oligonucleotide
  Antisense strand to SEQ ID NO: 2255520
cuucaucgcccaaaccauc

SEQ ID NO: 2255522 - RNA, 19 nt, Artificial Sequence
  Description of Artificial Sequence: Synthetic oligonucleotide
  Sense strand starting at position 870 of SEQ ID NO: 1884303
ugguuugggcgaugaagaa

SEQ ID NO: 2255523 - RNA, 19 nt, Artificial Sequence
  Description of Artificial Sequence: Synthetic oligonucleotide
  Antisense strand to SEQ ID NO: 2255522
uucuucaucgcccaaacca

SEQ ID NO: 2255524 - RNA, 19 nt, Artificial Sequence
  Description of Artificial Sequence: Synthetic oligonucleotide
  Sense strand starting at position 1208 of SEQ ID NO: 1884303
gcguacauguugacgaaga

SEQ ID NO: 2255525 - RNA, 19 nt, Artificial Sequence
  Description of Artificial Sequence: Synthetic oligonucleotide
  Antisense strand to SEQ ID NO: 2255524
ucuucgucaacauguacgc

SEQ ID NO: 2255526 - RNA, 19 nt, Artificial Sequence
  Description of Artificial Sequence: Synthetic oligonucleotide
  Sense strand starting at position 1210 of SEQ ID NO: 1884303
guacauguugacgaagaug

SEQ ID NO: 2255527 - RNA, 19 nt, Artificial Sequence
  Description of Artificial Sequence: Synthetic oligonucleotide
  Antisense strand to SEQ ID NO: 2255526
caucuucgucaacauguac

SEQ ID NO: 2255528 - RNA, 19 nt, Artificial Sequence
  Description of Artificial Sequence: Synthetic oligonucleotide
  Sense strand starting at position 1338 of SEQ ID NO: 1884303
ccaggcuagcaaugaagau

SEQ ID NO: 2255529 - RNA, 19 nt, Artificial Sequence
  Description of Artificial Sequence: Synthetic oligonucleotide
  Antisense strand to SEQ ID NO: 2255528
aucuucauugcuagccugg

SEQ ID NO: 2255530 - RNA, 19 nt, Artificial Sequence
  Description of Artificial Sequence: Synthetic oligonucleotide
  Sense strand starting at position 1342 of SEQ ID NO: 1884303
gcuagcaaugaagauauca

SEQ ID NO: 2255531 - RNA, 19 nt, Artificial Sequence
  Description of Artificial Sequence: Synthetic oligonucleotide
  Antisense strand to SEQ ID NO: 2255530
ugauaucuucauugcuagc

SEQ ID NO: 2255532 - RNA, 19 nt, Artificial Sequence
  Description of Artificial Sequence: Synthetic oligonucleotide
  Sense strand starting at position 1620 of SEQ ID NO: 1884303
cugcaagcagccugaauuu

SEQ ID NO: 2255533 - RNA, 19 nt, Artificial Sequence
  Description of Artificial Sequence: Synthetic oligonucleotide
  Antisense strand to SEQ ID NO: 2255532
aaauucaggcugcuugcag

SEQ ID NO: 2255534 - RNA, 19 nt, Artificial Sequence
  Description of Artificial Sequence: Synthetic oligonucleotide
  Sense strand starting at position 1633 of SEQ ID NO: 1884303
gaauuucuggcuugagccu

SEQ ID NO: 2255535 - RNA, 19 nt, Artificial Sequence
  Description of Artificial Sequence: Synthetic oligonucleotide
  Antisense strand to SEQ ID NO: 2255534
aggcucaagccagaaauuc

SEQ ID NO: 2255536 - RNA, 19 nt, Artificial Sequence
  Description of Artificial Sequence: Synthetic oligonucleotide
  Sense strand starting at position 1738 of SEQ ID NO: 1884303
gccugucuccugcagaauu

SEQ ID NO: 2255537 - RNA, 19 nt, Artificial Sequence
  Description of Artificial Sequence: Synthetic oligonucleotide
  Antisense strand to SEQ ID NO: 2255536
aauucugcaggagacaggc

SEQ ID NO: 2255538 - RNA, 19 nt, Artificial Sequence
  Description of Artificial Sequence: Synthetic oligonucleotide
  Sense strand starting at position 1966 of SEQ ID NO: 1884303
ugaacauuaucugugguuu

SEQ ID NO: 2255539 - RNA, 19 nt, Artificial Sequence
  Description of Artificial Sequence: Synthetic oligonucleotide
  Antisense strand to SEQ ID NO: 2255538
aaaccacagauaauguuca

SEQ ID NO: 2255540 - RNA, 19 nt, Artificial Sequence
  Description of Artificial Sequence: Synthetic oligonucleotide
  Sense strand starting at position 2156 of SEQ ID NO: 1884303
gggacacauuaugcagauu

SEQ ID NO: 2255541 - RNA, 19 nt, Artificial Sequence
  Description of Artificial Sequence: Synthetic oligonucleotide
  Antisense strand to SEQ ID NO: 2255540
aaucugcauaauguguccc

SEQ ID NO: 2255542 - RNA, 19 nt, Artificial Sequence
  Description of Artificial Sequence: Synthetic oligonucleotide
  Sense strand starting at position 2159 of SEQ ID NO: 1884303
acacauuaugcagauugca

SEQ ID NO: 2255543 - RNA, 19 nt, Artificial Sequence
  Description of Artificial Sequence: Synthetic oligonucleotide
  Antisense strand to SEQ ID NO: 2255542
ugcaaucugcauaaugugu

SEQ ID NO: 2255544 - RNA, 19 nt, Artificial Sequence
  Description of Artificial Sequence: Synthetic oligonucleotide
  Sense strand starting at position 2221 of SEQ ID NO: 1884303
guguaagauuucgcaggau

SEQ ID NO: 2255545 - RNA, 19 nt, Artificial Sequence
  Description of Artificial Sequence: Synthetic oligonucleotide
  Antisense strand to SEQ ID NO: 2255544
auccugcgaaaucuuacac

SEQ ID NO: 2255546 - RNA, 19 nt, Artificial Sequence
  Description of Artificial Sequence: Synthetic oligonucleotide
  Sense strand starting at position 2469 of SEQ ID NO: 1884303
ggcacaggaugcuuuagaa

SEQ ID NO: 2255547 - RNA, 19 nt, Artificial Sequence
  Description of Artificial Sequence: Synthetic oligonucleotide
  Antisense strand to SEQ ID NO: 2255546
uucuaaagcauccugugcc

SEQ ID NO: 2255548 - RNA, 19 nt, Artificial Sequence
  Description of Artificial Sequence: Synthetic oligonucleotide
  Sense strand starting at position 2543 of SEQ ID NO: 1884303
gucauuaaaucuguaggaa

SEQ ID NO: 2255549 - RNA, 19 nt, Artificial Sequence
  Description of Artificial Sequence: Synthetic oligonucleotide
  Antisense strand to SEQ ID NO: 2255548
uuccuacagauuuaaugac

SEQ ID NO: 2255550 - RNA, 19 nt, Artificial Sequence
  Description of Artificial Sequence: Synthetic oligonucleotide
  Sense strand starting at position 2605 of SEQ ID NO: 1884303
ugaauuaugcuacaguuga

SEQ ID NO: 2255551 - RNA, 19 nt, Artificial Sequence
  Description of Artificial Sequence: Synthetic oligonucleotide
  Antisense strand to SEQ ID NO: 2255550
ucaacuguagcauaauuca

SEQ ID NO: 2255552 - RNA, 19 nt, Artificial Sequence
  Description of Artificial Sequence: Synthetic oligonucleotide
  Sense strand starting at position 2668 of SEQ ID NO: 1884303
cuggcaugucguaggugaa

SEQ ID NO: 2255553 - RNA, 19 nt, Artificial Sequence
  Description of Artificial Sequence: Synthetic oligonucleotide
  Antisense strand to SEQ ID NO: 2255552
uucaccuacgacaugccag

SEQ ID NO: 2255554 - RNA, 19 nt, Artificial Sequence
  Description of Artificial Sequence: Synthetic oligonucleotide
  Sense strand starting at position 2964 of SEQ ID NO: 1884303
auggcuguugagugaguaa

SEQ ID NO: 2255555 - RNA, 19 nt, Artificial Sequence
  Description of Artificial Sequence: Synthetic oligonucleotide
  Antisense strand to SEQ ID NO: 2255554
uuacucacucaacagccau

SEQ ID NO: 2255556 - RNA, 19 nt, Artificial Sequence
  Description of Artificial Sequence: Synthetic oligonucleotide
  Sense strand starting at position 2966 of SEQ ID NO: 1884303
ggcuguugagugaguaagu

SEQ ID NO: 2255557 - RNA, 19 nt, Artificial Sequence
  Description of Artificial Sequence: Synthetic oligonucleotide
  Antisense strand to SEQ ID NO: 2255556
acuuacucacucaacagcc

SEQ ID NO: 2255558 - RNA, 19 nt, Artificial Sequence
  Description of Artificial Sequence: Synthetic oligonucleotide
  Sense strand starting at position 2977 of SEQ ID NO: 1884303
gaguaaguggauggaugau

SEQ ID NO: 2255559 - RNA, 19 nt, Artificial Sequence
  Description of Artificial Sequence: Synthetic oligonucleotide
  Antisense strand to SEQ ID NO: 2255558
aucauccauccacuuacuc

SEQ ID NO: 2255560 - RNA, 19 nt, Artificial Sequence
  Description of Artificial Sequence: Synthetic oligonucleotide
  Sense strand starting at position 3043 of SEQ ID NO: 1884303
aagaauuacuacgugguga

SEQ ID NO: 2255561 - RNA, 19 nt, Artificial Sequence
  Description of Artificial Sequence: Synthetic oligonucleotide
  Antisense strand to SEQ ID NO: 2255560
ucaccacguaguaauucuu

SEQ ID NO: 2255562 - RNA, 19 nt, Artificial Sequence
  Description of Artificial Sequence: Synthetic oligonucleotide
  Sense strand starting at position 3045 of SEQ ID NO: 1884303
gaauuacuacguggugaga

SEQ ID NO: 2255563 - RNA, 19 nt, Artificial Sequence
  Description of Artificial Sequence: Synthetic oligonucleotide
  Antisense strand to SEQ ID NO: 2255562
ucucaccacguaguaauuc

SEQ ID NO: 2255564 - RNA, 19 nt, Artificial Sequence
  Description of Artificial Sequence: Synthetic oligonucleotide
  Sense strand starting at position 3270 of SEQ ID NO: 1884303
agaugcacgacguaagauu

SEQ ID NO: 2255565 - RNA, 19 nt, Artificial Sequence
  Description of Artificial Sequence: Synthetic oligonucleotide
  Antisense strand to SEQ ID NO: 2255564
aaucuuacgucgugcaucu

SEQ ID NO: 2255566 - RNA, 19 nt, Artificial Sequence
  Description of Artificial Sequence: Synthetic oligonucleotide
  Sense strand starting at position 3338 of SEQ ID NO: 1884303
ccaccugacguuggguaau

SEQ ID NO: 2255567 - RNA, 19 nt, Artificial Sequence
  Description of Artificial Sequence: Synthetic oligonucleotide
  Antisense strand to SEQ ID NO: 2255566
auuacccaacgucaggugg

SEQ ID NO: 2255568 - RNA, 19 nt, Artificial Sequence
  Description of Artificial Sequence: Synthetic oligonucleotide
  Sense strand starting at position 3341 of SEQ ID NO: 1884303
ccugacguuggguaauagu

SEQ ID NO: 2255569 - RNA, 19 nt, Artificial Sequence
  Description of Artificial Sequence: Synthetic oligonucleotide
  Antisense strand to SEQ ID NO: 2255568
acuauuacccaacgucagg

SEQ ID NO: 2255570 - RNA, 19 nt, Artificial Sequence
  Description of Artificial Sequence: Synthetic oligonucleotide
  Sense strand starting at position 3507 of SEQ ID NO: 1884303
ucaagacuagccugaauaa

SEQ ID NO: 2255571 - RNA, 19 nt, Artificial Sequence
  Description of Artificial Sequence: Synthetic oligonucleotide
  Antisense strand to SEQ ID NO: 2255570
uuauucaggcuagucuuga

SEQ ID NO: 2255572 - RNA, 19 nt, Artificial Sequence
  Description of Artificial Sequence: Synthetic oligonucleotide
  Sense strand starting at position 3558 of SEQ ID NO: 1884303
ugucuuaaguuacuacaaa

SEQ ID NO: 2255573 - RNA, 19 nt, Artificial Sequence
  Description of Artificial Sequence: Synthetic oligonucleotide
  Antisense strand to SEQ ID NO: 2255572
uuuguaguaacuuaagaca

SEQ ID NO: 2255574 - RNA, 19 nt, Artificial Sequence
  Description of Artificial Sequence: Synthetic oligonucleotide
  Sense strand starting at position 3679 of SEQ ID NO: 1884303
ccaagaguguaguuugaga

SEQ ID NO: 2255575 - RNA, 19 nt, Artificial Sequence
  Description of Artificial Sequence: Synthetic oligonucleotide
  Antisense strand to SEQ ID NO: 2255574
ucucaaacuacacucuugg

SEQ ID NO: 2255576 - RNA, 19 nt, Artificial Sequence
  Description of Artificial Sequence: Synthetic oligonucleotide
  Sense strand starting at position 3681 of SEQ ID NO: 1884303
aagaguguaguuugagaca

SEQ ID NO: 2255577 - RNA, 19 nt, Artificial Sequence
  Description of Artificial Sequence: Synthetic oligonucleotide
  Antisense strand to SEQ ID NO: 2255576
ugucucaaacuacacucuu

SEQ ID NO: 2255578 - RNA, 19 nt, Artificial Sequence
  Description of Artificial Sequence: Synthetic oligonucleotide
  Sense strand starting at position 3804 of SEQ ID NO: 1884303
gcaugacugugucuuagga

SEQ ID NO: 2255579 - RNA, 19 nt, Artificial Sequence
  Description of Artificial Sequence: Synthetic oligonucleotide
  Antisense strand to SEQ ID NO: 2255578
uccuaagacacagucaugc

SEQ ID NO: 2255580 - RNA, 19 nt, Artificial Sequence
  Description of Artificial Sequence: Synthetic oligonucleotide
  Sense strand starting at position 3949 of SEQ ID NO: 1884303
gaguuuguguucuuuaaac

SEQ ID NO: 2255581 - RNA, 19 nt, Artificial Sequence
  Description of Artificial Sequence: Synthetic oligonucleotide
  Antisense strand to SEQ ID NO: 2255580
guuuaaagaacacaaacuc

SEQ ID NO: 2255582 - RNA, 19 nt, Artificial Sequence
  Description of Artificial Sequence: Synthetic oligonucleotide
  Sense strand starting at position 3951 of SEQ ID NO: 1884303
guuuguguucuuuaaacag

SEQ ID NO: 2255583 - RNA, 19 nt, Artificial Sequence
  Description of Artificial Sequence: Synthetic oligonucleotide
  Antisense strand to SEQ ID NO: 2255582
cuguuuaaagaacacaaac

SEQ ID NO: 2255584 - RNA, 19 nt, Artificial Sequence
  Description of Artificial Sequence: Synthetic oligonucleotide
  Sense strand starting at position 80 of SEQ ID NO: 1884304
caacgcuguggcuaacaau

SEQ ID NO: 2255585 - RNA, 19 nt, Artificial Sequence
  Description of Artificial Sequence: Synthetic oligonucleotide
  Antisense strand to SEQ ID NO: 2255584
auuguuagccacagcguug

SEQ ID NO: 2255586 - RNA, 19 nt, Artificial Sequence
  Description of Artificial Sequence: Synthetic oligonucleotide
  Sense strand starting at position 178 of SEQ ID NO: 1884304
agucuucuacugugaauuc

SEQ ID NO: 2255587 - RNA, 19 nt, Artificial Sequence
  Description of Artificial Sequence: Synthetic oligonucleotide
  Antisense strand to SEQ ID NO: 2255586
gaauucacaguagaagacu

SEQ ID NO: 2255588 - RNA, 19 nt, Artificial Sequence
  Description of Artificial Sequence: Synthetic oligonucleotide
  Sense strand starting at position 212 of SEQ ID NO: 1884304
uagucauagcagugggaag

SEQ ID NO: 2255589 - RNA, 19 nt, Artificial Sequence
  Description of Artificial Sequence: Synthetic oligonucleotide
  Antisense strand to SEQ ID NO: 2255588
cuucccacugcuaugacua

SEQ ID NO: 2255590 - RNA, 19 nt, Artificial Sequence
  Description of Artificial Sequence: Synthetic oligonucleotide
  Sense strand starting at position 213 of SEQ ID NO: 1884304
agucauagcagugggaagu

SEQ ID NO: 2255591 - RNA, 19 nt, Artificial Sequence
  Description of Artificial Sequence: Synthetic oligonucleotide
  Antisense strand to SEQ ID NO: 2255590
acuucccacugcuaugacu

SEQ ID NO: 2255592 - RNA, 19 nt, Artificial Sequence
  Description of Artificial Sequence: Synthetic oligonucleotide
  Sense strand starting at position 237 of SEQ ID NO: 1884304
gcgagugugaacgaugguu

SEQ ID NO: 2255593 - RNA, 19 nt, Artificial Sequence
  Description of Artificial Sequence: Synthetic oligonucleotide
  Antisense strand to SEQ ID NO: 2255592
aaccaucguucacacucgc

SEQ ID NO: 2255594 - RNA, 19 nt, Artificial Sequence
  Description of Artificial Sequence: Synthetic oligonucleotide
  Sense strand starting at position 242 of SEQ ID NO: 1884304
ugugaacgaugguuucuga

SEQ ID NO: 2255595 - RNA, 19 nt, Artificial Sequence
  Description of Artificial Sequence: Synthetic oligonucleotide
  Antisense strand to SEQ ID NO: 2255594
ucagaaaccaucguucaca

SEQ ID NO: 2255596 - RNA, 19 nt, Artificial Sequence
  Description of Artificial Sequence: Synthetic oligonucleotide
  Sense strand starting at position 245 of SEQ ID NO: 1884304
gaacgaugguuucugacac

SEQ ID NO: 2255597 - RNA, 19 nt, Artificial Sequence
  Description of Artificial Sequence: Synthetic oligonucleotide
  Antisense strand to SEQ ID NO: 2255596
gugucagaaaccaucguuc

SEQ ID NO: 2255598 - RNA, 19 nt, Artificial Sequence
  Description of Artificial Sequence: Synthetic oligonucleotide
  Sense strand starting at position 344 of SEQ ID NO: 1884304
gcgacauaucagggaucac

SEQ ID NO: 2255599 - RNA, 19 nt, Artificial Sequence
  Description of Artificial Sequence: Synthetic oligonucleotide
  Antisense strand to SEQ ID NO: 2255598
gugaucccugauaugucgc

SEQ ID NO: 2255600 - RNA, 19 nt, Artificial Sequence
  Description of Artificial Sequence: Synthetic oligonucleotide
  Sense strand starting at position 421 of SEQ ID NO: 1884304
guagauaaacguuaacuau

SEQ ID NO: 2255601 - RNA, 19 nt, Artificial Sequence
  Description of Artificial Sequence: Synthetic oligonucleotide
  Antisense strand to SEQ ID NO: 2255600
auaguuaacguuuaucuac

SEQ ID NO: 2255602 - RNA, 19 nt, Artificial Sequence
  Description of Artificial Sequence: Synthetic oligonucleotide
  Sense strand starting at position 507 of SEQ ID NO: 1884304
gguguuaagccguuccauc

SEQ ID NO: 2255603 - RNA, 19 nt, Artificial Sequence
  Description of Artificial Sequence: Synthetic oligonucleotide
  Antisense strand to SEQ ID NO: 2255602
gauggaacggcuuaacacc

SEQ ID NO: 2255604 - RNA, 19 nt, Artificial Sequence
  Description of Artificial Sequence: Synthetic oligonucleotide
  Sense strand starting at position 508 of SEQ ID NO: 1884304
guguuaagccguuccauca

SEQ ID NO: 2255605 - RNA, 19 nt, Artificial Sequence
  Description of Artificial Sequence: Synthetic oligonucleotide
  Antisense strand to SEQ ID NO: 2255604
ugauggaacggcuuaacac

SEQ ID NO: 2255606 - RNA, 19 nt, Artificial Sequence
  Description of Artificial Sequence: Synthetic oligonucleotide
  Sense strand starting at position 557 of SEQ ID NO: 1884304
cguggaaauacuugaacau

SEQ ID NO: 2255607 - RNA, 19 nt, Artificial Sequence
  Description of Artificial Sequence: Synthetic oligonucleotide
  Antisense strand to SEQ ID NO: 2255606
auguucaaguauuuccacg

SEQ ID NO: 2255608 - RNA, 19 nt, Artificial Sequence
  Description of Artificial Sequence: Synthetic oligonucleotide
  Sense strand starting at position 567 of SEQ ID NO: 1884304
cuugaacauucuguagaag

SEQ ID NO: 2255609 - RNA, 19 nt, Artificial Sequence
  Description of Artificial Sequence: Synthetic oligonucleotide
  Antisense strand to SEQ ID NO: 2255608
cuucuacagaauguucaag

SEQ ID NO: 2255610 - RNA, 19 nt, Artificial Sequence
  Description of Artificial Sequence: Synthetic oligonucleotide
  Sense strand starting at position 661 of SEQ ID NO: 1884304
cucugaaauuagcuaagua

SEQ ID NO: 2255611 - RNA, 19 nt, Artificial Sequence
  Description of Artificial Sequence: Synthetic oligonucleotide
  Antisense strand to SEQ ID NO: 2255610
uacuuagcuaauuucagag

SEQ ID NO: 2255612 - RNA, 19 nt, Artificial Sequence
  Description of Artificial Sequence: Synthetic oligonucleotide
  Sense strand starting at position 665 of SEQ ID NO: 1884304
gaaauuagcuaaguaugca

SEQ ID NO: 2255613 - RNA, 19 nt, Artificial Sequence
  Description of Artificial Sequence: Synthetic oligonucleotide
  Antisense strand to SEQ ID NO: 2255612
ugcauacuuagcuaauuuc

SEQ ID NO: 2255614 - RNA, 19 nt, Artificial Sequence
  Description of Artificial Sequence: Synthetic oligonucleotide
  Sense strand starting at position 669 of SEQ ID NO: 1884304
uuagcuaaguaugcagaaa

SEQ ID NO: 2255615 - RNA, 19 nt, Artificial Sequence
  Description of Artificial Sequence: Synthetic oligonucleotide
  Antisense strand to SEQ ID NO: 2255614
uuucugcauacuuagcuaa

SEQ ID NO: 2255616 - RNA, 19 nt, Artificial Sequence
  Description of Artificial Sequence: Synthetic oligonucleotide
  Sense strand starting at position 2778 of SEQ ID NO: 1884304
gcggcauugccacuucagu

SEQ ID NO: 2255617 - RNA, 19 nt, Artificial Sequence
  Description of Artificial Sequence: Synthetic oligonucleotide
  Antisense strand to SEQ ID NO: 2255616
acugaaguggcaaugccgc

SEQ ID NO: 2255618 - RNA, 19 nt, Artificial Sequence
  Description of Artificial Sequence: Synthetic oligonucleotide
  Sense strand starting at position 2879 of SEQ ID NO: 1884304
gucgccugugaguuaggua

SEQ ID NO: 2255619 - RNA, 19 nt, Artificial Sequence
  Description of Artificial Sequence: Synthetic oligonucleotide
  Antisense strand to SEQ ID NO: 2255618
uaccuaacucacaggcgac

SEQ ID NO: 2255620 - RNA, 19 nt, Artificial Sequence
  Description of Artificial Sequence: Synthetic oligonucleotide
  Sense strand starting at position 2987 of SEQ ID NO: 1884304
agagacuguccgcggagua

SEQ ID NO: 2255621 - RNA, 19 nt, Artificial Sequence
  Description of Artificial Sequence: Synthetic oligonucleotide
  Antisense strand to SEQ ID NO: 2255620
uacuccgcggacagucucu

SEQ ID NO: 2255622 - RNA, 19 nt, Artificial Sequence
  Description of Artificial Sequence: Synthetic oligonucleotide
  Sense strand starting at position 2989 of SEQ ID NO: 1884304
agacuguccgcggaguaga

SEQ ID NO: 2255623 - RNA, 19 nt, Artificial Sequence
  Description of Artificial Sequence: Synthetic oligonucleotide
  Antisense strand to SEQ ID NO: 2255622
ucuacuccgcggacagucu

SEQ ID NO: 2255624 - RNA, 19 nt, Artificial Sequence
  Description of Artificial Sequence: Synthetic oligonucleotide
  Sense strand starting at position 3016 of SEQ ID NO: 1884304
ccuguaagaacucgggauu

SEQ ID NO: 2255625 - RNA, 19 nt, Artificial Sequence
  Description of Artificial Sequence: Synthetic oligonucleotide
  Antisense strand to SEQ ID NO: 2255624
aaucccgaguucuuacagg

SEQ ID NO: 2255626 - RNA, 19 nt, Artificial Sequence
  Description of Artificial Sequence: Synthetic oligonucleotide
  Sense strand starting at position 3096 of SEQ ID NO: 1884304
cugcccgauuccuccaaga

SEQ ID NO: 2255627 - RNA, 19 nt, Artificial Sequence
  Description of Artificial Sequence: Synthetic oligonucleotide
  Antisense strand to SEQ ID NO: 2255626
ucuuggaggaaucgggcag

SEQ ID NO: 2255628 - RNA, 19 nt, Artificial Sequence
  Description of Artificial Sequence: Synthetic oligonucleotide
  Sense strand starting at position 3175 of SEQ ID NO: 1884304
ccaacaucugccuguugga

SEQ ID NO: 2255629 - RNA, 19 nt, Artificial Sequence
  Description of Artificial Sequence: Synthetic oligonucleotide
  Antisense strand to SEQ ID NO: 2255628
uccaacaggcagauguugg

SEQ ID NO: 2255630 - RNA, 19 nt, Artificial Sequence
  Description of Artificial Sequence: Synthetic oligonucleotide
  Sense strand starting at position 3213 of SEQ ID NO: 1884304
ggcucagucggcugaaaua

SEQ ID NO: 2255631 - RNA, 19 nt, Artificial Sequence
  Description of Artificial Sequence: Synthetic oligonucleotide
  Antisense strand to SEQ ID NO: 2255630
uauuucagccgacugagcc

SEQ ID NO: 2255632 - RNA, 19 nt, Artificial Sequence
  Description of Artificial Sequence: Synthetic oligonucleotide
  Sense strand starting at position 3223 of SEQ ID NO: 1884304
gcugaaauaucgcuucuga

SEQ ID NO: 2255633 - RNA, 19 nt, Artificial Sequence
  Description of Artificial Sequence: Synthetic oligonucleotide
  Antisense strand to SEQ ID NO: 2255632
ucagaagcgauauuucagc

SEQ ID NO: 2255634 - RNA, 19 nt, Artificial Sequence
  Description of Artificial Sequence: Synthetic oligonucleotide
  Sense strand starting at position 3240 of SEQ ID NO: 1884304
gauugcucagagggauguu

SEQ ID NO: 2255635 - RNA, 19 nt, Artificial Sequence
  Description of Artificial Sequence: Synthetic oligonucleotide
  Antisense strand to SEQ ID NO: 2255634
aacaucccucugagcaauc

SEQ ID NO: 2255636 - RNA, 19 nt, Artificial Sequence
  Description of Artificial Sequence: Synthetic oligonucleotide
  Sense strand starting at position 3249 of SEQ ID NO: 1884304
gagggauguuucccacugu

SEQ ID NO: 2255637 - RNA, 19 nt, Artificial Sequence
  Description of Artificial Sequence: Synthetic oligonucleotide
  Antisense strand to SEQ ID NO: 2255636
acagugggaaacaucccuc

SEQ ID NO: 2255638 - RNA, 19 nt, Artificial Sequence
  Description of Artificial Sequence: Synthetic oligonucleotide
  Sense strand starting at position 3253 of SEQ ID NO: 1884304
gauguuucccacuguggca

SEQ ID NO: 2255639 - RNA, 19 nt, Artificial Sequence
  Description of Artificial Sequence: Synthetic oligonucleotide
  Antisense strand to SEQ ID NO: 2255638
ugccacagugggaaacauc

SEQ ID NO: 2255640 - RNA, 19 nt, Artificial Sequence
  Description of Artificial Sequence: Synthetic oligonucleotide
  Sense strand starting at position 3275 of SEQ ID NO: 1884304
gcucccuaguuauuccaua

SEQ ID NO: 2255641 - RNA, 19 nt, Artificial Sequence
  Description of Artificial Sequence: Synthetic oligonucleotide
  Antisense strand to SEQ ID NO: 2255640
uauggaauaacuagggagc

SEQ ID NO: 2255642 - RNA, 19 nt, Artificial Sequence
  Description of Artificial Sequence: Synthetic oligonucleotide
  Sense strand starting at position 3313 of SEQ ID NO: 1884304
aagacuugggucugucaug

SEQ ID NO: 2255643 - RNA, 19 nt, Artificial Sequence
  Description of Artificial Sequence: Synthetic oligonucleotide
  Antisense strand to SEQ ID NO: 2255642
caugacagacccaagucuu

SEQ ID NO: 2255644 - RNA, 19 nt, Artificial Sequence
  Description of Artificial Sequence: Synthetic oligonucleotide
  Sense strand starting at position 3347 of SEQ ID NO: 1884304
cagugcaguccucgauaaa

SEQ ID NO: 2255645 - RNA, 19 nt, Artificial Sequence
  Description of Artificial Sequence: Synthetic oligonucleotide
  Antisense strand to SEQ ID NO: 2255644
uuuaucgaggacugcacug

SEQ ID NO: 2255646 - RNA, 19 nt, Artificial Sequence
  Description of Artificial Sequence: Synthetic oligonucleotide
  Sense strand starting at position 3348 of SEQ ID NO: 1884304
agugcaguccucgauaaau

SEQ ID NO: 2255647 - RNA, 19 nt, Artificial Sequence
  Description of Artificial Sequence: Synthetic oligonucleotide
  Antisense strand to SEQ ID NO: 2255646
auuuaucgaggacugcacu

SEQ ID NO: 2255648 - RNA, 19 nt, Artificial Sequence
  Description of Artificial Sequence: Synthetic oligonucleotide
  Sense strand starting at position 3350 of SEQ ID NO: 1884304
ugcaguccucgauaaaugu

SEQ ID NO: 2255649 - RNA, 19 nt, Artificial Sequence
  Description of Artificial Sequence: Synthetic oligonucleotide
  Antisense strand to SEQ ID NO: 2255648
acauuuaucgaggacugca

SEQ ID NO: 2255650 - RNA, 19 nt, Artificial Sequence
  Description of Artificial Sequence: Synthetic oligonucleotide
  Sense strand starting at position 3359 of SEQ ID NO: 1884304
cgauaaauguuugcccagu

SEQ ID NO: 2255651 - RNA, 19 nt, Artificial Sequence
  Description of Artificial Sequence: Synthetic oligonucleotide
  Antisense strand to SEQ ID NO: 2255650
acugggcaaacauuuaucg

SEQ ID NO: 2255652 - RNA, 19 nt, Artificial Sequence
  Description of Artificial Sequence: Synthetic oligonucleotide
  Sense strand starting at position 3389 of SEQ ID NO: 1884304
caguuaucuugggugcuga

SEQ ID NO: 2255653 - RNA, 19 nt, Artificial Sequence
  Description of Artificial Sequence: Synthetic oligonucleotide
  Antisense strand to SEQ ID NO: 2255652
ucagcacccaagauaacug

SEQ ID NO: 2255654 - RNA, 19 nt, Artificial Sequence
  Description of Artificial Sequence: Synthetic oligonucleotide
  Sense strand starting at position 3390 of SEQ ID NO: 1884304
aguuaucuugggugcugau

SEQ ID NO: 2255655 - RNA, 19 nt, Artificial Sequence
  Description of Artificial Sequence: Synthetic oligonucleotide
  Antisense strand to SEQ ID NO: 2255654
aucagcacccaagauaacu

SEQ ID NO: 2255656 - RNA, 19 nt, Artificial Sequence
  Description of Artificial Sequence: Synthetic oligonucleotide
  Sense strand starting at position 3402 of SEQ ID NO: 1884304
ugcugauacuaguucugga

SEQ ID NO: 2255657 - RNA, 19 nt, Artificial Sequence
  Description of Artificial Sequence: Synthetic oligonucleotide
  Antisense strand to SEQ ID NO: 2255656
uccagaacuaguaucagca

SEQ ID NO: 2255658 - RNA, 19 nt, Artificial Sequence
  Description of Artificial Sequence: Synthetic oligonucleotide
  Sense strand starting at position 3499 of SEQ ID NO: 1884304
gugugaugguuauuuguaa

SEQ ID NO: 2255659 - RNA, 19 nt, Artificial Sequence
  Description of Artificial Sequence: Synthetic oligonucleotide
  Antisense strand to SEQ ID NO: 2255658
uuacaaauaaccaucacac

SEQ ID NO: 2255660 - RNA, 19 nt, Artificial Sequence
  Description of Artificial Sequence: Synthetic oligonucleotide
  Sense strand starting at position 3546 of SEQ ID NO: 1884304
ggaugaggucauggaggua

SEQ ID NO: 2255661 - RNA, 19 nt, Artificial Sequence
  Description of Artificial Sequence: Synthetic oligonucleotide
  Antisense strand to SEQ ID NO: 2255660
uaccuccaugaccucaucc

SEQ ID NO: 2255662 - RNA, 19 nt, Artificial Sequence
  Description of Artificial Sequence: Synthetic oligonucleotide
  Sense strand starting at position 3576 of SEQ ID NO: 1884304
ugggaugagugccuuuauu

SEQ ID NO: 2255663 - RNA, 19 nt, Artificial Sequence
  Description of Artificial Sequence: Synthetic oligonucleotide
  Antisense strand to SEQ ID NO: 2255662
aauaaaggcacucauccca

SEQ ID NO: 2255664 - RNA, 19 nt, Artificial Sequence
  Description of Artificial Sequence: Synthetic oligonucleotide
  Sense strand starting at position 79 of SEQ ID NO: 1884305
gaaguagucucccuggaau

SEQ ID NO: 2255665 - RNA, 19 nt, Artificial Sequence
  Description of Artificial Sequence: Synthetic oligonucleotide
  Antisense strand to SEQ ID NO: 2255664
auuccagggagacuacuuc

SEQ ID NO: 2255666 - RNA, 19 nt, Artificial Sequence
  Description of Artificial Sequence: Synthetic oligonucleotide
  Sense strand starting at position 360 of SEQ ID NO: 1884305
agagcugauccuugaacuc

SEQ ID NO: 2255667 - RNA, 19 nt, Artificial Sequence
  Description of Artificial Sequence: Synthetic oligonucleotide
  Antisense strand to SEQ ID NO: 2255666
gaguucaaggaucagcucu

SEQ ID NO: 2255668 - RNA, 19 nt, Artificial Sequence
  Description of Artificial Sequence: Synthetic oligonucleotide
  Sense strand starting at position 466 of SEQ ID NO: 1884305
auaaauaggcccugcaaga

SEQ ID NO: 2255669 - RNA, 19 nt, Artificial Sequence
  Description of Artificial Sequence: Synthetic oligonucleotide
  Antisense strand to SEQ ID NO: 2255668
ucuugcagggccuauuuau

SEQ ID NO: 2255670 - RNA, 19 nt, Artificial Sequence
  Description of Artificial Sequence: Synthetic oligonucleotide
  Sense strand starting at position 482 of SEQ ID NO: 1884305
agagcuggcugcuuagaga

SEQ ID NO: 2255671 - RNA, 19 nt, Artificial Sequence
  Description of Artificial Sequence: Synthetic oligonucleotide
  Antisense strand to SEQ ID NO: 2255670
ucucuaagcagccagcucu

SEQ ID NO: 2255672 - RNA, 19 nt, Artificial Sequence
  Description of Artificial Sequence: Synthetic oligonucleotide
  Sense strand starting at position 898 of SEQ ID NO: 1884305
ggccuuucggcucagaucu

SEQ ID NO: 2255673 - RNA, 19 nt, Artificial Sequence
  Description of Artificial Sequence: Synthetic oligonucleotide
  Antisense strand to SEQ ID NO: 2255672
agaucugagccgaaaggcc

SEQ ID NO: 2255674 - RNA, 19 nt, Artificial Sequence
  Description of Artificial Sequence: Synthetic oligonucleotide
  Sense strand starting at position 1040 of SEQ ID NO: 1884305
guacguggaugugcucaaa

SEQ ID NO: 2255675 - RNA, 19 nt, Artificial Sequence
  Description of Artificial Sequence: Synthetic oligonucleotide
  Antisense strand to SEQ ID NO: 2255674
uuugagcacauccacguac

SEQ ID NO: 2255676 - RNA, 19 nt, Artificial Sequence
  Description of Artificial Sequence: Synthetic oligonucleotide
  Sense strand starting at position 1043 of SEQ ID NO: 1884305
cguggaugugcucaaagac

SEQ ID NO: 2255677 - RNA, 19 nt, Artificial Sequence
  Description of Artificial Sequence: Synthetic oligonucleotide
  Antisense strand to SEQ ID NO: 2255676
gucuuugagcacauccacg

SEQ ID NO: 2255678 - RNA, 19 nt, Artificial Sequence
  Description of Artificial Sequence: Synthetic oligonucleotide
  Sense strand starting at position 1069 of SEQ ID NO: 1884305
gagacuaugugucccaguu

SEQ ID NO: 2255679 - RNA, 19 nt, Artificial Sequence
  Description of Artificial Sequence: Synthetic oligonucleotide
  Antisense strand to SEQ ID NO: 2255678
aacugggacacauagucuc

SEQ ID NO: 2255680 - RNA, 19 nt, Artificial Sequence
  Description of Artificial Sequence: Synthetic oligonucleotide
  Sense strand starting at position 1090 of SEQ ID NO: 1884305
aaggcuccgccuugggaaa

SEQ ID NO: 2255681 - RNA, 19 nt, Artificial Sequence
  Description of Artificial Sequence: Synthetic oligonucleotide
  Antisense strand to SEQ ID NO: 2255680
uuucccaaggcggagccuu

SEQ ID NO: 2255682 - RNA, 19 nt, Artificial Sequence
  Description of Artificial Sequence: Synthetic oligonucleotide
  Sense strand starting at position 1227 of SEQ ID NO: 1884305
cacagauggucuggaugga

SEQ ID NO: 2255683 - RNA, 19 nt, Artificial Sequence
  Description of Artificial Sequence: Synthetic oligonucleotide
  Antisense strand to SEQ ID NO: 2255682
uccauccagaccaucugug

SEQ ID NO: 2255684 - RNA, 19 nt, Artificial Sequence
  Description of Artificial Sequence: Synthetic oligonucleotide
  Sense strand starting at position 1313 of SEQ ID NO: 1884305
cccgaugcgugaucacaga

SEQ ID NO: 2255685 - RNA, 19 nt, Artificial Sequence
  Description of Artificial Sequence: Synthetic oligonucleotide
  Antisense strand to SEQ ID NO: 2255684
ucugugaucacgcaucggg

SEQ ID NO: 2255686 - RNA, 19 nt, Artificial Sequence
  Description of Artificial Sequence: Synthetic oligonucleotide
  Sense strand starting at position 1333 of SEQ ID NO: 1884305
ccacauugugccugcaagu

SEQ ID NO: 2255687 - RNA, 19 nt, Artificial Sequence
  Description of Artificial Sequence: Synthetic oligonucleotide
  Antisense strand to SEQ ID NO: 2255686
acuugcaggcacaaugugg

SEQ ID NO: 2255688 - RNA, 19 nt, Artificial Sequence
  Description of Artificial Sequence: Synthetic oligonucleotide
  Sense strand starting at position 1411 of SEQ ID NO: 1884305
gcugucuucggagaggaga

SEQ ID NO: 2255689 - RNA, 19 nt, Artificial Sequence
  Description of Artificial Sequence: Synthetic oligonucleotide
  Antisense strand to SEQ ID NO: 2255688
ucuccucuccgaagacagc

SEQ ID NO: 2255690 - RNA, 19 nt, Artificial Sequence
  Description of Artificial Sequence: Synthetic oligonucleotide
  Sense strand starting at position 1413 of SEQ ID NO: 1884305
ugucuucggagaggagaau

SEQ ID NO: 2255691 - RNA, 19 nt, Artificial Sequence
  Description of Artificial Sequence: Synthetic oligonucleotide
  Antisense strand to SEQ ID NO: 2255690
auucuccucuccgaagaca

SEQ ID NO: 2255692 - RNA, 19 nt, Artificial Sequence
  Description of Artificial Sequence: Synthetic oligonucleotide
  Sense strand starting at position 1706 of SEQ ID NO: 1884305
gccuaaagcuccuugacaa

SEQ ID NO: 2255693 - RNA, 19 nt, Artificial Sequence
  Description of Artificial Sequence: Synthetic oligonucleotide
  Antisense strand to SEQ ID NO: 2255692
uugucaaggagcuuuaggc

SEQ ID NO: 2255694 - RNA, 19 nt, Artificial Sequence
  Description of Artificial Sequence: Synthetic oligonucleotide
  Sense strand starting at position 1782 of SEQ ID NO: 1884305
ccaggaguucugggauaac

SEQ ID NO: 2255695 - RNA, 19 nt, Artificial Sequence
  Description of Artificial Sequence: Synthetic oligonucleotide
  Antisense strand to SEQ ID NO: 2255694
guuaucccagaacuccugg

SEQ ID NO: 2255696 - RNA, 19 nt, Artificial Sequence
  Description of Artificial Sequence: Synthetic oligonucleotide
  Sense strand starting at position 2344 of SEQ ID NO: 1884305
gaauaaacguuuccaaagu

SEQ ID NO: 2255697 - RNA, 19 nt, Artificial Sequence
  Description of Artificial Sequence: Synthetic oligonucleotide
  Antisense strand to SEQ ID NO: 2255696
acuuuggaaacguuuauuc

SEQ ID NO: 2255698 - RNA, 19 nt, Artificial Sequence
  Description of Artificial Sequence: Synthetic oligonucleotide
  Sense strand starting at position 2537 of SEQ ID NO: 1884305
gcugcuuacgagugaggga

SEQ ID NO: 2255699 - RNA, 19 nt, Artificial Sequence
  Description of Artificial Sequence: Synthetic oligonucleotide
  Antisense strand to SEQ ID NO: 2255698
ucccucacucguaagcagc

SEQ ID NO: 2255700 - RNA, 19 nt, Artificial Sequence
  Description of Artificial Sequence: Synthetic oligonucleotide
  Sense strand starting at position 2552 of SEQ ID NO: 1884305
gggaguagagucugccuua

SEQ ID NO: 2255701 - RNA, 19 nt, Artificial Sequence
  Description of Artificial Sequence: Synthetic oligonucleotide
  Antisense strand to SEQ ID NO: 2255700
uaaggcagacucuacuccc

SEQ ID NO: 2255702 - RNA, 19 nt, Artificial Sequence
  Description of Artificial Sequence: Synthetic oligonucleotide
  Sense strand starting at position 2553 of SEQ ID NO: 1884305
ggaguagagucugccuuag

SEQ ID NO: 2255703 - RNA, 19 nt, Artificial Sequence
  Description of Artificial Sequence: Synthetic oligonucleotide
  Antisense strand to SEQ ID NO: 2255702
cuaaggcagacucuacucc

SEQ ID NO: 2255704 - RNA, 19 nt, Artificial Sequence
  Description of Artificial Sequence: Synthetic oligonucleotide
  Sense strand starting at position 2555 of SEQ ID NO: 1884305
aguagagucugccuuagca

SEQ ID NO: 2255705 - RNA, 19 nt, Artificial Sequence
  Description of Artificial Sequence: Synthetic oligonucleotide
  Antisense strand to SEQ ID NO: 2255704
ugcuaaggcagacucuacu

SEQ ID NO: 2255706 - RNA, 19 nt, Artificial Sequence
  Description of Artificial Sequence: Synthetic oligonucleotide
  Sense strand starting at position 2557 of SEQ ID NO: 1884305
uagagucugccuuagcaag

SEQ ID NO: 2255707 - RNA, 19 nt, Artificial Sequence
  Description of Artificial Sequence: Synthetic oligonucleotide
  Antisense strand to SEQ ID NO: 2255706
cuugcuaaggcagacucua

SEQ ID NO: 2255708 - RNA, 19 nt, Artificial Sequence
  Description of Artificial Sequence: Synthetic oligonucleotide
  Sense strand starting at position 2732 of SEQ ID NO: 1884305
agagguguguccguauaga

SEQ ID NO: 2255709 - RNA, 19 nt, Artificial Sequence
  Description of Artificial Sequence: Synthetic oligonucleotide
  Antisense strand to SEQ ID NO: 2255708
ucuauacggacacaccucu

SEQ ID NO: 2255710 - RNA, 19 nt, Artificial Sequence
  Description of Artificial Sequence: Synthetic oligonucleotide
  Sense strand starting at position 2827 of SEQ ID NO: 1884305
gguuuggucccgggugcaa

SEQ ID NO: 2255711 - RNA, 19 nt, Artificial Sequence
  Description of Artificial Sequence: Synthetic oligonucleotide
  Antisense strand to SEQ ID NO: 2255710
uugcacccgggaccaaacc

SEQ ID NO: 2255712 - RNA, 19 nt, Artificial Sequence
  Description of Artificial Sequence: Synthetic oligonucleotide
  Sense strand starting at position 2844 of SEQ ID NO: 1884305
aagugaagcgcuuggaguu

SEQ ID NO: 2255713 - RNA, 19 nt, Artificial Sequence
  Description of Artificial Sequence: Synthetic oligonucleotide
  Antisense strand to SEQ ID NO: 2255712
aacuccaagcgcuucacuu

SEQ ID NO: 2255714 - RNA, 19 nt, Artificial Sequence
  Description of Artificial Sequence: Synthetic oligonucleotide
  Sense strand starting at position 3128 of SEQ ID NO: 1884305
ucucauaucugugcucuca

SEQ ID NO: 2255715 - RNA, 19 nt, Artificial Sequence
  Description of Artificial Sequence: Synthetic oligonucleotide
  Antisense strand to SEQ ID NO: 2255714
ugagagcacagauaugaga

SEQ ID NO: 2255716 - RNA, 19 nt, Artificial Sequence
  Description of Artificial Sequence: Synthetic oligonucleotide
  Sense strand starting at position 3162 of SEQ ID NO: 1884305
cccacauccuggcuagauu

SEQ ID NO: 2255717 - RNA, 19 nt, Artificial Sequence
  Description of Artificial Sequence: Synthetic oligonucleotide
  Antisense strand to SEQ ID NO: 2255716
aaucuagccaggauguggg

SEQ ID NO: 2255718 - RNA, 19 nt, Artificial Sequence
  Description of Artificial Sequence: Synthetic oligonucleotide
  Sense strand starting at position 3231 of SEQ ID NO: 1884305
gucgcuugcccagugaaca

SEQ ID NO: 2255719 - RNA, 19 nt, Artificial Sequence
  Description of Artificial Sequence: Synthetic oligonucleotide
  Antisense strand to SEQ ID NO: 2255718
uguucacugggcaagcgac

SEQ ID NO: 2255720 - RNA, 19 nt, Artificial Sequence
  Description of Artificial Sequence: Synthetic oligonucleotide
  Sense strand starting at position 3288 of SEQ ID NO: 1884305
ccuggccauccaugauuau

SEQ ID NO: 2255721 - RNA, 19 nt, Artificial Sequence
  Description of Artificial Sequence: Synthetic oligonucleotide
  Antisense strand to SEQ ID NO: 2255720
auaaucauggauggccagg

SEQ ID NO: 2255722 - RNA, 19 nt, Artificial Sequence
  Description of Artificial Sequence: Synthetic oligonucleotide
  Sense strand starting at position 3289 of SEQ ID NO: 1884305
cuggccauccaugauuauu

SEQ ID NO: 2255723 - RNA, 19 nt, Artificial Sequence
  Description of Artificial Sequence: Synthetic oligonucleotide
  Antisense strand to SEQ ID NO: 2255722
aauaaucauggauggccag

SEQ ID NO: 2255724 - RNA, 19 nt, Artificial Sequence
  Description of Artificial Sequence: Synthetic oligonucleotide
  Sense strand starting at position 3291 of SEQ ID NO: 1884305
ggccauccaugauuauuga

SEQ ID NO: 2255725 - RNA, 19 nt, Artificial Sequence
  Description of Artificial Sequence: Synthetic oligonucleotide
  Antisense strand to SEQ ID NO: 2255724
ucaauaaucauggauggcc

SEQ ID NO: 2255726 - RNA, 19 nt, Artificial Sequence
  Description of Artificial Sequence: Synthetic oligonucleotide
  Sense strand starting at position 3292 of SEQ ID NO: 1884305
gccauccaugauuauugaa

SEQ ID NO: 2255727 - RNA, 19 nt, Artificial Sequence
  Description of Artificial Sequence: Synthetic oligonucleotide
  Antisense strand to SEQ ID NO: 2255726
uucaauaaucauggauggc

SEQ ID NO: 2255728 - RNA, 19 nt, Artificial Sequence
  Description of Artificial Sequence: Synthetic oligonucleotide
  Sense strand starting at position 3589 of SEQ ID NO: 1884305
ggagcaagacuccagcuaa

SEQ ID NO: 2255729 - RNA, 19 nt, Artificial Sequence
  Description of Artificial Sequence: Synthetic oligonucleotide
  Antisense strand to SEQ ID NO: 2255728
uuagcuggagucuugcucc

SEQ ID NO: 2255730 - RNA, 19 nt, Artificial Sequence
  Description of Artificial Sequence: Synthetic oligonucleotide
  Sense strand starting at position 3664 of SEQ ID NO: 1884305
gcaggcaugccuguguauu

SEQ ID NO: 2255731 - RNA, 19 nt, Artificial Sequence
  Description of Artificial Sequence: Synthetic oligonucleotide
  Antisense strand to SEQ ID NO: 2255730
aauacacaggcaugccugc

SEQ ID NO: 2255732 - RNA, 19 nt, Artificial Sequence
  Description of Artificial Sequence: Synthetic oligonucleotide
  Sense strand starting at position 3665 of SEQ ID NO: 1884305
caggcaugccuguguauuc

SEQ ID NO: 2255733 - RNA, 19 nt, Artificial Sequence
  Description of Artificial Sequence: Synthetic oligonucleotide
  Antisense strand to SEQ ID NO: 2255732
gaauacacaggcaugccug

SEQ ID NO: 2255734 - RNA, 19 nt, Artificial Sequence
  Description of Artificial Sequence: Synthetic oligonucleotide
  Sense strand starting at position 3670 of SEQ ID NO: 1884305
augccuguguauucucaca

SEQ ID NO: 2255735 - RNA, 19 nt, Artificial Sequence
  Description of Artificial Sequence: Synthetic oligonucleotide
  Antisense strand to SEQ ID NO: 2255734
ugugagaauacacaggcau

SEQ ID NO: 2255736 - RNA, 19 nt, Artificial Sequence
  Description of Artificial Sequence: Synthetic oligonucleotide
  Sense strand starting at position 3672 of SEQ ID NO: 1884305
gccuguguauucucacaug

SEQ ID NO: 2255737 - RNA, 19 nt, Artificial Sequence
  Description of Artificial Sequence: Synthetic oligonucleotide
  Antisense strand to SEQ ID NO: 2255736
caugugagaauacacaggc

SEQ ID NO: 2255738 - RNA, 19 nt, Artificial Sequence
  Description of Artificial Sequence: Synthetic oligonucleotide
  Sense strand starting at position 3715 of SEQ ID NO: 1884305
ugcacucaugucugaaugu

SEQ ID NO: 2255739 - RNA, 19 nt, Artificial Sequence
  Description of Artificial Sequence: Synthetic oligonucleotide
  Antisense strand to SEQ ID NO: 2255738
acauucagacaugagugca

SEQ ID NO: 2255740 - RNA, 19 nt, Artificial Sequence
  Description of Artificial Sequence: Synthetic oligonucleotide
  Sense strand starting at position 3851 of SEQ ID NO: 1884305
ccaucuccaguguaucuua

SEQ ID NO: 2255741 - RNA, 19 nt, Artificial Sequence
  Description of Artificial Sequence: Synthetic oligonucleotide
  Antisense strand to SEQ ID NO: 2255740
uaagauacacuggagaugg

SEQ ID NO: 2255742 - RNA, 19 nt, Artificial Sequence
  Description of Artificial Sequence: Synthetic oligonucleotide
  Sense strand starting at position 3975 of SEQ ID NO: 1884305
ugagaucucucagcccaga

SEQ ID NO: 2255743 - RNA, 19 nt, Artificial Sequence
  Description of Artificial Sequence: Synthetic oligonucleotide
  Antisense strand to SEQ ID NO: 2255742
ucugggcugagagaucuca

SEQ ID NO: 2255744 - RNA, 19 nt, Artificial Sequence
  Description of Artificial Sequence: Synthetic oligonucleotide
  Sense strand starting at position 491 of SEQ ID NO: 1884306
acuuacuuccuguguuauc

SEQ ID NO: 2255745 - RNA, 19 nt, Artificial Sequence
  Description of Artificial Sequence: Synthetic oligonucleotide
  Antisense strand to SEQ ID NO: 2255744
gauaacacaggaaguaagu

SEQ ID NO: 2255746 - RNA, 19 nt, Artificial Sequence
  Description of Artificial Sequence: Synthetic oligonucleotide
  Sense strand starting at position 492 of SEQ ID NO: 1884306
cuuacuuccuguguuauca

SEQ ID NO: 2255747 - RNA, 19 nt, Artificial Sequence
  Description of Artificial Sequence: Synthetic oligonucleotide
  Antisense strand to SEQ ID NO: 2255746
ugauaacacaggaaguaag

SEQ ID NO: 2255748 - RNA, 19 nt, Artificial Sequence
  Description of Artificial Sequence: Synthetic oligonucleotide
  Sense strand starting at position 496 of SEQ ID NO: 1884306
cuuccuguguuaucaucuu

SEQ ID NO: 2255749 - RNA, 19 nt, Artificial Sequence
  Description of Artificial Sequence: Synthetic oligonucleotide
  Antisense strand to SEQ ID NO: 2255748
aagaugauaacacaggaag

SEQ ID NO: 2255750 - RNA, 19 nt, Artificial Sequence
  Description of Artificial Sequence: Synthetic oligonucleotide
  Sense strand starting at position 502 of SEQ ID NO: 1884306
guguuaucaucuuucuacc

SEQ ID NO: 2255751 - RNA, 19 nt, Artificial Sequence
  Description of Artificial Sequence: Synthetic oligonucleotide
  Antisense strand to SEQ ID NO: 2255750
gguagaaagaugauaacac

SEQ ID NO: 2255752 - RNA, 19 nt, Artificial Sequence
  Description of Artificial Sequence: Synthetic oligonucleotide
  Sense strand starting at position 651 of SEQ ID NO: 1884306
augagugaacuguaugcuu

SEQ ID NO: 2255753 - RNA, 19 nt, Artificial Sequence
  Description of Artificial Sequence: Synthetic oligonucleotide
  Antisense strand to SEQ ID NO: 2255752
aagcauacaguucacucau

SEQ ID NO: 2255754 - RNA, 19 nt, Artificial Sequence
  Description of Artificial Sequence: Synthetic oligonucleotide
  Sense strand starting at position 672 of SEQ ID NO: 1884306
cuuagagcucuuuaaagca

SEQ ID NO: 2255755 - RNA, 19 nt, Artificial Sequence
  Description of Artificial Sequence: Synthetic oligonucleotide
  Antisense strand to SEQ ID NO: 2255754
ugcuuuaaagagcucuaag

SEQ ID NO: 2255756 - RNA, 19 nt, Artificial Sequence
  Description of Artificial Sequence: Synthetic oligonucleotide
  Sense strand starting at position 1028 of SEQ ID NO: 1884306
augccuauauucccagagu

SEQ ID NO: 2255757 - RNA, 19 nt, Artificial Sequence
  Description of Artificial Sequence: Synthetic oligonucleotide
  Antisense strand to SEQ ID NO: 2255756
acucugggaauauaggcau

SEQ ID NO: 2255758 - RNA, 19 nt, Artificial Sequence
  Description of Artificial Sequence: Synthetic oligonucleotide
  Sense strand starting at position 1186 of SEQ ID NO: 1884306
uaaguuauaugugcacgua

SEQ ID NO: 2255759 - RNA, 19 nt, Artificial Sequence
  Description of Artificial Sequence: Synthetic oligonucleotide
  Antisense strand to SEQ ID NO: 2255758
uacgugcacauauaacuua

SEQ ID NO: 2255760 - RNA, 19 nt, Artificial Sequence
  Description of Artificial Sequence: Synthetic oligonucleotide
  Sense strand starting at position 1187 of SEQ ID NO: 1884306
aaguuauaugugcacguaa

SEQ ID NO: 2255761 - RNA, 19 nt, Artificial Sequence
  Description of Artificial Sequence: Synthetic oligonucleotide
  Antisense strand to SEQ ID NO: 2255760
uuacgugcacauauaacuu

SEQ ID NO: 2255762 - RNA, 19 nt, Artificial Sequence
  Description of Artificial Sequence: Synthetic oligonucleotide
  Sense strand starting at position 1198 of SEQ ID NO: 1884306
gcacguaagcgucuuaucu

SEQ ID NO: 2255763 - RNA, 19 nt, Artificial Sequence
  Description of Artificial Sequence: Synthetic oligonucleotide
  Antisense strand to SEQ ID NO: 2255762
agauaagacgcuuacgugc

SEQ ID NO: 2255764 - RNA, 19 nt, Artificial Sequence
  Description of Artificial Sequence: Synthetic oligonucleotide
  Sense strand starting at position 1199 of SEQ ID NO: 1884306
cacguaagcgucuuaucuc

SEQ ID NO: 2255765 - RNA, 19 nt, Artificial Sequence
  Description of Artificial Sequence: Synthetic oligonucleotide
  Antisense strand to SEQ ID NO: 2255764
gagauaagacgcuuacgug

SEQ ID NO: 2255766 - RNA, 19 nt, Artificial Sequence
  Description of Artificial Sequence: Synthetic oligonucleotide
  Sense strand starting at position 1554 of SEQ ID NO: 1884306
gguggcguccgaguuaucu

SEQ ID NO: 2255767 - RNA, 19 nt, Artificial Sequence
  Description of Artificial Sequence: Synthetic oligonucleotide
  Antisense strand to SEQ ID NO: 2255766
agauaacucggacgccacc

SEQ ID NO: 2255768 - RNA, 19 nt, Artificial Sequence
  Description of Artificial Sequence: Synthetic oligonucleotide
  Sense strand starting at position 1564 of SEQ ID NO: 1884306
gaguuaucuccgggaccca

SEQ ID NO: 2255769 - RNA, 19 nt, Artificial Sequence
  Description of Artificial Sequence: Synthetic oligonucleotide
  Antisense strand to SEQ ID NO: 2255768
ugggucccggagauaacuc

SEQ ID NO: 2255770 - RNA, 19 nt, Artificial Sequence
  Description of Artificial Sequence: Synthetic oligonucleotide
  Sense strand starting at position 2217 of SEQ ID NO: 1884306
ugaaguuccugaguugcau

SEQ ID NO: 2255771 - RNA, 19 nt, Artificial Sequence
  Description of Artificial Sequence: Synthetic oligonucleotide
  Antisense strand to SEQ ID NO: 2255770
augcaacucaggaacuuca

SEQ ID NO: 2255772 - RNA, 19 nt, Artificial Sequence
  Description of Artificial Sequence: Synthetic oligonucleotide
  Sense strand starting at position 2241 of SEQ ID NO: 1884306
cugcgucugaccugagagu

SEQ ID NO: 2255773 - RNA, 19 nt, Artificial Sequence
  Description of Artificial Sequence: Synthetic oligonucleotide
  Antisense strand to SEQ ID NO: 2255772
acucucaggucagacgcag

SEQ ID NO: 2255774 - RNA, 19 nt, Artificial Sequence
  Description of Artificial Sequence: Synthetic oligonucleotide
  Sense strand starting at position 2357 of SEQ ID NO: 1884306
ucggcaucauccucugaca

SEQ ID NO: 2255775 - RNA, 19 nt, Artificial Sequence
  Description of Artificial Sequence: Synthetic oligonucleotide
  Antisense strand to SEQ ID NO: 2255774
ugucagaggaugaugccga

SEQ ID NO: 2255776 - RNA, 19 nt, Artificial Sequence
  Description of Artificial Sequence: Synthetic oligonucleotide
  Sense strand starting at position 2359 of SEQ ID NO: 1884306
ggcaucauccucugacaga

SEQ ID NO: 2255777 - RNA, 19 nt, Artificial Sequence
  Description of Artificial Sequence: Synthetic oligonucleotide
  Antisense strand to SEQ ID NO: 2255776
ucugucagaggaugaugcc

SEQ ID NO: 2255778 - RNA, 19 nt, Artificial Sequence
  Description of Artificial Sequence: Synthetic oligonucleotide
  Sense strand starting at position 2533 of SEQ ID NO: 1884306
gcguuucccuguucagaag

SEQ ID NO: 2255779 - RNA, 19 nt, Artificial Sequence
  Description of Artificial Sequence: Synthetic oligonucleotide
  Antisense strand to SEQ ID NO: 2255778
cuucugaacagggaaacgc

SEQ ID NO: 2255780 - RNA, 19 nt, Artificial Sequence
  Description of Artificial Sequence: Synthetic oligonucleotide
  Sense strand starting at position 2653 of SEQ ID NO: 1884306
aauggcuuuguccaagagu

SEQ ID NO: 2255781 - RNA, 19 nt, Artificial Sequence
  Description of Artificial Sequence: Synthetic oligonucleotide
  Antisense strand to SEQ ID NO: 2255780
acucuuggacaaagccauu

SEQ ID NO: 2255782 - RNA, 19 nt, Artificial Sequence
  Description of Artificial Sequence: Synthetic oligonucleotide
  Sense strand starting at position 2656 of SEQ ID NO: 1884306
ggcuuuguccaagaguuuc

SEQ ID NO: 2255783 - RNA, 19 nt, Artificial Sequence
  Description of Artificial Sequence: Synthetic oligonucleotide
  Antisense strand to SEQ ID NO: 2255782
gaaacucuuggacaaagcc

SEQ ID NO: 2255784 - RNA, 19 nt, Artificial Sequence
  Description of Artificial Sequence: Synthetic oligonucleotide
  Sense strand starting at position 2681 of SEQ ID NO: 1884306
uacuuuagcgcucaagaag

SEQ ID NO: 2255785 - RNA, 19 nt, Artificial Sequence
  Description of Artificial Sequence: Synthetic oligonucleotide
  Antisense strand to SEQ ID NO: 2255784
cuucuugagcgcuaaagua

SEQ ID NO: 2255786 - RNA, 19 nt, Artificial Sequence
  Description of Artificial Sequence: Synthetic oligonucleotide
  Sense strand starting at position 2739 of SEQ ID NO: 1884306
uuuguaaacucaggagaca

SEQ ID NO: 2255787 - RNA, 19 nt, Artificial Sequence
  Description of Artificial Sequence: Synthetic oligonucleotide
  Antisense strand to SEQ ID NO: 2255786
ugucuccugaguuuacaaa

SEQ ID NO: 2255788 - RNA, 19 nt, Artificial Sequence
  Description of Artificial Sequence: Synthetic oligonucleotide
  Sense strand starting at position 2750 of SEQ ID NO: 1884306
aggagacagccuuauugcu

SEQ ID NO: 2255789 - RNA, 19 nt, Artificial Sequence
  Description of Artificial Sequence: Synthetic oligonucleotide
  Antisense strand to SEQ ID NO: 2255788
agcaauaaggcugucuccu

SEQ ID NO: 2255790 - RNA, 19 nt, Artificial Sequence
  Description of Artificial Sequence: Synthetic oligonucleotide
  Sense strand starting at position 2758 of SEQ ID NO: 1884306
gccuuauugcugcagguaa

SEQ ID NO: 2255791 - RNA, 19 nt, Artificial Sequence
  Description of Artificial Sequence: Synthetic oligonucleotide
  Antisense strand to SEQ ID NO: 2255790
uuaccugcagcaauaaggc

SEQ ID NO: 2255792 - RNA, 19 nt, Artificial Sequence
  Description of Artificial Sequence: Synthetic oligonucleotide
  Sense strand starting at position 2760 of SEQ ID NO: 1884306
cuuauugcugcagguaagu

SEQ ID NO: 2255793 - RNA, 19 nt, Artificial Sequence
  Description of Artificial Sequence: Synthetic oligonucleotide
  Antisense strand to SEQ ID NO: 2255792
acuuaccugcagcaauaag

SEQ ID NO: 2255794 - RNA, 19 nt, Artificial Sequence
  Description of Artificial Sequence: Synthetic oligonucleotide
  Sense strand starting at position 2801 of SEQ ID NO: 1884306
ccucucucaugcuugggaa

SEQ ID NO: 2255795 - RNA, 19 nt, Artificial Sequence
  Description of Artificial Sequence: Synthetic oligonucleotide
  Antisense strand to SEQ ID NO: 2255794
uucccaagcaugagagagg

SEQ ID NO: 2255796 - RNA, 19 nt, Artificial Sequence
  Description of Artificial Sequence: Synthetic oligonucleotide
  Sense strand starting at position 2802 of SEQ ID NO: 1884306
cucucucaugcuugggaaa

SEQ ID NO: 2255797 - RNA, 19 nt, Artificial Sequence
  Description of Artificial Sequence: Synthetic oligonucleotide
  Antisense strand to SEQ ID NO: 2255796
uuucccaagcaugagagag

SEQ ID NO: 2255798 - RNA, 19 nt, Artificial Sequence
  Description of Artificial Sequence: Synthetic oligonucleotide
  Sense strand starting at position 2848 of SEQ ID NO: 1884306
agcuaacuccuguguaacu

SEQ ID NO: 2255799 - RNA, 19 nt, Artificial Sequence
  Description of Artificial Sequence: Synthetic oligonucleotide
  Antisense strand to SEQ ID NO: 2255798
aguuacacaggaguuagcu

SEQ ID NO: 2255800 - RNA, 19 nt, Artificial Sequence
  Description of Artificial Sequence: Synthetic oligonucleotide
  Sense strand starting at position 2857 of SEQ ID NO: 1884306
cuguguaacuguuugcaac

SEQ ID NO: 2255801 - RNA, 19 nt, Artificial Sequence
  Description of Artificial Sequence: Synthetic oligonucleotide
  Antisense strand to SEQ ID NO: 2255800
guugcaaacaguuacacag

SEQ ID NO: 2255802 - RNA, 19 nt, Artificial Sequence
  Description of Artificial Sequence: Synthetic oligonucleotide
  Sense strand starting at position 2906 of SEQ ID NO: 1884306
gcaacccugagagguuuau

SEQ ID NO: 2255803 - RNA, 19 nt, Artificial Sequence
  Description of Artificial Sequence: Synthetic oligonucleotide
  Antisense strand to SEQ ID NO: 2255802
auaaaccucucaggguugc

SEQ ID NO: 2255804 - RNA, 19 nt, Artificial Sequence
  Description of Artificial Sequence: Synthetic oligonucleotide
  Sense strand starting at position 2910 of SEQ ID NO: 1884306
cccugagagguuuauauuc

SEQ ID NO: 2255805 - RNA, 19 nt, Artificial Sequence
  Description of Artificial Sequence: Synthetic oligonucleotide
  Antisense strand to SEQ ID NO: 2255804
gaauauaaaccucucaggg

SEQ ID NO: 2255806 - RNA, 19 nt, Artificial Sequence
  Description of Artificial Sequence: Synthetic oligonucleotide
  Sense strand starting at position 2947 of SEQ ID NO: 1884306
uggaauccagaguguuuaa

SEQ ID NO: 2255807 - RNA, 19 nt, Artificial Sequence
  Description of Artificial Sequence: Synthetic oligonucleotide
  Antisense strand to SEQ ID NO: 2255806
uuaaacacucuggauucca

SEQ ID NO: 2255808 - RNA, 19 nt, Artificial Sequence
  Description of Artificial Sequence: Synthetic oligonucleotide
  Sense strand starting at position 2950 of SEQ ID NO: 1884306
aauccagaguguuuaagga

SEQ ID NO: 2255809 - RNA, 19 nt, Artificial Sequence
  Description of Artificial Sequence: Synthetic oligonucleotide
  Antisense strand to SEQ ID NO: 2255808
uccuuaaacacucuggauu

SEQ ID NO: 2255810 - RNA, 19 nt, Artificial Sequence
  Description of Artificial Sequence: Synthetic oligonucleotide
  Sense strand starting at position 2990 of SEQ ID NO: 1884306
aggucuaguaaaugguaaa

SEQ ID NO: 2255811 - RNA, 19 nt, Artificial Sequence
  Description of Artificial Sequence: Synthetic oligonucleotide
  Antisense strand to SEQ ID NO: 2255810
uuuaccauuuacuagaccu

SEQ ID NO: 2255812 - RNA, 19 nt, Artificial Sequence
  Description of Artificial Sequence: Synthetic oligonucleotide
  Sense strand starting at position 2991 of SEQ ID NO: 1884306
ggucuaguaaaugguaaag

SEQ ID NO: 2255813 - RNA, 19 nt, Artificial Sequence
  Description of Artificial Sequence: Synthetic oligonucleotide
  Antisense strand to SEQ ID NO: 2255812
cuuuaccauuuacuagacc

SEQ ID NO: 2255814 - RNA, 19 nt, Artificial Sequence
  Description of Artificial Sequence: Synthetic oligonucleotide
  Sense strand starting at position 3020 of SEQ ID NO: 1884306
ucaugccuccaugaaguuu

SEQ ID NO: 2255815 - RNA, 19 nt, Artificial Sequence
  Description of Artificial Sequence: Synthetic oligonucleotide
  Antisense strand to SEQ ID NO: 2255814
aaacuucauggaggcauga

SEQ ID NO: 2255816 - RNA, 19 nt, Artificial Sequence
  Description of Artificial Sequence: Synthetic oligonucleotide
  Sense strand starting at position 3029 of SEQ ID NO: 1884306
caugaaguuugccuagaga

SEQ ID NO: 2255817 - RNA, 19 nt, Artificial Sequence
  Description of Artificial Sequence: Synthetic oligonucleotide
  Antisense strand to SEQ ID NO: 2255816
ucucuaggcaaacuucaug

SEQ ID NO: 2255818 - RNA, 19 nt, Artificial Sequence
  Description of Artificial Sequence: Synthetic oligonucleotide
  Sense strand starting at position 3965 of SEQ ID NO: 1884306
gggcgaaauugucugucuc

SEQ ID NO: 2255819 - RNA, 19 nt, Artificial Sequence
  Description of Artificial Sequence: Synthetic oligonucleotide
  Antisense strand to SEQ ID NO: 2255818
gagacagacaauuucgccc

SEQ ID NO: 2255820 - RNA, 19 nt, Artificial Sequence
  Description of Artificial Sequence: Synthetic oligonucleotide
  Sense strand starting at position 3966 of SEQ ID NO: 1884306
ggcgaaauugucugucuca

SEQ ID NO: 2255821 - RNA, 19 nt, Artificial Sequence
  Description of Artificial Sequence: Synthetic oligonucleotide
  Antisense strand to SEQ ID NO: 2255820
ugagacagacaauuucgcc

SEQ ID NO: 2255822 - RNA, 19 nt, Artificial Sequence
  Description of Artificial Sequence: Synthetic oligonucleotide
  Sense strand starting at position 3967 of SEQ ID NO: 1884306
gcgaaauugucugucucaa

SEQ ID NO: 2255823 - RNA, 19 nt, Artificial Sequence
  Description of Artificial Sequence: Synthetic oligonucleotide
  Antisense strand to SEQ ID NO: 2255822
uugagacagacaauuucgc

SEQ ID NO: 2255824 - RNA, 19 nt, Artificial Sequence
  Description of Artificial Sequence: Synthetic oligonucleotide
  Sense strand starting at position 436 of SEQ ID NO: 1884307
guuucuuugagacgaaguc

SEQ ID NO: 2255825 - RNA, 19 nt, Artificial Sequence
  Description of Artificial Sequence: Synthetic oligonucleotide
  Antisense strand to SEQ ID NO: 2255824
gacuucgucucaaagaaac

SEQ ID NO: 2255826 - RNA, 19 nt, Artificial Sequence
  Description of Artificial Sequence: Synthetic oligonucleotide
  Sense strand starting at position 724 of SEQ ID NO: 1884307
ggcugaaaucuugacuuua

SEQ ID NO: 2255827 - RNA, 19 nt, Artificial Sequence
  Description of Artificial Sequence: Synthetic oligonucleotide
  Antisense strand to SEQ ID NO: 2255826
uaaagucaagauuucagcc

SEQ ID NO: 2255828 - RNA, 19 nt, Artificial Sequence
  Description of Artificial Sequence: Synthetic oligonucleotide
  Sense strand starting at position 864 of SEQ ID NO: 1884307
gggucauccugucauuaga

SEQ ID NO: 2255829 - RNA, 19 nt, Artificial Sequence
  Description of Artificial Sequence: Synthetic oligonucleotide
  Antisense strand to SEQ ID NO: 2255828
ucuaaugacaggaugaccc

SEQ ID NO: 2255830 - RNA, 19 nt, Artificial Sequence
  Description of Artificial Sequence: Synthetic oligonucleotide
  Sense strand starting at position 878 of SEQ ID NO: 1884307
uuagaaagguucuugcagu

SEQ ID NO: 2255831 - RNA, 19 nt, Artificial Sequence
  Description of Artificial Sequence: Synthetic oligonucleotide
  Antisense strand to SEQ ID NO: 2255830
acugcaagaaccuuucuaa

SEQ ID NO: 2255832 - RNA, 19 nt, Artificial Sequence
  Description of Artificial Sequence: Synthetic oligonucleotide
  Sense strand starting at position 955 of SEQ ID NO: 1884307
gcaggugaugugcaaauau

SEQ ID NO: 2255833 - RNA, 19 nt, Artificial Sequence
  Description of Artificial Sequence: Synthetic oligonucleotide
  Antisense strand to SEQ ID NO: 2255832
auauuugcacaucaccugc

SEQ ID NO: 2255834 - RNA, 19 nt, Artificial Sequence
  Description of Artificial Sequence: Synthetic oligonucleotide
  Sense strand starting at position 1360 of SEQ ID NO: 1884307
gagaguuaagaguggaauc

SEQ ID NO: 2255835 - RNA, 19 nt, Artificial Sequence
  Description of Artificial Sequence: Synthetic oligonucleotide
  Antisense strand to SEQ ID NO: 2255834
gauuccacucuuaacucuc

SEQ ID NO: 2255836 - RNA, 19 nt, Artificial Sequence
  Description of Artificial Sequence: Synthetic oligonucleotide
  Sense strand starting at position 1371 of SEQ ID NO: 1884307
guggaauccuagggaagag

SEQ ID NO: 2255837 - RNA, 19 nt, Artificial Sequence
  Description of Artificial Sequence: Synthetic oligonucleotide
  Antisense strand to SEQ ID NO: 2255836
cucuucccuaggauuccac

SEQ ID NO: 2255838 - RNA, 19 nt, Artificial Sequence
  Description of Artificial Sequence: Synthetic oligonucleotide
  Sense strand starting at position 1435 of SEQ ID NO: 1884307
cagggucugucccuuaaug

SEQ ID NO: 2255839 - RNA, 19 nt, Artificial Sequence
  Description of Artificial Sequence: Synthetic oligonucleotide
  Antisense strand to SEQ ID NO: 2255838
cauuaagggacagacccug

SEQ ID NO: 2255840 - RNA, 19 nt, Artificial Sequence
  Description of Artificial Sequence: Synthetic oligonucleotide
  Sense strand starting at position 1437 of SEQ ID NO: 1884307
gggucugucccuuaauguc

SEQ ID NO: 2255841 - RNA, 19 nt, Artificial Sequence
  Description of Artificial Sequence: Synthetic oligonucleotide
  Antisense strand to SEQ ID NO: 2255840
gacauuaagggacagaccc

SEQ ID NO: 2255842 - RNA, 19 nt, Artificial Sequence
  Description of Artificial Sequence: Synthetic oligonucleotide
  Sense strand starting at position 1468 of SEQ ID NO: 1884307
aggagaugguuccuggagu

SEQ ID NO: 2255843 - RNA, 19 nt, Artificial Sequence
  Description of Artificial Sequence: Synthetic oligonucleotide
  Antisense strand to SEQ ID NO: 2255842
acuccaggaaccaucuccu

SEQ ID NO: 2255844 - RNA, 19 nt, Artificial Sequence
  Description of Artificial Sequence: Synthetic oligonucleotide
  Sense strand starting at position 1540 of SEQ ID NO: 1884307
gcgccaucccuggaggaga

SEQ ID NO: 2255845 - RNA, 19 nt, Artificial Sequence
  Description of Artificial Sequence: Synthetic oligonucleotide
  Antisense strand to SEQ ID NO: 2255844
ucuccuccagggauggcgc

SEQ ID NO: 2255846 - RNA, 19 nt, Artificial Sequence
  Description of Artificial Sequence: Synthetic oligonucleotide
  Sense strand starting at position 1784 of SEQ ID NO: 1884307
ggaccuuuccgagacugua

SEQ ID NO: 2255847 - RNA, 19 nt, Artificial Sequence
  Description of Artificial Sequence: Synthetic oligonucleotide
  Antisense strand to SEQ ID NO: 2255846
uacagucucggaaaggucc

SEQ ID NO: 2255848 - RNA, 19 nt, Artificial Sequence
  Description of Artificial Sequence: Synthetic oligonucleotide
  Sense strand starting at position 1956 of SEQ ID NO: 1884307
aaagguucucgaggcuaac

SEQ ID NO: 2255849 - RNA, 19 nt, Artificial Sequence
  Description of Artificial Sequence: Synthetic oligonucleotide
  Antisense strand to SEQ ID NO: 2255848
guuagccucgagaaccuuu

SEQ ID NO: 2255850 - RNA, 19 nt, Artificial Sequence
  Description of Artificial Sequence: Synthetic oligonucleotide
  Sense strand starting at position 2104 of SEQ ID NO: 1884307
ccucuuuggcugugaguga

SEQ ID NO: 2255851 - RNA, 19 nt, Artificial Sequence
  Description of Artificial Sequence: Synthetic oligonucleotide
  Antisense strand to SEQ ID NO: 2255850
ucacucacagccaaagagg

SEQ ID NO: 2255852 - RNA, 19 nt, Artificial Sequence
  Description of Artificial Sequence: Synthetic oligonucleotide
  Sense strand starting at position 2126 of SEQ ID NO: 1884307
ggaggaaacuugugagacu

SEQ ID NO: 2255853 - RNA, 19 nt, Artificial Sequence
  Description of Artificial Sequence: Synthetic oligonucleotide
  Antisense strand to SEQ ID NO: 2255852
agucucacaaguuuccucc

SEQ ID NO: 2255854 - RNA, 19 nt, Artificial Sequence
  Description of Artificial Sequence: Synthetic oligonucleotide
  Sense strand starting at position 2252 of SEQ ID NO: 1884307
cugcgauuugcauacaguu

SEQ ID NO: 2255855 - RNA, 19 nt, Artificial Sequence
  Description of Artificial Sequence: Synthetic oligonucleotide
  Antisense strand to SEQ ID NO: 2255854
aacuguaugcaaaucgcag

SEQ ID NO: 2255856 - RNA, 19 nt, Artificial Sequence
  Description of Artificial Sequence: Synthetic oligonucleotide
  Sense strand starting at position 2453 of SEQ ID NO: 1884307
ucaggugacccauguuugu

SEQ ID NO: 2255857 - RNA, 19 nt, Artificial Sequence
  Description of Artificial Sequence: Synthetic oligonucleotide
  Antisense strand to SEQ ID NO: 2255856
acaaacaugggucaccuga

SEQ ID NO: 2255858 - RNA, 19 nt, Artificial Sequence
  Description of Artificial Sequence: Synthetic oligonucleotide
  Sense strand starting at position 2456 of SEQ ID NO: 1884307
ggugacccauguuuguaaa

SEQ ID NO: 2255859 - RNA, 19 nt, Artificial Sequence
  Description of Artificial Sequence: Synthetic oligonucleotide
  Antisense strand to SEQ ID NO: 2255858
uuuacaaacaugggucacc

SEQ ID NO: 2255860 - RNA, 19 nt, Artificial Sequence
  Description of Artificial Sequence: Synthetic oligonucleotide
  Sense strand starting at position 2458 of SEQ ID NO: 1884307
ugacccauguuuguaaaca

SEQ ID NO: 2255861 - RNA, 19 nt, Artificial Sequence
  Description of Artificial Sequence: Synthetic oligonucleotide
  Antisense strand to SEQ ID NO: 2255860
uguuuacaaacauggguca

SEQ ID NO: 2255862 - RNA, 19 nt, Artificial Sequence
  Description of Artificial Sequence: Synthetic oligonucleotide
  Sense strand starting at position 2543 of SEQ ID NO: 1884307
gucagaggucaugggagaa

SEQ ID NO: 2255863 - RNA, 19 nt, Artificial Sequence
  Description of Artificial Sequence: Synthetic oligonucleotide
  Antisense strand to SEQ ID NO: 2255862
uucucccaugaccucugac

SEQ ID NO: 2255864 - RNA, 19 nt, Artificial Sequence
  Description of Artificial Sequence: Synthetic oligonucleotide
  Sense strand starting at position 2577 of SEQ ID NO: 1884307
auugguaacucagggaaga

SEQ ID NO: 2255865 - RNA, 19 nt, Artificial Sequence
  Description of Artificial Sequence: Synthetic oligonucleotide
  Antisense strand to SEQ ID NO: 2255864
ucuucccugaguuaccaau

SEQ ID NO: 2255866 - RNA, 19 nt, Artificial Sequence
  Description of Artificial Sequence: Synthetic oligonucleotide
  Sense strand starting at position 2665 of SEQ ID NO: 1884307
gccgaaagcuaggauuuga

SEQ ID NO: 2255867 - RNA, 19 nt, Artificial Sequence
  Description of Artificial Sequence: Synthetic oligonucleotide
  Antisense strand to SEQ ID NO: 2255866
ucaaauccuagcuuucggc

SEQ ID NO: 2255868 - RNA, 19 nt, Artificial Sequence
  Description of Artificial Sequence: Synthetic oligonucleotide
  Sense strand starting at position 2670 of SEQ ID NO: 1884307
aagcuaggauuugagaaau

SEQ ID NO: 2255869 - RNA, 19 nt, Artificial Sequence
  Description of Artificial Sequence: Synthetic oligonucleotide
  Antisense strand to SEQ ID NO: 2255868
auuucucaaauccuagcuu

SEQ ID NO: 2255870 - RNA, 19 nt, Artificial Sequence
  Description of Artificial Sequence: Synthetic oligonucleotide
  Sense strand starting at position 2704 of SEQ ID NO: 1884307
ugaggugggcacgaaagau

SEQ ID NO: 2255871 - RNA, 19 nt, Artificial Sequence
  Description of Artificial Sequence: Synthetic oligonucleotide
  Antisense strand to SEQ ID NO: 2255870
aucuuucgugcccaccuca

SEQ ID NO: 2255872 - RNA, 19 nt, Artificial Sequence
  Description of Artificial Sequence: Synthetic oligonucleotide
  Sense strand starting at position 2746 of SEQ ID NO: 1884307
ccuggucuggcucauuaau

SEQ ID NO: 2255873 - RNA, 19 nt, Artificial Sequence
  Description of Artificial Sequence: Synthetic oligonucleotide
  Antisense strand to SEQ ID NO: 2255872
auuaaugagccagaccagg

SEQ ID NO: 2255874 - RNA, 19 nt, Artificial Sequence
  Description of Artificial Sequence: Synthetic oligonucleotide
  Sense strand starting at position 2748 of SEQ ID NO: 1884307
uggucuggcucauuaauuu

SEQ ID NO: 2255875 - RNA, 19 nt, Artificial Sequence
  Description of Artificial Sequence: Synthetic oligonucleotide
  Antisense strand to SEQ ID NO: 2255874
aaauuaaugagccagacca

SEQ ID NO: 2255876 - RNA, 19 nt, Artificial Sequence
  Description of Artificial Sequence: Synthetic oligonucleotide
  Sense strand starting at position 2791 of SEQ ID NO: 1884307
cucagagugucagccaaau

SEQ ID NO: 2255877 - RNA, 19 nt, Artificial Sequence
  Description of Artificial Sequence: Synthetic oligonucleotide
  Antisense strand to SEQ ID NO: 2255876
auuuggcugacacucugag

SEQ ID NO: 2255878 - RNA, 19 nt, Artificial Sequence
  Description of Artificial Sequence: Synthetic oligonucleotide
  Sense strand starting at position 2844 of SEQ ID NO: 1884307
ccagaauccuuucuguaga

SEQ ID NO: 2255879 - RNA, 19 nt, Artificial Sequence
  Description of Artificial Sequence: Synthetic oligonucleotide
  Antisense strand to SEQ ID NO: 2255878
ucuacagaaaggauucugg

SEQ ID NO: 2255880 - RNA, 19 nt, Artificial Sequence
  Description of Artificial Sequence: Synthetic oligonucleotide
  Sense strand starting at position 2917 of SEQ ID NO: 1884307
ugcuucugagugcuuguua

SEQ ID NO: 2255881 - RNA, 19 nt, Artificial Sequence
  Description of Artificial Sequence: Synthetic oligonucleotide
  Antisense strand to SEQ ID NO: 2255880
uaacaagcacucagaagca

SEQ ID NO: 2255882 - RNA, 19 nt, Artificial Sequence
  Description of Artificial Sequence: Synthetic oligonucleotide
  Sense strand starting at position 3268 of SEQ ID NO: 1884307
cuucuaugagucuagccau

SEQ ID NO: 2255883 - RNA, 19 nt, Artificial Sequence
  Description of Artificial Sequence: Synthetic oligonucleotide
  Antisense strand to SEQ ID NO: 2255882
auggcuagacucauagaag

SEQ ID NO: 2255884 - RNA, 19 nt, Artificial Sequence
  Description of Artificial Sequence: Synthetic oligonucleotide
  Sense strand starting at position 3313 of SEQ ID NO: 1884307
aaggaaucauccuaccguu

SEQ ID NO: 2255885 - RNA, 19 nt, Artificial Sequence
  Description of Artificial Sequence: Synthetic oligonucleotide
  Antisense strand to SEQ ID NO: 2255884
aacgguaggaugauuccuu

SEQ ID NO: 2255886 - RNA, 19 nt, Artificial Sequence
  Description of Artificial Sequence: Synthetic oligonucleotide
  Sense strand starting at position 3329 of SEQ ID NO: 1884307
guuucccaucauggugaaa

SEQ ID NO: 2255887 - RNA, 19 nt, Artificial Sequence
  Description of Artificial Sequence: Synthetic oligonucleotide
  Antisense strand to SEQ ID NO: 2255886
uuucaccaugaugggaaac

SEQ ID NO: 2255888 - RNA, 19 nt, Artificial Sequence
  Description of Artificial Sequence: Synthetic oligonucleotide
  Sense strand starting at position 3390 of SEQ ID NO: 1884307
gaaguugaguguuugcagu

SEQ ID NO: 2255889 - RNA, 19 nt, Artificial Sequence
  Description of Artificial Sequence: Synthetic oligonucleotide
  Antisense strand to SEQ ID NO: 2255888
acugcaaacacucaacuuc

SEQ ID NO: 2255890 - RNA, 19 nt, Artificial Sequence
  Description of Artificial Sequence: Synthetic oligonucleotide
  Sense strand starting at position 3877 of SEQ ID NO: 1884307
cuagucauugggcagggau

SEQ ID NO: 2255891 - RNA, 19 nt, Artificial Sequence
  Description of Artificial Sequence: Synthetic oligonucleotide
  Antisense strand to SEQ ID NO: 2255890
aucccugcccaaugacuag

SEQ ID NO: 2255892 - RNA, 19 nt, Artificial Sequence
  Description of Artificial Sequence: Synthetic oligonucleotide
  Sense strand starting at position 3892 of SEQ ID NO: 1884307
ggauccuaaguauagcauu

SEQ ID NO: 2255893 - RNA, 19 nt, Artificial Sequence
  Description of Artificial Sequence: Synthetic oligonucleotide
  Antisense strand to SEQ ID NO: 2255892
aaugcuauacuuaggaucc

SEQ ID NO: 2255894 - RNA, 19 nt, Artificial Sequence
  Description of Artificial Sequence: Synthetic oligonucleotide
  Sense strand starting at position 3918 of SEQ ID NO: 1884307
ccugcaagaucacugguaa

SEQ ID NO: 2255895 - RNA, 19 nt, Artificial Sequence
  Description of Artificial Sequence: Synthetic oligonucleotide
  Antisense strand to SEQ ID NO: 2255894
uuaccagugaucuugcagg

SEQ ID NO: 2255896 - RNA, 19 nt, Artificial Sequence
  Description of Artificial Sequence: Synthetic oligonucleotide
  Sense strand starting at position 3919 of SEQ ID NO: 1884307
cugcaagaucacugguaag

SEQ ID NO: 2255897 - RNA, 19 nt, Artificial Sequence
  Description of Artificial Sequence: Synthetic oligonucleotide
  Antisense strand to SEQ ID NO: 2255896
cuuaccagugaucuugcag

SEQ ID NO: 2255898 - RNA, 19 nt, Artificial Sequence
  Description of Artificial Sequence: Synthetic oligonucleotide
  Sense strand starting at position 3922 of SEQ ID NO: 1884307
caagaucacugguaaguca

SEQ ID NO: 2255899 - RNA, 19 nt, Artificial Sequence
  Description of Artificial Sequence: Synthetic oligonucleotide
  Antisense strand to SEQ ID NO: 2255898
ugacuuaccagugaucuug

SEQ ID NO: 2255900 - RNA, 19 nt, Artificial Sequence
  Description of Artificial Sequence: Synthetic oligonucleotide
  Sense strand starting at position 3933 of SEQ ID NO: 1884307
guaagucagagcuggaacu

SEQ ID NO: 2255901 - RNA, 19 nt, Artificial Sequence
  Description of Artificial Sequence: Synthetic oligonucleotide
  Antisense strand to SEQ ID NO: 2255900
aguuccagcucugacuuac

SEQ ID NO: 2255902 - RNA, 19 nt, Artificial Sequence
  Description of Artificial Sequence: Synthetic oligonucleotide
  Sense strand starting at position 3976 of SEQ ID NO: 1884307
guucgaaucucuccuggca

SEQ ID NO: 2255903 - RNA, 19 nt, Artificial Sequence
  Description of Artificial Sequence: Synthetic oligonucleotide
  Antisense strand to SEQ ID NO: 2255902
ugccaggagagauucgaac

SEQ ID NO: 2255904 - RNA, 19 nt, Artificial Sequence
  Description of Artificial Sequence: Synthetic oligonucleotide
  Sense strand starting at position 199 of SEQ ID NO: 1884308
auuguagagcucuaugaca

SEQ ID NO: 2255905 - RNA, 19 nt, Artificial Sequence
  Description of Artificial Sequence: Synthetic oligonucleotide
  Antisense strand to SEQ ID NO: 2255904
ugucauagagcucuacaau

SEQ ID NO: 2255906 - RNA, 19 nt, Artificial Sequence
  Description of Artificial Sequence: Synthetic oligonucleotide
  Sense strand starting at position 745 of SEQ ID NO: 1884308
gcuagaaaguauuacauuu

SEQ ID NO: 2255907 - RNA, 19 nt, Artificial Sequence
  Description of Artificial Sequence: Synthetic oligonucleotide
  Antisense strand to SEQ ID NO: 2255906
aaauguaauacuuucuagc

SEQ ID NO: 2255908 - RNA, 19 nt, Artificial Sequence
  Description of Artificial Sequence: Synthetic oligonucleotide
  Sense strand starting at position 810 of SEQ ID NO: 1884308
aguuaagagauccgaccuu

SEQ ID NO: 2255909 - RNA, 19 nt, Artificial Sequence
  Description of Artificial Sequence: Synthetic oligonucleotide
  Antisense strand to SEQ ID NO: 2255908
aaggucggaucucuuaacu

SEQ ID NO: 2255910 - RNA, 19 nt, Artificial Sequence
  Description of Artificial Sequence: Synthetic oligonucleotide
  Sense strand starting at position 906 of SEQ ID NO: 1884308
auagcuugccacugagaag

SEQ ID NO: 2255911 - RNA, 19 nt, Artificial Sequence
  Description of Artificial Sequence: Synthetic oligonucleotide
  Antisense strand to SEQ ID NO: 2255910
cuucucaguggcaagcuau

SEQ ID NO: 2255912 - RNA, 19 nt, Artificial Sequence
  Description of Artificial Sequence: Synthetic oligonucleotide
  Sense strand starting at position 957 of SEQ ID NO: 1884308
guacucagaggcugugauu

SEQ ID NO: 2255913 - RNA, 19 nt, Artificial Sequence
  Description of Artificial Sequence: Synthetic oligonucleotide
  Antisense strand to SEQ ID NO: 2255912
aaucacagccucugaguac

SEQ ID NO: 2255914 - RNA, 19 nt, Artificial Sequence
  Description of Artificial Sequence: Synthetic oligonucleotide
  Sense strand starting at position 966 of SEQ ID NO: 1884308
ggcugugauuauucagggu

SEQ ID NO: 2255915 - RNA, 19 nt, Artificial Sequence
  Description of Artificial Sequence: Synthetic oligonucleotide
  Antisense strand to SEQ ID NO: 2255914
acccugaauaaucacagcc

SEQ ID NO: 2255916 - RNA, 19 nt, Artificial Sequence
  Description of Artificial Sequence: Synthetic oligonucleotide
  Sense strand starting at position 1146 of SEQ ID NO: 1884308
ucggauuaaagcggaagua

SEQ ID NO: 2255917 - RNA, 19 nt, Artificial Sequence
  Description of Artificial Sequence: Synthetic oligonucleotide
  Antisense strand to SEQ ID NO: 2255916
uacuuccgcuuuaauccga

SEQ ID NO: 2255918 - RNA, 19 nt, Artificial Sequence
  Description of Artificial Sequence: Synthetic oligonucleotide
  Sense strand starting at position 1147 of SEQ ID NO: 1884308
cggauuaaagcggaaguau

SEQ ID NO: 2255919 - RNA, 19 nt, Artificial Sequence
  Description of Artificial Sequence: Synthetic oligonucleotide
  Antisense strand to SEQ ID NO: 2255918
auacuuccgcuuuaauccg

SEQ ID NO: 2255920 - RNA, 19 nt, Artificial Sequence
  Description of Artificial Sequence: Synthetic oligonucleotide
  Sense strand starting at position 1167 of SEQ ID NO: 1884308
uuagaauccgucuaggaca

SEQ ID NO: 2255921 - RNA, 19 nt, Artificial Sequence
  Description of Artificial Sequence: Synthetic oligonucleotide
  Antisense strand to SEQ ID NO: 2255920
uguccuagacggauucuaa

SEQ ID NO: 2255922 - RNA, 19 nt, Artificial Sequence
  Description of Artificial Sequence: Synthetic oligonucleotide
  Sense strand starting at position 1272 of SEQ ID NO: 1884308
uguaaugaggccgaauuga

SEQ ID NO: 2255923 - RNA, 19 nt, Artificial Sequence
  Description of Artificial Sequence: Synthetic oligonucleotide
  Antisense strand to SEQ ID NO: 2255922
ucaauucggccucauuaca

SEQ ID NO: 2255924 - RNA, 19 nt, Artificial Sequence
  Description of Artificial Sequence: Synthetic oligonucleotide
  Sense strand starting at position 1433 of SEQ ID NO: 1884308
cccagucgugguuagaauu

SEQ ID NO: 2255925 - RNA, 19 nt, Artificial Sequence
  Description of Artificial Sequence: Synthetic oligonucleotide
  Antisense strand to SEQ ID NO: 2255924
aauucuaaccacgacuggg

SEQ ID NO: 2255926 - RNA, 19 nt, Artificial Sequence
  Description of Artificial Sequence: Synthetic oligonucleotide
  Sense strand starting at position 1458 of SEQ ID NO: 1884308
cuucuagguuguguagaga

SEQ ID NO: 2255927 - RNA, 19 nt, Artificial Sequence
  Description of Artificial Sequence: Synthetic oligonucleotide
  Antisense strand to SEQ ID NO: 2255926
ucucuacacaaccuagaag

SEQ ID NO: 2255928 - RNA, 19 nt, Artificial Sequence
  Description of Artificial Sequence: Synthetic oligonucleotide
  Sense strand starting at position 1477 of SEQ ID NO: 1884308
acccaaucugcaggucaga

SEQ ID NO: 2255929 - RNA, 19 nt, Artificial Sequence
  Description of Artificial Sequence: Synthetic oligonucleotide
  Antisense strand to SEQ ID NO: 2255928
ucugaccugcagauugggu

SEQ ID NO: 2255930 - RNA, 19 nt, Artificial Sequence
  Description of Artificial Sequence: Synthetic oligonucleotide
  Sense strand starting at position 2121 of SEQ ID NO: 1884308
cuuugaagucaguacugga

SEQ ID NO: 2255931 - RNA, 19 nt, Artificial Sequence
  Description of Artificial Sequence: Synthetic oligonucleotide
  Antisense strand to SEQ ID NO: 2255930
uccaguacugacuucaaag

SEQ ID NO: 2255932 - RNA, 19 nt, Artificial Sequence
  Description of Artificial Sequence: Synthetic oligonucleotide
  Sense strand starting at position 2137 of SEQ ID NO: 1884308
ggagaaggauucgcugaga

SEQ ID NO: 2255933 - RNA, 19 nt, Artificial Sequence
  Description of Artificial Sequence: Synthetic oligonucleotide
  Antisense strand to SEQ ID NO: 2255932
ucucagcgaauccuucucc

SEQ ID NO: 2255934 - RNA, 19 nt, Artificial Sequence
  Description of Artificial Sequence: Synthetic oligonucleotide
  Sense strand starting at position 2140 of SEQ ID NO: 1884308
gaaggauucgcugagauuc

SEQ ID NO: 2255935 - RNA, 19 nt, Artificial Sequence
  Description of Artificial Sequence: Synthetic oligonucleotide
  Antisense strand to SEQ ID NO: 2255934
gaaucucagcgaauccuuc

SEQ ID NO: 2255936 - RNA, 19 nt, Artificial Sequence
  Description of Artificial Sequence: Synthetic oligonucleotide
  Sense strand starting at position 2362 of SEQ ID NO: 1884308
gcgauuguugugccucagu

SEQ ID NO: 2255937 - RNA, 19 nt, Artificial Sequence
  Description of Artificial Sequence: Synthetic oligonucleotide
  Antisense strand to SEQ ID NO: 2255936
acugaggcacaacaaucgc

SEQ ID NO: 2255938 - RNA, 19 nt, Artificial Sequence
  Description of Artificial Sequence: Synthetic oligonucleotide
  Sense strand starting at position 2601 of SEQ ID NO: 1884308
cuguaucacgauuggaauc

SEQ ID NO: 2255939 - RNA, 19 nt, Artificial Sequence
  Description of Artificial Sequence: Synthetic oligonucleotide
  Antisense strand to SEQ ID NO: 2255938
gauuccaaucgugauacag

SEQ ID NO: 2255940 - RNA, 19 nt, Artificial Sequence
  Description of Artificial Sequence: Synthetic oligonucleotide
  Sense strand starting at position 2747 of SEQ ID NO: 1884308
cauugagacugggcuugaa

SEQ ID NO: 2255941 - RNA, 19 nt, Artificial Sequence
  Description of Artificial Sequence: Synthetic oligonucleotide
  Antisense strand to SEQ ID NO: 2255940
uucaagcccagucucaaug

SEQ ID NO: 2255942 - RNA, 19 nt, Artificial Sequence
  Description of Artificial Sequence: Synthetic oligonucleotide
  Sense strand starting at position 2792 of SEQ ID NO: 1884308
agaguugagaucugaaguu

SEQ ID NO: 2255943 - RNA, 19 nt, Artificial Sequence
  Description of Artificial Sequence: Synthetic oligonucleotide
  Antisense strand to SEQ ID NO: 2255942
aacuucagaucucaacucu

SEQ ID NO: 2255944 - RNA, 19 nt, Artificial Sequence
  Description of Artificial Sequence: Synthetic oligonucleotide
  Sense strand starting at position 2810 of SEQ ID NO: 1884308
ugcaauguauacucagaga

SEQ ID NO: 2255945 - RNA, 19 nt, Artificial Sequence
  Description of Artificial Sequence: Synthetic oligonucleotide
  Antisense strand to SEQ ID NO: 2255944
ucucugaguauacauugca

SEQ ID NO: 2255946 - RNA, 19 nt, Artificial Sequence
  Description of Artificial Sequence: Synthetic oligonucleotide
  Sense strand starting at position 2835 of SEQ ID NO: 1884308
auuccaucagauuaggcau

SEQ ID NO: 2255947 - RNA, 19 nt, Artificial Sequence
  Description of Artificial Sequence: Synthetic oligonucleotide
  Antisense strand to SEQ ID NO: 2255946
augccuaaucugauggaau

SEQ ID NO: 2255948 - RNA, 19 nt, Artificial Sequence
  Description of Artificial Sequence: Synthetic oligonucleotide
  Sense strand starting at position 2890 of SEQ ID NO: 1884308
ugagccgauguguaagaga

SEQ ID NO: 2255949 - RNA, 19 nt, Artificial Sequence
  Description of Artificial Sequence: Synthetic oligonucleotide
  Antisense strand to SEQ ID NO: 2255948
ucucuuacacaucggcuca

SEQ ID NO: 2255950 - RNA, 19 nt, Artificial Sequence
  Description of Artificial Sequence: Synthetic oligonucleotide
  Sense strand starting at position 2980 of SEQ ID NO: 1884308
ggcauuugaugagaggaac

SEQ ID NO: 2255951 - RNA, 19 nt, Artificial Sequence
  Description of Artificial Sequence: Synthetic oligonucleotide
  Antisense strand to SEQ ID NO: 2255950
guuccucucaucaaaugcc

SEQ ID NO: 2255952 - RNA, 19 nt, Artificial Sequence
  Description of Artificial Sequence: Synthetic oligonucleotide
  Sense strand starting at position 3055 of SEQ ID NO: 1884308
uggaaugguuagagagaug

SEQ ID NO: 2255953 - RNA, 19 nt, Artificial Sequence
  Description of Artificial Sequence: Synthetic oligonucleotide
  Antisense strand to SEQ ID NO: 2255952
caucucucuaaccauucca

SEQ ID NO: 2255954 - RNA, 19 nt, Artificial Sequence
  Description of Artificial Sequence: Synthetic oligonucleotide
  Sense strand starting at position 3084 of SEQ ID NO: 1884308
uuagaaguguaaucaagga

SEQ ID NO: 2255955 - RNA, 19 nt, Artificial Sequence
  Description of Artificial Sequence: Synthetic oligonucleotide
  Antisense strand to SEQ ID NO: 2255954
uccuugauuacacuucuaa

SEQ ID NO: 2255956 - RNA, 19 nt, Artificial Sequence
  Description of Artificial Sequence: Synthetic oligonucleotide
  Sense strand starting at position 3088 of SEQ ID NO: 1884308
aaguguaaucaaggaacua

SEQ ID NO: 2255957 - RNA, 19 nt, Artificial Sequence
  Description of Artificial Sequence: Synthetic oligonucleotide
  Antisense strand to SEQ ID NO: 2255956
uaguuccuugauuacacuu

SEQ ID NO: 2255958 - RNA, 19 nt, Artificial Sequence
  Description of Artificial Sequence: Synthetic oligonucleotide
  Sense strand starting at position 3254 of SEQ ID NO: 1884308
gaagaaauauggcuguaaa

SEQ ID NO: 2255959 - RNA, 19 nt, Artificial Sequence
  Description of Artificial Sequence: Synthetic oligonucleotide
  Antisense strand to SEQ ID NO: 2255958
uuuacagccauauuucuuc

SEQ ID NO: 2255960 - RNA, 19 nt, Artificial Sequence
  Description of Artificial Sequence: Synthetic oligonucleotide
  Sense strand starting at position 3255 of SEQ ID NO: 1884308
aagaaauauggcuguaaag

SEQ ID NO: 2255961 - RNA, 19 nt, Artificial Sequence
  Description of Artificial Sequence: Synthetic oligonucleotide
  Antisense strand to SEQ ID NO: 2255960
cuuuacagccauauuucuu

SEQ ID NO: 2255962 - RNA, 19 nt, Artificial Sequence
  Description of Artificial Sequence: Synthetic oligonucleotide
  Sense strand starting at position 3265 of SEQ ID NO: 1884308
gcuguaaaggauuacaagu

SEQ ID NO: 2255963 - RNA, 19 nt, Artificial Sequence
  Description of Artificial Sequence: Synthetic oligonucleotide
  Antisense strand to SEQ ID NO: 2255962
acuuguaauccuuuacagc

SEQ ID NO: 2255964 - RNA, 19 nt, Artificial Sequence
  Description of Artificial Sequence: Synthetic oligonucleotide
  Sense strand starting at position 3458 of SEQ ID NO: 1884308
aggccauccugccugauaa

SEQ ID NO: 2255965 - RNA, 19 nt, Artificial Sequence
  Description of Artificial Sequence: Synthetic oligonucleotide
  Antisense strand to SEQ ID NO: 2255964
uuaucaggcaggauggccu

SEQ ID NO: 2255966 - RNA, 19 nt, Artificial Sequence
  Description of Artificial Sequence: Synthetic oligonucleotide
  Sense strand starting at position 3459 of SEQ ID NO: 1884308
ggccauccugccugauaaa

SEQ ID NO: 2255967 - RNA, 19 nt, Artificial Sequence
  Description of Artificial Sequence: Synthetic oligonucleotide
  Antisense strand to SEQ ID NO: 2255966
uuuaucaggcaggauggcc

SEQ ID NO: 2255968 - RNA, 19 nt, Artificial Sequence
  Description of Artificial Sequence: Synthetic oligonucleotide
  Sense strand starting at position 3516 of SEQ ID NO: 1884308
agaacuagccagggaucua

SEQ ID NO: 2255969 - RNA, 19 nt, Artificial Sequence
  Description of Artificial Sequence: Synthetic oligonucleotide
  Antisense strand to SEQ ID NO: 2255968
uagaucccuggcuaguucu

SEQ ID NO: 2255970 - RNA, 19 nt, Artificial Sequence
  Description of Artificial Sequence: Synthetic oligonucleotide
  Sense strand starting at position 3620 of SEQ ID NO: 1884308
aaggcaaagucaucggacu

SEQ ID NO: 2255971 - RNA, 19 nt, Artificial Sequence
  Description of Artificial Sequence: Synthetic oligonucleotide
  Antisense strand to SEQ ID NO: 2255970
aguccgaugacuuugccuu

SEQ ID NO: 2255972 - RNA, 19 nt, Artificial Sequence
  Description of Artificial Sequence: Synthetic oligonucleotide
  Sense strand starting at position 3684 of SEQ ID NO: 1884308
gaggccaaaguuuggaaua

SEQ ID NO: 2255973 - RNA, 19 nt, Artificial Sequence
  Description of Artificial Sequence: Synthetic oligonucleotide
  Antisense strand to SEQ ID NO: 2255972
uauuccaaacuuuggccuc

SEQ ID NO: 2255974 - RNA, 19 nt, Artificial Sequence
  Description of Artificial Sequence: Synthetic oligonucleotide
  Sense strand starting at position 3730 of SEQ ID NO: 1884308
ggcaacguuagagauaagu

SEQ ID NO: 2255975 - RNA, 19 nt, Artificial Sequence
  Description of Artificial Sequence: Synthetic oligonucleotide
  Antisense strand to SEQ ID NO: 2255974
acuuaucucuaacguugcc

SEQ ID NO: 2255976 - RNA, 19 nt, Artificial Sequence
  Description of Artificial Sequence: Synthetic oligonucleotide
  Sense strand starting at position 3738 of SEQ ID NO: 1884308
uagagauaaguuugugguu

SEQ ID NO: 2255977 - RNA, 19 nt, Artificial Sequence
  Description of Artificial Sequence: Synthetic oligonucleotide
  Antisense strand to SEQ ID NO: 2255976
aaccacaaacuuaucucua

SEQ ID NO: 2255978 - RNA, 19 nt, Artificial Sequence
  Description of Artificial Sequence: Synthetic oligonucleotide
  Sense strand starting at position 3821 of SEQ ID NO: 1884308
gggaauggcugaguuaauc

SEQ ID NO: 2255979 - RNA, 19 nt, Artificial Sequence
  Description of Artificial Sequence: Synthetic oligonucleotide
  Antisense strand to SEQ ID NO: 2255978
gauuaacucagccauuccc

SEQ ID NO: 2255980 - RNA, 19 nt, Artificial Sequence
  Description of Artificial Sequence: Synthetic oligonucleotide
  Sense strand starting at position 3831 of SEQ ID NO: 1884308
gaguuaaucuaggcugaca

SEQ ID NO: 2255981 - RNA, 19 nt, Artificial Sequence
  Description of Artificial Sequence: Synthetic oligonucleotide
  Antisense strand to SEQ ID NO: 2255980
ugucagccuagauuaacuc

SEQ ID NO: 2255982 - RNA, 19 nt, Artificial Sequence
  Description of Artificial Sequence: Synthetic oligonucleotide
  Sense strand starting at position 3833 of SEQ ID NO: 1884308
guuaaucuaggcugacauc

SEQ ID NO: 2255983 - RNA, 19 nt, Artificial Sequence
  Description of Artificial Sequence: Synthetic oligonucleotide
  Antisense strand to SEQ ID NO: 2255982
gaugucagccuagauuaac

SEQ ID NO: 2255984 - RNA, 19 nt, Artificial Sequence
  Description of Artificial Sequence: Synthetic oligonucleotide
  Sense strand starting at position 212 of SEQ ID NO: 1884309
caugcucuaguuugaggaa

SEQ ID NO: 2255985 - RNA, 19 nt, Artificial Sequence
  Description of Artificial Sequence: Synthetic oligonucleotide
  Antisense strand to SEQ ID NO: 2255984
uuccucaaacuagagcaug

SEQ ID NO: 2255986 - RNA, 19 nt, Artificial Sequence
  Description of Artificial Sequence: Synthetic oligonucleotide
  Sense strand starting at position 409 of SEQ ID NO: 1884309
uccgcuugcagcugggaaa

SEQ ID NO: 2255987 - RNA, 19 nt, Artificial Sequence
  Description of Artificial Sequence: Synthetic oligonucleotide
  Antisense strand to SEQ ID NO: 2255986
uuucccagcugcaagcgga

SEQ ID NO: 2255988 - RNA, 19 nt, Artificial Sequence
  Description of Artificial Sequence: Synthetic oligonucleotide
  Sense strand starting at position 410 of SEQ ID NO: 1884309
ccgcuugcagcugggaaau

SEQ ID NO: 2255989 - RNA, 19 nt, Artificial Sequence
  Description of Artificial Sequence: Synthetic oligonucleotide
  Antisense strand to SEQ ID NO: 2255988
auuucccagcugcaagcgg

SEQ ID NO: 2255990 - RNA, 19 nt, Artificial Sequence
  Description of Artificial Sequence: Synthetic oligonucleotide
  Sense strand starting at position 422 of SEQ ID NO: 1884309
gggaaauccucagauccuu

SEQ ID NO: 2255991 - RNA, 19 nt, Artificial Sequence
  Description of Artificial Sequence: Synthetic oligonucleotide
  Antisense strand to SEQ ID NO: 2255990
aaggaucugaggauuuccc

SEQ ID NO: 2255992 - RNA, 19 nt, Artificial Sequence
  Description of Artificial Sequence: Synthetic oligonucleotide
  Sense strand starting at position 499 of SEQ ID NO: 1884309
ggucccaggaagcauuaau

SEQ ID NO: 2255993 - RNA, 19 nt, Artificial Sequence
  Description of Artificial Sequence: Synthetic oligonucleotide
  Antisense strand to SEQ ID NO: 2255992
auuaaugcuuccugggacc

SEQ ID NO: 2255994 - RNA, 19 nt, Artificial Sequence
  Description of Artificial Sequence: Synthetic oligonucleotide
  Sense strand starting at position 536 of SEQ ID NO: 1884309
cagagaaccgcagaauguu

SEQ ID NO: 2255995 - RNA, 19 nt, Artificial Sequence
  Description of Artificial Sequence: Synthetic oligonucleotide
  Antisense strand to SEQ ID NO: 2255994
aacauucugcgguucucug

SEQ ID NO: 2255996 - RNA, 19 nt, Artificial Sequence
  Description of Artificial Sequence: Synthetic oligonucleotide
  Sense strand starting at position 568 of SEQ ID NO: 1884309
ggccguaaucgucucauua

SEQ ID NO: 2255997 - RNA, 19 nt, Artificial Sequence
  Description of Artificial Sequence: Synthetic oligonucleotide
  Antisense strand to SEQ ID NO: 2255996
uaaugagacgauuacggcc

SEQ ID NO: 2255998 - RNA, 19 nt, Artificial Sequence
  Description of Artificial Sequence: Synthetic oligonucleotide
  Sense strand starting at position 572 of SEQ ID NO: 1884309
guaaucgucucauuaauuc

SEQ ID NO: 2255999 - RNA, 19 nt, Artificial Sequence
  Description of Artificial Sequence: Synthetic oligonucleotide
  Antisense strand to SEQ ID NO: 2255998
gaauuaaugagacgauuac

SEQ ID NO: 2256000 - RNA, 19 nt, Artificial Sequence
  Description of Artificial Sequence: Synthetic oligonucleotide
  Sense strand starting at position 610 of SEQ ID NO: 1884309
ccuuaugacuucccuagua

SEQ ID NO: 2256001 - RNA, 19 nt, Artificial Sequence
  Description of Artificial Sequence: Synthetic oligonucleotide
  Antisense strand to SEQ ID NO: 2256000
uacuagggaagucauaagg

SEQ ID NO: 2256002 - RNA, 19 nt, Artificial Sequence
  Description of Artificial Sequence: Synthetic oligonucleotide
  Sense strand starting at position 638 of SEQ ID NO: 1884309
auaccucucgugugggaaa

SEQ ID NO: 2256003 - RNA, 19 nt, Artificial Sequence
  Description of Artificial Sequence: Synthetic oligonucleotide
  Antisense strand to SEQ ID NO: 2256002
uuucccacacgagagguau

SEQ ID NO: 2256004 - RNA, 19 nt, Artificial Sequence
  Description of Artificial Sequence: Synthetic oligonucleotide
  Sense strand starting at position 718 of SEQ ID NO: 1884309
guuggauauugagcugauu

SEQ ID NO: 2256005 - RNA, 19 nt, Artificial Sequence
  Description of Artificial Sequence: Synthetic oligonucleotide
  Antisense strand to SEQ ID NO: 2256004
aaucagcucaauauccaac

SEQ ID NO: 2256006 - RNA, 19 nt, Artificial Sequence
  Description of Artificial Sequence: Synthetic oligonucleotide
  Sense strand starting at position 786 of SEQ ID NO: 1884309
agcucauguccuuaaacag

SEQ ID NO: 2256007 - RNA, 19 nt, Artificial Sequence
  Description of Artificial Sequence: Synthetic oligonucleotide
  Antisense strand to SEQ ID NO: 2256006
cuguuuaaggacaugagcu

SEQ ID NO: 2256008 - RNA, 19 nt, Artificial Sequence
  Description of Artificial Sequence: Synthetic oligonucleotide
  Sense strand starting at position 872 of SEQ ID NO: 1884309
ucaaauaccugaggauaac

SEQ ID NO: 2256009 - RNA, 19 nt, Artificial Sequence
  Description of Artificial Sequence: Synthetic oligonucleotide
  Antisense strand to SEQ ID NO: 2256008
guuauccucagguauuuga

SEQ ID NO: 2256010 - RNA, 19 nt, Artificial Sequence
  Description of Artificial Sequence: Synthetic oligonucleotide
  Sense strand starting at position 894 of SEQ ID NO: 1884309
guggcacugucccuaaauc

SEQ ID NO: 2256011 - RNA, 19 nt, Artificial Sequence
  Description of Artificial Sequence: Synthetic oligonucleotide
  Antisense strand to SEQ ID NO: 2256010
gauuuagggacagugccac

SEQ ID NO: 2256012 - RNA, 19 nt, Artificial Sequence
  Description of Artificial Sequence: Synthetic oligonucleotide
  Sense strand starting at position 895 of SEQ ID NO: 1884309
uggcacugucccuaaaucu

SEQ ID NO: 2256013 - RNA, 19 nt, Artificial Sequence
  Description of Artificial Sequence: Synthetic oligonucleotide
  Antisense strand to SEQ ID NO: 2256012
agauuuagggacagugcca

SEQ ID NO: 2256014 - RNA, 19 nt, Artificial Sequence
  Description of Artificial Sequence: Synthetic oligonucleotide
  Sense strand starting at position 978 of SEQ ID NO: 1884309
cauugauuccaucguagga

SEQ ID NO: 2256015 - RNA, 19 nt, Artificial Sequence
  Description of Artificial Sequence: Synthetic oligonucleotide
  Antisense strand to SEQ ID NO: 2256014
uccuacgauggaaucaaug

SEQ ID NO: 2256016 - RNA, 19 nt, Artificial Sequence
  Description of Artificial Sequence: Synthetic oligonucleotide
  Sense strand starting at position 982 of SEQ ID NO: 1884309
gauuccaucguaggauaaa

SEQ ID NO: 2256017 - RNA, 19 nt, Artificial Sequence
  Description of Artificial Sequence: Synthetic oligonucleotide
  Antisense strand to SEQ ID NO: 2256016
uuuauccuacgauggaauc

SEQ ID NO: 2256018 - RNA, 19 nt, Artificial Sequence
  Description of Artificial Sequence: Synthetic oligonucleotide
  Sense strand starting at position 985 of SEQ ID NO: 1884309
uccaucguaggauaaauau

SEQ ID NO: 2256019 - RNA, 19 nt, Artificial Sequence
  Description of Artificial Sequence: Synthetic oligonucleotide
  Antisense strand to SEQ ID NO: 2256018
auauuuauccuacgaugga

SEQ ID NO: 2256020 - RNA, 19 nt, Artificial Sequence
  Description of Artificial Sequence: Synthetic oligonucleotide
  Sense strand starting at position 1008 of SEQ ID NO: 1884309
ugaauacucuuccuaggag

SEQ ID NO: 2256021 - RNA, 19 nt, Artificial Sequence
  Description of Artificial Sequence: Synthetic oligonucleotide
  Antisense strand to SEQ ID NO: 2256020
cuccuaggaagaguauuca

SEQ ID NO: 2256022 - RNA, 19 nt, Artificial Sequence
  Description of Artificial Sequence: Synthetic oligonucleotide
  Sense strand starting at position 1089 of SEQ ID NO: 1884309
gagcuuucuguuuagugga

SEQ ID NO: 2256023 - RNA, 19 nt, Artificial Sequence
  Description of Artificial Sequence: Synthetic oligonucleotide
  Antisense strand to SEQ ID NO: 2256022
uccacuaaacagaaagcuc

SEQ ID NO: 2256024 - RNA, 19 nt, Artificial Sequence
  Description of Artificial Sequence: Synthetic oligonucleotide
  Sense strand starting at position 1225 of SEQ ID NO: 1884309
uagcuaugguggucaggga

SEQ ID NO: 2256025 - RNA, 19 nt, Artificial Sequence
  Description of Artificial Sequence: Synthetic oligonucleotide
  Antisense strand to SEQ ID NO: 2256024
ucccugaccaccauagcua

SEQ ID NO: 2256026 - RNA, 19 nt, Artificial Sequence
  Description of Artificial Sequence: Synthetic oligonucleotide
  Sense strand starting at position 1342 of SEQ ID NO: 1884309
caaguuaagugcuugagag

SEQ ID NO: 2256027 - RNA, 19 nt, Artificial Sequence
  Description of Artificial Sequence: Synthetic oligonucleotide
  Antisense strand to SEQ ID NO: 2256026
cucucaagcacuuaacuug

SEQ ID NO: 2256028 - RNA, 19 nt, Artificial Sequence
  Description of Artificial Sequence: Synthetic oligonucleotide
  Sense strand starting at position 1343 of SEQ ID NO: 1884309
aaguuaagugcuugagaga

SEQ ID NO: 2256029 - RNA, 19 nt, Artificial Sequence
  Description of Artificial Sequence: Synthetic oligonucleotide
  Antisense strand to SEQ ID NO: 2256028
ucucucaagcacuuaacuu

SEQ ID NO: 2256030 - RNA, 19 nt, Artificial Sequence
  Description of Artificial Sequence: Synthetic oligonucleotide
  Sense strand starting at position 1344 of SEQ ID NO: 1884309
aguuaagugcuugagagag

SEQ ID NO: 2256031 - RNA, 19 nt, Artificial Sequence
  Description of Artificial Sequence: Synthetic oligonucleotide
  Antisense strand to SEQ ID NO: 2256030
cucucucaagcacuuaacu

SEQ ID NO: 2256032 - RNA, 19 nt, Artificial Sequence
  Description of Artificial Sequence: Synthetic oligonucleotide
  Sense strand starting at position 1530 of SEQ ID NO: 1884309
ccgcggugcguucuauaga

SEQ ID NO: 2256033 - RNA, 19 nt, Artificial Sequence
  Description of Artificial Sequence: Synthetic oligonucleotide
  Antisense strand to SEQ ID NO: 2256032
ucuauagaacgcaccgcgg

SEQ ID NO: 2256034 - RNA, 19 nt, Artificial Sequence
  Description of Artificial Sequence: Synthetic oligonucleotide
  Sense strand starting at position 2141 of SEQ ID NO: 1884309
cacggaauugccugagaaa

SEQ ID NO: 2256035 - RNA, 19 nt, Artificial Sequence
  Description of Artificial Sequence: Synthetic oligonucleotide
  Antisense strand to SEQ ID NO: 2256034
uuucucaggcaauuccgug

SEQ ID NO: 2256036 - RNA, 19 nt, Artificial Sequence
  Description of Artificial Sequence: Synthetic oligonucleotide
  Sense strand starting at position 2219 of SEQ ID NO: 1884309
auagcuguugcucaauacu

SEQ ID NO: 2256037 - RNA, 19 nt, Artificial Sequence
  Description of Artificial Sequence: Synthetic oligonucleotide
  Antisense strand to SEQ ID NO: 2256036
aguauugagcaacagcuau

SEQ ID NO: 2256038 - RNA, 19 nt, Artificial Sequence
  Description of Artificial Sequence: Synthetic oligonucleotide
  Sense strand starting at position 2222 of SEQ ID NO: 1884309
gcuguugcucaauacuuau

SEQ ID NO: 2256039 - RNA, 19 nt, Artificial Sequence
  Description of Artificial Sequence: Synthetic oligonucleotide
  Antisense strand to SEQ ID NO: 2256038
auaaguauugagcaacagc

SEQ ID NO: 2256040 - RNA, 19 nt, Artificial Sequence
  Description of Artificial Sequence: Synthetic oligonucleotide
  Sense strand starting at position 2237 of SEQ ID NO: 1884309
uuauuacacgaaugaaauc

SEQ ID NO: 2256041 - RNA, 19 nt, Artificial Sequence
  Description of Artificial Sequence: Synthetic oligonucleotide
  Antisense strand to SEQ ID NO: 2256040
gauuucauucguguaauaa

SEQ ID NO: 2256042 - RNA, 19 nt, Artificial Sequence
  Description of Artificial Sequence: Synthetic oligonucleotide
  Sense strand starting at position 2277 of SEQ ID NO: 1884309
cugggugucucuccuggaa

SEQ ID NO: 2256043 - RNA, 19 nt, Artificial Sequence
  Description of Artificial Sequence: Synthetic oligonucleotide
  Antisense strand to SEQ ID NO: 2256042
uuccaggagagacacccag

SEQ ID NO: 2256044 - RNA, 19 nt, Artificial Sequence
  Description of Artificial Sequence: Synthetic oligonucleotide
  Sense strand starting at position 2475 of SEQ ID NO: 1884309
ggaaauugauuggaaauag

SEQ ID NO: 2256045 - RNA, 19 nt, Artificial Sequence
  Description of Artificial Sequence: Synthetic oligonucleotide
  Antisense strand to SEQ ID NO: 2256044
cuauuuccaaucaauuucc

SEQ ID NO: 2256046 - RNA, 19 nt, Artificial Sequence
  Description of Artificial Sequence: Synthetic oligonucleotide
  Sense strand starting at position 2485 of SEQ ID NO: 1884309
uggaaauaguuccugagcu

SEQ ID NO: 2256047 - RNA, 19 nt, Artificial Sequence
  Description of Artificial Sequence: Synthetic oligonucleotide
  Antisense strand to SEQ ID NO: 2256046
agcucaggaacuauuucca

SEQ ID NO: 2256048 - RNA, 19 nt, Artificial Sequence
  Description of Artificial Sequence: Synthetic oligonucleotide
  Sense strand starting at position 2622 of SEQ ID NO: 1884309
uuuagaagcccaggaguuu

SEQ ID NO: 2256049 - RNA, 19 nt, Artificial Sequence
  Description of Artificial Sequence: Synthetic oligonucleotide
  Antisense strand to SEQ ID NO: 2256048
aaacuccugggcuucuaaa

SEQ ID NO: 2256050 - RNA, 19 nt, Artificial Sequence
  Description of Artificial Sequence: Synthetic oligonucleotide
  Sense strand starting at position 2869 of SEQ ID NO: 1884309
cugacuuguggucagucua

SEQ ID NO: 2256051 - RNA, 19 nt, Artificial Sequence
  Description of Artificial Sequence: Synthetic oligonucleotide
  Antisense strand to SEQ ID NO: 2256050
uagacugaccacaagucag

SEQ ID NO: 2256052 - RNA, 19 nt, Artificial Sequence
  Description of Artificial Sequence: Synthetic oligonucleotide
  Sense strand starting at position 3306 of SEQ ID NO: 1884309
agugaucgaugccuguaau

SEQ ID NO: 2256053 - RNA, 19 nt, Artificial Sequence
  Description of Artificial Sequence: Synthetic oligonucleotide
  Antisense strand to SEQ ID NO: 2256052
auuacaggcaucgaucacu

SEQ ID NO: 2256054 - RNA, 19 nt, Artificial Sequence
  Description of Artificial Sequence: Synthetic oligonucleotide
  Sense strand starting at position 3307 of SEQ ID NO: 1884309
gugaucgaugccuguaauc

SEQ ID NO: 2256055 - RNA, 19 nt, Artificial Sequence
  Description of Artificial Sequence: Synthetic oligonucleotide
  Antisense strand to SEQ ID NO: 2256054
gauuacaggcaucgaucac

SEQ ID NO: 2256056 - RNA, 19 nt, Artificial Sequence
  Description of Artificial Sequence: Synthetic oligonucleotide
  Sense strand starting at position 3451 of SEQ ID NO: 1884309
aguuuaguuugagaaacag

SEQ ID NO: 2256057 - RNA, 19 nt, Artificial Sequence
  Description of Artificial Sequence: Synthetic oligonucleotide
  Antisense strand to SEQ ID NO: 2256056
cuguuucucaaacuaaacu

SEQ ID NO: 2256058 - RNA, 19 nt, Artificial Sequence
  Description of Artificial Sequence: Synthetic oligonucleotide
  Sense strand starting at position 3512 of SEQ ID NO: 1884309
uggcucugaucaccacuua

SEQ ID NO: 2256059 - RNA, 19 nt, Artificial Sequence
  Description of Artificial Sequence: Synthetic oligonucleotide
  Antisense strand to SEQ ID NO: 2256058
uaaguggugaucagagcca

SEQ ID NO: 2256060 - RNA, 19 nt, Artificial Sequence
  Description of Artificial Sequence: Synthetic oligonucleotide
  Sense strand starting at position 3620 of SEQ ID NO: 1884309
ugcugaaaucaaggaugcu

SEQ ID NO: 2256061 - RNA, 19 nt, Artificial Sequence
  Description of Artificial Sequence: Synthetic oligonucleotide
  Antisense strand to SEQ ID NO: 2256060
agcauccuugauuucagca

SEQ ID NO: 2256062 - RNA, 19 nt, Artificial Sequence
  Description of Artificial Sequence: Synthetic oligonucleotide
  Sense strand starting at position 3723 of SEQ ID NO: 1884309
ucgagacaacauggugaaa

SEQ ID NO: 2256063 - RNA, 19 nt, Artificial Sequence
  Description of Artificial Sequence: Synthetic oligonucleotide
  Antisense strand to SEQ ID NO: 2256062
uuucaccauguugucucga

SEQ ID NO: 2256064 - RNA, 19 nt, Artificial Sequence
  Description of Artificial Sequence: Synthetic oligonucleotide
  Sense strand starting at position 17 of SEQ ID NO: 1884310
uguuuagaagcaggaagau

SEQ ID NO: 2256065 - RNA, 19 nt, Artificial Sequence
  Description of Artificial Sequence: Synthetic oligonucleotide
  Antisense strand to SEQ ID NO: 2256064
aucuuccugcuucuaaaca

SEQ ID NO: 2256066 - RNA, 19 nt, Artificial Sequence
  Description of Artificial Sequence: Synthetic oligonucleotide
  Sense strand starting at position 39 of SEQ ID NO: 1884310
aaggguagccuguagaaga

SEQ ID NO: 2256067 - RNA, 19 nt, Artificial Sequence
  Description of Artificial Sequence: Synthetic oligonucleotide
  Antisense strand to SEQ ID NO: 2256066
ucuucuacaggcuacccuu

SEQ ID NO: 2256068 - RNA, 19 nt, Artificial Sequence
  Description of Artificial Sequence: Synthetic oligonucleotide
  Sense strand starting at position 152 of SEQ ID NO: 1884310
ucccuagaucauuggaggu

SEQ ID NO: 2256069 - RNA, 19 nt, Artificial Sequence
  Description of Artificial Sequence: Synthetic oligonucleotide
  Antisense strand to SEQ ID NO: 2256068
accuccaaugaucuaggga

SEQ ID NO: 2256070 - RNA, 19 nt, Artificial Sequence
  Description of Artificial Sequence: Synthetic oligonucleotide
  Sense strand starting at position 158 of SEQ ID NO: 1884310
gaucauuggagguaucgac

SEQ ID NO: 2256071 - RNA, 19 nt, Artificial Sequence
  Description of Artificial Sequence: Synthetic oligonucleotide
  Antisense strand to SEQ ID NO: 2256070
gucgauaccuccaaugauc

SEQ ID NO: 2256072 - RNA, 19 nt, Artificial Sequence
  Description of Artificial Sequence: Synthetic oligonucleotide
  Sense strand starting at position 226 of SEQ ID NO: 1884310
gguauuaugaggugaucau

SEQ ID NO: 2256073 - RNA, 19 nt, Artificial Sequence
  Description of Artificial Sequence: Synthetic oligonucleotide
  Antisense strand to SEQ ID NO: 2256072
augaucaccucauaauacc

SEQ ID NO: 2256074 - RNA, 19 nt, Artificial Sequence
  Description of Artificial Sequence: Synthetic oligonucleotide
  Sense strand starting at position 227 of SEQ ID NO: 1884310
guauuaugaggugaucauu

SEQ ID NO: 2256075 - RNA, 19 nt, Artificial Sequence
  Description of Artificial Sequence: Synthetic oligonucleotide
  Antisense strand to SEQ ID NO: 2256074
aaugaucaccucauaauac

SEQ ID NO: 2256076 - RNA, 19 nt, Artificial Sequence
  Description of Artificial Sequence: Synthetic oligonucleotide
  Sense strand starting at position 350 of SEQ ID NO: 1884310
ggaagacucugguuaucau

SEQ ID NO: 2256077 - RNA, 19 nt, Artificial Sequence
  Description of Artificial Sequence: Synthetic oligonucleotide
  Antisense strand to SEQ ID NO: 2256076
augauaaccagagucuucc

SEQ ID NO: 2256078 - RNA, 19 nt, Artificial Sequence
  Description of Artificial Sequence: Synthetic oligonucleotide
  Sense strand starting at position 360 of SEQ ID NO: 1884310
gguuaucauguugggagga

SEQ ID NO: 2256079 - RNA, 19 nt, Artificial Sequence
  Description of Artificial Sequence: Synthetic oligonucleotide
  Antisense strand to SEQ ID NO: 2256078
uccucccaacaugauaacc

SEQ ID NO: 2256080 - RNA, 19 nt, Artificial Sequence
  Description of Artificial Sequence: Synthetic oligonucleotide
  Sense strand starting at position 376 of SEQ ID NO: 1884310
ggaugaggcagagguaaua

SEQ ID NO: 2256081 - RNA, 19 nt, Artificial Sequence
  Description of Artificial Sequence: Synthetic oligonucleotide
  Antisense strand to SEQ ID NO: 2256080
uauuaccucugccucaucc

SEQ ID NO: 2256082 - RNA, 19 nt, Artificial Sequence
  Description of Artificial Sequence: Synthetic oligonucleotide
  Sense strand starting at position 388 of SEQ ID NO: 1884310
gguaauaggaccugcagaa

SEQ ID NO: 2256083 - RNA, 19 nt, Artificial Sequence
  Description of Artificial Sequence: Synthetic oligonucleotide
  Antisense strand to SEQ ID NO: 2256082
uucugcagguccuauuacc

SEQ ID NO: 2256084 - RNA, 19 nt, Artificial Sequence
  Description of Artificial Sequence: Synthetic oligonucleotide
  Sense strand starting at position 401 of SEQ ID NO: 1884310
gcagaaaggguuggaaguu

SEQ ID NO: 2256085 - RNA, 19 nt, Artificial Sequence
  Description of Artificial Sequence: Synthetic oligonucleotide
  Antisense strand to SEQ ID NO: 2256084
aacuuccaacccuuucugc

SEQ ID NO: 2256086 - RNA, 19 nt, Artificial Sequence
  Description of Artificial Sequence: Synthetic oligonucleotide
  Sense strand starting at position 513 of SEQ ID NO: 1884310
uucugaugucuggacucua

SEQ ID NO: 2256087 - RNA, 19 nt, Artificial Sequence
  Description of Artificial Sequence: Synthetic oligonucleotide
  Antisense strand to SEQ ID NO: 2256086
uagaguccagacaucagaa

SEQ ID NO: 2256088 - RNA, 19 nt, Artificial Sequence
  Description of Artificial Sequence: Synthetic oligonucleotide
  Sense strand starting at position 623 of SEQ ID NO: 1884310
aucugaaucuagcucugau

SEQ ID NO: 2256089 - RNA, 19 nt, Artificial Sequence
  Description of Artificial Sequence: Synthetic oligonucleotide
  Antisense strand to SEQ ID NO: 2256088
aucagagcuagauucagau

SEQ ID NO: 2256090 - RNA, 19 nt, Artificial Sequence
  Description of Artificial Sequence: Synthetic oligonucleotide
  Sense strand starting at position 733 of SEQ ID NO: 1884310
cagagauaauguguaaagu

SEQ ID NO: 2256091 - RNA, 19 nt, Artificial Sequence
  Description of Artificial Sequence: Synthetic oligonucleotide
  Antisense strand to SEQ ID NO: 2256090
acuuuacacauuaucucug

SEQ ID NO: 2256092 - RNA, 19 nt, Artificial Sequence
  Description of Artificial Sequence: Synthetic oligonucleotide
  Sense strand starting at position 810 of SEQ ID NO: 1884310
uucccuagauucuuaugua

SEQ ID NO: 2256093 - RNA, 19 nt, Artificial Sequence
  Description of Artificial Sequence: Synthetic oligonucleotide
  Antisense strand to SEQ ID NO: 2256092
uacauaagaaucuagggaa

SEQ ID NO: 2256094 - RNA, 19 nt, Artificial Sequence
  Description of Artificial Sequence: Synthetic oligonucleotide
  Sense strand starting at position 2086 of SEQ ID NO: 1884310
ugucacuuugcucaucaca

SEQ ID NO: 2256095 - RNA, 19 nt, Artificial Sequence
  Description of Artificial Sequence: Synthetic oligonucleotide
  Antisense strand to SEQ ID NO: 2256094
ugugaugagcaaagugaca

SEQ ID NO: 2256096 - RNA, 19 nt, Artificial Sequence
  Description of Artificial Sequence: Synthetic oligonucleotide
  Sense strand starting at position 2300 of SEQ ID NO: 1884310
ggagaaguucccugauggu

SEQ ID NO: 2256097 - RNA, 19 nt, Artificial Sequence
  Description of Artificial Sequence: Synthetic oligonucleotide
  Antisense strand to SEQ ID NO: 2256096
accaucagggaacuucucc

SEQ ID NO: 2256098 - RNA, 19 nt, Artificial Sequence
  Description of Artificial Sequence: Synthetic oligonucleotide
  Sense strand starting at position 2313 of SEQ ID NO: 1884310
gaugguuucuggcuaggag

SEQ ID NO: 2256099 - RNA, 19 nt, Artificial Sequence
  Description of Artificial Sequence: Synthetic oligonucleotide
  Antisense strand to SEQ ID NO: 2256098
cuccuagccagaaaccauc

SEQ ID NO: 2256100 - RNA, 19 nt, Artificial Sequence
  Description of Artificial Sequence: Synthetic oligonucleotide
  Sense strand starting at position 2314 of SEQ ID NO: 1884310
augguuucuggcuaggaga

SEQ ID NO: 2256101 - RNA, 19 nt, Artificial Sequence
  Description of Artificial Sequence: Synthetic oligonucleotide
  Antisense strand to SEQ ID NO: 2256100
ucuccuagccagaaaccau

SEQ ID NO: 2256102 - RNA, 19 nt, Artificial Sequence
  Description of Artificial Sequence: Synthetic oligonucleotide
  Sense strand starting at position 2393 of SEQ ID NO: 1884310
cuaccuaaugggugagguu

SEQ ID NO: 2256103 - RNA, 19 nt, Artificial Sequence
  Description of Artificial Sequence: Synthetic oligonucleotide
  Antisense strand to SEQ ID NO: 2256102
aaccucacccauuagguag

SEQ ID NO: 2256104 - RNA, 19 nt, Artificial Sequence
  Description of Artificial Sequence: Synthetic oligonucleotide
  Sense strand starting at position 2394 of SEQ ID NO: 1884310
uaccuaaugggugagguua

SEQ ID NO: 2256105 - RNA, 19 nt, Artificial Sequence
  Description of Artificial Sequence: Synthetic oligonucleotide
  Antisense strand to SEQ ID NO: 2256104
uaaccucacccauuaggua

SEQ ID NO: 2256106 - RNA, 19 nt, Artificial Sequence
  Description of Artificial Sequence: Synthetic oligonucleotide
  Sense strand starting at position 2580 of SEQ ID NO: 1884310
cccguuagagcucagggau

SEQ ID NO: 2256107 - RNA, 19 nt, Artificial Sequence
  Description of Artificial Sequence: Synthetic oligonucleotide
  Antisense strand to SEQ ID NO: 2256106
aucccugagcucuaacggg

SEQ ID NO: 2256108 - RNA, 19 nt, Artificial Sequence
  Description of Artificial Sequence: Synthetic oligonucleotide
  Sense strand starting at position 2586 of SEQ ID NO: 1884310
agagcucagggaugguaaa

SEQ ID NO: 2256109 - RNA, 19 nt, Artificial Sequence
  Description of Artificial Sequence: Synthetic oligonucleotide
  Antisense strand to SEQ ID NO: 2256108
uuuaccaucccugagcucu

SEQ ID NO: 2256110 - RNA, 19 nt, Artificial Sequence
  Description of Artificial Sequence: Synthetic oligonucleotide
  Sense strand starting at position 2657 of SEQ ID NO: 1884310
agacacucacccugugauu

SEQ ID NO: 2256111 - RNA, 19 nt, Artificial Sequence
  Description of Artificial Sequence: Synthetic oligonucleotide
  Antisense strand to SEQ ID NO: 2256110
aaucacagggugagugucu

SEQ ID NO: 2256112 - RNA, 19 nt, Artificial Sequence
  Description of Artificial Sequence: Synthetic oligonucleotide
  Sense strand starting at position 2721 of SEQ ID NO: 1884310
ucccaagacgacuguuaca

SEQ ID NO: 2256113 - RNA, 19 nt, Artificial Sequence
  Description of Artificial Sequence: Synthetic oligonucleotide
  Antisense strand to SEQ ID NO: 2256112
uguaacagucgucuuggga

SEQ ID NO: 2256114 - RNA, 19 nt, Artificial Sequence
  Description of Artificial Sequence: Synthetic oligonucleotide
  Sense strand starting at position 2781 of SEQ ID NO: 1884310
gcuguuaucauggagggcu

SEQ ID NO: 2256115 - RNA, 19 nt, Artificial Sequence
  Description of Artificial Sequence: Synthetic oligonucleotide
  Antisense strand to SEQ ID NO: 2256114
agcccuccaugauaacagc

SEQ ID NO: 2256116 - RNA, 19 nt, Artificial Sequence
  Description of Artificial Sequence: Synthetic oligonucleotide
  Sense strand starting at position 3005 of SEQ ID NO: 1884310
gugucaaugcucguccuuu

SEQ ID NO: 2256117 - RNA, 19 nt, Artificial Sequence
  Description of Artificial Sequence: Synthetic oligonucleotide
  Antisense strand to SEQ ID NO: 2256116
aaaggacgagcauugacac

SEQ ID NO: 2256118 - RNA, 19 nt, Artificial Sequence
  Description of Artificial Sequence: Synthetic oligonucleotide
  Sense strand starting at position 3058 of SEQ ID NO: 1884310
auugguaaccucuguugga

SEQ ID NO: 2256119 - RNA, 19 nt, Artificial Sequence
  Description of Artificial Sequence: Synthetic oligonucleotide
  Antisense strand to SEQ ID NO: 2256118
uccaacagagguuaccaau

SEQ ID NO: 2256120 - RNA, 19 nt, Artificial Sequence
  Description of Artificial Sequence: Synthetic oligonucleotide
  Sense strand starting at position 3059 of SEQ ID NO: 1884310
uugguaaccucuguuggaa

SEQ ID NO: 2256121 - RNA, 19 nt, Artificial Sequence
  Description of Artificial Sequence: Synthetic oligonucleotide
  Antisense strand to SEQ ID NO: 2256120
uuccaacagagguuaccaa

SEQ ID NO: 2256122 - RNA, 19 nt, Artificial Sequence
  Description of Artificial Sequence: Synthetic oligonucleotide
  Sense strand starting at position 3090 of SEQ ID NO: 1884310
aagaguuaccuggguaccu

SEQ ID NO: 2256123 - RNA, 19 nt, Artificial Sequence
  Description of Artificial Sequence: Synthetic oligonucleotide
  Antisense strand to SEQ ID NO: 2256122
agguacccagguaacucuu

SEQ ID NO: 2256124 - RNA, 19 nt, Artificial Sequence
  Description of Artificial Sequence: Synthetic oligonucleotide
  Sense strand starting at position 3091 of SEQ ID NO: 1884310
agaguuaccuggguaccuu

SEQ ID NO: 2256125 - RNA, 19 nt, Artificial Sequence
  Description of Artificial Sequence: Synthetic oligonucleotide
  Antisense strand to SEQ ID NO: 2256124
aagguacccagguaacucu

SEQ ID NO: 2256126 - RNA, 19 nt, Artificial Sequence
  Description of Artificial Sequence: Synthetic oligonucleotide
  Sense strand starting at position 3109 of SEQ ID NO: 1884310
ugggaagcucuugaugcaa

SEQ ID NO: 2256127 - RNA, 19 nt, Artificial Sequence
  Description of Artificial Sequence: Synthetic oligonucleotide
  Antisense strand to SEQ ID NO: 2256126
uugcaucaagagcuuccca

SEQ ID NO: 2256128 - RNA, 19 nt, Artificial Sequence
  Description of Artificial Sequence: Synthetic oligonucleotide
  Sense strand starting at position 3130 of SEQ ID NO: 1884310
guagcagacugagucuaua

SEQ ID NO: 2256129 - RNA, 19 nt, Artificial Sequence
  Description of Artificial Sequence: Synthetic oligonucleotide
  Antisense strand to SEQ ID NO: 2256128
uauagacucagucugcuac

SEQ ID NO: 2256130 - RNA, 19 nt, Artificial Sequence
  Description of Artificial Sequence: Synthetic oligonucleotide
  Sense strand starting at position 3225 of SEQ ID NO: 1884310
gcagcagaaaguuaaguuu

SEQ ID NO: 2256131 - RNA, 19 nt, Artificial Sequence
  Description of Artificial Sequence: Synthetic oligonucleotide
  Antisense strand to SEQ ID NO: 2256130
aaacuuaacuuucugcugc

SEQ ID NO: 2256132 - RNA, 19 nt, Artificial Sequence
  Description of Artificial Sequence: Synthetic oligonucleotide
  Sense strand starting at position 3228 of SEQ ID NO: 1884310
gcagaaaguuaaguuuacu

SEQ ID NO: 2256133 - RNA, 19 nt, Artificial Sequence
  Description of Artificial Sequence: Synthetic oligonucleotide
  Antisense strand to SEQ ID NO: 2256132
aguaaacuuaacuuucugc

SEQ ID NO: 2256134 - RNA, 19 nt, Artificial Sequence
  Description of Artificial Sequence: Synthetic oligonucleotide
  Sense strand starting at position 3544 of SEQ ID NO: 1884310
cgaugaguucaggacggca

SEQ ID NO: 2256135 - RNA, 19 nt, Artificial Sequence
  Description of Artificial Sequence: Synthetic oligonucleotide
  Antisense strand to SEQ ID NO: 2256134
ugccguccugaacucaucg

SEQ ID NO: 2256136 - RNA, 19 nt, Artificial Sequence
  Description of Artificial Sequence: Synthetic oligonucleotide
  Sense strand starting at position 3643 of SEQ ID NO: 1884310
gaccauagccuaugucaug

SEQ ID NO: 2256137 - RNA, 19 nt, Artificial Sequence
  Description of Artificial Sequence: Synthetic oligonucleotide
  Antisense strand to SEQ ID NO: 2256136
caugacauaggcuaugguc

SEQ ID NO: 2256138 - RNA, 19 nt, Artificial Sequence
  Description of Artificial Sequence: Synthetic oligonucleotide
  Sense strand starting at position 3758 of SEQ ID NO: 1884310
gaugacaucucccugcuga

SEQ ID NO: 2256139 - RNA, 19 nt, Artificial Sequence
  Description of Artificial Sequence: Synthetic oligonucleotide
  Antisense strand to SEQ ID NO: 2256138
ucagcagggagaugucauc

SEQ ID NO: 2256140 - RNA, 19 nt, Artificial Sequence
  Description of Artificial Sequence: Synthetic oligonucleotide
  Sense strand starting at position 3759 of SEQ ID NO: 1884310
augacaucucccugcugaa

SEQ ID NO: 2256141 - RNA, 19 nt, Artificial Sequence
  Description of Artificial Sequence: Synthetic oligonucleotide
  Antisense strand to SEQ ID NO: 2256140
uucagcagggagaugucau

SEQ ID NO: 2256142 - RNA, 19 nt, Artificial Sequence
  Description of Artificial Sequence: Synthetic oligonucleotide
  Sense strand starting at position 3785 of SEQ ID NO: 1884310
ggcccaugggcagaagaua

SEQ ID NO: 2256143 - RNA, 19 nt, Artificial Sequence
  Description of Artificial Sequence: Synthetic oligonucleotide
  Antisense strand to SEQ ID NO: 2256142
uaucuucugcccaugggcc

SEQ ID NO: 2256144 - RNA, 19 nt, Artificial Sequence
  Description of Artificial Sequence: Synthetic oligonucleotide
  Sense strand starting at position 7 of SEQ ID NO: 1884312
aguggaaaguccuaucugu

SEQ ID NO: 2256145 - RNA, 19 nt, Artificial Sequence
  Description of Artificial Sequence: Synthetic oligonucleotide
  Antisense strand to SEQ ID NO: 2256144
acagauaggacuuuccacu

SEQ ID NO: 2256146 - RNA, 19 nt, Artificial Sequence
  Description of Artificial Sequence: Synthetic oligonucleotide
  Sense strand starting at position 12 of SEQ ID NO: 1884312
aaaguccuaucugugaagu

SEQ ID NO: 2256147 - RNA, 19 nt, Artificial Sequence
  Description of Artificial Sequence: Synthetic oligonucleotide
  Antisense strand to SEQ ID NO: 2256146
acuucacagauaggacuuu

SEQ ID NO: 2256148 - RNA, 19 nt, Artificial Sequence
  Description of Artificial Sequence: Synthetic oligonucleotide
  Sense strand starting at position 13 of SEQ ID NO: 1884312
aaguccuaucugugaagua

SEQ ID NO: 2256149 - RNA, 19 nt, Artificial Sequence
  Description of Artificial Sequence: Synthetic oligonucleotide
  Antisense strand to SEQ ID NO: 2256148
uacuucacagauaggacuu

SEQ ID NO: 2256150 - RNA, 19 nt, Artificial Sequence
  Description of Artificial Sequence: Synthetic oligonucleotide
  Sense strand starting at position 14 of SEQ ID NO: 1884312
aguccuaucugugaaguaa

SEQ ID NO: 2256151 - RNA, 19 nt, Artificial Sequence
  Description of Artificial Sequence: Synthetic oligonucleotide
  Antisense strand to SEQ ID NO: 2256150
uuacuucacagauaggacu

SEQ ID NO: 2256152 - RNA, 19 nt, Artificial Sequence
  Description of Artificial Sequence: Synthetic oligonucleotide
  Sense strand starting at position 100 of SEQ ID NO: 1884312
ccuggcaacagugaguauu

SEQ ID NO: 2256153 - RNA, 19 nt, Artificial Sequence
  Description of Artificial Sequence: Synthetic oligonucleotide
  Antisense strand to SEQ ID NO: 2256152
aauacucacuguugccagg

SEQ ID NO: 2256154 - RNA, 19 nt, Artificial Sequence
  Description of Artificial Sequence: Synthetic oligonucleotide
  Sense strand starting at position 142 of SEQ ID NO: 1884312
ccaaguguucagggugaac

SEQ ID NO: 2256155 - RNA, 19 nt, Artificial Sequence
  Description of Artificial Sequence: Synthetic oligonucleotide
  Antisense strand to SEQ ID NO: 2256154
guucacccugaacacuugg

SEQ ID NO: 2256156 - RNA, 19 nt, Artificial Sequence
  Description of Artificial Sequence: Synthetic oligonucleotide
  Sense strand starting at position 208 of SEQ ID NO: 1884312
agugguugucuguggugaa

SEQ ID NO: 2256157 - RNA, 19 nt, Artificial Sequence
  Description of Artificial Sequence: Synthetic oligonucleotide
  Antisense strand to SEQ ID NO: 2256156
uucaccacagacaaccacu

SEQ ID NO: 2256158 - RNA, 19 nt, Artificial Sequence
  Description of Artificial Sequence: Synthetic oligonucleotide
  Sense strand starting at position 209 of SEQ ID NO: 1884312
gugguugucuguggugaaa

SEQ ID NO: 2256159 - RNA, 19 nt, Artificial Sequence
  Description of Artificial Sequence: Synthetic oligonucleotide
  Antisense strand to SEQ ID NO: 2256158
uuucaccacagacaaccac

SEQ ID NO: 2256160 - RNA, 19 nt, Artificial Sequence
  Description of Artificial Sequence: Synthetic oligonucleotide
  Sense strand starting at position 211 of SEQ ID NO: 1884312
gguugucuguggugaaaug

SEQ ID NO: 2256161 - RNA, 19 nt, Artificial Sequence
  Description of Artificial Sequence: Synthetic oligonucleotide
  Antisense strand to SEQ ID NO: 2256160
cauuucaccacagacaacc

SEQ ID NO: 2256162 - RNA, 19 nt, Artificial Sequence
  Description of Artificial Sequence: Synthetic oligonucleotide
  Sense strand starting at position 212 of SEQ ID NO: 1884312
guugucuguggugaaauga

SEQ ID NO: 2256163 - RNA, 19 nt, Artificial Sequence
  Description of Artificial Sequence: Synthetic oligonucleotide
  Antisense strand to SEQ ID NO: 2256162
ucauuucaccacagacaac

SEQ ID NO: 2256164 - RNA, 19 nt, Artificial Sequence
  Description of Artificial Sequence: Synthetic oligonucleotide
  Sense strand starting at position 230 of SEQ ID NO: 1884312
augauauggcccugaguuu

SEQ ID NO: 2256165 - RNA, 19 nt, Artificial Sequence
  Description of Artificial Sequence: Synthetic oligonucleotide
  Antisense strand to SEQ ID NO: 2256164
aaacucagggccauaucau

SEQ ID NO: 2256166 - RNA, 19 nt, Artificial Sequence
  Description of Artificial Sequence: Synthetic oligonucleotide
  Sense strand starting at position 318 of SEQ ID NO: 1884312
aagaaauucuaggaagcag

SEQ ID NO: 2256167 - RNA, 19 nt, Artificial Sequence
  Description of Artificial Sequence: Synthetic oligonucleotide
  Antisense strand to SEQ ID NO: 2256166
cugcuuccuagaauuucuu

SEQ ID NO: 2256168 - RNA, 19 nt, Artificial Sequence
  Description of Artificial Sequence: Synthetic oligonucleotide
  Sense strand starting at position 414 of SEQ ID NO: 1884312
gauggucagucacagaagu

SEQ ID NO: 2256169 - RNA, 19 nt, Artificial Sequence
  Description of Artificial Sequence: Synthetic oligonucleotide
  Antisense strand to SEQ ID NO: 2256168
acuucugugacugaccauc

SEQ ID NO: 2256170 - RNA, 19 nt, Artificial Sequence
  Description of Artificial Sequence: Synthetic oligonucleotide
  Sense strand starting at position 416 of SEQ ID NO: 1884312
uggucagucacagaaguca

SEQ ID NO: 2256171 - RNA, 19 nt, Artificial Sequence
  Description of Artificial Sequence: Synthetic oligonucleotide
  Antisense strand to SEQ ID NO: 2256170
ugacuucugugacugacca

SEQ ID NO: 2256172 - RNA, 19 nt, Artificial Sequence
  Description of Artificial Sequence: Synthetic oligonucleotide
  Sense strand starting at position 480 of SEQ ID NO: 1884312
uuucuaauccugugaguug

SEQ ID NO: 2256173 - RNA, 19 nt, Artificial Sequence
  Description of Artificial Sequence: Synthetic oligonucleotide
  Antisense strand to SEQ ID NO: 2256172
caacucacaggauuagaaa

SEQ ID NO: 2256174 - RNA, 19 nt, Artificial Sequence
  Description of Artificial Sequence: Synthetic oligonucleotide
  Sense strand starting at position 481 of SEQ ID NO: 1884312
uucuaauccugugaguuga

SEQ ID NO: 2256175 - RNA, 19 nt, Artificial Sequence
  Description of Artificial Sequence: Synthetic oligonucleotide
  Antisense strand to SEQ ID NO: 2256174
ucaacucacaggauuagaa

SEQ ID NO: 2256176 - RNA, 19 nt, Artificial Sequence
  Description of Artificial Sequence: Synthetic oligonucleotide
  Sense strand starting at position 562 of SEQ ID NO: 1884312
auccaaguaucaggagaga

SEQ ID NO: 2256177 - RNA, 19 nt, Artificial Sequence
  Description of Artificial Sequence: Synthetic oligonucleotide
  Antisense strand to SEQ ID NO: 2256176
ucucuccugauacuuggau

SEQ ID NO: 2256178 - RNA, 19 nt, Artificial Sequence
  Description of Artificial Sequence: Synthetic oligonucleotide
  Sense strand starting at position 576 of SEQ ID NO: 1884312
agagaugcauaguucuaag

SEQ ID NO: 2256179 - RNA, 19 nt, Artificial Sequence
  Description of Artificial Sequence: Synthetic oligonucleotide
  Antisense strand to SEQ ID NO: 2256178
cuuagaacuaugcaucucu

SEQ ID NO: 2256180 - RNA, 19 nt, Artificial Sequence
  Description of Artificial Sequence: Synthetic oligonucleotide
  Sense strand starting at position 579 of SEQ ID NO: 1884312
gaugcauaguucuaagagg

SEQ ID NO: 2256181 - RNA, 19 nt, Artificial Sequence
  Description of Artificial Sequence: Synthetic oligonucleotide
  Antisense strand to SEQ ID NO: 2256180
ccucuuagaacuaugcauc

SEQ ID NO: 2256182 - RNA, 19 nt, Artificial Sequence
  Description of Artificial Sequence: Synthetic oligonucleotide
  Sense strand starting at position 610 of SEQ ID NO: 1884312
gcaggcagaguuugaaaga

SEQ ID NO: 2256183 - RNA, 19 nt, Artificial Sequence
  Description of Artificial Sequence: Synthetic oligonucleotide
  Antisense strand to SEQ ID NO: 2256182
ucuuucaaacucugccugc

SEQ ID NO: 2256184 - RNA, 19 nt, Artificial Sequence
  Description of Artificial Sequence: Synthetic oligonucleotide
  Sense strand starting at position 611 of SEQ ID NO: 1884312
caggcagaguuugaaagaa

SEQ ID NO: 2256185 - RNA, 19 nt, Artificial Sequence
  Description of Artificial Sequence: Synthetic oligonucleotide
  Antisense strand to SEQ ID NO: 2256184
uucuuucaaacucugccug

SEQ ID NO: 2256186 - RNA, 19 nt, Artificial Sequence
  Description of Artificial Sequence: Synthetic oligonucleotide
  Sense strand starting at position 651 of SEQ ID NO: 1884312
augccuuucugugagguca

SEQ ID NO: 2256187 - RNA, 19 nt, Artificial Sequence
  Description of Artificial Sequence: Synthetic oligonucleotide
  Antisense strand to SEQ ID NO: 2256186
ugaccucacagaaaggcau

SEQ ID NO: 2256188 - RNA, 19 nt, Artificial Sequence
  Description of Artificial Sequence: Synthetic oligonucleotide
  Sense strand starting at position 653 of SEQ ID NO: 1884312
gccuuucugugaggucacu

SEQ ID NO: 2256189 - RNA, 19 nt, Artificial Sequence
  Description of Artificial Sequence: Synthetic oligonucleotide
  Antisense strand to SEQ ID NO: 2256188
agugaccucacagaaaggc

SEQ ID NO: 2256190 - RNA, 19 nt, Artificial Sequence
  Description of Artificial Sequence: Synthetic oligonucleotide
  Sense strand starting at position 818 of SEQ ID NO: 1884312
cuuuguaacuucuuuguaa

SEQ ID NO: 2256191 - RNA, 19 nt, Artificial Sequence
  Description of Artificial Sequence: Synthetic oligonucleotide
  Antisense strand to SEQ ID NO: 2256190
uuacaaagaaguuacaaag

SEQ ID NO: 2256192 - RNA, 19 nt, Artificial Sequence
  Description of Artificial Sequence: Synthetic oligonucleotide
  Sense strand starting at position 882 of SEQ ID NO: 1884312
aauggaaaccucuagugca

SEQ ID NO: 2256193 - RNA, 19 nt, Artificial Sequence
  Description of Artificial Sequence: Synthetic oligonucleotide
  Antisense strand to SEQ ID NO: 2256192
ugcacuagagguuuccauu

SEQ ID NO: 2256194 - RNA, 19 nt, Artificial Sequence
  Description of Artificial Sequence: Synthetic oligonucleotide
  Sense strand starting at position 885 of SEQ ID NO: 1884312
ggaaaccucuagugcauau

SEQ ID NO: 2256195 - RNA, 19 nt, Artificial Sequence
  Description of Artificial Sequence: Synthetic oligonucleotide
  Antisense strand to SEQ ID NO: 2256194
auaugcacuagagguuucc

SEQ ID NO: 2256196 - RNA, 19 nt, Artificial Sequence
  Description of Artificial Sequence: Synthetic oligonucleotide
  Sense strand starting at position 997 of SEQ ID NO: 1884312
cugcuuugguuccuuuauu

SEQ ID NO: 2256197 - RNA, 19 nt, Artificial Sequence
  Description of Artificial Sequence: Synthetic oligonucleotide
  Antisense strand to SEQ ID NO: 2256196
aauaaaggaaccaaagcag

SEQ ID NO: 2256198 - RNA, 19 nt, Artificial Sequence
  Description of Artificial Sequence: Synthetic oligonucleotide
  Sense strand starting at position 1199 of SEQ ID NO: 1884312
ccuaguaauuucuggaaca

SEQ ID NO: 2256199 - RNA, 19 nt, Artificial Sequence
  Description of Artificial Sequence: Synthetic oligonucleotide
  Antisense strand to SEQ ID NO: 2256198
uguuccagaaauuacuagg

SEQ ID NO: 2256200 - RNA, 19 nt, Artificial Sequence
  Description of Artificial Sequence: Synthetic oligonucleotide
  Sense strand starting at position 1200 of SEQ ID NO: 1884312
cuaguaauuucuggaacaa

SEQ ID NO: 2256201 - RNA, 19 nt, Artificial Sequence
  Description of Artificial Sequence: Synthetic oligonucleotide
  Antisense strand to SEQ ID NO: 2256200
uuguuccagaaauuacuag

SEQ ID NO: 2256202 - RNA, 19 nt, Artificial Sequence
  Description of Artificial Sequence: Synthetic oligonucleotide
  Sense strand starting at position 1287 of SEQ ID NO: 1884312
ggaccagucuugucccuuu

SEQ ID NO: 2256203 - RNA, 19 nt, Artificial Sequence
  Description of Artificial Sequence: Synthetic oligonucleotide
  Antisense strand to SEQ ID NO: 2256202
aaagggacaagacuggucc

SEQ ID NO: 2256204 - RNA, 19 nt, Artificial Sequence
  Description of Artificial Sequence: Synthetic oligonucleotide
  Sense strand starting at position 1290 of SEQ ID NO: 1884312
ccagucuugucccuuuacu

SEQ ID NO: 2256205 - RNA, 19 nt, Artificial Sequence
  Description of Artificial Sequence: Synthetic oligonucleotide
  Antisense strand to SEQ ID NO: 2256204
aguaaagggacaagacugg

SEQ ID NO: 2256206 - RNA, 19 nt, Artificial Sequence
  Description of Artificial Sequence: Synthetic oligonucleotide
  Sense strand starting at position 1321 of SEQ ID NO: 1884312
uugcacuggucacuaaguu

SEQ ID NO: 2256207 - RNA, 19 nt, Artificial Sequence
  Description of Artificial Sequence: Synthetic oligonucleotide
  Antisense strand to SEQ ID NO: 2256206
aacuuagugaccagugcaa

SEQ ID NO: 2256208 - RNA, 19 nt, Artificial Sequence
  Description of Artificial Sequence: Synthetic oligonucleotide
  Sense strand starting at position 1322 of SEQ ID NO: 1884312
ugcacuggucacuaaguuu

SEQ ID NO: 2256209 - RNA, 19 nt, Artificial Sequence
  Description of Artificial Sequence: Synthetic oligonucleotide
  Antisense strand to SEQ ID NO: 2256208
aaacuuagugaccagugca

SEQ ID NO: 2256210 - RNA, 19 nt, Artificial Sequence
  Description of Artificial Sequence: Synthetic oligonucleotide
  Sense strand starting at position 1369 of SEQ ID NO: 1884312
acaucauugguauagguuu

SEQ ID NO: 2256211 - RNA, 19 nt, Artificial Sequence
  Description of Artificial Sequence: Synthetic oligonucleotide
  Antisense strand to SEQ ID NO: 2256210
aaaccuauaccaaugaugu

SEQ ID NO: 2256212 - RNA, 19 nt, Artificial Sequence
  Description of Artificial Sequence: Synthetic oligonucleotide
  Sense strand starting at position 1575 of SEQ ID NO: 1884312
ucaagaaauuguuacagga

SEQ ID NO: 2256213 - RNA, 19 nt, Artificial Sequence
  Description of Artificial Sequence: Synthetic oligonucleotide
  Antisense strand to SEQ ID NO: 2256212
uccuguaacaauuucuuga

SEQ ID NO: 2256214 - RNA, 19 nt, Artificial Sequence
  Description of Artificial Sequence: Synthetic oligonucleotide
  Sense strand starting at position 93 of SEQ ID NO: 1884311
ggaaaugaguuccuaagca

SEQ ID NO: 2256215 - RNA, 19 nt, Artificial Sequence
  Description of Artificial Sequence: Synthetic oligonucleotide
  Antisense strand to SEQ ID NO: 2256214
ugcuuaggaacucauuucc

SEQ ID NO: 2256216 - RNA, 19 nt, Artificial Sequence
  Description of Artificial Sequence: Synthetic oligonucleotide
  Sense strand starting at position 97 of SEQ ID NO: 1884311
augaguuccuaagcacuaa

SEQ ID NO: 2256217 - RNA, 19 nt, Artificial Sequence
  Description of Artificial Sequence: Synthetic oligonucleotide
  Antisense strand to SEQ ID NO: 2256216
uuagugcuuaggaacucau

SEQ ID NO: 2256218 - RNA, 19 nt, Artificial Sequence
  Description of Artificial Sequence: Synthetic oligonucleotide
  Sense strand starting at position 122 of SEQ ID NO: 1884311
gcaaccugaucuuuaguaa

SEQ ID NO: 2256219 - RNA, 19 nt, Artificial Sequence
  Description of Artificial Sequence: Synthetic oligonucleotide
  Antisense strand to SEQ ID NO: 2256218
uuacuaaagaucagguugc

SEQ ID NO: 2256220 - RNA, 19 nt, Artificial Sequence
  Description of Artificial Sequence: Synthetic oligonucleotide
  Sense strand starting at position 359 of SEQ ID NO: 1884311
uagggaguuuaauugcuga

SEQ ID NO: 2256221 - RNA, 19 nt, Artificial Sequence
  Description of Artificial Sequence: Synthetic oligonucleotide
  Antisense strand to SEQ ID NO: 2256220
ucagcaauuaaacucccua

SEQ ID NO: 2256222 - RNA, 19 nt, Artificial Sequence
  Description of Artificial Sequence: Synthetic oligonucleotide
  Sense strand starting at position 364 of SEQ ID NO: 1884311
aguuuaauugcugaaccaa

SEQ ID NO: 2256223 - RNA, 19 nt, Artificial Sequence
  Description of Artificial Sequence: Synthetic oligonucleotide
  Antisense strand to SEQ ID NO: 2256222
uugguucagcaauuaaacu

SEQ ID NO: 2256224 - RNA, 19 nt, Artificial Sequence
  Description of Artificial Sequence: Synthetic oligonucleotide
  Sense strand starting at position 384 of SEQ ID NO: 1884311
gccacagaauuggugaguu

SEQ ID NO: 2256225 - RNA, 19 nt, Artificial Sequence
  Description of Artificial Sequence: Synthetic oligonucleotide
  Antisense strand to SEQ ID NO: 2256224
aacucaccaauucuguggc

SEQ ID NO: 2256226 - RNA, 19 nt, Artificial Sequence
  Description of Artificial Sequence: Synthetic oligonucleotide
  Sense strand starting at position 450 of SEQ ID NO: 1884311
uugucuuuccaucaugcua

SEQ ID NO: 2256227 - RNA, 19 nt, Artificial Sequence
  Description of Artificial Sequence: Synthetic oligonucleotide
  Antisense strand to SEQ ID NO: 2256226
uagcaugauggaaagacaa

SEQ ID NO: 2256228 - RNA, 19 nt, Artificial Sequence
  Description of Artificial Sequence: Synthetic oligonucleotide
  Sense strand starting at position 620 of SEQ ID NO: 1884311
ggaagcaugauguagugaa

SEQ ID NO: 2256229 - RNA, 19 nt, Artificial Sequence
  Description of Artificial Sequence: Synthetic oligonucleotide
  Antisense strand to SEQ ID NO: 2256228
uucacuacaucaugcuucc

SEQ ID NO: 2256230 - RNA, 19 nt, Artificial Sequence
  Description of Artificial Sequence: Synthetic oligonucleotide
  Sense strand starting at position 624 of SEQ ID NO: 1884311
gcaugauguagugaagccu

SEQ ID NO: 2256231 - RNA, 19 nt, Artificial Sequence
  Description of Artificial Sequence: Synthetic oligonucleotide
  Antisense strand to SEQ ID NO: 2256230
aggcuucacuacaucaugc

SEQ ID NO: 2256232 - RNA, 19 nt, Artificial Sequence
  Description of Artificial Sequence: Synthetic oligonucleotide
  Sense strand starting at position 657 of SEQ ID NO: 1884311
cuagaaguguacuccuaga

SEQ ID NO: 2256233 - RNA, 19 nt, Artificial Sequence
  Description of Artificial Sequence: Synthetic oligonucleotide
  Antisense strand to SEQ ID NO: 2256232
ucuaggaguacacuucuag

SEQ ID NO: 2256234 - RNA, 19 nt, Artificial Sequence
  Description of Artificial Sequence: Synthetic oligonucleotide
  Sense strand starting at position 735 of SEQ ID NO: 1884311
uaauuuggcuucgacaaga

SEQ ID NO: 2256235 - RNA, 19 nt, Artificial Sequence
  Description of Artificial Sequence: Synthetic oligonucleotide
  Antisense strand to SEQ ID NO: 2256234
ucuugucgaagccaaauua

SEQ ID NO: 2256236 - RNA, 19 nt, Artificial Sequence
  Description of Artificial Sequence: Synthetic oligonucleotide
  Sense strand starting at position 745 of SEQ ID NO: 1884311
ucgacaagauuccuuccaa

SEQ ID NO: 2256237 - RNA, 19 nt, Artificial Sequence
  Description of Artificial Sequence: Synthetic oligonucleotide
  Antisense strand to SEQ ID NO: 2256236
uuggaaggaaucuugucga

SEQ ID NO: 2256238 - RNA, 19 nt, Artificial Sequence
  Description of Artificial Sequence: Synthetic oligonucleotide
  Sense strand starting at position 746 of SEQ ID NO: 1884311
cgacaagauuccuuccaac

SEQ ID NO: 2256239 - RNA, 19 nt, Artificial Sequence
  Description of Artificial Sequence: Synthetic oligonucleotide
  Antisense strand to SEQ ID NO: 2256238
guuggaaggaaucuugucg

SEQ ID NO: 2256240 - RNA, 19 nt, Artificial Sequence
  Description of Artificial Sequence: Synthetic oligonucleotide
  Sense strand starting at position 803 of SEQ ID NO: 1884311
uuauuuccucugugccaga

SEQ ID NO: 2256241 - RNA, 19 nt, Artificial Sequence
  Description of Artificial Sequence: Synthetic oligonucleotide
  Antisense strand to SEQ ID NO: 2256240
ucuggcacagaggaaauaa

SEQ ID NO: 2256242 - RNA, 19 nt, Artificial Sequence
  Description of Artificial Sequence: Synthetic oligonucleotide
  Sense strand starting at position 819 of SEQ ID NO: 1884311
agauacugugcugaguauu

SEQ ID NO: 2256243 - RNA, 19 nt, Artificial Sequence
  Description of Artificial Sequence: Synthetic oligonucleotide
  Antisense strand to SEQ ID NO: 2256242
aauacucagcacaguaucu

SEQ ID NO: 2256244 - RNA, 19 nt, Artificial Sequence
  Description of Artificial Sequence: Synthetic oligonucleotide
  Sense strand starting at position 865 of SEQ ID NO: 1884311
aacaaauagcugugaugga

SEQ ID NO: 2256245 - RNA, 19 nt, Artificial Sequence
  Description of Artificial Sequence: Synthetic oligonucleotide
  Antisense strand to SEQ ID NO: 2256244
uccaucacagcuauuuguu

SEQ ID NO: 2256246 - RNA, 19 nt, Artificial Sequence
  Description of Artificial Sequence: Synthetic oligonucleotide
  Sense strand starting at position 874 of SEQ ID NO: 1884311
cugugauggagcugcaaau

SEQ ID NO: 2256247 - RNA, 19 nt, Artificial Sequence
  Description of Artificial Sequence: Synthetic oligonucleotide
  Antisense strand to SEQ ID NO: 2256246
auuugcagcuccaucacag

SEQ ID NO: 2256248 - RNA, 19 nt, Artificial Sequence
  Description of Artificial Sequence: Synthetic oligonucleotide
  Sense strand starting at position 1243 of SEQ ID NO: 1884311
ucaaucauagugugacuua

SEQ ID NO: 2256249 - RNA, 19 nt, Artificial Sequence
  Description of Artificial Sequence: Synthetic oligonucleotide
  Antisense strand to SEQ ID NO: 2256248
uaagucacacuaugauuga

SEQ ID NO: 2256250 - RNA, 19 nt, Artificial Sequence
  Description of Artificial Sequence: Synthetic oligonucleotide
  Sense strand starting at position 1246 of SEQ ID NO: 1884311
aucauagugugacuuaaau

SEQ ID NO: 2256251 - RNA, 19 nt, Artificial Sequence
  Description of Artificial Sequence: Synthetic oligonucleotide
  Antisense strand to SEQ ID NO: 2256250
auuuaagucacacuaugau

SEQ ID NO: 2256252 - RNA, 19 nt, Artificial Sequence
  Description of Artificial Sequence: Synthetic oligonucleotide
  Sense strand starting at position 1252 of SEQ ID NO: 1884311
gugugacuuaaauggguca

SEQ ID NO: 2256253 - RNA, 19 nt, Artificial Sequence
  Description of Artificial Sequence: Synthetic oligonucleotide
  Antisense strand to SEQ ID NO: 2256252
ugacccauuuaagucacac

SEQ ID NO: 2256254 - RNA, 19 nt, Artificial Sequence
  Description of Artificial Sequence: Synthetic oligonucleotide
  Sense strand starting at position 1333 of SEQ ID NO: 1884311
gggcuuucugggcagcauu

SEQ ID NO: 2256255 - RNA, 19 nt, Artificial Sequence
  Description of Artificial Sequence: Synthetic oligonucleotide
  Antisense strand to SEQ ID NO: 2256254
aaugcugcccagaaagccc

SEQ ID NO: 2256256 - RNA, 19 nt, Artificial Sequence
  Description of Artificial Sequence: Synthetic oligonucleotide
  Sense strand starting at position 1343 of SEQ ID NO: 1884311
ggcagcauuaguggaaagu

SEQ ID NO: 2256257 - RNA, 19 nt, Artificial Sequence
  Description of Artificial Sequence: Synthetic oligonucleotide
  Antisense strand to SEQ ID NO: 2256256
acuuuccacuaaugcugcc

SEQ ID NO: 2256258 - RNA, 19 nt, Artificial Sequence
  Description of Artificial Sequence: Synthetic oligonucleotide
  Sense strand starting at position 1357 of SEQ ID NO: 1884311
aaaguccuaucugugaagu

SEQ ID NO: 2256259 - RNA, 19 nt, Artificial Sequence
  Description of Artificial Sequence: Synthetic oligonucleotide
  Antisense strand to SEQ ID NO: 2256258
acuucacagauaggacuuu

SEQ ID NO: 2256260 - RNA, 19 nt, Artificial Sequence
  Description of Artificial Sequence: Synthetic oligonucleotide
  Sense strand starting at position 1358 of SEQ ID NO: 1884311
aaguccuaucugugaagua

SEQ ID NO: 2256261 - RNA, 19 nt, Artificial Sequence
  Description of Artificial Sequence: Synthetic oligonucleotide
  Antisense strand to SEQ ID NO: 2256260
uacuucacagauaggacuu

SEQ ID NO: 2256262 - RNA, 19 nt, Artificial Sequence
  Description of Artificial Sequence: Synthetic oligonucleotide
  Sense strand starting at position 1445 of SEQ ID NO: 1884311
ccuggcaacagugaguauu

SEQ ID NO: 2256263 - RNA, 19 nt, Artificial Sequence
  Description of Artificial Sequence: Synthetic oligonucleotide
  Antisense strand to SEQ ID NO: 2256262
aauacucacuguugccagg

SEQ ID NO: 2256264 - RNA, 19 nt, Artificial Sequence
  Description of Artificial Sequence: Synthetic oligonucleotide
  Sense strand starting at position 1487 of SEQ ID NO: 1884311
ccaaguguucagggugaac

SEQ ID NO: 2256265 - RNA, 19 nt, Artificial Sequence
  Description of Artificial Sequence: Synthetic oligonucleotide
  Antisense strand to SEQ ID NO: 2256264
guucacccugaacacuugg

SEQ ID NO: 2256266 - RNA, 19 nt, Artificial Sequence
  Description of Artificial Sequence: Synthetic oligonucleotide
  Sense strand starting at position 1557 of SEQ ID NO: 1884311
guugucuguggugaaauga

SEQ ID NO: 2256267 - RNA, 19 nt, Artificial Sequence
  Description of Artificial Sequence: Synthetic oligonucleotide
  Antisense strand to SEQ ID NO: 2256266
ucauuucaccacagacaac

SEQ ID NO: 2256268 - RNA, 19 nt, Artificial Sequence
  Description of Artificial Sequence: Synthetic oligonucleotide
  Sense strand starting at position 1575 of SEQ ID NO: 1884311
augauauggcccugaguuu

SEQ ID NO: 2256269 - RNA, 19 nt, Artificial Sequence
  Description of Artificial Sequence: Synthetic oligonucleotide
  Antisense strand to SEQ ID NO: 2256268
aaacucagggccauaucau

SEQ ID NO: 2256270 - RNA, 19 nt, Artificial Sequence
  Description of Artificial Sequence: Synthetic oligonucleotide
  Sense strand starting at position 1663 of SEQ ID NO: 1884311
aagaaauucuaggaagcag

SEQ ID NO: 2256271 - RNA, 19 nt, Artificial Sequence
  Description of Artificial Sequence: Synthetic oligonucleotide
  Antisense strand to SEQ ID NO: 2256270
cugcuuccuagaauuucuu

SEQ ID NO: 2256272 - RNA, 19 nt, Artificial Sequence
  Description of Artificial Sequence: Synthetic oligonucleotide
  Sense strand starting at position 1761 of SEQ ID NO: 1884311
uggucagucacagaaguca

SEQ ID NO: 2256273 - RNA, 19 nt, Artificial Sequence
  Description of Artificial Sequence: Synthetic oligonucleotide
  Antisense strand to SEQ ID NO: 2256272
ugacuucugugacugacca

SEQ ID NO: 2256274 - RNA, 19 nt, Artificial Sequence
  Description of Artificial Sequence: Synthetic oligonucleotide
  Sense strand starting at position 1825 of SEQ ID NO: 1884311
uuucuaauccugugaguug

SEQ ID NO: 2256275 - RNA, 19 nt, Artificial Sequence
  Description of Artificial Sequence: Synthetic oligonucleotide
  Antisense strand to SEQ ID NO: 2256274
caacucacaggauuagaaa

SEQ ID NO: 2256276 - RNA, 19 nt, Artificial Sequence
  Description of Artificial Sequence: Synthetic oligonucleotide
  Sense strand starting at position 1921 of SEQ ID NO: 1884311
agagaugcauaguucuaag

SEQ ID NO: 2256277 - RNA, 19 nt, Artificial Sequence
  Description of Artificial Sequence: Synthetic oligonucleotide
  Antisense strand to SEQ ID NO: 2256276
cuuagaacuaugcaucucu

SEQ ID NO: 2256278 - RNA, 19 nt, Artificial Sequence
  Description of Artificial Sequence: Synthetic oligonucleotide
  Sense strand starting at position 1955 of SEQ ID NO: 1884311
gcaggcagaguuugaaaga

SEQ ID NO: 2256279 - RNA, 19 nt, Artificial Sequence
  Description of Artificial Sequence: Synthetic oligonucleotide
  Antisense strand to SEQ ID NO: 2256278
ucuuucaaacucugccugc

SEQ ID NO: 2256280 - RNA, 19 nt, Artificial Sequence
  Description of Artificial Sequence: Synthetic oligonucleotide
  Sense strand starting at position 2163 of SEQ ID NO: 1884311
cuuuguaacuucuuuguaa

SEQ ID NO: 2256281 - RNA, 19 nt, Artificial Sequence
  Description of Artificial Sequence: Synthetic oligonucleotide
  Antisense strand to SEQ ID NO: 2256280
uuacaaagaaguuacaaag

SEQ ID NO: 2256282 - RNA, 19 nt, Artificial Sequence
  Description of Artificial Sequence: Synthetic oligonucleotide
  Sense strand starting at position 2227 of SEQ ID NO: 1884311
aauggaaaccucuagugca

SEQ ID NO: 2256283 - RNA, 19 nt, Artificial Sequence
  Description of Artificial Sequence: Synthetic oligonucleotide
  Antisense strand to SEQ ID NO: 2256282
ugcacuagagguuuccauu

SEQ ID NO: 2256284 - RNA, 19 nt, Artificial Sequence
  Description of Artificial Sequence: Synthetic oligonucleotide
  Sense strand starting at position 2544 of SEQ ID NO: 1884311
ccuaguaauuucuggaaca

SEQ ID NO: 2256285 - RNA, 19 nt, Artificial Sequence
  Description of Artificial Sequence: Synthetic oligonucleotide
  Antisense strand to SEQ ID NO: 2256284
uguuccagaaauuacuagg

SEQ ID NO: 2256286 - RNA, 19 nt, Artificial Sequence
  Description of Artificial Sequence: Synthetic oligonucleotide
  Sense strand starting at position 2545 of SEQ ID NO: 1884311
cuaguaauuucuggaacaa

SEQ ID NO: 2256287 - RNA, 19 nt, Artificial Sequence
  Description of Artificial Sequence: Synthetic oligonucleotide
  Antisense strand to SEQ ID NO: 2256286
uuguuccagaaauuacuag

SEQ ID NO: 2256288 - RNA, 19 nt, Artificial Sequence
  Description of Artificial Sequence: Synthetic oligonucleotide
  Sense strand starting at position 2632 of SEQ ID NO: 1884311
ggaccagucuugucccuuu

SEQ ID NO: 2256289 - RNA, 19 nt, Artificial Sequence
  Description of Artificial Sequence: Synthetic oligonucleotide
  Antisense strand to SEQ ID NO: 2256288
aaagggacaagacuggucc

SEQ ID NO: 2256290 - RNA, 19 nt, Artificial Sequence
  Description of Artificial Sequence: Synthetic oligonucleotide
  Sense strand starting at position 2667 of SEQ ID NO: 1884311
ugcacuggucacuaaguuu

SEQ ID NO: 2256291 - RNA, 19 nt, Artificial Sequence
  Description of Artificial Sequence: Synthetic oligonucleotide
  Antisense strand to SEQ ID NO: 2256290
aaacuuagugaccagugca

SEQ ID NO: 2256292 - RNA, 19 nt, Artificial Sequence
  Description of Artificial Sequence: Synthetic oligonucleotide
  Sense strand starting at position 2714 of SEQ ID NO: 1884311
acaucauugguauagguuu

SEQ ID NO: 2256293 - RNA, 19 nt, Artificial Sequence
  Description of Artificial Sequence: Synthetic oligonucleotide
  Antisense strand to SEQ ID NO: 2256292
aaaccuauaccaaugaugu

SEQ ID NO: 2256294 - RNA, 19 nt, Artificial Sequence
  Description of Artificial Sequence: Synthetic oligonucleotide
  Sense strand starting at position 199 of SEQ ID NO: 1884313
gucacugagcugugagaca

SEQ ID NO: 2256295 - RNA, 19 nt, Artificial Sequence
  Description of Artificial Sequence: Synthetic oligonucleotide
  Antisense strand to SEQ ID NO: 2256294
ugucucacagcucagugac

SEQ ID NO: 2256296 - RNA, 19 nt, Artificial Sequence
  Description of Artificial Sequence: Synthetic oligonucleotide
  Sense strand starting at position 255 of SEQ ID NO: 1884313
ugcacaugacuccaauagu

SEQ ID NO: 2256297 - RNA, 19 nt, Artificial Sequence
  Description of Artificial Sequence: Synthetic oligonucleotide
  Antisense strand to SEQ ID NO: 2256296
acuauuggagucaugugca

SEQ ID NO: 2256298 - RNA, 19 nt, Artificial Sequence
  Description of Artificial Sequence: Synthetic oligonucleotide
  Sense strand starting at position 372 of SEQ ID NO: 1884313
aggcaccugguauauauua

SEQ ID NO: 2256299 - RNA, 19 nt, Artificial Sequence
  Description of Artificial Sequence: Synthetic oligonucleotide
  Antisense strand to SEQ ID NO: 2256298
uaauauauaccaggugccu

SEQ ID NO: 2256300 - RNA, 19 nt, Artificial Sequence
  Description of Artificial Sequence: Synthetic oligonucleotide
  Sense strand starting at position 380 of SEQ ID NO: 1884313
gguauauauuagguguuua

SEQ ID NO: 2256301 - RNA, 19 nt, Artificial Sequence
  Description of Artificial Sequence: Synthetic oligonucleotide
  Antisense strand to SEQ ID NO: 2256300
uaaacaccuaauauauacc

SEQ ID NO: 2256302 - RNA, 19 nt, Artificial Sequence
  Description of Artificial Sequence: Synthetic oligonucleotide
  Sense strand starting at position 449 of SEQ ID NO: 1884313
gagauaagcaccugagugu

SEQ ID NO: 2256303 - RNA, 19 nt, Artificial Sequence
  Description of Artificial Sequence: Synthetic oligonucleotide
  Antisense strand to SEQ ID NO: 2256302
acacucaggugcuuaucuc

SEQ ID NO: 2256304 - RNA, 19 nt, Artificial Sequence
  Description of Artificial Sequence: Synthetic oligonucleotide
  Sense strand starting at position 450 of SEQ ID NO: 1884313
agauaagcaccugaguguu

SEQ ID NO: 2256305 - RNA, 19 nt, Artificial Sequence
  Description of Artificial Sequence: Synthetic oligonucleotide
  Antisense strand to SEQ ID NO: 2256304
aacacucaggugcuuaucu

SEQ ID NO: 2256306 - RNA, 19 nt, Artificial Sequence
  Description of Artificial Sequence: Synthetic oligonucleotide
  Sense strand starting at position 464 of SEQ ID NO: 1884313
guguuacugcaacguauuu

SEQ ID NO: 2256307 - RNA, 19 nt, Artificial Sequence
  Description of Artificial Sequence: Synthetic oligonucleotide
  Antisense strand to SEQ ID NO: 2256306
aaauacguugcaguaacac

SEQ ID NO: 2256308 - RNA, 19 nt, Artificial Sequence
  Description of Artificial Sequence: Synthetic oligonucleotide
  Sense strand starting at position 571 of SEQ ID NO: 1884313
ucaacugaguguguacaaa

SEQ ID NO: 2256309 - RNA, 19 nt, Artificial Sequence
  Description of Artificial Sequence: Synthetic oligonucleotide
  Antisense strand to SEQ ID NO: 2256308
uuuguacacacucaguuga

SEQ ID NO: 2256310 - RNA, 19 nt, Artificial Sequence
  Description of Artificial Sequence: Synthetic oligonucleotide
  Sense strand starting at position 981 of SEQ ID NO: 1884313
gugguugcacuuaguggua

SEQ ID NO: 2256311 - RNA, 19 nt, Artificial Sequence
  Description of Artificial Sequence: Synthetic oligonucleotide
  Antisense strand to SEQ ID NO: 2256310
uaccacuaagugcaaccac

SEQ ID NO: 2256312 - RNA, 19 nt, Artificial Sequence
  Description of Artificial Sequence: Synthetic oligonucleotide
  Sense strand starting at position 1010 of SEQ ID NO: 1884313
aaguuaguuggaugaguua

SEQ ID NO: 2256313 - RNA, 19 nt, Artificial Sequence
  Description of Artificial Sequence: Synthetic oligonucleotide
  Antisense strand to SEQ ID NO: 2256312
uaacucauccaacuaacuu

SEQ ID NO: 2256314 - RNA, 19 nt, Artificial Sequence
  Description of Artificial Sequence: Synthetic oligonucleotide
  Sense strand starting at position 1021 of SEQ ID NO: 1884313
augaguuagggucagagua

SEQ ID NO: 2256315 - RNA, 19 nt, Artificial Sequence
  Description of Artificial Sequence: Synthetic oligonucleotide
  Antisense strand to SEQ ID NO: 2256314
uacucugacccuaacucau

SEQ ID NO: 2256316 - RNA, 19 nt, Artificial Sequence
  Description of Artificial Sequence: Synthetic oligonucleotide
  Sense strand starting at position 1144 of SEQ ID NO: 1884313
gguggcauccaugauggau

SEQ ID NO: 2256317 - RNA, 19 nt, Artificial Sequence
  Description of Artificial Sequence: Synthetic oligonucleotide
  Antisense strand to SEQ ID NO: 2256316
auccaucauggaugccacc

SEQ ID NO: 2256318 - RNA, 19 nt, Artificial Sequence
  Description of Artificial Sequence: Synthetic oligonucleotide
  Sense strand starting at position 1242 of SEQ ID NO: 1884313
uguugaaaugcuggaugua

SEQ ID NO: 2256319 - RNA, 19 nt, Artificial Sequence
  Description of Artificial Sequence: Synthetic oligonucleotide
  Antisense strand to SEQ ID NO: 2256318
uacauccagcauuucaaca

SEQ ID NO: 2256320 - RNA, 19 nt, Artificial Sequence
  Description of Artificial Sequence: Synthetic oligonucleotide
  Sense strand starting at position 1243 of SEQ ID NO: 1884313
guugaaaugcuggauguaa

SEQ ID NO: 2256321 - RNA, 19 nt, Artificial Sequence
  Description of Artificial Sequence: Synthetic oligonucleotide
  Antisense strand to SEQ ID NO: 2256320
uuacauccagcauuucaac

SEQ ID NO: 2256322 - RNA, 19 nt, Artificial Sequence
  Description of Artificial Sequence: Synthetic oligonucleotide
  Sense strand starting at position 1245 of SEQ ID NO: 1884313
ugaaaugcuggauguaaac

SEQ ID NO: 2256323 - RNA, 19 nt, Artificial Sequence
  Description of Artificial Sequence: Synthetic oligonucleotide
  Antisense strand to SEQ ID NO: 2256322
guuuacauccagcauuuca

SEQ ID NO: 2256324 - RNA, 19 nt, Artificial Sequence
  Description of Artificial Sequence: Synthetic oligonucleotide
  Sense strand starting at position 1299 of SEQ ID NO: 1884313
ggauaaauguuagucaaau

SEQ ID NO: 2256325 - RNA, 19 nt, Artificial Sequence
  Description of Artificial Sequence: Synthetic oligonucleotide
  Antisense strand to SEQ ID NO: 2256324
auuugacuaacauuuaucc

SEQ ID NO: 2256326 - RNA, 19 nt, Artificial Sequence
  Description of Artificial Sequence: Synthetic oligonucleotide
  Sense strand starting at position 1371 of SEQ ID NO: 1884313
ucuguaaugcauuaagaau

SEQ ID NO: 2256327 - RNA, 19 nt, Artificial Sequence
  Description of Artificial Sequence: Synthetic oligonucleotide
  Antisense strand to SEQ ID NO: 2256326
auucuuaaugcauuacaga

SEQ ID NO: 2256328 - RNA, 19 nt, Artificial Sequence
  Description of Artificial Sequence: Synthetic oligonucleotide
  Sense strand starting at position 1431 of SEQ ID NO: 1884313
agaaucagcugcuuauaaa

SEQ ID NO: 2256329 - RNA, 19 nt, Artificial Sequence
  Description of Artificial Sequence: Synthetic oligonucleotide
  Antisense strand to SEQ ID NO: 2256328
uuuauaagcagcugauucu

SEQ ID NO: 2256330 - RNA, 19 nt, Artificial Sequence
  Description of Artificial Sequence: Synthetic oligonucleotide
  Sense strand starting at position 1455 of SEQ ID NO: 1884313
uacuuuguggugcaccaaa

SEQ ID NO: 2256331 - RNA, 19 nt, Artificial Sequence
  Description of Artificial Sequence: Synthetic oligonucleotide
  Antisense strand to SEQ ID NO: 2256330
uuuggugcaccacaaagua

SEQ ID NO: 2256332 - RNA, 19 nt, Artificial Sequence
  Description of Artificial Sequence: Synthetic oligonucleotide
  Sense strand starting at position 1632 of SEQ ID NO: 1884313
caccgaaucccagaguuua

SEQ ID NO: 2256333 - RNA, 19 nt, Artificial Sequence
  Description of Artificial Sequence: Synthetic oligonucleotide
  Antisense strand to SEQ ID NO: 2256332
uaaacucugggauucggug

SEQ ID NO: 2256334 - RNA, 19 nt, Artificial Sequence
  Description of Artificial Sequence: Synthetic oligonucleotide
  Sense strand starting at position 1805 of SEQ ID NO: 1884313
uucgaagcgauugggauaa

SEQ ID NO: 2256335 - RNA, 19 nt, Artificial Sequence
  Description of Artificial Sequence: Synthetic oligonucleotide
  Antisense strand to SEQ ID NO: 2256334
uuaucccaaucgcuucgaa

SEQ ID NO: 2256336 - RNA, 19 nt, Artificial Sequence
  Description of Artificial Sequence: Synthetic oligonucleotide
  Sense strand starting at position 2065 of SEQ ID NO: 1884313
cgucauuuccugugggucu

SEQ ID NO: 2256337 - RNA, 19 nt, Artificial Sequence
  Description of Artificial Sequence: Synthetic oligonucleotide
  Antisense strand to SEQ ID NO: 2256336
agacccacaggaaaugacg

SEQ ID NO: 2256338 - RNA, 19 nt, Artificial Sequence
  Description of Artificial Sequence: Synthetic oligonucleotide
  Sense strand starting at position 2701 of SEQ ID NO: 1884313
gaaggagguuacguaagua

SEQ ID NO: 2256339 - RNA, 19 nt, Artificial Sequence
  Description of Artificial Sequence: Synthetic oligonucleotide
  Antisense strand to SEQ ID NO: 2256338
uacuuacguaaccuccuuc

SEQ ID NO: 2256340 - RNA, 19 nt, Artificial Sequence
  Description of Artificial Sequence: Synthetic oligonucleotide
  Sense strand starting at position 2723 of SEQ ID NO: 1884313
cgaauagugguagaugcua

SEQ ID NO: 2256341 - RNA, 19 nt, Artificial Sequence
  Description of Artificial Sequence: Synthetic oligonucleotide
  Antisense strand to SEQ ID NO: 2256340
uagcaucuaccacuauucg

SEQ ID NO: 2256342 - RNA, 19 nt, Artificial Sequence
  Description of Artificial Sequence: Synthetic oligonucleotide
  Sense strand starting at position 2805 of SEQ ID NO: 1884313
gauugcuuccuagagcaga

SEQ ID NO: 2256343 - RNA, 19 nt, Artificial Sequence
  Description of Artificial Sequence: Synthetic oligonucleotide
  Antisense strand to SEQ ID NO: 2256342
ucugcucuaggaagcaauc

SEQ ID NO: 2256344 - RNA, 19 nt, Artificial Sequence
  Description of Artificial Sequence: Synthetic oligonucleotide
  Sense strand starting at position 2841 of SEQ ID NO: 1884313
accaccucugcugaguaau

SEQ ID NO: 2256345 - RNA, 19 nt, Artificial Sequence
  Description of Artificial Sequence: Synthetic oligonucleotide
  Antisense strand to SEQ ID NO: 2256344
auuacucagcagagguggu

SEQ ID NO: 2256346 - RNA, 19 nt, Artificial Sequence
  Description of Artificial Sequence: Synthetic oligonucleotide
  Sense strand starting at position 2847 of SEQ ID NO: 1884313
ucugcugaguaauuagaga

SEQ ID NO: 2256347 - RNA, 19 nt, Artificial Sequence
  Description of Artificial Sequence: Synthetic oligonucleotide
  Antisense strand to SEQ ID NO: 2256346
ucucuaauuacucagcaga

SEQ ID NO: 2256348 - RNA, 19 nt, Artificial Sequence
  Description of Artificial Sequence: Synthetic oligonucleotide
  Sense strand starting at position 2962 of SEQ ID NO: 1884313
gucccuaaguccuuuauuu

SEQ ID NO: 2256349 - RNA, 19 nt, Artificial Sequence
  Description of Artificial Sequence: Synthetic oligonucleotide
  Antisense strand to SEQ ID NO: 2256348
aaauaaaggacuuagggac

SEQ ID NO: 2256350 - RNA, 19 nt, Artificial Sequence
  Description of Artificial Sequence: Synthetic oligonucleotide
  Sense strand starting at position 3018 of SEQ ID NO: 1884313
agaaaucauugauaggaau

SEQ ID NO: 2256351 - RNA, 19 nt, Artificial Sequence
  Description of Artificial Sequence: Synthetic oligonucleotide
  Antisense strand to SEQ ID NO: 2256350
auuccuaucaaugauuucu

SEQ ID NO: 2256352 - RNA, 19 nt, Artificial Sequence
  Description of Artificial Sequence: Synthetic oligonucleotide
  Sense strand starting at position 3241 of SEQ ID NO: 1884313
guugcugauuugcucuuua

SEQ ID NO: 2256353 - RNA, 19 nt, Artificial Sequence
  Description of Artificial Sequence: Synthetic oligonucleotide
  Antisense strand to SEQ ID NO: 2256352
uaaagagcaaaucagcaac

SEQ ID NO: 2256354 - RNA, 19 nt, Artificial Sequence
  Description of Artificial Sequence: Synthetic oligonucleotide
  Sense strand starting at position 3273 of SEQ ID NO: 1884313
uuggaagccucacuguaaa

SEQ ID NO: 2256355 - RNA, 19 nt, Artificial Sequence
  Description of Artificial Sequence: Synthetic oligonucleotide
  Antisense strand to SEQ ID NO: 2256354
uuuacagugaggcuuccaa

SEQ ID NO: 2256356 - RNA, 19 nt, Artificial Sequence
  Description of Artificial Sequence: Synthetic oligonucleotide
  Sense strand starting at position 3276 of SEQ ID NO: 1884313
gaagccucacuguaaauga

SEQ ID NO: 2256357 - RNA, 19 nt, Artificial Sequence
  Description of Artificial Sequence: Synthetic oligonucleotide
  Antisense strand to SEQ ID NO: 2256356
ucauuuacagugaggcuuc

SEQ ID NO: 2256358 - RNA, 19 nt, Artificial Sequence
  Description of Artificial Sequence: Synthetic oligonucleotide
  Sense strand starting at position 3301 of SEQ ID NO: 1884313
uuccguuaagccuauuaaa

SEQ ID NO: 2256359 - RNA, 19 nt, Artificial Sequence
  Description of Artificial Sequence: Synthetic oligonucleotide
  Antisense strand to SEQ ID NO: 2256358
uuuaauaggcuuaacggaa

SEQ ID NO: 2256360 - RNA, 19 nt, Artificial Sequence
  Description of Artificial Sequence: Synthetic oligonucleotide
  Sense strand starting at position 3348 of SEQ ID NO: 1884313
ggaagacuugccgaguuag

SEQ ID NO: 2256361 - RNA, 19 nt, Artificial Sequence
  Description of Artificial Sequence: Synthetic oligonucleotide
  Antisense strand to SEQ ID NO: 2256360
cuaacucggcaagucuucc

SEQ ID NO: 2256362 - RNA, 19 nt, Artificial Sequence
  Description of Artificial Sequence: Synthetic oligonucleotide
  Sense strand starting at position 3365 of SEQ ID NO: 1884313
aggccuaagucucugacau

SEQ ID NO: 2256363 - RNA, 19 nt, Artificial Sequence
  Description of Artificial Sequence: Synthetic oligonucleotide
  Antisense strand to SEQ ID NO: 2256362
augucagagacuuaggccu

SEQ ID NO: 2256364 - RNA, 19 nt, Artificial Sequence
  Description of Artificial Sequence: Synthetic oligonucleotide
  Sense strand starting at position 3421 of SEQ ID NO: 1884313
gggagcaaaucuguuuggu

SEQ ID NO: 2256365 - RNA, 19 nt, Artificial Sequence
  Description of Artificial Sequence: Synthetic oligonucleotide
  Antisense strand to SEQ ID NO: 2256364
accaaacagauuugcuccc

SEQ ID NO: 2256366 - RNA, 19 nt, Artificial Sequence
  Description of Artificial Sequence: Synthetic oligonucleotide
  Sense strand starting at position 3436 of SEQ ID NO: 1884313
ugguguuaacaggaguaag

SEQ ID NO: 2256367 - RNA, 19 nt, Artificial Sequence
  Description of Artificial Sequence: Synthetic oligonucleotide
  Antisense strand to SEQ ID NO: 2256366
cuuacuccuguuaacacca

SEQ ID NO: 2256368 - RNA, 19 nt, Artificial Sequence
  Description of Artificial Sequence: Synthetic oligonucleotide
  Sense strand starting at position 3439 of SEQ ID NO: 1884313
uguuaacaggaguaaguuu

SEQ ID NO: 2256369 - RNA, 19 nt, Artificial Sequence
  Description of Artificial Sequence: Synthetic oligonucleotide
  Antisense strand to SEQ ID NO: 2256368
aaacuuacuccuguuaaca

SEQ ID NO: 2256370 - RNA, 19 nt, Artificial Sequence
  Description of Artificial Sequence: Synthetic oligonucleotide
  Sense strand starting at position 3462 of SEQ ID NO: 1884313
uuugaaagcuaguuaagau

SEQ ID NO: 2256371 - RNA, 19 nt, Artificial Sequence
  Description of Artificial Sequence: Synthetic oligonucleotide
  Antisense strand to SEQ ID NO: 2256370
aucuuaacuagcuuucaaa

SEQ ID NO: 2256372 - RNA, 19 nt, Artificial Sequence
  Description of Artificial Sequence: Synthetic oligonucleotide
  Sense strand starting at position 3925 of SEQ ID NO: 1884313
cucuuaguaggaugaauua

SEQ ID NO: 2256373 - RNA, 19 nt, Artificial Sequence
  Description of Artificial Sequence: Synthetic oligonucleotide
  Antisense strand to SEQ ID NO: 2256372
uaauucauccuacuaagag

SEQ ID NO: 2256374 - RNA, 19 nt, Artificial Sequence
  Description of Artificial Sequence: Synthetic oligonucleotide
  Sense strand starting at position 9 of SEQ ID NO: 1884314
gaguuuccuggugaucaca

SEQ ID NO: 2256375 - RNA, 19 nt, Artificial Sequence
  Description of Artificial Sequence: Synthetic oligonucleotide
  Antisense strand to SEQ ID NO: 2256374
ugugaucaccaggaaacuc

SEQ ID NO: 2256376 - RNA, 19 nt, Artificial Sequence
  Description of Artificial Sequence: Synthetic oligonucleotide
  Sense strand starting at position 12 of SEQ ID NO: 1884314
uuuccuggugaucacagau

SEQ ID NO: 2256377 - RNA, 19 nt, Artificial Sequence
  Description of Artificial Sequence: Synthetic oligonucleotide
  Antisense strand to SEQ ID NO: 2256376
aucugugaucaccaggaaa

SEQ ID NO: 2256378 - RNA, 19 nt, Artificial Sequence
  Description of Artificial Sequence: Synthetic oligonucleotide
  Sense strand starting at position 158 of SEQ ID NO: 1884314
gaaucuauuggucaagggu

SEQ ID NO: 2256379 - RNA, 19 nt, Artificial Sequence
  Description of Artificial Sequence: Synthetic oligonucleotide
  Antisense strand to SEQ ID NO: 2256378
acccuugaccaauagauuc

SEQ ID NO: 2256380 - RNA, 19 nt, Artificial Sequence
  Description of Artificial Sequence: Synthetic oligonucleotide
  Sense strand starting at position 344 of SEQ ID NO: 1884314
ugugcaguuuauuucucaa

SEQ ID NO: 2256381 - RNA, 19 nt, Artificial Sequence
  Description of Artificial Sequence: Synthetic oligonucleotide
  Antisense strand to SEQ ID NO: 2256380
uugagaaauaaacugcaca

SEQ ID NO: 2256382 - RNA, 19 nt, Artificial Sequence
  Description of Artificial Sequence: Synthetic oligonucleotide
  Sense strand starting at position 451 of SEQ ID NO: 1884314
ccaucaauuccuggaucag

SEQ ID NO: 2256383 - RNA, 19 nt, Artificial Sequence
  Description of Artificial Sequence: Synthetic oligonucleotide
  Antisense strand to SEQ ID NO: 2256382
cugauccaggaauugaugg

SEQ ID NO: 2256384 - RNA, 19 nt, Artificial Sequence
  Description of Artificial Sequence: Synthetic oligonucleotide
  Sense strand starting at position 462 of SEQ ID NO: 1884314
uggaucaggaguugugaca

SEQ ID NO: 2256385 - RNA, 19 nt, Artificial Sequence
  Description of Artificial Sequence: Synthetic oligonucleotide
  Antisense strand to SEQ ID NO: 2256384
ugucacaacuccugaucca

SEQ ID NO: 2256386 - RNA, 19 nt, Artificial Sequence
  Description of Artificial Sequence: Synthetic oligonucleotide
  Sense strand starting at position 510 of SEQ ID NO: 1884314
ccaggcuuuauguggaaga

SEQ ID NO: 2256387 - RNA, 19 nt, Artificial Sequence
  Description of Artificial Sequence: Synthetic oligonucleotide
  Antisense strand to SEQ ID NO: 2256386
ucuuccacauaaagccugg

SEQ ID NO: 2256388 - RNA, 19 nt, Artificial Sequence
  Description of Artificial Sequence: Synthetic oligonucleotide
  Sense strand starting at position 1045 of SEQ ID NO: 1884314
uccauuuaguagucagugu

SEQ ID NO: 2256389 - RNA, 19 nt, Artificial Sequence
  Description of Artificial Sequence: Synthetic oligonucleotide
  Antisense strand to SEQ ID NO: 2256388
acacugacuacuaaaugga

SEQ ID NO: 2256390 - RNA, 19 nt, Artificial Sequence
  Description of Artificial Sequence: Synthetic oligonucleotide
  Sense strand starting at position 1099 of SEQ ID NO: 1884314
ugaacaauaguccauguca

SEQ ID NO: 2256391 - RNA, 19 nt, Artificial Sequence
  Description of Artificial Sequence: Synthetic oligonucleotide
  Antisense strand to SEQ ID NO: 2256390
ugacauggacuauuguuca

SEQ ID NO: 2256392 - RNA, 19 nt, Artificial Sequence
  Description of Artificial Sequence: Synthetic oligonucleotide
  Sense strand starting at position 1223 of SEQ ID NO: 1884314
ggcauuaggucauuugugu

SEQ ID NO: 2256393 - RNA, 19 nt, Artificial Sequence
  Description of Artificial Sequence: Synthetic oligonucleotide
  Antisense strand to SEQ ID NO: 2256392
acacaaaugaccuaaugcc

SEQ ID NO: 2256394 - RNA, 19 nt, Artificial Sequence
  Description of Artificial Sequence: Synthetic oligonucleotide
  Sense strand starting at position 1231 of SEQ ID NO: 1884314
gucauuugugucuggcaca

SEQ ID NO: 2256395 - RNA, 19 nt, Artificial Sequence
  Description of Artificial Sequence: Synthetic oligonucleotide
  Antisense strand to SEQ ID NO: 2256394
ugugccagacacaaaugac

SEQ ID NO: 2256396 - RNA, 19 nt, Artificial Sequence
  Description of Artificial Sequence: Synthetic oligonucleotide
  Sense strand starting at position 1249 of SEQ ID NO: 1884314
aggcuugaucuauagucua

SEQ ID NO: 2256397 - RNA, 19 nt, Artificial Sequence
  Description of Artificial Sequence: Synthetic oligonucleotide
  Antisense strand to SEQ ID NO: 2256396
uagacuauagaucaagccu

SEQ ID NO: 2256398 - RNA, 19 nt, Artificial Sequence
  Description of Artificial Sequence: Synthetic oligonucleotide
  Sense strand starting at position 1252 of SEQ ID NO: 1884314
cuugaucuauagucuaaug

SEQ ID NO: 2256399 - RNA, 19 nt, Artificial Sequence
  Description of Artificial Sequence: Synthetic oligonucleotide
  Antisense strand to SEQ ID NO: 2256398
cauuagacuauagaucaag

SEQ ID NO: 2256400 - RNA, 19 nt, Artificial Sequence
  Description of Artificial Sequence: Synthetic oligonucleotide
  Sense strand starting at position 1254 of SEQ ID NO: 1884314
ugaucuauagucuaaugcu

SEQ ID NO: 2256401 - RNA, 19 nt, Artificial Sequence
  Description of Artificial Sequence: Synthetic oligonucleotide
  Antisense strand to SEQ ID NO: 2256400
agcauuagacuauagauca

SEQ ID NO: 2256402 - RNA, 19 nt, Artificial Sequence
  Description of Artificial Sequence: Synthetic oligonucleotide
  Sense strand starting at position 1604 of SEQ ID NO: 1884314
cugaauuucugauauuaga

SEQ ID NO: 2256403 - RNA, 19 nt, Artificial Sequence
  Description of Artificial Sequence: Synthetic oligonucleotide
  Antisense strand to SEQ ID NO: 2256402
ucuaauaucagaaauucag

SEQ ID NO: 2256404 - RNA, 19 nt, Artificial Sequence
  Description of Artificial Sequence: Synthetic oligonucleotide
  Sense strand starting at position 1633 of SEQ ID NO: 1884314
uuuagucuacuugauauag

SEQ ID NO: 2256405 - RNA, 19 nt, Artificial Sequence
  Description of Artificial Sequence: Synthetic oligonucleotide
  Antisense strand to SEQ ID NO: 2256404
cuauaucaaguagacuaaa

SEQ ID NO: 2256406 - RNA, 19 nt, Artificial Sequence
  Description of Artificial Sequence: Synthetic oligonucleotide
  Sense strand starting at position 1740 of SEQ ID NO: 1884314
agcagagaucgaugauaug

SEQ ID NO: 2256407 - RNA, 19 nt, Artificial Sequence
  Description of Artificial Sequence: Synthetic oligonucleotide
  Antisense strand to SEQ ID NO: 2256406
cauaucaucgaucucugcu

SEQ ID NO: 2256408 - RNA, 19 nt, Artificial Sequence
  Description of Artificial Sequence: Synthetic oligonucleotide
  Sense strand starting at position 1780 of SEQ ID NO: 1884314
ugacuauaugcaggaaaca

SEQ ID NO: 2256409 - RNA, 19 nt, Artificial Sequence
  Description of Artificial Sequence: Synthetic oligonucleotide
  Antisense strand to SEQ ID NO: 2256408
uguuuccugcauauaguca

SEQ ID NO: 2256410 - RNA, 19 nt, Artificial Sequence
  Description of Artificial Sequence: Synthetic oligonucleotide
  Sense strand starting at position 1904 of SEQ ID NO: 1884314
ucauauccuuagguacaua

SEQ ID NO: 2256411 - RNA, 19 nt, Artificial Sequence
  Description of Artificial Sequence: Synthetic oligonucleotide
  Antisense strand to SEQ ID NO: 2256410
uauguaccuaaggauauga

SEQ ID NO: 2256412 - RNA, 19 nt, Artificial Sequence
  Description of Artificial Sequence: Synthetic oligonucleotide
  Sense strand starting at position 2043 of SEQ ID NO: 1884314
gucacuuuccuggaaguau

SEQ ID NO: 2256413 - RNA, 19 nt, Artificial Sequence
  Description of Artificial Sequence: Synthetic oligonucleotide
  Antisense strand to SEQ ID NO: 2256412
auacuuccaggaaagugac

SEQ ID NO: 2256414 - RNA, 19 nt, Artificial Sequence
  Description of Artificial Sequence: Synthetic oligonucleotide
  Sense strand starting at position 2118 of SEQ ID NO: 1884314
cuucuacugugaucuauag

SEQ ID NO: 2256415 - RNA, 19 nt, Artificial Sequence
  Description of Artificial Sequence: Synthetic oligonucleotide
  Antisense strand to SEQ ID NO: 2256414
cuauagaucacaguagaag

SEQ ID NO: 2256416 - RNA, 19 nt, Artificial Sequence
  Description of Artificial Sequence: Synthetic oligonucleotide
  Sense strand starting at position 2227 of SEQ ID NO: 1884314
uuccauaugucauccauga

SEQ ID NO: 2256417 - RNA, 19 nt, Artificial Sequence
  Description of Artificial Sequence: Synthetic oligonucleotide
  Antisense strand to SEQ ID NO: 2256416
ucauggaugacauauggaa

SEQ ID NO: 2256418 - RNA, 19 nt, Artificial Sequence
  Description of Artificial Sequence: Synthetic oligonucleotide
  Sense strand starting at position 2303 of SEQ ID NO: 1884314
cagacagauucucuggcua

SEQ ID NO: 2256419 - RNA, 19 nt, Artificial Sequence
  Description of Artificial Sequence: Synthetic oligonucleotide
  Antisense strand to SEQ ID NO: 2256418
uagccagagaaucugucug

SEQ ID NO: 2256420 - RNA, 19 nt, Artificial Sequence
  Description of Artificial Sequence: Synthetic oligonucleotide
  Sense strand starting at position 2398 of SEQ ID NO: 1884314
gguauuauaugacuugaag

SEQ ID NO: 2256421 - RNA, 19 nt, Artificial Sequence
  Description of Artificial Sequence: Synthetic oligonucleotide
  Antisense strand to SEQ ID NO: 2256420
cuucaagucauauaauacc

SEQ ID NO: 2256422 - RNA, 19 nt, Artificial Sequence
  Description of Artificial Sequence: Synthetic oligonucleotide
  Sense strand starting at position 2679 of SEQ ID NO: 1884314
ucaugaugaaagcgugaaa

SEQ ID NO: 2256423 - RNA, 19 nt, Artificial Sequence
  Description of Artificial Sequence: Synthetic oligonucleotide
  Antisense strand to SEQ ID NO: 2256422
uuucacgcuuucaucauga

SEQ ID NO: 2256424 - RNA, 19 nt, Artificial Sequence
  Description of Artificial Sequence: Synthetic oligonucleotide
  Sense strand starting at position 2772 of SEQ ID NO: 1884314
cuaccaucagagcgaaaga

SEQ ID NO: 2256425 - RNA, 19 nt, Artificial Sequence
  Description of Artificial Sequence: Synthetic oligonucleotide
  Antisense strand to SEQ ID NO: 2256424
ucuuucgcucugaugguag

SEQ ID NO: 2256426 - RNA, 19 nt, Artificial Sequence
  Description of Artificial Sequence: Synthetic oligonucleotide
  Sense strand starting at position 2840 of SEQ ID NO: 1884314
gccuaauauccagaguaaa

SEQ ID NO: 2256427 - RNA, 19 nt, Artificial Sequence
  Description of Artificial Sequence: Synthetic oligonucleotide
  Antisense strand to SEQ ID NO: 2256426
uuuacucuggauauuaggc

SEQ ID NO: 2256428 - RNA, 19 nt, Artificial Sequence
  Description of Artificial Sequence: Synthetic oligonucleotide
  Sense strand starting at position 3131 of SEQ ID NO: 1884314
ugcaguagucauucguuua

SEQ ID NO: 2256429 - RNA, 19 nt, Artificial Sequence
  Description of Artificial Sequence: Synthetic oligonucleotide
  Antisense strand to SEQ ID NO: 2256428
uaaacgaaugacuacugca

SEQ ID NO: 2256430 - RNA, 19 nt, Artificial Sequence
  Description of Artificial Sequence: Synthetic oligonucleotide
  Sense strand starting at position 3134 of SEQ ID NO: 1884314
aguagucauucguuuauuu

SEQ ID NO: 2256431 - RNA, 19 nt, Artificial Sequence
  Description of Artificial Sequence: Synthetic oligonucleotide
  Antisense strand to SEQ ID NO: 2256430
aaauaaacgaaugacuacu

SEQ ID NO: 2256432 - RNA, 19 nt, Artificial Sequence
  Description of Artificial Sequence: Synthetic oligonucleotide
  Sense strand starting at position 3138 of SEQ ID NO: 1884314
gucauucguuuauuucuuu

SEQ ID NO: 2256433 - RNA, 19 nt, Artificial Sequence
  Description of Artificial Sequence: Synthetic oligonucleotide
  Antisense strand to SEQ ID NO: 2256432
aaagaaauaaacgaaugac

SEQ ID NO: 2256434 - RNA, 19 nt, Artificial Sequence
  Description of Artificial Sequence: Synthetic oligonucleotide
  Sense strand starting at position 3143 of SEQ ID NO: 1884314
ucguuuauuucuuuacucu

SEQ ID NO: 2256435 - RNA, 19 nt, Artificial Sequence
  Description of Artificial Sequence: Synthetic oligonucleotide
  Antisense strand to SEQ ID NO: 2256434
agaguaaagaaauaaacga

SEQ ID NO: 2256436 - RNA, 19 nt, Artificial Sequence
  Description of Artificial Sequence: Synthetic oligonucleotide
  Sense strand starting at position 3210 of SEQ ID NO: 1884314
gaaagugcauauucugaaa

SEQ ID NO: 2256437 - RNA, 19 nt, Artificial Sequence
  Description of Artificial Sequence: Synthetic oligonucleotide
  Antisense strand to SEQ ID NO: 2256436
uuucagaauaugcacuuuc

SEQ ID NO: 2256438 - RNA, 19 nt, Artificial Sequence
  Description of Artificial Sequence: Synthetic oligonucleotide
  Sense strand starting at position 3258 of SEQ ID NO: 1884314
uuaugauaugauggagcca

SEQ ID NO: 2256439 - RNA, 19 nt, Artificial Sequence
  Description of Artificial Sequence: Synthetic oligonucleotide
  Antisense strand to SEQ ID NO: 2256438
uggcuccaucauaucauaa

SEQ ID NO: 2256440 - RNA, 19 nt, Artificial Sequence
  Description of Artificial Sequence: Synthetic oligonucleotide
  Sense strand starting at position 3410 of SEQ ID NO: 1884314
uagaguaaagcauguugaa

SEQ ID NO: 2256441 - RNA, 19 nt, Artificial Sequence
  Description of Artificial Sequence: Synthetic oligonucleotide
  Antisense strand to SEQ ID NO: 2256440
uucaacaugcuuuacucua

SEQ ID NO: 2256442 - RNA, 19 nt, Artificial Sequence
  Description of Artificial Sequence: Synthetic oligonucleotide
  Sense strand starting at position 3480 of SEQ ID NO: 1884314
gggucuuauagaugagagu

SEQ ID NO: 2256443 - RNA, 19 nt, Artificial Sequence
  Description of Artificial Sequence: Synthetic oligonucleotide
  Antisense strand to SEQ ID NO: 2256442
acucucaucuauaagaccc

SEQ ID NO: 2256444 - RNA, 19 nt, Artificial Sequence
  Description of Artificial Sequence: Synthetic oligonucleotide
  Sense strand starting at position 3494 of SEQ ID NO: 1884314
agaguaguagaguagguau

SEQ ID NO: 2256445 - RNA, 19 nt, Artificial Sequence
  Description of Artificial Sequence: Synthetic oligonucleotide
  Antisense strand to SEQ ID NO: 2256444
auaccuacucuacuacucu

SEQ ID NO: 2256446 - RNA, 19 nt, Artificial Sequence
  Description of Artificial Sequence: Synthetic oligonucleotide
  Sense strand starting at position 3554 of SEQ ID NO: 1884314
ugagauaaacauggucugu

SEQ ID NO: 2256447 - RNA, 19 nt, Artificial Sequence
  Description of Artificial Sequence: Synthetic oligonucleotide
  Antisense strand to SEQ ID NO: 2256446
acagaccauguuuaucuca

SEQ ID NO: 2256448 - RNA, 19 nt, Artificial Sequence
  Description of Artificial Sequence: Synthetic oligonucleotide
  Sense strand starting at position 3556 of SEQ ID NO: 1884314
agauaaacauggucuguag

SEQ ID NO: 2256449 - RNA, 19 nt, Artificial Sequence
  Description of Artificial Sequence: Synthetic oligonucleotide
  Antisense strand to SEQ ID NO: 2256448
cuacagaccauguuuaucu

SEQ ID NO: 2256450 - RNA, 19 nt, Artificial Sequence
  Description of Artificial Sequence: Synthetic oligonucleotide
  Sense strand starting at position 3755 of SEQ ID NO: 1884314
uguccucaccgggaggaaa

SEQ ID NO: 2256451 - RNA, 19 nt, Artificial Sequence
  Description of Artificial Sequence: Synthetic oligonucleotide
  Antisense strand to SEQ ID NO: 2256450
uuuccucccggugaggaca

SEQ ID NO: 2256452 - RNA, 19 nt, Artificial Sequence
  Description of Artificial Sequence: Synthetic oligonucleotide
  Sense strand starting at position 3880 of SEQ ID NO: 1884314
cagauaaggucaguuggga

SEQ ID NO: 2256453 - RNA, 19 nt, Artificial Sequence
  Description of Artificial Sequence: Synthetic oligonucleotide
  Antisense strand to SEQ ID NO: 2256452
ucccaacugaccuuaucug

SEQ ID NO: 2256454 - RNA, 19 nt, Artificial Sequence
  Description of Artificial Sequence: Synthetic oligonucleotide
  Sense strand starting at position 71 of SEQ ID NO: 1884315
cgcagauguuuccuuauaa

SEQ ID NO: 2256455 - RNA, 19 nt, Artificial Sequence
  Description of Artificial Sequence: Synthetic oligonucleotide
  Antisense strand to SEQ ID NO: 2256454
uuauaaggaaacaucugcg

SEQ ID NO: 2256456 - RNA, 19 nt, Artificial Sequence
  Description of Artificial Sequence: Synthetic oligonucleotide
  Sense strand starting at position 72 of SEQ ID NO: 1884315
gcagauguuuccuuauaau

SEQ ID NO: 2256457 - RNA, 19 nt, Artificial Sequence
  Description of Artificial Sequence: Synthetic oligonucleotide
  Antisense strand to SEQ ID NO: 2256456
auuauaaggaaacaucugc

SEQ ID NO: 2256458 - RNA, 19 nt, Artificial Sequence
  Description of Artificial Sequence: Synthetic oligonucleotide
  Sense strand starting at position 106 of SEQ ID NO: 1884315
ccguaauuggauuaucuca

SEQ ID NO: 2256459 - RNA, 19 nt, Artificial Sequence
  Description of Artificial Sequence: Synthetic oligonucleotide
  Antisense strand to SEQ ID NO: 2256458
ugagauaauccaauuacgg

SEQ ID NO: 2256460 - RNA, 19 nt, Artificial Sequence
  Description of Artificial Sequence: Synthetic oligonucleotide
  Sense strand starting at position 108 of SEQ ID NO: 1884315
guaauuggauuaucucacu

SEQ ID NO: 2256461 - RNA, 19 nt, Artificial Sequence
  Description of Artificial Sequence: Synthetic oligonucleotide
  Antisense strand to SEQ ID NO: 2256460
agugagauaauccaauuac

SEQ ID NO: 2256462 - RNA, 19 nt, Artificial Sequence
  Description of Artificial Sequence: Synthetic oligonucleotide
  Sense strand starting at position 111 of SEQ ID NO: 1884315
auuggauuaucucacugac

SEQ ID NO: 2256463 - RNA, 19 nt, Artificial Sequence
  Description of Artificial Sequence: Synthetic oligonucleotide
  Antisense strand to SEQ ID NO: 2256462
gucagugagauaauccaau

SEQ ID NO: 2256464 - RNA, 19 nt, Artificial Sequence
  Description of Artificial Sequence: Synthetic oligonucleotide
  Sense strand starting at position 113 of SEQ ID NO: 1884315
uggauuaucucacugacuc

SEQ ID NO: 2256465 - RNA, 19 nt, Artificial Sequence
  Description of Artificial Sequence: Synthetic oligonucleotide
  Antisense strand to SEQ ID NO: 2256464
gagucagugagauaaucca

SEQ ID NO: 2256466 - RNA, 19 nt, Artificial Sequence
  Description of Artificial Sequence: Synthetic oligonucleotide
  Sense strand starting at position 209 of SEQ ID NO: 1884315
uuugaacucaggugacaug

SEQ ID NO: 2256467 - RNA, 19 nt, Artificial Sequence
  Description of Artificial Sequence: Synthetic oligonucleotide
  Antisense strand to SEQ ID NO: 2256466
caugucaccugaguucaaa

SEQ ID NO: 2256468 - RNA, 19 nt, Artificial Sequence
  Description of Artificial Sequence: Synthetic oligonucleotide
  Sense strand starting at position 386 of SEQ ID NO: 1884315
ugcagcucugccguaguua

SEQ ID NO: 2256469 - RNA, 19 nt, Artificial Sequence
  Description of Artificial Sequence: Synthetic oligonucleotide
  Antisense strand to SEQ ID NO: 2256468
uaacuacggcagagcugca

SEQ ID NO: 2256470 - RNA, 19 nt, Artificial Sequence
  Description of Artificial Sequence: Synthetic oligonucleotide
  Sense strand starting at position 564 of SEQ ID NO: 1884315
uaaggaacuucucggauug

SEQ ID NO: 2256471 - RNA, 19 nt, Artificial Sequence
  Description of Artificial Sequence: Synthetic oligonucleotide
  Antisense strand to SEQ ID NO: 2256470
caauccgagaaguuccuua

SEQ ID NO: 2256472 - RNA, 19 nt, Artificial Sequence
  Description of Artificial Sequence: Synthetic oligonucleotide
  Sense strand starting at position 687 of SEQ ID NO: 1884315
gugaaugugccugaccaga

SEQ ID NO: 2256473 - RNA, 19 nt, Artificial Sequence
  Description of Artificial Sequence: Synthetic oligonucleotide
  Antisense strand to SEQ ID NO: 2256472
ucuggucaggcacauucac

SEQ ID NO: 2256474 - RNA, 19 nt, Artificial Sequence
  Description of Artificial Sequence: Synthetic oligonucleotide
  Sense strand starting at position 736 of SEQ ID NO: 1884315
gagaguuggccacaugcga

SEQ ID NO: 2256475 - RNA, 19 nt, Artificial Sequence
  Description of Artificial Sequence: Synthetic oligonucleotide
  Antisense strand to SEQ ID NO: 2256474
ucgcauguggccaacucuc

SEQ ID NO: 2256476 - RNA, 19 nt, Artificial Sequence
  Description of Artificial Sequence: Synthetic oligonucleotide
  Sense strand starting at position 799 of SEQ ID NO: 1884315
ccggccuguucccuagaau

SEQ ID NO: 2256477 - RNA, 19 nt, Artificial Sequence
  Description of Artificial Sequence: Synthetic oligonucleotide
  Antisense strand to SEQ ID NO: 2256476
auucuagggaacaggccgg

SEQ ID NO: 2256478 - RNA, 19 nt, Artificial Sequence
  Description of Artificial Sequence: Synthetic oligonucleotide
  Sense strand starting at position 800 of SEQ ID NO: 1884315
cggccuguucccuagaaug

SEQ ID NO: 2256479 - RNA, 19 nt, Artificial Sequence
  Description of Artificial Sequence: Synthetic oligonucleotide
  Antisense strand to SEQ ID NO: 2256478
cauucuagggaacaggccg

SEQ ID NO: 2256480 - RNA, 19 nt, Artificial Sequence
  Description of Artificial Sequence: Synthetic oligonucleotide
  Sense strand starting at position 802 of SEQ ID NO: 1884315
gccuguucccuagaaugac

SEQ ID NO: 2256481 - RNA, 19 nt, Artificial Sequence
  Description of Artificial Sequence: Synthetic oligonucleotide
  Antisense strand to SEQ ID NO: 2256480
gucauucuagggaacaggc

SEQ ID NO: 2256482 - RNA, 19 nt, Artificial Sequence
  Description of Artificial Sequence: Synthetic oligonucleotide
  Sense strand starting at position 2833 of SEQ ID NO: 1884315
gggcguuguccaagcagag

SEQ ID NO: 2256483 - RNA, 19 nt, Artificial Sequence
  Description of Artificial Sequence: Synthetic oligonucleotide
  Antisense strand to SEQ ID NO: 2256482
cucugcuuggacaacgccc

SEQ ID NO: 2256484 - RNA, 19 nt, Artificial Sequence
  Description of Artificial Sequence: Synthetic oligonucleotide
  Sense strand starting at position 3053 of SEQ ID NO: 1884315
gcagccuuuggaggucuaa

SEQ ID NO: 2256485 - RNA, 19 nt, Artificial Sequence
  Description of Artificial Sequence: Synthetic oligonucleotide
  Antisense strand to SEQ ID NO: 2256484
uuagaccuccaaaggcugc

SEQ ID NO: 2256486 - RNA, 19 nt, Artificial Sequence
  Description of Artificial Sequence: Synthetic oligonucleotide
  Sense strand starting at position 3109 of SEQ ID NO: 1884315
cccucuguuucuuugcaga

SEQ ID NO: 2256487 - RNA, 19 nt, Artificial Sequence
  Description of Artificial Sequence: Synthetic oligonucleotide
  Antisense strand to SEQ ID NO: 2256486
ucugcaaagaaacagaggg

SEQ ID NO: 2256488 - RNA, 19 nt, Artificial Sequence
  Description of Artificial Sequence: Synthetic oligonucleotide
  Sense strand starting at position 3217 of SEQ ID NO: 1884315
cccagaucuugcccgugua

SEQ ID NO: 2256489 - RNA, 19 nt, Artificial Sequence
  Description of Artificial Sequence: Synthetic oligonucleotide
  Antisense strand to SEQ ID NO: 2256488
uacacgggcaagaucuggg

SEQ ID NO: 2256490 - RNA, 19 nt, Artificial Sequence
  Description of Artificial Sequence: Synthetic oligonucleotide
  Sense strand starting at position 3218 of SEQ ID NO: 1884315
ccagaucuugcccguguau

SEQ ID NO: 2256491 - RNA, 19 nt, Artificial Sequence
  Description of Artificial Sequence: Synthetic oligonucleotide
  Antisense strand to SEQ ID NO: 2256490
auacacgggcaagaucugg

SEQ ID NO: 2256492 - RNA, 19 nt, Artificial Sequence
  Description of Artificial Sequence: Synthetic oligonucleotide
  Sense strand starting at position 3231 of SEQ ID NO: 1884315
guguauggucugcgggcaa

SEQ ID NO: 2256493 - RNA, 19 nt, Artificial Sequence
  Description of Artificial Sequence: Synthetic oligonucleotide
  Antisense strand to SEQ ID NO: 2256492
uugcccgcagaccauacac

SEQ ID NO: 2256494 - RNA, 19 nt, Artificial Sequence
  Description of Artificial Sequence: Synthetic oligonucleotide
  Sense strand starting at position 3314 of SEQ ID NO: 1884315
cccguaugagcucaggaaa

SEQ ID NO: 2256495 - RNA, 19 nt, Artificial Sequence
  Description of Artificial Sequence: Synthetic oligonucleotide
  Antisense strand to SEQ ID NO: 2256494
uuuccugagcucauacggg

SEQ ID NO: 2256496 - RNA, 19 nt, Artificial Sequence
  Description of Artificial Sequence: Synthetic oligonucleotide
  Sense strand starting at position 3782 of SEQ ID NO: 1884315
gggcacuugaccugagaug

SEQ ID NO: 2256497 - RNA, 19 nt, Artificial Sequence
  Description of Artificial Sequence: Synthetic oligonucleotide
  Antisense strand to SEQ ID NO: 2256496
caucucaggucaagugccc

SEQ ID NO: 2256498 - RNA, 19 nt, Artificial Sequence
  Description of Artificial Sequence: Synthetic oligonucleotide
  Sense strand starting at position 3885 of SEQ ID NO: 1884315
gcccuauugaccguuugca

SEQ ID NO: 2256499 - RNA, 19 nt, Artificial Sequence
  Description of Artificial Sequence: Synthetic oligonucleotide
  Antisense strand to SEQ ID NO: 2256498
ugcaaacggucaauagggc

SEQ ID NO: 2256500 - RNA, 19 nt, Artificial Sequence
  Description of Artificial Sequence: Synthetic oligonucleotide
  Sense strand starting at position 281 of SEQ ID NO: 1884316
ccgcuuguggcuucaggua

SEQ ID NO: 2256501 - RNA, 19 nt, Artificial Sequence
  Description of Artificial Sequence: Synthetic oligonucleotide
  Antisense strand to SEQ ID NO: 2256500
uaccugaagccacaagcgg

SEQ ID NO: 2256502 - RNA, 19 nt, Artificial Sequence
  Description of Artificial Sequence: Synthetic oligonucleotide
  Sense strand starting at position 373 of SEQ ID NO: 1884316
gguugaggucuucagagcu

SEQ ID NO: 2256503 - RNA, 19 nt, Artificial Sequence
  Description of Artificial Sequence: Synthetic oligonucleotide
  Antisense strand to SEQ ID NO: 2256502
agcucugaagaccucaacc

SEQ ID NO: 2256504 - RNA, 19 nt, Artificial Sequence
  Description of Artificial Sequence: Synthetic oligonucleotide
  Sense strand starting at position 421 of SEQ ID NO: 1884316
agccuuaaaucauuugugu

SEQ ID NO: 2256505 - RNA, 19 nt, Artificial Sequence
  Description of Artificial Sequence: Synthetic oligonucleotide
  Antisense strand to SEQ ID NO: 2256504
acacaaaugauuuaaggcu

SEQ ID NO: 2256506 - RNA, 19 nt, Artificial Sequence
  Description of Artificial Sequence: Synthetic oligonucleotide
  Sense strand starting at position 434 of SEQ ID NO: 1884316
uuguguaagguuuaaugau

SEQ ID NO: 2256507 - RNA, 19 nt, Artificial Sequence
  Description of Artificial Sequence: Synthetic oligonucleotide
  Antisense strand to SEQ ID NO: 2256506
aucauuaaaccuuacacaa

SEQ ID NO: 2256508 - RNA, 19 nt, Artificial Sequence
  Description of Artificial Sequence: Synthetic oligonucleotide
  Sense strand starting at position 444 of SEQ ID NO: 1884316
uuuaaugaucuguggccca

SEQ ID NO: 2256509 - RNA, 19 nt, Artificial Sequence
  Description of Artificial Sequence: Synthetic oligonucleotide
  Antisense strand to SEQ ID NO: 2256508
ugggccacagaucauuaaa

SEQ ID NO: 2256510 - RNA, 19 nt, Artificial Sequence
  Description of Artificial Sequence: Synthetic oligonucleotide
  Sense strand starting at position 585 of SEQ ID NO: 1884316
ugaccacagccuuguaaag

SEQ ID NO: 2256511 - RNA, 19 nt, Artificial Sequence
  Description of Artificial Sequence: Synthetic oligonucleotide
  Antisense strand to SEQ ID NO: 2256510
cuuuacaaggcugugguca

SEQ ID NO: 2256512 - RNA, 19 nt, Artificial Sequence
  Description of Artificial Sequence: Synthetic oligonucleotide
  Sense strand starting at position 639 of SEQ ID NO: 1884316
cugagacugugcucugaga

SEQ ID NO: 2256513 - RNA, 19 nt, Artificial Sequence
  Description of Artificial Sequence: Synthetic oligonucleotide
  Antisense strand to SEQ ID NO: 2256512
ucucagagcacagucucag

SEQ ID NO: 2256514 - RNA, 19 nt, Artificial Sequence
  Description of Artificial Sequence: Synthetic oligonucleotide
  Sense strand starting at position 831 of SEQ ID NO: 1884316
guucccaaagcucaagaua

SEQ ID NO: 2256515 - RNA, 19 nt, Artificial Sequence
  Description of Artificial Sequence: Synthetic oligonucleotide
  Antisense strand to SEQ ID NO: 2256514
uaucuugagcuuugggaac

SEQ ID NO: 2256516 - RNA, 19 nt, Artificial Sequence
  Description of Artificial Sequence: Synthetic oligonucleotide
  Sense strand starting at position 845 of SEQ ID NO: 1884316
agauaagagaugcguucuu

SEQ ID NO: 2256517 - RNA, 19 nt, Artificial Sequence
  Description of Artificial Sequence: Synthetic oligonucleotide
  Antisense strand to SEQ ID NO: 2256516
aagaacgcaucucuuaucu

SEQ ID NO: 2256518 - RNA, 19 nt, Artificial Sequence
  Description of Artificial Sequence: Synthetic oligonucleotide
  Sense strand starting at position 1018 of SEQ ID NO: 1884316
agagguccuggcuaacaau

SEQ ID NO: 2256519 - RNA, 19 nt, Artificial Sequence
  Description of Artificial Sequence: Synthetic oligonucleotide
  Antisense strand to SEQ ID NO: 2256518
auuguuagccaggaccucu

SEQ ID NO: 2256520 - RNA, 19 nt, Artificial Sequence
  Description of Artificial Sequence: Synthetic oligonucleotide
  Sense strand starting at position 1584 of SEQ ID NO: 1884316
gacagcuccuguguuagaa

SEQ ID NO: 2256521 - RNA, 19 nt, Artificial Sequence
  Description of Artificial Sequence: Synthetic oligonucleotide
  Antisense strand to SEQ ID NO: 2256520
uucuaacacaggagcuguc

SEQ ID NO: 2256522 - RNA, 19 nt, Artificial Sequence
  Description of Artificial Sequence: Synthetic oligonucleotide
  Sense strand starting at position 1671 of SEQ ID NO: 1884316
gcuagacaucgucaaggau

SEQ ID NO: 2256523 - RNA, 19 nt, Artificial Sequence
  Description of Artificial Sequence: Synthetic oligonucleotide
  Antisense strand to SEQ ID NO: 2256522
auccuugacgaugucuagc

SEQ ID NO: 2256524 - RNA, 19 nt, Artificial Sequence
  Description of Artificial Sequence: Synthetic oligonucleotide
  Sense strand starting at position 1729 of SEQ ID NO: 1884316
gcguccacaguguaagaau

SEQ ID NO: 2256525 - RNA, 19 nt, Artificial Sequence
  Description of Artificial Sequence: Synthetic oligonucleotide
  Antisense strand to SEQ ID NO: 2256524
auucuuacacuguggacgc

SEQ ID NO: 2256526 - RNA, 19 nt, Artificial Sequence
  Description of Artificial Sequence: Synthetic oligonucleotide
  Sense strand starting at position 1860 of SEQ ID NO: 1884316
gcgggagugcagucguaca

SEQ ID NO: 2256527 - RNA, 19 nt, Artificial Sequence
  Description of Artificial Sequence: Synthetic oligonucleotide
  Antisense strand to SEQ ID NO: 2256526
uguacgacugcacucccgc

SEQ ID NO: 2256528 - RNA, 19 nt, Artificial Sequence
  Description of Artificial Sequence: Synthetic oligonucleotide
  Sense strand starting at position 2274 of SEQ ID NO: 1884316
ggaucuugcgagggaaucu

SEQ ID NO: 2256529 - RNA, 19 nt, Artificial Sequence
  Description of Artificial Sequence: Synthetic oligonucleotide
  Antisense strand to SEQ ID NO: 2256528
agauucccucgcaagaucc

SEQ ID NO: 2256530 - RNA, 19 nt, Artificial Sequence
  Description of Artificial Sequence: Synthetic oligonucleotide
  Sense strand starting at position 2275 of SEQ ID NO: 1884316
gaucuugcgagggaaucua

SEQ ID NO: 2256531 - RNA, 19 nt, Artificial Sequence
  Description of Artificial Sequence: Synthetic oligonucleotide
  Antisense strand to SEQ ID NO: 2256530
uagauucccucgcaagauc

SEQ ID NO: 2256532 - RNA, 19 nt, Artificial Sequence
  Description of Artificial Sequence: Synthetic oligonucleotide
  Sense strand starting at position 2283 of SEQ ID NO: 1884316
gagggaaucuagguuucua

SEQ ID NO: 2256533 - RNA, 19 nt, Artificial Sequence
  Description of Artificial Sequence: Synthetic oligonucleotide
  Antisense strand to SEQ ID NO: 2256532
uagaaaccuagauucccuc

SEQ ID NO: 2256534 - RNA, 19 nt, Artificial Sequence
  Description of Artificial Sequence: Synthetic oligonucleotide
  Sense strand starting at position 2324 of SEQ ID NO: 1884316
cucccuuuggagcggaaau

SEQ ID NO: 2256535 - RNA, 19 nt, Artificial Sequence
  Description of Artificial Sequence: Synthetic oligonucleotide
  Antisense strand to SEQ ID NO: 2256534
auuuccgcuccaaagggag

SEQ ID NO: 2256536 - RNA, 19 nt, Artificial Sequence
  Description of Artificial Sequence: Synthetic oligonucleotide
  Sense strand starting at position 2325 of SEQ ID NO: 1884316
ucccuuuggagcggaaaua

SEQ ID NO: 2256537 - RNA, 19 nt, Artificial Sequence
  Description of Artificial Sequence: Synthetic oligonucleotide
  Antisense strand to SEQ ID NO: 2256536
uauuuccgcuccaaaggga

SEQ ID NO: 2256538 - RNA, 19 nt, Artificial Sequence
  Description of Artificial Sequence: Synthetic oligonucleotide
  Sense strand starting at position 2326 of SEQ ID NO: 1884316
cccuuuggagcggaaauau

SEQ ID NO: 2256539 - RNA, 19 nt, Artificial Sequence
  Description of Artificial Sequence: Synthetic oligonucleotide
  Antisense strand to SEQ ID NO: 2256538
auauuuccgcuccaaaggg

SEQ ID NO: 2256540 - RNA, 19 nt, Artificial Sequence
  Description of Artificial Sequence: Synthetic oligonucleotide
  Sense strand starting at position 2421 of SEQ ID NO: 1884316
gcuggauaagccugaaguu

SEQ ID NO: 2256541 - RNA, 19 nt, Artificial Sequence
  Description of Artificial Sequence: Synthetic oligonucleotide
  Antisense strand to SEQ ID NO: 2256540
aacuucaggcuuauccagc

SEQ ID NO: 2256542 - RNA, 19 nt, Artificial Sequence
  Description of Artificial Sequence: Synthetic oligonucleotide
  Sense strand starting at position 2443 of SEQ ID NO: 1884316
caguuuggguuuccuagua

SEQ ID NO: 2256543 - RNA, 19 nt, Artificial Sequence
  Description of Artificial Sequence: Synthetic oligonucleotide
  Antisense strand to SEQ ID NO: 2256542
uacuaggaaacccaaacug

SEQ ID NO: 2256544 - RNA, 19 nt, Artificial Sequence
  Description of Artificial Sequence: Synthetic oligonucleotide
  Sense strand starting at position 2607 of SEQ ID NO: 1884316
uggucaucuccaggacuca

SEQ ID NO: 2256545 - RNA, 19 nt, Artificial Sequence
  Description of Artificial Sequence: Synthetic oligonucleotide
  Antisense strand to SEQ ID NO: 2256544
ugaguccuggagaugacca

SEQ ID NO: 2256546 - RNA, 19 nt, Artificial Sequence
  Description of Artificial Sequence: Synthetic oligonucleotide
  Sense strand starting at position 2725 of SEQ ID NO: 1884316
uaacaaucccaguacgugu

SEQ ID NO: 2256547 - RNA, 19 nt, Artificial Sequence
  Description of Artificial Sequence: Synthetic oligonucleotide
  Antisense strand to SEQ ID NO: 2256546
acacguacugggauuguua

SEQ ID NO: 2256548 - RNA, 19 nt, Artificial Sequence
  Description of Artificial Sequence: Synthetic oligonucleotide
  Sense strand starting at position 2819 of SEQ ID NO: 1884316
cuggauauacuucgggaag

SEQ ID NO: 2256549 - RNA, 19 nt, Artificial Sequence
  Description of Artificial Sequence: Synthetic oligonucleotide
  Antisense strand to SEQ ID NO: 2256548
cuucccgaaguauauccag

SEQ ID NO: 2256550 - RNA, 19 nt, Artificial Sequence
  Description of Artificial Sequence: Synthetic oligonucleotide
  Sense strand starting at position 2835 of SEQ ID NO: 1884316
aagggaggcugcuuugaaa

SEQ ID NO: 2256551 - RNA, 19 nt, Artificial Sequence
  Description of Artificial Sequence: Synthetic oligonucleotide
  Antisense strand to SEQ ID NO: 2256550
uuucaaagcagccucccuu

SEQ ID NO: 2256552 - RNA, 19 nt, Artificial Sequence
  Description of Artificial Sequence: Synthetic oligonucleotide
  Sense strand starting at position 2883 of SEQ ID NO: 1884316
ccagguaucuuugcacaga

SEQ ID NO: 2256553 - RNA, 19 nt, Artificial Sequence
  Description of Artificial Sequence: Synthetic oligonucleotide
  Antisense strand to SEQ ID NO: 2256552
ucugugcaaagauaccugg

SEQ ID NO: 2256554 - RNA, 19 nt, Artificial Sequence
  Description of Artificial Sequence: Synthetic oligonucleotide
  Sense strand starting at position 2886 of SEQ ID NO: 1884316
gguaucuuugcacagaaga

SEQ ID NO: 2256555 - RNA, 19 nt, Artificial Sequence
  Description of Artificial Sequence: Synthetic oligonucleotide
  Antisense strand to SEQ ID NO: 2256554
ucuucugugcaaagauacc

SEQ ID NO: 2256556 - RNA, 19 nt, Artificial Sequence
  Description of Artificial Sequence: Synthetic oligonucleotide
  Sense strand starting at position 2932 of SEQ ID NO: 1884316
gaagaaagguuguuaucac

SEQ ID NO: 2256557 - RNA, 19 nt, Artificial Sequence
  Description of Artificial Sequence: Synthetic oligonucleotide
  Antisense strand to SEQ ID NO: 2256556
gugauaacaaccuuucuuc

SEQ ID NO: 2256558 - RNA, 19 nt, Artificial Sequence
  Description of Artificial Sequence: Synthetic oligonucleotide
  Sense strand starting at position 2939 of SEQ ID NO: 1884316
gguuguuaucaccagcaac

SEQ ID NO: 2256559 - RNA, 19 nt, Artificial Sequence
  Description of Artificial Sequence: Synthetic oligonucleotide
  Antisense strand to SEQ ID NO: 2256558
guugcuggugauaacaacc

SEQ ID NO: 2256560 - RNA, 19 nt, Artificial Sequence
  Description of Artificial Sequence: Synthetic oligonucleotide
  Sense strand starting at position 2942 of SEQ ID NO: 1884316
uguuaucaccagcaacuga

SEQ ID NO: 2256561 - RNA, 19 nt, Artificial Sequence
  Description of Artificial Sequence: Synthetic oligonucleotide
  Antisense strand to SEQ ID NO: 2256560
ucaguugcuggugauaaca

SEQ ID NO: 2256562 - RNA, 19 nt, Artificial Sequence
  Description of Artificial Sequence: Synthetic oligonucleotide
  Sense strand starting at position 3005 of SEQ ID NO: 1884316
gugaacuugggucaccuua

SEQ ID NO: 2256563 - RNA, 19 nt, Artificial Sequence
  Description of Artificial Sequence: Synthetic oligonucleotide
  Antisense strand to SEQ ID NO: 2256562
uaaggugacccaaguucac

SEQ ID NO: 2256564 - RNA, 19 nt, Artificial Sequence
  Description of Artificial Sequence: Synthetic oligonucleotide
  Sense strand starting at position 3053 of SEQ ID NO: 1884316
uggaacuucugagcucuaa

SEQ ID NO: 2256565 - RNA, 19 nt, Artificial Sequence
  Description of Artificial Sequence: Synthetic oligonucleotide
  Antisense strand to SEQ ID NO: 2256564
uuagagcucagaaguucca

SEQ ID NO: 2256566 - RNA, 19 nt, Artificial Sequence
  Description of Artificial Sequence: Synthetic oligonucleotide
  Sense strand starting at position 3068 of SEQ ID NO: 1884316
cuaagaaguccuggagauc

SEQ ID NO: 2256567 - RNA, 19 nt, Artificial Sequence
  Description of Artificial Sequence: Synthetic oligonucleotide
  Antisense strand to SEQ ID NO: 2256566
gaucuccaggacuucuuag

SEQ ID NO: 2256568 - RNA, 19 nt, Artificial Sequence
  Description of Artificial Sequence: Synthetic oligonucleotide
  Sense strand starting at position 3186 of SEQ ID NO: 1884316
ccuucuuggcacggugaaa

SEQ ID NO: 2256569 - RNA, 19 nt, Artificial Sequence
  Description of Artificial Sequence: Synthetic oligonucleotide
  Antisense strand to SEQ ID NO: 2256568
uuucaccgugccaagaagg

SEQ ID NO: 2256570 - RNA, 19 nt, Artificial Sequence
  Description of Artificial Sequence: Synthetic oligonucleotide
  Sense strand starting at position 3418 of SEQ ID NO: 1884316
cagcucagacaugguuaaa

SEQ ID NO: 2256571 - RNA, 19 nt, Artificial Sequence
  Description of Artificial Sequence: Synthetic oligonucleotide
  Antisense strand to SEQ ID NO: 2256570
uuuaaccaugucugagcug

SEQ ID NO: 2256572 - RNA, 19 nt, Artificial Sequence
  Description of Artificial Sequence: Synthetic oligonucleotide
  Sense strand starting at position 3841 of SEQ ID NO: 1884316
guuccuacccaucagauua

SEQ ID NO: 2256573 - RNA, 19 nt, Artificial Sequence
  Description of Artificial Sequence: Synthetic oligonucleotide
  Antisense strand to SEQ ID NO: 2256572
uaaucugauggguaggaac

SEQ ID NO: 2256574 - RNA, 19 nt, Artificial Sequence
  Description of Artificial Sequence: Synthetic oligonucleotide
  Sense strand starting at position 3894 of SEQ ID NO: 1884316
ggguuuaagcaguaacuag

SEQ ID NO: 2256575 - RNA, 19 nt, Artificial Sequence
  Description of Artificial Sequence: Synthetic oligonucleotide
  Antisense strand to SEQ ID NO: 2256574
cuaguuacugcuuaaaccc

SEQ ID NO: 2256576 - RNA, 19 nt, Artificial Sequence
  Description of Artificial Sequence: Synthetic oligonucleotide
  Sense strand starting at position 3916 of SEQ ID NO: 1884316
ccaggcaugagcuaugauu

SEQ ID NO: 2256577 - RNA, 19 nt, Artificial Sequence
  Description of Artificial Sequence: Synthetic oligonucleotide
  Antisense strand to SEQ ID NO: 2256576
aaucauagcucaugccugg

SEQ ID NO: 2256578 - RNA, 19 nt, Artificial Sequence
  Description of Artificial Sequence: Synthetic oligonucleotide
  Sense strand starting at position 3918 of SEQ ID NO: 1884316
aggcaugagcuaugauuaa

SEQ ID NO: 2256579 - RNA, 19 nt, Artificial Sequence
  Description of Artificial Sequence: Synthetic oligonucleotide
  Antisense strand to SEQ ID NO: 2256578
uuaaucauagcucaugccu

SEQ ID NO: 2256580 - RNA, 19 nt, Artificial Sequence
  Description of Artificial Sequence: Synthetic oligonucleotide
  Sense strand starting at position 520 of SEQ ID NO: 1884317
gaggguguggcucagcaaa

SEQ ID NO: 2256581 - RNA, 19 nt, Artificial Sequence
  Description of Artificial Sequence: Synthetic oligonucleotide
  Antisense strand to SEQ ID NO: 2256580
uuugcugagccacacccuc

SEQ ID NO: 2256582 - RNA, 19 nt, Artificial Sequence
  Description of Artificial Sequence: Synthetic oligonucleotide
  Sense strand starting at position 661 of SEQ ID NO: 1884317
gccacuuugagaugacaag

SEQ ID NO: 2256583 - RNA, 19 nt, Artificial Sequence
  Description of Artificial Sequence: Synthetic oligonucleotide
  Antisense strand to SEQ ID NO: 2256582
cuugucaucucaaaguggc

SEQ ID NO: 2256584 - RNA, 19 nt, Artificial Sequence
  Description of Artificial Sequence: Synthetic oligonucleotide
  Sense strand starting at position 885 of SEQ ID NO: 1884317
agcucaucuucccuggaga

SEQ ID NO: 2256585 - RNA, 19 nt, Artificial Sequence
  Description of Artificial Sequence: Synthetic oligonucleotide
  Antisense strand to SEQ ID NO: 2256584
ucuccagggaagaugagcu

SEQ ID NO: 2256586 - RNA, 19 nt, Artificial Sequence
  Description of Artificial Sequence: Synthetic oligonucleotide
  Sense strand starting at position 886 of SEQ ID NO: 1884317
gcucaucuucccuggagag

SEQ ID NO: 2256587 - RNA, 19 nt, Artificial Sequence
  Description of Artificial Sequence: Synthetic oligonucleotide
  Antisense strand to SEQ ID NO: 2256586
cucuccagggaagaugagc

SEQ ID NO: 2256588 - RNA, 19 nt, Artificial Sequence
  Description of Artificial Sequence: Synthetic oligonucleotide
  Sense strand starting at position 1400 of SEQ ID NO: 1884317
cggaguggucccugaauga

SEQ ID NO: 2256589 - RNA, 19 nt, Artificial Sequence
  Description of Artificial Sequence: Synthetic oligonucleotide
  Antisense strand to SEQ ID NO: 2256588
ucauucagggaccacuccg

SEQ ID NO: 2256590 - RNA, 19 nt, Artificial Sequence
  Description of Artificial Sequence: Synthetic oligonucleotide
  Sense strand starting at position 1526 of SEQ ID NO: 1884317
uuacacggcucgguguaau

SEQ ID NO: 2256591 - RNA, 19 nt, Artificial Sequence
  Description of Artificial Sequence: Synthetic oligonucleotide
  Antisense strand to SEQ ID NO: 2256590
auuacaccgagccguguaa

SEQ ID NO: 2256592 - RNA, 19 nt, Artificial Sequence
  Description of Artificial Sequence: Synthetic oligonucleotide
  Sense strand starting at position 1544 of SEQ ID NO: 1884317
uugcaaauucgagguuuac

SEQ ID NO: 2256593 - RNA, 19 nt, Artificial Sequence
  Description of Artificial Sequence: Synthetic oligonucleotide
  Antisense strand to SEQ ID NO: 2256592
guaaaccucgaauuugcaa

SEQ ID NO: 2256594 - RNA, 19 nt, Artificial Sequence
  Description of Artificial Sequence: Synthetic oligonucleotide
  Sense strand starting at position 1624 of SEQ ID NO: 1884317
ccaagaaggcucugcgaca

SEQ ID NO: 2256595 - RNA, 19 nt, Artificial Sequence
  Description of Artificial Sequence: Synthetic oligonucleotide
  Antisense strand to SEQ ID NO: 2256594
ugucgcagagccuucuugg

SEQ ID NO: 2256596 - RNA, 19 nt, Artificial Sequence
  Description of Artificial Sequence: Synthetic oligonucleotide
  Sense strand starting at position 1625 of SEQ ID NO: 1884317
caagaaggcucugcgacaa

SEQ ID NO: 2256597 - RNA, 19 nt, Artificial Sequence
  Description of Artificial Sequence: Synthetic oligonucleotide
  Antisense strand to SEQ ID NO: 2256596
uugucgcagagccuucuug

SEQ ID NO: 2256598 - RNA, 19 nt, Artificial Sequence
  Description of Artificial Sequence: Synthetic oligonucleotide
  Sense strand starting at position 1721 of SEQ ID NO: 1884317
aaggguguuuccuaagaac

SEQ ID NO: 2256599 - RNA, 19 nt, Artificial Sequence
  Description of Artificial Sequence: Synthetic oligonucleotide
  Antisense strand to SEQ ID NO: 2256598
guucuuaggaaacacccuu

SEQ ID NO: 2256600 - RNA, 19 nt, Artificial Sequence
  Description of Artificial Sequence: Synthetic oligonucleotide
  Sense strand starting at position 1963 of SEQ ID NO: 1884317
ggccucagaugucagcaaa

SEQ ID NO: 2256601 - RNA, 19 nt, Artificial Sequence
  Description of Artificial Sequence: Synthetic oligonucleotide
  Antisense strand to SEQ ID NO: 2256600
uuugcugacaucugaggcc

SEQ ID NO: 2256602 - RNA, 19 nt, Artificial Sequence
  Description of Artificial Sequence: Synthetic oligonucleotide
  Sense strand starting at position 2367 of SEQ ID NO: 1884317
gccucagcacagggauuau

SEQ ID NO: 2256603 - RNA, 19 nt, Artificial Sequence
  Description of Artificial Sequence: Synthetic oligonucleotide
  Antisense strand to SEQ ID NO: 2256602
auaaucccugugcugaggc

SEQ ID NO: 2256604 - RNA, 19 nt, Artificial Sequence
  Description of Artificial Sequence: Synthetic oligonucleotide
  Sense strand starting at position 2707 of SEQ ID NO: 1884317
gcguguaugcgucuaccau

SEQ ID NO: 2256605 - RNA, 19 nt, Artificial Sequence
  Description of Artificial Sequence: Synthetic oligonucleotide
  Antisense strand to SEQ ID NO: 2256604
augguagacgcauacacgc

SEQ ID NO: 2256606 - RNA, 19 nt, Artificial Sequence
  Description of Artificial Sequence: Synthetic oligonucleotide
  Sense strand starting at position 2708 of SEQ ID NO: 1884317
cguguaugcgucuaccaug

SEQ ID NO: 2256607 - RNA, 19 nt, Artificial Sequence
  Description of Artificial Sequence: Synthetic oligonucleotide
  Antisense strand to SEQ ID NO: 2256606
caugguagacgcauacacg

SEQ ID NO: 2256608 - RNA, 19 nt, Artificial Sequence
  Description of Artificial Sequence: Synthetic oligonucleotide
  Sense strand starting at position 3497 of SEQ ID NO: 1884317
ggacucagcagcgacuuau

SEQ ID NO: 2256609 - RNA, 19 nt, Artificial Sequence
  Description of Artificial Sequence: Synthetic oligonucleotide
  Antisense strand to SEQ ID NO: 2256608
auaagucgcugcugagucc

SEQ ID NO: 2256610 - RNA, 19 nt, Artificial Sequence
  Description of Artificial Sequence: Synthetic oligonucleotide
  Sense strand starting at position 3695 of SEQ ID NO: 1884317
ccaggaggucagggauacu

SEQ ID NO: 2256611 - RNA, 19 nt, Artificial Sequence
  Description of Artificial Sequence: Synthetic oligonucleotide
  Antisense strand to SEQ ID NO: 2256610
aguaucccugaccuccugg

SEQ ID NO: 2256612 - RNA, 19 nt, Artificial Sequence
  Description of Artificial Sequence: Synthetic oligonucleotide
  Sense strand starting at position 3704 of SEQ ID NO: 1884317
cagggauacugccuuagaa

SEQ ID NO: 2256613 - RNA, 19 nt, Artificial Sequence
  Description of Artificial Sequence: Synthetic oligonucleotide
  Antisense strand to SEQ ID NO: 2256612
uucuaaggcaguaucccug

SEQ ID NO: 2256614 - RNA, 19 nt, Artificial Sequence
  Description of Artificial Sequence: Synthetic oligonucleotide
  Sense strand starting at position 3824 of SEQ ID NO: 1884317
gccacuugucacuaggaca

SEQ ID NO: 2256615 - RNA, 19 nt, Artificial Sequence
  Description of Artificial Sequence: Synthetic oligonucleotide
  Antisense strand to SEQ ID NO: 2256614
uguccuagugacaaguggc

SEQ ID NO: 2256616 - RNA, 19 nt, Artificial Sequence
  Description of Artificial Sequence: Synthetic oligonucleotide
  Sense strand starting at position 3867 of SEQ ID NO: 1884317
gguccagguccagacugau

SEQ ID NO: 2256617 - RNA, 19 nt, Artificial Sequence
  Description of Artificial Sequence: Synthetic oligonucleotide
  Antisense strand to SEQ ID NO: 2256616
aucagucuggaccuggacc

SEQ ID NO: 2256618 - RNA, 19 nt, Artificial Sequence
  Description of Artificial Sequence: Synthetic oligonucleotide
  Sense strand starting at position 3873 of SEQ ID NO: 1884317
gguccagacugauaagauu

SEQ ID NO: 2256619 - RNA, 19 nt, Artificial Sequence
  Description of Artificial Sequence: Synthetic oligonucleotide
  Antisense strand to SEQ ID NO: 2256618
aaucuuaucagucuggacc

SEQ ID NO: 2256620 - RNA, 19 nt, Artificial Sequence
  Description of Artificial Sequence: Synthetic oligonucleotide
  Sense strand starting at position 3876 of SEQ ID NO: 1884317
ccagacugauaagauuaca

SEQ ID NO: 2256621 - RNA, 19 nt, Artificial Sequence
  Description of Artificial Sequence: Synthetic oligonucleotide
  Antisense strand to SEQ ID NO: 2256620
uguaaucuuaucagucugg

SEQ ID NO: 2256622 - RNA, 19 nt, Artificial Sequence
  Description of Artificial Sequence: Synthetic oligonucleotide
  Sense strand starting at position 3934 of SEQ ID NO: 1884317
gcauguggcuuccaagaua

SEQ ID NO: 2256623 - RNA, 19 nt, Artificial Sequence
  Description of Artificial Sequence: Synthetic oligonucleotide
  Antisense strand to SEQ ID NO: 2256622
uaucuuggaagccacaugc

SEQ ID NO: 2256624 - RNA, 19 nt, Artificial Sequence
  Description of Artificial Sequence: Synthetic oligonucleotide
  Sense strand starting at position 219 of SEQ ID NO: 1884318
gugaguugccaacaaucca

SEQ ID NO: 2256625 - RNA, 19 nt, Artificial Sequence
  Description of Artificial Sequence: Synthetic oligonucleotide
  Antisense strand to SEQ ID NO: 2256624
uggauuguuggcaacucac

SEQ ID NO: 2256626 - RNA, 19 nt, Artificial Sequence
  Description of Artificial Sequence: Synthetic oligonucleotide
  Sense strand starting at position 537 of SEQ ID NO: 1884318
uucggaaaucuuugaaaga

SEQ ID NO: 2256627 - RNA, 19 nt, Artificial Sequence
  Description of Artificial Sequence: Synthetic oligonucleotide
  Antisense strand to SEQ ID NO: 2256626
ucuuucaaagauuuccgaa

SEQ ID NO: 2256628 - RNA, 19 nt, Artificial Sequence
  Description of Artificial Sequence: Synthetic oligonucleotide
  Sense strand starting at position 765 of SEQ ID NO: 1884318
cguccuguggucuuucauu

SEQ ID NO: 2256629 - RNA, 19 nt, Artificial Sequence
  Description of Artificial Sequence: Synthetic oligonucleotide
  Antisense strand to SEQ ID NO: 2256628
aaugaaagaccacaggacg

SEQ ID NO: 2256630 - RNA, 19 nt, Artificial Sequence
  Description of Artificial Sequence: Synthetic oligonucleotide
  Sense strand starting at position 836 of SEQ ID NO: 1884318
ugggaauucuucuugguau

SEQ ID NO: 2256631 - RNA, 19 nt, Artificial Sequence
  Description of Artificial Sequence: Synthetic oligonucleotide
  Antisense strand to SEQ ID NO: 2256630
auaccaagaagaauuccca

SEQ ID NO: 2256632 - RNA, 19 nt, Artificial Sequence
  Description of Artificial Sequence: Synthetic oligonucleotide
  Sense strand starting at position 847 of SEQ ID NO: 1884318
cuugguauuuguccugcau

SEQ ID NO: 2256633 - RNA, 19 nt, Artificial Sequence
  Description of Artificial Sequence: Synthetic oligonucleotide
  Antisense strand to SEQ ID NO: 2256632
augcaggacaaauaccaag

SEQ ID NO: 2256634 - RNA, 19 nt, Artificial Sequence
  Description of Artificial Sequence: Synthetic oligonucleotide
  Sense strand starting at position 933 of SEQ ID NO: 1884318
ccugcuuugaaagggaaga

SEQ ID NO: 2256635 - RNA, 19 nt, Artificial Sequence
  Description of Artificial Sequence: Synthetic oligonucleotide
  Antisense strand to SEQ ID NO: 2256634
ucuucccuuucaaagcagg

SEQ ID NO: 2256636 - RNA, 19 nt, Artificial Sequence
  Description of Artificial Sequence: Synthetic oligonucleotide
  Sense strand starting at position 1067 of SEQ ID NO: 1884318
gguugauggagucacugau

SEQ ID NO: 2256637 - RNA, 19 nt, Artificial Sequence
  Description of Artificial Sequence: Synthetic oligonucleotide
  Antisense strand to SEQ ID NO: 2256636
aucagugacuccaucaacc

SEQ ID NO: 2256638 - RNA, 19 nt, Artificial Sequence
  Description of Artificial Sequence: Synthetic oligonucleotide
  Sense strand starting at position 1184 of SEQ ID NO: 1884318
uaggcauugcauggaugaa

SEQ ID NO: 2256639 - RNA, 19 nt, Artificial Sequence
  Description of Artificial Sequence: Synthetic oligonucleotide
  Antisense strand to SEQ ID NO: 2256638
uucauccaugcaaugccua

SEQ ID NO: 2256640 - RNA, 19 nt, Artificial Sequence
  Description of Artificial Sequence: Synthetic oligonucleotide
  Sense strand starting at position 1302 of SEQ ID NO: 1884318
aaggcagucccucagaauu

SEQ ID NO: 2256641 - RNA, 19 nt, Artificial Sequence
  Description of Artificial Sequence: Synthetic oligonucleotide
  Antisense strand to SEQ ID NO: 2256640
aauucugagggacugccuu

SEQ ID NO: 2256642 - RNA, 19 nt, Artificial Sequence
  Description of Artificial Sequence: Synthetic oligonucleotide
  Sense strand starting at position 1334 of SEQ ID NO: 1884318
gagguaauagaguauaugu

SEQ ID NO: 2256643 - RNA, 19 nt, Artificial Sequence
  Description of Artificial Sequence: Synthetic oligonucleotide
  Antisense strand to SEQ ID NO: 2256642
acauauacucuauuaccuc

SEQ ID NO: 2256644 - RNA, 19 nt, Artificial Sequence
  Description of Artificial Sequence: Synthetic oligonucleotide
  Sense strand starting at position 1364 of SEQ ID NO: 1884318
gaacauguuccacagagca

SEQ ID NO: 2256645 - RNA, 19 nt, Artificial Sequence
  Description of Artificial Sequence: Synthetic oligonucleotide
  Antisense strand to SEQ ID NO: 2256644
ugcucuguggaacauguuc

SEQ ID NO: 2256646 - RNA, 19 nt, Artificial Sequence
  Description of Artificial Sequence: Synthetic oligonucleotide
  Sense strand starting at position 1393 of SEQ ID NO: 1884318
ugggauauauuugaauagu

SEQ ID NO: 2256647 - RNA, 19 nt, Artificial Sequence
  Description of Artificial Sequence: Synthetic oligonucleotide
  Antisense strand to SEQ ID NO: 2256646
acuauucaaauauauccca

SEQ ID NO: 2256648 - RNA, 19 nt, Artificial Sequence
  Description of Artificial Sequence: Synthetic oligonucleotide
  Sense strand starting at position 1418 of SEQ ID NO: 1884318
augcuaugauucucagaac

SEQ ID NO: 2256649 - RNA, 19 nt, Artificial Sequence
  Description of Artificial Sequence: Synthetic oligonucleotide
  Antisense strand to SEQ ID NO: 2256648
guucugagaaucauagcau

SEQ ID NO: 2256650 - RNA, 19 nt, Artificial Sequence
  Description of Artificial Sequence: Synthetic oligonucleotide
  Sense strand starting at position 1624 of SEQ ID NO: 1884318
gccuuugaaaggugacaag

SEQ ID NO: 2256651 - RNA, 19 nt, Artificial Sequence
  Description of Artificial Sequence: Synthetic oligonucleotide
  Antisense strand to SEQ ID NO: 2256650
cuugucaccuuucaaaggc

SEQ ID NO: 2256652 - RNA, 19 nt, Artificial Sequence
  Description of Artificial Sequence: Synthetic oligonucleotide
  Sense strand starting at position 1683 of SEQ ID NO: 1884318
guuguuucccaagauauau

SEQ ID NO: 2256653 - RNA, 19 nt, Artificial Sequence
  Description of Artificial Sequence: Synthetic oligonucleotide
  Antisense strand to SEQ ID NO: 2256652
auauaucuugggaaacaac

SEQ ID NO: 2256654 - RNA, 19 nt, Artificial Sequence
  Description of Artificial Sequence: Synthetic oligonucleotide
  Sense strand starting at position 2215 of SEQ ID NO: 1884318
ucagacgucuuacuaaaca

SEQ ID NO: 2256655 - RNA, 19 nt, Artificial Sequence
  Description of Artificial Sequence: Synthetic oligonucleotide
  Antisense strand to SEQ ID NO: 2256654
uguuuaguaagacgucuga

SEQ ID NO: 2256656 - RNA, 19 nt, Artificial Sequence
  Description of Artificial Sequence: Synthetic oligonucleotide
  Sense strand starting at position 2321 of SEQ ID NO: 1884318
caggcuuaaagcgaugaga

SEQ ID NO: 2256657 - RNA, 19 nt, Artificial Sequence
  Description of Artificial Sequence: Synthetic oligonucleotide
  Antisense strand to SEQ ID NO: 2256656
ucucaucgcuuuaagccug

SEQ ID NO: 2256658 - RNA, 19 nt, Artificial Sequence
  Description of Artificial Sequence: Synthetic oligonucleotide
  Sense strand starting at position 2324 of SEQ ID NO: 1884318
gcuuaaagcgaugagauaa

SEQ ID NO: 2256659 - RNA, 19 nt, Artificial Sequence
  Description of Artificial Sequence: Synthetic oligonucleotide
  Antisense strand to SEQ ID NO: 2256658
uuaucucaucgcuuuaagc

SEQ ID NO: 2256660 - RNA, 19 nt, Artificial Sequence
  Description of Artificial Sequence: Synthetic oligonucleotide
  Sense strand starting at position 2386 of SEQ ID NO: 1884318
ugucuaucugacuacagua

SEQ ID NO: 2256661 - RNA, 19 nt, Artificial Sequence
  Description of Artificial Sequence: Synthetic oligonucleotide
  Antisense strand to SEQ ID NO: 2256660
uacuguagucagauagaca

SEQ ID NO: 2256662 - RNA, 19 nt, Artificial Sequence
  Description of Artificial Sequence: Synthetic oligonucleotide
  Sense strand starting at position 2388 of SEQ ID NO: 1884318
ucuaucugacuacaguauu

SEQ ID NO: 2256663 - RNA, 19 nt, Artificial Sequence
  Description of Artificial Sequence: Synthetic oligonucleotide
  Antisense strand to SEQ ID NO: 2256662
aauacuguagucagauaga

SEQ ID NO: 2256664 - RNA, 19 nt, Artificial Sequence
  Description of Artificial Sequence: Synthetic oligonucleotide
  Sense strand starting at position 2412 of SEQ ID NO: 1884318
acuuaacugcuuugggaug

SEQ ID NO: 2256665 - RNA, 19 nt, Artificial Sequence
  Description of Artificial Sequence: Synthetic oligonucleotide
  Antisense strand to SEQ ID NO: 2256664
caucccaaagcaguuaagu

SEQ ID NO: 2256666 - RNA, 19 nt, Artificial Sequence
  Description of Artificial Sequence: Synthetic oligonucleotide
  Sense strand starting at position 2718 of SEQ ID NO: 1884318
gcauaagcuuaaccagaga

SEQ ID NO: 2256667 - RNA, 19 nt, Artificial Sequence
  Description of Artificial Sequence: Synthetic oligonucleotide
  Antisense strand to SEQ ID NO: 2256666
ucucugguuaagcuuaugc

SEQ ID NO: 2256668 - RNA, 19 nt, Artificial Sequence
  Description of Artificial Sequence: Synthetic oligonucleotide
  Sense strand starting at position 3307 of SEQ ID NO: 1884318
aagggaugauuguuacuca

SEQ ID NO: 2256669 - RNA, 19 nt, Artificial Sequence
  Description of Artificial Sequence: Synthetic oligonucleotide
  Antisense strand to SEQ ID NO: 2256668
ugaguaacaaucaucccuu

SEQ ID NO: 2256670 - RNA, 19 nt, Artificial Sequence
  Description of Artificial Sequence: Synthetic oligonucleotide
  Sense strand starting at position 3310 of SEQ ID NO: 1884318
ggaugauuguuacucagag

SEQ ID NO: 2256671 - RNA, 19 nt, Artificial Sequence
  Description of Artificial Sequence: Synthetic oligonucleotide
  Antisense strand to SEQ ID NO: 2256670
cucugaguaacaaucaucc

SEQ ID NO: 2256672 - RNA, 19 nt, Artificial Sequence
  Description of Artificial Sequence: Synthetic oligonucleotide
  Sense strand starting at position 3311 of SEQ ID NO: 1884318
gaugauuguuacucagaga

SEQ ID NO: 2256673 - RNA, 19 nt, Artificial Sequence
  Description of Artificial Sequence: Synthetic oligonucleotide
  Antisense strand to SEQ ID NO: 2256672
ucucugaguaacaaucauc

SEQ ID NO: 2256674 - RNA, 19 nt, Artificial Sequence
  Description of Artificial Sequence: Synthetic oligonucleotide
  Sense strand starting at position 3345 of SEQ ID NO: 1884318
cuaggaucacuuggcacau

SEQ ID NO: 2256675 - RNA, 19 nt, Artificial Sequence
  Description of Artificial Sequence: Synthetic oligonucleotide
  Antisense strand to SEQ ID NO: 2256674
augugccaagugauccuag

SEQ ID NO: 2256676 - RNA, 19 nt, Artificial Sequence
  Description of Artificial Sequence: Synthetic oligonucleotide
  Sense strand starting at position 3510 of SEQ ID NO: 1884318
cuguguuugccaguggcau

SEQ ID NO: 2256677 - RNA, 19 nt, Artificial Sequence
  Description of Artificial Sequence: Synthetic oligonucleotide
  Antisense strand to SEQ ID NO: 2256676
augccacuggcaaacacag

SEQ ID NO: 2256678 - RNA, 19 nt, Artificial Sequence
  Description of Artificial Sequence: Synthetic oligonucleotide
  Sense strand starting at position 3543 of SEQ ID NO: 1884318
cuguccugcagggaaauua

SEQ ID NO: 2256679 - RNA, 19 nt, Artificial Sequence
  Description of Artificial Sequence: Synthetic oligonucleotide
  Antisense strand to SEQ ID NO: 2256678
uaauuucccugcaggacag

SEQ ID NO: 2256680 - RNA, 19 nt, Artificial Sequence
  Description of Artificial Sequence: Synthetic oligonucleotide
  Sense strand starting at position 3635 of SEQ ID NO: 1884318
ucuggagugaguuaucuua

SEQ ID NO: 2256681 - RNA, 19 nt, Artificial Sequence
  Description of Artificial Sequence: Synthetic oligonucleotide
  Antisense strand to SEQ ID NO: 2256680
uaagauaacucacuccaga

SEQ ID NO: 2256682 - RNA, 19 nt, Artificial Sequence
  Description of Artificial Sequence: Synthetic oligonucleotide
  Sense strand starting at position 3637 of SEQ ID NO: 1884318
uggagugaguuaucuuaau

SEQ ID NO: 2256683 - RNA, 19 nt, Artificial Sequence
  Description of Artificial Sequence: Synthetic oligonucleotide
  Antisense strand to SEQ ID NO: 2256682
auuaagauaacucacucca

SEQ ID NO: 2256684 - RNA, 19 nt, Artificial Sequence
  Description of Artificial Sequence: Synthetic oligonucleotide
  Sense strand starting at position 3718 of SEQ ID NO: 1884318
uggguaaacagugauugca

SEQ ID NO: 2256685 - RNA, 19 nt, Artificial Sequence
  Description of Artificial Sequence: Synthetic oligonucleotide
  Antisense strand to SEQ ID NO: 2256684
ugcaaucacuguuuaccca

SEQ ID NO: 2256686 - RNA, 19 nt, Artificial Sequence
  Description of Artificial Sequence: Synthetic oligonucleotide
  Sense strand starting at position 3731 of SEQ ID NO: 1884318
auugcauugauguggaaag

SEQ ID NO: 2256687 - RNA, 19 nt, Artificial Sequence
  Description of Artificial Sequence: Synthetic oligonucleotide
  Antisense strand to SEQ ID NO: 2256686
cuuuccacaucaaugcaau

SEQ ID NO: 2256688 - RNA, 19 nt, Artificial Sequence
  Description of Artificial Sequence: Synthetic oligonucleotide
  Sense strand starting at position 3753 of SEQ ID NO: 1884318
aguagagaucccuggcaag

SEQ ID NO: 2256689 - RNA, 19 nt, Artificial Sequence
  Description of Artificial Sequence: Synthetic oligonucleotide
  Antisense strand to SEQ ID NO: 2256688
cuugccagggaucucuacu

SEQ ID NO: 2256690 - RNA, 19 nt, Artificial Sequence
  Description of Artificial Sequence: Synthetic oligonucleotide
  Sense strand starting at position 3807 of SEQ ID NO: 1884318
acuguuaugagcugaacag

SEQ ID NO: 2256691 - RNA, 19 nt, Artificial Sequence
  Description of Artificial Sequence: Synthetic oligonucleotide
  Antisense strand to SEQ ID NO: 2256690
cuguucagcucauaacagu

SEQ ID NO: 2256692 - RNA, 19 nt, Artificial Sequence
  Description of Artificial Sequence: Synthetic oligonucleotide
  Sense strand starting at position 3819 of SEQ ID NO: 1884318
ugaacagggucuuuccaaa

SEQ ID NO: 2256693 - RNA, 19 nt, Artificial Sequence
  Description of Artificial Sequence: Synthetic oligonucleotide
  Antisense strand to SEQ ID NO: 2256692
uuuggaaagacccuguuca

SEQ ID NO: 2256694 - RNA, 19 nt, Artificial Sequence
  Description of Artificial Sequence: Synthetic oligonucleotide
  Sense strand starting at position 3851 of SEQ ID NO: 1884318
aguccugaccuccaguaau

SEQ ID NO: 2256695 - RNA, 19 nt, Artificial Sequence
  Description of Artificial Sequence: Synthetic oligonucleotide
  Antisense strand to SEQ ID NO: 2256694
auuacuggaggucaggacu

SEQ ID NO: 2256696 - RNA, 19 nt, Artificial Sequence
  Description of Artificial Sequence: Synthetic oligonucleotide
  Sense strand starting at position 3876 of SEQ ID NO: 1884318
ggugacuguauugggagau

SEQ ID NO: 2256697 - RNA, 19 nt, Artificial Sequence
  Description of Artificial Sequence: Synthetic oligonucleotide
  Antisense strand to SEQ ID NO: 2256696
aucucccaauacagucacc

SEQ ID NO: 2256698 - RNA, 19 nt, Artificial Sequence
  Description of Artificial Sequence: Synthetic oligonucleotide
  Sense strand starting at position 3949 of SEQ ID NO: 1884318
uaugacgaauguccuuaua

SEQ ID NO: 2256699 - RNA, 19 nt, Artificial Sequence
  Description of Artificial Sequence: Synthetic oligonucleotide
  Antisense strand to SEQ ID NO: 2256698
uauaaggacauucgucaua

SEQ ID NO: 2256700 - RNA, 19 nt, Artificial Sequence
  Description of Artificial Sequence: Synthetic oligonucleotide
  Sense strand starting at position 3951 of SEQ ID NO: 1884318
ugacgaauguccuuauaga

SEQ ID NO: 2256701 - RNA, 19 nt, Artificial Sequence
  Description of Artificial Sequence: Synthetic oligonucleotide
  Antisense strand to SEQ ID NO: 2256700
ucuauaaggacauucguca

SEQ ID NO: 2256702 - RNA, 19 nt, Artificial Sequence
  Description of Artificial Sequence: Synthetic oligonucleotide
  Sense strand starting at position 3965 of SEQ ID NO: 1884318
auagaaagcgauugggaca

SEQ ID NO: 2256703 - RNA, 19 nt, Artificial Sequence
  Description of Artificial Sequence: Synthetic oligonucleotide
  Antisense strand to SEQ ID NO: 2256702
ugucccaaucgcuuucuau

SEQ ID NO: 2256704 - RNA, 19 nt, Artificial Sequence
  Description of Artificial Sequence: Synthetic oligonucleotide
  Sense strand starting at position 185 of SEQ ID NO: 1884319
cgucaaucucauuaccugu

SEQ ID NO: 2256705 - RNA, 19 nt, Artificial Sequence
  Description of Artificial Sequence: Synthetic oligonucleotide
  Antisense strand to SEQ ID NO: 2256704
acagguaaugagauugacg

SEQ ID NO: 2256706 - RNA, 19 nt, Artificial Sequence
  Description of Artificial Sequence: Synthetic oligonucleotide
  Sense strand starting at position 435 of SEQ ID NO: 1884319
aacgaaugccagugaagug

SEQ ID NO: 2256707 - RNA, 19 nt, Artificial Sequence
  Description of Artificial Sequence: Synthetic oligonucleotide
  Antisense strand to SEQ ID NO: 2256706
cacuucacuggcauucguu

SEQ ID NO: 2256708 - RNA, 19 nt, Artificial Sequence
  Description of Artificial Sequence: Synthetic oligonucleotide
  Sense strand starting at position 518 of SEQ ID NO: 1884319
ggguucgcugacuaauuga

SEQ ID NO: 2256709 - RNA, 19 nt, Artificial Sequence
  Description of Artificial Sequence: Synthetic oligonucleotide
  Antisense strand to SEQ ID NO: 2256708
ucaauuagucagcgaaccc

SEQ ID NO: 2256710 - RNA, 19 nt, Artificial Sequence
  Description of Artificial Sequence: Synthetic oligonucleotide
  Sense strand starting at position 526 of SEQ ID NO: 1884319
ugacuaauugacugaguga

SEQ ID NO: 2256711 - RNA, 19 nt, Artificial Sequence
  Description of Artificial Sequence: Synthetic oligonucleotide
  Antisense strand to SEQ ID NO: 2256710
ucacucagucaauuaguca

SEQ ID NO: 2256712 - RNA, 19 nt, Artificial Sequence
  Description of Artificial Sequence: Synthetic oligonucleotide
  Sense strand starting at position 557 of SEQ ID NO: 1884319
gucagcuuccacugggauu

SEQ ID NO: 2256713 - RNA, 19 nt, Artificial Sequence
  Description of Artificial Sequence: Synthetic oligonucleotide
  Antisense strand to SEQ ID NO: 2256712
aaucccaguggaagcugac

SEQ ID NO: 2256714 - RNA, 19 nt, Artificial Sequence
  Description of Artificial Sequence: Synthetic oligonucleotide
  Sense strand starting at position 661 of SEQ ID NO: 1884319
gaccuaaguugauagaaca

SEQ ID NO: 2256715 - RNA, 19 nt, Artificial Sequence
  Description of Artificial Sequence: Synthetic oligonucleotide
  Antisense strand to SEQ ID NO: 2256714
uguucuaucaacuuagguc

SEQ ID NO: 2256716 - RNA, 19 nt, Artificial Sequence
  Description of Artificial Sequence: Synthetic oligonucleotide
  Sense strand starting at position 757 of SEQ ID NO: 1884319
ccauuaaaccuccgaguac

SEQ ID NO: 2256717 - RNA, 19 nt, Artificial Sequence
  Description of Artificial Sequence: Synthetic oligonucleotide
  Antisense strand to SEQ ID NO: 2256716
guacucggagguuuaaugg

SEQ ID NO: 2256718 - RNA, 19 nt, Artificial Sequence
  Description of Artificial Sequence: Synthetic oligonucleotide
  Sense strand starting at position 801 of SEQ ID NO: 1884319
uaagguugguaauugugaa

SEQ ID NO: 2256719 - RNA, 19 nt, Artificial Sequence
  Description of Artificial Sequence: Synthetic oligonucleotide
  Antisense strand to SEQ ID NO: 2256718
uucacaauuaccaaccuua

SEQ ID NO: 2256720 - RNA, 19 nt, Artificial Sequence
  Description of Artificial Sequence: Synthetic oligonucleotide
  Sense strand starting at position 802 of SEQ ID NO: 1884319
aagguugguaauugugaaa

SEQ ID NO: 2256721 - RNA, 19 nt, Artificial Sequence
  Description of Artificial Sequence: Synthetic oligonucleotide
  Antisense strand to SEQ ID NO: 2256720
uuucacaauuaccaaccuu

SEQ ID NO: 2256722 - RNA, 19 nt, Artificial Sequence
  Description of Artificial Sequence: Synthetic oligonucleotide
  Sense strand starting at position 1334 of SEQ ID NO: 1884319
gcacgauccggccaagaga

SEQ ID NO: 2256723 - RNA, 19 nt, Artificial Sequence
  Description of Artificial Sequence: Synthetic oligonucleotide
  Antisense strand to SEQ ID NO: 2256722
ucucuuggccggaucgugc

SEQ ID NO: 2256724 - RNA, 19 nt, Artificial Sequence
  Description of Artificial Sequence: Synthetic oligonucleotide
  Sense strand starting at position 2076 of SEQ ID NO: 1884319
aacuguuuaugauccgacu

SEQ ID NO: 2256725 - RNA, 19 nt, Artificial Sequence
  Description of Artificial Sequence: Synthetic oligonucleotide
  Antisense strand to SEQ ID NO: 2256724
agucggaucauaaacaguu

SEQ ID NO: 2256726 - RNA, 19 nt, Artificial Sequence
  Description of Artificial Sequence: Synthetic oligonucleotide
  Sense strand starting at position 2141 of SEQ ID NO: 1884319
cagacauaguggcuggaaa

SEQ ID NO: 2256727 - RNA, 19 nt, Artificial Sequence
  Description of Artificial Sequence: Synthetic oligonucleotide
  Antisense strand to SEQ ID NO: 2256726
uuuccagccacuaugucug

SEQ ID NO: 2256728 - RNA, 19 nt, Artificial Sequence
  Description of Artificial Sequence: Synthetic oligonucleotide
  Sense strand starting at position 2192 of SEQ ID NO: 1884319
gucagaaguccaggcuuga

SEQ ID NO: 2256729 - RNA, 19 nt, Artificial Sequence
  Description of Artificial Sequence: Synthetic oligonucleotide
  Antisense strand to SEQ ID NO: 2256728
ucaagccuggacuucugac

SEQ ID NO: 2256730 - RNA, 19 nt, Artificial Sequence
  Description of Artificial Sequence: Synthetic oligonucleotide
  Sense strand starting at position 2309 of SEQ ID NO: 1884319
gugguucuggcagaauuca

SEQ ID NO: 2256731 - RNA, 19 nt, Artificial Sequence
  Description of Artificial Sequence: Synthetic oligonucleotide
  Antisense strand to SEQ ID NO: 2256730
ugaauucugccagaaccac

SEQ ID NO: 2256732 - RNA, 19 nt, Artificial Sequence
  Description of Artificial Sequence: Synthetic oligonucleotide
  Sense strand starting at position 2528 of SEQ ID NO: 1884319
gggcuugugauugggucaa

SEQ ID NO: 2256733 - RNA, 19 nt, Artificial Sequence
  Description of Artificial Sequence: Synthetic oligonucleotide
  Antisense strand to SEQ ID NO: 2256732
uugacccaaucacaagccc

SEQ ID NO: 2256734 - RNA, 19 nt, Artificial Sequence
  Description of Artificial Sequence: Synthetic oligonucleotide
  Sense strand starting at position 2578 of SEQ ID NO: 1884319
ucagcucugccauaugaca

SEQ ID NO: 2256735 - RNA, 19 nt, Artificial Sequence
  Description of Artificial Sequence: Synthetic oligonucleotide
  Antisense strand to SEQ ID NO: 2256734
ugucauauggcagagcuga

SEQ ID NO: 2256736 - RNA, 19 nt, Artificial Sequence
  Description of Artificial Sequence: Synthetic oligonucleotide
  Sense strand starting at position 2602 of SEQ ID NO: 1884319
cagucaugggagugaggau

SEQ ID NO: 2256737 - RNA, 19 nt, Artificial Sequence
  Description of Artificial Sequence: Synthetic oligonucleotide
  Antisense strand to SEQ ID NO: 2256736
auccucacucccaugacug

SEQ ID NO: 2256738 - RNA, 19 nt, Artificial Sequence
  Description of Artificial Sequence: Synthetic oligonucleotide
  Sense strand starting at position 2675 of SEQ ID NO: 1884319
uuggaauucugccuacuua

SEQ ID NO: 2256739 - RNA, 19 nt, Artificial Sequence
  Description of Artificial Sequence: Synthetic oligonucleotide
  Antisense strand to SEQ ID NO: 2256738
uaaguaggcagaauuccaa

SEQ ID NO: 2256740 - RNA, 19 nt, Artificial Sequence
  Description of Artificial Sequence: Synthetic oligonucleotide
  Sense strand starting at position 2676 of SEQ ID NO: 1884319
uggaauucugccuacuuac

SEQ ID NO: 2256741 - RNA, 19 nt, Artificial Sequence
  Description of Artificial Sequence: Synthetic oligonucleotide
  Antisense strand to SEQ ID NO: 2256740
guaaguaggcagaauucca

SEQ ID NO: 2256742 - RNA, 19 nt, Artificial Sequence
  Description of Artificial Sequence: Synthetic oligonucleotide
  Sense strand starting at position 2740 of SEQ ID NO: 1884319
guguaacaccucgaaugcu

SEQ ID NO: 2256743 - RNA, 19 nt, Artificial Sequence
  Description of Artificial Sequence: Synthetic oligonucleotide
  Antisense strand to SEQ ID NO: 2256742
agcauucgagguguuacac

SEQ ID NO: 2256744 - RNA, 19 nt, Artificial Sequence
  Description of Artificial Sequence: Synthetic oligonucleotide
  Sense strand starting at position 2825 of SEQ ID NO: 1884319
uuccuaugaguacagucau

SEQ ID NO: 2256745 - RNA, 19 nt, Artificial Sequence
  Description of Artificial Sequence: Synthetic oligonucleotide
  Antisense strand to SEQ ID NO: 2256744
augacuguacucauaggaa

SEQ ID NO: 2256746 - RNA, 19 nt, Artificial Sequence
  Description of Artificial Sequence: Synthetic oligonucleotide
  Sense strand starting at position 2939 of SEQ ID NO: 1884319
agcucagagagugguacau

SEQ ID NO: 2256747 - RNA, 19 nt, Artificial Sequence
  Description of Artificial Sequence: Synthetic oligonucleotide
  Antisense strand to SEQ ID NO: 2256746
auguaccacucucugagcu

SEQ ID NO: 2256748 - RNA, 19 nt, Artificial Sequence
  Description of Artificial Sequence: Synthetic oligonucleotide
  Sense strand starting at position 2941 of SEQ ID NO: 1884319
cucagagagugguacauuu

SEQ ID NO: 2256749 - RNA, 19 nt, Artificial Sequence
  Description of Artificial Sequence: Synthetic oligonucleotide
  Antisense strand to SEQ ID NO: 2256748
aaauguaccacucucugag

SEQ ID NO: 2256750 - RNA, 19 nt, Artificial Sequence
  Description of Artificial Sequence: Synthetic oligonucleotide
  Sense strand starting at position 2981 of SEQ ID NO: 1884319
guaggaaauugauaaagau

SEQ ID NO: 2256751 - RNA, 19 nt, Artificial Sequence
  Description of Artificial Sequence: Synthetic oligonucleotide
  Antisense strand to SEQ ID NO: 2256750
aucuuuaucaauuuccuac

SEQ ID NO: 2256752 - RNA, 19 nt, Artificial Sequence
  Description of Artificial Sequence: Synthetic oligonucleotide
  Sense strand starting at position 2991 of SEQ ID NO: 1884319
gauaaagaugcuugugauc

SEQ ID NO: 2256753 - RNA, 19 nt, Artificial Sequence
  Description of Artificial Sequence: Synthetic oligonucleotide
  Antisense strand to SEQ ID NO: 2256752
gaucacaagcaucuuuauc

SEQ ID NO: 2256754 - RNA, 19 nt, Artificial Sequence
  Description of Artificial Sequence: Synthetic oligonucleotide
  Sense strand starting at position 2996 of SEQ ID NO: 1884319
agaugcuugugaucacaga

SEQ ID NO: 2256755 - RNA, 19 nt, Artificial Sequence
  Description of Artificial Sequence: Synthetic oligonucleotide
  Antisense strand to SEQ ID NO: 2256754
ucugugaucacaagcaucu

SEQ ID NO: 2256756 - RNA, 19 nt, Artificial Sequence
  Description of Artificial Sequence: Synthetic oligonucleotide
  Sense strand starting at position 2997 of SEQ ID NO: 1884319
gaugcuugugaucacagau

SEQ ID NO: 2256757 - RNA, 19 nt, Artificial Sequence
  Description of Artificial Sequence: Synthetic oligonucleotide
  Antisense strand to SEQ ID NO: 2256756
aucugugaucacaagcauc

SEQ ID NO: 2256758 - RNA, 19 nt, Artificial Sequence
  Description of Artificial Sequence: Synthetic oligonucleotide
  Sense strand starting at position 3018 of SEQ ID NO: 1884319
ggagacugagucugugaaa

SEQ ID NO: 2256759 - RNA, 19 nt, Artificial Sequence
  Description of Artificial Sequence: Synthetic oligonucleotide
  Antisense strand to SEQ ID NO: 2256758
uuucacagacucagucucc

SEQ ID NO: 2256760 - RNA, 19 nt, Artificial Sequence
  Description of Artificial Sequence: Synthetic oligonucleotide
  Sense strand starting at position 3195 of SEQ ID NO: 1884319
gguccaucuaaauggaugu

SEQ ID NO: 2256761 - RNA, 19 nt, Artificial Sequence
  Description of Artificial Sequence: Synthetic oligonucleotide
  Antisense strand to SEQ ID NO: 2256760
acauccauuuagauggacc

SEQ ID NO: 2256762 - RNA, 19 nt, Artificial Sequence
  Description of Artificial Sequence: Synthetic oligonucleotide
  Sense strand starting at position 3221 of SEQ ID NO: 1884319
acuaacgcaucaucugaaa

SEQ ID NO: 2256763 - RNA, 19 nt, Artificial Sequence
  Description of Artificial Sequence: Synthetic oligonucleotide
  Antisense strand to SEQ ID NO: 2256762
uuucagaugaugcguuagu

SEQ ID NO: 2256764 - RNA, 19 nt, Artificial Sequence
  Description of Artificial Sequence: Synthetic oligonucleotide
  Sense strand starting at position 3660 of SEQ ID NO: 1884319
auaguaguuccucaauuaa

SEQ ID NO: 2256765 - RNA, 19 nt, Artificial Sequence
  Description of Artificial Sequence: Synthetic oligonucleotide
  Antisense strand to SEQ ID NO: 2256764
uuaauugaggaacuacuau

SEQ ID NO: 2256766 - RNA, 19 nt, Artificial Sequence
  Description of Artificial Sequence: Synthetic oligonucleotide
  Sense strand starting at position 3670 of SEQ ID NO: 1884319
cucaauuaaugugugcuua

SEQ ID NO: 2256767 - RNA, 19 nt, Artificial Sequence
  Description of Artificial Sequence: Synthetic oligonucleotide
  Antisense strand to SEQ ID NO: 2256766
uaagcacacauuaauugag

SEQ ID NO: 2256768 - RNA, 19 nt, Artificial Sequence
  Description of Artificial Sequence: Synthetic oligonucleotide
  Sense strand starting at position 3671 of SEQ ID NO: 1884319
ucaauuaaugugugcuuaa

SEQ ID NO: 2256769 - RNA, 19 nt, Artificial Sequence
  Description of Artificial Sequence: Synthetic oligonucleotide
  Antisense strand to SEQ ID NO: 2256768
uuaagcacacauuaauuga

SEQ ID NO: 2256770 - RNA, 19 nt, Artificial Sequence
  Description of Artificial Sequence: Synthetic oligonucleotide
  Sense strand starting at position 3674 of SEQ ID NO: 1884319
auuaaugugugcuuaauga

SEQ ID NO: 2256771 - RNA, 19 nt, Artificial Sequence
  Description of Artificial Sequence: Synthetic oligonucleotide
  Antisense strand to SEQ ID NO: 2256770
ucauuaagcacacauuaau

SEQ ID NO: 2256772 - RNA, 19 nt, Artificial Sequence
  Description of Artificial Sequence: Synthetic oligonucleotide
  Sense strand starting at position 3684 of SEQ ID NO: 1884319
gcuuaaugagugcauaauu

SEQ ID NO: 2256773 - RNA, 19 nt, Artificial Sequence
  Description of Artificial Sequence: Synthetic oligonucleotide
  Antisense strand to SEQ ID NO: 2256772
aauuaugcacucauuaagc

SEQ ID NO: 2256774 - RNA, 19 nt, Artificial Sequence
  Description of Artificial Sequence: Synthetic oligonucleotide
  Sense strand starting at position 3898 of SEQ ID NO: 1884319
gccuuuagcuauuugucuu

SEQ ID NO: 2256775 - RNA, 19 nt, Artificial Sequence
  Description of Artificial Sequence: Synthetic oligonucleotide
  Antisense strand to SEQ ID NO: 2256774
aagacaaauagcuaaaggc

SEQ ID NO: 2256776 - RNA, 19 nt, Artificial Sequence
  Description of Artificial Sequence: Synthetic oligonucleotide
  Sense strand starting at position 3901 of SEQ ID NO: 1884319
uuuagcuauuugucuuaga

SEQ ID NO: 2256777 - RNA, 19 nt, Artificial Sequence
  Description of Artificial Sequence: Synthetic oligonucleotide
  Antisense strand to SEQ ID NO: 2256776
ucuaagacaaauagcuaaa

SEQ ID NO: 2256778 - RNA, 19 nt, Artificial Sequence
  Description of Artificial Sequence: Synthetic oligonucleotide
  Sense strand starting at position 3902 of SEQ ID NO: 1884319
uuagcuauuugucuuagau

SEQ ID NO: 2256779 - RNA, 19 nt, Artificial Sequence
  Description of Artificial Sequence: Synthetic oligonucleotide
  Antisense strand to SEQ ID NO: 2256778
aucuaagacaaauagcuaa

SEQ ID NO: 2256780 - RNA, 19 nt, Artificial Sequence
  Description of Artificial Sequence: Synthetic oligonucleotide
  Sense strand starting at position 3904 of SEQ ID NO: 1884319
agcuauuugucuuagauaa

SEQ ID NO: 2256781 - RNA, 19 nt, Artificial Sequence
  Description of Artificial Sequence: Synthetic oligonucleotide
  Antisense strand to SEQ ID NO: 2256780
uuaucuaagacaaauagcu

SEQ ID NO: 2256782 - RNA, 19 nt, Artificial Sequence
  Description of Artificial Sequence: Synthetic oligonucleotide
  Sense strand starting at position 3954 of SEQ ID NO: 1884319
ggguuaaugggauauugca

SEQ ID NO: 2256783 - RNA, 19 nt, Artificial Sequence
  Description of Artificial Sequence: Synthetic oligonucleotide
  Antisense strand to SEQ ID NO: 2256782
ugcaauaucccauuaaccc

SEQ ID NO: 2256784 - RNA, 19 nt, Artificial Sequence
  Description of Artificial Sequence: Synthetic oligonucleotide
  Sense strand starting at position 22 of SEQ ID NO: 1884320
gcuuacugcuaaguuaaag

SEQ ID NO: 2256785 - RNA, 19 nt, Artificial Sequence
  Description of Artificial Sequence: Synthetic oligonucleotide
  Antisense strand to SEQ ID NO: 2256784
cuuuaacuuagcaguaagc

SEQ ID NO: 2256786 - RNA, 19 nt, Artificial Sequence
  Description of Artificial Sequence: Synthetic oligonucleotide
  Sense strand starting at position 118 of SEQ ID NO: 1884320
uaagaucagugguuggcaa

SEQ ID NO: 2256787 - RNA, 19 nt, Artificial Sequence
  Description of Artificial Sequence: Synthetic oligonucleotide
  Antisense strand to SEQ ID NO: 2256786
uugccaaccacugaucuua

SEQ ID NO: 2256788 - RNA, 19 nt, Artificial Sequence
  Description of Artificial Sequence: Synthetic oligonucleotide
  Sense strand starting at position 381 of SEQ ID NO: 1884320
auguuuauccauuguaaca

SEQ ID NO: 2256789 - RNA, 19 nt, Artificial Sequence
  Description of Artificial Sequence: Synthetic oligonucleotide
  Antisense strand to SEQ ID NO: 2256788
uguuacaauggauaaacau

SEQ ID NO: 2256790 - RNA, 19 nt, Artificial Sequence
  Description of Artificial Sequence: Synthetic oligonucleotide
  Sense strand starting at position 423 of SEQ ID NO: 1884320
guaaauaauagcggaaacu

SEQ ID NO: 2256791 - RNA, 19 nt, Artificial Sequence
  Description of Artificial Sequence: Synthetic oligonucleotide
  Antisense strand to SEQ ID NO: 2256790
aguuuccgcuauuauuuac

SEQ ID NO: 2256792 - RNA, 19 nt, Artificial Sequence
  Description of Artificial Sequence: Synthetic oligonucleotide
  Sense strand starting at position 478 of SEQ ID NO: 1884320
cguacuaucugcucaauuu

SEQ ID NO: 2256793 - RNA, 19 nt, Artificial Sequence
  Description of Artificial Sequence: Synthetic oligonucleotide
  Antisense strand to SEQ ID NO: 2256792
aaauugagcagauaguacg

SEQ ID NO: 2256794 - RNA, 19 nt, Artificial Sequence
  Description of Artificial Sequence: Synthetic oligonucleotide
  Sense strand starting at position 962 of SEQ ID NO: 1884320
cgucucuauuaaguauaca

SEQ ID NO: 2256795 - RNA, 19 nt, Artificial Sequence
  Description of Artificial Sequence: Synthetic oligonucleotide
  Antisense strand to SEQ ID NO: 2256794
uguauacuuaauagagacg

SEQ ID NO: 2256796 - RNA, 19 nt, Artificial Sequence
  Description of Artificial Sequence: Synthetic oligonucleotide
  Sense strand starting at position 1236 of SEQ ID NO: 1884320
gucuuagcucaagagccaa

SEQ ID NO: 2256797 - RNA, 19 nt, Artificial Sequence
  Description of Artificial Sequence: Synthetic oligonucleotide
  Antisense strand to SEQ ID NO: 2256796
uuggcucuugagcuaagac

SEQ ID NO: 2256798 - RNA, 19 nt, Artificial Sequence
  Description of Artificial Sequence: Synthetic oligonucleotide
  Sense strand starting at position 1269 of SEQ ID NO: 1884320
uucuguuggagugggcaaa

SEQ ID NO: 2256799 - RNA, 19 nt, Artificial Sequence
  Description of Artificial Sequence: Synthetic oligonucleotide
  Antisense strand to SEQ ID NO: 2256798
uuugcccacuccaacagaa

SEQ ID NO: 2256800 - RNA, 19 nt, Artificial Sequence
  Description of Artificial Sequence: Synthetic oligonucleotide
  Sense strand starting at position 1319 of SEQ ID NO: 1884320
agcuguguggccuaacuua

SEQ ID NO: 2256801 - RNA, 19 nt, Artificial Sequence
  Description of Artificial Sequence: Synthetic oligonucleotide
  Antisense strand to SEQ ID NO: 2256800
uaaguuaggccacacagcu

SEQ ID NO: 2256802 - RNA, 19 nt, Artificial Sequence
  Description of Artificial Sequence: Synthetic oligonucleotide
  Sense strand starting at position 1486 of SEQ ID NO: 1884320
aauguucgcugacugauuu

SEQ ID NO: 2256803 - RNA, 19 nt, Artificial Sequence
  Description of Artificial Sequence: Synthetic oligonucleotide
  Antisense strand to SEQ ID NO: 2256802
aaaucagucagcgaacauu

SEQ ID NO: 2256804 - RNA, 19 nt, Artificial Sequence
  Description of Artificial Sequence: Synthetic oligonucleotide
  Sense strand starting at position 1521 of SEQ ID NO: 1884320
agguuauucuuacuccacu

SEQ ID NO: 2256805 - RNA, 19 nt, Artificial Sequence
  Description of Artificial Sequence: Synthetic oligonucleotide
  Antisense strand to SEQ ID NO: 2256804
aguggaguaagaauaaccu

SEQ ID NO: 2256806 - RNA, 19 nt, Artificial Sequence
  Description of Artificial Sequence: Synthetic oligonucleotide
  Sense strand starting at position 1522 of SEQ ID NO: 1884320
gguuauucuuacuccacua

SEQ ID NO: 2256807 - RNA, 19 nt, Artificial Sequence
  Description of Artificial Sequence: Synthetic oligonucleotide
  Antisense strand to SEQ ID NO: 2256806
uaguggaguaagaauaacc

SEQ ID NO: 2256808 - RNA, 19 nt, Artificial Sequence
  Description of Artificial Sequence: Synthetic oligonucleotide
  Sense strand starting at position 2011 of SEQ ID NO: 1884320
acagucuccgugucgcaaa

SEQ ID NO: 2256809 - RNA, 19 nt, Artificial Sequence
  Description of Artificial Sequence: Synthetic oligonucleotide
  Antisense strand to SEQ ID NO: 2256808
uuugcgacacggagacugu

SEQ ID NO: 2256810 - RNA, 19 nt, Artificial Sequence
  Description of Artificial Sequence: Synthetic oligonucleotide
  Sense strand starting at position 2088 of SEQ ID NO: 1884320
ggacucccauucuugaaga

SEQ ID NO: 2256811 - RNA, 19 nt, Artificial Sequence
  Description of Artificial Sequence: Synthetic oligonucleotide
  Antisense strand to SEQ ID NO: 2256810
ucuucaagaaugggagucc

SEQ ID NO: 2256812 - RNA, 19 nt, Artificial Sequence
  Description of Artificial Sequence: Synthetic oligonucleotide
  Sense strand starting at position 2116 of SEQ ID NO: 1884320
agaggaaucugagaugaag

SEQ ID NO: 2256813 - RNA, 19 nt, Artificial Sequence
  Description of Artificial Sequence: Synthetic oligonucleotide
  Antisense strand to SEQ ID NO: 2256812
cuucaucucagauuccucu

SEQ ID NO: 2256814 - RNA, 19 nt, Artificial Sequence
  Description of Artificial Sequence: Synthetic oligonucleotide
  Sense strand starting at position 2156 of SEQ ID NO: 1884320
uuucccagugucgaagaau

SEQ ID NO: 2256815 - RNA, 19 nt, Artificial Sequence
  Description of Artificial Sequence: Synthetic oligonucleotide
  Antisense strand to SEQ ID NO: 2256814
auucuucgacacugggaaa

SEQ ID NO: 2256816 - RNA, 19 nt, Artificial Sequence
  Description of Artificial Sequence: Synthetic oligonucleotide
  Sense strand starting at position 2159 of SEQ ID NO: 1884320
cccagugucgaagaauuac

SEQ ID NO: 2256817 - RNA, 19 nt, Artificial Sequence
  Description of Artificial Sequence: Synthetic oligonucleotide
  Antisense strand to SEQ ID NO: 2256816
guaauucuucgacacuggg

SEQ ID NO: 2256818 - RNA, 19 nt, Artificial Sequence
  Description of Artificial Sequence: Synthetic oligonucleotide
  Sense strand starting at position 2236 of SEQ ID NO: 1884320
uguuuauccuaacucagua

SEQ ID NO: 2256819 - RNA, 19 nt, Artificial Sequence
  Description of Artificial Sequence: Synthetic oligonucleotide
  Antisense strand to SEQ ID NO: 2256818
uacugaguuaggauaaaca

SEQ ID NO: 2256820 - RNA, 19 nt, Artificial Sequence
  Description of Artificial Sequence: Synthetic oligonucleotide
  Sense strand starting at position 2286 of SEQ ID NO: 1884320
uuaguaucccauuagcuau

SEQ ID NO: 2256821 - RNA, 19 nt, Artificial Sequence
  Description of Artificial Sequence: Synthetic oligonucleotide
  Antisense strand to SEQ ID NO: 2256820
auagcuaaugggauacuaa

SEQ ID NO: 2256822 - RNA, 19 nt, Artificial Sequence
  Description of Artificial Sequence: Synthetic oligonucleotide
  Sense strand starting at position 2338 of SEQ ID NO: 1884320
cuacaaagugcuuacguau

SEQ ID NO: 2256823 - RNA, 19 nt, Artificial Sequence
  Description of Artificial Sequence: Synthetic oligonucleotide
  Antisense strand to SEQ ID NO: 2256822
auacguaagcacuuuguag

SEQ ID NO: 2256824 - RNA, 19 nt, Artificial Sequence
  Description of Artificial Sequence: Synthetic oligonucleotide
  Sense strand starting at position 2357 of SEQ ID NO: 1884320
gcauauacccuggaugcuu

SEQ ID NO: 2256825 - RNA, 19 nt, Artificial Sequence
  Description of Artificial Sequence: Synthetic oligonucleotide
  Antisense strand to SEQ ID NO: 2256824
aagcauccaggguauaugc

SEQ ID NO: 2256826 - RNA, 19 nt, Artificial Sequence
  Description of Artificial Sequence: Synthetic oligonucleotide
  Sense strand starting at position 2372 of SEQ ID NO: 1884320
gcuucuagaggucagagau

SEQ ID NO: 2256827 - RNA, 19 nt, Artificial Sequence
  Description of Artificial Sequence: Synthetic oligonucleotide
  Antisense strand to SEQ ID NO: 2256826
aucucugaccucuagaagc

SEQ ID NO: 2256828 - RNA, 19 nt, Artificial Sequence
  Description of Artificial Sequence: Synthetic oligonucleotide
  Sense strand starting at position 2380 of SEQ ID NO: 1884320
aggucagagaugugucuuu

SEQ ID NO: 2256829 - RNA, 19 nt, Artificial Sequence
  Description of Artificial Sequence: Synthetic oligonucleotide
  Antisense strand to SEQ ID NO: 2256828
aaagacacaucucugaccu

SEQ ID NO: 2256830 - RNA, 19 nt, Artificial Sequence
  Description of Artificial Sequence: Synthetic oligonucleotide
  Sense strand starting at position 2853 of SEQ ID NO: 1884320
agacauugcucuucuugag

SEQ ID NO: 2256831 - RNA, 19 nt, Artificial Sequence
  Description of Artificial Sequence: Synthetic oligonucleotide
  Antisense strand to SEQ ID NO: 2256830
cucaagaagagcaaugucu

SEQ ID NO: 2256832 - RNA, 19 nt, Artificial Sequence
  Description of Artificial Sequence: Synthetic oligonucleotide
  Sense strand starting at position 3011 of SEQ ID NO: 1884320
aggucagagaucuguagca

SEQ ID NO: 2256833 - RNA, 19 nt, Artificial Sequence
  Description of Artificial Sequence: Synthetic oligonucleotide
  Antisense strand to SEQ ID NO: 2256832
ugcuacagaucucugaccu

SEQ ID NO: 2256834 - RNA, 19 nt, Artificial Sequence
  Description of Artificial Sequence: Synthetic oligonucleotide
  Sense strand starting at position 3013 of SEQ ID NO: 1884320
gucagagaucuguagcacu

SEQ ID NO: 2256835 - RNA, 19 nt, Artificial Sequence
  Description of Artificial Sequence: Synthetic oligonucleotide
  Antisense strand to SEQ ID NO: 2256834
agugcuacagaucucugac

SEQ ID NO: 2256836 - RNA, 19 nt, Artificial Sequence
  Description of Artificial Sequence: Synthetic oligonucleotide
  Sense strand starting at position 3099 of SEQ ID NO: 1884320
caaggugagguuugugaaa

SEQ ID NO: 2256837 - RNA, 19 nt, Artificial Sequence
  Description of Artificial Sequence: Synthetic oligonucleotide
  Antisense strand to SEQ ID NO: 2256836
uuucacaaaccucaccuug

SEQ ID NO: 2256838 - RNA, 19 nt, Artificial Sequence
  Description of Artificial Sequence: Synthetic oligonucleotide
  Sense strand starting at position 3199 of SEQ ID NO: 1884320
agaggagguucuucucuuu

SEQ ID NO: 2256839 - RNA, 19 nt, Artificial Sequence
  Description of Artificial Sequence: Synthetic oligonucleotide
  Antisense strand to SEQ ID NO: 2256838
aaagagaagaaccuccucu

SEQ ID NO: 2256840 - RNA, 19 nt, Artificial Sequence
  Description of Artificial Sequence: Synthetic oligonucleotide
  Sense strand starting at position 3221 of SEQ ID NO: 1884320
uuccgaguggccuauucuu

SEQ ID NO: 2256841 - RNA, 19 nt, Artificial Sequence
  Description of Artificial Sequence: Synthetic oligonucleotide
  Antisense strand to SEQ ID NO: 2256840
aagaauaggccacucggaa

SEQ ID NO: 2256842 - RNA, 19 nt, Artificial Sequence
  Description of Artificial Sequence: Synthetic oligonucleotide
  Sense strand starting at position 3324 of SEQ ID NO: 1884320
gagucacucuaaguuugga

SEQ ID NO: 2256843 - RNA, 19 nt, Artificial Sequence
  Description of Artificial Sequence: Synthetic oligonucleotide
  Antisense strand to SEQ ID NO: 2256842
uccaaacuuagagugacuc

SEQ ID NO: 2256844 - RNA, 19 nt, Artificial Sequence
  Description of Artificial Sequence: Synthetic oligonucleotide
  Sense strand starting at position 3337 of SEQ ID NO: 1884320
uuuggauguggugagguua

SEQ ID NO: 2256845 - RNA, 19 nt, Artificial Sequence
  Description of Artificial Sequence: Synthetic oligonucleotide
  Antisense strand to SEQ ID NO: 2256844
uaaccucaccacauccaaa

SEQ ID NO: 2256846 - RNA, 19 nt, Artificial Sequence
  Description of Artificial Sequence: Synthetic oligonucleotide
  Sense strand starting at position 3413 of SEQ ID NO: 1884320
ugguauuuggugugaaguc

SEQ ID NO: 2256847 - RNA, 19 nt, Artificial Sequence
  Description of Artificial Sequence: Synthetic oligonucleotide
  Antisense strand to SEQ ID NO: 2256846
gacuucacaccaaauacca

SEQ ID NO: 2256848 - RNA, 19 nt, Artificial Sequence
  Description of Artificial Sequence: Synthetic oligonucleotide
  Sense strand starting at position 3420 of SEQ ID NO: 1884320
uggugugaaguccagcaaa

SEQ ID NO: 2256849 - RNA, 19 nt, Artificial Sequence
  Description of Artificial Sequence: Synthetic oligonucleotide
  Antisense strand to SEQ ID NO: 2256848
uuugcuggacuucacacca

SEQ ID NO: 2256850 - RNA, 19 nt, Artificial Sequence
  Description of Artificial Sequence: Synthetic oligonucleotide
  Sense strand starting at position 3423 of SEQ ID NO: 1884320
ugugaaguccagcaaaucu

SEQ ID NO: 2256851 - RNA, 19 nt, Artificial Sequence
  Description of Artificial Sequence: Synthetic oligonucleotide
  Antisense strand to SEQ ID NO: 2256850
agauuugcuggacuucaca

SEQ ID NO: 2256852 - RNA, 19 nt, Artificial Sequence
  Description of Artificial Sequence: Synthetic oligonucleotide
  Sense strand starting at position 3475 of SEQ ID NO: 1884320
cccaucuagcuugagguua

SEQ ID NO: 2256853 - RNA, 19 nt, Artificial Sequence
  Description of Artificial Sequence: Synthetic oligonucleotide
  Antisense strand to SEQ ID NO: 2256852
uaaccucaagcuagauggg

SEQ ID NO: 2256854 - RNA, 19 nt, Artificial Sequence
  Description of Artificial Sequence: Synthetic oligonucleotide
  Sense strand starting at position 3487 of SEQ ID NO: 1884320
gagguuaugggagguucau

SEQ ID NO: 2256855 - RNA, 19 nt, Artificial Sequence
  Description of Artificial Sequence: Synthetic oligonucleotide
  Antisense strand to SEQ ID NO: 2256854
augaaccucccauaaccuc

SEQ ID NO: 2256856 - RNA, 19 nt, Artificial Sequence
  Description of Artificial Sequence: Synthetic oligonucleotide
  Sense strand starting at position 3502 of SEQ ID NO: 1884320
ucauauguuccauaacugu

SEQ ID NO: 2256857 - RNA, 19 nt, Artificial Sequence
  Description of Artificial Sequence: Synthetic oligonucleotide
  Antisense strand to SEQ ID NO: 2256856
acaguuauggaacauauga

SEQ ID NO: 2256858 - RNA, 19 nt, Artificial Sequence
  Description of Artificial Sequence: Synthetic oligonucleotide
  Sense strand starting at position 3595 of SEQ ID NO: 1884320
acuuguagcuauuugcaaa

SEQ ID NO: 2256859 - RNA, 19 nt, Artificial Sequence
  Description of Artificial Sequence: Synthetic oligonucleotide
  Antisense strand to SEQ ID NO: 2256858
uuugcaaauagcuacaagu

SEQ ID NO: 2256860 - RNA, 19 nt, Artificial Sequence
  Description of Artificial Sequence: Synthetic oligonucleotide
  Sense strand starting at position 3963 of SEQ ID NO: 1884320
cagugacuugucuagugac

SEQ ID NO: 2256861 - RNA, 19 nt, Artificial Sequence
  Description of Artificial Sequence: Synthetic oligonucleotide
  Antisense strand to SEQ ID NO: 2256860
gucacuagacaagucacug

SEQ ID NO: 2256862 - RNA, 19 nt, Artificial Sequence
  Description of Artificial Sequence: Synthetic oligonucleotide
  Sense strand starting at position 3975 of SEQ ID NO: 1884320
uagugacuugucuagcauc

SEQ ID NO: 2256863 - RNA, 19 nt, Artificial Sequence
  Description of Artificial Sequence: Synthetic oligonucleotide
  Antisense strand to SEQ ID NO: 2256862
gaugcuagacaagucacua

SEQ ID NO: 2256864 - RNA, 19 nt, Artificial Sequence
  Description of Artificial Sequence: Synthetic oligonucleotide
  Sense strand starting at position 67 of SEQ ID NO: 1884321
uucuuuauugccuagagga

SEQ ID NO: 2256865 - RNA, 19 nt, Artificial Sequence
  Description of Artificial Sequence: Synthetic oligonucleotide
  Antisense strand to SEQ ID NO: 2256864
uccucuaggcaauaaagaa

SEQ ID NO: 2256866 - RNA, 19 nt, Artificial Sequence
  Description of Artificial Sequence: Synthetic oligonucleotide
  Sense strand starting at position 164 of SEQ ID NO: 1884321
cccugcuuucuggauaaau

SEQ ID NO: 2256867 - RNA, 19 nt, Artificial Sequence
  Description of Artificial Sequence: Synthetic oligonucleotide
  Antisense strand to SEQ ID NO: 2256866
auuuauccagaaagcaggg

SEQ ID NO: 2256868 - RNA, 19 nt, Artificial Sequence
  Description of Artificial Sequence: Synthetic oligonucleotide
  Sense strand starting at position 237 of SEQ ID NO: 1884321
gaugcugucuauccagaau

SEQ ID NO: 2256869 - RNA, 19 nt, Artificial Sequence
  Description of Artificial Sequence: Synthetic oligonucleotide
  Antisense strand to SEQ ID NO: 2256868
auucuggauagacagcauc

SEQ ID NO: 2256870 - RNA, 19 nt, Artificial Sequence
  Description of Artificial Sequence: Synthetic oligonucleotide
  Sense strand starting at position 240 of SEQ ID NO: 1884321
gcugucuauccagaaugau

SEQ ID NO: 2256871 - RNA, 19 nt, Artificial Sequence
  Description of Artificial Sequence: Synthetic oligonucleotide
  Antisense strand to SEQ ID NO: 2256870
aucauucuggauagacagc

SEQ ID NO: 2256872 - RNA, 19 nt, Artificial Sequence
  Description of Artificial Sequence: Synthetic oligonucleotide
  Sense strand starting at position 243 of SEQ ID NO: 1884321
gucuauccagaaugauauu

SEQ ID NO: 2256873 - RNA, 19 nt, Artificial Sequence
  Description of Artificial Sequence: Synthetic oligonucleotide
  Antisense strand to SEQ ID NO: 2256872
aauaucauucuggauagac

SEQ ID NO: 2256874 - RNA, 19 nt, Artificial Sequence
  Description of Artificial Sequence: Synthetic oligonucleotide
  Sense strand starting at position 268 of SEQ ID NO: 1884321
cugguaaacguauaccuau

SEQ ID NO: 2256875 - RNA, 19 nt, Artificial Sequence
  Description of Artificial Sequence: Synthetic oligonucleotide
  Antisense strand to SEQ ID NO: 2256874
auagguauacguuuaccag

SEQ ID NO: 2256876 - RNA, 19 nt, Artificial Sequence
  Description of Artificial Sequence: Synthetic oligonucleotide
  Sense strand starting at position 375 of SEQ ID NO: 1884321
uccuuagugcuccaaagca

SEQ ID NO: 2256877 - RNA, 19 nt, Artificial Sequence
  Description of Artificial Sequence: Synthetic oligonucleotide
  Antisense strand to SEQ ID NO: 2256876
ugcuuuggagcacuaagga

SEQ ID NO: 2256878 - RNA, 19 nt, Artificial Sequence
  Description of Artificial Sequence: Synthetic oligonucleotide
  Sense strand starting at position 407 of SEQ ID NO: 1884321
ucuguuauacaguacuuau

SEQ ID NO: 2256879 - RNA, 19 nt, Artificial Sequence
  Description of Artificial Sequence: Synthetic oligonucleotide
  Antisense strand to SEQ ID NO: 2256878
auaaguacuguauaacaga

SEQ ID NO: 2256880 - RNA, 19 nt, Artificial Sequence
  Description of Artificial Sequence: Synthetic oligonucleotide
  Sense strand starting at position 410 of SEQ ID NO: 1884321
guuauacaguacuuaucaa

SEQ ID NO: 2256881 - RNA, 19 nt, Artificial Sequence
  Description of Artificial Sequence: Synthetic oligonucleotide
  Antisense strand to SEQ ID NO: 2256880
uugauaaguacuguauaac

SEQ ID NO: 2256882 - RNA, 19 nt, Artificial Sequence
  Description of Artificial Sequence: Synthetic oligonucleotide
  Sense strand starting at position 500 of SEQ ID NO: 1884321
ugacaagaauauucuuugu

SEQ ID NO: 2256883 - RNA, 19 nt, Artificial Sequence
  Description of Artificial Sequence: Synthetic oligonucleotide
  Antisense strand to SEQ ID NO: 2256882
acaaagaauauucuuguca

SEQ ID NO: 2256884 - RNA, 19 nt, Artificial Sequence
  Description of Artificial Sequence: Synthetic oligonucleotide
  Sense strand starting at position 999 of SEQ ID NO: 1884321
agaugaaguucccuuaaag

SEQ ID NO: 2256885 - RNA, 19 nt, Artificial Sequence
  Description of Artificial Sequence: Synthetic oligonucleotide
  Antisense strand to SEQ ID NO: 2256884
cuuuaagggaacuucaucu

SEQ ID NO: 2256886 - RNA, 19 nt, Artificial Sequence
  Description of Artificial Sequence: Synthetic oligonucleotide
  Sense strand starting at position 1045 of SEQ ID NO: 1884321
aggcaaaugauguauguca

SEQ ID NO: 2256887 - RNA, 19 nt, Artificial Sequence
  Description of Artificial Sequence: Synthetic oligonucleotide
  Antisense strand to SEQ ID NO: 2256886
ugacauacaucauuugccu

SEQ ID NO: 2256888 - RNA, 19 nt, Artificial Sequence
  Description of Artificial Sequence: Synthetic oligonucleotide
  Sense strand starting at position 1094 of SEQ ID NO: 1884321
ccaauauaguuugcacuga

SEQ ID NO: 2256889 - RNA, 19 nt, Artificial Sequence
  Description of Artificial Sequence: Synthetic oligonucleotide
  Antisense strand to SEQ ID NO: 2256888
ucagugcaaacuauauugg

SEQ ID NO: 2256890 - RNA, 19 nt, Artificial Sequence
  Description of Artificial Sequence: Synthetic oligonucleotide
  Sense strand starting at position 1148 of SEQ ID NO: 1884321
gggugucaacaguaacaga

SEQ ID NO: 2256891 - RNA, 19 nt, Artificial Sequence
  Description of Artificial Sequence: Synthetic oligonucleotide
  Antisense strand to SEQ ID NO: 2256890
ucuguuacuguugacaccc

SEQ ID NO: 2256892 - RNA, 19 nt, Artificial Sequence
  Description of Artificial Sequence: Synthetic oligonucleotide
  Sense strand starting at position 1189 of SEQ ID NO: 1884321
augcaaagauguccuaaau

SEQ ID NO: 2256893 - RNA, 19 nt, Artificial Sequence
  Description of Artificial Sequence: Synthetic oligonucleotide
  Antisense strand to SEQ ID NO: 2256892
auuuaggacaucuuugcau

SEQ ID NO: 2256894 - RNA, 19 nt, Artificial Sequence
  Description of Artificial Sequence: Synthetic oligonucleotide
  Sense strand starting at position 2049 of SEQ ID NO: 1884321
gagguugacgggugcagaa

SEQ ID NO: 2256895 - RNA, 19 nt, Artificial Sequence
  Description of Artificial Sequence: Synthetic oligonucleotide
  Antisense strand to SEQ ID NO: 2256894
uucugcacccgucaaccuc

SEQ ID NO: 2256896 - RNA, 19 nt, Artificial Sequence
  Description of Artificial Sequence: Synthetic oligonucleotide
  Sense strand starting at position 2076 of SEQ ID NO: 1884321
ggcgcuuuccuggaagaga

SEQ ID NO: 2256897 - RNA, 19 nt, Artificial Sequence
  Description of Artificial Sequence: Synthetic oligonucleotide
  Antisense strand to SEQ ID NO: 2256896
ucucuuccaggaaagcgcc

SEQ ID NO: 2256898 - RNA, 19 nt, Artificial Sequence
  Description of Artificial Sequence: Synthetic oligonucleotide
  Sense strand starting at position 2148 of SEQ ID NO: 1884321
ggaacuagauaugaagaga

SEQ ID NO: 2256899 - RNA, 19 nt, Artificial Sequence
  Description of Artificial Sequence: Synthetic oligonucleotide
  Antisense strand to SEQ ID NO: 2256898
ucucuucauaucuaguucc

SEQ ID NO: 2256900 - RNA, 19 nt, Artificial Sequence
  Description of Artificial Sequence: Synthetic oligonucleotide
  Sense strand starting at position 2239 of SEQ ID NO: 1884321
cgguuugucaaggaacuga

SEQ ID NO: 2256901 - RNA, 19 nt, Artificial Sequence
  Description of Artificial Sequence: Synthetic oligonucleotide
  Antisense strand to SEQ ID NO: 2256900
ucaguuccuugacaaaccg

SEQ ID NO: 2256902 - RNA, 19 nt, Artificial Sequence
  Description of Artificial Sequence: Synthetic oligonucleotide
  Sense strand starting at position 2282 of SEQ ID NO: 1884321
auagaaugauuacccguua

SEQ ID NO: 2256903 - RNA, 19 nt, Artificial Sequence
  Description of Artificial Sequence: Synthetic oligonucleotide
  Antisense strand to SEQ ID NO: 2256902
uaacggguaaucauucuau

SEQ ID NO: 2256904 - RNA, 19 nt, Artificial Sequence
  Description of Artificial Sequence: Synthetic oligonucleotide
  Sense strand starting at position 2287 of SEQ ID NO: 1884321
augauuacccguuagaacu

SEQ ID NO: 2256905 - RNA, 19 nt, Artificial Sequence
  Description of Artificial Sequence: Synthetic oligonucleotide
  Antisense strand to SEQ ID NO: 2256904
aguucuaacggguaaucau

SEQ ID NO: 2256906 - RNA, 19 nt, Artificial Sequence
  Description of Artificial Sequence: Synthetic oligonucleotide
  Sense strand starting at position 2293 of SEQ ID NO: 1884321
acccguuagaacugagaga

SEQ ID NO: 2256907 - RNA, 19 nt, Artificial Sequence
  Description of Artificial Sequence: Synthetic oligonucleotide
  Antisense strand to SEQ ID NO: 2256906
ucucucaguucuaacgggu

SEQ ID NO: 2256908 - RNA, 19 nt, Artificial Sequence
  Description of Artificial Sequence: Synthetic oligonucleotide
  Sense strand starting at position 2332 of SEQ ID NO: 1884321
auggaaugauuauccguua

SEQ ID NO: 2256909 - RNA, 19 nt, Artificial Sequence
  Description of Artificial Sequence: Synthetic oligonucleotide
  Antisense strand to SEQ ID NO: 2256908
uaacggauaaucauuccau

SEQ ID NO: 2256910 - RNA, 19 nt, Artificial Sequence
  Description of Artificial Sequence: Synthetic oligonucleotide
  Sense strand starting at position 2335 of SEQ ID NO: 1884321
gaaugauuauccguuaguu

SEQ ID NO: 2256911 - RNA, 19 nt, Artificial Sequence
  Description of Artificial Sequence: Synthetic oligonucleotide
  Antisense strand to SEQ ID NO: 2256910
aacuaacggauaaucauuc

SEQ ID NO: 2256912 - RNA, 19 nt, Artificial Sequence
  Description of Artificial Sequence: Synthetic oligonucleotide
  Sense strand starting at position 2337 of SEQ ID NO: 1884321
augauuauccguuaguuaa

SEQ ID NO: 2256913 - RNA, 19 nt, Artificial Sequence
  Description of Artificial Sequence: Synthetic oligonucleotide
  Antisense strand to SEQ ID NO: 2256912
uuaacuaacggauaaucau

SEQ ID NO: 2256914 - RNA, 19 nt, Artificial Sequence
  Description of Artificial Sequence: Synthetic oligonucleotide
  Sense strand starting at position 2461 of SEQ ID NO: 1884321
ggagauuuaucugaagacg

SEQ ID NO: 2256915 - RNA, 19 nt, Artificial Sequence
  Description of Artificial Sequence: Synthetic oligonucleotide
  Antisense strand to SEQ ID NO: 2256914
cgucuucagauaaaucucc

SEQ ID NO: 2256916 - RNA, 19 nt, Artificial Sequence
  Description of Artificial Sequence: Synthetic oligonucleotide
  Sense strand starting at position 2521 of SEQ ID NO: 1884321
gcaauaauccuaugguaga

SEQ ID NO: 2256917 - RNA, 19 nt, Artificial Sequence
  Description of Artificial Sequence: Synthetic oligonucleotide
  Antisense strand to SEQ ID NO: 2256916
ucuaccauaggauuauugc

SEQ ID NO: 2256918 - RNA, 19 nt, Artificial Sequence
  Description of Artificial Sequence: Synthetic oligonucleotide
  Sense strand starting at position 2528 of SEQ ID NO: 1884321
uccuaugguagagguauua

SEQ ID NO: 2256919 - RNA, 19 nt, Artificial Sequence
  Description of Artificial Sequence: Synthetic oligonucleotide
  Antisense strand to SEQ ID NO: 2256918
uaauaccucuaccauagga

SEQ ID NO: 2256920 - RNA, 19 nt, Artificial Sequence
  Description of Artificial Sequence: Synthetic oligonucleotide
  Sense strand starting at position 2567 of SEQ ID NO: 1884321
acauuaauugcucaagguc

SEQ ID NO: 2256921 - RNA, 19 nt, Artificial Sequence
  Description of Artificial Sequence: Synthetic oligonucleotide
  Antisense strand to SEQ ID NO: 2256920
gaccuugagcaauuaaugu

SEQ ID NO: 2256922 - RNA, 19 nt, Artificial Sequence
  Description of Artificial Sequence: Synthetic oligonucleotide
  Sense strand starting at position 2624 of SEQ ID NO: 1884321
ggcauucuggcucacaagu

SEQ ID NO: 2256923 - RNA, 19 nt, Artificial Sequence
  Description of Artificial Sequence: Synthetic oligonucleotide
  Antisense strand to SEQ ID NO: 2256922
acuugugagccagaaugcc

SEQ ID NO: 2256924 - RNA, 19 nt, Artificial Sequence
  Description of Artificial Sequence: Synthetic oligonucleotide
  Sense strand starting at position 2637 of SEQ ID NO: 1884321
acaaguccaugcuuugaaa

SEQ ID NO: 2256925 - RNA, 19 nt, Artificial Sequence
  Description of Artificial Sequence: Synthetic oligonucleotide
  Antisense strand to SEQ ID NO: 2256924
uuucaaagcauggacuugu

SEQ ID NO: 2256926 - RNA, 19 nt, Artificial Sequence
  Description of Artificial Sequence: Synthetic oligonucleotide
  Sense strand starting at position 2742 of SEQ ID NO: 1884321
cagucagguguuggaacaa

SEQ ID NO: 2256927 - RNA, 19 nt, Artificial Sequence
  Description of Artificial Sequence: Synthetic oligonucleotide
  Antisense strand to SEQ ID NO: 2256926
uuguuccaacaccugacug

SEQ ID NO: 2256928 - RNA, 19 nt, Artificial Sequence
  Description of Artificial Sequence: Synthetic oligonucleotide
  Sense strand starting at position 2787 of SEQ ID NO: 1884321
ugauuacucugacuuguca

SEQ ID NO: 2256929 - RNA, 19 nt, Artificial Sequence
  Description of Artificial Sequence: Synthetic oligonucleotide
  Antisense strand to SEQ ID NO: 2256928
ugacaagucagaguaauca

SEQ ID NO: 2256930 - RNA, 19 nt, Artificial Sequence
  Description of Artificial Sequence: Synthetic oligonucleotide
  Sense strand starting at position 2795 of SEQ ID NO: 1884321
cugacuugucaggguccaa

SEQ ID NO: 2256931 - RNA, 19 nt, Artificial Sequence
  Description of Artificial Sequence: Synthetic oligonucleotide
  Antisense strand to SEQ ID NO: 2256930
uuggacccugacaagucag

SEQ ID NO: 2256932 - RNA, 19 nt, Artificial Sequence
  Description of Artificial Sequence: Synthetic oligonucleotide
  Sense strand starting at position 2817 of SEQ ID NO: 1884321
gaaguaaggccuuaucuga

SEQ ID NO: 2256933 - RNA, 19 nt, Artificial Sequence
  Description of Artificial Sequence: Synthetic oligonucleotide
  Antisense strand to SEQ ID NO: 2256932
ucagauaaggccuuacuuc

SEQ ID NO: 2256934 - RNA, 19 nt, Artificial Sequence
  Description of Artificial Sequence: Synthetic oligonucleotide
  Sense strand starting at position 2837 of SEQ ID NO: 1884321
aggacaaugugagaauuua

SEQ ID NO: 2256935 - RNA, 19 nt, Artificial Sequence
  Description of Artificial Sequence: Synthetic oligonucleotide
  Antisense strand to SEQ ID NO: 2256934
uaaauucucacauuguccu

SEQ ID NO: 2256936 - RNA, 19 nt, Artificial Sequence
  Description of Artificial Sequence: Synthetic oligonucleotide
  Sense strand starting at position 2899 of SEQ ID NO: 1884321
ggugcugauccacaaccuu

SEQ ID NO: 2256937 - RNA, 19 nt, Artificial Sequence
  Description of Artificial Sequence: Synthetic oligonucleotide
  Antisense strand to SEQ ID NO: 2256936
aagguuguggaucagcacc

SEQ ID NO: 2256938 - RNA, 19 nt, Artificial Sequence
  Description of Artificial Sequence: Synthetic oligonucleotide
  Sense strand starting at position 3061 of SEQ ID NO: 1884321
cucauaagucauggagaca

SEQ ID NO: 2256939 - RNA, 19 nt, Artificial Sequence
  Description of Artificial Sequence: Synthetic oligonucleotide
  Antisense strand to SEQ ID NO: 2256938
ugucuccaugacuuaugag

SEQ ID NO: 2256940 - RNA, 19 nt, Artificial Sequence
  Description of Artificial Sequence: Synthetic oligonucleotide
  Sense strand starting at position 3148 of SEQ ID NO: 1884321
cccugagggcuaugagaag

SEQ ID NO: 2256941 - RNA, 19 nt, Artificial Sequence
  Description of Artificial Sequence: Synthetic oligonucleotide
  Antisense strand to SEQ ID NO: 2256940
cuucucauagcccucaggg

SEQ ID NO: 2256942 - RNA, 19 nt, Artificial Sequence
  Description of Artificial Sequence: Synthetic oligonucleotide
  Sense strand starting at position 3285 of SEQ ID NO: 1884321
augaaaugaucccagaaua

SEQ ID NO: 2256943 - RNA, 19 nt, Artificial Sequence
  Description of Artificial Sequence: Synthetic oligonucleotide
  Antisense strand to SEQ ID NO: 2256942
uauucugggaucauuucau

SEQ ID NO: 2256944 - RNA, 19 nt, Artificial Sequence
  Description of Artificial Sequence: Synthetic oligonucleotide
  Sense strand starting at position 374 of SEQ ID NO: 1884323
agguaagcaauccagaagu

SEQ ID NO: 2256945 - RNA, 19 nt, Artificial Sequence
  Description of Artificial Sequence: Synthetic oligonucleotide
  Antisense strand to SEQ ID NO: 2256944
acuucuggauugcuuaccu

SEQ ID NO: 2256946 - RNA, 19 nt, Artificial Sequence
  Description of Artificial Sequence: Synthetic oligonucleotide
  Sense strand starting at position 376 of SEQ ID NO: 1884323
guaagcaauccagaaguaa

SEQ ID NO: 2256947 - RNA, 19 nt, Artificial Sequence
  Description of Artificial Sequence: Synthetic oligonucleotide
  Antisense strand to SEQ ID NO: 2256946
uuacuucuggauugcuuac

SEQ ID NO: 2256948 - RNA, 19 nt, Artificial Sequence
  Description of Artificial Sequence: Synthetic oligonucleotide
  Sense strand starting at position 478 of SEQ ID NO: 1884323
gcugcauuucugcagucau

SEQ ID NO: 2256949 - RNA, 19 nt, Artificial Sequence
  Description of Artificial Sequence: Synthetic oligonucleotide
  Antisense strand to SEQ ID NO: 2256948
augacugcagaaaugcagc

SEQ ID NO: 2256950 - RNA, 19 nt, Artificial Sequence
  Description of Artificial Sequence: Synthetic oligonucleotide
  Sense strand starting at position 843 of SEQ ID NO: 1884323
aagugaguugugcaacuca

SEQ ID NO: 2256951 - RNA, 19 nt, Artificial Sequence
  Description of Artificial Sequence: Synthetic oligonucleotide
  Antisense strand to SEQ ID NO: 2256950
ugaguugcacaacucacuu

SEQ ID NO: 2256952 - RNA, 19 nt, Artificial Sequence
  Description of Artificial Sequence: Synthetic oligonucleotide
  Sense strand starting at position 967 of SEQ ID NO: 1884323
guuggugaucgugcuguuu

SEQ ID NO: 2256953 - RNA, 19 nt, Artificial Sequence
  Description of Artificial Sequence: Synthetic oligonucleotide
  Antisense strand to SEQ ID NO: 2256952
aaacagcacgaucaccaac

SEQ ID NO: 2256954 - RNA, 19 nt, Artificial Sequence
  Description of Artificial Sequence: Synthetic oligonucleotide
  Sense strand starting at position 1023 of SEQ ID NO: 1884323
gugcaagaaggcuaugaca

SEQ ID NO: 2256955 - RNA, 19 nt, Artificial Sequence
  Description of Artificial Sequence: Synthetic oligonucleotide
  Antisense strand to SEQ ID NO: 2256954
ugucauagccuucuugcac

SEQ ID NO: 2256956 - RNA, 19 nt, Artificial Sequence
  Description of Artificial Sequence: Synthetic oligonucleotide
  Sense strand starting at position 1025 of SEQ ID NO: 1884323
gcaagaaggcuaugacaug

SEQ ID NO: 2256957 - RNA, 19 nt, Artificial Sequence
  Description of Artificial Sequence: Synthetic oligonucleotide
  Antisense strand to SEQ ID NO: 2256956
caugucauagccuucuugc

SEQ ID NO: 2256958 - RNA, 19 nt, Artificial Sequence
  Description of Artificial Sequence: Synthetic oligonucleotide
  Sense strand starting at position 1268 of SEQ ID NO: 1884323
auccuccagcuuuaguaua

SEQ ID NO: 2256959 - RNA, 19 nt, Artificial Sequence
  Description of Artificial Sequence: Synthetic oligonucleotide
  Antisense strand to SEQ ID NO: 2256958
uauacuaaagcuggaggau

SEQ ID NO: 2256960 - RNA, 19 nt, Artificial Sequence
  Description of Artificial Sequence: Synthetic oligonucleotide
  Sense strand starting at position 1273 of SEQ ID NO: 1884323
ccagcuuuaguauaaagaa

SEQ ID NO: 2256961 - RNA, 19 nt, Artificial Sequence
  Description of Artificial Sequence: Synthetic oligonucleotide
  Antisense strand to SEQ ID NO: 2256960
uucuuuauacuaaagcugg

SEQ ID NO: 2256962 - RNA, 19 nt, Artificial Sequence
  Description of Artificial Sequence: Synthetic oligonucleotide
  Sense strand starting at position 1314 of SEQ ID NO: 1884323
ccaaauggccuguauuagu

SEQ ID NO: 2256963 - RNA, 19 nt, Artificial Sequence
  Description of Artificial Sequence: Synthetic oligonucleotide
  Antisense strand to SEQ ID NO: 2256962
acuaauacaggccauuugg

SEQ ID NO: 2256964 - RNA, 19 nt, Artificial Sequence
  Description of Artificial Sequence: Synthetic oligonucleotide
  Sense strand starting at position 1512 of SEQ ID NO: 1884323
aaagguguaucucuuuaag

SEQ ID NO: 2256965 - RNA, 19 nt, Artificial Sequence
  Description of Artificial Sequence: Synthetic oligonucleotide
  Antisense strand to SEQ ID NO: 2256964
cuuaaagagauacaccuuu

SEQ ID NO: 2256966 - RNA, 19 nt, Artificial Sequence
  Description of Artificial Sequence: Synthetic oligonucleotide
  Sense strand starting at position 1514 of SEQ ID NO: 1884323
agguguaucucuuuaagaa

SEQ ID NO: 2256967 - RNA, 19 nt, Artificial Sequence
  Description of Artificial Sequence: Synthetic oligonucleotide
  Antisense strand to SEQ ID NO: 2256966
uucuuaaagagauacaccu

SEQ ID NO: 2256968 - RNA, 19 nt, Artificial Sequence
  Description of Artificial Sequence: Synthetic oligonucleotide
  Sense strand starting at position 1515 of SEQ ID NO: 1884323
gguguaucucuuuaagaaa

SEQ ID NO: 2256969 - RNA, 19 nt, Artificial Sequence
  Description of Artificial Sequence: Synthetic oligonucleotide
  Antisense strand to SEQ ID NO: 2256968
uuucuuaaagagauacacc

SEQ ID NO: 2256970 - RNA, 19 nt, Artificial Sequence
  Description of Artificial Sequence: Synthetic oligonucleotide
  Sense strand starting at position 1592 of SEQ ID NO: 1884323
aacagagucguguaguuaa

SEQ ID NO: 2256971 - RNA, 19 nt, Artificial Sequence
  Description of Artificial Sequence: Synthetic oligonucleotide
  Antisense strand to SEQ ID NO: 2256970
uuaacuacacgacucuguu

SEQ ID NO: 2256972 - RNA, 19 nt, Artificial Sequence
  Description of Artificial Sequence: Synthetic oligonucleotide
  Sense strand starting at position 1652 of SEQ ID NO: 1884323
guguccuaauacuccauaa

SEQ ID NO: 2256973 - RNA, 19 nt, Artificial Sequence
  Description of Artificial Sequence: Synthetic oligonucleotide
  Antisense strand to SEQ ID NO: 2256972
uuauggaguauuaggacac

SEQ ID NO: 2256974 - RNA, 19 nt, Artificial Sequence
  Description of Artificial Sequence: Synthetic oligonucleotide
  Sense strand starting at position 1693 of SEQ ID NO: 1884323
uauauagaggcagguauua

SEQ ID NO: 2256975 - RNA, 19 nt, Artificial Sequence
  Description of Artificial Sequence: Synthetic oligonucleotide
  Antisense strand to SEQ ID NO: 2256974
uaauaccugccucuauaua

SEQ ID NO: 2256976 - RNA, 19 nt, Artificial Sequence
  Description of Artificial Sequence: Synthetic oligonucleotide
  Sense strand starting at position 1734 of SEQ ID NO: 1884323
auuaguugacaacgugaga

SEQ ID NO: 2256977 - RNA, 19 nt, Artificial Sequence
  Description of Artificial Sequence: Synthetic oligonucleotide
  Antisense strand to SEQ ID NO: 2256976
ucucacguugucaacuaau

SEQ ID NO: 2256978 - RNA, 19 nt, Artificial Sequence
  Description of Artificial Sequence: Synthetic oligonucleotide
  Sense strand starting at position 1737 of SEQ ID NO: 1884323
aguugacaacgugagagau

SEQ ID NO: 2256979 - RNA, 19 nt, Artificial Sequence
  Description of Artificial Sequence: Synthetic oligonucleotide
  Antisense strand to SEQ ID NO: 2256978
aucucucacguugucaacu

SEQ ID NO: 2256980 - RNA, 19 nt, Artificial Sequence
  Description of Artificial Sequence: Synthetic oligonucleotide
  Sense strand starting at position 1992 of SEQ ID NO: 1884323
uucuuagaacuguauaugu

SEQ ID NO: 2256981 - RNA, 19 nt, Artificial Sequence
  Description of Artificial Sequence: Synthetic oligonucleotide
  Antisense strand to SEQ ID NO: 2256980
acauauacaguucuaagaa

SEQ ID NO: 2256982 - RNA, 19 nt, Artificial Sequence
  Description of Artificial Sequence: Synthetic oligonucleotide
  Sense strand starting at position 1997 of SEQ ID NO: 1884323
agaacuguauauguacaga

SEQ ID NO: 2256983 - RNA, 19 nt, Artificial Sequence
  Description of Artificial Sequence: Synthetic oligonucleotide
  Antisense strand to SEQ ID NO: 2256982
ucuguacauauacaguucu

SEQ ID NO: 2256984 - RNA, 19 nt, Artificial Sequence
  Description of Artificial Sequence: Synthetic oligonucleotide
  Sense strand starting at position 2198 of SEQ ID NO: 1884323
uaaagaauuccaggugcug

SEQ ID NO: 2256985 - RNA, 19 nt, Artificial Sequence
  Description of Artificial Sequence: Synthetic oligonucleotide
  Antisense strand to SEQ ID NO: 2256984
cagcaccuggaauucuuua

SEQ ID NO: 2256986 - RNA, 19 nt, Artificial Sequence
  Description of Artificial Sequence: Synthetic oligonucleotide
  Sense strand starting at position 2290 of SEQ ID NO: 1884323
cuucucugguuaucucaga

SEQ ID NO: 2256987 - RNA, 19 nt, Artificial Sequence
  Description of Artificial Sequence: Synthetic oligonucleotide
  Antisense strand to SEQ ID NO: 2256986
ucugagauaaccagagaag

SEQ ID NO: 2256988 - RNA, 19 nt, Artificial Sequence
  Description of Artificial Sequence: Synthetic oligonucleotide
  Sense strand starting at position 2291 of SEQ ID NO: 1884323
uucucugguuaucucagau

SEQ ID NO: 2256989 - RNA, 19 nt, Artificial Sequence
  Description of Artificial Sequence: Synthetic oligonucleotide
  Antisense strand to SEQ ID NO: 2256988
aucugagauaaccagagaa

SEQ ID NO: 2256990 - RNA, 19 nt, Artificial Sequence
  Description of Artificial Sequence: Synthetic oligonucleotide
  Sense strand starting at position 2486 of SEQ ID NO: 1884323
gguauuuauacuggcgauu

SEQ ID NO: 2256991 - RNA, 19 nt, Artificial Sequence
  Description of Artificial Sequence: Synthetic oligonucleotide
  Antisense strand to SEQ ID NO: 2256990
aaucgccaguauaaauacc

SEQ ID NO: 2256992 - RNA, 19 nt, Artificial Sequence
  Description of Artificial Sequence: Synthetic oligonucleotide
  Sense strand starting at position 2498 of SEQ ID NO: 1884323
ggcgauugaacuuaguucu

SEQ ID NO: 2256993 - RNA, 19 nt, Artificial Sequence
  Description of Artificial Sequence: Synthetic oligonucleotide
  Antisense strand to SEQ ID NO: 2256992
agaacuaaguucaaucgcc

SEQ ID NO: 2256994 - RNA, 19 nt, Artificial Sequence
  Description of Artificial Sequence: Synthetic oligonucleotide
  Sense strand starting at position 2501 of SEQ ID NO: 1884323
gauugaacuuaguucugua

SEQ ID NO: 2256995 - RNA, 19 nt, Artificial Sequence
  Description of Artificial Sequence: Synthetic oligonucleotide
  Antisense strand to SEQ ID NO: 2256994
uacagaacuaaguucaauc

SEQ ID NO: 2256996 - RNA, 19 nt, Artificial Sequence
  Description of Artificial Sequence: Synthetic oligonucleotide
  Sense strand starting at position 2505 of SEQ ID NO: 1884323
gaacuuaguucuguaacug

SEQ ID NO: 2256997 - RNA, 19 nt, Artificial Sequence
  Description of Artificial Sequence: Synthetic oligonucleotide
  Antisense strand to SEQ ID NO: 2256996
caguuacagaacuaaguuc

SEQ ID NO: 2256998 - RNA, 19 nt, Artificial Sequence
  Description of Artificial Sequence: Synthetic oligonucleotide
  Sense strand starting at position 2541 of SEQ ID NO: 1884323
agaccaucucacgaguuau

SEQ ID NO: 2256999 - RNA, 19 nt, Artificial Sequence
  Description of Artificial Sequence: Synthetic oligonucleotide
  Antisense strand to SEQ ID NO: 2256998
auaacucgugagauggucu

SEQ ID NO: 2257000 - RNA, 19 nt, Artificial Sequence
  Description of Artificial Sequence: Synthetic oligonucleotide
  Sense strand starting at position 2673 of SEQ ID NO: 1884323
cuuauacugugacuacuau

SEQ ID NO: 2257001 - RNA, 19 nt, Artificial Sequence
  Description of Artificial Sequence: Synthetic oligonucleotide
  Antisense strand to SEQ ID NO: 2257000
auaguagucacaguauaag

SEQ ID NO: 2257002 - RNA, 19 nt, Artificial Sequence
  Description of Artificial Sequence: Synthetic oligonucleotide
  Sense strand starting at position 2674 of SEQ ID NO: 1884323
uuauacugugacuacuauu

SEQ ID NO: 2257003 - RNA, 19 nt, Artificial Sequence
  Description of Artificial Sequence: Synthetic oligonucleotide
  Antisense strand to SEQ ID NO: 2257002
aauaguagucacaguauaa

SEQ ID NO: 2257004 - RNA, 19 nt, Artificial Sequence
  Description of Artificial Sequence: Synthetic oligonucleotide
  Sense strand starting at position 2680 of SEQ ID NO: 1884323
ugugacuacuauucgaaag

SEQ ID NO: 2257005 - RNA, 19 nt, Artificial Sequence
  Description of Artificial Sequence: Synthetic oligonucleotide
  Antisense strand to SEQ ID NO: 2257004
cuuucgaauaguagucaca

SEQ ID NO: 2257006 - RNA, 19 nt, Artificial Sequence
  Description of Artificial Sequence: Synthetic oligonucleotide
  Sense strand starting at position 2681 of SEQ ID NO: 1884323
gugacuacuauucgaaaga

SEQ ID NO: 2257007 - RNA, 19 nt, Artificial Sequence
  Description of Artificial Sequence: Synthetic oligonucleotide
  Antisense strand to SEQ ID NO: 2257006
ucuuucgaauaguagucac

SEQ ID NO: 2257008 - RNA, 19 nt, Artificial Sequence
  Description of Artificial Sequence: Synthetic oligonucleotide
  Sense strand starting at position 2701 of SEQ ID NO: 1884323
ucugaauagagcugggcaa

SEQ ID NO: 2257009 - RNA, 19 nt, Artificial Sequence
  Description of Artificial Sequence: Synthetic oligonucleotide
  Antisense strand to SEQ ID NO: 2257008
uugcccagcucuauucaga

SEQ ID NO: 2257010 - RNA, 19 nt, Artificial Sequence
  Description of Artificial Sequence: Synthetic oligonucleotide
  Sense strand starting at position 2702 of SEQ ID NO: 1884323
cugaauagagcugggcaaa

SEQ ID NO: 2257011 - RNA, 19 nt, Artificial Sequence
  Description of Artificial Sequence: Synthetic oligonucleotide
  Antisense strand to SEQ ID NO: 2257010
uuugcccagcucuauucag

SEQ ID NO: 2257012 - RNA, 19 nt, Artificial Sequence
  Description of Artificial Sequence: Synthetic oligonucleotide
  Sense strand starting at position 3350 of SEQ ID NO: 1884323
uucugugacaucugagaga

SEQ ID NO: 2257013 - RNA, 19 nt, Artificial Sequence
  Description of Artificial Sequence: Synthetic oligonucleotide
  Antisense strand to SEQ ID NO: 2257012
ucucucagaugucacagaa

SEQ ID NO: 2257014 - RNA, 19 nt, Artificial Sequence
  Description of Artificial Sequence: Synthetic oligonucleotide
  Sense strand starting at position 3454 of SEQ ID NO: 1884323
agugaucagccucaaaucu

SEQ ID NO: 2257015 - RNA, 19 nt, Artificial Sequence
  Description of Artificial Sequence: Synthetic oligonucleotide
  Antisense strand to SEQ ID NO: 2257014
agauuugaggcugaucacu

SEQ ID NO: 2257016 - RNA, 19 nt, Artificial Sequence
  Description of Artificial Sequence: Synthetic oligonucleotide
  Sense strand starting at position 3483 of SEQ ID NO: 1884323
guaaauguuggaggcugaa

SEQ ID NO: 2257017 - RNA, 19 nt, Artificial Sequence
  Description of Artificial Sequence: Synthetic oligonucleotide
  Antisense strand to SEQ ID NO: 2257016
uucagccuccaacauuuac

SEQ ID NO: 2257018 - RNA, 19 nt, Artificial Sequence
  Description of Artificial Sequence: Synthetic oligonucleotide
  Sense strand starting at position 3576 of SEQ ID NO: 1884323
uuuguacuugucuacaauu

SEQ ID NO: 2257019 - RNA, 19 nt, Artificial Sequence
  Description of Artificial Sequence: Synthetic oligonucleotide
  Antisense strand to SEQ ID NO: 2257018
aauuguagacaaguacaaa

SEQ ID NO: 2257020 - RNA, 19 nt, Artificial Sequence
  Description of Artificial Sequence: Synthetic oligonucleotide
  Sense strand starting at position 3651 of SEQ ID NO: 1884323
ggacgaguuguagaugucu

SEQ ID NO: 2257021 - RNA, 19 nt, Artificial Sequence
  Description of Artificial Sequence: Synthetic oligonucleotide
  Antisense strand to SEQ ID NO: 2257020
agacaucuacaacucgucc

SEQ ID NO: 2257022 - RNA, 19 nt, Artificial Sequence
  Description of Artificial Sequence: Synthetic oligonucleotide
  Sense strand starting at position 3829 of SEQ ID NO: 1884323
cuauguggaucugcagaaa

SEQ ID NO: 2257023 - RNA, 19 nt, Artificial Sequence
  Description of Artificial Sequence: Synthetic oligonucleotide
  Antisense strand to SEQ ID NO: 2257022
uuucugcagauccacauag

SEQ ID NO: 2257024 - RNA, 19 nt, Artificial Sequence
  Description of Artificial Sequence: Synthetic oligonucleotide
  Sense strand starting at position 123 of SEQ ID NO: 1884322
auccuccagcuuuaguaua

SEQ ID NO: 2257025 - RNA, 19 nt, Artificial Sequence
  Description of Artificial Sequence: Synthetic oligonucleotide
  Antisense strand to SEQ ID NO: 2257024
uauacuaaagcuggaggau

SEQ ID NO: 2257026 - RNA, 19 nt, Artificial Sequence
  Description of Artificial Sequence: Synthetic oligonucleotide
  Sense strand starting at position 128 of SEQ ID NO: 1884322
ccagcuuuaguauaaagaa

SEQ ID NO: 2257027 - RNA, 19 nt, Artificial Sequence
  Description of Artificial Sequence: Synthetic oligonucleotide
  Antisense strand to SEQ ID NO: 2257026
uucuuuauacuaaagcugg

SEQ ID NO: 2257028 - RNA, 19 nt, Artificial Sequence
  Description of Artificial Sequence: Synthetic oligonucleotide
  Sense strand starting at position 367 of SEQ ID NO: 1884322
aaagguguaucucuuuaag

SEQ ID NO: 2257029 - RNA, 19 nt, Artificial Sequence
  Description of Artificial Sequence: Synthetic oligonucleotide
  Antisense strand to SEQ ID NO: 2257028
cuuaaagagauacaccuuu

SEQ ID NO: 2257030 - RNA, 19 nt, Artificial Sequence
  Description of Artificial Sequence: Synthetic oligonucleotide
  Sense strand starting at position 369 of SEQ ID NO: 1884322
agguguaucucuuuaagaa

SEQ ID NO: 2257031 - RNA, 19 nt, Artificial Sequence
  Description of Artificial Sequence: Synthetic oligonucleotide
  Antisense strand to SEQ ID NO: 2257030
uucuuaaagagauacaccu

SEQ ID NO: 2257032 - RNA, 19 nt, Artificial Sequence
  Description of Artificial Sequence: Synthetic oligonucleotide
  Sense strand starting at position 370 of SEQ ID NO: 1884322
gguguaucucuuuaagaaa

SEQ ID NO: 2257033 - RNA, 19 nt, Artificial Sequence
  Description of Artificial Sequence: Synthetic oligonucleotide
  Antisense strand to SEQ ID NO: 2257032
uuucuuaaagagauacacc

SEQ ID NO: 2257034 - RNA, 19 nt, Artificial Sequence
  Description of Artificial Sequence: Synthetic oligonucleotide
  Sense strand starting at position 548 of SEQ ID NO: 1884322
uauauagaggcagguauua

SEQ ID NO: 2257035 - RNA, 19 nt, Artificial Sequence
  Description of Artificial Sequence: Synthetic oligonucleotide
  Antisense strand to SEQ ID NO: 2257034
uaauaccugccucuauaua

SEQ ID NO: 2257036 - RNA, 19 nt, Artificial Sequence
  Description of Artificial Sequence: Synthetic oligonucleotide
  Sense strand starting at position 589 of SEQ ID NO: 1884322
auuaguugacaacgugaga

SEQ ID NO: 2257037 - RNA, 19 nt, Artificial Sequence
  Description of Artificial Sequence: Synthetic oligonucleotide
  Antisense strand to SEQ ID NO: 2257036
ucucacguugucaacuaau

SEQ ID NO: 2257038 - RNA, 19 nt, Artificial Sequence
  Description of Artificial Sequence: Synthetic oligonucleotide
  Sense strand starting at position 592 of SEQ ID NO: 1884322
aguugacaacgugagagau

SEQ ID NO: 2257039 - RNA, 19 nt, Artificial Sequence
  Description of Artificial Sequence: Synthetic oligonucleotide
  Antisense strand to SEQ ID NO: 2257038
aucucucacguugucaacu

SEQ ID NO: 2257040 - RNA, 19 nt, Artificial Sequence
  Description of Artificial Sequence: Synthetic oligonucleotide
  Sense strand starting at position 847 of SEQ ID NO: 1884322
uucuuagaacuguauaugu

SEQ ID NO: 2257041 - RNA, 19 nt, Artificial Sequence
  Description of Artificial Sequence: Synthetic oligonucleotide
  Antisense strand to SEQ ID NO: 2257040
acauauacaguucuaagaa

SEQ ID NO: 2257042 - RNA, 19 nt, Artificial Sequence
  Description of Artificial Sequence: Synthetic oligonucleotide
  Sense strand starting at position 852 of SEQ ID NO: 1884322
agaacuguauauguacaga

SEQ ID NO: 2257043 - RNA, 19 nt, Artificial Sequence
  Description of Artificial Sequence: Synthetic oligonucleotide
  Antisense strand to SEQ ID NO: 2257042
ucuguacauauacaguucu

SEQ ID NO: 2257044 - RNA, 19 nt, Artificial Sequence
  Description of Artificial Sequence: Synthetic oligonucleotide
  Sense strand starting at position 1053 of SEQ ID NO: 1884322
uaaagaauuccaggugcug

SEQ ID NO: 2257045 - RNA, 19 nt, Artificial Sequence
  Description of Artificial Sequence: Synthetic oligonucleotide
  Antisense strand to SEQ ID NO: 2257044
cagcaccuggaauucuuua

SEQ ID NO: 2257046 - RNA, 19 nt, Artificial Sequence
  Description of Artificial Sequence: Synthetic oligonucleotide
  Sense strand starting at position 1341 of SEQ ID NO: 1884322
gguauuuauacuggcgauu

SEQ ID NO: 2257047 - RNA, 19 nt, Artificial Sequence
  Description of Artificial Sequence: Synthetic oligonucleotide
  Antisense strand to SEQ ID NO: 2257046
aaucgccaguauaaauacc

SEQ ID NO: 2257048 - RNA, 19 nt, Artificial Sequence
  Description of Artificial Sequence: Synthetic oligonucleotide
  Sense strand starting at position 1396 of SEQ ID NO: 1884322
agaccaucucacgaguuau

SEQ ID NO: 2257049 - RNA, 19 nt, Artificial Sequence
  Description of Artificial Sequence: Synthetic oligonucleotide
  Antisense strand to SEQ ID NO: 2257048
auaacucgugagauggucu

SEQ ID NO: 2257050 - RNA, 19 nt, Artificial Sequence
  Description of Artificial Sequence: Synthetic oligonucleotide
  Sense strand starting at position 1528 of SEQ ID NO: 1884322
cuuauacugugacuacuau

SEQ ID NO: 2257051 - RNA, 19 nt, Artificial Sequence
  Description of Artificial Sequence: Synthetic oligonucleotide
  Antisense strand to SEQ ID NO: 2257050
auaguagucacaguauaag

SEQ ID NO: 2257052 - RNA, 19 nt, Artificial Sequence
  Description of Artificial Sequence: Synthetic oligonucleotide
  Sense strand starting at position 1529 of SEQ ID NO: 1884322
uuauacugugacuacuauu

SEQ ID NO: 2257053 - RNA, 19 nt, Artificial Sequence
  Description of Artificial Sequence: Synthetic oligonucleotide
  Antisense strand to SEQ ID NO: 2257052
aauaguagucacaguauaa

SEQ ID NO: 2257054 - RNA, 19 nt, Artificial Sequence
  Description of Artificial Sequence: Synthetic oligonucleotide
  Sense strand starting at position 1535 of SEQ ID NO: 1884322
ugugacuacuauucgaaag

SEQ ID NO: 2257055 - RNA, 19 nt, Artificial Sequence
  Description of Artificial Sequence: Synthetic oligonucleotide
  Antisense strand to SEQ ID NO: 2257054
cuuucgaauaguagucaca

SEQ ID NO: 2257056 - RNA, 19 nt, Artificial Sequence
  Description of Artificial Sequence: Synthetic oligonucleotide
  Sense strand starting at position 1536 of SEQ ID NO: 1884322
gugacuacuauucgaaaga

SEQ ID NO: 2257057 - RNA, 19 nt, Artificial Sequence
  Description of Artificial Sequence: Synthetic oligonucleotide
  Antisense strand to SEQ ID NO: 2257056
ucuuucgaauaguagucac

SEQ ID NO: 2257058 - RNA, 19 nt, Artificial Sequence
  Description of Artificial Sequence: Synthetic oligonucleotide
  Sense strand starting at position 1556 of SEQ ID NO: 1884322
ucugaauagagcugggcaa

SEQ ID NO: 2257059 - RNA, 19 nt, Artificial Sequence
  Description of Artificial Sequence: Synthetic oligonucleotide
  Antisense strand to SEQ ID NO: 2257058
uugcccagcucuauucaga

SEQ ID NO: 2257060 - RNA, 19 nt, Artificial Sequence
  Description of Artificial Sequence: Synthetic oligonucleotide
  Sense strand starting at position 1557 of SEQ ID NO: 1884322
cugaauagagcugggcaaa

SEQ ID NO: 2257061 - RNA, 19 nt, Artificial Sequence
  Description of Artificial Sequence: Synthetic oligonucleotide
  Antisense strand to SEQ ID NO: 2257060
uuugcccagcucuauucag

SEQ ID NO: 2257062 - RNA, 19 nt, Artificial Sequence
  Description of Artificial Sequence: Synthetic oligonucleotide
  Sense strand starting at position 2205 of SEQ ID NO: 1884322
uucugugacaucugagaga

SEQ ID NO: 2257063 - RNA, 19 nt, Artificial Sequence
  Description of Artificial Sequence: Synthetic oligonucleotide
  Antisense strand to SEQ ID NO: 2257062
ucucucagaugucacagaa

SEQ ID NO: 2257064 - RNA, 19 nt, Artificial Sequence
  Description of Artificial Sequence: Synthetic oligonucleotide
  Sense strand starting at position 2309 of SEQ ID NO: 1884322
agugaucagccucaaaucu

SEQ ID NO: 2257065 - RNA, 19 nt, Artificial Sequence
  Description of Artificial Sequence: Synthetic oligonucleotide
  Antisense strand to SEQ ID NO: 2257064
agauuugaggcugaucacu

SEQ ID NO: 2257066 - RNA, 19 nt, Artificial Sequence
  Description of Artificial Sequence: Synthetic oligonucleotide
  Sense strand starting at position 2684 of SEQ ID NO: 1884322
cuauguggaucugcagaaa

SEQ ID NO: 2257067 - RNA, 19 nt, Artificial Sequence
  Description of Artificial Sequence: Synthetic oligonucleotide
  Antisense strand to SEQ ID NO: 2257066
uuucugcagauccacauag

SEQ ID NO: 2257068 - RNA, 19 nt, Artificial Sequence
  Description of Artificial Sequence: Synthetic oligonucleotide
  Sense strand starting at position 2918 of SEQ ID NO: 1884322
gggaucaguguuuggaaca

SEQ ID NO: 2257069 - RNA, 19 nt, Artificial Sequence
  Description of Artificial Sequence: Synthetic oligonucleotide
  Antisense strand to SEQ ID NO: 2257068
uguuccaaacacugauccc

SEQ ID NO: 2257070 - RNA, 19 nt, Artificial Sequence
  Description of Artificial Sequence: Synthetic oligonucleotide
  Sense strand starting at position 2984 of SEQ ID NO: 1884322
caccgauacuccuuugaga

SEQ ID NO: 2257071 - RNA, 19 nt, Artificial Sequence
  Description of Artificial Sequence: Synthetic oligonucleotide
  Antisense strand to SEQ ID NO: 2257070
ucucaaaggaguaucggug

SEQ ID NO: 2257072 - RNA, 19 nt, Artificial Sequence
  Description of Artificial Sequence: Synthetic oligonucleotide
  Sense strand starting at position 2986 of SEQ ID NO: 1884322
ccgauacuccuuugagaua

SEQ ID NO: 2257073 - RNA, 19 nt, Artificial Sequence
  Description of Artificial Sequence: Synthetic oligonucleotide
  Antisense strand to SEQ ID NO: 2257072
uaucucaaaggaguaucgg

SEQ ID NO: 2257074 - RNA, 19 nt, Artificial Sequence
  Description of Artificial Sequence: Synthetic oligonucleotide
  Sense strand starting at position 3156 of SEQ ID NO: 1884322
cucugccauuuauuaguua

SEQ ID NO: 2257075 - RNA, 19 nt, Artificial Sequence
  Description of Artificial Sequence: Synthetic oligonucleotide
  Antisense strand to SEQ ID NO: 2257074
uaacuaauaaauggcagag

SEQ ID NO: 2257076 - RNA, 19 nt, Artificial Sequence
  Description of Artificial Sequence: Synthetic oligonucleotide
  Sense strand starting at position 3281 of SEQ ID NO: 1884322
cacguaaaguacucaauag

SEQ ID NO: 2257077 - RNA, 19 nt, Artificial Sequence
  Description of Artificial Sequence: Synthetic oligonucleotide
  Antisense strand to SEQ ID NO: 2257076
cuauugaguacuuuacgug

SEQ ID NO: 2257078 - RNA, 19 nt, Artificial Sequence
  Description of Artificial Sequence: Synthetic oligonucleotide
  Sense strand starting at position 3291 of SEQ ID NO: 1884322
acucaauaguggccagaau

SEQ ID NO: 2257079 - RNA, 19 nt, Artificial Sequence
  Description of Artificial Sequence: Synthetic oligonucleotide
  Antisense strand to SEQ ID NO: 2257078
auucuggccacuauugagu

SEQ ID NO: 2257080 - RNA, 19 nt, Artificial Sequence
  Description of Artificial Sequence: Synthetic oligonucleotide
  Sense strand starting at position 3408 of SEQ ID NO: 1884322
ugaauucucugagcaacuc

SEQ ID NO: 2257081 - RNA, 19 nt, Artificial Sequence
  Description of Artificial Sequence: Synthetic oligonucleotide
  Antisense strand to SEQ ID NO: 2257080
gaguugcucagagaauuca

SEQ ID NO: 2257082 - RNA, 19 nt, Artificial Sequence
  Description of Artificial Sequence: Synthetic oligonucleotide
  Sense strand starting at position 3445 of SEQ ID NO: 1884322
gugcuuaugcaacuuguuu

SEQ ID NO: 2257083 - RNA, 19 nt, Artificial Sequence
  Description of Artificial Sequence: Synthetic oligonucleotide
  Antisense strand to SEQ ID NO: 2257082
aaacaaguugcauaagcac

SEQ ID NO: 2257084 - RNA, 19 nt, Artificial Sequence
  Description of Artificial Sequence: Synthetic oligonucleotide
  Sense strand starting at position 3589 of SEQ ID NO: 1884322
agaacuagcuagcuuagaa

SEQ ID NO: 2257085 - RNA, 19 nt, Artificial Sequence
  Description of Artificial Sequence: Synthetic oligonucleotide
  Antisense strand to SEQ ID NO: 2257084
uucuaagcuagcuaguucu

SEQ ID NO: 2257086 - RNA, 19 nt, Artificial Sequence
  Description of Artificial Sequence: Synthetic oligonucleotide
  Sense strand starting at position 3698 of SEQ ID NO: 1884322
gucuuaguuauagauugua

SEQ ID NO: 2257087 - RNA, 19 nt, Artificial Sequence
  Description of Artificial Sequence: Synthetic oligonucleotide
  Antisense strand to SEQ ID NO: 2257086
uacaaucuauaacuaagac

SEQ ID NO: 2257088 - RNA, 19 nt, Artificial Sequence
  Description of Artificial Sequence: Synthetic oligonucleotide
  Sense strand starting at position 3731 of SEQ ID NO: 1884322
cagugaguacaguaucaua

SEQ ID NO: 2257089 - RNA, 19 nt, Artificial Sequence
  Description of Artificial Sequence: Synthetic oligonucleotide
  Antisense strand to SEQ ID NO: 2257088
uaugauacuguacucacug

SEQ ID NO: 2257090 - RNA, 19 nt, Artificial Sequence
  Description of Artificial Sequence: Synthetic oligonucleotide
  Sense strand starting at position 3739 of SEQ ID NO: 1884322
acaguaucauaucucuaga

SEQ ID NO: 2257091 - RNA, 19 nt, Artificial Sequence
  Description of Artificial Sequence: Synthetic oligonucleotide
  Antisense strand to SEQ ID NO: 2257090
ucuagagauaugauacugu

SEQ ID NO: 2257092 - RNA, 19 nt, Artificial Sequence
  Description of Artificial Sequence: Synthetic oligonucleotide
  Sense strand starting at position 3741 of SEQ ID NO: 1884322
aguaucauaucucuagagu

SEQ ID NO: 2257093 - RNA, 19 nt, Artificial Sequence
  Description of Artificial Sequence: Synthetic oligonucleotide
  Antisense strand to SEQ ID NO: 2257092
acucuagagauaugauacu

SEQ ID NO: 2257094 - RNA, 19 nt, Artificial Sequence
  Description of Artificial Sequence: Synthetic oligonucleotide
  Sense strand starting at position 3742 of SEQ ID NO: 1884322
guaucauaucucuagagua

SEQ ID NO: 2257095 - RNA, 19 nt, Artificial Sequence
  Description of Artificial Sequence: Synthetic oligonucleotide
  Antisense strand to SEQ ID NO: 2257094
uacucuagagauaugauac

SEQ ID NO: 2257096 - RNA, 19 nt, Artificial Sequence
  Description of Artificial Sequence: Synthetic oligonucleotide
  Sense strand starting at position 3754 of SEQ ID NO: 1884322
uagaguagccaguauucca

SEQ ID NO: 2257097 - RNA, 19 nt, Artificial Sequence
  Description of Artificial Sequence: Synthetic oligonucleotide
  Antisense strand to SEQ ID NO: 2257096
uggaauacuggcuacucua

SEQ ID NO: 2257098 - RNA, 19 nt, Artificial Sequence
  Description of Artificial Sequence: Synthetic oligonucleotide
  Sense strand starting at position 3831 of SEQ ID NO: 1884322
cuagauacagugugaggaa

SEQ ID NO: 2257099 - RNA, 19 nt, Artificial Sequence
  Description of Artificial Sequence: Synthetic oligonucleotide
  Antisense strand to SEQ ID NO: 2257098
uuccucacacuguaucuag

SEQ ID NO: 2257100 - RNA, 19 nt, Artificial Sequence
  Description of Artificial Sequence: Synthetic oligonucleotide
  Sense strand starting at position 3887 of SEQ ID NO: 1884322
aucagagcucucugaaaua

SEQ ID NO: 2257101 - RNA, 19 nt, Artificial Sequence
  Description of Artificial Sequence: Synthetic oligonucleotide
  Antisense strand to SEQ ID NO: 2257100
uauuucagagagcucugau

SEQ ID NO: 2257102 - RNA, 19 nt, Artificial Sequence
  Description of Artificial Sequence: Synthetic oligonucleotide
  Sense strand starting at position 3973 of SEQ ID NO: 1884322
ccacuuacauuguugagga

SEQ ID NO: 2257103 - RNA, 19 nt, Artificial Sequence
  Description of Artificial Sequence: Synthetic oligonucleotide
  Antisense strand to SEQ ID NO: 2257102
uccucaacaauguaagugg

SEQ ID NO: 2257104 - RNA, 19 nt, Artificial Sequence
  Description of Artificial Sequence: Synthetic oligonucleotide
  Sense strand starting at position 228 of SEQ ID NO: 1884324
acagcugaucuacagaagu

SEQ ID NO: 2257105 - RNA, 19 nt, Artificial Sequence
  Description of Artificial Sequence: Synthetic oligonucleotide
  Antisense strand to SEQ ID NO: 2257104
acuucuguagaucagcugu

SEQ ID NO: 2257106 - RNA, 19 nt, Artificial Sequence
  Description of Artificial Sequence: Synthetic oligonucleotide
  Sense strand starting at position 239 of SEQ ID NO: 1884324
acagaaguucuuuaaagca

SEQ ID NO: 2257107 - RNA, 19 nt, Artificial Sequence
  Description of Artificial Sequence: Synthetic oligonucleotide
  Antisense strand to SEQ ID NO: 2257106
ugcuuuaaagaacuucugu

SEQ ID NO: 2257108 - RNA, 19 nt, Artificial Sequence
  Description of Artificial Sequence: Synthetic oligonucleotide
  Sense strand starting at position 284 of SEQ ID NO: 1884324
acuaccaucucauuagagu

SEQ ID NO: 2257109 - RNA, 19 nt, Artificial Sequence
  Description of Artificial Sequence: Synthetic oligonucleotide
  Antisense strand to SEQ ID NO: 2257108
acucuaaugagaugguagu

SEQ ID NO: 2257110 - RNA, 19 nt, Artificial Sequence
  Description of Artificial Sequence: Synthetic oligonucleotide
  Sense strand starting at position 285 of SEQ ID NO: 1884324
cuaccaucucauuagagug

SEQ ID NO: 2257111 - RNA, 19 nt, Artificial Sequence
  Description of Artificial Sequence: Synthetic oligonucleotide
  Antisense strand to SEQ ID NO: 2257110
cacucuaaugagaugguag

SEQ ID NO: 2257112 - RNA, 19 nt, Artificial Sequence
  Description of Artificial Sequence: Synthetic oligonucleotide
  Sense strand starting at position 324 of SEQ ID NO: 1884324
caaggaaucuuugcaggag

SEQ ID NO: 2257113 - RNA, 19 nt, Artificial Sequence
  Description of Artificial Sequence: Synthetic oligonucleotide
  Antisense strand to SEQ ID NO: 2257112
cuccugcaaagauuccuug

SEQ ID NO: 2257114 - RNA, 19 nt, Artificial Sequence
  Description of Artificial Sequence: Synthetic oligonucleotide
  Sense strand starting at position 327 of SEQ ID NO: 1884324
ggaaucuuugcaggaggaa

SEQ ID NO: 2257115 - RNA, 19 nt, Artificial Sequence
  Description of Artificial Sequence: Synthetic oligonucleotide
  Antisense strand to SEQ ID NO: 2257114
uuccuccugcaaagauucc

SEQ ID NO: 2257116 - RNA, 19 nt, Artificial Sequence
  Description of Artificial Sequence: Synthetic oligonucleotide
  Sense strand starting at position 330 of SEQ ID NO: 1884324
aucuuugcaggaggaauaa

SEQ ID NO: 2257117 - RNA, 19 nt, Artificial Sequence
  Description of Artificial Sequence: Synthetic oligonucleotide
  Antisense strand to SEQ ID NO: 2257116
uuauuccuccugcaaagau

SEQ ID NO: 2257118 - RNA, 19 nt, Artificial Sequence
  Description of Artificial Sequence: Synthetic oligonucleotide
  Sense strand starting at position 416 of SEQ ID NO: 1884324
augugauuuacacgugcua

SEQ ID NO: 2257119 - RNA, 19 nt, Artificial Sequence
  Description of Artificial Sequence: Synthetic oligonucleotide
  Antisense strand to SEQ ID NO: 2257118
uagcacguguaaaucacau

SEQ ID NO: 2257120 - RNA, 19 nt, Artificial Sequence
  Description of Artificial Sequence: Synthetic oligonucleotide
  Sense strand starting at position 418 of SEQ ID NO: 1884324
gugauuuacacgugcuauc

SEQ ID NO: 2257121 - RNA, 19 nt, Artificial Sequence
  Description of Artificial Sequence: Synthetic oligonucleotide
  Antisense strand to SEQ ID NO: 2257120
gauagcacguguaaaucac

SEQ ID NO: 2257122 - RNA, 19 nt, Artificial Sequence
  Description of Artificial Sequence: Synthetic oligonucleotide
  Sense strand starting at position 808 of SEQ ID NO: 1884324
aauauaugagguugguaaa

SEQ ID NO: 2257123 - RNA, 19 nt, Artificial Sequence
  Description of Artificial Sequence: Synthetic oligonucleotide
  Antisense strand to SEQ ID NO: 2257122
uuuaccaaccucauauauu

SEQ ID NO: 2257124 - RNA, 19 nt, Artificial Sequence
  Description of Artificial Sequence: Synthetic oligonucleotide
  Sense strand starting at position 920 of SEQ ID NO: 1884324
gaauccagccaguaagcau

SEQ ID NO: 2257125 - RNA, 19 nt, Artificial Sequence
  Description of Artificial Sequence: Synthetic oligonucleotide
  Antisense strand to SEQ ID NO: 2257124
augcuuacuggcuggauuc

SEQ ID NO: 2257126 - RNA, 19 nt, Artificial Sequence
  Description of Artificial Sequence: Synthetic oligonucleotide
  Sense strand starting at position 1005 of SEQ ID NO: 1884324
ucaagaaaucugugcuaug

SEQ ID NO: 2257127 - RNA, 19 nt, Artificial Sequence
  Description of Artificial Sequence: Synthetic oligonucleotide
  Antisense strand to SEQ ID NO: 2257126
cauagcacagauuucuuga

SEQ ID NO: 2257128 - RNA, 19 nt, Artificial Sequence
  Description of Artificial Sequence: Synthetic oligonucleotide
  Sense strand starting at position 1159 of SEQ ID NO: 1884324
guaacacaaguaugaaauu

SEQ ID NO: 2257129 - RNA, 19 nt, Artificial Sequence
  Description of Artificial Sequence: Synthetic oligonucleotide
  Antisense strand to SEQ ID NO: 2257128
aauuucauacuuguguuac

SEQ ID NO: 2257130 - RNA, 19 nt, Artificial Sequence
  Description of Artificial Sequence: Synthetic oligonucleotide
  Sense strand starting at position 1451 of SEQ ID NO: 1884324
ugguaaacaucuuuaacag

SEQ ID NO: 2257131 - RNA, 19 nt, Artificial Sequence
  Description of Artificial Sequence: Synthetic oligonucleotide
  Antisense strand to SEQ ID NO: 2257130
cuguuaaagauguuuacca

SEQ ID NO: 2257132 - RNA, 19 nt, Artificial Sequence
  Description of Artificial Sequence: Synthetic oligonucleotide
  Sense strand starting at position 2064 of SEQ ID NO: 1884324
ccagaaauccuagggagca

SEQ ID NO: 2257133 - RNA, 19 nt, Artificial Sequence
  Description of Artificial Sequence: Synthetic oligonucleotide
  Antisense strand to SEQ ID NO: 2257132
ugcucccuaggauuucugg

SEQ ID NO: 2257134 - RNA, 19 nt, Artificial Sequence
  Description of Artificial Sequence: Synthetic oligonucleotide
  Sense strand starting at position 2153 of SEQ ID NO: 1884324
ugaccuaacuccuuggauu

SEQ ID NO: 2257135 - RNA, 19 nt, Artificial Sequence
  Description of Artificial Sequence: Synthetic oligonucleotide
  Antisense strand to SEQ ID NO: 2257134
aauccaaggaguuagguca

SEQ ID NO: 2257136 - RNA, 19 nt, Artificial Sequence
  Description of Artificial Sequence: Synthetic oligonucleotide
  Sense strand starting at position 2258 of SEQ ID NO: 1884324
ugaagcgaucucuaaguca

SEQ ID NO: 2257137 - RNA, 19 nt, Artificial Sequence
  Description of Artificial Sequence: Synthetic oligonucleotide
  Antisense strand to SEQ ID NO: 2257136
ugacuuagagaucgcuuca

SEQ ID NO: 2257138 - RNA, 19 nt, Artificial Sequence
  Description of Artificial Sequence: Synthetic oligonucleotide
  Sense strand starting at position 2261 of SEQ ID NO: 1884324
agcgaucucuaagucauuu

SEQ ID NO: 2257139 - RNA, 19 nt, Artificial Sequence
  Description of Artificial Sequence: Synthetic oligonucleotide
  Antisense strand to SEQ ID NO: 2257138
aaaugacuuagagaucgcu

SEQ ID NO: 2257140 - RNA, 19 nt, Artificial Sequence
  Description of Artificial Sequence: Synthetic oligonucleotide
  Sense strand starting at position 2320 of SEQ ID NO: 1884324
gaaacuaugucucugcaga

SEQ ID NO: 2257141 - RNA, 19 nt, Artificial Sequence
  Description of Artificial Sequence: Synthetic oligonucleotide
  Antisense strand to SEQ ID NO: 2257140
ucugcagagacauaguuuc

SEQ ID NO: 2257142 - RNA, 19 nt, Artificial Sequence
  Description of Artificial Sequence: Synthetic oligonucleotide
  Sense strand starting at position 2339 of SEQ ID NO: 1884324
ugguaacagucaguaauaa

SEQ ID NO: 2257143 - RNA, 19 nt, Artificial Sequence
  Description of Artificial Sequence: Synthetic oligonucleotide
  Antisense strand to SEQ ID NO: 2257142
uuauuacugacuguuacca

SEQ ID NO: 2257144 - RNA, 19 nt, Artificial Sequence
  Description of Artificial Sequence: Synthetic oligonucleotide
  Sense strand starting at position 2340 of SEQ ID NO: 1884324
gguaacagucaguaauaac

SEQ ID NO: 2257145 - RNA, 19 nt, Artificial Sequence
  Description of Artificial Sequence: Synthetic oligonucleotide
  Antisense strand to SEQ ID NO: 2257144
guuauuacugacuguuacc

SEQ ID NO: 2257146 - RNA, 19 nt, Artificial Sequence
  Description of Artificial Sequence: Synthetic oligonucleotide
  Sense strand starting at position 2374 of SEQ ID NO: 1884324
ccaggcuucucacugauga

SEQ ID NO: 2257147 - RNA, 19 nt, Artificial Sequence
  Description of Artificial Sequence: Synthetic oligonucleotide
  Antisense strand to SEQ ID NO: 2257146
ucaucagugagaagccugg

SEQ ID NO: 2257148 - RNA, 19 nt, Artificial Sequence
  Description of Artificial Sequence: Synthetic oligonucleotide
  Sense strand starting at position 2460 of SEQ ID NO: 1884324
uuuccaucuggauguaaag

SEQ ID NO: 2257149 - RNA, 19 nt, Artificial Sequence
  Description of Artificial Sequence: Synthetic oligonucleotide
  Antisense strand to SEQ ID NO: 2257148
cuuuacauccagauggaaa

SEQ ID NO: 2257150 - RNA, 19 nt, Artificial Sequence
  Description of Artificial Sequence: Synthetic oligonucleotide
  Sense strand starting at position 2716 of SEQ ID NO: 1884324
ggagauguuccugaagcca

SEQ ID NO: 2257151 - RNA, 19 nt, Artificial Sequence
  Description of Artificial Sequence: Synthetic oligonucleotide
  Antisense strand to SEQ ID NO: 2257150
uggcuucaggaacaucucc

SEQ ID NO: 2257152 - RNA, 19 nt, Artificial Sequence
  Description of Artificial Sequence: Synthetic oligonucleotide
  Sense strand starting at position 2731 of SEQ ID NO: 1884324
gccagauauggucauucca

SEQ ID NO: 2257153 - RNA, 19 nt, Artificial Sequence
  Description of Artificial Sequence: Synthetic oligonucleotide
  Antisense strand to SEQ ID NO: 2257152
uggaaugaccauaucuggc

SEQ ID NO: 2257154 - RNA, 19 nt, Artificial Sequence
  Description of Artificial Sequence: Synthetic oligonucleotide
  Sense strand starting at position 2739 of SEQ ID NO: 1884324
uggucauuccauuaaugug

SEQ ID NO: 2257155 - RNA, 19 nt, Artificial Sequence
  Description of Artificial Sequence: Synthetic oligonucleotide
  Antisense strand to SEQ ID NO: 2257154
cacauuaauggaaugacca

SEQ ID NO: 2257156 - RNA, 19 nt, Artificial Sequence
  Description of Artificial Sequence: Synthetic oligonucleotide
  Sense strand starting at position 2884 of SEQ ID NO: 1884324
uuugaauuugggugugcua

SEQ ID NO: 2257157 - RNA, 19 nt, Artificial Sequence
  Description of Artificial Sequence: Synthetic oligonucleotide
  Antisense strand to SEQ ID NO: 2257156
uagcacacccaaauucaaa

SEQ ID NO: 2257158 - RNA, 19 nt, Artificial Sequence
  Description of Artificial Sequence: Synthetic oligonucleotide
  Sense strand starting at position 2886 of SEQ ID NO: 1884324
ugaauuugggugugcuaca

SEQ ID NO: 2257159 - RNA, 19 nt, Artificial Sequence
  Description of Artificial Sequence: Synthetic oligonucleotide
  Antisense strand to SEQ ID NO: 2257158
uguagcacacccaaauuca

SEQ ID NO: 2257160 - RNA, 19 nt, Artificial Sequence
  Description of Artificial Sequence: Synthetic oligonucleotide
  Sense strand starting at position 3015 of SEQ ID NO: 1884324
ugccaaccuguacagaaua

SEQ ID NO: 2257161 - RNA, 19 nt, Artificial Sequence
  Description of Artificial Sequence: Synthetic oligonucleotide
  Antisense strand to SEQ ID NO: 2257160
uauucuguacagguuggca

SEQ ID NO: 2257162 - RNA, 19 nt, Artificial Sequence
  Description of Artificial Sequence: Synthetic oligonucleotide
  Sense strand starting at position 3027 of SEQ ID NO: 1884324
cagaauaaggguugaucuu

SEQ ID NO: 2257163 - RNA, 19 nt, Artificial Sequence
  Description of Artificial Sequence: Synthetic oligonucleotide
  Antisense strand to SEQ ID NO: 2257162
aagaucaacccuuauucug

SEQ ID NO: 2257164 - RNA, 19 nt, Artificial Sequence
  Description of Artificial Sequence: Synthetic oligonucleotide
  Sense strand starting at position 3073 of SEQ ID NO: 1884324
acagucuugccaggaggaa

SEQ ID NO: 2257165 - RNA, 19 nt, Artificial Sequence
  Description of Artificial Sequence: Synthetic oligonucleotide
  Antisense strand to SEQ ID NO: 2257164
uuccuccuggcaagacugu

SEQ ID NO: 2257166 - RNA, 19 nt, Artificial Sequence
  Description of Artificial Sequence: Synthetic oligonucleotide
  Sense strand starting at position 3074 of SEQ ID NO: 1884324
cagucuugccaggaggaau

SEQ ID NO: 2257167 - RNA, 19 nt, Artificial Sequence
  Description of Artificial Sequence: Synthetic oligonucleotide
  Antisense strand to SEQ ID NO: 2257166
auuccuccuggcaagacug

SEQ ID NO: 2257168 - RNA, 19 nt, Artificial Sequence
  Description of Artificial Sequence: Synthetic oligonucleotide
  Sense strand starting at position 3085 of SEQ ID NO: 1884324
ggaggaaucucugucucca

SEQ ID NO: 2257169 - RNA, 19 nt, Artificial Sequence
  Description of Artificial Sequence: Synthetic oligonucleotide
  Antisense strand to SEQ ID NO: 2257168
uggagacagagauuccucc

SEQ ID NO: 2257170 - RNA, 19 nt, Artificial Sequence
  Description of Artificial Sequence: Synthetic oligonucleotide
  Sense strand starting at position 3343 of SEQ ID NO: 1884324
ucagaaggauucuauuucu

SEQ ID NO: 2257171 - RNA, 19 nt, Artificial Sequence
  Description of Artificial Sequence: Synthetic oligonucleotide
  Antisense strand to SEQ ID NO: 2257170
agaaauagaauccuucuga

SEQ ID NO: 2257172 - RNA, 19 nt, Artificial Sequence
  Description of Artificial Sequence: Synthetic oligonucleotide
  Sense strand starting at position 3444 of SEQ ID NO: 1884324
ggauuccacucccuuugaa

SEQ ID NO: 2257173 - RNA, 19 nt, Artificial Sequence
  Description of Artificial Sequence: Synthetic oligonucleotide
  Antisense strand to SEQ ID NO: 2257172
uucaaagggaguggaaucc

SEQ ID NO: 2257174 - RNA, 19 nt, Artificial Sequence
  Description of Artificial Sequence: Synthetic oligonucleotide
  Sense strand starting at position 3513 of SEQ ID NO: 1884324
ugaugaauuugacaccuau

SEQ ID NO: 2257175 - RNA, 19 nt, Artificial Sequence
  Description of Artificial Sequence: Synthetic oligonucleotide
  Antisense strand to SEQ ID NO: 2257174
auaggugucaaauucauca

SEQ ID NO: 2257176 - RNA, 19 nt, Artificial Sequence
  Description of Artificial Sequence: Synthetic oligonucleotide
  Sense strand starting at position 3589 of SEQ ID NO: 1884324
acuugugauguggauauca

SEQ ID NO: 2257177 - RNA, 19 nt, Artificial Sequence
  Description of Artificial Sequence: Synthetic oligonucleotide
  Antisense strand to SEQ ID NO: 2257176
ugauauccacaucacaagu

SEQ ID NO: 2257178 - RNA, 19 nt, Artificial Sequence
  Description of Artificial Sequence: Synthetic oligonucleotide
  Sense strand starting at position 3591 of SEQ ID NO: 1884324
uugugauguggauaucaac

SEQ ID NO: 2257179 - RNA, 19 nt, Artificial Sequence
  Description of Artificial Sequence: Synthetic oligonucleotide
  Antisense strand to SEQ ID NO: 2257178
guugauauccacaucacaa

SEQ ID NO: 2257180 - RNA, 19 nt, Artificial Sequence
  Description of Artificial Sequence: Synthetic oligonucleotide
  Sense strand starting at position 3747 of SEQ ID NO: 1884324
caaguauuacugcaaugag

SEQ ID NO: 2257181 - RNA, 19 nt, Artificial Sequence
  Description of Artificial Sequence: Synthetic oligonucleotide
  Antisense strand to SEQ ID NO: 2257180
cucauugcaguaauacuug

SEQ ID NO: 2257182 - RNA, 19 nt, Artificial Sequence
  Description of Artificial Sequence: Synthetic oligonucleotide
  Sense strand starting at position 3890 of SEQ ID NO: 1884324
uuagaagguuguuugauua

SEQ ID NO: 2257183 - RNA, 19 nt, Artificial Sequence
  Description of Artificial Sequence: Synthetic oligonucleotide
  Antisense strand to SEQ ID NO: 2257182
uaaucaaacaaccuucuaa

SEQ ID NO: 2257184 - RNA, 19 nt, Artificial Sequence
  Description of Artificial Sequence: Synthetic oligonucleotide
  Sense strand starting at position 31 of SEQ ID NO: 1884325
gucuucucuuucugggcaa

SEQ ID NO: 2257185 - RNA, 19 nt, Artificial Sequence
  Description of Artificial Sequence: Synthetic oligonucleotide
  Antisense strand to SEQ ID NO: 2257184
uugcccagaaagagaagac

SEQ ID NO: 2257186 - RNA, 19 nt, Artificial Sequence
  Description of Artificial Sequence: Synthetic oligonucleotide
  Sense strand starting at position 53 of SEQ ID NO: 1884325
ggaucugcuggaggaguuu

SEQ ID NO: 2257187 - RNA, 19 nt, Artificial Sequence
  Description of Artificial Sequence: Synthetic oligonucleotide
  Antisense strand to SEQ ID NO: 2257186
aaacuccuccagcagaucc

SEQ ID NO: 2257188 - RNA, 19 nt, Artificial Sequence
  Description of Artificial Sequence: Synthetic oligonucleotide
  Sense strand starting at position 73 of SEQ ID NO: 1884325
cugcgcuucuucccugaca

SEQ ID NO: 2257189 - RNA, 19 nt, Artificial Sequence
  Description of Artificial Sequence: Synthetic oligonucleotide
  Antisense strand to SEQ ID NO: 2257188
ugucagggaagaagcgcag

SEQ ID NO: 2257190 - RNA, 19 nt, Artificial Sequence
  Description of Artificial Sequence: Synthetic oligonucleotide
  Sense strand starting at position 75 of SEQ ID NO: 1884325
gcgcuucuucccugacagu

SEQ ID NO: 2257191 - RNA, 19 nt, Artificial Sequence
  Description of Artificial Sequence: Synthetic oligonucleotide
  Antisense strand to SEQ ID NO: 2257190
acugucagggaagaagcgc

SEQ ID NO: 2257192 - RNA, 19 nt, Artificial Sequence
  Description of Artificial Sequence: Synthetic oligonucleotide
  Sense strand starting at position 174 of SEQ ID NO: 1884325
acaaauaguucuggcuaua

SEQ ID NO: 2257193 - RNA, 19 nt, Artificial Sequence
  Description of Artificial Sequence: Synthetic oligonucleotide
  Antisense strand to SEQ ID NO: 2257192
uauagccagaacuauuugu

SEQ ID NO: 2257194 - RNA, 19 nt, Artificial Sequence
  Description of Artificial Sequence: Synthetic oligonucleotide
  Sense strand starting at position 177 of SEQ ID NO: 1884325
aauaguucuggcuauagaa

SEQ ID NO: 2257195 - RNA, 19 nt, Artificial Sequence
  Description of Artificial Sequence: Synthetic oligonucleotide
  Antisense strand to SEQ ID NO: 2257194
uucuauagccagaacuauu

SEQ ID NO: 2257196 - RNA, 19 nt, Artificial Sequence
  Description of Artificial Sequence: Synthetic oligonucleotide
  Sense strand starting at position 897 of SEQ ID NO: 1884325
gaaaguaauuaaugggaug

SEQ ID NO: 2257197 - RNA, 19 nt, Artificial Sequence
  Description of Artificial Sequence: Synthetic oligonucleotide
  Antisense strand to SEQ ID NO: 2257196
caucccauuaauuacuuuc

SEQ ID NO: 2257198 - RNA, 19 nt, Artificial Sequence
  Description of Artificial Sequence: Synthetic oligonucleotide
  Sense strand starting at position 900 of SEQ ID NO: 1884325
aguaauuaaugggauggga

SEQ ID NO: 2257199 - RNA, 19 nt, Artificial Sequence
  Description of Artificial Sequence: Synthetic oligonucleotide
  Antisense strand to SEQ ID NO: 2257198
ucccaucccauuaauuacu

SEQ ID NO: 2257200 - RNA, 19 nt, Artificial Sequence
  Description of Artificial Sequence: Synthetic oligonucleotide
  Sense strand starting at position 914 of SEQ ID NO: 1884325
ugggaacucuuccucaaga

SEQ ID NO: 2257201 - RNA, 19 nt, Artificial Sequence
  Description of Artificial Sequence: Synthetic oligonucleotide
  Antisense strand to SEQ ID NO: 2257200
ucuugaggaagaguuccca

SEQ ID NO: 2257202 - RNA, 19 nt, Artificial Sequence
  Description of Artificial Sequence: Synthetic oligonucleotide
  Sense strand starting at position 915 of SEQ ID NO: 1884325
gggaacucuuccucaagac

SEQ ID NO: 2257203 - RNA, 19 nt, Artificial Sequence
  Description of Artificial Sequence: Synthetic oligonucleotide
  Antisense strand to SEQ ID NO: 2257202
gucuugaggaagaguuccc

SEQ ID NO: 2257204 - RNA, 19 nt, Artificial Sequence
  Description of Artificial Sequence: Synthetic oligonucleotide
  Sense strand starting at position 942 of SEQ ID NO: 1884325
ccuugaaacuuacaaguga

SEQ ID NO: 2257205 - RNA, 19 nt, Artificial Sequence
  Description of Artificial Sequence: Synthetic oligonucleotide
  Antisense strand to SEQ ID NO: 2257204
ucacuuguaaguuucaagg

SEQ ID NO: 2257206 - RNA, 19 nt, Artificial Sequence
  Description of Artificial Sequence: Synthetic oligonucleotide
  Sense strand starting at position 1057 of SEQ ID NO: 1884325
gugaauguauaacauuacu

SEQ ID NO: 2257207 - RNA, 19 nt, Artificial Sequence
  Description of Artificial Sequence: Synthetic oligonucleotide
  Antisense strand to SEQ ID NO: 2257206
aguaauguuauacauucac

SEQ ID NO: 2257208 - RNA, 19 nt, Artificial Sequence
  Description of Artificial Sequence: Synthetic oligonucleotide
  Sense strand starting at position 1063 of SEQ ID NO: 1884325
guauaacauuacuuggaga

SEQ ID NO: 2257209 - RNA, 19 nt, Artificial Sequence
  Description of Artificial Sequence: Synthetic oligonucleotide
  Antisense strand to SEQ ID NO: 2257208
ucuccaaguaauguuauac

SEQ ID NO: 2257210 - RNA, 19 nt, Artificial Sequence
  Description of Artificial Sequence: Synthetic oligonucleotide
  Sense strand starting at position 1410 of SEQ ID NO: 1884325
cggcuuuccugagauucuu

SEQ ID NO: 2257211 - RNA, 19 nt, Artificial Sequence
  Description of Artificial Sequence: Synthetic oligonucleotide
  Antisense strand to SEQ ID NO: 2257210
aagaaucucaggaaagccg

SEQ ID NO: 2257212 - RNA, 19 nt, Artificial Sequence
  Description of Artificial Sequence: Synthetic oligonucleotide
  Sense strand starting at position 1416 of SEQ ID NO: 1884325
uccugagauucuuaacaga

SEQ ID NO: 2257213 - RNA, 19 nt, Artificial Sequence
  Description of Artificial Sequence: Synthetic oligonucleotide
  Antisense strand to SEQ ID NO: 2257212
ucuguuaagaaucucagga

SEQ ID NO: 2257214 - RNA, 19 nt, Artificial Sequence
  Description of Artificial Sequence: Synthetic oligonucleotide
  Sense strand starting at position 1419 of SEQ ID NO: 1884325
ugagauucuuaacagaauc

SEQ ID NO: 2257215 - RNA, 19 nt, Artificial Sequence
  Description of Artificial Sequence: Synthetic oligonucleotide
  Antisense strand to SEQ ID NO: 2257214
gauucuguuaagaaucuca

SEQ ID NO: 2257216 - RNA, 19 nt, Artificial Sequence
  Description of Artificial Sequence: Synthetic oligonucleotide
  Sense strand starting at position 1446 of SEQ ID NO: 1884325
aaagaaagguugucugcua

SEQ ID NO: 2257217 - RNA, 19 nt, Artificial Sequence
  Description of Artificial Sequence: Synthetic oligonucleotide
  Antisense strand to SEQ ID NO: 2257216
uagcagacaaccuuucuuu

SEQ ID NO: 2257218 - RNA, 19 nt, Artificial Sequence
  Description of Artificial Sequence: Synthetic oligonucleotide
  Sense strand starting at position 1453 of SEQ ID NO: 1884325
gguugucugcuacagguau

SEQ ID NO: 2257219 - RNA, 19 nt, Artificial Sequence
  Description of Artificial Sequence: Synthetic oligonucleotide
  Antisense strand to SEQ ID NO: 2257218
auaccuguagcagacaacc

SEQ ID NO: 2257220 - RNA, 19 nt, Artificial Sequence
  Description of Artificial Sequence: Synthetic oligonucleotide
  Sense strand starting at position 1460 of SEQ ID NO: 1884325
ugcuacagguauugugaga

SEQ ID NO: 2257221 - RNA, 19 nt, Artificial Sequence
  Description of Artificial Sequence: Synthetic oligonucleotide
  Antisense strand to SEQ ID NO: 2257220
ucucacaauaccuguagca

SEQ ID NO: 2257222 - RNA, 19 nt, Artificial Sequence
  Description of Artificial Sequence: Synthetic oligonucleotide
  Sense strand starting at position 1465 of SEQ ID NO: 1884325
cagguauugugagaggcua

SEQ ID NO: 2257223 - RNA, 19 nt, Artificial Sequence
  Description of Artificial Sequence: Synthetic oligonucleotide
  Antisense strand to SEQ ID NO: 2257222
uagccucucacaauaccug

SEQ ID NO: 2257224 - RNA, 19 nt, Artificial Sequence
  Description of Artificial Sequence: Synthetic oligonucleotide
  Sense strand starting at position 1467 of SEQ ID NO: 1884325
gguauugugagaggcuauc

SEQ ID NO: 2257225 - RNA, 19 nt, Artificial Sequence
  Description of Artificial Sequence: Synthetic oligonucleotide
  Antisense strand to SEQ ID NO: 2257224
gauagccucucacaauacc

SEQ ID NO: 2257226 - RNA, 19 nt, Artificial Sequence
  Description of Artificial Sequence: Synthetic oligonucleotide
  Sense strand starting at position 1657 of SEQ ID NO: 1884325
gugaucagcccuuggucua

SEQ ID NO: 2257227 - RNA, 19 nt, Artificial Sequence
  Description of Artificial Sequence: Synthetic oligonucleotide
  Antisense strand to SEQ ID NO: 2257226
uagaccaagggcugaucac

SEQ ID NO: 2257228 - RNA, 19 nt, Artificial Sequence
  Description of Artificial Sequence: Synthetic oligonucleotide
  Sense strand starting at position 1658 of SEQ ID NO: 1884325
ugaucagcccuuggucuau

SEQ ID NO: 2257229 - RNA, 19 nt, Artificial Sequence
  Description of Artificial Sequence: Synthetic oligonucleotide
  Antisense strand to SEQ ID NO: 2257228
auagaccaagggcugauca

SEQ ID NO: 2257230 - RNA, 19 nt, Artificial Sequence
  Description of Artificial Sequence: Synthetic oligonucleotide
  Sense strand starting at position 1842 of SEQ ID NO: 1884325
gaucccaucucgugcgaga

SEQ ID NO: 2257231 - RNA, 19 nt, Artificial Sequence
  Description of Artificial Sequence: Synthetic oligonucleotide
  Antisense strand to SEQ ID NO: 2257230
ucucgcacgagaugggauc

SEQ ID NO: 2257232 - RNA, 19 nt, Artificial Sequence
  Description of Artificial Sequence: Synthetic oligonucleotide
  Sense strand starting at position 1844 of SEQ ID NO: 1884325
ucccaucucgugcgagaua

SEQ ID NO: 2257233 - RNA, 19 nt, Artificial Sequence
  Description of Artificial Sequence: Synthetic oligonucleotide
  Antisense strand to SEQ ID NO: 2257232
uaucucgcacgagauggga

SEQ ID NO: 2257234 - RNA, 19 nt, Artificial Sequence
  Description of Artificial Sequence: Synthetic oligonucleotide
  Sense strand starting at position 1845 of SEQ ID NO: 1884325
cccaucucgugcgagauaa

SEQ ID NO: 2257235 - RNA, 19 nt, Artificial Sequence
  Description of Artificial Sequence: Synthetic oligonucleotide
  Antisense strand to SEQ ID NO: 2257234
uuaucucgcacgagauggg

SEQ ID NO: 2257236 - RNA, 19 nt, Artificial Sequence
  Description of Artificial Sequence: Synthetic oligonucleotide
  Sense strand starting at position 2051 of SEQ ID NO: 1884325
ggcggguccucgggcuaua

SEQ ID NO: 2257237 - RNA, 19 nt, Artificial Sequence
  Description of Artificial Sequence: Synthetic oligonucleotide
  Antisense strand to SEQ ID NO: 2257236
uauagcccgaggacccgcc

SEQ ID NO: 2257238 - RNA, 19 nt, Artificial Sequence
  Description of Artificial Sequence: Synthetic oligonucleotide
  Sense strand starting at position 2052 of SEQ ID NO: 1884325
gcggguccucgggcuauau

SEQ ID NO: 2257239 - RNA, 19 nt, Artificial Sequence
  Description of Artificial Sequence: Synthetic oligonucleotide
  Antisense strand to SEQ ID NO: 2257238
auauagcccgaggacccgc

SEQ ID NO: 2257240 - RNA, 19 nt, Artificial Sequence
  Description of Artificial Sequence: Synthetic oligonucleotide
  Sense strand starting at position 2054 of SEQ ID NO: 1884325
ggguccucgggcuauauaa

SEQ ID NO: 2257241 - RNA, 19 nt, Artificial Sequence
  Description of Artificial Sequence: Synthetic oligonucleotide
  Antisense strand to SEQ ID NO: 2257240
uuauauagcccgaggaccc

SEQ ID NO: 2257242 - RNA, 19 nt, Artificial Sequence
  Description of Artificial Sequence: Synthetic oligonucleotide
  Sense strand starting at position 2106 of SEQ ID NO: 1884325
guggugagcuaguaagugu

SEQ ID NO: 2257243 - RNA, 19 nt, Artificial Sequence
  Description of Artificial Sequence: Synthetic oligonucleotide
  Antisense strand to SEQ ID NO: 2257242
acacuuacuagcucaccac

SEQ ID NO: 2257244 - RNA, 19 nt, Artificial Sequence
  Description of Artificial Sequence: Synthetic oligonucleotide
  Sense strand starting at position 2787 of SEQ ID NO: 1884325
agguggguuccucgugagu

SEQ ID NO: 2257245 - RNA, 19 nt, Artificial Sequence
  Description of Artificial Sequence: Synthetic oligonucleotide
  Antisense strand to SEQ ID NO: 2257244
acucacgaggaacccaccu

SEQ ID NO: 2257246 - RNA, 19 nt, Artificial Sequence
  Description of Artificial Sequence: Synthetic oligonucleotide
  Sense strand starting at position 2789 of SEQ ID NO: 1884325
guggguuccucgugaguca

SEQ ID NO: 2257247 - RNA, 19 nt, Artificial Sequence
  Description of Artificial Sequence: Synthetic oligonucleotide
  Antisense strand to SEQ ID NO: 2257246
ugacucacgaggaacccac

SEQ ID NO: 2257248 - RNA, 19 nt, Artificial Sequence
  Description of Artificial Sequence: Synthetic oligonucleotide
  Sense strand starting at position 2809 of SEQ ID NO: 1884325
gaguguagucccugaaauu

SEQ ID NO: 2257249 - RNA, 19 nt, Artificial Sequence
  Description of Artificial Sequence: Synthetic oligonucleotide
  Antisense strand to SEQ ID NO: 2257248
aauuucagggacuacacuc

SEQ ID NO: 2257250 - RNA, 19 nt, Artificial Sequence
  Description of Artificial Sequence: Synthetic oligonucleotide
  Sense strand starting at position 2810 of SEQ ID NO: 1884325
aguguagucccugaaauug

SEQ ID NO: 2257251 - RNA, 19 nt, Artificial Sequence
  Description of Artificial Sequence: Synthetic oligonucleotide
  Antisense strand to SEQ ID NO: 2257250
caauuucagggacuacacu

SEQ ID NO: 2257252 - RNA, 19 nt, Artificial Sequence
  Description of Artificial Sequence: Synthetic oligonucleotide
  Sense strand starting at position 2820 of SEQ ID NO: 1884325
cugaaauugugauucucaa

SEQ ID NO: 2257253 - RNA, 19 nt, Artificial Sequence
  Description of Artificial Sequence: Synthetic oligonucleotide
  Antisense strand to SEQ ID NO: 2257252
uugagaaucacaauuucag

SEQ ID NO: 2257254 - RNA, 19 nt, Artificial Sequence
  Description of Artificial Sequence: Synthetic oligonucleotide
  Sense strand starting at position 2983 of SEQ ID NO: 1884325
gcacgauggcgccuauagu

SEQ ID NO: 2257255 - RNA, 19 nt, Artificial Sequence
  Description of Artificial Sequence: Synthetic oligonucleotide
  Antisense strand to SEQ ID NO: 2257254
acuauaggcgccaucgugc

SEQ ID NO: 2257256 - RNA, 19 nt, Artificial Sequence
  Description of Artificial Sequence: Synthetic oligonucleotide
  Sense strand starting at position 3041 of SEQ ID NO: 1884325
ccaucauugugcuacugua

SEQ ID NO: 2257257 - RNA, 19 nt, Artificial Sequence
  Description of Artificial Sequence: Synthetic oligonucleotide
  Antisense strand to SEQ ID NO: 2257256
uacaguagcacaaugaugg

SEQ ID NO: 2257258 - RNA, 19 nt, Artificial Sequence
  Description of Artificial Sequence: Synthetic oligonucleotide
  Sense strand starting at position 4 of SEQ ID NO: 1884326
gugaaagcuaaugguuaaa

SEQ ID NO: 2257259 - RNA, 19 nt, Artificial Sequence
  Description of Artificial Sequence: Synthetic oligonucleotide
  Antisense strand to SEQ ID NO: 2257258
uuuaaccauuagcuuucac

SEQ ID NO: 2257260 - RNA, 19 nt, Artificial Sequence
  Description of Artificial Sequence: Synthetic oligonucleotide
  Sense strand starting at position 44 of SEQ ID NO: 1884326
gagugcagccauuauuaaa

SEQ ID NO: 2257261 - RNA, 19 nt, Artificial Sequence
  Description of Artificial Sequence: Synthetic oligonucleotide
  Antisense strand to SEQ ID NO: 2257260
uuuaauaauggcugcacuc

SEQ ID NO: 2257262 - RNA, 19 nt, Artificial Sequence
  Description of Artificial Sequence: Synthetic oligonucleotide
  Sense strand starting at position 122 of SEQ ID NO: 1884326
uuuauaugugggugagaaa

SEQ ID NO: 2257263 - RNA, 19 nt, Artificial Sequence
  Description of Artificial Sequence: Synthetic oligonucleotide
  Antisense strand to SEQ ID NO: 2257262
uuucucacccacauauaaa

SEQ ID NO: 2257264 - RNA, 19 nt, Artificial Sequence
  Description of Artificial Sequence: Synthetic oligonucleotide
  Sense strand starting at position 223 of SEQ ID NO: 1884326
ucaaaucauggcugaauag

SEQ ID NO: 2257265 - RNA, 19 nt, Artificial Sequence
  Description of Artificial Sequence: Synthetic oligonucleotide
  Antisense strand to SEQ ID NO: 2257264
cuauucagccaugauuuga

SEQ ID NO: 2257266 - RNA, 19 nt, Artificial Sequence
  Description of Artificial Sequence: Synthetic oligonucleotide
  Sense strand starting at position 300 of SEQ ID NO: 1884326
gagacucagugggcuauau

SEQ ID NO: 2257267 - RNA, 19 nt, Artificial Sequence
  Description of Artificial Sequence: Synthetic oligonucleotide
  Antisense strand to SEQ ID NO: 2257266
auauagcccacugagucuc

SEQ ID NO: 2257268 - RNA, 19 nt, Artificial Sequence
  Description of Artificial Sequence: Synthetic oligonucleotide
  Sense strand starting at position 302 of SEQ ID NO: 1884326
gacucagugggcuauauaa

SEQ ID NO: 2257269 - RNA, 19 nt, Artificial Sequence
  Description of Artificial Sequence: Synthetic oligonucleotide
  Antisense strand to SEQ ID NO: 2257268
uuauauagcccacugaguc

SEQ ID NO: 2257270 - RNA, 19 nt, Artificial Sequence
  Description of Artificial Sequence: Synthetic oligonucleotide
  Sense strand starting at position 658 of SEQ ID NO: 1884326
uuauaaauuguguaccaca

SEQ ID NO: 2257271 - RNA, 19 nt, Artificial Sequence
  Description of Artificial Sequence: Synthetic oligonucleotide
  Antisense strand to SEQ ID NO: 2257270
ugugguacacaauuuauaa

SEQ ID NO: 2257272 - RNA, 19 nt, Artificial Sequence
  Description of Artificial Sequence: Synthetic oligonucleotide
  Sense strand starting at position 694 of SEQ ID NO: 1884326
auuauauaugugcaugagu

SEQ ID NO: 2257273 - RNA, 19 nt, Artificial Sequence
  Description of Artificial Sequence: Synthetic oligonucleotide
  Antisense strand to SEQ ID NO: 2257272
acucaugcacauauauaau

SEQ ID NO: 2257274 - RNA, 19 nt, Artificial Sequence
  Description of Artificial Sequence: Synthetic oligonucleotide
  Sense strand starting at position 697 of SEQ ID NO: 1884326
auauaugugcaugaguaca

SEQ ID NO: 2257275 - RNA, 19 nt, Artificial Sequence
  Description of Artificial Sequence: Synthetic oligonucleotide
  Antisense strand to SEQ ID NO: 2257274
uguacucaugcacauauau

SEQ ID NO: 2257276 - RNA, 19 nt, Artificial Sequence
  Description of Artificial Sequence: Synthetic oligonucleotide
  Sense strand starting at position 699 of SEQ ID NO: 1884326
auaugugcaugaguacaua

SEQ ID NO: 2257277 - RNA, 19 nt, Artificial Sequence
  Description of Artificial Sequence: Synthetic oligonucleotide
  Antisense strand to SEQ ID NO: 2257276
uauguacucaugcacauau

SEQ ID NO: 2257278 - RNA, 19 nt, Artificial Sequence
  Description of Artificial Sequence: Synthetic oligonucleotide
  Sense strand starting at position 763 of SEQ ID NO: 1884326
acuuaagaggcauggaauu

SEQ ID NO: 2257279 - RNA, 19 nt, Artificial Sequence
  Description of Artificial Sequence: Synthetic oligonucleotide
  Antisense strand to SEQ ID NO: 2257278
aauuccaugccucuuaagu

SEQ ID NO: 2257280 - RNA, 19 nt, Artificial Sequence
  Description of Artificial Sequence: Synthetic oligonucleotide
  Sense strand starting at position 769 of SEQ ID NO: 1884326
gaggcauggaauugucuga

SEQ ID NO: 2257281 - RNA, 19 nt, Artificial Sequence
  Description of Artificial Sequence: Synthetic oligonucleotide
  Antisense strand to SEQ ID NO: 2257280
ucagacaauuccaugccuc

SEQ ID NO: 2257282 - RNA, 19 nt, Artificial Sequence
  Description of Artificial Sequence: Synthetic oligonucleotide
  Sense strand starting at position 773 of SEQ ID NO: 1884326
cauggaauugucugauacc

SEQ ID NO: 2257283 - RNA, 19 nt, Artificial Sequence
  Description of Artificial Sequence: Synthetic oligonucleotide
  Antisense strand to SEQ ID NO: 2257282
gguaucagacaauuccaug

SEQ ID NO: 2257284 - RNA, 19 nt, Artificial Sequence
  Description of Artificial Sequence: Synthetic oligonucleotide
  Sense strand starting at position 808 of SEQ ID NO: 1884326
caggcugucuuaccugaau

SEQ ID NO: 2257285 - RNA, 19 nt, Artificial Sequence
  Description of Artificial Sequence: Synthetic oligonucleotide
  Antisense strand to SEQ ID NO: 2257284
auucagguaagacagccug

SEQ ID NO: 2257286 - RNA, 19 nt, Artificial Sequence
  Description of Artificial Sequence: Synthetic oligonucleotide
  Sense strand starting at position 811 of SEQ ID NO: 1884326
gcugucuuaccugaauggu

SEQ ID NO: 2257287 - RNA, 19 nt, Artificial Sequence
  Description of Artificial Sequence: Synthetic oligonucleotide
  Antisense strand to SEQ ID NO: 2257286
accauucagguaagacagc

SEQ ID NO: 2257288 - RNA, 19 nt, Artificial Sequence
  Description of Artificial Sequence: Synthetic oligonucleotide
  Sense strand starting at position 1031 of SEQ ID NO: 1884326
ucagacuggucauuauauu

SEQ ID NO: 2257289 - RNA, 19 nt, Artificial Sequence
  Description of Artificial Sequence: Synthetic oligonucleotide
  Antisense strand to SEQ ID NO: 2257288
aauauaaugaccagucuga

SEQ ID NO: 2257290 - RNA, 19 nt, Artificial Sequence
  Description of Artificial Sequence: Synthetic oligonucleotide
  Sense strand starting at position 1079 of SEQ ID NO: 1884326
aguggacuucugggagguu

SEQ ID NO: 2257291 - RNA, 19 nt, Artificial Sequence
  Description of Artificial Sequence: Synthetic oligonucleotide
  Antisense strand to SEQ ID NO: 2257290
aaccucccagaaguccacu

SEQ ID NO: 2257292 - RNA, 19 nt, Artificial Sequence
  Description of Artificial Sequence: Synthetic oligonucleotide
  Sense strand starting at position 1120 of SEQ ID NO: 1884326
gucugauagagcuggagga

SEQ ID NO: 2257293 - RNA, 19 nt, Artificial Sequence
  Description of Artificial Sequence: Synthetic oligonucleotide
  Antisense strand to SEQ ID NO: 2257292
uccuccagcucuaucagac

SEQ ID NO: 2257294 - RNA, 19 nt, Artificial Sequence
  Description of Artificial Sequence: Synthetic oligonucleotide
  Sense strand starting at position 1353 of SEQ ID NO: 1884326
agagauuaucucugcaauu

SEQ ID NO: 2257295 - RNA, 19 nt, Artificial Sequence
  Description of Artificial Sequence: Synthetic oligonucleotide
  Antisense strand to SEQ ID NO: 2257294
aauugcagagauaaucucu

SEQ ID NO: 2257296 - RNA, 19 nt, Artificial Sequence
  Description of Artificial Sequence: Synthetic oligonucleotide
  Sense strand starting at position 1369 of SEQ ID NO: 1884326
auuggaaucugagaaauaa

SEQ ID NO: 2257297 - RNA, 19 nt, Artificial Sequence
  Description of Artificial Sequence: Synthetic oligonucleotide
  Antisense strand to SEQ ID NO: 2257296
uuauuucucagauuccaau

SEQ ID NO: 2257298 - RNA, 19 nt, Artificial Sequence
  Description of Artificial Sequence: Synthetic oligonucleotide
  Sense strand starting at position 1818 of SEQ ID NO: 1884326
guauaaaucgcggacuaac

SEQ ID NO: 2257299 - RNA, 19 nt, Artificial Sequence
  Description of Artificial Sequence: Synthetic oligonucleotide
  Antisense strand to SEQ ID NO: 2257298
guuaguccgcgauuuauac

SEQ ID NO: 2257300 - RNA, 19 nt, Artificial Sequence
  Description of Artificial Sequence: Synthetic oligonucleotide
  Sense strand starting at position 2227 of SEQ ID NO: 1884326
uugcauugaggucauugau

SEQ ID NO: 2257301 - RNA, 19 nt, Artificial Sequence
  Description of Artificial Sequence: Synthetic oligonucleotide
  Antisense strand to SEQ ID NO: 2257300
aucaaugaccucaaugcaa

SEQ ID NO: 2257302 - RNA, 19 nt, Artificial Sequence
  Description of Artificial Sequence: Synthetic oligonucleotide
  Sense strand starting at position 2230 of SEQ ID NO: 1884326
cauugaggucauugaugga

SEQ ID NO: 2257303 - RNA, 19 nt, Artificial Sequence
  Description of Artificial Sequence: Synthetic oligonucleotide
  Antisense strand to SEQ ID NO: 2257302
uccaucaaugaccucaaug

SEQ ID NO: 2257304 - RNA, 19 nt, Artificial Sequence
  Description of Artificial Sequence: Synthetic oligonucleotide
  Sense strand starting at position 2286 of SEQ ID NO: 1884326
ccuuaaagugagcgggaau

SEQ ID NO: 2257305 - RNA, 19 nt, Artificial Sequence
  Description of Artificial Sequence: Synthetic oligonucleotide
  Antisense strand to SEQ ID NO: 2257304
auucccgcucacuuuaagg

SEQ ID NO: 2257306 - RNA, 19 nt, Artificial Sequence
  Description of Artificial Sequence: Synthetic oligonucleotide
  Sense strand starting at position 2287 of SEQ ID NO: 1884326
cuuaaagugagcgggaauu

SEQ ID NO: 2257307 - RNA, 19 nt, Artificial Sequence
  Description of Artificial Sequence: Synthetic oligonucleotide
  Antisense strand to SEQ ID NO: 2257306
aauucccgcucacuuuaag

SEQ ID NO: 2257308 - RNA, 19 nt, Artificial Sequence
  Description of Artificial Sequence: Synthetic oligonucleotide
  Sense strand starting at position 2397 of SEQ ID NO: 1884326
gcggaaaggguccaggauu

SEQ ID NO: 2257309 - RNA, 19 nt, Artificial Sequence
  Description of Artificial Sequence: Synthetic oligonucleotide
  Antisense strand to SEQ ID NO: 2257308
aauccuggacccuuuccgc

SEQ ID NO: 2257310 - RNA, 19 nt, Artificial Sequence
  Description of Artificial Sequence: Synthetic oligonucleotide
  Sense strand starting at position 2488 of SEQ ID NO: 1884326
ggguucugggcccaagaaa

SEQ ID NO: 2257311 - RNA, 19 nt, Artificial Sequence
  Description of Artificial Sequence: Synthetic oligonucleotide
  Antisense strand to SEQ ID NO: 2257310
uuucuugggcccagaaccc

SEQ ID NO: 2257312 - RNA, 19 nt, Artificial Sequence
  Description of Artificial Sequence: Synthetic oligonucleotide
  Sense strand starting at position 2574 of SEQ ID NO: 1884326
gagcaagaacuuuguuaga

SEQ ID NO: 2257313 - RNA, 19 nt, Artificial Sequence
  Description of Artificial Sequence: Synthetic oligonucleotide
  Antisense strand to SEQ ID NO: 2257312
ucuaacaaaguucuugcuc

SEQ ID NO: 2257314 - RNA, 19 nt, Artificial Sequence
  Description of Artificial Sequence: Synthetic oligonucleotide
  Sense strand starting at position 2576 of SEQ ID NO: 1884326
gcaagaacuuuguuagaca

SEQ ID NO: 2257315 - RNA, 19 nt, Artificial Sequence
  Description of Artificial Sequence: Synthetic oligonucleotide
  Antisense strand to SEQ ID NO: 2257314
ugucuaacaaaguucuugc

SEQ ID NO: 2257316 - RNA, 19 nt, Artificial Sequence
  Description of Artificial Sequence: Synthetic oligonucleotide
  Sense strand starting at position 2583 of SEQ ID NO: 1884326
cuuuguuagacaggaguuc

SEQ ID NO: 2257317 - RNA, 19 nt, Artificial Sequence
  Description of Artificial Sequence: Synthetic oligonucleotide
  Antisense strand to SEQ ID NO: 2257316
gaacuccugucuaacaaag

SEQ ID NO: 2257318 - RNA, 19 nt, Artificial Sequence
  Description of Artificial Sequence: Synthetic oligonucleotide
  Sense strand starting at position 2663 of SEQ ID NO: 1884326
guguacucaucuuugaaau

SEQ ID NO: 2257319 - RNA, 19 nt, Artificial Sequence
  Description of Artificial Sequence: Synthetic oligonucleotide
  Antisense strand to SEQ ID NO: 2257318
auuucaaagaugaguacac

SEQ ID NO: 2257320 - RNA, 19 nt, Artificial Sequence
  Description of Artificial Sequence: Synthetic oligonucleotide
  Sense strand starting at position 2664 of SEQ ID NO: 1884326
uguacucaucuuugaaaug

SEQ ID NO: 2257321 - RNA, 19 nt, Artificial Sequence
  Description of Artificial Sequence: Synthetic oligonucleotide
  Antisense strand to SEQ ID NO: 2257320
cauuucaaagaugaguaca

SEQ ID NO: 2257322 - RNA, 19 nt, Artificial Sequence
  Description of Artificial Sequence: Synthetic oligonucleotide
  Sense strand starting at position 2693 of SEQ ID NO: 1884326
ucucaucuugaaggaauau

SEQ ID NO: 2257323 - RNA, 19 nt, Artificial Sequence
  Description of Artificial Sequence: Synthetic oligonucleotide
  Antisense strand to SEQ ID NO: 2257322
auauuccuucaagaugaga

SEQ ID NO: 2257324 - RNA, 19 nt, Artificial Sequence
  Description of Artificial Sequence: Synthetic oligonucleotide
  Sense strand starting at position 2786 of SEQ ID NO: 1884326
ucuguaagaucuccaugga

SEQ ID NO: 2257325 - RNA, 19 nt, Artificial Sequence
  Description of Artificial Sequence: Synthetic oligonucleotide
  Antisense strand to SEQ ID NO: 2257324
uccauggagaucuuacaga

SEQ ID NO: 2257326 - RNA, 19 nt, Artificial Sequence
  Description of Artificial Sequence: Synthetic oligonucleotide
  Sense strand starting at position 2789 of SEQ ID NO: 1884326
guaagaucuccauggauac

SEQ ID NO: 2257327 - RNA, 19 nt, Artificial Sequence
  Description of Artificial Sequence: Synthetic oligonucleotide
  Antisense strand to SEQ ID NO: 2257326
guauccauggagaucuuac

SEQ ID NO: 2257328 - RNA, 19 nt, Artificial Sequence
  Description of Artificial Sequence: Synthetic oligonucleotide
  Sense strand starting at position 2854 of SEQ ID NO: 1884326
uccauuacaugugugagga

SEQ ID NO: 2257329 - RNA, 19 nt, Artificial Sequence
  Description of Artificial Sequence: Synthetic oligonucleotide
  Antisense strand to SEQ ID NO: 2257328
uccucacacauguaaugga

SEQ ID NO: 2257330 - RNA, 19 nt, Artificial Sequence
  Description of Artificial Sequence: Synthetic oligonucleotide
  Sense strand starting at position 2855 of SEQ ID NO: 1884326
ccauuacaugugugaggag

SEQ ID NO: 2257331 - RNA, 19 nt, Artificial Sequence
  Description of Artificial Sequence: Synthetic oligonucleotide
  Antisense strand to SEQ ID NO: 2257330
cuccucacacauguaaugg

SEQ ID NO: 2257332 - RNA, 19 nt, Artificial Sequence
  Description of Artificial Sequence: Synthetic oligonucleotide
  Sense strand starting at position 2903 of SEQ ID NO: 1884326
ugaguugcaagguacagau

SEQ ID NO: 2257333 - RNA, 19 nt, Artificial Sequence
  Description of Artificial Sequence: Synthetic oligonucleotide
  Antisense strand to SEQ ID NO: 2257332
aucuguaccuugcaacuca

SEQ ID NO: 2257334 - RNA, 19 nt, Artificial Sequence
  Description of Artificial Sequence: Synthetic oligonucleotide
  Sense strand starting at position 3778 of SEQ ID NO: 1884326
cgucgaaauuucuuagcac

SEQ ID NO: 2257335 - RNA, 19 nt, Artificial Sequence
  Description of Artificial Sequence: Synthetic oligonucleotide
  Antisense strand to SEQ ID NO: 2257334
gugcuaagaaauuucgacg

SEQ ID NO: 2257336 - RNA, 19 nt, Artificial Sequence
  Description of Artificial Sequence: Synthetic oligonucleotide
  Sense strand starting at position 3882 of SEQ ID NO: 1884326
cuaagaugcccuuaauuga

SEQ ID NO: 2257337 - RNA, 19 nt, Artificial Sequence
  Description of Artificial Sequence: Synthetic oligonucleotide
  Antisense strand to SEQ ID NO: 2257336
ucaauuaagggcaucuuag

SEQ ID NO: 2257338 - RNA, 19 nt, Artificial Sequence
  Description of Artificial Sequence: Synthetic oligonucleotide
  Sense strand starting at position 107 of SEQ ID NO: 1884327
aggugugaaucaccuauac

SEQ ID NO: 2257339 - RNA, 19 nt, Artificial Sequence
  Description of Artificial Sequence: Synthetic oligonucleotide
  Antisense strand to SEQ ID NO: 2257338
guauaggugauucacaccu

SEQ ID NO: 2257340 - RNA, 19 nt, Artificial Sequence
  Description of Artificial Sequence: Synthetic oligonucleotide
  Sense strand starting at position 167 of SEQ ID NO: 1884327
ggagaaucuaaacguuaaa

SEQ ID NO: 2257341 - RNA, 19 nt, Artificial Sequence
  Description of Artificial Sequence: Synthetic oligonucleotide
  Antisense strand to SEQ ID NO: 2257340
uuuaacguuuagauucucc

SEQ ID NO: 2257342 - RNA, 19 nt, Artificial Sequence
  Description of Artificial Sequence: Synthetic oligonucleotide
  Sense strand starting at position 201 of SEQ ID NO: 1884327
uccauaugccuuuagagga

SEQ ID NO: 2257343 - RNA, 19 nt, Artificial Sequence
  Description of Artificial Sequence: Synthetic oligonucleotide
  Antisense strand to SEQ ID NO: 2257342
uccucuaaaggcauaugga

SEQ ID NO: 2257344 - RNA, 19 nt, Artificial Sequence
  Description of Artificial Sequence: Synthetic oligonucleotide
  Sense strand starting at position 308 of SEQ ID NO: 1884327
ugagguuguuuccuuauca

SEQ ID NO: 2257345 - RNA, 19 nt, Artificial Sequence
  Description of Artificial Sequence: Synthetic oligonucleotide
  Antisense strand to SEQ ID NO: 2257344
ugauaaggaaacaaccuca

SEQ ID NO: 2257346 - RNA, 19 nt, Artificial Sequence
  Description of Artificial Sequence: Synthetic oligonucleotide
  Sense strand starting at position 309 of SEQ ID NO: 1884327
gagguuguuuccuuaucaa

SEQ ID NO: 2257347 - RNA, 19 nt, Artificial Sequence
  Description of Artificial Sequence: Synthetic oligonucleotide
  Antisense strand to SEQ ID NO: 2257346
uugauaaggaaacaaccuc

SEQ ID NO: 2257348 - RNA, 19 nt, Artificial Sequence
  Description of Artificial Sequence: Synthetic oligonucleotide
  Sense strand starting at position 312 of SEQ ID NO: 1884327
guuguuuccuuaucaauaa

SEQ ID NO: 2257349 - RNA, 19 nt, Artificial Sequence
  Description of Artificial Sequence: Synthetic oligonucleotide
  Antisense strand to SEQ ID NO: 2257348
uuauugauaaggaaacaac

SEQ ID NO: 2257350 - RNA, 19 nt, Artificial Sequence
  Description of Artificial Sequence: Synthetic oligonucleotide
  Sense strand starting at position 379 of SEQ ID NO: 1884327
agguguauaaaguggcaaa

SEQ ID NO: 2257351 - RNA, 19 nt, Artificial Sequence
  Description of Artificial Sequence: Synthetic oligonucleotide
  Antisense strand to SEQ ID NO: 2257350
uuugccacuuuauacaccu

SEQ ID NO: 2257352 - RNA, 19 nt, Artificial Sequence
  Description of Artificial Sequence: Synthetic oligonucleotide
  Sense strand starting at position 499 of SEQ ID NO: 1884327
ucaagaaauugccugauac

SEQ ID NO: 2257353 - RNA, 19 nt, Artificial Sequence
  Description of Artificial Sequence: Synthetic oligonucleotide
  Antisense strand to SEQ ID NO: 2257352
guaucaggcaauuucuuga

SEQ ID NO: 2257354 - RNA, 19 nt, Artificial Sequence
  Description of Artificial Sequence: Synthetic oligonucleotide
  Sense strand starting at position 542 of SEQ ID NO: 1884327
guaucauucccacagcaag

SEQ ID NO: 2257355 - RNA, 19 nt, Artificial Sequence
  Description of Artificial Sequence: Synthetic oligonucleotide
  Antisense strand to SEQ ID NO: 2257354
cuugcugugggaaugauac

SEQ ID NO: 2257356 - RNA, 19 nt, Artificial Sequence
  Description of Artificial Sequence: Synthetic oligonucleotide
  Sense strand starting at position 610 of SEQ ID NO: 1884327
gucgaaucagcucacaaau

SEQ ID NO: 2257357 - RNA, 19 nt, Artificial Sequence
  Description of Artificial Sequence: Synthetic oligonucleotide
  Antisense strand to SEQ ID NO: 2257356
auuugugagcugauucgac

SEQ ID NO: 2257358 - RNA, 19 nt, Artificial Sequence
  Description of Artificial Sequence: Synthetic oligonucleotide
  Sense strand starting at position 654 of SEQ ID NO: 1884327
uguucuuggcaucaauagu

SEQ ID NO: 2257359 - RNA, 19 nt, Artificial Sequence
  Description of Artificial Sequence: Synthetic oligonucleotide
  Antisense strand to SEQ ID NO: 2257358
acuauugaugccaagaaca

SEQ ID NO: 2257360 - RNA, 19 nt, Artificial Sequence
  Description of Artificial Sequence: Synthetic oligonucleotide
  Sense strand starting at position 715 of SEQ ID NO: 1884327
ggguuugauggugaccuuu

SEQ ID NO: 2257361 - RNA, 19 nt, Artificial Sequence
  Description of Artificial Sequence: Synthetic oligonucleotide
  Antisense strand to SEQ ID NO: 2257360
aaaggucaccaucaaaccc

SEQ ID NO: 2257362 - RNA, 19 nt, Artificial Sequence
  Description of Artificial Sequence: Synthetic oligonucleotide
  Sense strand starting at position 721 of SEQ ID NO: 1884327
gauggugaccuuugguuaa

SEQ ID NO: 2257363 - RNA, 19 nt, Artificial Sequence
  Description of Artificial Sequence: Synthetic oligonucleotide
  Antisense strand to SEQ ID NO: 2257362
uuaaccaaaggucaccauc

SEQ ID NO: 2257364 - RNA, 19 nt, Artificial Sequence
  Description of Artificial Sequence: Synthetic oligonucleotide
  Sense strand starting at position 723 of SEQ ID NO: 1884327
uggugaccuuugguuaauc

SEQ ID NO: 2257365 - RNA, 19 nt, Artificial Sequence
  Description of Artificial Sequence: Synthetic oligonucleotide
  Antisense strand to SEQ ID NO: 2257364
gauuaaccaaaggucacca

SEQ ID NO: 2257366 - RNA, 19 nt, Artificial Sequence
  Description of Artificial Sequence: Synthetic oligonucleotide
  Sense strand starting at position 728 of SEQ ID NO: 1884327
accuuugguuaauccugaa

SEQ ID NO: 2257367 - RNA, 19 nt, Artificial Sequence
  Description of Artificial Sequence: Synthetic oligonucleotide
  Antisense strand to SEQ ID NO: 2257366
uucaggauuaaccaaaggu

SEQ ID NO: 2257368 - RNA, 19 nt, Artificial Sequence
  Description of Artificial Sequence: Synthetic oligonucleotide
  Sense strand starting at position 732 of SEQ ID NO: 1884327
uugguuaauccugaacuca

SEQ ID NO: 2257369 - RNA, 19 nt, Artificial Sequence
  Description of Artificial Sequence: Synthetic oligonucleotide
  Antisense strand to SEQ ID NO: 2257368
ugaguucaggauuaaccaa

SEQ ID NO: 2257370 - RNA, 19 nt, Artificial Sequence
  Description of Artificial Sequence: Synthetic oligonucleotide
  Sense strand starting at position 802 of SEQ ID NO: 1884327
acaggauucucagcgggaa

SEQ ID NO: 2257371 - RNA, 19 nt, Artificial Sequence
  Description of Artificial Sequence: Synthetic oligonucleotide
  Antisense strand to SEQ ID NO: 2257370
uucccgcugagaauccugu

SEQ ID NO: 2257372 - RNA, 19 nt, Artificial Sequence
  Description of Artificial Sequence: Synthetic oligonucleotide
  Sense strand starting at position 803 of SEQ ID NO: 1884327
caggauucucagcgggaag

SEQ ID NO: 2257373 - RNA, 19 nt, Artificial Sequence
  Description of Artificial Sequence: Synthetic oligonucleotide
  Antisense strand to SEQ ID NO: 2257372
cuucccgcugagaauccug

SEQ ID NO: 2257374 - RNA, 19 nt, Artificial Sequence
  Description of Artificial Sequence: Synthetic oligonucleotide
  Sense strand starting at position 805 of SEQ ID NO: 1884327
ggauucucagcgggaagga

SEQ ID NO: 2257375 - RNA, 19 nt, Artificial Sequence
  Description of Artificial Sequence: Synthetic oligonucleotide
  Antisense strand to SEQ ID NO: 2257374
uccuucccgcugagaaucc

SEQ ID NO: 2257376 - RNA, 19 nt, Artificial Sequence
  Description of Artificial Sequence: Synthetic oligonucleotide
  Sense strand starting at position 847 of SEQ ID NO: 1884327
uugucuuagggcugaacca

SEQ ID NO: 2257377 - RNA, 19 nt, Artificial Sequence
  Description of Artificial Sequence: Synthetic oligonucleotide
  Antisense strand to SEQ ID NO: 2257376
ugguucagcccuaagacaa

SEQ ID NO: 2257378 - RNA, 19 nt, Artificial Sequence
  Description of Artificial Sequence: Synthetic oligonucleotide
  Sense strand starting at position 848 of SEQ ID NO: 1884327
ugucuuagggcugaaccau

SEQ ID NO: 2257379 - RNA, 19 nt, Artificial Sequence
  Description of Artificial Sequence: Synthetic oligonucleotide
  Antisense strand to SEQ ID NO: 2257378
augguucagcccuaagaca

SEQ ID NO: 2257380 - RNA, 19 nt, Artificial Sequence
  Description of Artificial Sequence: Synthetic oligonucleotide
  Sense strand starting at position 880 of SEQ ID NO: 1884327
cuuggauucccucaaguca

SEQ ID NO: 2257381 - RNA, 19 nt, Artificial Sequence
  Description of Artificial Sequence: Synthetic oligonucleotide
  Antisense strand to SEQ ID NO: 2257380
ugacuugagggaauccaag

SEQ ID NO: 2257382 - RNA, 19 nt, Artificial Sequence
  Description of Artificial Sequence: Synthetic oligonucleotide
  Sense strand starting at position 1080 of SEQ ID NO: 1884327
cugucugcgaggcuuaagu

SEQ ID NO: 2257383 - RNA, 19 nt, Artificial Sequence
  Description of Artificial Sequence: Synthetic oligonucleotide
  Antisense strand to SEQ ID NO: 2257382
acuuaagccucgcagacag

SEQ ID NO: 2257384 - RNA, 19 nt, Artificial Sequence
  Description of Artificial Sequence: Synthetic oligonucleotide
  Sense strand starting at position 1229 of SEQ ID NO: 1884327
ggcacagaguucccacaaa

SEQ ID NO: 2257385 - RNA, 19 nt, Artificial Sequence
  Description of Artificial Sequence: Synthetic oligonucleotide
  Antisense strand to SEQ ID NO: 2257384
uuugugggaacucugugcc

SEQ ID NO: 2257386 - RNA, 19 nt, Artificial Sequence
  Description of Artificial Sequence: Synthetic oligonucleotide
  Sense strand starting at position 1275 of SEQ ID NO: 1884327
ggacaagaauggucuguag

SEQ ID NO: 2257387 - RNA, 19 nt, Artificial Sequence
  Description of Artificial Sequence: Synthetic oligonucleotide
  Antisense strand to SEQ ID NO: 2257386
cuacagaccauucuugucc

SEQ ID NO: 2257388 - RNA, 19 nt, Artificial Sequence
  Description of Artificial Sequence: Synthetic oligonucleotide
  Sense strand starting at position 1277 of SEQ ID NO: 1884327
acaagaauggucuguagcu

SEQ ID NO: 2257389 - RNA, 19 nt, Artificial Sequence
  Description of Artificial Sequence: Synthetic oligonucleotide
  Antisense strand to SEQ ID NO: 2257388
agcuacagaccauucuugu

SEQ ID NO: 2257390 - RNA, 19 nt, Artificial Sequence
  Description of Artificial Sequence: Synthetic oligonucleotide
  Sense strand starting at position 1278 of SEQ ID NO: 1884327
caagaauggucuguagcug

SEQ ID NO: 2257391 - RNA, 19 nt, Artificial Sequence
  Description of Artificial Sequence: Synthetic oligonucleotide
  Antisense strand to SEQ ID NO: 2257390
cagcuacagaccauucuug

SEQ ID NO: 2257392 - RNA, 19 nt, Artificial Sequence
  Description of Artificial Sequence: Synthetic oligonucleotide
  Sense strand starting at position 1360 of SEQ ID NO: 1884327
acuauaugagauuggcauu

SEQ ID NO: 2257393 - RNA, 19 nt, Artificial Sequence
  Description of Artificial Sequence: Synthetic oligonucleotide
  Antisense strand to SEQ ID NO: 2257392
aaugccaaucucauauagu

SEQ ID NO: 2257394 - RNA, 19 nt, Artificial Sequence
  Description of Artificial Sequence: Synthetic oligonucleotide
  Sense strand starting at position 1366 of SEQ ID NO: 1884327
ugagauuggcauugucaac

SEQ ID NO: 2257395 - RNA, 19 nt, Artificial Sequence
  Description of Artificial Sequence: Synthetic oligonucleotide
  Antisense strand to SEQ ID NO: 2257394
guugacaaugccaaucuca

SEQ ID NO: 2257396 - RNA, 19 nt, Artificial Sequence
  Description of Artificial Sequence: Synthetic oligonucleotide
  Sense strand starting at position 1422 of SEQ ID NO: 1884327
ggaaauucuauguacucga

SEQ ID NO: 2257397 - RNA, 19 nt, Artificial Sequence
  Description of Artificial Sequence: Synthetic oligonucleotide
  Antisense strand to SEQ ID NO: 2257396
ucgaguacauagaauuucc

SEQ ID NO: 2257398 - RNA, 19 nt, Artificial Sequence
  Description of Artificial Sequence: Synthetic oligonucleotide
  Sense strand starting at position 1427 of SEQ ID NO: 1884327
uucuauguacucgaguuua

SEQ ID NO: 2257399 - RNA, 19 nt, Artificial Sequence
  Description of Artificial Sequence: Synthetic oligonucleotide
  Antisense strand to SEQ ID NO: 2257398
uaaacucgaguacauagaa

SEQ ID NO: 2257400 - RNA, 19 nt, Artificial Sequence
  Description of Artificial Sequence: Synthetic oligonucleotide
  Sense strand starting at position 1463 of SEQ ID NO: 1884327
acugcuuuggaaugaggua

SEQ ID NO: 2257401 - RNA, 19 nt, Artificial Sequence
  Description of Artificial Sequence: Synthetic oligonucleotide
  Antisense strand to SEQ ID NO: 2257400
uaccucauuccaaagcagu

SEQ ID NO: 2257402 - RNA, 19 nt, Artificial Sequence
  Description of Artificial Sequence: Synthetic oligonucleotide
  Sense strand starting at position 1464 of SEQ ID NO: 1884327
cugcuuuggaaugagguau

SEQ ID NO: 2257403 - RNA, 19 nt, Artificial Sequence
  Description of Artificial Sequence: Synthetic oligonucleotide
  Antisense strand to SEQ ID NO: 2257402
auaccucauuccaaagcag

SEQ ID NO: 2257404 - RNA, 19 nt, Artificial Sequence
  Description of Artificial Sequence: Synthetic oligonucleotide
  Sense strand starting at position 1526 of SEQ ID NO: 1884327
aguccucuucugcaagaaa

SEQ ID NO: 2257405 - RNA, 19 nt, Artificial Sequence
  Description of Artificial Sequence: Synthetic oligonucleotide
  Antisense strand to SEQ ID NO: 2257404
uuucuugcagaagaggacu

SEQ ID NO: 2257406 - RNA, 19 nt, Artificial Sequence
  Description of Artificial Sequence: Synthetic oligonucleotide
  Sense strand starting at position 2146 of SEQ ID NO: 1884327
cugagucacugucccagaa

SEQ ID NO: 2257407 - RNA, 19 nt, Artificial Sequence
  Description of Artificial Sequence: Synthetic oligonucleotide
  Antisense strand to SEQ ID NO: 2257406
uucugggacagugacucag

SEQ ID NO: 2257408 - RNA, 19 nt, Artificial Sequence
  Description of Artificial Sequence: Synthetic oligonucleotide
  Sense strand starting at position 2506 of SEQ ID NO: 1884327
gggaacgccucucuuagaa

SEQ ID NO: 2257409 - RNA, 19 nt, Artificial Sequence
  Description of Artificial Sequence: Synthetic oligonucleotide
  Antisense strand to SEQ ID NO: 2257408
uucuaagagaggcguuccc

SEQ ID NO: 2257410 - RNA, 19 nt, Artificial Sequence
  Description of Artificial Sequence: Synthetic oligonucleotide
  Sense strand starting at position 2751 of SEQ ID NO: 1884327
gagaacagagcucgugaca

SEQ ID NO: 2257411 - RNA, 19 nt, Artificial Sequence
  Description of Artificial Sequence: Synthetic oligonucleotide
  Antisense strand to SEQ ID NO: 2257410
ugucacgagcucuguucuc

SEQ ID NO: 2257412 - RNA, 19 nt, Artificial Sequence
  Description of Artificial Sequence: Synthetic oligonucleotide
  Sense strand starting at position 2879 of SEQ ID NO: 1884327
ucccuuccuagacgugaga

SEQ ID NO: 2257413 - RNA, 19 nt, Artificial Sequence
  Description of Artificial Sequence: Synthetic oligonucleotide
  Antisense strand to SEQ ID NO: 2257412
ucucacgucuaggaaggga

SEQ ID NO: 2257414 - RNA, 19 nt, Artificial Sequence
  Description of Artificial Sequence: Synthetic oligonucleotide
  Sense strand starting at position 2912 of SEQ ID NO: 1884327
augaaucagcauugagaca

SEQ ID NO: 2257415 - RNA, 19 nt, Artificial Sequence
  Description of Artificial Sequence: Synthetic oligonucleotide
  Antisense strand to SEQ ID NO: 2257414
ugucucaaugcugauucau

SEQ ID NO: 2257416 - RNA, 19 nt, Artificial Sequence
  Description of Artificial Sequence: Synthetic oligonucleotide
  Sense strand starting at position 2935 of SEQ ID NO: 1884327
auugguuugcuguucgcau

SEQ ID NO: 2257417 - RNA, 19 nt, Artificial Sequence
  Description of Artificial Sequence: Synthetic oligonucleotide
  Antisense strand to SEQ ID NO: 2257416
augcgaacagcaaaccaau

SEQ ID NO: 2257418 - RNA, 19 nt, Artificial Sequence
  Description of Artificial Sequence: Synthetic oligonucleotide
  Sense strand starting at position 106 of SEQ ID NO: 1884328
auggcacugagaggucaaa

SEQ ID NO: 2257419 - RNA, 19 nt, Artificial Sequence
  Description of Artificial Sequence: Synthetic oligonucleotide
  Antisense strand to SEQ ID NO: 2257418
uuugaccucucagugccau

SEQ ID NO: 2257420 - RNA, 19 nt, Artificial Sequence
  Description of Artificial Sequence: Synthetic oligonucleotide
  Sense strand starting at position 170 of SEQ ID NO: 1884328
gcagguauugugggucauc

SEQ ID NO: 2257421 - RNA, 19 nt, Artificial Sequence
  Description of Artificial Sequence: Synthetic oligonucleotide
  Antisense strand to SEQ ID NO: 2257420
gaugacccacaauaccugc

SEQ ID NO: 2257422 - RNA, 19 nt, Artificial Sequence
  Description of Artificial Sequence: Synthetic oligonucleotide
  Sense strand starting at position 173 of SEQ ID NO: 1884328
gguauugugggucauccuu

SEQ ID NO: 2257423 - RNA, 19 nt, Artificial Sequence
  Description of Artificial Sequence: Synthetic oligonucleotide
  Antisense strand to SEQ ID NO: 2257422
aaggaugacccacaauacc

SEQ ID NO: 2257424 - RNA, 19 nt, Artificial Sequence
  Description of Artificial Sequence: Synthetic oligonucleotide
  Sense strand starting at position 231 of SEQ ID NO: 1884328
ggagcccucaccuggaaau

SEQ ID NO: 2257425 - RNA, 19 nt, Artificial Sequence
  Description of Artificial Sequence: Synthetic oligonucleotide
  Antisense strand to SEQ ID NO: 2257424
auuuccaggugagggcucc

SEQ ID NO: 2257426 - RNA, 19 nt, Artificial Sequence
  Description of Artificial Sequence: Synthetic oligonucleotide
  Sense strand starting at position 696 of SEQ ID NO: 1884328
gacagcaguuccuacgaga

SEQ ID NO: 2257427 - RNA, 19 nt, Artificial Sequence
  Description of Artificial Sequence: Synthetic oligonucleotide
  Antisense strand to SEQ ID NO: 2257426
ucucguaggaacugcuguc

SEQ ID NO: 2257428 - RNA, 19 nt, Artificial Sequence
  Description of Artificial Sequence: Synthetic oligonucleotide
  Sense strand starting at position 1383 of SEQ ID NO: 1884328
gcuugcagcucuguaguga

SEQ ID NO: 2257429 - RNA, 19 nt, Artificial Sequence
  Description of Artificial Sequence: Synthetic oligonucleotide
  Antisense strand to SEQ ID NO: 2257428
ucacuacagagcugcaagc

SEQ ID NO: 2257430 - RNA, 19 nt, Artificial Sequence
  Description of Artificial Sequence: Synthetic oligonucleotide
  Sense strand starting at position 2710 of SEQ ID NO: 1884328
uuucuugaaccuggaaacu

SEQ ID NO: 2257431 - RNA, 19 nt, Artificial Sequence
  Description of Artificial Sequence: Synthetic oligonucleotide
  Antisense strand to SEQ ID NO: 2257430
aguuuccagguucaagaaa

SEQ ID NO: 2257432 - RNA, 19 nt, Artificial Sequence
  Description of Artificial Sequence: Synthetic oligonucleotide
  Sense strand starting at position 3052 of SEQ ID NO: 1884328
gaggaaacugcauagcguu

SEQ ID NO: 2257433 - RNA, 19 nt, Artificial Sequence
  Description of Artificial Sequence: Synthetic oligonucleotide
  Antisense strand to SEQ ID NO: 2257432
aacgcuaugcaguuuccuc

SEQ ID NO: 2257434 - RNA, 19 nt, Artificial Sequence
  Description of Artificial Sequence: Synthetic oligonucleotide
  Sense strand starting at position 3064 of SEQ ID NO: 1884328
uagcguucccaggacucua

SEQ ID NO: 2257435 - RNA, 19 nt, Artificial Sequence
  Description of Artificial Sequence: Synthetic oligonucleotide
  Antisense strand to SEQ ID NO: 2257434
uagaguccugggaacgcua

SEQ ID NO: 2257436 - RNA, 19 nt, Artificial Sequence
  Description of Artificial Sequence: Synthetic oligonucleotide
  Sense strand starting at position 3104 of SEQ ID NO: 1884328
uuaagagccgcugaucuaa

SEQ ID NO: 2257437 - RNA, 19 nt, Artificial Sequence
  Description of Artificial Sequence: Synthetic oligonucleotide
  Antisense strand to SEQ ID NO: 2257436
uuagaucagcggcucuuaa

SEQ ID NO: 2257438 - RNA, 19 nt, Artificial Sequence
  Description of Artificial Sequence: Synthetic oligonucleotide
  Sense strand starting at position 3174 of SEQ ID NO: 1884328
gagggugugacuugccuga

SEQ ID NO: 2257439 - RNA, 19 nt, Artificial Sequence
  Description of Artificial Sequence: Synthetic oligonucleotide
  Antisense strand to SEQ ID NO: 2257438
ucaggcaagucacacccuc

SEQ ID NO: 2257440 - RNA, 19 nt, Artificial Sequence
  Description of Artificial Sequence: Synthetic oligonucleotide
  Sense strand starting at position 3176 of SEQ ID NO: 1884328
gggugugacuugccugaaa

SEQ ID NO: 2257441 - RNA, 19 nt, Artificial Sequence
  Description of Artificial Sequence: Synthetic oligonucleotide
  Antisense strand to SEQ ID NO: 2257440
uuucaggcaagucacaccc

SEQ ID NO: 2257442 - RNA, 19 nt, Artificial Sequence
  Description of Artificial Sequence: Synthetic oligonucleotide
  Sense strand starting at position 3178 of SEQ ID NO: 1884328
gugugacuugccugaaaua

SEQ ID NO: 2257443 - RNA, 19 nt, Artificial Sequence
  Description of Artificial Sequence: Synthetic oligonucleotide
  Antisense strand to SEQ ID NO: 2257442
uauuucaggcaagucacac

SEQ ID NO: 2257444 - RNA, 19 nt, Artificial Sequence
  Description of Artificial Sequence: Synthetic oligonucleotide
  Sense strand starting at position 3179 of SEQ ID NO: 1884328
ugugacuugccugaaauac

SEQ ID NO: 2257445 - RNA, 19 nt, Artificial Sequence
  Description of Artificial Sequence: Synthetic oligonucleotide
  Antisense strand to SEQ ID NO: 2257444
guauuucaggcaagucaca

SEQ ID NO: 2257446 - RNA, 19 nt, Artificial Sequence
  Description of Artificial Sequence: Synthetic oligonucleotide
  Sense strand starting at position 3195 of SEQ ID NO: 1884328
uaccuaaccuggugaguga

SEQ ID NO: 2257447 - RNA, 19 nt, Artificial Sequence
  Description of Artificial Sequence: Synthetic oligonucleotide
  Antisense strand to SEQ ID NO: 2257446
ucacucaccagguuaggua

SEQ ID NO: 2257448 - RNA, 19 nt, Artificial Sequence
  Description of Artificial Sequence: Synthetic oligonucleotide
  Sense strand starting at position 3204 of SEQ ID NO: 1884328
uggugagugauggguggaa

SEQ ID NO: 2257449 - RNA, 19 nt, Artificial Sequence
  Description of Artificial Sequence: Synthetic oligonucleotide
  Antisense strand to SEQ ID NO: 2257448
uuccacccaucacucacca

SEQ ID NO: 2257450 - RNA, 19 nt, Artificial Sequence
  Description of Artificial Sequence: Synthetic oligonucleotide
  Sense strand starting at position 3243 of SEQ ID NO: 1884328
gcagguguccagggacaga

SEQ ID NO: 2257451 - RNA, 19 nt, Artificial Sequence
  Description of Artificial Sequence: Synthetic oligonucleotide
  Antisense strand to SEQ ID NO: 2257450
ucugucccuggacaccugc

SEQ ID NO: 2257452 - RNA, 19 nt, Artificial Sequence
  Description of Artificial Sequence: Synthetic oligonucleotide
  Sense strand starting at position 3256 of SEQ ID NO: 1884328
gacagagaagggugguuua

SEQ ID NO: 2257453 - RNA, 19 nt, Artificial Sequence
  Description of Artificial Sequence: Synthetic oligonucleotide
  Antisense strand to SEQ ID NO: 2257452
uaaaccacccuucucuguc

SEQ ID NO: 2257454 - RNA, 19 nt, Artificial Sequence
  Description of Artificial Sequence: Synthetic oligonucleotide
  Sense strand starting at position 3298 of SEQ ID NO: 1884328
guagauggauuugauaacu

SEQ ID NO: 2257455 - RNA, 19 nt, Artificial Sequence
  Description of Artificial Sequence: Synthetic oligonucleotide
  Antisense strand to SEQ ID NO: 2257454
aguuaucaaauccaucuac

SEQ ID NO: 2257456 - RNA, 19 nt, Artificial Sequence
  Description of Artificial Sequence: Synthetic oligonucleotide
  Sense strand starting at position 3405 of SEQ ID NO: 1884328
uggagacaaucuuaacaau

SEQ ID NO: 2257457 - RNA, 19 nt, Artificial Sequence
  Description of Artificial Sequence: Synthetic oligonucleotide
  Antisense strand to SEQ ID NO: 2257456
auuguuaagauugucucca

SEQ ID NO: 2257458 - RNA, 19 nt, Artificial Sequence
  Description of Artificial Sequence: Synthetic oligonucleotide
  Sense strand starting at position 3416 of SEQ ID NO: 1884328
uuaacaauauuggguuuga

SEQ ID NO: 2257459 - RNA, 19 nt, Artificial Sequence
  Description of Artificial Sequence: Synthetic oligonucleotide
  Antisense strand to SEQ ID NO: 2257458
ucaaacccaauauuguuaa

SEQ ID NO: 2257460 - RNA, 19 nt, Artificial Sequence
  Description of Artificial Sequence: Synthetic oligonucleotide
  Sense strand starting at position 3764 of SEQ ID NO: 1884328
aaguguaaaugauagaaga

SEQ ID NO: 2257461 - RNA, 19 nt, Artificial Sequence
  Description of Artificial Sequence: Synthetic oligonucleotide
  Antisense strand to SEQ ID NO: 2257460
ucuucuaucauuuacacuu

SEQ ID NO: 2257462 - RNA, 19 nt, Artificial Sequence
  Description of Artificial Sequence: Synthetic oligonucleotide
  Sense strand starting at position 3862 of SEQ ID NO: 1884328
gccauagacuaggacgaau

SEQ ID NO: 2257463 - RNA, 19 nt, Artificial Sequence
  Description of Artificial Sequence: Synthetic oligonucleotide
  Antisense strand to SEQ ID NO: 2257462
auucguccuagucuauggc

SEQ ID NO: 2257464 - RNA, 19 nt, Artificial Sequence
  Description of Artificial Sequence: Synthetic oligonucleotide
  Sense strand starting at position 3890 of SEQ ID NO: 1884328
aauucuaucugauguagga

SEQ ID NO: 2257465 - RNA, 19 nt, Artificial Sequence
  Description of Artificial Sequence: Synthetic oligonucleotide
  Antisense strand to SEQ ID NO: 2257464
uccuacaucagauagaauu

SEQ ID NO: 2257466 - RNA, 19 nt, Artificial Sequence
  Description of Artificial Sequence: Synthetic oligonucleotide
  Sense strand starting at position 3899 of SEQ ID NO: 1884328
ugauguaggacuuguauaa

SEQ ID NO: 2257467 - RNA, 19 nt, Artificial Sequence
  Description of Artificial Sequence: Synthetic oligonucleotide
  Antisense strand to SEQ ID NO: 2257466
uuauacaaguccuacauca

SEQ ID NO: 2257468 - RNA, 19 nt, Artificial Sequence
  Description of Artificial Sequence: Synthetic oligonucleotide
  Sense strand starting at position 9 of SEQ ID NO: 1884329
cuguucucaucuuugagag

SEQ ID NO: 2257469 - RNA, 19 nt, Artificial Sequence
  Description of Artificial Sequence: Synthetic oligonucleotide
  Antisense strand to SEQ ID NO: 2257468
cucucaaagaugagaacag

SEQ ID NO: 2257470 - RNA, 19 nt, Artificial Sequence
  Description of Artificial Sequence: Synthetic oligonucleotide
  Sense strand starting at position 10 of SEQ ID NO: 1884329
uguucucaucuuugagagu

SEQ ID NO: 2257471 - RNA, 19 nt, Artificial Sequence
  Description of Artificial Sequence: Synthetic oligonucleotide
  Antisense strand to SEQ ID NO: 2257470
acucucaaagaugagaaca

SEQ ID NO: 2257472 - RNA, 19 nt, Artificial Sequence
  Description of Artificial Sequence: Synthetic oligonucleotide
  Sense strand starting at position 265 of SEQ ID NO: 1884329
acuaauacgucauuuacgu

SEQ ID NO: 2257473 - RNA, 19 nt, Artificial Sequence
  Description of Artificial Sequence: Synthetic oligonucleotide
  Antisense strand to SEQ ID NO: 2257472
acguaaaugacguauuagu

SEQ ID NO: 2257474 - RNA, 19 nt, Artificial Sequence
  Description of Artificial Sequence: Synthetic oligonucleotide
  Sense strand starting at position 427 of SEQ ID NO: 1884329
ggagccauuacgcaugguu

SEQ ID NO: 2257475 - RNA, 19 nt, Artificial Sequence
  Description of Artificial Sequence: Synthetic oligonucleotide
  Antisense strand to SEQ ID NO: 2257474
aaccaugcguaauggcucc

SEQ ID NO: 2257476 - RNA, 19 nt, Artificial Sequence
  Description of Artificial Sequence: Synthetic oligonucleotide
  Sense strand starting at position 506 of SEQ ID NO: 1884329
ggcuguuaacuaugaugcu

SEQ ID NO: 2257477 - RNA, 19 nt, Artificial Sequence
  Description of Artificial Sequence: Synthetic oligonucleotide
  Antisense strand to SEQ ID NO: 2257476
agcaucauaguuaacagcc

SEQ ID NO: 2257478 - RNA, 19 nt, Artificial Sequence
  Description of Artificial Sequence: Synthetic oligonucleotide
  Sense strand starting at position 530 of SEQ ID NO: 1884329
acaggaaucugggugacuu

SEQ ID NO: 2257479 - RNA, 19 nt, Artificial Sequence
  Description of Artificial Sequence: Synthetic oligonucleotide
  Antisense strand to SEQ ID NO: 2257478
aagucacccagauuccugu

SEQ ID NO: 2257480 - RNA, 19 nt, Artificial Sequence
  Description of Artificial Sequence: Synthetic oligonucleotide
  Sense strand starting at position 531 of SEQ ID NO: 1884329
caggaaucugggugacuuc

SEQ ID NO: 2257481 - RNA, 19 nt, Artificial Sequence
  Description of Artificial Sequence: Synthetic oligonucleotide
  Antisense strand to SEQ ID NO: 2257480
gaagucacccagauuccug

SEQ ID NO: 2257482 - RNA, 19 nt, Artificial Sequence
  Description of Artificial Sequence: Synthetic oligonucleotide
  Sense strand starting at position 534 of SEQ ID NO: 1884329
gaaucugggugacuucuga

SEQ ID NO: 2257483 - RNA, 19 nt, Artificial Sequence
  Description of Artificial Sequence: Synthetic oligonucleotide
  Antisense strand to SEQ ID NO: 2257482
ucagaagucacccagauuc

SEQ ID NO: 2257484 - RNA, 19 nt, Artificial Sequence
  Description of Artificial Sequence: Synthetic oligonucleotide
  Sense strand starting at position 699 of SEQ ID NO: 1884329
gauuacucggguugucaua

SEQ ID NO: 2257485 - RNA, 19 nt, Artificial Sequence
  Description of Artificial Sequence: Synthetic oligonucleotide
  Antisense strand to SEQ ID NO: 2257484
uaugacaacccgaguaauc

SEQ ID NO: 2257486 - RNA, 19 nt, Artificial Sequence
  Description of Artificial Sequence: Synthetic oligonucleotide
  Sense strand starting at position 772 of SEQ ID NO: 1884329
uaaggaaaucuugguacga

SEQ ID NO: 2257487 - RNA, 19 nt, Artificial Sequence
  Description of Artificial Sequence: Synthetic oligonucleotide
  Antisense strand to SEQ ID NO: 2257486
ucguaccaagauuuccuua

SEQ ID NO: 2257488 - RNA, 19 nt, Artificial Sequence
  Description of Artificial Sequence: Synthetic oligonucleotide
  Sense strand starting at position 773 of SEQ ID NO: 1884329
aaggaaaucuugguacgau

SEQ ID NO: 2257489 - RNA, 19 nt, Artificial Sequence
  Description of Artificial Sequence: Synthetic oligonucleotide
  Antisense strand to SEQ ID NO: 2257488
aucguaccaagauuuccuu

SEQ ID NO: 2257490 - RNA, 19 nt, Artificial Sequence
  Description of Artificial Sequence: Synthetic oligonucleotide
  Sense strand starting at position 776 of SEQ ID NO: 1884329
gaaaucuugguacgaucua

SEQ ID NO: 2257491 - RNA, 19 nt, Artificial Sequence
  Description of Artificial Sequence: Synthetic oligonucleotide
  Antisense strand to SEQ ID NO: 2257490
uagaucguaccaagauuuc

SEQ ID NO: 2257492 - RNA, 19 nt, Artificial Sequence
  Description of Artificial Sequence: Synthetic oligonucleotide
  Sense strand starting at position 875 of SEQ ID NO: 1884329
ugagaauguuuccuuugga

SEQ ID NO: 2257493 - RNA, 19 nt, Artificial Sequence
  Description of Artificial Sequence: Synthetic oligonucleotide
  Antisense strand to SEQ ID NO: 2257492
uccaaaggaaacauucuca

SEQ ID NO: 2257494 - RNA, 19 nt, Artificial Sequence
  Description of Artificial Sequence: Synthetic oligonucleotide
  Sense strand starting at position 876 of SEQ ID NO: 1884329
gagaauguuuccuuuggaa

SEQ ID NO: 2257495 - RNA, 19 nt, Artificial Sequence
  Description of Artificial Sequence: Synthetic oligonucleotide
  Antisense strand to SEQ ID NO: 2257494
uuccaaaggaaacauucuc

SEQ ID NO: 2257496 - RNA, 19 nt, Artificial Sequence
  Description of Artificial Sequence: Synthetic oligonucleotide
  Sense strand starting at position 878 of SEQ ID NO: 1884329
gaauguuuccuuuggaaag

SEQ ID NO: 2257497 - RNA, 19 nt, Artificial Sequence
  Description of Artificial Sequence: Synthetic oligonucleotide
  Antisense strand to SEQ ID NO: 2257496
cuuuccaaaggaaacauuc

SEQ ID NO: 2257498 - RNA, 19 nt, Artificial Sequence
  Description of Artificial Sequence: Synthetic oligonucleotide
  Sense strand starting at position 911 of SEQ ID NO: 1884329
uuaggaaucugggcuuucu

SEQ ID NO: 2257499 - RNA, 19 nt, Artificial Sequence
  Description of Artificial Sequence: Synthetic oligonucleotide
  Antisense strand to SEQ ID NO: 2257498
agaaagcccagauuccuaa

SEQ ID NO: 2257500 - RNA, 19 nt, Artificial Sequence
  Description of Artificial Sequence: Synthetic oligonucleotide
  Sense strand starting at position 1091 of SEQ ID NO: 1884329
gcaguaaugcucugacaau

SEQ ID NO: 2257501 - RNA, 19 nt, Artificial Sequence
  Description of Artificial Sequence: Synthetic oligonucleotide
  Antisense strand to SEQ ID NO: 2257500
auugucagagcauuacugc

SEQ ID NO: 2257502 - RNA, 19 nt, Artificial Sequence
  Description of Artificial Sequence: Synthetic oligonucleotide
  Sense strand starting at position 1141 of SEQ ID NO: 1884329
gaugaaagccuucguaaag

SEQ ID NO: 2257503 - RNA, 19 nt, Artificial Sequence
  Description of Artificial Sequence: Synthetic oligonucleotide
  Antisense strand to SEQ ID NO: 2257502
cuuuacgaaggcuuucauc

SEQ ID NO: 2257504 - RNA, 19 nt, Artificial Sequence
  Description of Artificial Sequence: Synthetic oligonucleotide
  Sense strand starting at position 1362 of SEQ ID NO: 1884329
gggaaaggcuguuugaugu

SEQ ID NO: 2257505 - RNA, 19 nt, Artificial Sequence
  Description of Artificial Sequence: Synthetic oligonucleotide
  Antisense strand to SEQ ID NO: 2257504
acaucaaacagccuuuccc

SEQ ID NO: 2257506 - RNA, 19 nt, Artificial Sequence
  Description of Artificial Sequence: Synthetic oligonucleotide
  Sense strand starting at position 2204 of SEQ ID NO: 1884329
uguaauagguguuuaaguc

SEQ ID NO: 2257507 - RNA, 19 nt, Artificial Sequence
  Description of Artificial Sequence: Synthetic oligonucleotide
  Antisense strand to SEQ ID NO: 2257506
gacuuaaacaccuauuaca

SEQ ID NO: 2257508 - RNA, 19 nt, Artificial Sequence
  Description of Artificial Sequence: Synthetic oligonucleotide
  Sense strand starting at position 2205 of SEQ ID NO: 1884329
guaauagguguuuaaguca

SEQ ID NO: 2257509 - RNA, 19 nt, Artificial Sequence
  Description of Artificial Sequence: Synthetic oligonucleotide
  Antisense strand to SEQ ID NO: 2257508
ugacuuaaacaccuauuac

SEQ ID NO: 2257510 - RNA, 19 nt, Artificial Sequence
  Description of Artificial Sequence: Synthetic oligonucleotide
  Sense strand starting at position 2208 of SEQ ID NO: 1884329
auagguguuuaagucauga

SEQ ID NO: 2257511 - RNA, 19 nt, Artificial Sequence
  Description of Artificial Sequence: Synthetic oligonucleotide
  Antisense strand to SEQ ID NO: 2257510
ucaugacuuaaacaccuau

SEQ ID NO: 2257512 - RNA, 19 nt, Artificial Sequence
  Description of Artificial Sequence: Synthetic oligonucleotide
  Sense strand starting at position 2210 of SEQ ID NO: 1884329
agguguuuaagucaugauu

SEQ ID NO: 2257513 - RNA, 19 nt, Artificial Sequence
  Description of Artificial Sequence: Synthetic oligonucleotide
  Antisense strand to SEQ ID NO: 2257512
aaucaugacuuaaacaccu

SEQ ID NO: 2257514 - RNA, 19 nt, Artificial Sequence
  Description of Artificial Sequence: Synthetic oligonucleotide
  Sense strand starting at position 2606 of SEQ ID NO: 1884329
auuauuagccaggauuagu

SEQ ID NO: 2257515 - RNA, 19 nt, Artificial Sequence
  Description of Artificial Sequence: Synthetic oligonucleotide
  Antisense strand to SEQ ID NO: 2257514
acuaauccuggcuaauaau

SEQ ID NO: 2257516 - RNA, 19 nt, Artificial Sequence
  Description of Artificial Sequence: Synthetic oligonucleotide
  Sense strand starting at position 3189 of SEQ ID NO: 1884329
gaagaaagaguuuguuuac

SEQ ID NO: 2257517 - RNA, 19 nt, Artificial Sequence
  Description of Artificial Sequence: Synthetic oligonucleotide
  Antisense strand to SEQ ID NO: 2257516
guaaacaaacucuuucuuc

SEQ ID NO: 2257518 - RNA, 19 nt, Artificial Sequence
  Description of Artificial Sequence: Synthetic oligonucleotide
  Sense strand starting at position 3190 of SEQ ID NO: 1884329
aagaaagaguuuguuuaca

SEQ ID NO: 2257519 - RNA, 19 nt, Artificial Sequence
  Description of Artificial Sequence: Synthetic oligonucleotide
  Antisense strand to SEQ ID NO: 2257518
uguaaacaaacucuuucuu

SEQ ID NO: 2257520 - RNA, 19 nt, Artificial Sequence
  Description of Artificial Sequence: Synthetic oligonucleotide
  Sense strand starting at position 3192 of SEQ ID NO: 1884329
gaaagaguuuguuuacauu

SEQ ID NO: 2257521 - RNA, 19 nt, Artificial Sequence
  Description of Artificial Sequence: Synthetic oligonucleotide
  Antisense strand to SEQ ID NO: 2257520
aauguaaacaaacucuuuc

SEQ ID NO: 2257522 - RNA, 19 nt, Artificial Sequence
  Description of Artificial Sequence: Synthetic oligonucleotide
  Sense strand starting at position 3225 of SEQ ID NO: 1884329
guagcaugugcuguaacuu

SEQ ID NO: 2257523 - RNA, 19 nt, Artificial Sequence
  Description of Artificial Sequence: Synthetic oligonucleotide
  Antisense strand to SEQ ID NO: 2257522
aaguuacagcacaugcuac

SEQ ID NO: 2257524 - RNA, 19 nt, Artificial Sequence
  Description of Artificial Sequence: Synthetic oligonucleotide
  Sense strand starting at position 3234 of SEQ ID NO: 1884329
gcuguaacuugcccaggau

SEQ ID NO: 2257525 - RNA, 19 nt, Artificial Sequence
  Description of Artificial Sequence: Synthetic oligonucleotide
  Antisense strand to SEQ ID NO: 2257524
auccugggcaaguuacagc

SEQ ID NO: 2257526 - RNA, 19 nt, Artificial Sequence
  Description of Artificial Sequence: Synthetic oligonucleotide
  Sense strand starting at position 3292 of SEQ ID NO: 1884329
ggaccaaguccaggacuua

SEQ ID NO: 2257527 - RNA, 19 nt, Artificial Sequence
  Description of Artificial Sequence: Synthetic oligonucleotide
  Antisense strand to SEQ ID NO: 2257526
uaaguccuggacuuggucc

SEQ ID NO: 2257528 - RNA, 19 nt, Artificial Sequence
  Description of Artificial Sequence: Synthetic oligonucleotide
  Sense strand starting at position 3353 of SEQ ID NO: 1884329
gccuguuucucacucauca

SEQ ID NO: 2257529 - RNA, 19 nt, Artificial Sequence
  Description of Artificial Sequence: Synthetic oligonucleotide
  Antisense strand to SEQ ID NO: 2257528
ugaugagugagaaacaggc

SEQ ID NO: 2257530 - RNA, 19 nt, Artificial Sequence
  Description of Artificial Sequence: Synthetic oligonucleotide
  Sense strand starting at position 3408 of SEQ ID NO: 1884329
acaugccuuccugggagaa

SEQ ID NO: 2257531 - RNA, 19 nt, Artificial Sequence
  Description of Artificial Sequence: Synthetic oligonucleotide
  Antisense strand to SEQ ID NO: 2257530
uucucccaggaaggcaugu

SEQ ID NO: 2257532 - RNA, 19 nt, Artificial Sequence
  Description of Artificial Sequence: Synthetic oligonucleotide
  Sense strand starting at position 3452 of SEQ ID NO: 1884329
agaagccucuuagagauaa

SEQ ID NO: 2257533 - RNA, 19 nt, Artificial Sequence
  Description of Artificial Sequence: Synthetic oligonucleotide
  Antisense strand to SEQ ID NO: 2257532
uuaucucuaagaggcuucu

SEQ ID NO: 2257534 - RNA, 19 nt, Artificial Sequence
  Description of Artificial Sequence: Synthetic oligonucleotide
  Sense strand starting at position 3468 of SEQ ID NO: 1884329
uaaacauucggcuaaggcu

SEQ ID NO: 2257535 - RNA, 19 nt, Artificial Sequence
  Description of Artificial Sequence: Synthetic oligonucleotide
  Antisense strand to SEQ ID NO: 2257534
agccuuagccgaauguuua

SEQ ID NO: 2257536 - RNA, 19 nt, Artificial Sequence
  Description of Artificial Sequence: Synthetic oligonucleotide
  Sense strand starting at position 3542 of SEQ ID NO: 1884329
gccagaguuuggcuguaag

SEQ ID NO: 2257537 - RNA, 19 nt, Artificial Sequence
  Description of Artificial Sequence: Synthetic oligonucleotide
  Antisense strand to SEQ ID NO: 2257536
cuuacagccaaacucuggc

SEQ ID NO: 2257538 - RNA, 19 nt, Artificial Sequence
  Description of Artificial Sequence: Synthetic oligonucleotide
  Sense strand starting at position 3566 of SEQ ID NO: 1884329
gggugaguuuaacuucucu

SEQ ID NO: 2257539 - RNA, 19 nt, Artificial Sequence
  Description of Artificial Sequence: Synthetic oligonucleotide
  Antisense strand to SEQ ID NO: 2257538
agagaaguuaaacucaccc

SEQ ID NO: 2257540 - RNA, 19 nt, Artificial Sequence
  Description of Artificial Sequence: Synthetic oligonucleotide
  Sense strand starting at position 3570 of SEQ ID NO: 1884329
gaguuuaacuucucugagc

SEQ ID NO: 2257541 - RNA, 19 nt, Artificial Sequence
  Description of Artificial Sequence: Synthetic oligonucleotide
  Antisense strand to SEQ ID NO: 2257540
gcucagagaaguuaaacuc

SEQ ID NO: 2257542 - RNA, 19 nt, Artificial Sequence
  Description of Artificial Sequence: Synthetic oligonucleotide
  Sense strand starting at position 3571 of SEQ ID NO: 1884329
aguuuaacuucucugagcu

SEQ ID NO: 2257543 - RNA, 19 nt, Artificial Sequence
  Description of Artificial Sequence: Synthetic oligonucleotide
  Antisense strand to SEQ ID NO: 2257542
agcucagagaaguuaaacu

SEQ ID NO: 2257544 - RNA, 19 nt, Artificial Sequence
  Description of Artificial Sequence: Synthetic oligonucleotide
  Sense strand starting at position 3801 of SEQ ID NO: 1884329
ccgagcugugucuaagagu

SEQ ID NO: 2257545 - RNA, 19 nt, Artificial Sequence
  Description of Artificial Sequence: Synthetic oligonucleotide
  Antisense strand to SEQ ID NO: 2257544
acucuuagacacagcucgg

SEQ ID NO: 2257546 - RNA, 19 nt, Artificial Sequence
  Description of Artificial Sequence: Synthetic oligonucleotide
  Sense strand starting at position 3923 of SEQ ID NO: 1884329
guuguaguucuuugggaca

SEQ ID NO: 2257547 - RNA, 19 nt, Artificial Sequence
  Description of Artificial Sequence: Synthetic oligonucleotide
  Antisense strand to SEQ ID NO: 2257546
ugucccaaagaacuacaac

SEQ ID NO: 2257548 - RNA, 19 nt, Artificial Sequence
  Description of Artificial Sequence: Synthetic oligonucleotide
  Sense strand starting at position 269 of SEQ ID NO: 1884330
agauguugaucuucucacu

SEQ ID NO: 2257549 - RNA, 19 nt, Artificial Sequence
  Description of Artificial Sequence: Synthetic oligonucleotide
  Antisense strand to SEQ ID NO: 2257548
agugagaagaucaacaucu

SEQ ID NO: 2257550 - RNA, 19 nt, Artificial Sequence
  Description of Artificial Sequence: Synthetic oligonucleotide
  Sense strand starting at position 452 of SEQ ID NO: 1884330
aguccauagcaggagugau

SEQ ID NO: 2257551 - RNA, 19 nt, Artificial Sequence
  Description of Artificial Sequence: Synthetic oligonucleotide
  Antisense strand to SEQ ID NO: 2257550
aucacuccugcuauggacu

SEQ ID NO: 2257552 - RNA, 19 nt, Artificial Sequence
  Description of Artificial Sequence: Synthetic oligonucleotide
  Sense strand starting at position 469 of SEQ ID NO: 1884330
auuugauugcaaugugguu

SEQ ID NO: 2257553 - RNA, 19 nt, Artificial Sequence
  Description of Artificial Sequence: Synthetic oligonucleotide
  Antisense strand to SEQ ID NO: 2257552
aaccacauugcaaucaaau

SEQ ID NO: 2257554 - RNA, 19 nt, Artificial Sequence
  Description of Artificial Sequence: Synthetic oligonucleotide
  Sense strand starting at position 554 of SEQ ID NO: 1884330
uggugagguuauucaaggu

SEQ ID NO: 2257555 - RNA, 19 nt, Artificial Sequence
  Description of Artificial Sequence: Synthetic oligonucleotide
  Antisense strand to SEQ ID NO: 2257554
accuugaauaaccucacca

SEQ ID NO: 2257556 - RNA, 19 nt, Artificial Sequence
  Description of Artificial Sequence: Synthetic oligonucleotide
  Sense strand starting at position 575 of SEQ ID NO: 1884330
uagucaucuggacgugaag

SEQ ID NO: 2257557 - RNA, 19 nt, Artificial Sequence
  Description of Artificial Sequence: Synthetic oligonucleotide
  Antisense strand to SEQ ID NO: 2257556
cuucacguccagaugacua

SEQ ID NO: 2257558 - RNA, 19 nt, Artificial Sequence
  Description of Artificial Sequence: Synthetic oligonucleotide
  Sense strand starting at position 589 of SEQ ID NO: 1884330
ugaagccugucucucagaa

SEQ ID NO: 2257559 - RNA, 19 nt, Artificial Sequence
  Description of Artificial Sequence: Synthetic oligonucleotide
  Antisense strand to SEQ ID NO: 2257558
uucugagagacaggcuuca

SEQ ID NO: 2257560 - RNA, 19 nt, Artificial Sequence
  Description of Artificial Sequence: Synthetic oligonucleotide
  Sense strand starting at position 696 of SEQ ID NO: 1884330
gaguauagauaucugcaga

SEQ ID NO: 2257561 - RNA, 19 nt, Artificial Sequence
  Description of Artificial Sequence: Synthetic oligonucleotide
  Antisense strand to SEQ ID NO: 2257560
ucugcagauaucuauacuc

SEQ ID NO: 2257562 - RNA, 19 nt, Artificial Sequence
  Description of Artificial Sequence: Synthetic oligonucleotide
  Sense strand starting at position 748 of SEQ ID NO: 1884330
gcauuuauacauugcaugu

SEQ ID NO: 2257563 - RNA, 19 nt, Artificial Sequence
  Description of Artificial Sequence: Synthetic oligonucleotide
  Antisense strand to SEQ ID NO: 2257562
acaugcaauguauaaaugc

SEQ ID NO: 2257564 - RNA, 19 nt, Artificial Sequence
  Description of Artificial Sequence: Synthetic oligonucleotide
  Sense strand starting at position 752 of SEQ ID NO: 1884330
uuauacauugcaugugaua

SEQ ID NO: 2257565 - RNA, 19 nt, Artificial Sequence
  Description of Artificial Sequence: Synthetic oligonucleotide
  Antisense strand to SEQ ID NO: 2257564
uaucacaugcaauguauaa

SEQ ID NO: 2257566 - RNA, 19 nt, Artificial Sequence
  Description of Artificial Sequence: Synthetic oligonucleotide
  Sense strand starting at position 837 of SEQ ID NO: 1884330
gaucacagggauugugcua

SEQ ID NO: 2257567 - RNA, 19 nt, Artificial Sequence
  Description of Artificial Sequence: Synthetic oligonucleotide
  Antisense strand to SEQ ID NO: 2257566
uagcacaaucccugugauc

SEQ ID NO: 2257568 - RNA, 19 nt, Artificial Sequence
  Description of Artificial Sequence: Synthetic oligonucleotide
  Sense strand starting at position 964 of SEQ ID NO: 1884330
auugguucuagcuagcaga

SEQ ID NO: 2257569 - RNA, 19 nt, Artificial Sequence
  Description of Artificial Sequence: Synthetic oligonucleotide
  Antisense strand to SEQ ID NO: 2257568
ucugcuagcuagaaccaau

SEQ ID NO: 2257570 - RNA, 19 nt, Artificial Sequence
  Description of Artificial Sequence: Synthetic oligonucleotide
  Sense strand starting at position 1270 of SEQ ID NO: 1884330
gccuucuaagguuacaauu

SEQ ID NO: 2257571 - RNA, 19 nt, Artificial Sequence
  Description of Artificial Sequence: Synthetic oligonucleotide
  Antisense strand to SEQ ID NO: 2257570
aauuguaaccuuagaaggc

SEQ ID NO: 2257572 - RNA, 19 nt, Artificial Sequence
  Description of Artificial Sequence: Synthetic oligonucleotide
  Sense strand starting at position 1344 of SEQ ID NO: 1884330
cuaguaugcucacugacau

SEQ ID NO: 2257573 - RNA, 19 nt, Artificial Sequence
  Description of Artificial Sequence: Synthetic oligonucleotide
  Antisense strand to SEQ ID NO: 2257572
augucagugagcauacuag

SEQ ID NO: 2257574 - RNA, 19 nt, Artificial Sequence
  Description of Artificial Sequence: Synthetic oligonucleotide
  Sense strand starting at position 1345 of SEQ ID NO: 1884330
uaguaugcucacugacaug

SEQ ID NO: 2257575 - RNA, 19 nt, Artificial Sequence
  Description of Artificial Sequence: Synthetic oligonucleotide
  Antisense strand to SEQ ID NO: 2257574
caugucagugagcauacua

SEQ ID NO: 2257576 - RNA, 19 nt, Artificial Sequence
  Description of Artificial Sequence: Synthetic oligonucleotide
  Sense strand starting at position 1662 of SEQ ID NO: 1884330
uuggccauccgucagaauu

SEQ ID NO: 2257577 - RNA, 19 nt, Artificial Sequence
  Description of Artificial Sequence: Synthetic oligonucleotide
  Antisense strand to SEQ ID NO: 2257576
aauucugacggauggccaa

SEQ ID NO: 2257578 - RNA, 19 nt, Artificial Sequence
  Description of Artificial Sequence: Synthetic oligonucleotide
  Sense strand starting at position 1690 of SEQ ID NO: 1884330
uuacuuuccuucuuagagu

SEQ ID NO: 2257579 - RNA, 19 nt, Artificial Sequence
  Description of Artificial Sequence: Synthetic oligonucleotide
  Antisense strand to SEQ ID NO: 2257578
acucuaagaaggaaaguaa

SEQ ID NO: 2257580 - RNA, 19 nt, Artificial Sequence
  Description of Artificial Sequence: Synthetic oligonucleotide
  Sense strand starting at position 1853 of SEQ ID NO: 1884330
agcucaucucugcagauga

SEQ ID NO: 2257581 - RNA, 19 nt, Artificial Sequence
  Description of Artificial Sequence: Synthetic oligonucleotide
  Antisense strand to SEQ ID NO: 2257580
ucaucugcagagaugagcu

SEQ ID NO: 2257582 - RNA, 19 nt, Artificial Sequence
  Description of Artificial Sequence: Synthetic oligonucleotide
  Sense strand starting at position 1927 of SEQ ID NO: 1884330
gaaccaguuccucggagau

SEQ ID NO: 2257583 - RNA, 19 nt, Artificial Sequence
  Description of Artificial Sequence: Synthetic oligonucleotide
  Antisense strand to SEQ ID NO: 2257582
aucuccgaggaacugguuc

SEQ ID NO: 2257584 - RNA, 19 nt, Artificial Sequence
  Description of Artificial Sequence: Synthetic oligonucleotide
  Sense strand starting at position 1931 of SEQ ID NO: 1884330
caguuccucggagaugaau

SEQ ID NO: 2257585 - RNA, 19 nt, Artificial Sequence
  Description of Artificial Sequence: Synthetic oligonucleotide
  Antisense strand to SEQ ID NO: 2257584
auucaucuccgaggaacug

SEQ ID NO: 2257586 - RNA, 19 nt, Artificial Sequence
  Description of Artificial Sequence: Synthetic oligonucleotide
  Sense strand starting at position 1933 of SEQ ID NO: 1884330
guuccucggagaugaauuc

SEQ ID NO: 2257587 - RNA, 19 nt, Artificial Sequence
  Description of Artificial Sequence: Synthetic oligonucleotide
  Antisense strand to SEQ ID NO: 2257586
gaauucaucuccgaggaac

SEQ ID NO: 2257588 - RNA, 19 nt, Artificial Sequence
  Description of Artificial Sequence: Synthetic oligonucleotide
  Sense strand starting at position 2190 of SEQ ID NO: 1884330
gggacugucaauugaagca

SEQ ID NO: 2257589 - RNA, 19 nt, Artificial Sequence
  Description of Artificial Sequence: Synthetic oligonucleotide
  Antisense strand to SEQ ID NO: 2257588
ugcuucaauugacaguccc

SEQ ID NO: 2257590 - RNA, 19 nt, Artificial Sequence
  Description of Artificial Sequence: Synthetic oligonucleotide
  Sense strand starting at position 2381 of SEQ ID NO: 1884330
agaacuuguuucucaacga

SEQ ID NO: 2257591 - RNA, 19 nt, Artificial Sequence
  Description of Artificial Sequence: Synthetic oligonucleotide
  Antisense strand to SEQ ID NO: 2257590
ucguugagaaacaaguucu

SEQ ID NO: 2257592 - RNA, 19 nt, Artificial Sequence
  Description of Artificial Sequence: Synthetic oligonucleotide
  Sense strand starting at position 2386 of SEQ ID NO: 1884330
uuguuucucaacgagagga

SEQ ID NO: 2257593 - RNA, 19 nt, Artificial Sequence
  Description of Artificial Sequence: Synthetic oligonucleotide
  Antisense strand to SEQ ID NO: 2257592
uccucucguugagaaacaa

SEQ ID NO: 2257594 - RNA, 19 nt, Artificial Sequence
  Description of Artificial Sequence: Synthetic oligonucleotide
  Sense strand starting at position 2627 of SEQ ID NO: 1884330
uuuguacuucuagagggua

SEQ ID NO: 2257595 - RNA, 19 nt, Artificial Sequence
  Description of Artificial Sequence: Synthetic oligonucleotide
  Antisense strand to SEQ ID NO: 2257594
uacccucuagaaguacaaa

SEQ ID NO: 2257596 - RNA, 19 nt, Artificial Sequence
  Description of Artificial Sequence: Synthetic oligonucleotide
  Sense strand starting at position 2630 of SEQ ID NO: 1884330
guacuucuagaggguauca

SEQ ID NO: 2257597 - RNA, 19 nt, Artificial Sequence
  Description of Artificial Sequence: Synthetic oligonucleotide
  Antisense strand to SEQ ID NO: 2257596
ugauacccucuagaaguac

SEQ ID NO: 2257598 - RNA, 19 nt, Artificial Sequence
  Description of Artificial Sequence: Synthetic oligonucleotide
  Sense strand starting at position 2816 of SEQ ID NO: 1884330
uagccaguccuuuggagaa

SEQ ID NO: 2257599 - RNA, 19 nt, Artificial Sequence
  Description of Artificial Sequence: Synthetic oligonucleotide
  Antisense strand to SEQ ID NO: 2257598
uucuccaaaggacuggcua

SEQ ID NO: 2257600 - RNA, 19 nt, Artificial Sequence
  Description of Artificial Sequence: Synthetic oligonucleotide
  Sense strand starting at position 2999 of SEQ ID NO: 1884330
gcaacaaguugauucugga

SEQ ID NO: 2257601 - RNA, 19 nt, Artificial Sequence
  Description of Artificial Sequence: Synthetic oligonucleotide
  Antisense strand to SEQ ID NO: 2257600
uccagaaucaacuuguugc

SEQ ID NO: 2257602 - RNA, 19 nt, Artificial Sequence
  Description of Artificial Sequence: Synthetic oligonucleotide
  Sense strand starting at position 3122 of SEQ ID NO: 1884330
gucuguaaacuccacgaga

SEQ ID NO: 2257603 - RNA, 19 nt, Artificial Sequence
  Description of Artificial Sequence: Synthetic oligonucleotide
  Antisense strand to SEQ ID NO: 2257602
ucucguggaguuuacagac

SEQ ID NO: 2257604 - RNA, 19 nt, Artificial Sequence
  Description of Artificial Sequence: Synthetic oligonucleotide
  Sense strand starting at position 3124 of SEQ ID NO: 1884330
cuguaaacuccacgagaga

SEQ ID NO: 2257605 - RNA, 19 nt, Artificial Sequence
  Description of Artificial Sequence: Synthetic oligonucleotide
  Antisense strand to SEQ ID NO: 2257604
ucucucguggaguuuacag

SEQ ID NO: 2257606 - RNA, 19 nt, Artificial Sequence
  Description of Artificial Sequence: Synthetic oligonucleotide
  Sense strand starting at position 3195 of SEQ ID NO: 1884330
ugguaaauauugguuaaug

SEQ ID NO: 2257607 - RNA, 19 nt, Artificial Sequence
  Description of Artificial Sequence: Synthetic oligonucleotide
  Antisense strand to SEQ ID NO: 2257606
cauuaaccaauauuuacca

SEQ ID NO: 2257608 - RNA, 19 nt, Artificial Sequence
  Description of Artificial Sequence: Synthetic oligonucleotide
  Sense strand starting at position 3196 of SEQ ID NO: 1884330
gguaaauauugguuaauga

SEQ ID NO: 2257609 - RNA, 19 nt, Artificial Sequence
  Description of Artificial Sequence: Synthetic oligonucleotide
  Antisense strand to SEQ ID NO: 2257608
ucauuaaccaauauuuacc

SEQ ID NO: 2257610 - RNA, 19 nt, Artificial Sequence
  Description of Artificial Sequence: Synthetic oligonucleotide
  Sense strand starting at position 3258 of SEQ ID NO: 1884330
uauagagauggcuguauug

SEQ ID NO: 2257611 - RNA, 19 nt, Artificial Sequence
  Description of Artificial Sequence: Synthetic oligonucleotide
  Antisense strand to SEQ ID NO: 2257610
caauacagccaucucuaua

SEQ ID NO: 2257612 - RNA, 19 nt, Artificial Sequence
  Description of Artificial Sequence: Synthetic oligonucleotide
  Sense strand starting at position 3260 of SEQ ID NO: 1884330
uagagauggcuguauugca

SEQ ID NO: 2257613 - RNA, 19 nt, Artificial Sequence
  Description of Artificial Sequence: Synthetic oligonucleotide
  Antisense strand to SEQ ID NO: 2257612
ugcaauacagccaucucua

SEQ ID NO: 2257614 - RNA, 19 nt, Artificial Sequence
  Description of Artificial Sequence: Synthetic oligonucleotide
  Sense strand starting at position 3267 of SEQ ID NO: 1884330
ggcuguauugcacagaaau

SEQ ID NO: 2257615 - RNA, 19 nt, Artificial Sequence
  Description of Artificial Sequence: Synthetic oligonucleotide
  Antisense strand to SEQ ID NO: 2257614
auuucugugcaauacagcc

SEQ ID NO: 2257616 - RNA, 19 nt, Artificial Sequence
  Description of Artificial Sequence: Synthetic oligonucleotide
  Sense strand starting at position 3345 of SEQ ID NO: 1884330
gggccagaggcuuauagaa

SEQ ID NO: 2257617 - RNA, 19 nt, Artificial Sequence
  Description of Artificial Sequence: Synthetic oligonucleotide
  Antisense strand to SEQ ID NO: 2257616
uucuauaagccucuggccc

SEQ ID NO: 2257618 - RNA, 19 nt, Artificial Sequence
  Description of Artificial Sequence: Synthetic oligonucleotide
  Sense strand starting at position 3590 of SEQ ID NO: 1884330
cucuguaacccauaggguu

SEQ ID NO: 2257619 - RNA, 19 nt, Artificial Sequence
  Description of Artificial Sequence: Synthetic oligonucleotide
  Antisense strand to SEQ ID NO: 2257618
aacccuauggguuacagag

SEQ ID NO: 2257620 - RNA, 19 nt, Artificial Sequence
  Description of Artificial Sequence: Synthetic oligonucleotide
  Sense strand starting at position 3622 of SEQ ID NO: 1884330
aggaguugucaggauccuu

SEQ ID NO: 2257621 - RNA, 19 nt, Artificial Sequence
  Description of Artificial Sequence: Synthetic oligonucleotide
  Antisense strand to SEQ ID NO: 2257620
aaggauccugacaacuccu

SEQ ID NO: 2257622 - RNA, 19 nt, Artificial Sequence
  Description of Artificial Sequence: Synthetic oligonucleotide
  Sense strand starting at position 3627 of SEQ ID NO: 1884330
uugucaggauccuuggauu

SEQ ID NO: 2257623 - RNA, 19 nt, Artificial Sequence
  Description of Artificial Sequence: Synthetic oligonucleotide
  Antisense strand to SEQ ID NO: 2257622
aauccaaggauccugacaa

SEQ ID NO: 2257624 - RNA, 19 nt, Artificial Sequence
  Description of Artificial Sequence: Synthetic oligonucleotide
  Sense strand starting at position 3751 of SEQ ID NO: 1884330
cccgaaagguccuucuuag

SEQ ID NO: 2257625 - RNA, 19 nt, Artificial Sequence
  Description of Artificial Sequence: Synthetic oligonucleotide
  Antisense strand to SEQ ID NO: 2257624
cuaagaaggaccuuucggg

SEQ ID NO: 2257626 - RNA, 19 nt, Artificial Sequence
  Description of Artificial Sequence: Synthetic oligonucleotide
  Sense strand starting at position 3774 of SEQ ID NO: 1884330
uugugaccucugcaagaag

SEQ ID NO: 2257627 - RNA, 19 nt, Artificial Sequence
  Description of Artificial Sequence: Synthetic oligonucleotide
  Antisense strand to SEQ ID NO: 2257626
cuucuugcagaggucacaa

SEQ ID NO: 2257628 - RNA, 19 nt, Artificial Sequence
  Description of Artificial Sequence: Synthetic oligonucleotide
  Sense strand starting at position 304 of SEQ ID NO: 1884331
uggagauugcaaugaguua

SEQ ID NO: 2257629 - RNA, 19 nt, Artificial Sequence
  Description of Artificial Sequence: Synthetic oligonucleotide
  Antisense strand to SEQ ID NO: 2257628
uaacucauugcaaucucca

SEQ ID NO: 2257630 - RNA, 19 nt, Artificial Sequence
  Description of Artificial Sequence: Synthetic oligonucleotide
  Sense strand starting at position 423 of SEQ ID NO: 1884331
uccuaagaugggcauaguu

SEQ ID NO: 2257631 - RNA, 19 nt, Artificial Sequence
  Description of Artificial Sequence: Synthetic oligonucleotide
  Antisense strand to SEQ ID NO: 2257630
aacuaugcccaucuuagga

SEQ ID NO: 2257632 - RNA, 19 nt, Artificial Sequence
  Description of Artificial Sequence: Synthetic oligonucleotide
  Sense strand starting at position 425 of SEQ ID NO: 1884331
cuaagaugggcauaguuua

SEQ ID NO: 2257633 - RNA, 19 nt, Artificial Sequence
  Description of Artificial Sequence: Synthetic oligonucleotide
  Antisense strand to SEQ ID NO: 2257632
uaaacuaugcccaucuuag

SEQ ID NO: 2257634 - RNA, 19 nt, Artificial Sequence
  Description of Artificial Sequence: Synthetic oligonucleotide
  Sense strand starting at position 563 of SEQ ID NO: 1884331
uuuggaauuccacaggugu

SEQ ID NO: 2257635 - RNA, 19 nt, Artificial Sequence
  Description of Artificial Sequence: Synthetic oligonucleotide
  Antisense strand to SEQ ID NO: 2257634
acaccuguggaauuccaaa

SEQ ID NO: 2257636 - RNA, 19 nt, Artificial Sequence
  Description of Artificial Sequence: Synthetic oligonucleotide
  Sense strand starting at position 671 of SEQ ID NO: 1884331
uccuauaagguguaucuca

SEQ ID NO: 2257637 - RNA, 19 nt, Artificial Sequence
  Description of Artificial Sequence: Synthetic oligonucleotide
  Antisense strand to SEQ ID NO: 2257636
ugagauacaccuuauagga

SEQ ID NO: 2257638 - RNA, 19 nt, Artificial Sequence
  Description of Artificial Sequence: Synthetic oligonucleotide
  Sense strand starting at position 742 of SEQ ID NO: 1884331
aggucuugaucagcaacuu

SEQ ID NO: 2257639 - RNA, 19 nt, Artificial Sequence
  Description of Artificial Sequence: Synthetic oligonucleotide
  Antisense strand to SEQ ID NO: 2257638
aaguugcugaucaagaccu

SEQ ID NO: 2257640 - RNA, 19 nt, Artificial Sequence
  Description of Artificial Sequence: Synthetic oligonucleotide
  Sense strand starting at position 786 of SEQ ID NO: 1884331
gaugguuucucaucuguga

SEQ ID NO: 2257641 - RNA, 19 nt, Artificial Sequence
  Description of Artificial Sequence: Synthetic oligonucleotide
  Antisense strand to SEQ ID NO: 2257640
ucacagaugagaaaccauc

SEQ ID NO: 2257642 - RNA, 19 nt, Artificial Sequence
  Description of Artificial Sequence: Synthetic oligonucleotide
  Sense strand starting at position 891 of SEQ ID NO: 1884331
cuagaaagcuuaguaagca

SEQ ID NO: 2257643 - RNA, 19 nt, Artificial Sequence
  Description of Artificial Sequence: Synthetic oligonucleotide
  Antisense strand to SEQ ID NO: 2257642
ugcuuacuaagcuuucuag

SEQ ID NO: 2257644 - RNA, 19 nt, Artificial Sequence
  Description of Artificial Sequence: Synthetic oligonucleotide
  Sense strand starting at position 979 of SEQ ID NO: 1884331
auaacaauuucucagguga

SEQ ID NO: 2257645 - RNA, 19 nt, Artificial Sequence
  Description of Artificial Sequence: Synthetic oligonucleotide
  Antisense strand to SEQ ID NO: 2257644
ucaccugagaaauuguuau

SEQ ID NO: 2257646 - RNA, 19 nt, Artificial Sequence
  Description of Artificial Sequence: Synthetic oligonucleotide
  Sense strand starting at position 1126 of SEQ ID NO: 1884331
ugacucaguuuagucuuua

SEQ ID NO: 2257647 - RNA, 19 nt, Artificial Sequence
  Description of Artificial Sequence: Synthetic oligonucleotide
  Antisense strand to SEQ ID NO: 2257646
uaaagacuaaacugaguca

SEQ ID NO: 2257648 - RNA, 19 nt, Artificial Sequence
  Description of Artificial Sequence: Synthetic oligonucleotide
  Sense strand starting at position 1287 of SEQ ID NO: 1884331
cucgguaugcgcagauuga

SEQ ID NO: 2257649 - RNA, 19 nt, Artificial Sequence
  Description of Artificial Sequence: Synthetic oligonucleotide
  Antisense strand to SEQ ID NO: 2257648
ucaaucugcgcauaccgag

SEQ ID NO: 2257650 - RNA, 19 nt, Artificial Sequence
  Description of Artificial Sequence: Synthetic oligonucleotide
  Sense strand starting at position 1297 of SEQ ID NO: 1884331
gcagauugagcacacaugu

SEQ ID NO: 2257651 - RNA, 19 nt, Artificial Sequence
  Description of Artificial Sequence: Synthetic oligonucleotide
  Antisense strand to SEQ ID NO: 2257650
acaugugugcucaaucugc

SEQ ID NO: 2257652 - RNA, 19 nt, Artificial Sequence
  Description of Artificial Sequence: Synthetic oligonucleotide
  Sense strand starting at position 1504 of SEQ ID NO: 1884331
aacagaaauccagguguuu

SEQ ID NO: 2257653 - RNA, 19 nt, Artificial Sequence
  Description of Artificial Sequence: Synthetic oligonucleotide
  Antisense strand to SEQ ID NO: 2257652
aaacaccuggauuucuguu

SEQ ID NO: 2257654 - RNA, 19 nt, Artificial Sequence
  Description of Artificial Sequence: Synthetic oligonucleotide
  Sense strand starting at position 1563 of SEQ ID NO: 1884331
gaagacacuugguuugcau

SEQ ID NO: 2257655 - RNA, 19 nt, Artificial Sequence
  Description of Artificial Sequence: Synthetic oligonucleotide
  Antisense strand to SEQ ID NO: 2257654
augcaaaccaagugucuuc

SEQ ID NO: 2257656 - RNA, 19 nt, Artificial Sequence
  Description of Artificial Sequence: Synthetic oligonucleotide
  Sense strand starting at position 1819 of SEQ ID NO: 1884331
uggaccagcuuguugauau

SEQ ID NO: 2257657 - RNA, 19 nt, Artificial Sequence
  Description of Artificial Sequence: Synthetic oligonucleotide
  Antisense strand to SEQ ID NO: 2257656
auaucaacaagcuggucca

SEQ ID NO: 2257658 - RNA, 19 nt, Artificial Sequence
  Description of Artificial Sequence: Synthetic oligonucleotide
  Sense strand starting at position 1829 of SEQ ID NO: 1884331
uguugauauuacccugaau

SEQ ID NO: 2257659 - RNA, 19 nt, Artificial Sequence
  Description of Artificial Sequence: Synthetic oligonucleotide
  Antisense strand to SEQ ID NO: 2257658
auucaggguaauaucaaca

SEQ ID NO: 2257660 - RNA, 19 nt, Artificial Sequence
  Description of Artificial Sequence: Synthetic oligonucleotide
  Sense strand starting at position 1831 of SEQ ID NO: 1884331
uugauauuacccugaaugg

SEQ ID NO: 2257661 - RNA, 19 nt, Artificial Sequence
  Description of Artificial Sequence: Synthetic oligonucleotide
  Antisense strand to SEQ ID NO: 2257660
ccauucaggguaauaucaa

SEQ ID NO: 2257662 - RNA, 19 nt, Artificial Sequence
  Description of Artificial Sequence: Synthetic oligonucleotide
  Sense strand starting at position 1901 of SEQ ID NO: 1884331
ucugaucucguguauaacu

SEQ ID NO: 2257663 - RNA, 19 nt, Artificial Sequence
  Description of Artificial Sequence: Synthetic oligonucleotide
  Antisense strand to SEQ ID NO: 2257662
aguuauacacgagaucaga

SEQ ID NO: 2257664 - RNA, 19 nt, Artificial Sequence
  Description of Artificial Sequence: Synthetic oligonucleotide
  Sense strand starting at position 1994 of SEQ ID NO: 1884331
uguacacuugcaugagaac

SEQ ID NO: 2257665 - RNA, 19 nt, Artificial Sequence
  Description of Artificial Sequence: Synthetic oligonucleotide
  Antisense strand to SEQ ID NO: 2257664
guucucaugcaaguguaca

SEQ ID NO: 2257666 - RNA, 19 nt, Artificial Sequence
  Description of Artificial Sequence: Synthetic oligonucleotide
  Sense strand starting at position 2099 of SEQ ID NO: 1884331
ccucuaaauggucaggagu

SEQ ID NO: 2257667 - RNA, 19 nt, Artificial Sequence
  Description of Artificial Sequence: Synthetic oligonucleotide
  Antisense strand to SEQ ID NO: 2257666
acuccugaccauuuagagg

SEQ ID NO: 2257668 - RNA, 19 nt, Artificial Sequence
  Description of Artificial Sequence: Synthetic oligonucleotide
  Sense strand starting at position 2102 of SEQ ID NO: 1884331
cuaaauggucaggagucuu

SEQ ID NO: 2257669 - RNA, 19 nt, Artificial Sequence
  Description of Artificial Sequence: Synthetic oligonucleotide
  Antisense strand to SEQ ID NO: 2257668
aagacuccugaccauuuag

SEQ ID NO: 2257670 - RNA, 19 nt, Artificial Sequence
  Description of Artificial Sequence: Synthetic oligonucleotide
  Sense strand starting at position 2273 of SEQ ID NO: 1884331
uuuaaauugggauguuguu

SEQ ID NO: 2257671 - RNA, 19 nt, Artificial Sequence
  Description of Artificial Sequence: Synthetic oligonucleotide
  Antisense strand to SEQ ID NO: 2257670
aacaacaucccaauuuaaa

SEQ ID NO: 2257672 - RNA, 19 nt, Artificial Sequence
  Description of Artificial Sequence: Synthetic oligonucleotide
  Sense strand starting at position 2359 of SEQ ID NO: 1884331
agauauaugugugccauua

SEQ ID NO: 2257673 - RNA, 19 nt, Artificial Sequence
  Description of Artificial Sequence: Synthetic oligonucleotide
  Antisense strand to SEQ ID NO: 2257672
uaauggcacacauauaucu

SEQ ID NO: 2257674 - RNA, 19 nt, Artificial Sequence
  Description of Artificial Sequence: Synthetic oligonucleotide
  Sense strand starting at position 2441 of SEQ ID NO: 1884331
gguaaucacaacgauacgu

SEQ ID NO: 2257675 - RNA, 19 nt, Artificial Sequence
  Description of Artificial Sequence: Synthetic oligonucleotide
  Antisense strand to SEQ ID NO: 2257674
acguaucguugugauuacc

SEQ ID NO: 2257676 - RNA, 19 nt, Artificial Sequence
  Description of Artificial Sequence: Synthetic oligonucleotide
  Sense strand starting at position 2443 of SEQ ID NO: 1884331
uaaucacaacgauacguuu

SEQ ID NO: 2257677 - RNA, 19 nt, Artificial Sequence
  Description of Artificial Sequence: Synthetic oligonucleotide
  Antisense strand to SEQ ID NO: 2257676
aaacguaucguugugauua

SEQ ID NO: 2257678 - RNA, 19 nt, Artificial Sequence
  Description of Artificial Sequence: Synthetic oligonucleotide
  Sense strand starting at position 2518 of SEQ ID NO: 1884331
ugaucuuauccauggcucu

SEQ ID NO: 2257679 - RNA, 19 nt, Artificial Sequence
  Description of Artificial Sequence: Synthetic oligonucleotide
  Antisense strand to SEQ ID NO: 2257678
agagccauggauaagauca

SEQ ID NO: 2257680 - RNA, 19 nt, Artificial Sequence
  Description of Artificial Sequence: Synthetic oligonucleotide
  Sense strand starting at position 2698 of SEQ ID NO: 1884331
ugaggauaagccugggcua

SEQ ID NO: 2257681 - RNA, 19 nt, Artificial Sequence
  Description of Artificial Sequence: Synthetic oligonucleotide
  Antisense strand to SEQ ID NO: 2257680
uagcccaggcuuauccuca

SEQ ID NO: 2257682 - RNA, 19 nt, Artificial Sequence
  Description of Artificial Sequence: Synthetic oligonucleotide
  Sense strand starting at position 2700 of SEQ ID NO: 1884331
aggauaagccugggcuaga

SEQ ID NO: 2257683 - RNA, 19 nt, Artificial Sequence
  Description of Artificial Sequence: Synthetic oligonucleotide
  Antisense strand to SEQ ID NO: 2257682
ucuagcccaggcuuauccu

SEQ ID NO: 2257684 - RNA, 19 nt, Artificial Sequence
  Description of Artificial Sequence: Synthetic oligonucleotide
  Sense strand starting at position 2701 of SEQ ID NO: 1884331
ggauaagccugggcuagau

SEQ ID NO: 2257685 - RNA, 19 nt, Artificial Sequence
  Description of Artificial Sequence: Synthetic oligonucleotide
  Antisense strand to SEQ ID NO: 2257684
aucuagcccaggcuuaucc

SEQ ID NO: 2257686 - RNA, 19 nt, Artificial Sequence
  Description of Artificial Sequence: Synthetic oligonucleotide
  Sense strand starting at position 2714 of SEQ ID NO: 1884331
cuagauugcuagcugaaua

SEQ ID NO: 2257687 - RNA, 19 nt, Artificial Sequence
  Description of Artificial Sequence: Synthetic oligonucleotide
  Antisense strand to SEQ ID NO: 2257686
uauucagcuagcaaucuag

SEQ ID NO: 2257688 - RNA, 19 nt, Artificial Sequence
  Description of Artificial Sequence: Synthetic oligonucleotide
  Sense strand starting at position 2825 of SEQ ID NO: 1884331
cagccuugucagcagagau

SEQ ID NO: 2257689 - RNA, 19 nt, Artificial Sequence
  Description of Artificial Sequence: Synthetic oligonucleotide
  Antisense strand to SEQ ID NO: 2257688
aucucugcugacaaggcug

SEQ ID NO: 2257690 - RNA, 19 nt, Artificial Sequence
  Description of Artificial Sequence: Synthetic oligonucleotide
  Sense strand starting at position 2835 of SEQ ID NO: 1884331
agcagagaugccuacccua

SEQ ID NO: 2257691 - RNA, 19 nt, Artificial Sequence
  Description of Artificial Sequence: Synthetic oligonucleotide
  Antisense strand to SEQ ID NO: 2257690
uaggguaggcaucucugcu

SEQ ID NO: 2257692 - RNA, 19 nt, Artificial Sequence
  Description of Artificial Sequence: Synthetic oligonucleotide
  Sense strand starting at position 2943 of SEQ ID NO: 1884331
gugugaagccacuguauuu

SEQ ID NO: 2257693 - RNA, 19 nt, Artificial Sequence
  Description of Artificial Sequence: Synthetic oligonucleotide
  Antisense strand to SEQ ID NO: 2257692
aaauacaguggcuucacac

SEQ ID NO: 2257694 - RNA, 19 nt, Artificial Sequence
  Description of Artificial Sequence: Synthetic oligonucleotide
  Sense strand starting at position 3255 of SEQ ID NO: 1884331
cccacaaacuagguguaau

SEQ ID NO: 2257695 - RNA, 19 nt, Artificial Sequence
  Description of Artificial Sequence: Synthetic oligonucleotide
  Antisense strand to SEQ ID NO: 2257694
auuacaccuaguuuguggg

SEQ ID NO: 2257696 - RNA, 19 nt, Artificial Sequence
  Description of Artificial Sequence: Synthetic oligonucleotide
  Sense strand starting at position 3265 of SEQ ID NO: 1884331
agguguaauuucucuguua

SEQ ID NO: 2257697 - RNA, 19 nt, Artificial Sequence
  Description of Artificial Sequence: Synthetic oligonucleotide
  Antisense strand to SEQ ID NO: 2257696
uaacagagaaauuacaccu

SEQ ID NO: 2257698 - RNA, 19 nt, Artificial Sequence
  Description of Artificial Sequence: Synthetic oligonucleotide
  Sense strand starting at position 3266 of SEQ ID NO: 1884331
gguguaauuucucuguuau

SEQ ID NO: 2257699 - RNA, 19 nt, Artificial Sequence
  Description of Artificial Sequence: Synthetic oligonucleotide
  Antisense strand to SEQ ID NO: 2257698
auaacagagaaauuacacc

SEQ ID NO: 2257700 - RNA, 19 nt, Artificial Sequence
  Description of Artificial Sequence: Synthetic oligonucleotide
  Sense strand starting at position 3267 of SEQ ID NO: 1884331
guguaauuucucuguuauu

SEQ ID NO: 2257701 - RNA, 19 nt, Artificial Sequence
  Description of Artificial Sequence: Synthetic oligonucleotide
  Antisense strand to SEQ ID NO: 2257700
aauaacagagaaauuacac

SEQ ID NO: 2257702 - RNA, 19 nt, Artificial Sequence
  Description of Artificial Sequence: Synthetic oligonucleotide
  Sense strand starting at position 3276 of SEQ ID NO: 1884331
cucuguuauuugcuuuauu

SEQ ID NO: 2257703 - RNA, 19 nt, Artificial Sequence
  Description of Artificial Sequence: Synthetic oligonucleotide
  Antisense strand to SEQ ID NO: 2257702
aauaaagcaaauaacagag

SEQ ID NO: 2257704 - RNA, 19 nt, Artificial Sequence
  Description of Artificial Sequence: Synthetic oligonucleotide
  Sense strand starting at position 3299 of SEQ ID NO: 1884331
gcuaacaaucuuuggaaca

SEQ ID NO: 2257705 - RNA, 19 nt, Artificial Sequence
  Description of Artificial Sequence: Synthetic oligonucleotide
  Antisense strand to SEQ ID NO: 2257704
uguuccaaagauuguuagc

SEQ ID NO: 2257706 - RNA, 19 nt, Artificial Sequence
  Description of Artificial Sequence: Synthetic oligonucleotide
  Sense strand starting at position 3886 of SEQ ID NO: 1884331
gugagauugggccacugua

SEQ ID NO: 2257707 - RNA, 19 nt, Artificial Sequence
  Description of Artificial Sequence: Synthetic oligonucleotide
  Antisense strand to SEQ ID NO: 2257706
uacaguggcccaaucucac

SEQ ID NO: 2257708 - RNA, 19 nt, Artificial Sequence
  Description of Artificial Sequence: Synthetic oligonucleotide
  Sense strand starting at position 1268 of SEQ ID NO: 1884332
cgcaauaugaccugcugga

SEQ ID NO: 2257709 - RNA, 19 nt, Artificial Sequence
  Description of Artificial Sequence: Synthetic oligonucleotide
  Antisense strand to SEQ ID NO: 2257708
uccagcaggucauauugcg

SEQ ID NO: 2257710 - RNA, 19 nt, Artificial Sequence
  Description of Artificial Sequence: Synthetic oligonucleotide
  Sense strand starting at position 1283 of SEQ ID NO: 1884332
uggaauacgagcugcuuaa

SEQ ID NO: 2257711 - RNA, 19 nt, Artificial Sequence
  Description of Artificial Sequence: Synthetic oligonucleotide
  Antisense strand to SEQ ID NO: 2257710
uuaagcagcucguauucca

SEQ ID NO: 2257712 - RNA, 19 nt, Artificial Sequence
  Description of Artificial Sequence: Synthetic oligonucleotide
  Sense strand starting at position 1346 of SEQ ID NO: 1884332
uaagacaguuggccugaaa

SEQ ID NO: 2257713 - RNA, 19 nt, Artificial Sequence
  Description of Artificial Sequence: Synthetic oligonucleotide
  Antisense strand to SEQ ID NO: 2257712
uuucaggccaacugucuua

SEQ ID NO: 2257714 - RNA, 19 nt, Artificial Sequence
  Description of Artificial Sequence: Synthetic oligonucleotide
  Sense strand starting at position 1349 of SEQ ID NO: 1884332
gacaguuggccugaaagua

SEQ ID NO: 2257715 - RNA, 19 nt, Artificial Sequence
  Description of Artificial Sequence: Synthetic oligonucleotide
  Antisense strand to SEQ ID NO: 2257714
uacuuucaggccaacuguc

SEQ ID NO: 2257716 - RNA, 19 nt, Artificial Sequence
  Description of Artificial Sequence: Synthetic oligonucleotide
  Sense strand starting at position 1458 of SEQ ID NO: 1884332
gaguuaguaccaggacuac

SEQ ID NO: 2257717 - RNA, 19 nt, Artificial Sequence
  Description of Artificial Sequence: Synthetic oligonucleotide
  Antisense strand to SEQ ID NO: 2257716
guaguccugguacuaacuc

SEQ ID NO: 2257718 - RNA, 19 nt, Artificial Sequence
  Description of Artificial Sequence: Synthetic oligonucleotide
  Sense strand starting at position 1562 of SEQ ID NO: 1884332
ggcucucagaucugauugu

SEQ ID NO: 2257719 - RNA, 19 nt, Artificial Sequence
  Description of Artificial Sequence: Synthetic oligonucleotide
  Antisense strand to SEQ ID NO: 2257718
acaaucagaucugagagcc

SEQ ID NO: 2257720 - RNA, 19 nt, Artificial Sequence
  Description of Artificial Sequence: Synthetic oligonucleotide
  Sense strand starting at position 1590 of SEQ ID NO: 1884332
guucauagucuggaggauu

SEQ ID NO: 2257721 - RNA, 19 nt, Artificial Sequence
  Description of Artificial Sequence: Synthetic oligonucleotide
  Antisense strand to SEQ ID NO: 2257720
aauccuccagacuaugaac

SEQ ID NO: 2257722 - RNA, 19 nt, Artificial Sequence
  Description of Artificial Sequence: Synthetic oligonucleotide
  Sense strand starting at position 1602 of SEQ ID NO: 1884332
gaggauuaauuuggaauca

SEQ ID NO: 2257723 - RNA, 19 nt, Artificial Sequence
  Description of Artificial Sequence: Synthetic oligonucleotide
  Antisense strand to SEQ ID NO: 2257722
ugauuccaaauuaauccuc

SEQ ID NO: 2257724 - RNA, 19 nt, Artificial Sequence
  Description of Artificial Sequence: Synthetic oligonucleotide
  Sense strand starting at position 1706 of SEQ ID NO: 1884332
ucucuuugauuaccagaag

SEQ ID NO: 2257725 - RNA, 19 nt, Artificial Sequence
  Description of Artificial Sequence: Synthetic oligonucleotide
  Antisense strand to SEQ ID NO: 2257724
cuucugguaaucaaagaga

SEQ ID NO: 2257726 - RNA, 19 nt, Artificial Sequence
  Description of Artificial Sequence: Synthetic oligonucleotide
  Sense strand starting at position 1874 of SEQ ID NO: 1884332
gguauuucugccugucaca

SEQ ID NO: 2257727 - RNA, 19 nt, Artificial Sequence
  Description of Artificial Sequence: Synthetic oligonucleotide
  Antisense strand to SEQ ID NO: 2257726
ugugacaggcagaaauacc

SEQ ID NO: 2257728 - RNA, 19 nt, Artificial Sequence
  Description of Artificial Sequence: Synthetic oligonucleotide
  Sense strand starting at position 1928 of SEQ ID NO: 1884332
cccagcugcuagucagaaa

SEQ ID NO: 2257729 - RNA, 19 nt, Artificial Sequence
  Description of Artificial Sequence: Synthetic oligonucleotide
  Antisense strand to SEQ ID NO: 2257728
uuucugacuagcagcuggg

SEQ ID NO: 2257730 - RNA, 19 nt, Artificial Sequence
  Description of Artificial Sequence: Synthetic oligonucleotide
  Sense strand starting at position 2006 of SEQ ID NO: 1884332
gugccucagacucagagau

SEQ ID NO: 2257731 - RNA, 19 nt, Artificial Sequence
  Description of Artificial Sequence: Synthetic oligonucleotide
  Antisense strand to SEQ ID NO: 2257730
aucucugagucugaggcac

SEQ ID NO: 2257732 - RNA, 19 nt, Artificial Sequence
  Description of Artificial Sequence: Synthetic oligonucleotide
  Sense strand starting at position 2117 of SEQ ID NO: 1884332
ugggaagugcccuguagua

SEQ ID NO: 2257733 - RNA, 19 nt, Artificial Sequence
  Description of Artificial Sequence: Synthetic oligonucleotide
  Antisense strand to SEQ ID NO: 2257732
uacuacagggcacuuccca

SEQ ID NO: 2257734 - RNA, 19 nt, Artificial Sequence
  Description of Artificial Sequence: Synthetic oligonucleotide
  Sense strand starting at position 2119 of SEQ ID NO: 1884332
ggaagugcccuguaguaag

SEQ ID NO: 2257735 - RNA, 19 nt, Artificial Sequence
  Description of Artificial Sequence: Synthetic oligonucleotide
  Antisense strand to SEQ ID NO: 2257734
cuuacuacagggcacuucc

SEQ ID NO: 2257736 - RNA, 19 nt, Artificial Sequence
  Description of Artificial Sequence: Synthetic oligonucleotide
  Sense strand starting at position 2142 of SEQ ID NO: 1884332
uuggcuuucuauucuugaa

SEQ ID NO: 2257737 - RNA, 19 nt, Artificial Sequence
  Description of Artificial Sequence: Synthetic oligonucleotide
  Antisense strand to SEQ ID NO: 2257736
uucaagaauagaaagccaa

SEQ ID NO: 2257738 - RNA, 19 nt, Artificial Sequence
  Description of Artificial Sequence: Synthetic oligonucleotide
  Sense strand starting at position 2144 of SEQ ID NO: 1884332
ggcuuucuauucuugaacu

SEQ ID NO: 2257739 - RNA, 19 nt, Artificial Sequence
  Description of Artificial Sequence: Synthetic oligonucleotide
  Antisense strand to SEQ ID NO: 2257738
aguucaagaauagaaagcc

SEQ ID NO: 2257740 - RNA, 19 nt, Artificial Sequence
  Description of Artificial Sequence: Synthetic oligonucleotide
  Sense strand starting at position 2285 of SEQ ID NO: 1884332
ccucucuucugaucuguca

SEQ ID NO: 2257741 - RNA, 19 nt, Artificial Sequence
  Description of Artificial Sequence: Synthetic oligonucleotide
  Antisense strand to SEQ ID NO: 2257740
ugacagaucagaagagagg

SEQ ID NO: 2257742 - RNA, 19 nt, Artificial Sequence
  Description of Artificial Sequence: Synthetic oligonucleotide
  Sense strand starting at position 2400 of SEQ ID NO: 1884332
uguauaucuuggguuucuu

SEQ ID NO: 2257743 - RNA, 19 nt, Artificial Sequence
  Description of Artificial Sequence: Synthetic oligonucleotide
  Antisense strand to SEQ ID NO: 2257742
aagaaacccaagauauaca

SEQ ID NO: 2257744 - RNA, 19 nt, Artificial Sequence
  Description of Artificial Sequence: Synthetic oligonucleotide
  Sense strand starting at position 2477 of SEQ ID NO: 1884332
gaguauauuaggugaugca

SEQ ID NO: 2257745 - RNA, 19 nt, Artificial Sequence
  Description of Artificial Sequence: Synthetic oligonucleotide
  Antisense strand to SEQ ID NO: 2257744
ugcaucaccuaauauacuc

SEQ ID NO: 2257746 - RNA, 19 nt, Artificial Sequence
  Description of Artificial Sequence: Synthetic oligonucleotide
  Sense strand starting at position 2484 of SEQ ID NO: 1884332
uuaggugaugcagagguuu

SEQ ID NO: 2257747 - RNA, 19 nt, Artificial Sequence
  Description of Artificial Sequence: Synthetic oligonucleotide
  Antisense strand to SEQ ID NO: 2257746
aaaccucugcaucaccuaa

SEQ ID NO: 2257748 - RNA, 19 nt, Artificial Sequence
  Description of Artificial Sequence: Synthetic oligonucleotide
  Sense strand starting at position 2486 of SEQ ID NO: 1884332
aggugaugcagagguuugu

SEQ ID NO: 2257749 - RNA, 19 nt, Artificial Sequence
  Description of Artificial Sequence: Synthetic oligonucleotide
  Antisense strand to SEQ ID NO: 2257748
acaaaccucugcaucaccu

SEQ ID NO: 2257750 - RNA, 19 nt, Artificial Sequence
  Description of Artificial Sequence: Synthetic oligonucleotide
  Sense strand starting at position 2490 of SEQ ID NO: 1884332
gaugcagagguuuguagua

SEQ ID NO: 2257751 - RNA, 19 nt, Artificial Sequence
  Description of Artificial Sequence: Synthetic oligonucleotide
  Antisense strand to SEQ ID NO: 2257750
uacuacaaaccucugcauc

SEQ ID NO: 2257752 - RNA, 19 nt, Artificial Sequence
  Description of Artificial Sequence: Synthetic oligonucleotide
  Sense strand starting at position 2517 of SEQ ID NO: 1884332
ccuauuaccuagguaguga

SEQ ID NO: 2257753 - RNA, 19 nt, Artificial Sequence
  Description of Artificial Sequence: Synthetic oligonucleotide
  Antisense strand to SEQ ID NO: 2257752
ucacuaccuagguaauagg

SEQ ID NO: 2257754 - RNA, 19 nt, Artificial Sequence
  Description of Artificial Sequence: Synthetic oligonucleotide
  Sense strand starting at position 2592 of SEQ ID NO: 1884332
cugguauuucccugugucu

SEQ ID NO: 2257755 - RNA, 19 nt, Artificial Sequence
  Description of Artificial Sequence: Synthetic oligonucleotide
  Antisense strand to SEQ ID NO: 2257754
agacacagggaaauaccag

SEQ ID NO: 2257756 - RNA, 19 nt, Artificial Sequence
  Description of Artificial Sequence: Synthetic oligonucleotide
  Sense strand starting at position 2594 of SEQ ID NO: 1884332
gguauuucccugugucugu

SEQ ID NO: 2257757 - RNA, 19 nt, Artificial Sequence
  Description of Artificial Sequence: Synthetic oligonucleotide
  Antisense strand to SEQ ID NO: 2257756
acagacacagggaaauacc

SEQ ID NO: 2257758 - RNA, 19 nt, Artificial Sequence
  Description of Artificial Sequence: Synthetic oligonucleotide
  Sense strand starting at position 3043 of SEQ ID NO: 1884332
caagcuaugcuagaagucu

SEQ ID NO: 2257759 - RNA, 19 nt, Artificial Sequence
  Description of Artificial Sequence: Synthetic oligonucleotide
  Antisense strand to SEQ ID NO: 2257758
agacuucuagcauagcuug

SEQ ID NO: 2257760 - RNA, 19 nt, Artificial Sequence
  Description of Artificial Sequence: Synthetic oligonucleotide
  Sense strand starting at position 3049 of SEQ ID NO: 1884332
augcuagaagucuacagua

SEQ ID NO: 2257761 - RNA, 19 nt, Artificial Sequence
  Description of Artificial Sequence: Synthetic oligonucleotide
  Antisense strand to SEQ ID NO: 2257760
uacuguagacuucuagcau

SEQ ID NO: 2257762 - RNA, 19 nt, Artificial Sequence
  Description of Artificial Sequence: Synthetic oligonucleotide
  Sense strand starting at position 3051 of SEQ ID NO: 1884332
gcuagaagucuacaguaac

SEQ ID NO: 2257763 - RNA, 19 nt, Artificial Sequence
  Description of Artificial Sequence: Synthetic oligonucleotide
  Antisense strand to SEQ ID NO: 2257762
guuacuguagacuucuagc

SEQ ID NO: 2257764 - RNA, 19 nt, Artificial Sequence
  Description of Artificial Sequence: Synthetic oligonucleotide
  Sense strand starting at position 3074 of SEQ ID NO: 1884332
acagcaagguauucguaca

SEQ ID NO: 2257765 - RNA, 19 nt, Artificial Sequence
  Description of Artificial Sequence: Synthetic oligonucleotide
  Antisense strand to SEQ ID NO: 2257764
uguacgaauaccuugcugu

SEQ ID NO: 2257766 - RNA, 19 nt, Artificial Sequence
  Description of Artificial Sequence: Synthetic oligonucleotide
  Sense strand starting at position 3205 of SEQ ID NO: 1884332
aggaaaggauuguuuauuc

SEQ ID NO: 2257767 - RNA, 19 nt, Artificial Sequence
  Description of Artificial Sequence: Synthetic oligonucleotide
  Antisense strand to SEQ ID NO: 2257766
gaauaaacaauccuuuccu

SEQ ID NO: 2257768 - RNA, 19 nt, Artificial Sequence
  Description of Artificial Sequence: Synthetic oligonucleotide
  Sense strand starting at position 3311 of SEQ ID NO: 1884332
ggagacaguucugaaggaa

SEQ ID NO: 2257769 - RNA, 19 nt, Artificial Sequence
  Description of Artificial Sequence: Synthetic oligonucleotide
  Antisense strand to SEQ ID NO: 2257768
uuccuucagaacugucucc

SEQ ID NO: 2257770 - RNA, 19 nt, Artificial Sequence
  Description of Artificial Sequence: Synthetic oligonucleotide
  Sense strand starting at position 3423 of SEQ ID NO: 1884332
uuugauauucucugagcaa

SEQ ID NO: 2257771 - RNA, 19 nt, Artificial Sequence
  Description of Artificial Sequence: Synthetic oligonucleotide
  Antisense strand to SEQ ID NO: 2257770
uugcucagagaauaucaaa

SEQ ID NO: 2257772 - RNA, 19 nt, Artificial Sequence
  Description of Artificial Sequence: Synthetic oligonucleotide
  Sense strand starting at position 3467 of SEQ ID NO: 1884332
guuguaguagaguaugcau

SEQ ID NO: 2257773 - RNA, 19 nt, Artificial Sequence
  Description of Artificial Sequence: Synthetic oligonucleotide
  Antisense strand to SEQ ID NO: 2257772
augcauacucuacuacaac

SEQ ID NO: 2257774 - RNA, 19 nt, Artificial Sequence
  Description of Artificial Sequence: Synthetic oligonucleotide
  Sense strand starting at position 3469 of SEQ ID NO: 1884332
uguaguagaguaugcauga

SEQ ID NO: 2257775 - RNA, 19 nt, Artificial Sequence
  Description of Artificial Sequence: Synthetic oligonucleotide
  Antisense strand to SEQ ID NO: 2257774
ucaugcauacucuacuaca

SEQ ID NO: 2257776 - RNA, 19 nt, Artificial Sequence
  Description of Artificial Sequence: Synthetic oligonucleotide
  Sense strand starting at position 3470 of SEQ ID NO: 1884332
guaguagaguaugcaugau

SEQ ID NO: 2257777 - RNA, 19 nt, Artificial Sequence
  Description of Artificial Sequence: Synthetic oligonucleotide
  Antisense strand to SEQ ID NO: 2257776
aucaugcauacucuacuac

SEQ ID NO: 2257778 - RNA, 19 nt, Artificial Sequence
  Description of Artificial Sequence: Synthetic oligonucleotide
  Sense strand starting at position 3577 of SEQ ID NO: 1884332
cuaugaagguguuuaagaa

SEQ ID NO: 2257779 - RNA, 19 nt, Artificial Sequence
  Description of Artificial Sequence: Synthetic oligonucleotide
  Antisense strand to SEQ ID NO: 2257778
uucuuaaacaccuucauag

SEQ ID NO: 2257780 - RNA, 19 nt, Artificial Sequence
  Description of Artificial Sequence: Synthetic oligonucleotide
  Sense strand starting at position 3844 of SEQ ID NO: 1884332
cugugaacuacugaggguu

SEQ ID NO: 2257781 - RNA, 19 nt, Artificial Sequence
  Description of Artificial Sequence: Synthetic oligonucleotide
  Antisense strand to SEQ ID NO: 2257780
aacccucaguaguucacag

SEQ ID NO: 2257782 - RNA, 19 nt, Artificial Sequence
  Description of Artificial Sequence: Synthetic oligonucleotide
  Sense strand starting at position 3847 of SEQ ID NO: 1884332
ugaacuacugaggguugau

SEQ ID NO: 2257783 - RNA, 19 nt, Artificial Sequence
  Description of Artificial Sequence: Synthetic oligonucleotide
  Antisense strand to SEQ ID NO: 2257782
aucaacccucaguaguuca

SEQ ID NO: 2257784 - RNA, 19 nt, Artificial Sequence
  Description of Artificial Sequence: Synthetic oligonucleotide
  Sense strand starting at position 3931 of SEQ ID NO: 1884332
aguagcaaacugugggauu

SEQ ID NO: 2257785 - RNA, 19 nt, Artificial Sequence
  Description of Artificial Sequence: Synthetic oligonucleotide
  Antisense strand to SEQ ID NO: 2257784
aaucccacaguuugcuacu

SEQ ID NO: 2257786 - RNA, 19 nt, Artificial Sequence
  Description of Artificial Sequence: Synthetic oligonucleotide
  Sense strand starting at position 3983 of SEQ ID NO: 1884332
ugucauaacuagcugucuu

SEQ ID NO: 2257787 - RNA, 19 nt, Artificial Sequence
  Description of Artificial Sequence: Synthetic oligonucleotide
  Antisense strand to SEQ ID NO: 2257786
aagacagcuaguuaugaca

SEQ ID NO: 2257788 - RNA, 19 nt, Artificial Sequence
  Description of Artificial Sequence: Synthetic oligonucleotide
  Sense strand starting at position 130 of SEQ ID NO: 1884333
aggaguuagugaccaacuu

SEQ ID NO: 2257789 - RNA, 19 nt, Artificial Sequence
  Description of Artificial Sequence: Synthetic oligonucleotide
  Antisense strand to SEQ ID NO: 2257788
aaguuggucacuaacuccu

SEQ ID NO: 2257790 - RNA, 19 nt, Artificial Sequence
  Description of Artificial Sequence: Synthetic oligonucleotide
  Sense strand starting at position 715 of SEQ ID NO: 1884333
agcagcaguuucuuacaaa

SEQ ID NO: 2257791 - RNA, 19 nt, Artificial Sequence
  Description of Artificial Sequence: Synthetic oligonucleotide
  Antisense strand to SEQ ID NO: 2257790
uuuguaagaaacugcugcu

SEQ ID NO: 2257792 - RNA, 19 nt, Artificial Sequence
  Description of Artificial Sequence: Synthetic oligonucleotide
  Sense strand starting at position 745 of SEQ ID NO: 1884333
cucuucuaacguuaguauu

SEQ ID NO: 2257793 - RNA, 19 nt, Artificial Sequence
  Description of Artificial Sequence: Synthetic oligonucleotide
  Antisense strand to SEQ ID NO: 2257792
aauacuaacguuagaagag

SEQ ID NO: 2257794 - RNA, 19 nt, Artificial Sequence
  Description of Artificial Sequence: Synthetic oligonucleotide
  Sense strand starting at position 767 of SEQ ID NO: 1884333
ggugccucauauuuaagua

SEQ ID NO: 2257795 - RNA, 19 nt, Artificial Sequence
  Description of Artificial Sequence: Synthetic oligonucleotide
  Antisense strand to SEQ ID NO: 2257794
uacuuaaauaugaggcacc

SEQ ID NO: 2257796 - RNA, 19 nt, Artificial Sequence
  Description of Artificial Sequence: Synthetic oligonucleotide
  Sense strand starting at position 891 of SEQ ID NO: 1884333
uaagaagugcuaugaagac

SEQ ID NO: 2257797 - RNA, 19 nt, Artificial Sequence
  Description of Artificial Sequence: Synthetic oligonucleotide
  Antisense strand to SEQ ID NO: 2257796
gucuucauagcacuucuua

SEQ ID NO: 2257798 - RNA, 19 nt, Artificial Sequence
  Description of Artificial Sequence: Synthetic oligonucleotide
  Sense strand starting at position 907 of SEQ ID NO: 1884333
gacagcagauucuucguaa

SEQ ID NO: 2257799 - RNA, 19 nt, Artificial Sequence
  Description of Artificial Sequence: Synthetic oligonucleotide
  Antisense strand to SEQ ID NO: 2257798
uuacgaagaaucugcuguc

SEQ ID NO: 2257800 - RNA, 19 nt, Artificial Sequence
  Description of Artificial Sequence: Synthetic oligonucleotide
  Sense strand starting at position 908 of SEQ ID NO: 1884333
acagcagauucuucguaag

SEQ ID NO: 2257801 - RNA, 19 nt, Artificial Sequence
  Description of Artificial Sequence: Synthetic oligonucleotide
  Antisense strand to SEQ ID NO: 2257800
cuuacgaagaaucugcugu

SEQ ID NO: 2257802 - RNA, 19 nt, Artificial Sequence
  Description of Artificial Sequence: Synthetic oligonucleotide
  Sense strand starting at position 910 of SEQ ID NO: 1884333
agcagauucuucguaaguc

SEQ ID NO: 2257803 - RNA, 19 nt, Artificial Sequence
  Description of Artificial Sequence: Synthetic oligonucleotide
  Antisense strand to SEQ ID NO: 2257802
gacuuacgaagaaucugcu

SEQ ID NO: 2257804 - RNA, 19 nt, Artificial Sequence
  Description of Artificial Sequence: Synthetic oligonucleotide
  Sense strand starting at position 1005 of SEQ ID NO: 1884333
guuccauaccagugacuca

SEQ ID NO: 2257805 - RNA, 19 nt, Artificial Sequence
  Description of Artificial Sequence: Synthetic oligonucleotide
  Antisense strand to SEQ ID NO: 2257804
ugagucacugguauggaac

SEQ ID NO: 2257806 - RNA, 19 nt, Artificial Sequence
  Description of Artificial Sequence: Synthetic oligonucleotide
  Sense strand starting at position 1016 of SEQ ID NO: 1884333
gugacucaccgcgcauaau

SEQ ID NO: 2257807 - RNA, 19 nt, Artificial Sequence
  Description of Artificial Sequence: Synthetic oligonucleotide
  Antisense strand to SEQ ID NO: 2257806
auuaugcgcggugagucac

SEQ ID NO: 2257808 - RNA, 19 nt, Artificial Sequence
  Description of Artificial Sequence: Synthetic oligonucleotide
  Sense strand starting at position 1110 of SEQ ID NO: 1884333
ucuugugcucugggcugaa

SEQ ID NO: 2257809 - RNA, 19 nt, Artificial Sequence
  Description of Artificial Sequence: Synthetic oligonucleotide
  Antisense strand to SEQ ID NO: 2257808
uucagcccagagcacaaga

SEQ ID NO: 2257810 - RNA, 19 nt, Artificial Sequence
  Description of Artificial Sequence: Synthetic oligonucleotide
  Sense strand starting at position 1177 of SEQ ID NO: 1884333
gauauuaagcauuagguuu

SEQ ID NO: 2257811 - RNA, 19 nt, Artificial Sequence
  Description of Artificial Sequence: Synthetic oligonucleotide
  Antisense strand to SEQ ID NO: 2257810
aaaccuaaugcuuaauauc

SEQ ID NO: 2257812 - RNA, 19 nt, Artificial Sequence
  Description of Artificial Sequence: Synthetic oligonucleotide
  Sense strand starting at position 1183 of SEQ ID NO: 1884333
aagcauuagguuuguaaug

SEQ ID NO: 2257813 - RNA, 19 nt, Artificial Sequence
  Description of Artificial Sequence: Synthetic oligonucleotide
  Antisense strand to SEQ ID NO: 2257812
cauuacaaaccuaaugcuu

SEQ ID NO: 2257814 - RNA, 19 nt, Artificial Sequence
  Description of Artificial Sequence: Synthetic oligonucleotide
  Sense strand starting at position 1242 of SEQ ID NO: 1884333
gaggaacacuguuaccauc

SEQ ID NO: 2257815 - RNA, 19 nt, Artificial Sequence
  Description of Artificial Sequence: Synthetic oligonucleotide
  Antisense strand to SEQ ID NO: 2257814
gaugguaacaguguuccuc

SEQ ID NO: 2257816 - RNA, 19 nt, Artificial Sequence
  Description of Artificial Sequence: Synthetic oligonucleotide
  Sense strand starting at position 2297 of SEQ ID NO: 1884333
uguccagagcuuuacguua

SEQ ID NO: 2257817 - RNA, 19 nt, Artificial Sequence
  Description of Artificial Sequence: Synthetic oligonucleotide
  Antisense strand to SEQ ID NO: 2257816
uaacguaaagcucuggaca

SEQ ID NO: 2257818 - RNA, 19 nt, Artificial Sequence
  Description of Artificial Sequence: Synthetic oligonucleotide
  Sense strand starting at position 2340 of SEQ ID NO: 1884333
gagguugugugguuuacua

SEQ ID NO: 2257819 - RNA, 19 nt, Artificial Sequence
  Description of Artificial Sequence: Synthetic oligonucleotide
  Antisense strand to SEQ ID NO: 2257818
uaguaaaccacacaaccuc

SEQ ID NO: 2257820 - RNA, 19 nt, Artificial Sequence
  Description of Artificial Sequence: Synthetic oligonucleotide
  Sense strand starting at position 2342 of SEQ ID NO: 1884333
gguugugugguuuacuauu

SEQ ID NO: 2257821 - RNA, 19 nt, Artificial Sequence
  Description of Artificial Sequence: Synthetic oligonucleotide
  Antisense strand to SEQ ID NO: 2257820
aauaguaaaccacacaacc

SEQ ID NO: 2257822 - RNA, 19 nt, Artificial Sequence
  Description of Artificial Sequence: Synthetic oligonucleotide
  Sense strand starting at position 2350 of SEQ ID NO: 1884333
gguuuacuauuacugcuau

SEQ ID NO: 2257823 - RNA, 19 nt, Artificial Sequence
  Description of Artificial Sequence: Synthetic oligonucleotide
  Antisense strand to SEQ ID NO: 2257822
auagcaguaauaguaaacc

SEQ ID NO: 2257824 - RNA, 19 nt, Artificial Sequence
  Description of Artificial Sequence: Synthetic oligonucleotide
  Sense strand starting at position 2422 of SEQ ID NO: 1884333
gaggguugcacggguguua

SEQ ID NO: 2257825 - RNA, 19 nt, Artificial Sequence
  Description of Artificial Sequence: Synthetic oligonucleotide
  Antisense strand to SEQ ID NO: 2257824
uaacacccgugcaacccuc

SEQ ID NO: 2257826 - RNA, 19 nt, Artificial Sequence
  Description of Artificial Sequence: Synthetic oligonucleotide
  Sense strand starting at position 2426 of SEQ ID NO: 1884333
guugcacggguguuaagua

SEQ ID NO: 2257827 - RNA, 19 nt, Artificial Sequence
  Description of Artificial Sequence: Synthetic oligonucleotide
  Antisense strand to SEQ ID NO: 2257826
uacuuaacacccgugcaac

SEQ ID NO: 2257828 - RNA, 19 nt, Artificial Sequence
  Description of Artificial Sequence: Synthetic oligonucleotide
  Sense strand starting at position 2595 of SEQ ID NO: 1884333
agcguuguugcugagggau

SEQ ID NO: 2257829 - RNA, 19 nt, Artificial Sequence
  Description of Artificial Sequence: Synthetic oligonucleotide
  Antisense strand to SEQ ID NO: 2257828
aucccucagcaacaacgcu

SEQ ID NO: 2257830 - RNA, 19 nt, Artificial Sequence
  Description of Artificial Sequence: Synthetic oligonucleotide
  Sense strand starting at position 2694 of SEQ ID NO: 1884333
cggucagcgcuacagaauu

SEQ ID NO: 2257831 - RNA, 19 nt, Artificial Sequence
  Description of Artificial Sequence: Synthetic oligonucleotide
  Antisense strand to SEQ ID NO: 2257830
aauucuguagcgcugaccg

SEQ ID NO: 2257832 - RNA, 19 nt, Artificial Sequence
  Description of Artificial Sequence: Synthetic oligonucleotide
  Sense strand starting at position 2759 of SEQ ID NO: 1884333
uuggaacuguccucuagac

SEQ ID NO: 2257833 - RNA, 19 nt, Artificial Sequence
  Description of Artificial Sequence: Synthetic oligonucleotide
  Antisense strand to SEQ ID NO: 2257832
gucuagaggacaguuccaa

SEQ ID NO: 2257834 - RNA, 19 nt, Artificial Sequence
  Description of Artificial Sequence: Synthetic oligonucleotide
  Sense strand starting at position 2775 of SEQ ID NO: 1884333
gacuguagccucugccaga

SEQ ID NO: 2257835 - RNA, 19 nt, Artificial Sequence
  Description of Artificial Sequence: Synthetic oligonucleotide
  Antisense strand to SEQ ID NO: 2257834
ucuggcagaggcuacaguc

SEQ ID NO: 2257836 - RNA, 19 nt, Artificial Sequence
  Description of Artificial Sequence: Synthetic oligonucleotide
  Sense strand starting at position 2882 of SEQ ID NO: 1884333
caaauugcuucgucucuga

SEQ ID NO: 2257837 - RNA, 19 nt, Artificial Sequence
  Description of Artificial Sequence: Synthetic oligonucleotide
  Antisense strand to SEQ ID NO: 2257836
ucagagacgaagcaauuug

SEQ ID NO: 2257838 - RNA, 19 nt, Artificial Sequence
  Description of Artificial Sequence: Synthetic oligonucleotide
  Sense strand starting at position 2932 of SEQ ID NO: 1884333
accuuaaguuauccgaugu

SEQ ID NO: 2257839 - RNA, 19 nt, Artificial Sequence
  Description of Artificial Sequence: Synthetic oligonucleotide
  Antisense strand to SEQ ID NO: 2257838
acaucggauaacuuaaggu

SEQ ID NO: 2257840 - RNA, 19 nt, Artificial Sequence
  Description of Artificial Sequence: Synthetic oligonucleotide
  Sense strand starting at position 2933 of SEQ ID NO: 1884333
ccuuaaguuauccgaugug

SEQ ID NO: 2257841 - RNA, 19 nt, Artificial Sequence
  Description of Artificial Sequence: Synthetic oligonucleotide
  Antisense strand to SEQ ID NO: 2257840
cacaucggauaacuuaagg

SEQ ID NO: 2257842 - RNA, 19 nt, Artificial Sequence
  Description of Artificial Sequence: Synthetic oligonucleotide
  Sense strand starting at position 2961 of SEQ ID NO: 1884333
ucagccuagucuuugacua

SEQ ID NO: 2257843 - RNA, 19 nt, Artificial Sequence
  Description of Artificial Sequence: Synthetic oligonucleotide
  Antisense strand to SEQ ID NO: 2257842
uagucaaagacuaggcuga

SEQ ID NO: 2257844 - RNA, 19 nt, Artificial Sequence
  Description of Artificial Sequence: Synthetic oligonucleotide
  Sense strand starting at position 2985 of SEQ ID NO: 1884333
agaccucucuuccugaaga

SEQ ID NO: 2257845 - RNA, 19 nt, Artificial Sequence
  Description of Artificial Sequence: Synthetic oligonucleotide
  Antisense strand to SEQ ID NO: 2257844
ucuucaggaagagaggucu

SEQ ID NO: 2257846 - RNA, 19 nt, Artificial Sequence
  Description of Artificial Sequence: Synthetic oligonucleotide
  Sense strand starting at position 3133 of SEQ ID NO: 1884333
ggaacuugucaguaacgca

SEQ ID NO: 2257847 - RNA, 19 nt, Artificial Sequence
  Description of Artificial Sequence: Synthetic oligonucleotide
  Antisense strand to SEQ ID NO: 2257846
ugcguuacugacaaguucc

SEQ ID NO: 2257848 - RNA, 19 nt, Artificial Sequence
  Description of Artificial Sequence: Synthetic oligonucleotide
  Sense strand starting at position 3545 of SEQ ID NO: 1884333
gauacugaugcgggaucaa

SEQ ID NO: 2257849 - RNA, 19 nt, Artificial Sequence
  Description of Artificial Sequence: Synthetic oligonucleotide
  Antisense strand to SEQ ID NO: 2257848
uugaucccgcaucaguauc

SEQ ID NO: 2257850 - RNA, 19 nt, Artificial Sequence
  Description of Artificial Sequence: Synthetic oligonucleotide
  Sense strand starting at position 3572 of SEQ ID NO: 1884333
agcacuggucuaggucuua

SEQ ID NO: 2257851 - RNA, 19 nt, Artificial Sequence
  Description of Artificial Sequence: Synthetic oligonucleotide
  Antisense strand to SEQ ID NO: 2257850
uaagaccuagaccagugcu

SEQ ID NO: 2257852 - RNA, 19 nt, Artificial Sequence
  Description of Artificial Sequence: Synthetic oligonucleotide
  Sense strand starting at position 3584 of SEQ ID NO: 1884333
ggucuuagauccucuugcu

SEQ ID NO: 2257853 - RNA, 19 nt, Artificial Sequence
  Description of Artificial Sequence: Synthetic oligonucleotide
  Antisense strand to SEQ ID NO: 2257852
agcaagaggaucuaagacc

SEQ ID NO: 2257854 - RNA, 19 nt, Artificial Sequence
  Description of Artificial Sequence: Synthetic oligonucleotide
  Sense strand starting at position 3603 of SEQ ID NO: 1884333
ucaguuucgucauuggauc

SEQ ID NO: 2257855 - RNA, 19 nt, Artificial Sequence
  Description of Artificial Sequence: Synthetic oligonucleotide
  Antisense strand to SEQ ID NO: 2257854
gauccaaugacgaaacuga

SEQ ID NO: 2257856 - RNA, 19 nt, Artificial Sequence
  Description of Artificial Sequence: Synthetic oligonucleotide
  Sense strand starting at position 3719 of SEQ ID NO: 1884333
gcaugcuucccucaugugu

SEQ ID NO: 2257857 - RNA, 19 nt, Artificial Sequence
  Description of Artificial Sequence: Synthetic oligonucleotide
  Antisense strand to SEQ ID NO: 2257856
acacaugagggaagcaugc

SEQ ID NO: 2257858 - RNA, 19 nt, Artificial Sequence
  Description of Artificial Sequence: Synthetic oligonucleotide
  Sense strand starting at position 3737 of SEQ ID NO: 1884333
uuccaaagcuggucagagu

SEQ ID NO: 2257859 - RNA, 19 nt, Artificial Sequence
  Description of Artificial Sequence: Synthetic oligonucleotide
  Antisense strand to SEQ ID NO: 2257858
acucugaccagcuuuggaa

SEQ ID NO: 2257860 - RNA, 19 nt, Artificial Sequence
  Description of Artificial Sequence: Synthetic oligonucleotide
  Sense strand starting at position 3738 of SEQ ID NO: 1884333
uccaaagcuggucagagua

SEQ ID NO: 2257861 - RNA, 19 nt, Artificial Sequence
  Description of Artificial Sequence: Synthetic oligonucleotide
  Antisense strand to SEQ ID NO: 2257860
uacucugaccagcuuugga

SEQ ID NO: 2257862 - RNA, 19 nt, Artificial Sequence
  Description of Artificial Sequence: Synthetic oligonucleotide
  Sense strand starting at position 3748 of SEQ ID NO: 1884333
gucagaguagucuacacca

SEQ ID NO: 2257863 - RNA, 19 nt, Artificial Sequence
  Description of Artificial Sequence: Synthetic oligonucleotide
  Antisense strand to SEQ ID NO: 2257862
ugguguagacuacucugac

SEQ ID NO: 2257864 - RNA, 19 nt, Artificial Sequence
  Description of Artificial Sequence: Synthetic oligonucleotide
  Sense strand starting at position 3853 of SEQ ID NO: 1884333
gucagcuggcaucggaauu

SEQ ID NO: 2257865 - RNA, 19 nt, Artificial Sequence
  Description of Artificial Sequence: Synthetic oligonucleotide
  Antisense strand to SEQ ID NO: 2257864
aauuccgaugccagcugac

SEQ ID NO: 2257866 - RNA, 19 nt, Artificial Sequence
  Description of Artificial Sequence: Synthetic oligonucleotide
  Sense strand starting at position 3925 of SEQ ID NO: 1884333
ucauccucccagugaauga

SEQ ID NO: 2257867 - RNA, 19 nt, Artificial Sequence
  Description of Artificial Sequence: Synthetic oligonucleotide
  Antisense strand to SEQ ID NO: 2257866
ucauucacugggaggauga

SEQ ID NO: 2257868 - RNA, 19 nt, Artificial Sequence
  Description of Artificial Sequence: Synthetic oligonucleotide
  Sense strand starting at position 22 of SEQ ID NO: 1884334
uuugcuaaagcguaauaga

SEQ ID NO: 2257869 - RNA, 19 nt, Artificial Sequence
  Description of Artificial Sequence: Synthetic oligonucleotide
  Antisense strand to SEQ ID NO: 2257868
ucuauuacgcuuuagcaaa

SEQ ID NO: 2257870 - RNA, 19 nt, Artificial Sequence
  Description of Artificial Sequence: Synthetic oligonucleotide
  Sense strand starting at position 32 of SEQ ID NO: 1884334
cguaauagaaauuggguuu

SEQ ID NO: 2257871 - RNA, 19 nt, Artificial Sequence
  Description of Artificial Sequence: Synthetic oligonucleotide
  Antisense strand to SEQ ID NO: 2257870
aaacccaauuucuauuacg

SEQ ID NO: 2257872 - RNA, 19 nt, Artificial Sequence
  Description of Artificial Sequence: Synthetic oligonucleotide
  Sense strand starting at position 148 of SEQ ID NO: 1884334
cugagcuugcauugauaac

SEQ ID NO: 2257873 - RNA, 19 nt, Artificial Sequence
  Description of Artificial Sequence: Synthetic oligonucleotide
  Antisense strand to SEQ ID NO: 2257872
guuaucaaugcaagcucag

SEQ ID NO: 2257874 - RNA, 19 nt, Artificial Sequence
  Description of Artificial Sequence: Synthetic oligonucleotide
  Sense strand starting at position 205 of SEQ ID NO: 1884334
ccauaaaguggaugacagu

SEQ ID NO: 2257875 - RNA, 19 nt, Artificial Sequence
  Description of Artificial Sequence: Synthetic oligonucleotide
  Antisense strand to SEQ ID NO: 2257874
acugucauccacuuuaugg

SEQ ID NO: 2257876 - RNA, 19 nt, Artificial Sequence
  Description of Artificial Sequence: Synthetic oligonucleotide
  Sense strand starting at position 293 of SEQ ID NO: 1884334
ccaggacuacuuuguuuga

SEQ ID NO: 2257877 - RNA, 19 nt, Artificial Sequence
  Description of Artificial Sequence: Synthetic oligonucleotide
  Antisense strand to SEQ ID NO: 2257876
ucaaacaaaguaguccugg

SEQ ID NO: 2257878 - RNA, 19 nt, Artificial Sequence
  Description of Artificial Sequence: Synthetic oligonucleotide
  Sense strand starting at position 603 of SEQ ID NO: 1884334
gcagaaggcagcugaaauu

SEQ ID NO: 2257879 - RNA, 19 nt, Artificial Sequence
  Description of Artificial Sequence: Synthetic oligonucleotide
  Antisense strand to SEQ ID NO: 2257878
aauuucagcugccuucugc

SEQ ID NO: 2257880 - RNA, 19 nt, Artificial Sequence
  Description of Artificial Sequence: Synthetic oligonucleotide
  Sense strand starting at position 636 of SEQ ID NO: 1884334
ccagaaacuccugguagag

SEQ ID NO: 2257881 - RNA, 19 nt, Artificial Sequence
  Description of Artificial Sequence: Synthetic oligonucleotide
  Antisense strand to SEQ ID NO: 2257880
cucuaccaggaguuucugg

SEQ ID NO: 2257882 - RNA, 19 nt, Artificial Sequence
  Description of Artificial Sequence: Synthetic oligonucleotide
  Sense strand starting at position 713 of SEQ ID NO: 1884334
ccgaauggcuuucccugaa

SEQ ID NO: 2257883 - RNA, 19 nt, Artificial Sequence
  Description of Artificial Sequence: Synthetic oligonucleotide
  Antisense strand to SEQ ID NO: 2257882
uucagggaaagccauucgg

SEQ ID NO: 2257884 - RNA, 19 nt, Artificial Sequence
  Description of Artificial Sequence: Synthetic oligonucleotide
  Sense strand starting at position 753 of SEQ ID NO: 1884334
ggaacacaugccuggagau

SEQ ID NO: 2257885 - RNA, 19 nt, Artificial Sequence
  Description of Artificial Sequence: Synthetic oligonucleotide
  Antisense strand to SEQ ID NO: 2257884
aucuccaggcauguguucc

SEQ ID NO: 2257886 - RNA, 19 nt, Artificial Sequence
  Description of Artificial Sequence: Synthetic oligonucleotide
  Sense strand starting at position 865 of SEQ ID NO: 1884334
cugggucuccuccaucaca

SEQ ID NO: 2257887 - RNA, 19 nt, Artificial Sequence
  Description of Artificial Sequence: Synthetic oligonucleotide
  Antisense strand to SEQ ID NO: 2257886
ugugauggaggagacccag

SEQ ID NO: 2257888 - RNA, 19 nt, Artificial Sequence
  Description of Artificial Sequence: Synthetic oligonucleotide
  Sense strand starting at position 935 of SEQ ID NO: 1884334
cccgaauucuguuuccaua

SEQ ID NO: 2257889 - RNA, 19 nt, Artificial Sequence
  Description of Artificial Sequence: Synthetic oligonucleotide
  Antisense strand to SEQ ID NO: 2257888
uauggaaacagaauucggg

SEQ ID NO: 2257890 - RNA, 19 nt, Artificial Sequence
  Description of Artificial Sequence: Synthetic oligonucleotide
  Sense strand starting at position 991 of SEQ ID NO: 1884334
gggucaggaucucuugcau

SEQ ID NO: 2257891 - RNA, 19 nt, Artificial Sequence
  Description of Artificial Sequence: Synthetic oligonucleotide
  Antisense strand to SEQ ID NO: 2257890
augcaagagauccugaccc

SEQ ID NO: 2257892 - RNA, 19 nt, Artificial Sequence
  Description of Artificial Sequence: Synthetic oligonucleotide
  Sense strand starting at position 1186 of SEQ ID NO: 1884334
ucgcuuaugcccuagacua

SEQ ID NO: 2257893 - RNA, 19 nt, Artificial Sequence
  Description of Artificial Sequence: Synthetic oligonucleotide
  Antisense strand to SEQ ID NO: 2257892
uagucuagggcauaagcga

SEQ ID NO: 2257894 - RNA, 19 nt, Artificial Sequence
  Description of Artificial Sequence: Synthetic oligonucleotide
  Sense strand starting at position 1235 of SEQ ID NO: 1884334
ccugguuguccagaacucu

SEQ ID NO: 2257895 - RNA, 19 nt, Artificial Sequence
  Description of Artificial Sequence: Synthetic oligonucleotide
  Antisense strand to SEQ ID NO: 2257894
agaguucuggacaaccagg

SEQ ID NO: 2257896 - RNA, 19 nt, Artificial Sequence
  Description of Artificial Sequence: Synthetic oligonucleotide
  Sense strand starting at position 1244 of SEQ ID NO: 1884334
ccagaacucucccuggcuu

SEQ ID NO: 2257897 - RNA, 19 nt, Artificial Sequence
  Description of Artificial Sequence: Synthetic oligonucleotide
  Antisense strand to SEQ ID NO: 2257896
aagccagggagaguucugg

SEQ ID NO: 2257898 - RNA, 19 nt, Artificial Sequence
  Description of Artificial Sequence: Synthetic oligonucleotide
  Sense strand starting at position 1377 of SEQ ID NO: 1884334
gugaacgguuccuucuuaa

SEQ ID NO: 2257899 - RNA, 19 nt, Artificial Sequence
  Description of Artificial Sequence: Synthetic oligonucleotide
  Antisense strand to SEQ ID NO: 2257898
uuaagaaggaaccguucac

SEQ ID NO: 2257900 - RNA, 19 nt, Artificial Sequence
  Description of Artificial Sequence: Synthetic oligonucleotide
  Sense strand starting at position 1380 of SEQ ID NO: 1884334
aacgguuccuucuuaagag

SEQ ID NO: 2257901 - RNA, 19 nt, Artificial Sequence
  Description of Artificial Sequence: Synthetic oligonucleotide
  Antisense strand to SEQ ID NO: 2257900
cucuuaagaaggaaccguu

SEQ ID NO: 2257902 - RNA, 19 nt, Artificial Sequence
  Description of Artificial Sequence: Synthetic oligonucleotide
  Sense strand starting at position 1388 of SEQ ID NO: 1884334
cuucuuaagaguuggcaag

SEQ ID NO: 2257903 - RNA, 19 nt, Artificial Sequence
  Description of Artificial Sequence: Synthetic oligonucleotide
  Antisense strand to SEQ ID NO: 2257902
cuugccaacucuuaagaag

SEQ ID NO: 2257904 - RNA, 19 nt, Artificial Sequence
  Description of Artificial Sequence: Synthetic oligonucleotide
  Sense strand starting at position 1389 of SEQ ID NO: 1884334
uucuuaagaguuggcaaga

SEQ ID NO: 2257905 - RNA, 19 nt, Artificial Sequence
  Description of Artificial Sequence: Synthetic oligonucleotide
  Antisense strand to SEQ ID NO: 2257904
ucuugccaacucuuaagaa

SEQ ID NO: 2257906 - RNA, 19 nt, Artificial Sequence
  Description of Artificial Sequence: Synthetic oligonucleotide
  Sense strand starting at position 1390 of SEQ ID NO: 1884334
ucuuaagaguuggcaagaa

SEQ ID NO: 2257907 - RNA, 19 nt, Artificial Sequence
  Description of Artificial Sequence: Synthetic oligonucleotide
  Antisense strand to SEQ ID NO: 2257906
uucuugccaacucuuaaga

SEQ ID NO: 2257908 - RNA, 19 nt, Artificial Sequence
  Description of Artificial Sequence: Synthetic oligonucleotide
  Sense strand starting at position 1420 of SEQ ID NO: 1884334
gggaguuccugagcuuaag

SEQ ID NO: 2257909 - RNA, 19 nt, Artificial Sequence
  Description of Artificial Sequence: Synthetic oligonucleotide
  Antisense strand to SEQ ID NO: 2257908
cuuaagcucaggaacuccc

SEQ ID NO: 2257910 - RNA, 19 nt, Artificial Sequence
  Description of Artificial Sequence: Synthetic oligonucleotide
  Sense strand starting at position 1423 of SEQ ID NO: 1884334
aguuccugagcuuaaggau

SEQ ID NO: 2257911 - RNA, 19 nt, Artificial Sequence
  Description of Artificial Sequence: Synthetic oligonucleotide
  Antisense strand to SEQ ID NO: 2257910
auccuuaagcucaggaacu

SEQ ID NO: 2257912 - RNA, 19 nt, Artificial Sequence
  Description of Artificial Sequence: Synthetic oligonucleotide
  Sense strand starting at position 2281 of SEQ ID NO: 1884334
ccguguaauuuggcucucu

SEQ ID NO: 2257913 - RNA, 19 nt, Artificial Sequence
  Description of Artificial Sequence: Synthetic oligonucleotide
  Antisense strand to SEQ ID NO: 2257912
agagagccaaauuacacgg

SEQ ID NO: 2257914 - RNA, 19 nt, Artificial Sequence
  Description of Artificial Sequence: Synthetic oligonucleotide
  Sense strand starting at position 2282 of SEQ ID NO: 1884334
cguguaauuuggcucucuu

SEQ ID NO: 2257915 - RNA, 19 nt, Artificial Sequence
  Description of Artificial Sequence: Synthetic oligonucleotide
  Antisense strand to SEQ ID NO: 2257914
aagagagccaaauuacacg

SEQ ID NO: 2257916 - RNA, 19 nt, Artificial Sequence
  Description of Artificial Sequence: Synthetic oligonucleotide
  Sense strand starting at position 2289 of SEQ ID NO: 1884334
uuuggcucucuuggauuaa

SEQ ID NO: 2257917 - RNA, 19 nt, Artificial Sequence
  Description of Artificial Sequence: Synthetic oligonucleotide
  Antisense strand to SEQ ID NO: 2257916
uuaauccaagagagccaaa

SEQ ID NO: 2257918 - RNA, 19 nt, Artificial Sequence
  Description of Artificial Sequence: Synthetic oligonucleotide
  Sense strand starting at position 2333 of SEQ ID NO: 1884334
gugcaauggugguugggaa

SEQ ID NO: 2257919 - RNA, 19 nt, Artificial Sequence
  Description of Artificial Sequence: Synthetic oligonucleotide
  Antisense strand to SEQ ID NO: 2257918
uucccaaccaccauugcac

SEQ ID NO: 2257920 - RNA, 19 nt, Artificial Sequence
  Description of Artificial Sequence: Synthetic oligonucleotide
  Sense strand starting at position 2351 of SEQ ID NO: 1884334
aggaggguguggucuugau

SEQ ID NO: 2257921 - RNA, 19 nt, Artificial Sequence
  Description of Artificial Sequence: Synthetic oligonucleotide
  Antisense strand to SEQ ID NO: 2257920
aucaagaccacacccuccu

SEQ ID NO: 2257922 - RNA, 19 nt, Artificial Sequence
  Description of Artificial Sequence: Synthetic oligonucleotide
  Sense strand starting at position 2756 of SEQ ID NO: 1884334
guuuaauucccaugguacu

SEQ ID NO: 2257923 - RNA, 19 nt, Artificial Sequence
  Description of Artificial Sequence: Synthetic oligonucleotide
  Antisense strand to SEQ ID NO: 2257922
aguaccaugggaauuaaac

SEQ ID NO: 2257924 - RNA, 19 nt, Artificial Sequence
  Description of Artificial Sequence: Synthetic oligonucleotide
  Sense strand starting at position 2787 of SEQ ID NO: 1884334
uaugguaggaggugaauaa

SEQ ID NO: 2257925 - RNA, 19 nt, Artificial Sequence
  Description of Artificial Sequence: Synthetic oligonucleotide
  Antisense strand to SEQ ID NO: 2257924
uuauucaccuccuaccaua

SEQ ID NO: 2257926 - RNA, 19 nt, Artificial Sequence
  Description of Artificial Sequence: Synthetic oligonucleotide
  Sense strand starting at position 2834 of SEQ ID NO: 1884334
uaauuugguuguccaagca

SEQ ID NO: 2257927 - RNA, 19 nt, Artificial Sequence
  Description of Artificial Sequence: Synthetic oligonucleotide
  Antisense strand to SEQ ID NO: 2257926
ugcuuggacaaccaaauua

SEQ ID NO: 2257928 - RNA, 19 nt, Artificial Sequence
  Description of Artificial Sequence: Synthetic oligonucleotide
  Sense strand starting at position 3046 of SEQ ID NO: 1884334
ugaugcggcaaguauuaga

SEQ ID NO: 2257929 - RNA, 19 nt, Artificial Sequence
  Description of Artificial Sequence: Synthetic oligonucleotide
  Antisense strand to SEQ ID NO: 2257928
ucuaauacuugccgcauca

SEQ ID NO: 2257930 - RNA, 19 nt, Artificial Sequence
  Description of Artificial Sequence: Synthetic oligonucleotide
  Sense strand starting at position 3089 of SEQ ID NO: 1884334
gagugagacuccucccagu

SEQ ID NO: 2257931 - RNA, 19 nt, Artificial Sequence
  Description of Artificial Sequence: Synthetic oligonucleotide
  Antisense strand to SEQ ID NO: 2257930
acugggaggagucucacuc

SEQ ID NO: 2257932 - RNA, 19 nt, Artificial Sequence
  Description of Artificial Sequence: Synthetic oligonucleotide
  Sense strand starting at position 3217 of SEQ ID NO: 1884334
agucuuggugugcagaacu

SEQ ID NO: 2257933 - RNA, 19 nt, Artificial Sequence
  Description of Artificial Sequence: Synthetic oligonucleotide
  Antisense strand to SEQ ID NO: 2257932
aguucugcacaccaagacu

SEQ ID NO: 2257934 - RNA, 19 nt, Artificial Sequence
  Description of Artificial Sequence: Synthetic oligonucleotide
  Sense strand starting at position 3372 of SEQ ID NO: 1884334
gaggaacccguuugaaaug

SEQ ID NO: 2257935 - RNA, 19 nt, Artificial Sequence
  Description of Artificial Sequence: Synthetic oligonucleotide
  Antisense strand to SEQ ID NO: 2257934
cauuucaaacggguuccuc

SEQ ID NO: 2257936 - RNA, 19 nt, Artificial Sequence
  Description of Artificial Sequence: Synthetic oligonucleotide
  Sense strand starting at position 3443 of SEQ ID NO: 1884334
gcugaagaauucuccuaau

SEQ ID NO: 2257937 - RNA, 19 nt, Artificial Sequence
  Description of Artificial Sequence: Synthetic oligonucleotide
  Antisense strand to SEQ ID NO: 2257936
auuaggagaauucuucagc

SEQ ID NO: 2257938 - RNA, 19 nt, Artificial Sequence
  Description of Artificial Sequence: Synthetic oligonucleotide
  Sense strand starting at position 3506 of SEQ ID NO: 1884334
agcugagguggugagaaau

SEQ ID NO: 2257939 - RNA, 19 nt, Artificial Sequence
  Description of Artificial Sequence: Synthetic oligonucleotide
  Antisense strand to SEQ ID NO: 2257938
auuucucaccaccucagcu

SEQ ID NO: 2257940 - RNA, 19 nt, Artificial Sequence
  Description of Artificial Sequence: Synthetic oligonucleotide
  Sense strand starting at position 3741 of SEQ ID NO: 1884334
ugagaccuuguauauguua

SEQ ID NO: 2257941 - RNA, 19 nt, Artificial Sequence
  Description of Artificial Sequence: Synthetic oligonucleotide
  Antisense strand to SEQ ID NO: 2257940
uaacauauacaaggucuca

SEQ ID NO: 2257942 - RNA, 19 nt, Artificial Sequence
  Description of Artificial Sequence: Synthetic oligonucleotide
  Sense strand starting at position 3801 of SEQ ID NO: 1884334
agagaaguaucuguugauc

SEQ ID NO: 2257943 - RNA, 19 nt, Artificial Sequence
  Description of Artificial Sequence: Synthetic oligonucleotide
  Antisense strand to SEQ ID NO: 2257942
gaucaacagauacuucucu

SEQ ID NO: 2257944 - RNA, 19 nt, Artificial Sequence
  Description of Artificial Sequence: Synthetic oligonucleotide
  Sense strand starting at position 3804 of SEQ ID NO: 1884334
gaaguaucuguugauccag

SEQ ID NO: 2257945 - RNA, 19 nt, Artificial Sequence
  Description of Artificial Sequence: Synthetic oligonucleotide
  Antisense strand to SEQ ID NO: 2257944
cuggaucaacagauacuuc

SEQ ID NO: 2257946 - RNA, 19 nt, Artificial Sequence
  Description of Artificial Sequence: Synthetic oligonucleotide
  Sense strand starting at position 3806 of SEQ ID NO: 1884334
aguaucuguugauccaguu

SEQ ID NO: 2257947 - RNA, 19 nt, Artificial Sequence
  Description of Artificial Sequence: Synthetic oligonucleotide
  Antisense strand to SEQ ID NO: 2257946
aacuggaucaacagauacu

SEQ ID NO: 2257948 - RNA, 19 nt, Artificial Sequence
  Description of Artificial Sequence: Synthetic oligonucleotide
  Sense strand starting at position 23 of SEQ ID NO: 1884335
gcaguucuuacgcaggcau

SEQ ID NO: 2257949 - RNA, 19 nt, Artificial Sequence
  Description of Artificial Sequence: Synthetic oligonucleotide
  Antisense strand to SEQ ID NO: 2257948
augccugcguaagaacugc

SEQ ID NO: 2257950 - RNA, 19 nt, Artificial Sequence
  Description of Artificial Sequence: Synthetic oligonucleotide
  Sense strand starting at position 89 of SEQ ID NO: 1884335
cacagaugaugacgauaga

SEQ ID NO: 2257951 - RNA, 19 nt, Artificial Sequence
  Description of Artificial Sequence: Synthetic oligonucleotide
  Antisense strand to SEQ ID NO: 2257950
ucuaucgucaucaucugug

SEQ ID NO: 2257952 - RNA, 19 nt, Artificial Sequence
  Description of Artificial Sequence: Synthetic oligonucleotide
  Sense strand starting at position 138 of SEQ ID NO: 1884335
cacccagggccaugugaau

SEQ ID NO: 2257953 - RNA, 19 nt, Artificial Sequence
  Description of Artificial Sequence: Synthetic oligonucleotide
  Antisense strand to SEQ ID NO: 2257952
auucacauggcccugggug

SEQ ID NO: 2257954 - RNA, 19 nt, Artificial Sequence
  Description of Artificial Sequence: Synthetic oligonucleotide
  Sense strand starting at position 351 of SEQ ID NO: 1884335
ccacgugguucccagguaa

SEQ ID NO: 2257955 - RNA, 19 nt, Artificial Sequence
  Description of Artificial Sequence: Synthetic oligonucleotide
  Antisense strand to SEQ ID NO: 2257954
uuaccugggaaccacgugg

SEQ ID NO: 2257956 - RNA, 19 nt, Artificial Sequence
  Description of Artificial Sequence: Synthetic oligonucleotide
  Sense strand starting at position 421 of SEQ ID NO: 1884335
augggaaaccuucgucagu

SEQ ID NO: 2257957 - RNA, 19 nt, Artificial Sequence
  Description of Artificial Sequence: Synthetic oligonucleotide
  Antisense strand to SEQ ID NO: 2257956
acugacgaagguuucccau

SEQ ID NO: 2257958 - RNA, 19 nt, Artificial Sequence
  Description of Artificial Sequence: Synthetic oligonucleotide
  Sense strand starting at position 423 of SEQ ID NO: 1884335
gggaaaccuucgucagugu

SEQ ID NO: 2257959 - RNA, 19 nt, Artificial Sequence
  Description of Artificial Sequence: Synthetic oligonucleotide
  Antisense strand to SEQ ID NO: 2257958
acacugacgaagguuuccc

SEQ ID NO: 2257960 - RNA, 19 nt, Artificial Sequence
  Description of Artificial Sequence: Synthetic oligonucleotide
  Sense strand starting at position 597 of SEQ ID NO: 1884335
ccaggauguagacgaaaua

SEQ ID NO: 2257961 - RNA, 19 nt, Artificial Sequence
  Description of Artificial Sequence: Synthetic oligonucleotide
  Antisense strand to SEQ ID NO: 2257960
uauuucgucuacauccugg

SEQ ID NO: 2257962 - RNA, 19 nt, Artificial Sequence
  Description of Artificial Sequence: Synthetic oligonucleotide
  Sense strand starting at position 616 of SEQ ID NO: 1884335
gaugcaauaucuggagguu

SEQ ID NO: 2257963 - RNA, 19 nt, Artificial Sequence
  Description of Artificial Sequence: Synthetic oligonucleotide
  Antisense strand to SEQ ID NO: 2257962
aaccuccagauauugcauc

SEQ ID NO: 2257964 - RNA, 19 nt, Artificial Sequence
  Description of Artificial Sequence: Synthetic oligonucleotide
  Sense strand starting at position 629 of SEQ ID NO: 1884335
gagguucuccuauaggugu

SEQ ID NO: 2257965 - RNA, 19 nt, Artificial Sequence
  Description of Artificial Sequence: Synthetic oligonucleotide
  Antisense strand to SEQ ID NO: 2257964
acaccuauaggagaaccuc

SEQ ID NO: 2257966 - RNA, 19 nt, Artificial Sequence
  Description of Artificial Sequence: Synthetic oligonucleotide
  Sense strand starting at position 764 of SEQ ID NO: 1884335
gggauugguuaccuguacu

SEQ ID NO: 2257967 - RNA, 19 nt, Artificial Sequence
  Description of Artificial Sequence: Synthetic oligonucleotide
  Antisense strand to SEQ ID NO: 2257966
aguacagguaaccaauccc

SEQ ID NO: 2257968 - RNA, 19 nt, Artificial Sequence
  Description of Artificial Sequence: Synthetic oligonucleotide
  Sense strand starting at position 843 of SEQ ID NO: 1884335
gagcaaugugagcaaagcu

SEQ ID NO: 2257969 - RNA, 19 nt, Artificial Sequence
  Description of Artificial Sequence: Synthetic oligonucleotide
  Antisense strand to SEQ ID NO: 2257968
agcuuugcucacauugcuc

SEQ ID NO: 2257970 - RNA, 19 nt, Artificial Sequence
  Description of Artificial Sequence: Synthetic oligonucleotide
  Sense strand starting at position 852 of SEQ ID NO: 1884335
gagcaaagcuugcugucuu

SEQ ID NO: 2257971 - RNA, 19 nt, Artificial Sequence
  Description of Artificial Sequence: Synthetic oligonucleotide
  Antisense strand to SEQ ID NO: 2257970
aagacagcaagcuuugcuc

SEQ ID NO: 2257972 - RNA, 19 nt, Artificial Sequence
  Description of Artificial Sequence: Synthetic oligonucleotide
  Sense strand starting at position 859 of SEQ ID NO: 1884335
gcuugcugucuuugcaaag

SEQ ID NO: 2257973 - RNA, 19 nt, Artificial Sequence
  Description of Artificial Sequence: Synthetic oligonucleotide
  Antisense strand to SEQ ID NO: 2257972
cuuugcaaagacagcaagc

SEQ ID NO: 2257974 - RNA, 19 nt, Artificial Sequence
  Description of Artificial Sequence: Synthetic oligonucleotide
  Sense strand starting at position 982 of SEQ ID NO: 1884335
ggaggaauggguuguucuc

SEQ ID NO: 2257975 - RNA, 19 nt, Artificial Sequence
  Description of Artificial Sequence: Synthetic oligonucleotide
  Antisense strand to SEQ ID NO: 2257974
gagaacaacccauuccucc

SEQ ID NO: 2257976 - RNA, 19 nt, Artificial Sequence
  Description of Artificial Sequence: Synthetic oligonucleotide
  Sense strand starting at position 1609 of SEQ ID NO: 1884335
aauuucgucuucuggguaa

SEQ ID NO: 2257977 - RNA, 19 nt, Artificial Sequence
  Description of Artificial Sequence: Synthetic oligonucleotide
  Antisense strand to SEQ ID NO: 2257976
uuacccagaagacgaaauu

SEQ ID NO: 2257978 - RNA, 19 nt, Artificial Sequence
  Description of Artificial Sequence: Synthetic oligonucleotide
  Sense strand starting at position 2374 of SEQ ID NO: 1884335
gcgguucugaguuggcaca

SEQ ID NO: 2257979 - RNA, 19 nt, Artificial Sequence
  Description of Artificial Sequence: Synthetic oligonucleotide
  Antisense strand to SEQ ID NO: 2257978
ugugccaacucagaaccgc

SEQ ID NO: 2257980 - RNA, 19 nt, Artificial Sequence
  Description of Artificial Sequence: Synthetic oligonucleotide
  Sense strand starting at position 2521 of SEQ ID NO: 1884335
gagaauggcuuucuccuga

SEQ ID NO: 2257981 - RNA, 19 nt, Artificial Sequence
  Description of Artificial Sequence: Synthetic oligonucleotide
  Antisense strand to SEQ ID NO: 2257980
ucaggagaaagccauucuc

SEQ ID NO: 2257982 - RNA, 19 nt, Artificial Sequence
  Description of Artificial Sequence: Synthetic oligonucleotide
  Sense strand starting at position 2544 of SEQ ID NO: 1884335
agucuuugcugcugggaag

SEQ ID NO: 2257983 - RNA, 19 nt, Artificial Sequence
  Description of Artificial Sequence: Synthetic oligonucleotide
  Antisense strand to SEQ ID NO: 2257982
cuucccagcagcaaagacu

SEQ ID NO: 2257984 - RNA, 19 nt, Artificial Sequence
  Description of Artificial Sequence: Synthetic oligonucleotide
  Sense strand starting at position 2545 of SEQ ID NO: 1884335
gucuuugcugcugggaagu

SEQ ID NO: 2257985 - RNA, 19 nt, Artificial Sequence
  Description of Artificial Sequence: Synthetic oligonucleotide
  Antisense strand to SEQ ID NO: 2257984
acuucccagcagcaaagac

SEQ ID NO: 2257986 - RNA, 19 nt, Artificial Sequence
  Description of Artificial Sequence: Synthetic oligonucleotide
  Sense strand starting at position 2558 of SEQ ID NO: 1884335
ggaagugacugaugggcuu

SEQ ID NO: 2257987 - RNA, 19 nt, Artificial Sequence
  Description of Artificial Sequence: Synthetic oligonucleotide
  Antisense strand to SEQ ID NO: 2257986
aagcccaucagucacuucc

SEQ ID NO: 2257988 - RNA, 19 nt, Artificial Sequence
  Description of Artificial Sequence: Synthetic oligonucleotide
  Sense strand starting at position 2590 of SEQ ID NO: 1884335
ccauuuccugucgguguua

SEQ ID NO: 2257989 - RNA, 19 nt, Artificial Sequence
  Description of Artificial Sequence: Synthetic oligonucleotide
  Antisense strand to SEQ ID NO: 2257988
uaacaccgacaggaaaugg

SEQ ID NO: 2257990 - RNA, 19 nt, Artificial Sequence
  Description of Artificial Sequence: Synthetic oligonucleotide
  Sense strand starting at position 2592 of SEQ ID NO: 1884335
auuuccugucgguguuaga

SEQ ID NO: 2257991 - RNA, 19 nt, Artificial Sequence
  Description of Artificial Sequence: Synthetic oligonucleotide
  Antisense strand to SEQ ID NO: 2257990
ucuaacaccgacaggaaau

SEQ ID NO: 2257992 - RNA, 19 nt, Artificial Sequence
  Description of Artificial Sequence: Synthetic oligonucleotide
  Sense strand starting at position 2595 of SEQ ID NO: 1884335
uccugucgguguuagaauu

SEQ ID NO: 2257993 - RNA, 19 nt, Artificial Sequence
  Description of Artificial Sequence: Synthetic oligonucleotide
  Antisense strand to SEQ ID NO: 2257992
aauucuaacaccgacagga

SEQ ID NO: 2257994 - RNA, 19 nt, Artificial Sequence
  Description of Artificial Sequence: Synthetic oligonucleotide
  Sense strand starting at position 2749 of SEQ ID NO: 1884335
cguggaagacucggcugau

SEQ ID NO: 2257995 - RNA, 19 nt, Artificial Sequence
  Description of Artificial Sequence: Synthetic oligonucleotide
  Antisense strand to SEQ ID NO: 2257994
aucagccgagucuuccacg

SEQ ID NO: 2257996 - RNA, 19 nt, Artificial Sequence
  Description of Artificial Sequence: Synthetic oligonucleotide
  Sense strand starting at position 2750 of SEQ ID NO: 1884335
guggaagacucggcugaug

SEQ ID NO: 2257997 - RNA, 19 nt, Artificial Sequence
  Description of Artificial Sequence: Synthetic oligonucleotide
  Antisense strand to SEQ ID NO: 2257996
caucagccgagucuuccac

SEQ ID NO: 2257998 - RNA, 19 nt, Artificial Sequence
  Description of Artificial Sequence: Synthetic oligonucleotide
  Sense strand starting at position 2752 of SEQ ID NO: 1884335
ggaagacucggcugauguc

SEQ ID NO: 2257999 - RNA, 19 nt, Artificial Sequence
  Description of Artificial Sequence: Synthetic oligonucleotide
  Antisense strand to SEQ ID NO: 2257998
gacaucagccgagucuucc

SEQ ID NO: 2258000 - RNA, 19 nt, Artificial Sequence
  Description of Artificial Sequence: Synthetic oligonucleotide
  Sense strand starting at position 2777 of SEQ ID NO: 1884335
gaccgaguguuucucaagu

SEQ ID NO: 2258001 - RNA, 19 nt, Artificial Sequence
  Description of Artificial Sequence: Synthetic oligonucleotide
  Antisense strand to SEQ ID NO: 2258000
acuugagaaacacucgguc

SEQ ID NO: 2258002 - RNA, 19 nt, Artificial Sequence
  Description of Artificial Sequence: Synthetic oligonucleotide
  Sense strand starting at position 2779 of SEQ ID NO: 1884335
ccgaguguuucucaaguug

SEQ ID NO: 2258003 - RNA, 19 nt, Artificial Sequence
  Description of Artificial Sequence: Synthetic oligonucleotide
  Antisense strand to SEQ ID NO: 2258002
caacuugagaaacacucgg

SEQ ID NO: 2258004 - RNA, 19 nt, Artificial Sequence
  Description of Artificial Sequence: Synthetic oligonucleotide
  Sense strand starting at position 2850 of SEQ ID NO: 1884335
agagacaucuguuucccau

SEQ ID NO: 2258005 - RNA, 19 nt, Artificial Sequence
  Description of Artificial Sequence: Synthetic oligonucleotide
  Antisense strand to SEQ ID NO: 2258004
augggaaacagaugucucu

SEQ ID NO: 2258006 - RNA, 19 nt, Artificial Sequence
  Description of Artificial Sequence: Synthetic oligonucleotide
  Sense strand starting at position 2878 of SEQ ID NO: 1884335
ugaggaucccagugcggau

SEQ ID NO: 2258007 - RNA, 19 nt, Artificial Sequence
  Description of Artificial Sequence: Synthetic oligonucleotide
  Antisense strand to SEQ ID NO: 2258006
auccgcacugggauccuca

SEQ ID NO: 2258008 - RNA, 19 nt, Artificial Sequence
  Description of Artificial Sequence: Synthetic oligonucleotide
  Sense strand starting at position 2882 of SEQ ID NO: 1884335
gaucccagugcggaugauu

SEQ ID NO: 2258009 - RNA, 19 nt, Artificial Sequence
  Description of Artificial Sequence: Synthetic oligonucleotide
  Antisense strand to SEQ ID NO: 2258008
aaucauccgcacugggauc

SEQ ID NO: 2258010 - RNA, 19 nt, Artificial Sequence
  Description of Artificial Sequence: Synthetic oligonucleotide
  Sense strand starting at position 2885 of SEQ ID NO: 1884335
cccagugcggaugauuauu

SEQ ID NO: 2258011 - RNA, 19 nt, Artificial Sequence
  Description of Artificial Sequence: Synthetic oligonucleotide
  Antisense strand to SEQ ID NO: 2258010
aauaaucauccgcacuggg

SEQ ID NO: 2258012 - RNA, 19 nt, Artificial Sequence
  Description of Artificial Sequence: Synthetic oligonucleotide
  Sense strand starting at position 2930 of SEQ ID NO: 1884335
ugaacucucagcugggaga

SEQ ID NO: 2258013 - RNA, 19 nt, Artificial Sequence
  Description of Artificial Sequence: Synthetic oligonucleotide
  Antisense strand to SEQ ID NO: 2258012
ucucccagcugagaguuca

SEQ ID NO: 2258014 - RNA, 19 nt, Artificial Sequence
  Description of Artificial Sequence: Synthetic oligonucleotide
  Sense strand starting at position 2931 of SEQ ID NO: 1884335
gaacucucagcugggagau

SEQ ID NO: 2258015 - RNA, 19 nt, Artificial Sequence
  Description of Artificial Sequence: Synthetic oligonucleotide
  Antisense strand to SEQ ID NO: 2258014
aucucccagcugagaguuc

SEQ ID NO: 2258016 - RNA, 19 nt, Artificial Sequence
  Description of Artificial Sequence: Synthetic oligonucleotide
  Sense strand starting at position 3667 of SEQ ID NO: 1884335
ggaaguuucccaggcagcu

SEQ ID NO: 2258017 - RNA, 19 nt, Artificial Sequence
  Description of Artificial Sequence: Synthetic oligonucleotide
  Antisense strand to SEQ ID NO: 2258016
agcugccugggaaacuucc

SEQ ID NO: 2258018 - RNA, 19 nt, Artificial Sequence
  Description of Artificial Sequence: Synthetic oligonucleotide
  Sense strand starting at position 3705 of SEQ ID NO: 1884335
ucccaagggugcuuguuau

SEQ ID NO: 2258019 - RNA, 19 nt, Artificial Sequence
  Description of Artificial Sequence: Synthetic oligonucleotide
  Antisense strand to SEQ ID NO: 2258018
auaacaagcacccuuggga

SEQ ID NO: 2258020 - RNA, 19 nt, Artificial Sequence
  Description of Artificial Sequence: Synthetic oligonucleotide
  Sense strand starting at position 3709 of SEQ ID NO: 1884335
aagggugcuuguuauuaag

SEQ ID NO: 2258021 - RNA, 19 nt, Artificial Sequence
  Description of Artificial Sequence: Synthetic oligonucleotide
  Antisense strand to SEQ ID NO: 2258020
cuuaauaacaagcacccuu

SEQ ID NO: 2258022 - RNA, 19 nt, Artificial Sequence
  Description of Artificial Sequence: Synthetic oligonucleotide
  Sense strand starting at position 3715 of SEQ ID NO: 1884335
gcuuguuauuaaggcucaa

SEQ ID NO: 2258023 - RNA, 19 nt, Artificial Sequence
  Description of Artificial Sequence: Synthetic oligonucleotide
  Antisense strand to SEQ ID NO: 2258022
uugagccuuaauaacaagc

SEQ ID NO: 2258024 - RNA, 19 nt, Artificial Sequence
  Description of Artificial Sequence: Synthetic oligonucleotide
  Sense strand starting at position 3734 of SEQ ID NO: 1884335
ggaaaugucucugaggccu

SEQ ID NO: 2258025 - RNA, 19 nt, Artificial Sequence
  Description of Artificial Sequence: Synthetic oligonucleotide
  Antisense strand to SEQ ID NO: 2258024
aggccucagagacauuucc

SEQ ID NO: 2258026 - RNA, 19 nt, Artificial Sequence
  Description of Artificial Sequence: Synthetic oligonucleotide
  Sense strand starting at position 3780 of SEQ ID NO: 1884335
ccugcaaagcauugagaac

SEQ ID NO: 2258027 - RNA, 19 nt, Artificial Sequence
  Description of Artificial Sequence: Synthetic oligonucleotide
  Antisense strand to SEQ ID NO: 2258026
guucucaaugcuuugcagg

SEQ ID NO: 2258028 - RNA, 19 nt, Artificial Sequence
  Description of Artificial Sequence: Synthetic oligonucleotide
  Sense strand starting at position 933 of SEQ ID NO: 1884336
aaaucuaaugacggcuaga

SEQ ID NO: 2258029 - RNA, 19 nt, Artificial Sequence
  Description of Artificial Sequence: Synthetic oligonucleotide
  Antisense strand to SEQ ID NO: 2258028
ucuagccgucauuagauuu

SEQ ID NO: 2258030 - RNA, 19 nt, Artificial Sequence
  Description of Artificial Sequence: Synthetic oligonucleotide
  Sense strand starting at position 936 of SEQ ID NO: 1884336
ucuaaugacggcuagauga

SEQ ID NO: 2258031 - RNA, 19 nt, Artificial Sequence
  Description of Artificial Sequence: Synthetic oligonucleotide
  Antisense strand to SEQ ID NO: 2258030
ucaucuagccgucauuaga

SEQ ID NO: 2258032 - RNA, 19 nt, Artificial Sequence
  Description of Artificial Sequence: Synthetic oligonucleotide
  Sense strand starting at position 954 of SEQ ID NO: 1884336
aaauuagagguuugguuaa

SEQ ID NO: 2258033 - RNA, 19 nt, Artificial Sequence
  Description of Artificial Sequence: Synthetic oligonucleotide
  Antisense strand to SEQ ID NO: 2258032
uuaaccaaaccucuaauuu

SEQ ID NO: 2258034 - RNA, 19 nt, Artificial Sequence
  Description of Artificial Sequence: Synthetic oligonucleotide
  Sense strand starting at position 956 of SEQ ID NO: 1884336
auuagagguuugguuaauc

SEQ ID NO: 2258035 - RNA, 19 nt, Artificial Sequence
  Description of Artificial Sequence: Synthetic oligonucleotide
  Antisense strand to SEQ ID NO: 2258034
gauuaaccaaaccucuaau

SEQ ID NO: 2258036 - RNA, 19 nt, Artificial Sequence
  Description of Artificial Sequence: Synthetic oligonucleotide
  Sense strand starting at position 961 of SEQ ID NO: 1884336
agguuugguuaauccucaa

SEQ ID NO: 2258037 - RNA, 19 nt, Artificial Sequence
  Description of Artificial Sequence: Synthetic oligonucleotide
  Antisense strand to SEQ ID NO: 2258036
uugaggauuaaccaaaccu

SEQ ID NO: 2258038 - RNA, 19 nt, Artificial Sequence
  Description of Artificial Sequence: Synthetic oligonucleotide
  Sense strand starting at position 964 of SEQ ID NO: 1884336
uuugguuaauccucaaggu

SEQ ID NO: 2258039 - RNA, 19 nt, Artificial Sequence
  Description of Artificial Sequence: Synthetic oligonucleotide
  Antisense strand to SEQ ID NO: 2258038
accuugaggauuaaccaaa

SEQ ID NO: 2258040 - RNA, 19 nt, Artificial Sequence
  Description of Artificial Sequence: Synthetic oligonucleotide
  Sense strand starting at position 1005 of SEQ ID NO: 1884336
ccaugcucuucccuggaaa

SEQ ID NO: 2258041 - RNA, 19 nt, Artificial Sequence
  Description of Artificial Sequence: Synthetic oligonucleotide
  Antisense strand to SEQ ID NO: 2258040
uuuccagggaagagcaugg

SEQ ID NO: 2258042 - RNA, 19 nt, Artificial Sequence
  Description of Artificial Sequence: Synthetic oligonucleotide
  Sense strand starting at position 1060 of SEQ ID NO: 1884336
gguaguaauacuggacauc

SEQ ID NO: 2258043 - RNA, 19 nt, Artificial Sequence
  Description of Artificial Sequence: Synthetic oligonucleotide
  Antisense strand to SEQ ID NO: 2258042
gauguccaguauuacuacc

SEQ ID NO: 2258044 - RNA, 19 nt, Artificial Sequence
  Description of Artificial Sequence: Synthetic oligonucleotide
  Sense strand starting at position 1427 of SEQ ID NO: 1884336
gguccaaagucguuaaaca

SEQ ID NO: 2258045 - RNA, 19 nt, Artificial Sequence
  Description of Artificial Sequence: Synthetic oligonucleotide
  Antisense strand to SEQ ID NO: 2258044
uguuuaacgacuuuggacc

SEQ ID NO: 2258046 - RNA, 19 nt, Artificial Sequence
  Description of Artificial Sequence: Synthetic oligonucleotide
  Sense strand starting at position 1428 of SEQ ID NO: 1884336
guccaaagucguuaaacag

SEQ ID NO: 2258047 - RNA, 19 nt, Artificial Sequence
  Description of Artificial Sequence: Synthetic oligonucleotide
  Antisense strand to SEQ ID NO: 2258046
cuguuuaacgacuuuggac

SEQ ID NO: 2258048 - RNA, 19 nt, Artificial Sequence
  Description of Artificial Sequence: Synthetic oligonucleotide
  Sense strand starting at position 1436 of SEQ ID NO: 1884336
ucguuaaacagcggucuga

SEQ ID NO: 2258049 - RNA, 19 nt, Artificial Sequence
  Description of Artificial Sequence: Synthetic oligonucleotide
  Antisense strand to SEQ ID NO: 2258048
ucagaccgcuguuuaacga

SEQ ID NO: 2258050 - RNA, 19 nt, Artificial Sequence
  Description of Artificial Sequence: Synthetic oligonucleotide
  Sense strand starting at position 1585 of SEQ ID NO: 1884336
cccgauucccuccaaagga

SEQ ID NO: 2258051 - RNA, 19 nt, Artificial Sequence
  Description of Artificial Sequence: Synthetic oligonucleotide
  Antisense strand to SEQ ID NO: 2258050
uccuuuggagggaaucggg

SEQ ID NO: 2258052 - RNA, 19 nt, Artificial Sequence
  Description of Artificial Sequence: Synthetic oligonucleotide
  Sense strand starting at position 1731 of SEQ ID NO: 1884336
cccaguauugcagaacuca

SEQ ID NO: 2258053 - RNA, 19 nt, Artificial Sequence
  Description of Artificial Sequence: Synthetic oligonucleotide
  Antisense strand to SEQ ID NO: 2258052
ugaguucugcaauacuggg

SEQ ID NO: 2258054 - RNA, 19 nt, Artificial Sequence
  Description of Artificial Sequence: Synthetic oligonucleotide
  Sense strand starting at position 1874 of SEQ ID NO: 1884336
gggcgauggguuuguagga

SEQ ID NO: 2258055 - RNA, 19 nt, Artificial Sequence
  Description of Artificial Sequence: Synthetic oligonucleotide
  Antisense strand to SEQ ID NO: 2258054
uccuacaaacccaucgccc

SEQ ID NO: 2258056 - RNA, 19 nt, Artificial Sequence
  Description of Artificial Sequence: Synthetic oligonucleotide
  Sense strand starting at position 2082 of SEQ ID NO: 1884336
uccuuauuggccgagaccu

SEQ ID NO: 2258057 - RNA, 19 nt, Artificial Sequence
  Description of Artificial Sequence: Synthetic oligonucleotide
  Antisense strand to SEQ ID NO: 2258056
aggucucggccaauaagga

SEQ ID NO: 2258058 - RNA, 19 nt, Artificial Sequence
  Description of Artificial Sequence: Synthetic oligonucleotide
  Sense strand starting at position 2220 of SEQ ID NO: 1884336
gcgcgcucucaauccgauu

SEQ ID NO: 2258059 - RNA, 19 nt, Artificial Sequence
  Description of Artificial Sequence: Synthetic oligonucleotide
  Antisense strand to SEQ ID NO: 2258058
aaucggauugagagcgcgc

SEQ ID NO: 2258060 - RNA, 19 nt, Artificial Sequence
  Description of Artificial Sequence: Synthetic oligonucleotide
  Sense strand starting at position 2221 of SEQ ID NO: 1884336
cgcgcucucaauccgauua

SEQ ID NO: 2258061 - RNA, 19 nt, Artificial Sequence
  Description of Artificial Sequence: Synthetic oligonucleotide
  Antisense strand to SEQ ID NO: 2258060
uaaucggauugagagcgcg

SEQ ID NO: 2258062 - RNA, 19 nt, Artificial Sequence
  Description of Artificial Sequence: Synthetic oligonucleotide
  Sense strand starting at position 2581 of SEQ ID NO: 1884336
guuuguucccauggcaaca

SEQ ID NO: 2258063 - RNA, 19 nt, Artificial Sequence
  Description of Artificial Sequence: Synthetic oligonucleotide
  Antisense strand to SEQ ID NO: 2258062
uguugccaugggaacaaac

SEQ ID NO: 2258064 - RNA, 19 nt, Artificial Sequence
  Description of Artificial Sequence: Synthetic oligonucleotide
  Sense strand starting at position 2710 of SEQ ID NO: 1884336
cugccuaaguuagugacaa

SEQ ID NO: 2258065 - RNA, 19 nt, Artificial Sequence
  Description of Artificial Sequence: Synthetic oligonucleotide
  Antisense strand to SEQ ID NO: 2258064
uugucacuaacuuaggcag

SEQ ID NO: 2258066 - RNA, 19 nt, Artificial Sequence
  Description of Artificial Sequence: Synthetic oligonucleotide
  Sense strand starting at position 2712 of SEQ ID NO: 1884336
gccuaaguuagugacaaug

SEQ ID NO: 2258067 - RNA, 19 nt, Artificial Sequence
  Description of Artificial Sequence: Synthetic oligonucleotide
  Antisense strand to SEQ ID NO: 2258066
cauugucacuaacuuaggc

SEQ ID NO: 2258068 - RNA, 19 nt, Artificial Sequence
  Description of Artificial Sequence: Synthetic oligonucleotide
  Sense strand starting at position 2736 of SEQ ID NO: 1884336
agggcaaaccuucgggauu

SEQ ID NO: 2258069 - RNA, 19 nt, Artificial Sequence
  Description of Artificial Sequence: Synthetic oligonucleotide
  Antisense strand to SEQ ID NO: 2258068
aaucccgaagguuugcccu

SEQ ID NO: 2258070 - RNA, 19 nt, Artificial Sequence
  Description of Artificial Sequence: Synthetic oligonucleotide
  Sense strand starting at position 2739 of SEQ ID NO: 1884336
gcaaaccuucgggauuacu

SEQ ID NO: 2258071 - RNA, 19 nt, Artificial Sequence
  Description of Artificial Sequence: Synthetic oligonucleotide
  Antisense strand to SEQ ID NO: 2258070
aguaaucccgaagguuugc

SEQ ID NO: 2258072 - RNA, 19 nt, Artificial Sequence
  Description of Artificial Sequence: Synthetic oligonucleotide
  Sense strand starting at position 2857 of SEQ ID NO: 1884336
gcaaguuucucaccucagu

SEQ ID NO: 2258073 - RNA, 19 nt, Artificial Sequence
  Description of Artificial Sequence: Synthetic oligonucleotide
  Antisense strand to SEQ ID NO: 2258072
acugaggugagaaacuugc

SEQ ID NO: 2258074 - RNA, 19 nt, Artificial Sequence
  Description of Artificial Sequence: Synthetic oligonucleotide
  Sense strand starting at position 2922 of SEQ ID NO: 1884336
uuggguuguguggauuaaa

SEQ ID NO: 2258075 - RNA, 19 nt, Artificial Sequence
  Description of Artificial Sequence: Synthetic oligonucleotide
  Antisense strand to SEQ ID NO: 2258074
uuuaauccacacaacccaa

SEQ ID NO: 2258076 - RNA, 19 nt, Artificial Sequence
  Description of Artificial Sequence: Synthetic oligonucleotide
  Sense strand starting at position 2939 of SEQ ID NO: 1884336
aaugaauagucauaaagug

SEQ ID NO: 2258077 - RNA, 19 nt, Artificial Sequence
  Description of Artificial Sequence: Synthetic oligonucleotide
  Antisense strand to SEQ ID NO: 2258076
cacuuuaugacuauucauu

SEQ ID NO: 2258078 - RNA, 19 nt, Artificial Sequence
  Description of Artificial Sequence: Synthetic oligonucleotide
  Sense strand starting at position 2948 of SEQ ID NO: 1884336
ucauaaagugcuuguuguu

SEQ ID NO: 2258079 - RNA, 19 nt, Artificial Sequence
  Description of Artificial Sequence: Synthetic oligonucleotide
  Antisense strand to SEQ ID NO: 2258078
aacaacaagcacuuuauga

SEQ ID NO: 2258080 - RNA, 19 nt, Artificial Sequence
  Description of Artificial Sequence: Synthetic oligonucleotide
  Sense strand starting at position 3409 of SEQ ID NO: 1884336
ggagaaucguuugaacaga

SEQ ID NO: 2258081 - RNA, 19 nt, Artificial Sequence
  Description of Artificial Sequence: Synthetic oligonucleotide
  Antisense strand to SEQ ID NO: 2258080
ucuguucaaacgauucucc

SEQ ID NO: 2258082 - RNA, 19 nt, Artificial Sequence
  Description of Artificial Sequence: Synthetic oligonucleotide
  Sense strand starting at position 3611 of SEQ ID NO: 1884336
gaggccuuauacucugaga

SEQ ID NO: 2258083 - RNA, 19 nt, Artificial Sequence
  Description of Artificial Sequence: Synthetic oligonucleotide
  Antisense strand to SEQ ID NO: 2258082
ucucagaguauaaggccuc

SEQ ID NO: 2258084 - RNA, 19 nt, Artificial Sequence
  Description of Artificial Sequence: Synthetic oligonucleotide
  Sense strand starting at position 3613 of SEQ ID NO: 1884336
ggccuuauacucugagaca

SEQ ID NO: 2258085 - RNA, 19 nt, Artificial Sequence
  Description of Artificial Sequence: Synthetic oligonucleotide
  Antisense strand to SEQ ID NO: 2258084
ugucucagaguauaaggcc

SEQ ID NO: 2258086 - RNA, 19 nt, Artificial Sequence
  Description of Artificial Sequence: Synthetic oligonucleotide
  Sense strand starting at position 3634 of SEQ ID NO: 1884336
gaagcaacgucuucuuuac

SEQ ID NO: 2258087 - RNA, 19 nt, Artificial Sequence
  Description of Artificial Sequence: Synthetic oligonucleotide
  Antisense strand to SEQ ID NO: 2258086
guaaagaagacguugcuuc

SEQ ID NO: 2258088 - RNA, 19 nt, Artificial Sequence
  Description of Artificial Sequence: Synthetic oligonucleotide
  Sense strand starting at position 3636 of SEQ ID NO: 1884336
agcaacgucuucuuuacau

SEQ ID NO: 2258089 - RNA, 19 nt, Artificial Sequence
  Description of Artificial Sequence: Synthetic oligonucleotide
  Antisense strand to SEQ ID NO: 2258088
auguaaagaagacguugcu

SEQ ID NO: 2258090 - RNA, 19 nt, Artificial Sequence
  Description of Artificial Sequence: Synthetic oligonucleotide
  Sense strand starting at position 3648 of SEQ ID NO: 1884336
uuuacauugcaguaaguca

SEQ ID NO: 2258091 - RNA, 19 nt, Artificial Sequence
  Description of Artificial Sequence: Synthetic oligonucleotide
  Antisense strand to SEQ ID NO: 2258090
ugacuuacugcaauguaaa

SEQ ID NO: 2258092 - RNA, 19 nt, Artificial Sequence
  Description of Artificial Sequence: Synthetic oligonucleotide
  Sense strand starting at position 3688 of SEQ ID NO: 1884336
acaggaugcauuggaacuu

SEQ ID NO: 2258093 - RNA, 19 nt, Artificial Sequence
  Description of Artificial Sequence: Synthetic oligonucleotide
  Antisense strand to SEQ ID NO: 2258092
aaguuccaaugcauccugu

SEQ ID NO: 2258094 - RNA, 19 nt, Artificial Sequence
  Description of Artificial Sequence: Synthetic oligonucleotide
  Sense strand starting at position 3724 of SEQ ID NO: 1884336
gguggcaucacagaaaucu

SEQ ID NO: 2258095 - RNA, 19 nt, Artificial Sequence
  Description of Artificial Sequence: Synthetic oligonucleotide
  Antisense strand to SEQ ID NO: 2258094
agauuucugugaugccacc

SEQ ID NO: 2258096 - RNA, 19 nt, Artificial Sequence
  Description of Artificial Sequence: Synthetic oligonucleotide
  Sense strand starting at position 3847 of SEQ ID NO: 1884336
cacaacauguguuugagaa

SEQ ID NO: 2258097 - RNA, 19 nt, Artificial Sequence
  Description of Artificial Sequence: Synthetic oligonucleotide
  Antisense strand to SEQ ID NO: 2258096
uucucaaacacauguugug

SEQ ID NO: 2258098 - RNA, 19 nt, Artificial Sequence
  Description of Artificial Sequence: Synthetic oligonucleotide
  Sense strand starting at position 3848 of SEQ ID NO: 1884336
acaacauguguuugagaac

SEQ ID NO: 2258099 - RNA, 19 nt, Artificial Sequence
  Description of Artificial Sequence: Synthetic oligonucleotide
  Antisense strand to SEQ ID NO: 2258098
guucucaaacacauguugu

SEQ ID NO: 2258100 - RNA, 19 nt, Artificial Sequence
  Description of Artificial Sequence: Synthetic oligonucleotide
  Sense strand starting at position 3902 of SEQ ID NO: 1884336
gagaguucacugggaagug

SEQ ID NO: 2258101 - RNA, 19 nt, Artificial Sequence
  Description of Artificial Sequence: Synthetic oligonucleotide
  Antisense strand to SEQ ID NO: 2258100
cacuucccagugaacucuc

SEQ ID NO: 2258102 - RNA, 19 nt, Artificial Sequence
  Description of Artificial Sequence: Synthetic oligonucleotide
  Sense strand starting at position 3922 of SEQ ID NO: 1884336
agguggagccguggaaaua

SEQ ID NO: 2258103 - RNA, 19 nt, Artificial Sequence
  Description of Artificial Sequence: Synthetic oligonucleotide
  Antisense strand to SEQ ID NO: 2258102
uauuuccacggcuccaccu

SEQ ID NO: 2258104 - RNA, 19 nt, Artificial Sequence
  Description of Artificial Sequence: Synthetic oligonucleotide
  Sense strand starting at position 3923 of SEQ ID NO: 1884336
gguggagccguggaaauaa

SEQ ID NO: 2258105 - RNA, 19 nt, Artificial Sequence
  Description of Artificial Sequence: Synthetic oligonucleotide
  Antisense strand to SEQ ID NO: 2258104
uuauuuccacggcuccacc

SEQ ID NO: 2258106 - RNA, 19 nt, Artificial Sequence
  Description of Artificial Sequence: Synthetic oligonucleotide
  Sense strand starting at position 3964 of SEQ ID NO: 1884336
uuaggugacguggauguaa

SEQ ID NO: 2258107 - RNA, 19 nt, Artificial Sequence
  Description of Artificial Sequence: Synthetic oligonucleotide
  Antisense strand to SEQ ID NO: 2258106
uuacauccacgucaccuaa

SEQ ID NO: 2258108 - RNA, 19 nt, Artificial Sequence
  Description of Artificial Sequence: Synthetic oligonucleotide
  Sense strand starting at position 22 of SEQ ID NO: 1884337
ucuccagagucugcucauu

SEQ ID NO: 2258109 - RNA, 19 nt, Artificial Sequence
  Description of Artificial Sequence: Synthetic oligonucleotide
  Antisense strand to SEQ ID NO: 2258108
aaugagcagacucuggaga

SEQ ID NO: 2258110 - RNA, 19 nt, Artificial Sequence
  Description of Artificial Sequence: Synthetic oligonucleotide
  Sense strand starting at position 24 of SEQ ID NO: 1884337
uccagagucugcucauuug

SEQ ID NO: 2258111 - RNA, 19 nt, Artificial Sequence
  Description of Artificial Sequence: Synthetic oligonucleotide
  Antisense strand to SEQ ID NO: 2258110
caaaugagcagacucugga

SEQ ID NO: 2258112 - RNA, 19 nt, Artificial Sequence
  Description of Artificial Sequence: Synthetic oligonucleotide
  Sense strand starting at position 56 of SEQ ID NO: 1884337
augcuuaaacccugagaag

SEQ ID NO: 2258113 - RNA, 19 nt, Artificial Sequence
  Description of Artificial Sequence: Synthetic oligonucleotide
  Antisense strand to SEQ ID NO: 2258112
cuucucaggguuuaagcau

SEQ ID NO: 2258114 - RNA, 19 nt, Artificial Sequence
  Description of Artificial Sequence: Synthetic oligonucleotide
  Sense strand starting at position 411 of SEQ ID NO: 1884337
aaagauguagaguguaaga

SEQ ID NO: 2258115 - RNA, 19 nt, Artificial Sequence
  Description of Artificial Sequence: Synthetic oligonucleotide
  Antisense strand to SEQ ID NO: 2258114
ucuuacacucuacaucuuu

SEQ ID NO: 2258116 - RNA, 19 nt, Artificial Sequence
  Description of Artificial Sequence: Synthetic oligonucleotide
  Sense strand starting at position 413 of SEQ ID NO: 1884337
agauguagaguguaagauc

SEQ ID NO: 2258117 - RNA, 19 nt, Artificial Sequence
  Description of Artificial Sequence: Synthetic oligonucleotide
  Antisense strand to SEQ ID NO: 2258116
gaucuuacacucuacaucu

SEQ ID NO: 2258118 - RNA, 19 nt, Artificial Sequence
  Description of Artificial Sequence: Synthetic oligonucleotide
  Sense strand starting at position 421 of SEQ ID NO: 1884337
aguguaagaucaccaguga

SEQ ID NO: 2258119 - RNA, 19 nt, Artificial Sequence
  Description of Artificial Sequence: Synthetic oligonucleotide
  Antisense strand to SEQ ID NO: 2258118
ucacuggugaucuuacacu

SEQ ID NO: 2258120 - RNA, 19 nt, Artificial Sequence
  Description of Artificial Sequence: Synthetic oligonucleotide
  Sense strand starting at position 422 of SEQ ID NO: 1884337
guguaagaucaccagugaa

SEQ ID NO: 2258121 - RNA, 19 nt, Artificial Sequence
  Description of Artificial Sequence: Synthetic oligonucleotide
  Antisense strand to SEQ ID NO: 2258120
uucacuggugaucuuacac

SEQ ID NO: 2258122 - RNA, 19 nt, Artificial Sequence
  Description of Artificial Sequence: Synthetic oligonucleotide
  Sense strand starting at position 1019 of SEQ ID NO: 1884337
gcgcuagucaaugcuaacu

SEQ ID NO: 2258123 - RNA, 19 nt, Artificial Sequence
  Description of Artificial Sequence: Synthetic oligonucleotide
  Antisense strand to SEQ ID NO: 2258122
aguuagcauugacuagcgc

SEQ ID NO: 2258124 - RNA, 19 nt, Artificial Sequence
  Description of Artificial Sequence: Synthetic oligonucleotide
  Sense strand starting at position 1073 of SEQ ID NO: 1884337
ccgaacuccuucuuuagaa

SEQ ID NO: 2258125 - RNA, 19 nt, Artificial Sequence
  Description of Artificial Sequence: Synthetic oligonucleotide
  Antisense strand to SEQ ID NO: 2258124
uucuaaagaaggaguucgg

SEQ ID NO: 2258126 - RNA, 19 nt, Artificial Sequence
  Description of Artificial Sequence: Synthetic oligonucleotide
  Sense strand starting at position 1074 of SEQ ID NO: 1884337
cgaacuccuucuuuagaaa

SEQ ID NO: 2258127 - RNA, 19 nt, Artificial Sequence
  Description of Artificial Sequence: Synthetic oligonucleotide
  Antisense strand to SEQ ID NO: 2258126
uuucuaaagaaggaguucg

SEQ ID NO: 2258128 - RNA, 19 nt, Artificial Sequence
  Description of Artificial Sequence: Synthetic oligonucleotide
  Sense strand starting at position 2000 of SEQ ID NO: 1884337
agcugcguacgucauuuaa

SEQ ID NO: 2258129 - RNA, 19 nt, Artificial Sequence
  Description of Artificial Sequence: Synthetic oligonucleotide
  Antisense strand to SEQ ID NO: 2258128
uuaaaugacguacgcagcu

SEQ ID NO: 2258130 - RNA, 19 nt, Artificial Sequence
  Description of Artificial Sequence: Synthetic oligonucleotide
  Sense strand starting at position 2002 of SEQ ID NO: 1884337
cugcguacgucauuuaagu

SEQ ID NO: 2258131 - RNA, 19 nt, Artificial Sequence
  Description of Artificial Sequence: Synthetic oligonucleotide
  Antisense strand to SEQ ID NO: 2258130
acuuaaaugacguacgcag

SEQ ID NO: 2258132 - RNA, 19 nt, Artificial Sequence
  Description of Artificial Sequence: Synthetic oligonucleotide
  Sense strand starting at position 2070 of SEQ ID NO: 1884337
ggaaauaaguauucucuga

SEQ ID NO: 2258133 - RNA, 19 nt, Artificial Sequence
  Description of Artificial Sequence: Synthetic oligonucleotide
  Antisense strand to SEQ ID NO: 2258132
ucagagaauacuuauuucc

SEQ ID NO: 2258134 - RNA, 19 nt, Artificial Sequence
  Description of Artificial Sequence: Synthetic oligonucleotide
  Sense strand starting at position 2074 of SEQ ID NO: 1884337
auaaguauucucugacagu

SEQ ID NO: 2258135 - RNA, 19 nt, Artificial Sequence
  Description of Artificial Sequence: Synthetic oligonucleotide
  Antisense strand to SEQ ID NO: 2258134
acugucagagaauacuuau

SEQ ID NO: 2258136 - RNA, 19 nt, Artificial Sequence
  Description of Artificial Sequence: Synthetic oligonucleotide
  Sense strand starting at position 2109 of SEQ ID NO: 1884337
cagggauaggcaggaucau

SEQ ID NO: 2258137 - RNA, 19 nt, Artificial Sequence
  Description of Artificial Sequence: Synthetic oligonucleotide
  Antisense strand to SEQ ID NO: 2258136
augauccugccuaucccug

SEQ ID NO: 2258138 - RNA, 19 nt, Artificial Sequence
  Description of Artificial Sequence: Synthetic oligonucleotide
  Sense strand starting at position 2118 of SEQ ID NO: 1884337
gcaggaucaucuccauuac

SEQ ID NO: 2258139 - RNA, 19 nt, Artificial Sequence
  Description of Artificial Sequence: Synthetic oligonucleotide
  Antisense strand to SEQ ID NO: 2258138
guaauggagaugauccugc

SEQ ID NO: 2258140 - RNA, 19 nt, Artificial Sequence
  Description of Artificial Sequence: Synthetic oligonucleotide
  Sense strand starting at position 2281 of SEQ ID NO: 1884337
uuaggaauuagucgggcuu

SEQ ID NO: 2258141 - RNA, 19 nt, Artificial Sequence
  Description of Artificial Sequence: Synthetic oligonucleotide
  Antisense strand to SEQ ID NO: 2258140
aagcccgacuaauuccuaa

SEQ ID NO: 2258142 - RNA, 19 nt, Artificial Sequence
  Description of Artificial Sequence: Synthetic oligonucleotide
  Sense strand starting at position 2341 of SEQ ID NO: 1884337
gcagaacaaucguuugagu

SEQ ID NO: 2258143 - RNA, 19 nt, Artificial Sequence
  Description of Artificial Sequence: Synthetic oligonucleotide
  Antisense strand to SEQ ID NO: 2258142
acucaaacgauuguucugc

SEQ ID NO: 2258144 - RNA, 19 nt, Artificial Sequence
  Description of Artificial Sequence: Synthetic oligonucleotide
  Sense strand starting at position 2360 of SEQ ID NO: 1884337
ccaggaguuagagguuagu

SEQ ID NO: 2258145 - RNA, 19 nt, Artificial Sequence
  Description of Artificial Sequence: Synthetic oligonucleotide
  Antisense strand to SEQ ID NO: 2258144
acuaaccucuaacuccugg

SEQ ID NO: 2258146 - RNA, 19 nt, Artificial Sequence
  Description of Artificial Sequence: Synthetic oligonucleotide
  Sense strand starting at position 2370 of SEQ ID NO: 1884337
gagguuagugagcacuacu

SEQ ID NO: 2258147 - RNA, 19 nt, Artificial Sequence
  Description of Artificial Sequence: Synthetic oligonucleotide
  Antisense strand to SEQ ID NO: 2258146
aguagugcucacuaaccuc

SEQ ID NO: 2258148 - RNA, 19 nt, Artificial Sequence
  Description of Artificial Sequence: Synthetic oligonucleotide
  Sense strand starting at position 2407 of SEQ ID NO: 1884337
cagcaugauuccguaggaa

SEQ ID NO: 2258149 - RNA, 19 nt, Artificial Sequence
  Description of Artificial Sequence: Synthetic oligonucleotide
  Antisense strand to SEQ ID NO: 2258148
uuccuacggaaucaugcug

SEQ ID NO: 2258150 - RNA, 19 nt, Artificial Sequence
  Description of Artificial Sequence: Synthetic oligonucleotide
  Sense strand starting at position 2613 of SEQ ID NO: 1884337
gaagcugaggcguauggau

SEQ ID NO: 2258151 - RNA, 19 nt, Artificial Sequence
  Description of Artificial Sequence: Synthetic oligonucleotide
  Antisense strand to SEQ ID NO: 2258150
auccauacgccucagcuuc

SEQ ID NO: 2258152 - RNA, 19 nt, Artificial Sequence
  Description of Artificial Sequence: Synthetic oligonucleotide
  Sense strand starting at position 2904 of SEQ ID NO: 1884337
aaaugcuuauguguauagu

SEQ ID NO: 2258153 - RNA, 19 nt, Artificial Sequence
  Description of Artificial Sequence: Synthetic oligonucleotide
  Antisense strand to SEQ ID NO: 2258152
acuauacacauaagcauuu

SEQ ID NO: 2258154 - RNA, 19 nt, Artificial Sequence
  Description of Artificial Sequence: Synthetic oligonucleotide
  Sense strand starting at position 2905 of SEQ ID NO: 1884337
aaugcuuauguguauaguu

SEQ ID NO: 2258155 - RNA, 19 nt, Artificial Sequence
  Description of Artificial Sequence: Synthetic oligonucleotide
  Antisense strand to SEQ ID NO: 2258154
aacuauacacauaagcauu

SEQ ID NO: 2258156 - RNA, 19 nt, Artificial Sequence
  Description of Artificial Sequence: Synthetic oligonucleotide
  Sense strand starting at position 3180 of SEQ ID NO: 1884337
uccucacugugugcugaaa

SEQ ID NO: 2258157 - RNA, 19 nt, Artificial Sequence
  Description of Artificial Sequence: Synthetic oligonucleotide
  Antisense strand to SEQ ID NO: 2258156
uuucagcacacagugagga

SEQ ID NO: 2258158 - RNA, 19 nt, Artificial Sequence
  Description of Artificial Sequence: Synthetic oligonucleotide
  Sense strand starting at position 3226 of SEQ ID NO: 1884337
aaauuuccugugugucuga

SEQ ID NO: 2258159 - RNA, 19 nt, Artificial Sequence
  Description of Artificial Sequence: Synthetic oligonucleotide
  Antisense strand to SEQ ID NO: 2258158
ucagacacacaggaaauuu

SEQ ID NO: 2258160 - RNA, 19 nt, Artificial Sequence
  Description of Artificial Sequence: Synthetic oligonucleotide
  Sense strand starting at position 3235 of SEQ ID NO: 1884337
gugugucugauggagucuu

SEQ ID NO: 2258161 - RNA, 19 nt, Artificial Sequence
  Description of Artificial Sequence: Synthetic oligonucleotide
  Antisense strand to SEQ ID NO: 2258160
aagacuccaucagacacac

SEQ ID NO: 2258162 - RNA, 19 nt, Artificial Sequence
  Description of Artificial Sequence: Synthetic oligonucleotide
  Sense strand starting at position 3371 of SEQ ID NO: 1884337
aguaaaggauaccaauauu

SEQ ID NO: 2258163 - RNA, 19 nt, Artificial Sequence
  Description of Artificial Sequence: Synthetic oligonucleotide
  Antisense strand to SEQ ID NO: 2258162
aauauugguauccuuuacu

SEQ ID NO: 2258164 - RNA, 19 nt, Artificial Sequence
  Description of Artificial Sequence: Synthetic oligonucleotide
  Sense strand starting at position 3433 of SEQ ID NO: 1884337
gcagaaagccuuuagauga

SEQ ID NO: 2258165 - RNA, 19 nt, Artificial Sequence
  Description of Artificial Sequence: Synthetic oligonucleotide
  Antisense strand to SEQ ID NO: 2258164
ucaucuaaaggcuuucugc

SEQ ID NO: 2258166 - RNA, 19 nt, Artificial Sequence
  Description of Artificial Sequence: Synthetic oligonucleotide
  Sense strand starting at position 3447 of SEQ ID NO: 1884337
gaugaaagguaaugaagau

SEQ ID NO: 2258167 - RNA, 19 nt, Artificial Sequence
  Description of Artificial Sequence: Synthetic oligonucleotide
  Antisense strand to SEQ ID NO: 2258166
aucuucauuaccuuucauc

SEQ ID NO: 2258168 - RNA, 19 nt, Artificial Sequence
  Description of Artificial Sequence: Synthetic oligonucleotide
  Sense strand starting at position 3522 of SEQ ID NO: 1884337
ucaaguugaacuggugaca

SEQ ID NO: 2258169 - RNA, 19 nt, Artificial Sequence
  Description of Artificial Sequence: Synthetic oligonucleotide
  Antisense strand to SEQ ID NO: 2258168
ugucaccaguucaacuuga

SEQ ID NO: 2258170 - RNA, 19 nt, Artificial Sequence
  Description of Artificial Sequence: Synthetic oligonucleotide
  Sense strand starting at position 3670 of SEQ ID NO: 1884337
guacgagauuuaagagggu

SEQ ID NO: 2258171 - RNA, 19 nt, Artificial Sequence
  Description of Artificial Sequence: Synthetic oligonucleotide
  Antisense strand to SEQ ID NO: 2258170
acccucuuaaaucucguac

SEQ ID NO: 2258172 - RNA, 19 nt, Artificial Sequence
  Description of Artificial Sequence: Synthetic oligonucleotide
  Sense strand starting at position 3712 of SEQ ID NO: 1884337
gaccauuaggcacaguuaa

SEQ ID NO: 2258173 - RNA, 19 nt, Artificial Sequence
  Description of Artificial Sequence: Synthetic oligonucleotide
  Antisense strand to SEQ ID NO: 2258172
uuaacugugccuaaugguc

SEQ ID NO: 2258174 - RNA, 19 nt, Artificial Sequence
  Description of Artificial Sequence: Synthetic oligonucleotide
  Sense strand starting at position 3784 of SEQ ID NO: 1884337
gaagguugagccuguuaca

SEQ ID NO: 2258175 - RNA, 19 nt, Artificial Sequence
  Description of Artificial Sequence: Synthetic oligonucleotide
  Antisense strand to SEQ ID NO: 2258174
uguaacaggcucaaccuuc

SEQ ID NO: 2258176 - RNA, 19 nt, Artificial Sequence
  Description of Artificial Sequence: Synthetic oligonucleotide
  Sense strand starting at position 3841 of SEQ ID NO: 1884337
uggcuuacauccuugagua

SEQ ID NO: 2258177 - RNA, 19 nt, Artificial Sequence
  Description of Artificial Sequence: Synthetic oligonucleotide
  Antisense strand to SEQ ID NO: 2258176
uacucaaggauguaagcca

SEQ ID NO: 2258178 - RNA, 19 nt, Artificial Sequence
  Description of Artificial Sequence: Synthetic oligonucleotide
  Sense strand starting at position 3842 of SEQ ID NO: 1884337
ggcuuacauccuugaguaa

SEQ ID NO: 2258179 - RNA, 19 nt, Artificial Sequence
  Description of Artificial Sequence: Synthetic oligonucleotide
  Antisense strand to SEQ ID NO: 2258178
uuacucaaggauguaagcc

SEQ ID NO: 2258180 - RNA, 19 nt, Artificial Sequence
  Description of Artificial Sequence: Synthetic oligonucleotide
  Sense strand starting at position 3843 of SEQ ID NO: 1884337
gcuuacauccuugaguaag

SEQ ID NO: 2258181 - RNA, 19 nt, Artificial Sequence
  Description of Artificial Sequence: Synthetic oligonucleotide
  Antisense strand to SEQ ID NO: 2258180
cuuacucaaggauguaagc

SEQ ID NO: 2258182 - RNA, 19 nt, Artificial Sequence
  Description of Artificial Sequence: Synthetic oligonucleotide
  Sense strand starting at position 3845 of SEQ ID NO: 1884337
uuacauccuugaguaagag

SEQ ID NO: 2258183 - RNA, 19 nt, Artificial Sequence
  Description of Artificial Sequence: Synthetic oligonucleotide
  Antisense strand to SEQ ID NO: 2258182
cucuuacucaaggauguaa

SEQ ID NO: 2258184 - RNA, 19 nt, Artificial Sequence
  Description of Artificial Sequence: Synthetic oligonucleotide
  Sense strand starting at position 3882 of SEQ ID NO: 1884337
agggaaucuuaccuaugca

SEQ ID NO: 2258185 - RNA, 19 nt, Artificial Sequence
  Description of Artificial Sequence: Synthetic oligonucleotide
  Antisense strand to SEQ ID NO: 2258184
ugcauagguaagauucccu

SEQ ID NO: 2258186 - RNA, 19 nt, Artificial Sequence
  Description of Artificial Sequence: Synthetic oligonucleotide
  Sense strand starting at position 3953 of SEQ ID NO: 1884337
gccagaucacaguagauug

SEQ ID NO: 2258187 - RNA, 19 nt, Artificial Sequence
  Description of Artificial Sequence: Synthetic oligonucleotide
  Antisense strand to SEQ ID NO: 2258186
caaucuacugugaucuggc

SEQ ID NO: 2258188 - RNA, 19 nt, Artificial Sequence
  Description of Artificial Sequence: Synthetic oligonucleotide
  Sense strand starting at position 111 of SEQ ID NO: 1884338
cugcauuuaugauguacca

SEQ ID NO: 2258189 - RNA, 19 nt, Artificial Sequence
  Description of Artificial Sequence: Synthetic oligonucleotide
  Antisense strand to SEQ ID NO: 2258188
ugguacaucauaaaugcag

SEQ ID NO: 2258190 - RNA, 19 nt, Artificial Sequence
  Description of Artificial Sequence: Synthetic oligonucleotide
  Sense strand starting at position 134 of SEQ ID NO: 1884338
acuuguuugucacucuuaa

SEQ ID NO: 2258191 - RNA, 19 nt, Artificial Sequence
  Description of Artificial Sequence: Synthetic oligonucleotide
  Antisense strand to SEQ ID NO: 2258190
uuaagagugacaaacaagu

SEQ ID NO: 2258192 - RNA, 19 nt, Artificial Sequence
  Description of Artificial Sequence: Synthetic oligonucleotide
  Sense strand starting at position 187 of SEQ ID NO: 1884338
uuauauaacuugggaaaga

SEQ ID NO: 2258193 - RNA, 19 nt, Artificial Sequence
  Description of Artificial Sequence: Synthetic oligonucleotide
  Antisense strand to SEQ ID NO: 2258192
ucuuucccaaguuauauaa

SEQ ID NO: 2258194 - RNA, 19 nt, Artificial Sequence
  Description of Artificial Sequence: Synthetic oligonucleotide
  Sense strand starting at position 241 of SEQ ID NO: 1884338
uuauuaacaccagguggaa

SEQ ID NO: 2258195 - RNA, 19 nt, Artificial Sequence
  Description of Artificial Sequence: Synthetic oligonucleotide
  Antisense strand to SEQ ID NO: 2258194
uuccaccugguguuaauaa

SEQ ID NO: 2258196 - RNA, 19 nt, Artificial Sequence
  Description of Artificial Sequence: Synthetic oligonucleotide
  Sense strand starting at position 291 of SEQ ID NO: 1884338
acaguugcaugagcaauuu

SEQ ID NO: 2258197 - RNA, 19 nt, Artificial Sequence
  Description of Artificial Sequence: Synthetic oligonucleotide
  Antisense strand to SEQ ID NO: 2258196
aaauugcucaugcaacugu

SEQ ID NO: 2258198 - RNA, 19 nt, Artificial Sequence
  Description of Artificial Sequence: Synthetic oligonucleotide
  Sense strand starting at position 814 of SEQ ID NO: 1884338
cuccaaagacgucauuaug

SEQ ID NO: 2258199 - RNA, 19 nt, Artificial Sequence
  Description of Artificial Sequence: Synthetic oligonucleotide
  Antisense strand to SEQ ID NO: 2258198
cauaaugacgucuuuggag

SEQ ID NO: 2258200 - RNA, 19 nt, Artificial Sequence
  Description of Artificial Sequence: Synthetic oligonucleotide
  Sense strand starting at position 873 of SEQ ID NO: 1884338
uugagauaauucuaagcca

SEQ ID NO: 2258201 - RNA, 19 nt, Artificial Sequence
  Description of Artificial Sequence: Synthetic oligonucleotide
  Antisense strand to SEQ ID NO: 2258200
uggcuuagaauuaucucaa

SEQ ID NO: 2258202 - RNA, 19 nt, Artificial Sequence
  Description of Artificial Sequence: Synthetic oligonucleotide
  Sense strand starting at position 943 of SEQ ID NO: 1884338
uacuauaugugcuugugua

SEQ ID NO: 2258203 - RNA, 19 nt, Artificial Sequence
  Description of Artificial Sequence: Synthetic oligonucleotide
  Antisense strand to SEQ ID NO: 2258202
uacacaagcacauauagua

SEQ ID NO: 2258204 - RNA, 19 nt, Artificial Sequence
  Description of Artificial Sequence: Synthetic oligonucleotide
  Sense strand starting at position 944 of SEQ ID NO: 1884338
acuauaugugcuuguguaa

SEQ ID NO: 2258205 - RNA, 19 nt, Artificial Sequence
  Description of Artificial Sequence: Synthetic oligonucleotide
  Antisense strand to SEQ ID NO: 2258204
uuacacaagcacauauagu

SEQ ID NO: 2258206 - RNA, 19 nt, Artificial Sequence
  Description of Artificial Sequence: Synthetic oligonucleotide
  Sense strand starting at position 956 of SEQ ID NO: 1884338
uguguaacugacuguccua

SEQ ID NO: 2258207 - RNA, 19 nt, Artificial Sequence
  Description of Artificial Sequence: Synthetic oligonucleotide
  Antisense strand to SEQ ID NO: 2258206
uaggacagucaguuacaca

SEQ ID NO: 2258208 - RNA, 19 nt, Artificial Sequence
  Description of Artificial Sequence: Synthetic oligonucleotide
  Sense strand starting at position 1068 of SEQ ID NO: 1884338
caaugaccaguaugugaua

SEQ ID NO: 2258209 - RNA, 19 nt, Artificial Sequence
  Description of Artificial Sequence: Synthetic oligonucleotide
  Antisense strand to SEQ ID NO: 2258208
uaucacauacuggucauug

SEQ ID NO: 2258210 - RNA, 19 nt, Artificial Sequence
  Description of Artificial Sequence: Synthetic oligonucleotide
  Sense strand starting at position 1070 of SEQ ID NO: 1884338
augaccaguaugugauaga

SEQ ID NO: 2258211 - RNA, 19 nt, Artificial Sequence
  Description of Artificial Sequence: Synthetic oligonucleotide
  Antisense strand to SEQ ID NO: 2258210
ucuaucacauacuggucau

SEQ ID NO: 2258212 - RNA, 19 nt, Artificial Sequence
  Description of Artificial Sequence: Synthetic oligonucleotide
  Sense strand starting at position 1073 of SEQ ID NO: 1884338
accaguaugugauagagca

SEQ ID NO: 2258213 - RNA, 19 nt, Artificial Sequence
  Description of Artificial Sequence: Synthetic oligonucleotide
  Antisense strand to SEQ ID NO: 2258212
ugcucuaucacauacuggu

SEQ ID NO: 2258214 - RNA, 19 nt, Artificial Sequence
  Description of Artificial Sequence: Synthetic oligonucleotide
  Sense strand starting at position 1115 of SEQ ID NO: 1884338
ucuccagagucugcucauu

SEQ ID NO: 2258215 - RNA, 19 nt, Artificial Sequence
  Description of Artificial Sequence: Synthetic oligonucleotide
  Antisense strand to SEQ ID NO: 2258214
aaugagcagacucuggaga

SEQ ID NO: 2258216 - RNA, 19 nt, Artificial Sequence
  Description of Artificial Sequence: Synthetic oligonucleotide
  Sense strand starting at position 1117 of SEQ ID NO: 1884338
uccagagucugcucauuug

SEQ ID NO: 2258217 - RNA, 19 nt, Artificial Sequence
  Description of Artificial Sequence: Synthetic oligonucleotide
  Antisense strand to SEQ ID NO: 2258216
caaaugagcagacucugga

SEQ ID NO: 2258218 - RNA, 19 nt, Artificial Sequence
  Description of Artificial Sequence: Synthetic oligonucleotide
  Sense strand starting at position 1149 of SEQ ID NO: 1884338
augcuuaaacccugagaag

SEQ ID NO: 2258219 - RNA, 19 nt, Artificial Sequence
  Description of Artificial Sequence: Synthetic oligonucleotide
  Antisense strand to SEQ ID NO: 2258218
cuucucaggguuuaagcau

SEQ ID NO: 2258220 - RNA, 19 nt, Artificial Sequence
  Description of Artificial Sequence: Synthetic oligonucleotide
  Sense strand starting at position 1504 of SEQ ID NO: 1884338
aaagauguagaguguaaga

SEQ ID NO: 2258221 - RNA, 19 nt, Artificial Sequence
  Description of Artificial Sequence: Synthetic oligonucleotide
  Antisense strand to SEQ ID NO: 2258220
ucuuacacucuacaucuuu

SEQ ID NO: 2258222 - RNA, 19 nt, Artificial Sequence
  Description of Artificial Sequence: Synthetic oligonucleotide
  Sense strand starting at position 1506 of SEQ ID NO: 1884338
agauguagaguguaagauc

SEQ ID NO: 2258223 - RNA, 19 nt, Artificial Sequence
  Description of Artificial Sequence: Synthetic oligonucleotide
  Antisense strand to SEQ ID NO: 2258222
gaucuuacacucuacaucu

SEQ ID NO: 2258224 - RNA, 19 nt, Artificial Sequence
  Description of Artificial Sequence: Synthetic oligonucleotide
  Sense strand starting at position 1514 of SEQ ID NO: 1884338
aguguaagaucaccaguga

SEQ ID NO: 2258225 - RNA, 19 nt, Artificial Sequence
  Description of Artificial Sequence: Synthetic oligonucleotide
  Antisense strand to SEQ ID NO: 2258224
ucacuggugaucuuacacu

SEQ ID NO: 2258226 - RNA, 19 nt, Artificial Sequence
  Description of Artificial Sequence: Synthetic oligonucleotide
  Sense strand starting at position 1515 of SEQ ID NO: 1884338
guguaagaucaccagugaa

SEQ ID NO: 2258227 - RNA, 19 nt, Artificial Sequence
  Description of Artificial Sequence: Synthetic oligonucleotide
  Antisense strand to SEQ ID NO: 2258226
uucacuggugaucuuacac

SEQ ID NO: 2258228 - RNA, 19 nt, Artificial Sequence
  Description of Artificial Sequence: Synthetic oligonucleotide
  Sense strand starting at position 2112 of SEQ ID NO: 1884338
gcgcuagucaaugcuaacu

SEQ ID NO: 2258229 - RNA, 19 nt, Artificial Sequence
  Description of Artificial Sequence: Synthetic oligonucleotide
  Antisense strand to SEQ ID NO: 2258228
aguuagcauugacuagcgc

SEQ ID NO: 2258230 - RNA, 19 nt, Artificial Sequence
  Description of Artificial Sequence: Synthetic oligonucleotide
  Sense strand starting at position 2166 of SEQ ID NO: 1884338
ccgaacuccuucuuuagaa

SEQ ID NO: 2258231 - RNA, 19 nt, Artificial Sequence
  Description of Artificial Sequence: Synthetic oligonucleotide
  Antisense strand to SEQ ID NO: 2258230
uucuaaagaaggaguucgg

SEQ ID NO: 2258232 - RNA, 19 nt, Artificial Sequence
  Description of Artificial Sequence: Synthetic oligonucleotide
  Sense strand starting at position 2167 of SEQ ID NO: 1884338
cgaacuccuucuuuagaaa

SEQ ID NO: 2258233 - RNA, 19 nt, Artificial Sequence
  Description of Artificial Sequence: Synthetic oligonucleotide
  Antisense strand to SEQ ID NO: 2258232
uuucuaaagaaggaguucg

SEQ ID NO: 2258234 - RNA, 19 nt, Artificial Sequence
  Description of Artificial Sequence: Synthetic oligonucleotide
  Sense strand starting at position 3093 of SEQ ID NO: 1884338
agcugcguacgucauuuaa

SEQ ID NO: 2258235 - RNA, 19 nt, Artificial Sequence
  Description of Artificial Sequence: Synthetic oligonucleotide
  Antisense strand to SEQ ID NO: 2258234
uuaaaugacguacgcagcu

SEQ ID NO: 2258236 - RNA, 19 nt, Artificial Sequence
  Description of Artificial Sequence: Synthetic oligonucleotide
  Sense strand starting at position 3095 of SEQ ID NO: 1884338
cugcguacgucauuuaagu

SEQ ID NO: 2258237 - RNA, 19 nt, Artificial Sequence
  Description of Artificial Sequence: Synthetic oligonucleotide
  Antisense strand to SEQ ID NO: 2258236
acuuaaaugacguacgcag

SEQ ID NO: 2258238 - RNA, 19 nt, Artificial Sequence
  Description of Artificial Sequence: Synthetic oligonucleotide
  Sense strand starting at position 3163 of SEQ ID NO: 1884338
ggaaauaaguauucucuga

SEQ ID NO: 2258239 - RNA, 19 nt, Artificial Sequence
  Description of Artificial Sequence: Synthetic oligonucleotide
  Antisense strand to SEQ ID NO: 2258238
ucagagaauacuuauuucc

SEQ ID NO: 2258240 - RNA, 19 nt, Artificial Sequence
  Description of Artificial Sequence: Synthetic oligonucleotide
  Sense strand starting at position 3167 of SEQ ID NO: 1884338
auaaguauucucugacagu

SEQ ID NO: 2258241 - RNA, 19 nt, Artificial Sequence
  Description of Artificial Sequence: Synthetic oligonucleotide
  Antisense strand to SEQ ID NO: 2258240
acugucagagaauacuuau

SEQ ID NO: 2258242 - RNA, 19 nt, Artificial Sequence
  Description of Artificial Sequence: Synthetic oligonucleotide
  Sense strand starting at position 3170 of SEQ ID NO: 1884338
aguauucucugacaguaaa

SEQ ID NO: 2258243 - RNA, 19 nt, Artificial Sequence
  Description of Artificial Sequence: Synthetic oligonucleotide
  Antisense strand to SEQ ID NO: 2258242
uuuacugucagagaauacu

SEQ ID NO: 2258244 - RNA, 19 nt, Artificial Sequence
  Description of Artificial Sequence: Synthetic oligonucleotide
  Sense strand starting at position 3202 of SEQ ID NO: 1884338
cagggauaggcaggaucau

SEQ ID NO: 2258245 - RNA, 19 nt, Artificial Sequence
  Description of Artificial Sequence: Synthetic oligonucleotide
  Antisense strand to SEQ ID NO: 2258244
augauccugccuaucccug

SEQ ID NO: 2258246 - RNA, 19 nt, Artificial Sequence
  Description of Artificial Sequence: Synthetic oligonucleotide
  Sense strand starting at position 3211 of SEQ ID NO: 1884338
gcaggaucaucuccauuac

SEQ ID NO: 2258247 - RNA, 19 nt, Artificial Sequence
  Description of Artificial Sequence: Synthetic oligonucleotide
  Antisense strand to SEQ ID NO: 2258246
guaauggagaugauccugc

SEQ ID NO: 2258248 - RNA, 19 nt, Artificial Sequence
  Description of Artificial Sequence: Synthetic oligonucleotide
  Sense strand starting at position 3374 of SEQ ID NO: 1884338
uuaggaauuagucgggcuu

SEQ ID NO: 2258249 - RNA, 19 nt, Artificial Sequence
  Description of Artificial Sequence: Synthetic oligonucleotide
  Antisense strand to SEQ ID NO: 2258248
aagcccgacuaauuccuaa

SEQ ID NO: 2258250 - RNA, 19 nt, Artificial Sequence
  Description of Artificial Sequence: Synthetic oligonucleotide
  Sense strand starting at position 3434 of SEQ ID NO: 1884338
gcagaacaaucguuugagu

SEQ ID NO: 2258251 - RNA, 19 nt, Artificial Sequence
  Description of Artificial Sequence: Synthetic oligonucleotide
  Antisense strand to SEQ ID NO: 2258250
acucaaacgauuguucugc

SEQ ID NO: 2258252 - RNA, 19 nt, Artificial Sequence
  Description of Artificial Sequence: Synthetic oligonucleotide
  Sense strand starting at position 3437 of SEQ ID NO: 1884338
gaacaaucguuugagucca

SEQ ID NO: 2258253 - RNA, 19 nt, Artificial Sequence
  Description of Artificial Sequence: Synthetic oligonucleotide
  Antisense strand to SEQ ID NO: 2258252
uggacucaaacgauuguuc

SEQ ID NO: 2258254 - RNA, 19 nt, Artificial Sequence
  Description of Artificial Sequence: Synthetic oligonucleotide
  Sense strand starting at position 3453 of SEQ ID NO: 1884338
ccaggaguuagagguuagu

SEQ ID NO: 2258255 - RNA, 19 nt, Artificial Sequence
  Description of Artificial Sequence: Synthetic oligonucleotide
  Antisense strand to SEQ ID NO: 2258254
acuaaccucuaacuccugg

SEQ ID NO: 2258256 - RNA, 19 nt, Artificial Sequence
  Description of Artificial Sequence: Synthetic oligonucleotide
  Sense strand starting at position 3463 of SEQ ID NO: 1884338
gagguuagugagcacuacu

SEQ ID NO: 2258257 - RNA, 19 nt, Artificial Sequence
  Description of Artificial Sequence: Synthetic oligonucleotide
  Antisense strand to SEQ ID NO: 2258256
aguagugcucacuaaccuc

SEQ ID NO: 2258258 - RNA, 19 nt, Artificial Sequence
  Description of Artificial Sequence: Synthetic oligonucleotide
  Sense strand starting at position 3500 of SEQ ID NO: 1884338
cagcaugauuccguaggaa

SEQ ID NO: 2258259 - RNA, 19 nt, Artificial Sequence
  Description of Artificial Sequence: Synthetic oligonucleotide
  Antisense strand to SEQ ID NO: 2258258
uuccuacggaaucaugcug

SEQ ID NO: 2258260 - RNA, 19 nt, Artificial Sequence
  Description of Artificial Sequence: Synthetic oligonucleotide
  Sense strand starting at position 3609 of SEQ ID NO: 1884338
auaacuggcuauuaugaua

SEQ ID NO: 2258261 - RNA, 19 nt, Artificial Sequence
  Description of Artificial Sequence: Synthetic oligonucleotide
  Antisense strand to SEQ ID NO: 2258260
uaucauaauagccaguuau

SEQ ID NO: 2258262 - RNA, 19 nt, Artificial Sequence
  Description of Artificial Sequence: Synthetic oligonucleotide
  Sense strand starting at position 3612 of SEQ ID NO: 1884338
acuggcuauuaugauaaua

SEQ ID NO: 2258263 - RNA, 19 nt, Artificial Sequence
  Description of Artificial Sequence: Synthetic oligonucleotide
  Antisense strand to SEQ ID NO: 2258262
uauuaucauaauagccagu

SEQ ID NO: 2258264 - RNA, 19 nt, Artificial Sequence
  Description of Artificial Sequence: Synthetic oligonucleotide
  Sense strand starting at position 3614 of SEQ ID NO: 1884338
uggcuauuaugauaauagu

SEQ ID NO: 2258265 - RNA, 19 nt, Artificial Sequence
  Description of Artificial Sequence: Synthetic oligonucleotide
  Antisense strand to SEQ ID NO: 2258264
acuauuaucauaauagcca

SEQ ID NO: 2258266 - RNA, 19 nt, Artificial Sequence
  Description of Artificial Sequence: Synthetic oligonucleotide
  Sense strand starting at position 3706 of SEQ ID NO: 1884338
gaagcugaggcguauggau

SEQ ID NO: 2258267 - RNA, 19 nt, Artificial Sequence
  Description of Artificial Sequence: Synthetic oligonucleotide
  Antisense strand to SEQ ID NO: 2258266
auccauacgccucagcuuc

SEQ ID NO: 2258268 - RNA, 19 nt, Artificial Sequence
  Description of Artificial Sequence: Synthetic oligonucleotide
  Sense strand starting at position 30 of SEQ ID NO: 1884339
agagccugaucuuugggaa

SEQ ID NO: 2258269 - RNA, 19 nt, Artificial Sequence
  Description of Artificial Sequence: Synthetic oligonucleotide
  Antisense strand to SEQ ID NO: 2258268
uucccaaagaucaggcucu

SEQ ID NO: 2258270 - RNA, 19 nt, Artificial Sequence
  Description of Artificial Sequence: Synthetic oligonucleotide
  Sense strand starting at position 33 of SEQ ID NO: 1884339
gccugaucuuugggaagca

SEQ ID NO: 2258271 - RNA, 19 nt, Artificial Sequence
  Description of Artificial Sequence: Synthetic oligonucleotide
  Antisense strand to SEQ ID NO: 2258270
ugcuucccaaagaucaggc

SEQ ID NO: 2258272 - RNA, 19 nt, Artificial Sequence
  Description of Artificial Sequence: Synthetic oligonucleotide
  Sense strand starting at position 34 of SEQ ID NO: 1884339
ccugaucuuugggaagcau

SEQ ID NO: 2258273 - RNA, 19 nt, Artificial Sequence
  Description of Artificial Sequence: Synthetic oligonucleotide
  Antisense strand to SEQ ID NO: 2258272
augcuucccaaagaucagg

SEQ ID NO: 2258274 - RNA, 19 nt, Artificial Sequence
  Description of Artificial Sequence: Synthetic oligonucleotide
  Sense strand starting at position 67 of SEQ ID NO: 1884339
uggauaaacugcugaggau

SEQ ID NO: 2258275 - RNA, 19 nt, Artificial Sequence
  Description of Artificial Sequence: Synthetic oligonucleotide
  Antisense strand to SEQ ID NO: 2258274
auccucagcaguuuaucca

SEQ ID NO: 2258276 - RNA, 19 nt, Artificial Sequence
  Description of Artificial Sequence: Synthetic oligonucleotide
  Sense strand starting at position 434 of SEQ ID NO: 1884339
auggauucccgaugucaaa

SEQ ID NO: 2258277 - RNA, 19 nt, Artificial Sequence
  Description of Artificial Sequence: Synthetic oligonucleotide
  Antisense strand to SEQ ID NO: 2258276
uuugacaucgggaauccau

SEQ ID NO: 2258278 - RNA, 19 nt, Artificial Sequence
  Description of Artificial Sequence: Synthetic oligonucleotide
  Sense strand starting at position 806 of SEQ ID NO: 1884339
gcugauugauaguucugua

SEQ ID NO: 2258279 - RNA, 19 nt, Artificial Sequence
  Description of Artificial Sequence: Synthetic oligonucleotide
  Antisense strand to SEQ ID NO: 2258278
uacagaacuaucaaucagc

SEQ ID NO: 2258280 - RNA, 19 nt, Artificial Sequence
  Description of Artificial Sequence: Synthetic oligonucleotide
  Sense strand starting at position 809 of SEQ ID NO: 1884339
gauugauaguucuguagug

SEQ ID NO: 2258281 - RNA, 19 nt, Artificial Sequence
  Description of Artificial Sequence: Synthetic oligonucleotide
  Antisense strand to SEQ ID NO: 2258280
cacuacagaacuaucaauc

SEQ ID NO: 2258282 - RNA, 19 nt, Artificial Sequence
  Description of Artificial Sequence: Synthetic oligonucleotide
  Sense strand starting at position 810 of SEQ ID NO: 1884339
auugauaguucuguaguga

SEQ ID NO: 2258283 - RNA, 19 nt, Artificial Sequence
  Description of Artificial Sequence: Synthetic oligonucleotide
  Antisense strand to SEQ ID NO: 2258282
ucacuacagaacuaucaau

SEQ ID NO: 2258284 - RNA, 19 nt, Artificial Sequence
  Description of Artificial Sequence: Synthetic oligonucleotide
  Sense strand starting at position 811 of SEQ ID NO: 1884339
uugauaguucuguagugag

SEQ ID NO: 2258285 - RNA, 19 nt, Artificial Sequence
  Description of Artificial Sequence: Synthetic oligonucleotide
  Antisense strand to SEQ ID NO: 2258284
cucacuacagaacuaucaa

SEQ ID NO: 2258286 - RNA, 19 nt, Artificial Sequence
  Description of Artificial Sequence: Synthetic oligonucleotide
  Sense strand starting at position 1181 of SEQ ID NO: 1884339
guuaauggacucugagauc

SEQ ID NO: 2258287 - RNA, 19 nt, Artificial Sequence
  Description of Artificial Sequence: Synthetic oligonucleotide
  Antisense strand to SEQ ID NO: 2258286
gaucucagaguccauuaac

SEQ ID NO: 2258288 - RNA, 19 nt, Artificial Sequence
  Description of Artificial Sequence: Synthetic oligonucleotide
  Sense strand starting at position 1188 of SEQ ID NO: 1884339
gacucugagaucugugggu

SEQ ID NO: 2258289 - RNA, 19 nt, Artificial Sequence
  Description of Artificial Sequence: Synthetic oligonucleotide
  Antisense strand to SEQ ID NO: 2258288
acccacagaucucagaguc

SEQ ID NO: 2258290 - RNA, 19 nt, Artificial Sequence
  Description of Artificial Sequence: Synthetic oligonucleotide
  Sense strand starting at position 1197 of SEQ ID NO: 1884339
aucuguggguccuguaaac

SEQ ID NO: 2258291 - RNA, 19 nt, Artificial Sequence
  Description of Artificial Sequence: Synthetic oligonucleotide
  Antisense strand to SEQ ID NO: 2258290
guuuacaggacccacagau

SEQ ID NO: 2258292 - RNA, 19 nt, Artificial Sequence
  Description of Artificial Sequence: Synthetic oligonucleotide
  Sense strand starting at position 1242 of SEQ ID NO: 1884339
ccaucacucuggcuggaaa

SEQ ID NO: 2258293 - RNA, 19 nt, Artificial Sequence
  Description of Artificial Sequence: Synthetic oligonucleotide
  Antisense strand to SEQ ID NO: 2258292
uuuccagccagagugaugg

SEQ ID NO: 2258294 - RNA, 19 nt, Artificial Sequence
  Description of Artificial Sequence: Synthetic oligonucleotide
  Sense strand starting at position 1657 of SEQ ID NO: 1884339
ggccuuacgugccagauga

SEQ ID NO: 2258295 - RNA, 19 nt, Artificial Sequence
  Description of Artificial Sequence: Synthetic oligonucleotide
  Antisense strand to SEQ ID NO: 2258294
ucaucuggcacguaaggcc

SEQ ID NO: 2258296 - RNA, 19 nt, Artificial Sequence
  Description of Artificial Sequence: Synthetic oligonucleotide
  Sense strand starting at position 1661 of SEQ ID NO: 1884339
uuacgugccagaugacaaa

SEQ ID NO: 2258297 - RNA, 19 nt, Artificial Sequence
  Description of Artificial Sequence: Synthetic oligonucleotide
  Antisense strand to SEQ ID NO: 2258296
uuugucaucuggcacguaa

SEQ ID NO: 2258298 - RNA, 19 nt, Artificial Sequence
  Description of Artificial Sequence: Synthetic oligonucleotide
  Sense strand starting at position 2262 of SEQ ID NO: 1884339
gugcgaggcacuugucacu

SEQ ID NO: 2258299 - RNA, 19 nt, Artificial Sequence
  Description of Artificial Sequence: Synthetic oligonucleotide
  Antisense strand to SEQ ID NO: 2258298
agugacaagugccucgcac

SEQ ID NO: 2258300 - RNA, 19 nt, Artificial Sequence
  Description of Artificial Sequence: Synthetic oligonucleotide
  Sense strand starting at position 2268 of SEQ ID NO: 1884339
ggcacuugucacugucgga

SEQ ID NO: 2258301 - RNA, 19 nt, Artificial Sequence
  Description of Artificial Sequence: Synthetic oligonucleotide
  Antisense strand to SEQ ID NO: 2258300
uccgacagugacaagugcc

SEQ ID NO: 2258302 - RNA, 19 nt, Artificial Sequence
  Description of Artificial Sequence: Synthetic oligonucleotide
  Sense strand starting at position 2485 of SEQ ID NO: 1884339
ugccucuuucccugacaga

SEQ ID NO: 2258303 - RNA, 19 nt, Artificial Sequence
  Description of Artificial Sequence: Synthetic oligonucleotide
  Antisense strand to SEQ ID NO: 2258302
ucugucagggaaagaggca

SEQ ID NO: 2258304 - RNA, 19 nt, Artificial Sequence
  Description of Artificial Sequence: Synthetic oligonucleotide
  Sense strand starting at position 2486 of SEQ ID NO: 1884339
gccucuuucccugacagaa

SEQ ID NO: 2258305 - RNA, 19 nt, Artificial Sequence
  Description of Artificial Sequence: Synthetic oligonucleotide
  Antisense strand to SEQ ID NO: 2258304
uucugucagggaaagaggc

SEQ ID NO: 2258306 - RNA, 19 nt, Artificial Sequence
  Description of Artificial Sequence: Synthetic oligonucleotide
  Sense strand starting at position 2547 of SEQ ID NO: 1884339
cuuuccuggccucaggaaa

SEQ ID NO: 2258307 - RNA, 19 nt, Artificial Sequence
  Description of Artificial Sequence: Synthetic oligonucleotide
  Antisense strand to SEQ ID NO: 2258306
uuuccugaggccaggaaag

SEQ ID NO: 2258308 - RNA, 19 nt, Artificial Sequence
  Description of Artificial Sequence: Synthetic oligonucleotide
  Sense strand starting at position 289 of SEQ ID NO: 1884340
ugcccugaaggcugaaaua

SEQ ID NO: 2258309 - RNA, 19 nt, Artificial Sequence
  Description of Artificial Sequence: Synthetic oligonucleotide
  Antisense strand to SEQ ID NO: 2258308
uauuucagccuucagggca

SEQ ID NO: 2258310 - RNA, 19 nt, Artificial Sequence
  Description of Artificial Sequence: Synthetic oligonucleotide
  Sense strand starting at position 320 of SEQ ID NO: 1884340
gaggacaucugcucuaucu

SEQ ID NO: 2258311 - RNA, 19 nt, Artificial Sequence
  Description of Artificial Sequence: Synthetic oligonucleotide
  Antisense strand to SEQ ID NO: 2258310
agauagagcagauguccuc

SEQ ID NO: 2258312 - RNA, 19 nt, Artificial Sequence
  Description of Artificial Sequence: Synthetic oligonucleotide
  Sense strand starting at position 322 of SEQ ID NO: 1884340
ggacaucugcucuaucugu

SEQ ID NO: 2258313 - RNA, 19 nt, Artificial Sequence
  Description of Artificial Sequence: Synthetic oligonucleotide
  Antisense strand to SEQ ID NO: 2258312
acagauagagcagaugucc

SEQ ID NO: 2258314 - RNA, 19 nt, Artificial Sequence
  Description of Artificial Sequence: Synthetic oligonucleotide
  Sense strand starting at position 327 of SEQ ID NO: 1884340
ucugcucuaucugugggaa

SEQ ID NO: 2258315 - RNA, 19 nt, Artificial Sequence
  Description of Artificial Sequence: Synthetic oligonucleotide
  Antisense strand to SEQ ID NO: 2258314
uucccacagauagagcaga

SEQ ID NO: 2258316 - RNA, 19 nt, Artificial Sequence
  Description of Artificial Sequence: Synthetic oligonucleotide
  Sense strand starting at position 328 of SEQ ID NO: 1884340
cugcucuaucugugggaag

SEQ ID NO: 2258317 - RNA, 19 nt, Artificial Sequence
  Description of Artificial Sequence: Synthetic oligonucleotide
  Antisense strand to SEQ ID NO: 2258316
cuucccacagauagagcag

SEQ ID NO: 2258318 - RNA, 19 nt, Artificial Sequence
  Description of Artificial Sequence: Synthetic oligonucleotide
  Sense strand starting at position 330 of SEQ ID NO: 1884340
gcucuaucugugggaagga

SEQ ID NO: 2258319 - RNA, 19 nt, Artificial Sequence
  Description of Artificial Sequence: Synthetic oligonucleotide
  Antisense strand to SEQ ID NO: 2258318
uccuucccacagauagagc

SEQ ID NO: 2258320 - RNA, 19 nt, Artificial Sequence
  Description of Artificial Sequence: Synthetic oligonucleotide
  Sense strand starting at position 470 of SEQ ID NO: 1884340
uuguuaagccuuugaauau

SEQ ID NO: 2258321 - RNA, 19 nt, Artificial Sequence
  Description of Artificial Sequence: Synthetic oligonucleotide
  Antisense strand to SEQ ID NO: 2258320
auauucaaaggcuuaacaa

SEQ ID NO: 2258322 - RNA, 19 nt, Artificial Sequence
  Description of Artificial Sequence: Synthetic oligonucleotide
  Sense strand starting at position 496 of SEQ ID NO: 1884340
gaaaguaucgcgcaaucau

SEQ ID NO: 2258323 - RNA, 19 nt, Artificial Sequence
  Description of Artificial Sequence: Synthetic oligonucleotide
  Antisense strand to SEQ ID NO: 2258322
augauugcgcgauacuuuc

SEQ ID NO: 2258324 - RNA, 19 nt, Artificial Sequence
  Description of Artificial Sequence: Synthetic oligonucleotide
  Sense strand starting at position 506 of SEQ ID NO: 1884340
cgcaaucauugauugucaa

SEQ ID NO: 2258325 - RNA, 19 nt, Artificial Sequence
  Description of Artificial Sequence: Synthetic oligonucleotide
  Antisense strand to SEQ ID NO: 2258324
uugacaaucaaugauugcg

SEQ ID NO: 2258326 - RNA, 19 nt, Artificial Sequence
  Description of Artificial Sequence: Synthetic oligonucleotide
  Sense strand starting at position 507 of SEQ ID NO: 1884340
gcaaucauugauugucaaa

SEQ ID NO: 2258327 - RNA, 19 nt, Artificial Sequence
  Description of Artificial Sequence: Synthetic oligonucleotide
  Antisense strand to SEQ ID NO: 2258326
uuugacaaucaaugauugc

SEQ ID NO: 2258328 - RNA, 19 nt, Artificial Sequence
  Description of Artificial Sequence: Synthetic oligonucleotide
  Sense strand starting at position 520 of SEQ ID NO: 1884340
gucaaaucauggguuucua

SEQ ID NO: 2258329 - RNA, 19 nt, Artificial Sequence
  Description of Artificial Sequence: Synthetic oligonucleotide
  Antisense strand to SEQ ID NO: 2258328
uagaaacccaugauuugac

SEQ ID NO: 2258330 - RNA, 19 nt, Artificial Sequence
  Description of Artificial Sequence: Synthetic oligonucleotide
  Sense strand starting at position 579 of SEQ ID NO: 1884340
ccuauacccgaagguauaa

SEQ ID NO: 2258331 - RNA, 19 nt, Artificial Sequence
  Description of Artificial Sequence: Synthetic oligonucleotide
  Antisense strand to SEQ ID NO: 2258330
uuauaccuucggguauagg

SEQ ID NO: 2258332 - RNA, 19 nt, Artificial Sequence
  Description of Artificial Sequence: Synthetic oligonucleotide
  Sense strand starting at position 831 of SEQ ID NO: 1884340
ggguguguuuccacggcuu

SEQ ID NO: 2258333 - RNA, 19 nt, Artificial Sequence
  Description of Artificial Sequence: Synthetic oligonucleotide
  Antisense strand to SEQ ID NO: 2258332
aagccguggaaacacaccc

SEQ ID NO: 2258334 - RNA, 19 nt, Artificial Sequence
  Description of Artificial Sequence: Synthetic oligonucleotide
  Sense strand starting at position 2221 of SEQ ID NO: 1884340
ucgggacuuccaugcuagu

SEQ ID NO: 2258335 - RNA, 19 nt, Artificial Sequence
  Description of Artificial Sequence: Synthetic oligonucleotide
  Antisense strand to SEQ ID NO: 2258334
acuagcauggaagucccga

SEQ ID NO: 2258336 - RNA, 19 nt, Artificial Sequence
  Description of Artificial Sequence: Synthetic oligonucleotide
  Sense strand starting at position 2262 of SEQ ID NO: 1884340
cuacgucagccgccauaau

SEQ ID NO: 2258337 - RNA, 19 nt, Artificial Sequence
  Description of Artificial Sequence: Synthetic oligonucleotide
  Antisense strand to SEQ ID NO: 2258336
auuauggcggcugacguag

SEQ ID NO: 2258338 - RNA, 19 nt, Artificial Sequence
  Description of Artificial Sequence: Synthetic oligonucleotide
  Sense strand starting at position 2398 of SEQ ID NO: 1884340
cugcacuggucuccauauu

SEQ ID NO: 2258339 - RNA, 19 nt, Artificial Sequence
  Description of Artificial Sequence: Synthetic oligonucleotide
  Antisense strand to SEQ ID NO: 2258338
aauauggagaccagugcag

SEQ ID NO: 2258340 - RNA, 19 nt, Artificial Sequence
  Description of Artificial Sequence: Synthetic oligonucleotide
  Sense strand starting at position 2408 of SEQ ID NO: 1884340
cuccauauuccagagcaga

SEQ ID NO: 2258341 - RNA, 19 nt, Artificial Sequence
  Description of Artificial Sequence: Synthetic oligonucleotide
  Antisense strand to SEQ ID NO: 2258340
ucugcucuggaauauggag

SEQ ID NO: 2258342 - RNA, 19 nt, Artificial Sequence
  Description of Artificial Sequence: Synthetic oligonucleotide
  Sense strand starting at position 2436 of SEQ ID NO: 1884340
uugcuauuggccuaggacu

SEQ ID NO: 2258343 - RNA, 19 nt, Artificial Sequence
  Description of Artificial Sequence: Synthetic oligonucleotide
  Antisense strand to SEQ ID NO: 2258342
aguccuaggccaauagcaa

SEQ ID NO: 2258344 - RNA, 19 nt, Artificial Sequence
  Description of Artificial Sequence: Synthetic oligonucleotide
  Sense strand starting at position 2479 of SEQ ID NO: 1884340
cccacaaauuuccacggau

SEQ ID NO: 2258345 - RNA, 19 nt, Artificial Sequence
  Description of Artificial Sequence: Synthetic oligonucleotide
  Antisense strand to SEQ ID NO: 2258344
auccguggaaauuuguggg

SEQ ID NO: 2258346 - RNA, 19 nt, Artificial Sequence
  Description of Artificial Sequence: Synthetic oligonucleotide
  Sense strand starting at position 2515 of SEQ ID NO: 1884340
ucugaaaccugcucagcua

SEQ ID NO: 2258347 - RNA, 19 nt, Artificial Sequence
  Description of Artificial Sequence: Synthetic oligonucleotide
  Antisense strand to SEQ ID NO: 2258346
uagcugagcagguuucaga

SEQ ID NO: 2258348 - RNA, 19 nt, Artificial Sequence
  Description of Artificial Sequence: Synthetic oligonucleotide
  Sense strand starting at position 2550 of SEQ ID NO: 1884340
guuugaaauguuuggguuu

SEQ ID NO: 2258349 - RNA, 19 nt, Artificial Sequence
  Description of Artificial Sequence: Synthetic oligonucleotide
  Antisense strand to SEQ ID NO: 2258348
aaacccaaacauuucaaac

SEQ ID NO: 2258350 - RNA, 19 nt, Artificial Sequence
  Description of Artificial Sequence: Synthetic oligonucleotide
  Sense strand starting at position 2697 of SEQ ID NO: 1884340
aguugccuuucuccagaaa

SEQ ID NO: 2258351 - RNA, 19 nt, Artificial Sequence
  Description of Artificial Sequence: Synthetic oligonucleotide
  Antisense strand to SEQ ID NO: 2258350
uuucuggagaaaggcaacu

SEQ ID NO: 2258352 - RNA, 19 nt, Artificial Sequence
  Description of Artificial Sequence: Synthetic oligonucleotide
  Sense strand starting at position 3209 of SEQ ID NO: 1884340
auagcaucuguguggaaca

SEQ ID NO: 2258353 - RNA, 19 nt, Artificial Sequence
  Description of Artificial Sequence: Synthetic oligonucleotide
  Antisense strand to SEQ ID NO: 2258352
uguuccacacagaugcuau

SEQ ID NO: 2258354 - RNA, 19 nt, Artificial Sequence
  Description of Artificial Sequence: Synthetic oligonucleotide
  Sense strand starting at position 3277 of SEQ ID NO: 1884340
aucuguaaaucaucaguua

SEQ ID NO: 2258355 - RNA, 19 nt, Artificial Sequence
  Description of Artificial Sequence: Synthetic oligonucleotide
  Antisense strand to SEQ ID NO: 2258354
uaacugaugauuuacagau

SEQ ID NO: 2258356 - RNA, 19 nt, Artificial Sequence
  Description of Artificial Sequence: Synthetic oligonucleotide
  Sense strand starting at position 3278 of SEQ ID NO: 1884340
ucuguaaaucaucaguuac

SEQ ID NO: 2258357 - RNA, 19 nt, Artificial Sequence
  Description of Artificial Sequence: Synthetic oligonucleotide
  Antisense strand to SEQ ID NO: 2258356
guaacugaugauuuacaga

SEQ ID NO: 2258358 - RNA, 19 nt, Artificial Sequence
  Description of Artificial Sequence: Synthetic oligonucleotide
  Sense strand starting at position 3280 of SEQ ID NO: 1884340
uguaaaucaucaguuaccu

SEQ ID NO: 2258359 - RNA, 19 nt, Artificial Sequence
  Description of Artificial Sequence: Synthetic oligonucleotide
  Antisense strand to SEQ ID NO: 2258358
agguaacugaugauuuaca

SEQ ID NO: 2258360 - RNA, 19 nt, Artificial Sequence
  Description of Artificial Sequence: Synthetic oligonucleotide
  Sense strand starting at position 3317 of SEQ ID NO: 1884340
gggcccugucucugcagaa

SEQ ID NO: 2258361 - RNA, 19 nt, Artificial Sequence
  Description of Artificial Sequence: Synthetic oligonucleotide
  Antisense strand to SEQ ID NO: 2258360
uucugcagagacagggccc

SEQ ID NO: 2258362 - RNA, 19 nt, Artificial Sequence
  Description of Artificial Sequence: Synthetic oligonucleotide
  Sense strand starting at position 3406 of SEQ ID NO: 1884340
aauugaacugagcagucau

SEQ ID NO: 2258363 - RNA, 19 nt, Artificial Sequence
  Description of Artificial Sequence: Synthetic oligonucleotide
  Antisense strand to SEQ ID NO: 2258362
augacugcucaguucaauu

SEQ ID NO: 2258364 - RNA, 19 nt, Artificial Sequence
  Description of Artificial Sequence: Synthetic oligonucleotide
  Sense strand starting at position 3425 of SEQ ID NO: 1884340
aaggguauacccugacacu

SEQ ID NO: 2258365 - RNA, 19 nt, Artificial Sequence
  Description of Artificial Sequence: Synthetic oligonucleotide
  Antisense strand to SEQ ID NO: 2258364
agugucaggguauacccuu

SEQ ID NO: 2258366 - RNA, 19 nt, Artificial Sequence
  Description of Artificial Sequence: Synthetic oligonucleotide
  Sense strand starting at position 3575 of SEQ ID NO: 1884340
ggguugguuugggugugaa

SEQ ID NO: 2258367 - RNA, 19 nt, Artificial Sequence
  Description of Artificial Sequence: Synthetic oligonucleotide
  Antisense strand to SEQ ID NO: 2258366
uucacacccaaaccaaccc

SEQ ID NO: 2258368 - RNA, 19 nt, Artificial Sequence
  Description of Artificial Sequence: Synthetic oligonucleotide
  Sense strand starting at position 3576 of SEQ ID NO: 1884340
gguugguuugggugugaac

SEQ ID NO: 2258369 - RNA, 19 nt, Artificial Sequence
  Description of Artificial Sequence: Synthetic oligonucleotide
  Antisense strand to SEQ ID NO: 2258368
guucacacccaaaccaacc

SEQ ID NO: 2258370 - RNA, 19 nt, Artificial Sequence
  Description of Artificial Sequence: Synthetic oligonucleotide
  Sense strand starting at position 3578 of SEQ ID NO: 1884340
uugguuugggugugaacau

SEQ ID NO: 2258371 - RNA, 19 nt, Artificial Sequence
  Description of Artificial Sequence: Synthetic oligonucleotide
  Antisense strand to SEQ ID NO: 2258370
auguucacacccaaaccaa

SEQ ID NO: 2258372 - RNA, 19 nt, Artificial Sequence
  Description of Artificial Sequence: Synthetic oligonucleotide
  Sense strand starting at position 3617 of SEQ ID NO: 1884340
cauauugccucuguuagga

SEQ ID NO: 2258373 - RNA, 19 nt, Artificial Sequence
  Description of Artificial Sequence: Synthetic oligonucleotide
  Antisense strand to SEQ ID NO: 2258372
uccuaacagaggcaauaug

SEQ ID NO: 2258374 - RNA, 19 nt, Artificial Sequence
  Description of Artificial Sequence: Synthetic oligonucleotide
  Sense strand starting at position 3631 of SEQ ID NO: 1884340
uaggauugguccuucucca

SEQ ID NO: 2258375 - RNA, 19 nt, Artificial Sequence
  Description of Artificial Sequence: Synthetic oligonucleotide
  Antisense strand to SEQ ID NO: 2258374
uggagaaggaccaauccua

SEQ ID NO: 2258376 - RNA, 19 nt, Artificial Sequence
  Description of Artificial Sequence: Synthetic oligonucleotide
  Sense strand starting at position 3831 of SEQ ID NO: 1884340
ugguguguauccucaagca

SEQ ID NO: 2258377 - RNA, 19 nt, Artificial Sequence
  Description of Artificial Sequence: Synthetic oligonucleotide
  Antisense strand to SEQ ID NO: 2258376
ugcuugaggauacacacca

SEQ ID NO: 2258378 - RNA, 19 nt, Artificial Sequence
  Description of Artificial Sequence: Synthetic oligonucleotide
  Sense strand starting at position 3915 of SEQ ID NO: 1884340
gguuaaucgaguuauugca

SEQ ID NO: 2258379 - RNA, 19 nt, Artificial Sequence
  Description of Artificial Sequence: Synthetic oligonucleotide
  Antisense strand to SEQ ID NO: 2258378
ugcaauaacucgauuaacc

SEQ ID NO: 2258380 - RNA, 19 nt, Artificial Sequence
  Description of Artificial Sequence: Synthetic oligonucleotide
  Sense strand starting at position 3917 of SEQ ID NO: 1884340
uuaaucgaguuauugcaua

SEQ ID NO: 2258381 - RNA, 19 nt, Artificial Sequence
  Description of Artificial Sequence: Synthetic oligonucleotide
  Antisense strand to SEQ ID NO: 2258380
uaugcaauaacucgauuaa

SEQ ID NO: 2258382 - RNA, 19 nt, Artificial Sequence
  Description of Artificial Sequence: Synthetic oligonucleotide
  Sense strand starting at position 3922 of SEQ ID NO: 1884340
cgaguuauugcauacaaag

SEQ ID NO: 2258383 - RNA, 19 nt, Artificial Sequence
  Description of Artificial Sequence: Synthetic oligonucleotide
  Antisense strand to SEQ ID NO: 2258382
cuuuguaugcaauaacucg

SEQ ID NO: 2258384 - RNA, 19 nt, Artificial Sequence
  Description of Artificial Sequence: Synthetic oligonucleotide
  Sense strand starting at position 3933 of SEQ ID NO: 1884340
auacaaagccguuagaaga

SEQ ID NO: 2258385 - RNA, 19 nt, Artificial Sequence
  Description of Artificial Sequence: Synthetic oligonucleotide
  Antisense strand to SEQ ID NO: 2258384
ucuucuaacggcuuuguau

SEQ ID NO: 2258386 - RNA, 19 nt, Artificial Sequence
  Description of Artificial Sequence: Synthetic oligonucleotide
  Sense strand starting at position 3950 of SEQ ID NO: 1884340
gaaugcuuuccacauagug

SEQ ID NO: 2258387 - RNA, 19 nt, Artificial Sequence
  Description of Artificial Sequence: Synthetic oligonucleotide
  Antisense strand to SEQ ID NO: 2258386
cacuauguggaaagcauuc

SEQ ID NO: 2258388 - RNA, 19 nt, Artificial Sequence
  Description of Artificial Sequence: Synthetic oligonucleotide
  Sense strand starting at position 316 of SEQ ID NO: 1884341
cugagauguugcccauuaa

SEQ ID NO: 2258389 - RNA, 19 nt, Artificial Sequence
  Description of Artificial Sequence: Synthetic oligonucleotide
  Antisense strand to SEQ ID NO: 2258388
uuaaugggcaacaucucag

SEQ ID NO: 2258390 - RNA, 19 nt, Artificial Sequence
  Description of Artificial Sequence: Synthetic oligonucleotide
  Sense strand starting at position 317 of SEQ ID NO: 1884341
ugagauguugcccauuaaa

SEQ ID NO: 2258391 - RNA, 19 nt, Artificial Sequence
  Description of Artificial Sequence: Synthetic oligonucleotide
  Antisense strand to SEQ ID NO: 2258390
uuuaaugggcaacaucuca

SEQ ID NO: 2258392 - RNA, 19 nt, Artificial Sequence
  Description of Artificial Sequence: Synthetic oligonucleotide
  Sense strand starting at position 320 of SEQ ID NO: 1884341
gauguugcccauuaaagua

SEQ ID NO: 2258393 - RNA, 19 nt, Artificial Sequence
  Description of Artificial Sequence: Synthetic oligonucleotide
  Antisense strand to SEQ ID NO: 2258392
uacuuuaaugggcaacauc

SEQ ID NO: 2258394 - RNA, 19 nt, Artificial Sequence
  Description of Artificial Sequence: Synthetic oligonucleotide
  Sense strand starting at position 356 of SEQ ID NO: 1884341
ugagcguuacgggaagaga

SEQ ID NO: 2258395 - RNA, 19 nt, Artificial Sequence
  Description of Artificial Sequence: Synthetic oligonucleotide
  Antisense strand to SEQ ID NO: 2258394
ucucuucccguaacgcuca

SEQ ID NO: 2258396 - RNA, 19 nt, Artificial Sequence
  Description of Artificial Sequence: Synthetic oligonucleotide
  Sense strand starting at position 373 of SEQ ID NO: 1884341
gauggauccuuaccagguu

SEQ ID NO: 2258397 - RNA, 19 nt, Artificial Sequence
  Description of Artificial Sequence: Synthetic oligonucleotide
  Antisense strand to SEQ ID NO: 2258396
aaccugguaaggauccauc

SEQ ID NO: 2258398 - RNA, 19 nt, Artificial Sequence
  Description of Artificial Sequence: Synthetic oligonucleotide
  Sense strand starting at position 399 of SEQ ID NO: 1884341
gggaacgacuguucuguaa

SEQ ID NO: 2258399 - RNA, 19 nt, Artificial Sequence
  Description of Artificial Sequence: Synthetic oligonucleotide
  Antisense strand to SEQ ID NO: 2258398
uuacagaacagucguuccc

SEQ ID NO: 2258400 - RNA, 19 nt, Artificial Sequence
  Description of Artificial Sequence: Synthetic oligonucleotide
  Sense strand starting at position 458 of SEQ ID NO: 1884341
aagaaacugucagagagau

SEQ ID NO: 2258401 - RNA, 19 nt, Artificial Sequence
  Description of Artificial Sequence: Synthetic oligonucleotide
  Antisense strand to SEQ ID NO: 2258400
aucucucugacaguuucuu

SEQ ID NO: 2258402 - RNA, 19 nt, Artificial Sequence
  Description of Artificial Sequence: Synthetic oligonucleotide
  Sense strand starting at position 486 of SEQ ID NO: 1884341
acauguuaucauuaggagu

SEQ ID NO: 2258403 - RNA, 19 nt, Artificial Sequence
  Description of Artificial Sequence: Synthetic oligonucleotide
  Antisense strand to SEQ ID NO: 2258402
acuccuaaugauaacaugu

SEQ ID NO: 2258404 - RNA, 19 nt, Artificial Sequence
  Description of Artificial Sequence: Synthetic oligonucleotide
  Sense strand starting at position 494 of SEQ ID NO: 1884341
ucauuaggaguugguuacu

SEQ ID NO: 2258405 - RNA, 19 nt, Artificial Sequence
  Description of Artificial Sequence: Synthetic oligonucleotide
  Antisense strand to SEQ ID NO: 2258404
aguaaccaacuccuaauga

SEQ ID NO: 2258406 - RNA, 19 nt, Artificial Sequence
  Description of Artificial Sequence: Synthetic oligonucleotide
  Sense strand starting at position 577 of SEQ ID NO: 1884341
aaauguguccggugaagau

SEQ ID NO: 2258407 - RNA, 19 nt, Artificial Sequence
  Description of Artificial Sequence: Synthetic oligonucleotide
  Antisense strand to SEQ ID NO: 2258406
aucuucaccggacacauuu

SEQ ID NO: 2258408 - RNA, 19 nt, Artificial Sequence
  Description of Artificial Sequence: Synthetic oligonucleotide
  Sense strand starting at position 586 of SEQ ID NO: 1884341
cggugaagaugucccacua

SEQ ID NO: 2258409 - RNA, 19 nt, Artificial Sequence
  Description of Artificial Sequence: Synthetic oligonucleotide
  Antisense strand to SEQ ID NO: 2258408
uagugggacaucuucaccg

SEQ ID NO: 2258410 - RNA, 19 nt, Artificial Sequence
  Description of Artificial Sequence: Synthetic oligonucleotide
  Sense strand starting at position 608 of SEQ ID NO: 1884341
uaaguuugacaugguguaa

SEQ ID NO: 2258411 - RNA, 19 nt, Artificial Sequence
  Description of Artificial Sequence: Synthetic oligonucleotide
  Antisense strand to SEQ ID NO: 2258410
uuacaccaugucaaacuua

SEQ ID NO: 2258412 - RNA, 19 nt, Artificial Sequence
  Description of Artificial Sequence: Synthetic oligonucleotide
  Sense strand starting at position 647 of SEQ ID NO: 1884341
gcggauaaagagcagauua

SEQ ID NO: 2258413 - RNA, 19 nt, Artificial Sequence
  Description of Artificial Sequence: Synthetic oligonucleotide
  Antisense strand to SEQ ID NO: 2258412
uaaucugcucuuuauccgc

SEQ ID NO: 2258414 - RNA, 19 nt, Artificial Sequence
  Description of Artificial Sequence: Synthetic oligonucleotide
  Sense strand starting at position 657 of SEQ ID NO: 1884341
agcagauuacuugacccua

SEQ ID NO: 2258415 - RNA, 19 nt, Artificial Sequence
  Description of Artificial Sequence: Synthetic oligonucleotide
  Antisense strand to SEQ ID NO: 2258414
uagggucaaguaaucugcu

SEQ ID NO: 2258416 - RNA, 19 nt, Artificial Sequence
  Description of Artificial Sequence: Synthetic oligonucleotide
  Sense strand starting at position 2038 of SEQ ID NO: 1884341
ggccguagugucgcgagau

SEQ ID NO: 2258417 - RNA, 19 nt, Artificial Sequence
  Description of Artificial Sequence: Synthetic oligonucleotide
  Antisense strand to SEQ ID NO: 2258416
aucucgcgacacuacggcc

SEQ ID NO: 2258418 - RNA, 19 nt, Artificial Sequence
  Description of Artificial Sequence: Synthetic oligonucleotide
  Sense strand starting at position 2040 of SEQ ID NO: 1884341
ccguagugucgcgagauuu

SEQ ID NO: 2258419 - RNA, 19 nt, Artificial Sequence
  Description of Artificial Sequence: Synthetic oligonucleotide
  Antisense strand to SEQ ID NO: 2258418
aaaucucgcgacacuacgg

SEQ ID NO: 2258420 - RNA, 19 nt, Artificial Sequence
  Description of Artificial Sequence: Synthetic oligonucleotide
  Sense strand starting at position 2041 of SEQ ID NO: 1884341
cguagugucgcgagauuuc

SEQ ID NO: 2258421 - RNA, 19 nt, Artificial Sequence
  Description of Artificial Sequence: Synthetic oligonucleotide
  Antisense strand to SEQ ID NO: 2258420
gaaaucucgcgacacuacg

SEQ ID NO: 2258422 - RNA, 19 nt, Artificial Sequence
  Description of Artificial Sequence: Synthetic oligonucleotide
  Sense strand starting at position 2050 of SEQ ID NO: 1884341
gcgagauuucagggugcuu

SEQ ID NO: 2258423 - RNA, 19 nt, Artificial Sequence
  Description of Artificial Sequence: Synthetic oligonucleotide
  Antisense strand to SEQ ID NO: 2258422
aagcacccugaaaucucgc

SEQ ID NO: 2258424 - RNA, 19 nt, Artificial Sequence
  Description of Artificial Sequence: Synthetic oligonucleotide
  Sense strand starting at position 2062 of SEQ ID NO: 1884341
ggugcuuuagagugggaau

SEQ ID NO: 2258425 - RNA, 19 nt, Artificial Sequence
  Description of Artificial Sequence: Synthetic oligonucleotide
  Antisense strand to SEQ ID NO: 2258424
auucccacucuaaagcacc

SEQ ID NO: 2258426 - RNA, 19 nt, Artificial Sequence
  Description of Artificial Sequence: Synthetic oligonucleotide
  Sense strand starting at position 2063 of SEQ ID NO: 1884341
gugcuuuagagugggaaua

SEQ ID NO: 2258427 - RNA, 19 nt, Artificial Sequence
  Description of Artificial Sequence: Synthetic oligonucleotide
  Antisense strand to SEQ ID NO: 2258426
uauucccacucuaaagcac

SEQ ID NO: 2258428 - RNA, 19 nt, Artificial Sequence
  Description of Artificial Sequence: Synthetic oligonucleotide
  Sense strand starting at position 2064 of SEQ ID NO: 1884341
ugcuuuagagugggaauaa

SEQ ID NO: 2258429 - RNA, 19 nt, Artificial Sequence
  Description of Artificial Sequence: Synthetic oligonucleotide
  Antisense strand to SEQ ID NO: 2258428
uuauucccacucuaaagca

SEQ ID NO: 2258430 - RNA, 19 nt, Artificial Sequence
  Description of Artificial Sequence: Synthetic oligonucleotide
  Sense strand starting at position 2409 of SEQ ID NO: 1884341
auguccucaguuggauaau

SEQ ID NO: 2258431 - RNA, 19 nt, Artificial Sequence
  Description of Artificial Sequence: Synthetic oligonucleotide
  Antisense strand to SEQ ID NO: 2258430
auuauccaacugaggacau

SEQ ID NO: 2258432 - RNA, 19 nt, Artificial Sequence
  Description of Artificial Sequence: Synthetic oligonucleotide
  Sense strand starting at position 2421 of SEQ ID NO: 1884341
ggauaauggauaugcuagu

SEQ ID NO: 2258433 - RNA, 19 nt, Artificial Sequence
  Description of Artificial Sequence: Synthetic oligonucleotide
  Antisense strand to SEQ ID NO: 2258432
acuagcauauccauuaucc

SEQ ID NO: 2258434 - RNA, 19 nt, Artificial Sequence
  Description of Artificial Sequence: Synthetic oligonucleotide
  Sense strand starting at position 2656 of SEQ ID NO: 1884341
gcauuuggguaacaaacaa

SEQ ID NO: 2258435 - RNA, 19 nt, Artificial Sequence
  Description of Artificial Sequence: Synthetic oligonucleotide
  Antisense strand to SEQ ID NO: 2258434
uuguuuguuacccaaaugc

SEQ ID NO: 2258436 - RNA, 19 nt, Artificial Sequence
  Description of Artificial Sequence: Synthetic oligonucleotide
  Sense strand starting at position 2807 of SEQ ID NO: 1884341
aaggaugucugcccagaaa

SEQ ID NO: 2258437 - RNA, 19 nt, Artificial Sequence
  Description of Artificial Sequence: Synthetic oligonucleotide
  Antisense strand to SEQ ID NO: 2258436
uuucugggcagacauccuu

SEQ ID NO: 2258438 - RNA, 19 nt, Artificial Sequence
  Description of Artificial Sequence: Synthetic oligonucleotide
  Sense strand starting at position 2864 of SEQ ID NO: 1884341
ugaccuuuguagcuaagau

SEQ ID NO: 2258439 - RNA, 19 nt, Artificial Sequence
  Description of Artificial Sequence: Synthetic oligonucleotide
  Antisense strand to SEQ ID NO: 2258438
aucuuagcuacaaagguca

SEQ ID NO: 2258440 - RNA, 19 nt, Artificial Sequence
  Description of Artificial Sequence: Synthetic oligonucleotide
  Sense strand starting at position 2945 of SEQ ID NO: 1884341
cuucgucuuccugaauaca

SEQ ID NO: 2258441 - RNA, 19 nt, Artificial Sequence
  Description of Artificial Sequence: Synthetic oligonucleotide
  Antisense strand to SEQ ID NO: 2258440
uguauucaggaagacgaag

SEQ ID NO: 2258442 - RNA, 19 nt, Artificial Sequence
  Description of Artificial Sequence: Synthetic oligonucleotide
  Sense strand starting at position 3084 of SEQ ID NO: 1884341
uuugaagcaguuuacaaau

SEQ ID NO: 2258443 - RNA, 19 nt, Artificial Sequence
  Description of Artificial Sequence: Synthetic oligonucleotide
  Antisense strand to SEQ ID NO: 2258442
auuuguaaacugcuucaaa

SEQ ID NO: 2258444 - RNA, 19 nt, Artificial Sequence
  Description of Artificial Sequence: Synthetic oligonucleotide
  Sense strand starting at position 3254 of SEQ ID NO: 1884341
aagguuaaucuuggaauug

SEQ ID NO: 2258445 - RNA, 19 nt, Artificial Sequence
  Description of Artificial Sequence: Synthetic oligonucleotide
  Antisense strand to SEQ ID NO: 2258444
caauuccaagauuaaccuu

SEQ ID NO: 2258446 - RNA, 19 nt, Artificial Sequence
  Description of Artificial Sequence: Synthetic oligonucleotide
  Sense strand starting at position 3280 of SEQ ID NO: 1884341
gcaauaucuuacucaguug

SEQ ID NO: 2258447 - RNA, 19 nt, Artificial Sequence
  Description of Artificial Sequence: Synthetic oligonucleotide
  Antisense strand to SEQ ID NO: 2258446
caacugaguaagauauugc

SEQ ID NO: 2258448 - RNA, 19 nt, Artificial Sequence
  Description of Artificial Sequence: Synthetic oligonucleotide
  Sense strand starting at position 3287 of SEQ ID NO: 1884341
cuuacucaguuguuugaau

SEQ ID NO: 2258449 - RNA, 19 nt, Artificial Sequence
  Description of Artificial Sequence: Synthetic oligonucleotide
  Antisense strand to SEQ ID NO: 2258448
auucaaacaacugaguaag

SEQ ID NO: 2258450 - RNA, 19 nt, Artificial Sequence
  Description of Artificial Sequence: Synthetic oligonucleotide
  Sense strand starting at position 3288 of SEQ ID NO: 1884341
uuacucaguuguuugaauu

SEQ ID NO: 2258451 - RNA, 19 nt, Artificial Sequence
  Description of Artificial Sequence: Synthetic oligonucleotide
  Antisense strand to SEQ ID NO: 2258450
aauucaaacaacugaguaa

SEQ ID NO: 2258452 - RNA, 19 nt, Artificial Sequence
  Description of Artificial Sequence: Synthetic oligonucleotide
  Sense strand starting at position 3289 of SEQ ID NO: 1884341
uacucaguuguuugaauug

SEQ ID NO: 2258453 - RNA, 19 nt, Artificial Sequence
  Description of Artificial Sequence: Synthetic oligonucleotide
  Antisense strand to SEQ ID NO: 2258452
caauucaaacaacugagua

SEQ ID NO: 2258454 - RNA, 19 nt, Artificial Sequence
  Description of Artificial Sequence: Synthetic oligonucleotide
  Sense strand starting at position 3453 of SEQ ID NO: 1884341
aguagauauccucgaggau

SEQ ID NO: 2258455 - RNA, 19 nt, Artificial Sequence
  Description of Artificial Sequence: Synthetic oligonucleotide
  Antisense strand to SEQ ID NO: 2258454
auccucgaggauaucuacu

SEQ ID NO: 2258456 - RNA, 19 nt, Artificial Sequence
  Description of Artificial Sequence: Synthetic oligonucleotide
  Sense strand starting at position 3466 of SEQ ID NO: 1884341
gaggauagcugcuucuaua

SEQ ID NO: 2258457 - RNA, 19 nt, Artificial Sequence
  Description of Artificial Sequence: Synthetic oligonucleotide
  Antisense strand to SEQ ID NO: 2258456
uauagaagcagcuauccuc

SEQ ID NO: 2258458 - RNA, 19 nt, Artificial Sequence
  Description of Artificial Sequence: Synthetic oligonucleotide
  Sense strand starting at position 3582 of SEQ ID NO: 1884341
acaaauauugagugaguga

SEQ ID NO: 2258459 - RNA, 19 nt, Artificial Sequence
  Description of Artificial Sequence: Synthetic oligonucleotide
  Antisense strand to SEQ ID NO: 2258458
ucacucacucaauauuugu

SEQ ID NO: 2258460 - RNA, 19 nt, Artificial Sequence
  Description of Artificial Sequence: Synthetic oligonucleotide
  Sense strand starting at position 3589 of SEQ ID NO: 1884341
uugagugagugagugaaua

SEQ ID NO: 2258461 - RNA, 19 nt, Artificial Sequence
  Description of Artificial Sequence: Synthetic oligonucleotide
  Antisense strand to SEQ ID NO: 2258460
uauucacucacucacucaa

SEQ ID NO: 2258462 - RNA, 19 nt, Artificial Sequence
  Description of Artificial Sequence: Synthetic oligonucleotide
  Sense strand starting at position 3601 of SEQ ID NO: 1884341
gugaauaaagucuacaguu

SEQ ID NO: 2258463 - RNA, 19 nt, Artificial Sequence
  Description of Artificial Sequence: Synthetic oligonucleotide
  Antisense strand to SEQ ID NO: 2258462
aacuguagacuuuauucac

SEQ ID NO: 2258464 - RNA, 19 nt, Artificial Sequence
  Description of Artificial Sequence: Synthetic oligonucleotide
  Sense strand starting at position 3682 of SEQ ID NO: 1884341
aaguaugaccugugguauc

SEQ ID NO: 2258465 - RNA, 19 nt, Artificial Sequence
  Description of Artificial Sequence: Synthetic oligonucleotide
  Antisense strand to SEQ ID NO: 2258464
gauaccacaggucauacuu

SEQ ID NO: 2258466 - RNA, 19 nt, Artificial Sequence
  Description of Artificial Sequence: Synthetic oligonucleotide
  Sense strand starting at position 3787 of SEQ ID NO: 1884341
gugauauauguauacucug

SEQ ID NO: 2258467 - RNA, 19 nt, Artificial Sequence
  Description of Artificial Sequence: Synthetic oligonucleotide
  Antisense strand to SEQ ID NO: 2258466
cagaguauacauauaucac

SEQ ID NO: 2258468 - RNA, 19 nt, Artificial Sequence
  Description of Artificial Sequence: Synthetic oligonucleotide
  Sense strand starting at position 421 of SEQ ID NO: 1884342
ggaugcuaaagugguaagu

SEQ ID NO: 2258469 - RNA, 19 nt, Artificial Sequence
  Description of Artificial Sequence: Synthetic oligonucleotide
  Antisense strand to SEQ ID NO: 2258468
acuuaccacuuuagcaucc

SEQ ID NO: 2258470 - RNA, 19 nt, Artificial Sequence
  Description of Artificial Sequence: Synthetic oligonucleotide
  Sense strand starting at position 491 of SEQ ID NO: 1884342
guugccuuucugucaguca

SEQ ID NO: 2258471 - RNA, 19 nt, Artificial Sequence
  Description of Artificial Sequence: Synthetic oligonucleotide
  Antisense strand to SEQ ID NO: 2258470
ugacugacagaaaggcaac

SEQ ID NO: 2258472 - RNA, 19 nt, Artificial Sequence
  Description of Artificial Sequence: Synthetic oligonucleotide
  Sense strand starting at position 535 of SEQ ID NO: 1884342
gugauauuccauugcagag

SEQ ID NO: 2258473 - RNA, 19 nt, Artificial Sequence
  Description of Artificial Sequence: Synthetic oligonucleotide
  Antisense strand to SEQ ID NO: 2258472
cucugcaauggaauaucac

SEQ ID NO: 2258474 - RNA, 19 nt, Artificial Sequence
  Description of Artificial Sequence: Synthetic oligonucleotide
  Sense strand starting at position 733 of SEQ ID NO: 1884342
gggaacaguucacuagguu

SEQ ID NO: 2258475 - RNA, 19 nt, Artificial Sequence
  Description of Artificial Sequence: Synthetic oligonucleotide
  Antisense strand to SEQ ID NO: 2258474
aaccuagugaacuguuccc

SEQ ID NO: 2258476 - RNA, 19 nt, Artificial Sequence
  Description of Artificial Sequence: Synthetic oligonucleotide
  Sense strand starting at position 817 of SEQ ID NO: 1884342
ggaagagcaguuugagaag

SEQ ID NO: 2258477 - RNA, 19 nt, Artificial Sequence
  Description of Artificial Sequence: Synthetic oligonucleotide
  Antisense strand to SEQ ID NO: 2258476
cuucucaaacugcucuucc

SEQ ID NO: 2258478 - RNA, 19 nt, Artificial Sequence
  Description of Artificial Sequence: Synthetic oligonucleotide
  Sense strand starting at position 1581 of SEQ ID NO: 1884342
gaaguuuaauuaccagagu

SEQ ID NO: 2258479 - RNA, 19 nt, Artificial Sequence
  Description of Artificial Sequence: Synthetic oligonucleotide
  Antisense strand to SEQ ID NO: 2258478
acucugguaauuaaacuuc

SEQ ID NO: 2258480 - RNA, 19 nt, Artificial Sequence
  Description of Artificial Sequence: Synthetic oligonucleotide
  Sense strand starting at position 1584 of SEQ ID NO: 1884342
guuuaauuaccagaguuac

SEQ ID NO: 2258481 - RNA, 19 nt, Artificial Sequence
  Description of Artificial Sequence: Synthetic oligonucleotide
  Antisense strand to SEQ ID NO: 2258480
guaacucugguaauuaaac

SEQ ID NO: 2258482 - RNA, 19 nt, Artificial Sequence
  Description of Artificial Sequence: Synthetic oligonucleotide
  Sense strand starting at position 1673 of SEQ ID NO: 1884342
cugagauguugagcugaaa

SEQ ID NO: 2258483 - RNA, 19 nt, Artificial Sequence
  Description of Artificial Sequence: Synthetic oligonucleotide
  Antisense strand to SEQ ID NO: 2258482
uuucagcucaacaucucag

SEQ ID NO: 2258484 - RNA, 19 nt, Artificial Sequence
  Description of Artificial Sequence: Synthetic oligonucleotide
  Sense strand starting at position 1852 of SEQ ID NO: 1884342
gcauuuaacguuuagcauu

SEQ ID NO: 2258485 - RNA, 19 nt, Artificial Sequence
  Description of Artificial Sequence: Synthetic oligonucleotide
  Antisense strand to SEQ ID NO: 2258484
aaugcuaaacguuaaaugc

SEQ ID NO: 2258486 - RNA, 19 nt, Artificial Sequence
  Description of Artificial Sequence: Synthetic oligonucleotide
  Sense strand starting at position 2413 of SEQ ID NO: 1884342
cuccgacugcuccagacau

SEQ ID NO: 2258487 - RNA, 19 nt, Artificial Sequence
  Description of Artificial Sequence: Synthetic oligonucleotide
  Antisense strand to SEQ ID NO: 2258486
augucuggagcagucggag

SEQ ID NO: 2258488 - RNA, 19 nt, Artificial Sequence
  Description of Artificial Sequence: Synthetic oligonucleotide
  Sense strand starting at position 2415 of SEQ ID NO: 1884342
ccgacugcuccagacaugu

SEQ ID NO: 2258489 - RNA, 19 nt, Artificial Sequence
  Description of Artificial Sequence: Synthetic oligonucleotide
  Antisense strand to SEQ ID NO: 2258488
acaugucuggagcagucgg

SEQ ID NO: 2258490 - RNA, 19 nt, Artificial Sequence
  Description of Artificial Sequence: Synthetic oligonucleotide
  Sense strand starting at position 2542 of SEQ ID NO: 1884342
cucucuuaggcaugaauac

SEQ ID NO: 2258491 - RNA, 19 nt, Artificial Sequence
  Description of Artificial Sequence: Synthetic oligonucleotide
  Antisense strand to SEQ ID NO: 2258490
guauucaugccuaagagag

SEQ ID NO: 2258492 - RNA, 19 nt, Artificial Sequence
  Description of Artificial Sequence: Synthetic oligonucleotide
  Sense strand starting at position 2631 of SEQ ID NO: 1884342
augggaugcuuuccuuuga

SEQ ID NO: 2258493 - RNA, 19 nt, Artificial Sequence
  Description of Artificial Sequence: Synthetic oligonucleotide
  Antisense strand to SEQ ID NO: 2258492
ucaaaggaaagcaucccau

SEQ ID NO: 2258494 - RNA, 19 nt, Artificial Sequence
  Description of Artificial Sequence: Synthetic oligonucleotide
  Sense strand starting at position 2632 of SEQ ID NO: 1884342
ugggaugcuuuccuuugau

SEQ ID NO: 2258495 - RNA, 19 nt, Artificial Sequence
  Description of Artificial Sequence: Synthetic oligonucleotide
  Antisense strand to SEQ ID NO: 2258494
aucaaaggaaagcauccca

SEQ ID NO: 2258496 - RNA, 19 nt, Artificial Sequence
  Description of Artificial Sequence: Synthetic oligonucleotide
  Sense strand starting at position 2657 of SEQ ID NO: 1884342
uugguauuagaguggauag

SEQ ID NO: 2258497 - RNA, 19 nt, Artificial Sequence
  Description of Artificial Sequence: Synthetic oligonucleotide
  Antisense strand to SEQ ID NO: 2258496
cuauccacucuaauaccaa

SEQ ID NO: 2258498 - RNA, 19 nt, Artificial Sequence
  Description of Artificial Sequence: Synthetic oligonucleotide
  Sense strand starting at position 2753 of SEQ ID NO: 1884342
agaaauagguuacuaguuu

SEQ ID NO: 2258499 - RNA, 19 nt, Artificial Sequence
  Description of Artificial Sequence: Synthetic oligonucleotide
  Antisense strand to SEQ ID NO: 2258498
aaacuaguaaccuauuucu

SEQ ID NO: 2258500 - RNA, 19 nt, Artificial Sequence
  Description of Artificial Sequence: Synthetic oligonucleotide
  Sense strand starting at position 2757 of SEQ ID NO: 1884342
auagguuacuaguuugaga

SEQ ID NO: 2258501 - RNA, 19 nt, Artificial Sequence
  Description of Artificial Sequence: Synthetic oligonucleotide
  Antisense strand to SEQ ID NO: 2258500
ucucaaacuaguaaccuau

SEQ ID NO: 2258502 - RNA, 19 nt, Artificial Sequence
  Description of Artificial Sequence: Synthetic oligonucleotide
  Sense strand starting at position 2759 of SEQ ID NO: 1884342
agguuacuaguuugagaaa

SEQ ID NO: 2258503 - RNA, 19 nt, Artificial Sequence
  Description of Artificial Sequence: Synthetic oligonucleotide
  Antisense strand to SEQ ID NO: 2258502
uuucucaaacuaguaaccu

SEQ ID NO: 2258504 - RNA, 19 nt, Artificial Sequence
  Description of Artificial Sequence: Synthetic oligonucleotide
  Sense strand starting at position 2810 of SEQ ID NO: 1884342
acuuaaugagagcgaguga

SEQ ID NO: 2258505 - RNA, 19 nt, Artificial Sequence
  Description of Artificial Sequence: Synthetic oligonucleotide
  Antisense strand to SEQ ID NO: 2258504
ucacucgcucucauuaagu

SEQ ID NO: 2258506 - RNA, 19 nt, Artificial Sequence
  Description of Artificial Sequence: Synthetic oligonucleotide
  Sense strand starting at position 2811 of SEQ ID NO: 1884342
cuuaaugagagcgagugaa

SEQ ID NO: 2258507 - RNA, 19 nt, Artificial Sequence
  Description of Artificial Sequence: Synthetic oligonucleotide
  Antisense strand to SEQ ID NO: 2258506
uucacucgcucucauuaag

SEQ ID NO: 2258508 - RNA, 19 nt, Artificial Sequence
  Description of Artificial Sequence: Synthetic oligonucleotide
  Sense strand starting at position 2925 of SEQ ID NO: 1884342
auaaacauugcagguauaa

SEQ ID NO: 2258509 - RNA, 19 nt, Artificial Sequence
  Description of Artificial Sequence: Synthetic oligonucleotide
  Antisense strand to SEQ ID NO: 2258508
uuauaccugcaauguuuau

SEQ ID NO: 2258510 - RNA, 19 nt, Artificial Sequence
  Description of Artificial Sequence: Synthetic oligonucleotide
  Sense strand starting at position 2998 of SEQ ID NO: 1884342
aguaaauaugagugacaac

SEQ ID NO: 2258511 - RNA, 19 nt, Artificial Sequence
  Description of Artificial Sequence: Synthetic oligonucleotide
  Antisense strand to SEQ ID NO: 2258510
guugucacucauauuuacu

SEQ ID NO: 2258512 - RNA, 19 nt, Artificial Sequence
  Description of Artificial Sequence: Synthetic oligonucleotide
  Sense strand starting at position 3041 of SEQ ID NO: 1884342
uagguuagaucagugugau

SEQ ID NO: 2258513 - RNA, 19 nt, Artificial Sequence
  Description of Artificial Sequence: Synthetic oligonucleotide
  Antisense strand to SEQ ID NO: 2258512
aucacacugaucuaaccua

SEQ ID NO: 2258514 - RNA, 19 nt, Artificial Sequence
  Description of Artificial Sequence: Synthetic oligonucleotide
  Sense strand starting at position 3042 of SEQ ID NO: 1884342
agguuagaucagugugauu

SEQ ID NO: 2258515 - RNA, 19 nt, Artificial Sequence
  Description of Artificial Sequence: Synthetic oligonucleotide
  Antisense strand to SEQ ID NO: 2258514
aaucacacugaucuaaccu

SEQ ID NO: 2258516 - RNA, 19 nt, Artificial Sequence
  Description of Artificial Sequence: Synthetic oligonucleotide
  Sense strand starting at position 3049 of SEQ ID NO: 1884342
aucagugugauuuguuucu

SEQ ID NO: 2258517 - RNA, 19 nt, Artificial Sequence
  Description of Artificial Sequence: Synthetic oligonucleotide
  Antisense strand to SEQ ID NO: 2258516
agaaacaaaucacacugau

SEQ ID NO: 2258518 - RNA, 19 nt, Artificial Sequence
  Description of Artificial Sequence: Synthetic oligonucleotide
  Sense strand starting at position 3051 of SEQ ID NO: 1884342
cagugugauuuguuucuuu

SEQ ID NO: 2258519 - RNA, 19 nt, Artificial Sequence
  Description of Artificial Sequence: Synthetic oligonucleotide
  Antisense strand to SEQ ID NO: 2258518
aaagaaacaaaucacacug

SEQ ID NO: 2258520 - RNA, 19 nt, Artificial Sequence
  Description of Artificial Sequence: Synthetic oligonucleotide
  Sense strand starting at position 3301 of SEQ ID NO: 1884342
agcuuauaacguggaagau

SEQ ID NO: 2258521 - RNA, 19 nt, Artificial Sequence
  Description of Artificial Sequence: Synthetic oligonucleotide
  Antisense strand to SEQ ID NO: 2258520
aucuuccacguuauaagcu

SEQ ID NO: 2258522 - RNA, 19 nt, Artificial Sequence
  Description of Artificial Sequence: Synthetic oligonucleotide
  Sense strand starting at position 3302 of SEQ ID NO: 1884342
gcuuauaacguggaagaug

SEQ ID NO: 2258523 - RNA, 19 nt, Artificial Sequence
  Description of Artificial Sequence: Synthetic oligonucleotide
  Antisense strand to SEQ ID NO: 2258522
caucuuccacguuauaagc

SEQ ID NO: 2258524 - RNA, 19 nt, Artificial Sequence
  Description of Artificial Sequence: Synthetic oligonucleotide
  Sense strand starting at position 3314 of SEQ ID NO: 1884342
gaagauguuauuggagguu

SEQ ID NO: 2258525 - RNA, 19 nt, Artificial Sequence
  Description of Artificial Sequence: Synthetic oligonucleotide
  Antisense strand to SEQ ID NO: 2258524
aaccuccaauaacaucuuc

SEQ ID NO: 2258526 - RNA, 19 nt, Artificial Sequence
  Description of Artificial Sequence: Synthetic oligonucleotide
  Sense strand starting at position 3354 of SEQ ID NO: 1884342
gagcguucuauugcauagu

SEQ ID NO: 2258527 - RNA, 19 nt, Artificial Sequence
  Description of Artificial Sequence: Synthetic oligonucleotide
  Antisense strand to SEQ ID NO: 2258526
acuaugcaauagaacgcuc

SEQ ID NO: 2258528 - RNA, 19 nt, Artificial Sequence
  Description of Artificial Sequence: Synthetic oligonucleotide
  Sense strand starting at position 3363 of SEQ ID NO: 1884342
auugcauagucuguaagac

SEQ ID NO: 2258529 - RNA, 19 nt, Artificial Sequence
  Description of Artificial Sequence: Synthetic oligonucleotide
  Antisense strand to SEQ ID NO: 2258528
gucuuacagacuaugcaau

SEQ ID NO: 2258530 - RNA, 19 nt, Artificial Sequence
  Description of Artificial Sequence: Synthetic oligonucleotide
  Sense strand starting at position 3364 of SEQ ID NO: 1884342
uugcauagucuguaagacu

SEQ ID NO: 2258531 - RNA, 19 nt, Artificial Sequence
  Description of Artificial Sequence: Synthetic oligonucleotide
  Antisense strand to SEQ ID NO: 2258530
agucuuacagacuaugcaa

SEQ ID NO: 2258532 - RNA, 19 nt, Artificial Sequence
  Description of Artificial Sequence: Synthetic oligonucleotide
  Sense strand starting at position 3421 of SEQ ID NO: 1884342
uguguuugcccgaggacug

SEQ ID NO: 2258533 - RNA, 19 nt, Artificial Sequence
  Description of Artificial Sequence: Synthetic oligonucleotide
  Antisense strand to SEQ ID NO: 2258532
caguccucgggcaaacaca

SEQ ID NO: 2258534 - RNA, 19 nt, Artificial Sequence
  Description of Artificial Sequence: Synthetic oligonucleotide
  Sense strand starting at position 3447 of SEQ ID NO: 1884342
uccagaaaucuucgcacua

SEQ ID NO: 2258535 - RNA, 19 nt, Artificial Sequence
  Description of Artificial Sequence: Synthetic oligonucleotide
  Antisense strand to SEQ ID NO: 2258534
uagugcgaagauuucugga

SEQ ID NO: 2258536 - RNA, 19 nt, Artificial Sequence
  Description of Artificial Sequence: Synthetic oligonucleotide
  Sense strand starting at position 3448 of SEQ ID NO: 1884342
ccagaaaucuucgcacuau

SEQ ID NO: 2258537 - RNA, 19 nt, Artificial Sequence
  Description of Artificial Sequence: Synthetic oligonucleotide
  Antisense strand to SEQ ID NO: 2258536
auagugcgaagauuucugg

SEQ ID NO: 2258538 - RNA, 19 nt, Artificial Sequence
  Description of Artificial Sequence: Synthetic oligonucleotide
  Sense strand starting at position 3665 of SEQ ID NO: 1884342
ccaugaccucuugaauguu

SEQ ID NO: 2258539 - RNA, 19 nt, Artificial Sequence
  Description of Artificial Sequence: Synthetic oligonucleotide
  Antisense strand to SEQ ID NO: 2258538
aacauucaagaggucaugg

SEQ ID NO: 2258540 - RNA, 19 nt, Artificial Sequence
  Description of Artificial Sequence: Synthetic oligonucleotide
  Sense strand starting at position 3694 of SEQ ID NO: 1884342
gguguuucagugggacaga

SEQ ID NO: 2258541 - RNA, 19 nt, Artificial Sequence
  Description of Artificial Sequence: Synthetic oligonucleotide
  Antisense strand to SEQ ID NO: 2258540
ucugucccacugaaacacc

SEQ ID NO: 2258542 - RNA, 19 nt, Artificial Sequence
  Description of Artificial Sequence: Synthetic oligonucleotide
  Sense strand starting at position 3817 of SEQ ID NO: 1884342
gacaacucuucgccuggaa

SEQ ID NO: 2258543 - RNA, 19 nt, Artificial Sequence
  Description of Artificial Sequence: Synthetic oligonucleotide
  Antisense strand to SEQ ID NO: 2258542
uuccaggcgaagaguuguc

SEQ ID NO: 2258544 - RNA, 19 nt, Artificial Sequence
  Description of Artificial Sequence: Synthetic oligonucleotide
  Sense strand starting at position 3821 of SEQ ID NO: 1884342
acucuucgccuggaaucaa

SEQ ID NO: 2258545 - RNA, 19 nt, Artificial Sequence
  Description of Artificial Sequence: Synthetic oligonucleotide
  Antisense strand to SEQ ID NO: 2258544
uugauuccaggcgaagagu

SEQ ID NO: 2258546 - RNA, 19 nt, Artificial Sequence
  Description of Artificial Sequence: Synthetic oligonucleotide
  Sense strand starting at position 3879 of SEQ ID NO: 1884342
cugauagauugagaacaga

SEQ ID NO: 2258547 - RNA, 19 nt, Artificial Sequence
  Description of Artificial Sequence: Synthetic oligonucleotide
  Antisense strand to SEQ ID NO: 2258546
ucuguucucaaucuaucag

SEQ ID NO: 2258548 - RNA, 19 nt, Artificial Sequence
  Description of Artificial Sequence: Synthetic oligonucleotide
  Sense strand starting at position 32 of SEQ ID NO: 1884343
guguaaucucaccaccuga

SEQ ID NO: 2258549 - RNA, 19 nt, Artificial Sequence
  Description of Artificial Sequence: Synthetic oligonucleotide
  Antisense strand to SEQ ID NO: 2258548
ucagguggugagauuacac

SEQ ID NO: 2258550 - RNA, 19 nt, Artificial Sequence
  Description of Artificial Sequence: Synthetic oligonucleotide
  Sense strand starting at position 70 of SEQ ID NO: 1884343
uuggccugugcauauaaga

SEQ ID NO: 2258551 - RNA, 19 nt, Artificial Sequence
  Description of Artificial Sequence: Synthetic oligonucleotide
  Antisense strand to SEQ ID NO: 2258550
ucuuauaugcacaggccaa

SEQ ID NO: 2258552 - RNA, 19 nt, Artificial Sequence
  Description of Artificial Sequence: Synthetic oligonucleotide
  Sense strand starting at position 126 of SEQ ID NO: 1884343
gcagcacuagcagauuaua

SEQ ID NO: 2258553 - RNA, 19 nt, Artificial Sequence
  Description of Artificial Sequence: Synthetic oligonucleotide
  Antisense strand to SEQ ID NO: 2258552
uauaaucugcuagugcugc

SEQ ID NO: 2258554 - RNA, 19 nt, Artificial Sequence
  Description of Artificial Sequence: Synthetic oligonucleotide
  Sense strand starting at position 129 of SEQ ID NO: 1884343
gcacuagcagauuauacaa

SEQ ID NO: 2258555 - RNA, 19 nt, Artificial Sequence
  Description of Artificial Sequence: Synthetic oligonucleotide
  Antisense strand to SEQ ID NO: 2258554
uuguauaaucugcuagugc

SEQ ID NO: 2258556 - RNA, 19 nt, Artificial Sequence
  Description of Artificial Sequence: Synthetic oligonucleotide
  Sense strand starting at position 209 of SEQ ID NO: 1884343
agugguguuacagauuaga

SEQ ID NO: 2258557 - RNA, 19 nt, Artificial Sequence
  Description of Artificial Sequence: Synthetic oligonucleotide
  Antisense strand to SEQ ID NO: 2258556
ucuaaucuguaacaccacu

SEQ ID NO: 2258558 - RNA, 19 nt, Artificial Sequence
  Description of Artificial Sequence: Synthetic oligonucleotide
  Sense strand starting at position 315 of SEQ ID NO: 1884343
cagagaaucuaagugaccu

SEQ ID NO: 2258559 - RNA, 19 nt, Artificial Sequence
  Description of Artificial Sequence: Synthetic oligonucleotide
  Antisense strand to SEQ ID NO: 2258558
aggucacuuagauucucug

SEQ ID NO: 2258560 - RNA, 19 nt, Artificial Sequence
  Description of Artificial Sequence: Synthetic oligonucleotide
  Sense strand starting at position 421 of SEQ ID NO: 1884343
ugcacaauacuuuguaguu

SEQ ID NO: 2258561 - RNA, 19 nt, Artificial Sequence
  Description of Artificial Sequence: Synthetic oligonucleotide
  Antisense strand to SEQ ID NO: 2258560
aacuacaaaguauugugca

SEQ ID NO: 2258562 - RNA, 19 nt, Artificial Sequence
  Description of Artificial Sequence: Synthetic oligonucleotide
  Sense strand starting at position 422 of SEQ ID NO: 1884343
gcacaauacuuuguaguuu

SEQ ID NO: 2258563 - RNA, 19 nt, Artificial Sequence
  Description of Artificial Sequence: Synthetic oligonucleotide
  Antisense strand to SEQ ID NO: 2258562
aaacuacaaaguauugugc

SEQ ID NO: 2258564 - RNA, 19 nt, Artificial Sequence
  Description of Artificial Sequence: Synthetic oligonucleotide
  Sense strand starting at position 571 of SEQ ID NO: 1884343
caaggagccuuccaugaga

SEQ ID NO: 2258565 - RNA, 19 nt, Artificial Sequence
  Description of Artificial Sequence: Synthetic oligonucleotide
  Antisense strand to SEQ ID NO: 2258564
ucucauggaaggcuccuug

SEQ ID NO: 2258566 - RNA, 19 nt, Artificial Sequence
  Description of Artificial Sequence: Synthetic oligonucleotide
  Sense strand starting at position 573 of SEQ ID NO: 1884343
aggagccuuccaugagauu

SEQ ID NO: 2258567 - RNA, 19 nt, Artificial Sequence
  Description of Artificial Sequence: Synthetic oligonucleotide
  Antisense strand to SEQ ID NO: 2258566
aaucucauggaaggcuccu

SEQ ID NO: 2258568 - RNA, 19 nt, Artificial Sequence
  Description of Artificial Sequence: Synthetic oligonucleotide
  Sense strand starting at position 770 of SEQ ID NO: 1884343
gugggaaaccuguguuucu

SEQ ID NO: 2258569 - RNA, 19 nt, Artificial Sequence
  Description of Artificial Sequence: Synthetic oligonucleotide
  Antisense strand to SEQ ID NO: 2258568
agaaacacagguuucccac

SEQ ID NO: 2258570 - RNA, 19 nt, Artificial Sequence
  Description of Artificial Sequence: Synthetic oligonucleotide
  Sense strand starting at position 773 of SEQ ID NO: 1884343
ggaaaccuguguuucuguu

SEQ ID NO: 2258571 - RNA, 19 nt, Artificial Sequence
  Description of Artificial Sequence: Synthetic oligonucleotide
  Antisense strand to SEQ ID NO: 2258570
aacagaaacacagguuucc

SEQ ID NO: 2258572 - RNA, 19 nt, Artificial Sequence
  Description of Artificial Sequence: Synthetic oligonucleotide
  Sense strand starting at position 777 of SEQ ID NO: 1884343
accuguguuucuguuaaga

SEQ ID NO: 2258573 - RNA, 19 nt, Artificial Sequence
  Description of Artificial Sequence: Synthetic oligonucleotide
  Antisense strand to SEQ ID NO: 2258572
ucuuaacagaaacacaggu

SEQ ID NO: 2258574 - RNA, 19 nt, Artificial Sequence
  Description of Artificial Sequence: Synthetic oligonucleotide
  Sense strand starting at position 951 of SEQ ID NO: 1884343
ucugucagcuuucuagaag

SEQ ID NO: 2258575 - RNA, 19 nt, Artificial Sequence
  Description of Artificial Sequence: Synthetic oligonucleotide
  Antisense strand to SEQ ID NO: 2258574
cuucuagaaagcugacaga

SEQ ID NO: 2258576 - RNA, 19 nt, Artificial Sequence
  Description of Artificial Sequence: Synthetic oligonucleotide
  Sense strand starting at position 954 of SEQ ID NO: 1884343
gucagcuuucuagaagccu

SEQ ID NO: 2258577 - RNA, 19 nt, Artificial Sequence
  Description of Artificial Sequence: Synthetic oligonucleotide
  Antisense strand to SEQ ID NO: 2258576
aggcuucuagaaagcugac

SEQ ID NO: 2258578 - RNA, 19 nt, Artificial Sequence
  Description of Artificial Sequence: Synthetic oligonucleotide
  Sense strand starting at position 1072 of SEQ ID NO: 1884343
ugagaugacugucuggaug

SEQ ID NO: 2258579 - RNA, 19 nt, Artificial Sequence
  Description of Artificial Sequence: Synthetic oligonucleotide
  Antisense strand to SEQ ID NO: 2258578
cauccagacagucaucuca

SEQ ID NO: 2258580 - RNA, 19 nt, Artificial Sequence
  Description of Artificial Sequence: Synthetic oligonucleotide
  Sense strand starting at position 1396 of SEQ ID NO: 1884343
gagcucugccugcaggaaa

SEQ ID NO: 2258581 - RNA, 19 nt, Artificial Sequence
  Description of Artificial Sequence: Synthetic oligonucleotide
  Antisense strand to SEQ ID NO: 2258580
uuuccugcaggcagagcuc

SEQ ID NO: 2258582 - RNA, 19 nt, Artificial Sequence
  Description of Artificial Sequence: Synthetic oligonucleotide
  Sense strand starting at position 2061 of SEQ ID NO: 1884343
ccgucccgacggagauauu

SEQ ID NO: 2258583 - RNA, 19 nt, Artificial Sequence
  Description of Artificial Sequence: Synthetic oligonucleotide
  Antisense strand to SEQ ID NO: 2258582
aauaucuccgucgggacgg

SEQ ID NO: 2258584 - RNA, 19 nt, Artificial Sequence
  Description of Artificial Sequence: Synthetic oligonucleotide
  Sense strand starting at position 2595 of SEQ ID NO: 1884343
caaagagcgcgcgaauaua

SEQ ID NO: 2258585 - RNA, 19 nt, Artificial Sequence
  Description of Artificial Sequence: Synthetic oligonucleotide
  Antisense strand to SEQ ID NO: 2258584
uauauucgcgcgcucuuug

SEQ ID NO: 2258586 - RNA, 19 nt, Artificial Sequence
  Description of Artificial Sequence: Synthetic oligonucleotide
  Sense strand starting at position 2848 of SEQ ID NO: 1884343
cccggcucgcccuugauua

SEQ ID NO: 2258587 - RNA, 19 nt, Artificial Sequence
  Description of Artificial Sequence: Synthetic oligonucleotide
  Antisense strand to SEQ ID NO: 2258586
uaaucaagggcgagccggg

SEQ ID NO: 2258588 - RNA, 19 nt, Artificial Sequence
  Description of Artificial Sequence: Synthetic oligonucleotide
  Sense strand starting at position 2876 of SEQ ID NO: 1884343
gcaaauucuugccucagga

SEQ ID NO: 2258589 - RNA, 19 nt, Artificial Sequence
  Description of Artificial Sequence: Synthetic oligonucleotide
  Antisense strand to SEQ ID NO: 2258588
uccugaggcaagaauuugc

SEQ ID NO: 2258590 - RNA, 19 nt, Artificial Sequence
  Description of Artificial Sequence: Synthetic oligonucleotide
  Sense strand starting at position 2889 of SEQ ID NO: 1884343
ucaggaccugugugaaaca

SEQ ID NO: 2258591 - RNA, 19 nt, Artificial Sequence
  Description of Artificial Sequence: Synthetic oligonucleotide
  Antisense strand to SEQ ID NO: 2258590
uguuucacacagguccuga

SEQ ID NO: 2258592 - RNA, 19 nt, Artificial Sequence
  Description of Artificial Sequence: Synthetic oligonucleotide
  Sense strand starting at position 3221 of SEQ ID NO: 1884343
ucaauuaggguccauccua

SEQ ID NO: 2258593 - RNA, 19 nt, Artificial Sequence
  Description of Artificial Sequence: Synthetic oligonucleotide
  Antisense strand to SEQ ID NO: 2258592
uaggauggacccuaauuga

SEQ ID NO: 2258594 - RNA, 19 nt, Artificial Sequence
  Description of Artificial Sequence: Synthetic oligonucleotide
  Sense strand starting at position 3289 of SEQ ID NO: 1884343
aaggucauauccuuaggua

SEQ ID NO: 2258595 - RNA, 19 nt, Artificial Sequence
  Description of Artificial Sequence: Synthetic oligonucleotide
  Antisense strand to SEQ ID NO: 2258594
uaccuaaggauaugaccuu

SEQ ID NO: 2258596 - RNA, 19 nt, Artificial Sequence
  Description of Artificial Sequence: Synthetic oligonucleotide
  Sense strand starting at position 3290 of SEQ ID NO: 1884343
aggucauauccuuagguac

SEQ ID NO: 2258597 - RNA, 19 nt, Artificial Sequence
  Description of Artificial Sequence: Synthetic oligonucleotide
  Antisense strand to SEQ ID NO: 2258596
guaccuaaggauaugaccu

SEQ ID NO: 2258598 - RNA, 19 nt, Artificial Sequence
  Description of Artificial Sequence: Synthetic oligonucleotide
  Sense strand starting at position 3326 of SEQ ID NO: 1884343
acauaagaaucagggugaa

SEQ ID NO: 2258599 - RNA, 19 nt, Artificial Sequence
  Description of Artificial Sequence: Synthetic oligonucleotide
  Antisense strand to SEQ ID NO: 2258598
uucacccugauucuuaugu

SEQ ID NO: 2258600 - RNA, 19 nt, Artificial Sequence
  Description of Artificial Sequence: Synthetic oligonucleotide
  Sense strand starting at position 3407 of SEQ ID NO: 1884343
aaauucuugcugugugaau

SEQ ID NO: 2258601 - RNA, 19 nt, Artificial Sequence
  Description of Artificial Sequence: Synthetic oligonucleotide
  Antisense strand to SEQ ID NO: 2258600
auucacacagcaagaauuu

SEQ ID NO: 2258602 - RNA, 19 nt, Artificial Sequence
  Description of Artificial Sequence: Synthetic oligonucleotide
  Sense strand starting at position 3408 of SEQ ID NO: 1884343
aauucuugcugugugaaug

SEQ ID NO: 2258603 - RNA, 19 nt, Artificial Sequence
  Description of Artificial Sequence: Synthetic oligonucleotide
  Antisense strand to SEQ ID NO: 2258602
cauucacacagcaagaauu

SEQ ID NO: 2258604 - RNA, 19 nt, Artificial Sequence
  Description of Artificial Sequence: Synthetic oligonucleotide
  Sense strand starting at position 3409 of SEQ ID NO: 1884343
auucuugcugugugaauga

SEQ ID NO: 2258605 - RNA, 19 nt, Artificial Sequence
  Description of Artificial Sequence: Synthetic oligonucleotide
  Antisense strand to SEQ ID NO: 2258604
ucauucacacagcaagaau

SEQ ID NO: 2258606 - RNA, 19 nt, Artificial Sequence
  Description of Artificial Sequence: Synthetic oligonucleotide
  Sense strand starting at position 3414 of SEQ ID NO: 1884343
ugcugugugaaugaauaaa

SEQ ID NO: 2258607 - RNA, 19 nt, Artificial Sequence
  Description of Artificial Sequence: Synthetic oligonucleotide
  Antisense strand to SEQ ID NO: 2258606
uuuauucauucacacagca

SEQ ID NO: 2258608 - RNA, 19 nt, Artificial Sequence
  Description of Artificial Sequence: Synthetic oligonucleotide
  Sense strand starting at position 3496 of SEQ ID NO: 1884343
uugguuauuauaggcagau

SEQ ID NO: 2258609 - RNA, 19 nt, Artificial Sequence
  Description of Artificial Sequence: Synthetic oligonucleotide
  Antisense strand to SEQ ID NO: 2258608
aucugccuauaauaaccaa

SEQ ID NO: 2258610 - RNA, 19 nt, Artificial Sequence
  Description of Artificial Sequence: Synthetic oligonucleotide
  Sense strand starting at position 3497 of SEQ ID NO: 1884343
ugguuauuauaggcagaua

SEQ ID NO: 2258611 - RNA, 19 nt, Artificial Sequence
  Description of Artificial Sequence: Synthetic oligonucleotide
  Antisense strand to SEQ ID NO: 2258610
uaucugccuauaauaacca

SEQ ID NO: 2258612 - RNA, 19 nt, Artificial Sequence
  Description of Artificial Sequence: Synthetic oligonucleotide
  Sense strand starting at position 3498 of SEQ ID NO: 1884343
gguuauuauaggcagauau

SEQ ID NO: 2258613 - RNA, 19 nt, Artificial Sequence
  Description of Artificial Sequence: Synthetic oligonucleotide
  Antisense strand to SEQ ID NO: 2258612
auaucugccuauaauaacc

SEQ ID NO: 2258614 - RNA, 19 nt, Artificial Sequence
  Description of Artificial Sequence: Synthetic oligonucleotide
  Sense strand starting at position 3525 of SEQ ID NO: 1884343
uugacaaugcgauaagugu

SEQ ID NO: 2258615 - RNA, 19 nt, Artificial Sequence
  Description of Artificial Sequence: Synthetic oligonucleotide
  Antisense strand to SEQ ID NO: 2258614
acacuuaucgcauugucaa

SEQ ID NO: 2258616 - RNA, 19 nt, Artificial Sequence
  Description of Artificial Sequence: Synthetic oligonucleotide
  Sense strand starting at position 3729 of SEQ ID NO: 1884343
aucccuucuuugccaguua

SEQ ID NO: 2258617 - RNA, 19 nt, Artificial Sequence
  Description of Artificial Sequence: Synthetic oligonucleotide
  Antisense strand to SEQ ID NO: 2258616
uaacuggcaaagaagggau

SEQ ID NO: 2258618 - RNA, 19 nt, Artificial Sequence
  Description of Artificial Sequence: Synthetic oligonucleotide
  Sense strand starting at position 3769 of SEQ ID NO: 1884343
cguaauuuguaacuuauuc

SEQ ID NO: 2258619 - RNA, 19 nt, Artificial Sequence
  Description of Artificial Sequence: Synthetic oligonucleotide
  Antisense strand to SEQ ID NO: 2258618
gaauaaguuacaaauuacg

SEQ ID NO: 2258620 - RNA, 19 nt, Artificial Sequence
  Description of Artificial Sequence: Synthetic oligonucleotide
  Sense strand starting at position 3825 of SEQ ID NO: 1884343
ugugguguagucugaugaa

SEQ ID NO: 2258621 - RNA, 19 nt, Artificial Sequence
  Description of Artificial Sequence: Synthetic oligonucleotide
  Antisense strand to SEQ ID NO: 2258620
uucaucagacuacaccaca

SEQ ID NO: 2258622 - RNA, 19 nt, Artificial Sequence
  Description of Artificial Sequence: Synthetic oligonucleotide
  Sense strand starting at position 3852 of SEQ ID NO: 1884343
ugaauugcaguauaaccaa

SEQ ID NO: 2258623 - RNA, 19 nt, Artificial Sequence
  Description of Artificial Sequence: Synthetic oligonucleotide
  Antisense strand to SEQ ID NO: 2258622
uugguuauacugcaauuca

SEQ ID NO: 2258624 - RNA, 19 nt, Artificial Sequence
  Description of Artificial Sequence: Synthetic oligonucleotide
  Sense strand starting at position 3893 of SEQ ID NO: 1884343
ugccguuaugguuagugau

SEQ ID NO: 2258625 - RNA, 19 nt, Artificial Sequence
  Description of Artificial Sequence: Synthetic oligonucleotide
  Antisense strand to SEQ ID NO: 2258624
aucacuaaccauaacggca

SEQ ID NO: 2258626 - RNA, 19 nt, Artificial Sequence
  Description of Artificial Sequence: Synthetic oligonucleotide
  Sense strand starting at position 3895 of SEQ ID NO: 1884343
ccguuaugguuagugauuu

SEQ ID NO: 2258627 - RNA, 19 nt, Artificial Sequence
  Description of Artificial Sequence: Synthetic oligonucleotide
  Antisense strand to SEQ ID NO: 2258626
aaaucacuaaccauaacgg

SEQ ID NO: 2258628 - RNA, 19 nt, Artificial Sequence
  Description of Artificial Sequence: Synthetic oligonucleotide
  Sense strand starting at position 448 of SEQ ID NO: 1884344
ucggcaaaguacuuaaaua

SEQ ID NO: 2258629 - RNA, 19 nt, Artificial Sequence
  Description of Artificial Sequence: Synthetic oligonucleotide
  Antisense strand to SEQ ID NO: 2258628
uauuuaaguacuuugccga

SEQ ID NO: 2258630 - RNA, 19 nt, Artificial Sequence
  Description of Artificial Sequence: Synthetic oligonucleotide
  Sense strand starting at position 576 of SEQ ID NO: 1884344
acaccuuuaggaugacuau

SEQ ID NO: 2258631 - RNA, 19 nt, Artificial Sequence
  Description of Artificial Sequence: Synthetic oligonucleotide
  Antisense strand to SEQ ID NO: 2258630
auagucauccuaaaggugu

SEQ ID NO: 2258632 - RNA, 19 nt, Artificial Sequence
  Description of Artificial Sequence: Synthetic oligonucleotide
  Sense strand starting at position 892 of SEQ ID NO: 1884344
ugucuuacaugaccucauu

SEQ ID NO: 2258633 - RNA, 19 nt, Artificial Sequence
  Description of Artificial Sequence: Synthetic oligonucleotide
  Antisense strand to SEQ ID NO: 2258632
aaugaggucauguaagaca

SEQ ID NO: 2258634 - RNA, 19 nt, Artificial Sequence
  Description of Artificial Sequence: Synthetic oligonucleotide
  Sense strand starting at position 1065 of SEQ ID NO: 1884344
uauguuacuggauagaguu

SEQ ID NO: 2258635 - RNA, 19 nt, Artificial Sequence
  Description of Artificial Sequence: Synthetic oligonucleotide
  Antisense strand to SEQ ID NO: 2258634
aacucuauccaguaacaua

SEQ ID NO: 2258636 - RNA, 19 nt, Artificial Sequence
  Description of Artificial Sequence: Synthetic oligonucleotide
  Sense strand starting at position 1075 of SEQ ID NO: 1884344
gauagaguuguccagguuc

SEQ ID NO: 2258637 - RNA, 19 nt, Artificial Sequence
  Description of Artificial Sequence: Synthetic oligonucleotide
  Antisense strand to SEQ ID NO: 2258636
gaaccuggacaacucuauc

SEQ ID NO: 2258638 - RNA, 19 nt, Artificial Sequence
  Description of Artificial Sequence: Synthetic oligonucleotide
  Sense strand starting at position 1095 of SEQ ID NO: 1884344
ugcccuguugaacaaagaa

SEQ ID NO: 2258639 - RNA, 19 nt, Artificial Sequence
  Description of Artificial Sequence: Synthetic oligonucleotide
  Antisense strand to SEQ ID NO: 2258638
uucuuuguucaacagggca

SEQ ID NO: 2258640 - RNA, 19 nt, Artificial Sequence
  Description of Artificial Sequence: Synthetic oligonucleotide
  Sense strand starting at position 1328 of SEQ ID NO: 1884344
gguuauacccuaugaaaga

SEQ ID NO: 2258641 - RNA, 19 nt, Artificial Sequence
  Description of Artificial Sequence: Synthetic oligonucleotide
  Antisense strand to SEQ ID NO: 2258640
ucuuucauaggguauaacc

SEQ ID NO: 2258642 - RNA, 19 nt, Artificial Sequence
  Description of Artificial Sequence: Synthetic oligonucleotide
  Sense strand starting at position 1376 of SEQ ID NO: 1884344
ggaaacuucugucuuguaa

SEQ ID NO: 2258643 - RNA, 19 nt, Artificial Sequence
  Description of Artificial Sequence: Synthetic oligonucleotide
  Antisense strand to SEQ ID NO: 2258642
uuacaagacagaaguuucc

SEQ ID NO: 2258644 - RNA, 19 nt, Artificial Sequence
  Description of Artificial Sequence: Synthetic oligonucleotide
  Sense strand starting at position 1388 of SEQ ID NO: 1884344
cuuguaaucacaggaguga

SEQ ID NO: 2258645 - RNA, 19 nt, Artificial Sequence
  Description of Artificial Sequence: Synthetic oligonucleotide
  Antisense strand to SEQ ID NO: 2258644
ucacuccugugauuacaag

SEQ ID NO: 2258646 - RNA, 19 nt, Artificial Sequence
  Description of Artificial Sequence: Synthetic oligonucleotide
  Sense strand starting at position 1622 of SEQ ID NO: 1884344
cauagauauuuagagugua

SEQ ID NO: 2258647 - RNA, 19 nt, Artificial Sequence
  Description of Artificial Sequence: Synthetic oligonucleotide
  Antisense strand to SEQ ID NO: 2258646
uacacucuaaauaucuaug

SEQ ID NO: 2258648 - RNA, 19 nt, Artificial Sequence
  Description of Artificial Sequence: Synthetic oligonucleotide
  Sense strand starting at position 1657 of SEQ ID NO: 1884344
uuauguguaagauaagugu

SEQ ID NO: 2258649 - RNA, 19 nt, Artificial Sequence
  Description of Artificial Sequence: Synthetic oligonucleotide
  Antisense strand to SEQ ID NO: 2258648
acacuuaucuuacacauaa

SEQ ID NO: 2258650 - RNA, 19 nt, Artificial Sequence
  Description of Artificial Sequence: Synthetic oligonucleotide
  Sense strand starting at position 1661 of SEQ ID NO: 1884344
guguaagauaagugugaga

SEQ ID NO: 2258651 - RNA, 19 nt, Artificial Sequence
  Description of Artificial Sequence: Synthetic oligonucleotide
  Antisense strand to SEQ ID NO: 2258650
ucucacacuuaucuuacac

SEQ ID NO: 2258652 - RNA, 19 nt, Artificial Sequence
  Description of Artificial Sequence: Synthetic oligonucleotide
  Sense strand starting at position 1663 of SEQ ID NO: 1884344
guaagauaagugugagaua

SEQ ID NO: 2258653 - RNA, 19 nt, Artificial Sequence
  Description of Artificial Sequence: Synthetic oligonucleotide
  Antisense strand to SEQ ID NO: 2258652
uaucucacacuuaucuuac

SEQ ID NO: 2258654 - RNA, 19 nt, Artificial Sequence
  Description of Artificial Sequence: Synthetic oligonucleotide
  Sense strand starting at position 1716 of SEQ ID NO: 1884344
augauacaugugugucaaa

SEQ ID NO: 2258655 - RNA, 19 nt, Artificial Sequence
  Description of Artificial Sequence: Synthetic oligonucleotide
  Antisense strand to SEQ ID NO: 2258654
uuugacacacauguaucau

SEQ ID NO: 2258656 - RNA, 19 nt, Artificial Sequence
  Description of Artificial Sequence: Synthetic oligonucleotide
  Sense strand starting at position 1734 of SEQ ID NO: 1884344
aauguuaggcaauggaaau

SEQ ID NO: 2258657 - RNA, 19 nt, Artificial Sequence
  Description of Artificial Sequence: Synthetic oligonucleotide
  Antisense strand to SEQ ID NO: 2258656
auuuccauugccuaacauu

SEQ ID NO: 2258658 - RNA, 19 nt, Artificial Sequence
  Description of Artificial Sequence: Synthetic oligonucleotide
  Sense strand starting at position 1735 of SEQ ID NO: 1884344
auguuaggcaauggaaaua

SEQ ID NO: 2258659 - RNA, 19 nt, Artificial Sequence
  Description of Artificial Sequence: Synthetic oligonucleotide
  Antisense strand to SEQ ID NO: 2258658
uauuuccauugccuaacau

SEQ ID NO: 2258660 - RNA, 19 nt, Artificial Sequence
  Description of Artificial Sequence: Synthetic oligonucleotide
  Sense strand starting at position 1745 of SEQ ID NO: 1884344
auggaaauaaucuguguga

SEQ ID NO: 2258661 - RNA, 19 nt, Artificial Sequence
  Description of Artificial Sequence: Synthetic oligonucleotide
  Antisense strand to SEQ ID NO: 2258660
ucacacagauuauuuccau

SEQ ID NO: 2258662 - RNA, 19 nt, Artificial Sequence
  Description of Artificial Sequence: Synthetic oligonucleotide
  Sense strand starting at position 1746 of SEQ ID NO: 1884344
uggaaauaaucugugugaa

SEQ ID NO: 2258663 - RNA, 19 nt, Artificial Sequence
  Description of Artificial Sequence: Synthetic oligonucleotide
  Antisense strand to SEQ ID NO: 2258662
uucacacagauuauuucca

SEQ ID NO: 2258664 - RNA, 19 nt, Artificial Sequence
  Description of Artificial Sequence: Synthetic oligonucleotide
  Sense strand starting at position 1747 of SEQ ID NO: 1884344
ggaaauaaucugugugaac

SEQ ID NO: 2258665 - RNA, 19 nt, Artificial Sequence
  Description of Artificial Sequence: Synthetic oligonucleotide
  Antisense strand to SEQ ID NO: 2258664
guucacacagauuauuucc

SEQ ID NO: 2258666 - RNA, 19 nt, Artificial Sequence
  Description of Artificial Sequence: Synthetic oligonucleotide
  Sense strand starting at position 1781 of SEQ ID NO: 1884344
ucuguagcucuugaauaug

SEQ ID NO: 2258667 - RNA, 19 nt, Artificial Sequence
  Description of Artificial Sequence: Synthetic oligonucleotide
  Antisense strand to SEQ ID NO: 2258666
cauauucaagagcuacaga

SEQ ID NO: 2258668 - RNA, 19 nt, Artificial Sequence
  Description of Artificial Sequence: Synthetic oligonucleotide
  Sense strand starting at position 2107 of SEQ ID NO: 1884344
agagaaguccgccacauga

SEQ ID NO: 2258669 - RNA, 19 nt, Artificial Sequence
  Description of Artificial Sequence: Synthetic oligonucleotide
  Antisense strand to SEQ ID NO: 2258668
ucauguggcggacuucucu

SEQ ID NO: 2258670 - RNA, 19 nt, Artificial Sequence
  Description of Artificial Sequence: Synthetic oligonucleotide
  Sense strand starting at position 2109 of SEQ ID NO: 1884344
agaaguccgccacaugauu

SEQ ID NO: 2258671 - RNA, 19 nt, Artificial Sequence
  Description of Artificial Sequence: Synthetic oligonucleotide
  Antisense strand to SEQ ID NO: 2258670
aaucauguggcggacuucu

SEQ ID NO: 2258672 - RNA, 19 nt, Artificial Sequence
  Description of Artificial Sequence: Synthetic oligonucleotide
  Sense strand starting at position 2162 of SEQ ID NO: 1884344
ugguaauuauaauuccaga

SEQ ID NO: 2258673 - RNA, 19 nt, Artificial Sequence
  Description of Artificial Sequence: Synthetic oligonucleotide
  Antisense strand to SEQ ID NO: 2258672
ucuggaauuauaauuacca

SEQ ID NO: 2258674 - RNA, 19 nt, Artificial Sequence
  Description of Artificial Sequence: Synthetic oligonucleotide
  Sense strand starting at position 2292 of SEQ ID NO: 1884344
cucucaagcccagguauuu

SEQ ID NO: 2258675 - RNA, 19 nt, Artificial Sequence
  Description of Artificial Sequence: Synthetic oligonucleotide
  Antisense strand to SEQ ID NO: 2258674
aaauaccugggcuugagag

SEQ ID NO: 2258676 - RNA, 19 nt, Artificial Sequence
  Description of Artificial Sequence: Synthetic oligonucleotide
  Sense strand starting at position 2327 of SEQ ID NO: 1884344
cuggaugauccauagucga

SEQ ID NO: 2258677 - RNA, 19 nt, Artificial Sequence
  Description of Artificial Sequence: Synthetic oligonucleotide
  Antisense strand to SEQ ID NO: 2258676
ucgacuauggaucauccag

SEQ ID NO: 2258678 - RNA, 19 nt, Artificial Sequence
  Description of Artificial Sequence: Synthetic oligonucleotide
  Sense strand starting at position 2330 of SEQ ID NO: 1884344
gaugauccauagucgaauu

SEQ ID NO: 2258679 - RNA, 19 nt, Artificial Sequence
  Description of Artificial Sequence: Synthetic oligonucleotide
  Antisense strand to SEQ ID NO: 2258678
aauucgacuauggaucauc

SEQ ID NO: 2258680 - RNA, 19 nt, Artificial Sequence
  Description of Artificial Sequence: Synthetic oligonucleotide
  Sense strand starting at position 2449 of SEQ ID NO: 1884344
aauggaaagcuucgugaau

SEQ ID NO: 2258681 - RNA, 19 nt, Artificial Sequence
  Description of Artificial Sequence: Synthetic oligonucleotide
  Antisense strand to SEQ ID NO: 2258680
auucacgaagcuuuccauu

SEQ ID NO: 2258682 - RNA, 19 nt, Artificial Sequence
  Description of Artificial Sequence: Synthetic oligonucleotide
  Sense strand starting at position 2460 of SEQ ID NO: 1884344
ucgugaauuauuuguguuu

SEQ ID NO: 2258683 - RNA, 19 nt, Artificial Sequence
  Description of Artificial Sequence: Synthetic oligonucleotide
  Antisense strand to SEQ ID NO: 2258682
aaacacaaauaauucacga

SEQ ID NO: 2258684 - RNA, 19 nt, Artificial Sequence
  Description of Artificial Sequence: Synthetic oligonucleotide
  Sense strand starting at position 2461 of SEQ ID NO: 1884344
cgugaauuauuuguguuuc

SEQ ID NO: 2258685 - RNA, 19 nt, Artificial Sequence
  Description of Artificial Sequence: Synthetic oligonucleotide
  Antisense strand to SEQ ID NO: 2258684
gaaacacaaauaauucacg

SEQ ID NO: 2258686 - RNA, 19 nt, Artificial Sequence
  Description of Artificial Sequence: Synthetic oligonucleotide
  Sense strand starting at position 2508 of SEQ ID NO: 1884344
gugccuuguaaagagaaca

SEQ ID NO: 2258687 - RNA, 19 nt, Artificial Sequence
  Description of Artificial Sequence: Synthetic oligonucleotide
  Antisense strand to SEQ ID NO: 2258686
uguucucuuuacaaggcac

SEQ ID NO: 2258688 - RNA, 19 nt, Artificial Sequence
  Description of Artificial Sequence: Synthetic oligonucleotide
  Sense strand starting at position 2532 of SEQ ID NO: 1884344
acugauacugguugaguga

SEQ ID NO: 2258689 - RNA, 19 nt, Artificial Sequence
  Description of Artificial Sequence: Synthetic oligonucleotide
  Antisense strand to SEQ ID NO: 2258688
ucacucaaccaguaucagu

SEQ ID NO: 2258690 - RNA, 19 nt, Artificial Sequence
  Description of Artificial Sequence: Synthetic oligonucleotide
  Sense strand starting at position 2533 of SEQ ID NO: 1884344
cugauacugguugagugaa

SEQ ID NO: 2258691 - RNA, 19 nt, Artificial Sequence
  Description of Artificial Sequence: Synthetic oligonucleotide
  Antisense strand to SEQ ID NO: 2258690
uucacucaaccaguaucag

SEQ ID NO: 2258692 - RNA, 19 nt, Artificial Sequence
  Description of Artificial Sequence: Synthetic oligonucleotide
  Sense strand starting at position 2866 of SEQ ID NO: 1884344
cggauuauucuuuauuccu

SEQ ID NO: 2258693 - RNA, 19 nt, Artificial Sequence
  Description of Artificial Sequence: Synthetic oligonucleotide
  Antisense strand to SEQ ID NO: 2258692
aggaauaaagaauaauccg

SEQ ID NO: 2258694 - RNA, 19 nt, Artificial Sequence
  Description of Artificial Sequence: Synthetic oligonucleotide
  Sense strand starting at position 2880 of SEQ ID NO: 1884344
uuccuugugguuuaaggaa

SEQ ID NO: 2258695 - RNA, 19 nt, Artificial Sequence
  Description of Artificial Sequence: Synthetic oligonucleotide
  Antisense strand to SEQ ID NO: 2258694
uuccuuaaaccacaaggaa

SEQ ID NO: 2258696 - RNA, 19 nt, Artificial Sequence
  Description of Artificial Sequence: Synthetic oligonucleotide
  Sense strand starting at position 2950 of SEQ ID NO: 1884344
gauuaaucuggauguauau

SEQ ID NO: 2258697 - RNA, 19 nt, Artificial Sequence
  Description of Artificial Sequence: Synthetic oligonucleotide
  Antisense strand to SEQ ID NO: 2258696
auauacauccagauuaauc

SEQ ID NO: 2258698 - RNA, 19 nt, Artificial Sequence
  Description of Artificial Sequence: Synthetic oligonucleotide
  Sense strand starting at position 3236 of SEQ ID NO: 1884344
gagagacugcugcaucaca

SEQ ID NO: 2258699 - RNA, 19 nt, Artificial Sequence
  Description of Artificial Sequence: Synthetic oligonucleotide
  Antisense strand to SEQ ID NO: 2258698
ugugaugcagcagucucuc

SEQ ID NO: 2258700 - RNA, 19 nt, Artificial Sequence
  Description of Artificial Sequence: Synthetic oligonucleotide
  Sense strand starting at position 3443 of SEQ ID NO: 1884344
augacagguuguuuacuga

SEQ ID NO: 2258701 - RNA, 19 nt, Artificial Sequence
  Description of Artificial Sequence: Synthetic oligonucleotide
  Antisense strand to SEQ ID NO: 2258700
ucaguaaacaaccugucau

SEQ ID NO: 2258702 - RNA, 19 nt, Artificial Sequence
  Description of Artificial Sequence: Synthetic oligonucleotide
  Sense strand starting at position 3808 of SEQ ID NO: 1884344
uugugaauauaccuauuga

SEQ ID NO: 2258703 - RNA, 19 nt, Artificial Sequence
  Description of Artificial Sequence: Synthetic oligonucleotide
  Antisense strand to SEQ ID NO: 2258702
ucaauagguauauucacaa

SEQ ID NO: 2258704 - RNA, 19 nt, Artificial Sequence
  Description of Artificial Sequence: Synthetic oligonucleotide
  Sense strand starting at position 3834 of SEQ ID NO: 1884344
uccuauuauugaguucuua

SEQ ID NO: 2258705 - RNA, 19 nt, Artificial Sequence
  Description of Artificial Sequence: Synthetic oligonucleotide
  Antisense strand to SEQ ID NO: 2258704
uaagaacucaauaauagga

SEQ ID NO: 2258706 - RNA, 19 nt, Artificial Sequence
  Description of Artificial Sequence: Synthetic oligonucleotide
  Sense strand starting at position 3877 of SEQ ID NO: 1884344
aguaucuacugaguaccua

SEQ ID NO: 2258707 - RNA, 19 nt, Artificial Sequence
  Description of Artificial Sequence: Synthetic oligonucleotide
  Antisense strand to SEQ ID NO: 2258706
uagguacucaguagauacu

SEQ ID NO: 2258708 - RNA, 19 nt, Artificial Sequence
  Description of Artificial Sequence: Synthetic oligonucleotide
  Sense strand starting at position 207 of SEQ ID NO: 1884345
gaaagaccacuuggaguuu

SEQ ID NO: 2258709 - RNA, 19 nt, Artificial Sequence
  Description of Artificial Sequence: Synthetic oligonucleotide
  Antisense strand to SEQ ID NO: 2258708
aaacuccaaguggucuuuc

SEQ ID NO: 2258710 - RNA, 19 nt, Artificial Sequence
  Description of Artificial Sequence: Synthetic oligonucleotide
  Sense strand starting at position 420 of SEQ ID NO: 1884345
auagucuccugauaggaca

SEQ ID NO: 2258711 - RNA, 19 nt, Artificial Sequence
  Description of Artificial Sequence: Synthetic oligonucleotide
  Antisense strand to SEQ ID NO: 2258710
uguccuaucaggagacuau

SEQ ID NO: 2258712 - RNA, 19 nt, Artificial Sequence
  Description of Artificial Sequence: Synthetic oligonucleotide
  Sense strand starting at position 485 of SEQ ID NO: 1884345
ccaggauacugguuugaaa

SEQ ID NO: 2258713 - RNA, 19 nt, Artificial Sequence
  Description of Artificial Sequence: Synthetic oligonucleotide
  Antisense strand to SEQ ID NO: 2258712
uuucaaaccaguauccugg

SEQ ID NO: 2258714 - RNA, 19 nt, Artificial Sequence
  Description of Artificial Sequence: Synthetic oligonucleotide
  Sense strand starting at position 568 of SEQ ID NO: 1884345
aagggaguuggccagaguu

SEQ ID NO: 2258715 - RNA, 19 nt, Artificial Sequence
  Description of Artificial Sequence: Synthetic oligonucleotide
  Antisense strand to SEQ ID NO: 2258714
aacucuggccaacucccuu

SEQ ID NO: 2258716 - RNA, 19 nt, Artificial Sequence
  Description of Artificial Sequence: Synthetic oligonucleotide
  Sense strand starting at position 570 of SEQ ID NO: 1884345
gggaguuggccagaguuag

SEQ ID NO: 2258717 - RNA, 19 nt, Artificial Sequence
  Description of Artificial Sequence: Synthetic oligonucleotide
  Antisense strand to SEQ ID NO: 2258716
cuaacucuggccaacuccc

SEQ ID NO: 2258718 - RNA, 19 nt, Artificial Sequence
  Description of Artificial Sequence: Synthetic oligonucleotide
  Sense strand starting at position 580 of SEQ ID NO: 1884345
cagaguuagccagagugga

SEQ ID NO: 2258719 - RNA, 19 nt, Artificial Sequence
  Description of Artificial Sequence: Synthetic oligonucleotide
  Antisense strand to SEQ ID NO: 2258718
uccacucuggcuaacucug

SEQ ID NO: 2258720 - RNA, 19 nt, Artificial Sequence
  Description of Artificial Sequence: Synthetic oligonucleotide
  Sense strand starting at position 707 of SEQ ID NO: 1884345
gagacuaccugaugauuug

SEQ ID NO: 2258721 - RNA, 19 nt, Artificial Sequence
  Description of Artificial Sequence: Synthetic oligonucleotide
  Antisense strand to SEQ ID NO: 2258720
caaaucaucagguagucuc

SEQ ID NO: 2258722 - RNA, 19 nt, Artificial Sequence
  Description of Artificial Sequence: Synthetic oligonucleotide
  Sense strand starting at position 714 of SEQ ID NO: 1884345
ccugaugauuuggaagaga

SEQ ID NO: 2258723 - RNA, 19 nt, Artificial Sequence
  Description of Artificial Sequence: Synthetic oligonucleotide
  Antisense strand to SEQ ID NO: 2258722
ucucuuccaaaucaucagg

SEQ ID NO: 2258724 - RNA, 19 nt, Artificial Sequence
  Description of Artificial Sequence: Synthetic oligonucleotide
  Sense strand starting at position 970 of SEQ ID NO: 1884345
ggaagugcucuccggguca

SEQ ID NO: 2258725 - RNA, 19 nt, Artificial Sequence
  Description of Artificial Sequence: Synthetic oligonucleotide
  Antisense strand to SEQ ID NO: 2258724
ugacccggagagcacuucc

SEQ ID NO: 2258726 - RNA, 19 nt, Artificial Sequence
  Description of Artificial Sequence: Synthetic oligonucleotide
  Sense strand starting at position 972 of SEQ ID NO: 1884345
aagugcucuccgggucaau

SEQ ID NO: 2258727 - RNA, 19 nt, Artificial Sequence
  Description of Artificial Sequence: Synthetic oligonucleotide
  Antisense strand to SEQ ID NO: 2258726
auugacccggagagcacuu

SEQ ID NO: 2258728 - RNA, 19 nt, Artificial Sequence
  Description of Artificial Sequence: Synthetic oligonucleotide
  Sense strand starting at position 984 of SEQ ID NO: 1884345
ggucaauggugacaacaau

SEQ ID NO: 2258729 - RNA, 19 nt, Artificial Sequence
  Description of Artificial Sequence: Synthetic oligonucleotide
  Antisense strand to SEQ ID NO: 2258728
auuguugucaccauugacc

SEQ ID NO: 2258730 - RNA, 19 nt, Artificial Sequence
  Description of Artificial Sequence: Synthetic oligonucleotide
  Sense strand starting at position 996 of SEQ ID NO: 1884345
caacaauggguaugugaac

SEQ ID NO: 2258731 - RNA, 19 nt, Artificial Sequence
  Description of Artificial Sequence: Synthetic oligonucleotide
  Antisense strand to SEQ ID NO: 2258730
guucacauacccauuguug

SEQ ID NO: 2258732 - RNA, 19 nt, Artificial Sequence
  Description of Artificial Sequence: Synthetic oligonucleotide
  Sense strand starting at position 1116 of SEQ ID NO: 1884345
cagggacucuccugagacu

SEQ ID NO: 2258733 - RNA, 19 nt, Artificial Sequence
  Description of Artificial Sequence: Synthetic oligonucleotide
  Antisense strand to SEQ ID NO: 2258732
agucucaggagagucccug

SEQ ID NO: 2258734 - RNA, 19 nt, Artificial Sequence
  Description of Artificial Sequence: Synthetic oligonucleotide
  Sense strand starting at position 1331 of SEQ ID NO: 1884345
ugcccucccugauaaggaa

SEQ ID NO: 2258735 - RNA, 19 nt, Artificial Sequence
  Description of Artificial Sequence: Synthetic oligonucleotide
  Antisense strand to SEQ ID NO: 2258734
uuccuuaucagggagggca

SEQ ID NO: 2258736 - RNA, 19 nt, Artificial Sequence
  Description of Artificial Sequence: Synthetic oligonucleotide
  Sense strand starting at position 1355 of SEQ ID NO: 1884345
agcagaaauuauuaacuga

SEQ ID NO: 2258737 - RNA, 19 nt, Artificial Sequence
  Description of Artificial Sequence: Synthetic oligonucleotide
  Antisense strand to SEQ ID NO: 2258736
ucaguuaauaauuucugcu

SEQ ID NO: 2258738 - RNA, 19 nt, Artificial Sequence
  Description of Artificial Sequence: Synthetic oligonucleotide
  Sense strand starting at position 1763 of SEQ ID NO: 1884345
guaagauugugccuggccu

SEQ ID NO: 2258739 - RNA, 19 nt, Artificial Sequence
  Description of Artificial Sequence: Synthetic oligonucleotide
  Antisense strand to SEQ ID NO: 2258738
aggccaggcacaaucuuac

SEQ ID NO: 2258740 - RNA, 19 nt, Artificial Sequence
  Description of Artificial Sequence: Synthetic oligonucleotide
  Sense strand starting at position 1816 of SEQ ID NO: 1884345
gcgcccuaccuugaagauu

SEQ ID NO: 2258741 - RNA, 19 nt, Artificial Sequence
  Description of Artificial Sequence: Synthetic oligonucleotide
  Antisense strand to SEQ ID NO: 2258740
aaucuucaagguagggcgc

SEQ ID NO: 2258742 - RNA, 19 nt, Artificial Sequence
  Description of Artificial Sequence: Synthetic oligonucleotide
  Sense strand starting at position 2032 of SEQ ID NO: 1884345
gggcuuggcuguauuguga

SEQ ID NO: 2258743 - RNA, 19 nt, Artificial Sequence
  Description of Artificial Sequence: Synthetic oligonucleotide
  Antisense strand to SEQ ID NO: 2258742
ucacaauacagccaagccc

SEQ ID NO: 2258744 - RNA, 19 nt, Artificial Sequence
  Description of Artificial Sequence: Synthetic oligonucleotide
  Sense strand starting at position 2538 of SEQ ID NO: 1884345
ggucgcaucagugagggaa

SEQ ID NO: 2258745 - RNA, 19 nt, Artificial Sequence
  Description of Artificial Sequence: Synthetic oligonucleotide
  Antisense strand to SEQ ID NO: 2258744
uucccucacugaugcgacc

SEQ ID NO: 2258746 - RNA, 19 nt, Artificial Sequence
  Description of Artificial Sequence: Synthetic oligonucleotide
  Sense strand starting at position 2550 of SEQ ID NO: 1884345
gagggaaguucucccucca

SEQ ID NO: 2258747 - RNA, 19 nt, Artificial Sequence
  Description of Artificial Sequence: Synthetic oligonucleotide
  Antisense strand to SEQ ID NO: 2258746
uggagggagaacuucccuc

SEQ ID NO: 2258748 - RNA, 19 nt, Artificial Sequence
  Description of Artificial Sequence: Synthetic oligonucleotide
  Sense strand starting at position 2623 of SEQ ID NO: 1884345
cuuuguggaguuugaggau

SEQ ID NO: 2258749 - RNA, 19 nt, Artificial Sequence
  Description of Artificial Sequence: Synthetic oligonucleotide
  Antisense strand to SEQ ID NO: 2258748
auccucaaacuccacaaag

SEQ ID NO: 2258750 - RNA, 19 nt, Artificial Sequence
  Description of Artificial Sequence: Synthetic oligonucleotide
  Sense strand starting at position 2926 of SEQ ID NO: 1884345
gucagugaguguuugugua

SEQ ID NO: 2258751 - RNA, 19 nt, Artificial Sequence
  Description of Artificial Sequence: Synthetic oligonucleotide
  Antisense strand to SEQ ID NO: 2258750
uacacaaacacucacugac

SEQ ID NO: 2258752 - RNA, 19 nt, Artificial Sequence
  Description of Artificial Sequence: Synthetic oligonucleotide
  Sense strand starting at position 2928 of SEQ ID NO: 1884345
cagugaguguuuguguaca

SEQ ID NO: 2258753 - RNA, 19 nt, Artificial Sequence
  Description of Artificial Sequence: Synthetic oligonucleotide
  Antisense strand to SEQ ID NO: 2258752
uguacacaaacacucacug

SEQ ID NO: 2258754 - RNA, 19 nt, Artificial Sequence
  Description of Artificial Sequence: Synthetic oligonucleotide
  Sense strand starting at position 2930 of SEQ ID NO: 1884345
gugaguguuuguguacaug

SEQ ID NO: 2258755 - RNA, 19 nt, Artificial Sequence
  Description of Artificial Sequence: Synthetic oligonucleotide
  Antisense strand to SEQ ID NO: 2258754
cauguacacaaacacucac

SEQ ID NO: 2258756 - RNA, 19 nt, Artificial Sequence
  Description of Artificial Sequence: Synthetic oligonucleotide
  Sense strand starting at position 2946 of SEQ ID NO: 1884345
augcguguccuggcauaua

SEQ ID NO: 2258757 - RNA, 19 nt, Artificial Sequence
  Description of Artificial Sequence: Synthetic oligonucleotide
  Antisense strand to SEQ ID NO: 2258756
uauaugccaggacacgcau

SEQ ID NO: 2258758 - RNA, 19 nt, Artificial Sequence
  Description of Artificial Sequence: Synthetic oligonucleotide
  Sense strand starting at position 2957 of SEQ ID NO: 1884345
ggcauauacaccugugaag

SEQ ID NO: 2258759 - RNA, 19 nt, Artificial Sequence
  Description of Artificial Sequence: Synthetic oligonucleotide
  Antisense strand to SEQ ID NO: 2258758
cuucacagguguauaugcc

SEQ ID NO: 2258760 - RNA, 19 nt, Artificial Sequence
  Description of Artificial Sequence: Synthetic oligonucleotide
  Sense strand starting at position 2959 of SEQ ID NO: 1884345
cauauacaccugugaagug

SEQ ID NO: 2258761 - RNA, 19 nt, Artificial Sequence
  Description of Artificial Sequence: Synthetic oligonucleotide
  Antisense strand to SEQ ID NO: 2258760
cacuucacagguguauaug

SEQ ID NO: 2258762 - RNA, 19 nt, Artificial Sequence
  Description of Artificial Sequence: Synthetic oligonucleotide
  Sense strand starting at position 2976 of SEQ ID NO: 1884345
ugugcugaggugugaacau

SEQ ID NO: 2258763 - RNA, 19 nt, Artificial Sequence
  Description of Artificial Sequence: Synthetic oligonucleotide
  Antisense strand to SEQ ID NO: 2258762
auguucacaccucagcaca

SEQ ID NO: 2258764 - RNA, 19 nt, Artificial Sequence
  Description of Artificial Sequence: Synthetic oligonucleotide
  Sense strand starting at position 3044 of SEQ ID NO: 1884345
ucuggaaccuucuagaaug

SEQ ID NO: 2258765 - RNA, 19 nt, Artificial Sequence
  Description of Artificial Sequence: Synthetic oligonucleotide
  Antisense strand to SEQ ID NO: 2258764
cauucuagaagguuccaga

SEQ ID NO: 2258766 - RNA, 19 nt, Artificial Sequence
  Description of Artificial Sequence: Synthetic oligonucleotide
  Sense strand starting at position 3089 of SEQ ID NO: 1884345
ugacucugcucccuagaau

SEQ ID NO: 2258767 - RNA, 19 nt, Artificial Sequence
  Description of Artificial Sequence: Synthetic oligonucleotide
  Antisense strand to SEQ ID NO: 2258766
auucuagggagcagaguca

SEQ ID NO: 2258768 - RNA, 19 nt, Artificial Sequence
  Description of Artificial Sequence: Synthetic oligonucleotide
  Sense strand starting at position 3203 of SEQ ID NO: 1884345
guaaauaacugcugaauga

SEQ ID NO: 2258769 - RNA, 19 nt, Artificial Sequence
  Description of Artificial Sequence: Synthetic oligonucleotide
  Antisense strand to SEQ ID NO: 2258768
ucauucagcaguuauuuac

SEQ ID NO: 2258770 - RNA, 19 nt, Artificial Sequence
  Description of Artificial Sequence: Synthetic oligonucleotide
  Sense strand starting at position 3289 of SEQ ID NO: 1884345
gugucaguacuguguaugu

SEQ ID NO: 2258771 - RNA, 19 nt, Artificial Sequence
  Description of Artificial Sequence: Synthetic oligonucleotide
  Antisense strand to SEQ ID NO: 2258770
acauacacaguacugacac

SEQ ID NO: 2258772 - RNA, 19 nt, Artificial Sequence
  Description of Artificial Sequence: Synthetic oligonucleotide
  Sense strand starting at position 3296 of SEQ ID NO: 1884345
uacuguguaugugugagua

SEQ ID NO: 2258773 - RNA, 19 nt, Artificial Sequence
  Description of Artificial Sequence: Synthetic oligonucleotide
  Antisense strand to SEQ ID NO: 2258772
uacucacacauacacagua

SEQ ID NO: 2258774 - RNA, 19 nt, Artificial Sequence
  Description of Artificial Sequence: Synthetic oligonucleotide
  Sense strand starting at position 3319 of SEQ ID NO: 1884345
gcaggugguacgugaucau

SEQ ID NO: 2258775 - RNA, 19 nt, Artificial Sequence
  Description of Artificial Sequence: Synthetic oligonucleotide
  Antisense strand to SEQ ID NO: 2258774
augaucacguaccaccugc

SEQ ID NO: 2258776 - RNA, 19 nt, Artificial Sequence
  Description of Artificial Sequence: Synthetic oligonucleotide
  Sense strand starting at position 3329 of SEQ ID NO: 1884345
cgugaucaugcgcauguca

SEQ ID NO: 2258777 - RNA, 19 nt, Artificial Sequence
  Description of Artificial Sequence: Synthetic oligonucleotide
  Antisense strand to SEQ ID NO: 2258776
ugacaugcgcaugaucacg

SEQ ID NO: 2258778 - RNA, 19 nt, Artificial Sequence
  Description of Artificial Sequence: Synthetic oligonucleotide
  Sense strand starting at position 3331 of SEQ ID NO: 1884345
ugaucaugcgcaugucagu

SEQ ID NO: 2258779 - RNA, 19 nt, Artificial Sequence
  Description of Artificial Sequence: Synthetic oligonucleotide
  Antisense strand to SEQ ID NO: 2258778
acugacaugcgcaugauca

SEQ ID NO: 2258780 - RNA, 19 nt, Artificial Sequence
  Description of Artificial Sequence: Synthetic oligonucleotide
  Sense strand starting at position 3336 of SEQ ID NO: 1884345
augcgcaugucaguggaua

SEQ ID NO: 2258781 - RNA, 19 nt, Artificial Sequence
  Description of Artificial Sequence: Synthetic oligonucleotide
  Antisense strand to SEQ ID NO: 2258780
uauccacugacaugcgcau

SEQ ID NO: 2258782 - RNA, 19 nt, Artificial Sequence
  Description of Artificial Sequence: Synthetic oligonucleotide
  Sense strand starting at position 3651 of SEQ ID NO: 1884345
gggacuuggaguggaugua

SEQ ID NO: 2258783 - RNA, 19 nt, Artificial Sequence
  Description of Artificial Sequence: Synthetic oligonucleotide
  Antisense strand to SEQ ID NO: 2258782
uacauccacuccaaguccc

SEQ ID NO: 2258784 - RNA, 19 nt, Artificial Sequence
  Description of Artificial Sequence: Synthetic oligonucleotide
  Sense strand starting at position 3689 of SEQ ID NO: 1884345
uaaagauucugggucuccu

SEQ ID NO: 2258785 - RNA, 19 nt, Artificial Sequence
  Description of Artificial Sequence: Synthetic oligonucleotide
  Antisense strand to SEQ ID NO: 2258784
aggagacccagaaucuuua

SEQ ID NO: 2258786 - RNA, 19 nt, Artificial Sequence
  Description of Artificial Sequence: Synthetic oligonucleotide
  Sense strand starting at position 3693 of SEQ ID NO: 1884345
gauucugggucuccuagaa

SEQ ID NO: 2258787 - RNA, 19 nt, Artificial Sequence
  Description of Artificial Sequence: Synthetic oligonucleotide
  Antisense strand to SEQ ID NO: 2258786
uucuaggagacccagaauc

SEQ ID NO: 2258788 - RNA, 19 nt, Artificial Sequence
  Description of Artificial Sequence: Synthetic oligonucleotide
  Sense strand starting at position 12 of SEQ ID NO: 1884346
uggagagaccuuuggccua

SEQ ID NO: 2258789 - RNA, 19 nt, Artificial Sequence
  Description of Artificial Sequence: Synthetic oligonucleotide
  Antisense strand to SEQ ID NO: 2258788
uaggccaaaggucucucca

SEQ ID NO: 2258790 - RNA, 19 nt, Artificial Sequence
  Description of Artificial Sequence: Synthetic oligonucleotide
  Sense strand starting at position 563 of SEQ ID NO: 1884346
ggcgcuggcguggauauua

SEQ ID NO: 2258791 - RNA, 19 nt, Artificial Sequence
  Description of Artificial Sequence: Synthetic oligonucleotide
  Antisense strand to SEQ ID NO: 2258790
uaauauccacgccagcgcc

SEQ ID NO: 2258792 - RNA, 19 nt, Artificial Sequence
  Description of Artificial Sequence: Synthetic oligonucleotide
  Sense strand starting at position 894 of SEQ ID NO: 1884346
caaagauggaagcgaguua

SEQ ID NO: 2258793 - RNA, 19 nt, Artificial Sequence
  Description of Artificial Sequence: Synthetic oligonucleotide
  Antisense strand to SEQ ID NO: 2258792
uaacucgcuuccaucuuug

SEQ ID NO: 2258794 - RNA, 19 nt, Artificial Sequence
  Description of Artificial Sequence: Synthetic oligonucleotide
  Sense strand starting at position 943 of SEQ ID NO: 1884346
agggacuugucuuugccga

SEQ ID NO: 2258795 - RNA, 19 nt, Artificial Sequence
  Description of Artificial Sequence: Synthetic oligonucleotide
  Antisense strand to SEQ ID NO: 2258794
ucggcaaagacaagucccu

SEQ ID NO: 2258796 - RNA, 19 nt, Artificial Sequence
  Description of Artificial Sequence: Synthetic oligonucleotide
  Sense strand starting at position 945 of SEQ ID NO: 1884346
ggacuugucuuugccgagu

SEQ ID NO: 2258797 - RNA, 19 nt, Artificial Sequence
  Description of Artificial Sequence: Synthetic oligonucleotide
  Antisense strand to SEQ ID NO: 2258796
acucggcaaagacaagucc

SEQ ID NO: 2258798 - RNA, 19 nt, Artificial Sequence
  Description of Artificial Sequence: Synthetic oligonucleotide
  Sense strand starting at position 958 of SEQ ID NO: 1884346
ccgagugugcucuucugca

SEQ ID NO: 2258799 - RNA, 19 nt, Artificial Sequence
  Description of Artificial Sequence: Synthetic oligonucleotide
  Antisense strand to SEQ ID NO: 2258798
ugcagaagagcacacucgg

SEQ ID NO: 2258800 - RNA, 19 nt, Artificial Sequence
  Description of Artificial Sequence: Synthetic oligonucleotide
  Sense strand starting at position 1146 of SEQ ID NO: 1884346
gacauccacgcuugggaaa

SEQ ID NO: 2258801 - RNA, 19 nt, Artificial Sequence
  Description of Artificial Sequence: Synthetic oligonucleotide
  Antisense strand to SEQ ID NO: 2258800
uuucccaagcguggauguc

SEQ ID NO: 2258802 - RNA, 19 nt, Artificial Sequence
  Description of Artificial Sequence: Synthetic oligonucleotide
  Sense strand starting at position 1263 of SEQ ID NO: 1884346
cgcaacaaagucuagagau

SEQ ID NO: 2258803 - RNA, 19 nt, Artificial Sequence
  Description of Artificial Sequence: Synthetic oligonucleotide
  Antisense strand to SEQ ID NO: 2258802
aucucuagacuuuguugcg

SEQ ID NO: 2258804 - RNA, 19 nt, Artificial Sequence
  Description of Artificial Sequence: Synthetic oligonucleotide
  Sense strand starting at position 1314 of SEQ ID NO: 1884346
aaagaaugcggccgacaga

SEQ ID NO: 2258805 - RNA, 19 nt, Artificial Sequence
  Description of Artificial Sequence: Synthetic oligonucleotide
  Antisense strand to SEQ ID NO: 2258804
ucugucggccgcauucuuu

SEQ ID NO: 2258806 - RNA, 19 nt, Artificial Sequence
  Description of Artificial Sequence: Synthetic oligonucleotide
  Sense strand starting at position 1355 of SEQ ID NO: 1884346
cagcgugugauuugagcuu

SEQ ID NO: 2258807 - RNA, 19 nt, Artificial Sequence
  Description of Artificial Sequence: Synthetic oligonucleotide
  Antisense strand to SEQ ID NO: 2258806
aagcucaaaucacacgcug

SEQ ID NO: 2258808 - RNA, 19 nt, Artificial Sequence
  Description of Artificial Sequence: Synthetic oligonucleotide
  Sense strand starting at position 1395 of SEQ ID NO: 1884346
uagcgauucucacugagcu

SEQ ID NO: 2258809 - RNA, 19 nt, Artificial Sequence
  Description of Artificial Sequence: Synthetic oligonucleotide
  Antisense strand to SEQ ID NO: 2258808
agcucagugagaaucgcua

SEQ ID NO: 2258810 - RNA, 19 nt, Artificial Sequence
  Description of Artificial Sequence: Synthetic oligonucleotide
  Sense strand starting at position 1396 of SEQ ID NO: 1884346
agcgauucucacugagcua

SEQ ID NO: 2258811 - RNA, 19 nt, Artificial Sequence
  Description of Artificial Sequence: Synthetic oligonucleotide
  Antisense strand to SEQ ID NO: 2258810
uagcucagugagaaucgcu

SEQ ID NO: 2258812 - RNA, 19 nt, Artificial Sequence
  Description of Artificial Sequence: Synthetic oligonucleotide
  Sense strand starting at position 1397 of SEQ ID NO: 1884346
gcgauucucacugagcuag

SEQ ID NO: 2258813 - RNA, 19 nt, Artificial Sequence
  Description of Artificial Sequence: Synthetic oligonucleotide
  Antisense strand to SEQ ID NO: 2258812
cuagcucagugagaaucgc

SEQ ID NO: 2258814 - RNA, 19 nt, Artificial Sequence
  Description of Artificial Sequence: Synthetic oligonucleotide
  Sense strand starting at position 1566 of SEQ ID NO: 1884346
cccuuagugagucagggaa

SEQ ID NO: 2258815 - RNA, 19 nt, Artificial Sequence
  Description of Artificial Sequence: Synthetic oligonucleotide
  Antisense strand to SEQ ID NO: 2258814
uucccugacucacuaaggg

SEQ ID NO: 2258816 - RNA, 19 nt, Artificial Sequence
  Description of Artificial Sequence: Synthetic oligonucleotide
  Sense strand starting at position 1611 of SEQ ID NO: 1884346
gugguucagccgggcgaaa

SEQ ID NO: 2258817 - RNA, 19 nt, Artificial Sequence
  Description of Artificial Sequence: Synthetic oligonucleotide
  Antisense strand to SEQ ID NO: 2258816
uuucgcccggcugaaccac

SEQ ID NO: 2258818 - RNA, 19 nt, Artificial Sequence
  Description of Artificial Sequence: Synthetic oligonucleotide
  Sense strand starting at position 1988 of SEQ ID NO: 1884346
gccugcuucgcagugggaa

SEQ ID NO: 2258819 - RNA, 19 nt, Artificial Sequence
  Description of Artificial Sequence: Synthetic oligonucleotide
  Antisense strand to SEQ ID NO: 2258818
uucccacugcgaagcaggc

SEQ ID NO: 2258820 - RNA, 19 nt, Artificial Sequence
  Description of Artificial Sequence: Synthetic oligonucleotide
  Sense strand starting at position 2051 of SEQ ID NO: 1884346
ggccuccucccucauuaga

SEQ ID NO: 2258821 - RNA, 19 nt, Artificial Sequence
  Description of Artificial Sequence: Synthetic oligonucleotide
  Antisense strand to SEQ ID NO: 2258820
ucuaaugagggaggaggcc

SEQ ID NO: 2258822 - RNA, 19 nt, Artificial Sequence
  Description of Artificial Sequence: Synthetic oligonucleotide
  Sense strand starting at position 2095 of SEQ ID NO: 1884346
ucggcugucacggcgagaa

SEQ ID NO: 2258823 - RNA, 19 nt, Artificial Sequence
  Description of Artificial Sequence: Synthetic oligonucleotide
  Antisense strand to SEQ ID NO: 2258822
uucucgccgugacagccga

SEQ ID NO: 2258824 - RNA, 19 nt, Artificial Sequence
  Description of Artificial Sequence: Synthetic oligonucleotide
  Sense strand starting at position 2096 of SEQ ID NO: 1884346
cggcugucacggcgagaaa

SEQ ID NO: 2258825 - RNA, 19 nt, Artificial Sequence
  Description of Artificial Sequence: Synthetic oligonucleotide
  Antisense strand to SEQ ID NO: 2258824
uuucucgccgugacagccg

SEQ ID NO: 2258826 - RNA, 19 nt, Artificial Sequence
  Description of Artificial Sequence: Synthetic oligonucleotide
  Sense strand starting at position 2120 of SEQ ID NO: 1884346
gugacauaauuaccucuga

SEQ ID NO: 2258827 - RNA, 19 nt, Artificial Sequence
  Description of Artificial Sequence: Synthetic oligonucleotide
  Antisense strand to SEQ ID NO: 2258826
ucagagguaauuaugucac

SEQ ID NO: 2258828 - RNA, 19 nt, Artificial Sequence
  Description of Artificial Sequence: Synthetic oligonucleotide
  Sense strand starting at position 2225 of SEQ ID NO: 1884346
ccgugauaggcuugucuuu

SEQ ID NO: 2258829 - RNA, 19 nt, Artificial Sequence
  Description of Artificial Sequence: Synthetic oligonucleotide
  Antisense strand to SEQ ID NO: 2258828
aaagacaagccuaucacgg

SEQ ID NO: 2258830 - RNA, 19 nt, Artificial Sequence
  Description of Artificial Sequence: Synthetic oligonucleotide
  Sense strand starting at position 2530 of SEQ ID NO: 1884346
gguggugucauuuguugcu

SEQ ID NO: 2258831 - RNA, 19 nt, Artificial Sequence
  Description of Artificial Sequence: Synthetic oligonucleotide
  Antisense strand to SEQ ID NO: 2258830
agcaacaaaugacaccacc

SEQ ID NO: 2258832 - RNA, 19 nt, Artificial Sequence
  Description of Artificial Sequence: Synthetic oligonucleotide
  Sense strand starting at position 2563 of SEQ ID NO: 1884346
cuuuccucucgugaggaau

SEQ ID NO: 2258833 - RNA, 19 nt, Artificial Sequence
  Description of Artificial Sequence: Synthetic oligonucleotide
  Antisense strand to SEQ ID NO: 2258832
auuccucacgagaggaaag

SEQ ID NO: 2258834 - RNA, 19 nt, Artificial Sequence
  Description of Artificial Sequence: Synthetic oligonucleotide
  Sense strand starting at position 2602 of SEQ ID NO: 1884346
ggcugagaauucuuaaauu

SEQ ID NO: 2258835 - RNA, 19 nt, Artificial Sequence
  Description of Artificial Sequence: Synthetic oligonucleotide
  Antisense strand to SEQ ID NO: 2258834
aauuuaagaauucucagcc

SEQ ID NO: 2258836 - RNA, 19 nt, Artificial Sequence
  Description of Artificial Sequence: Synthetic oligonucleotide
  Sense strand starting at position 2710 of SEQ ID NO: 1884346
gaagucacccucugugaga

SEQ ID NO: 2258837 - RNA, 19 nt, Artificial Sequence
  Description of Artificial Sequence: Synthetic oligonucleotide
  Antisense strand to SEQ ID NO: 2258836
ucucacagagggugacuuc

SEQ ID NO: 2258838 - RNA, 19 nt, Artificial Sequence
  Description of Artificial Sequence: Synthetic oligonucleotide
  Sense strand starting at position 2795 of SEQ ID NO: 1884346
uggagauagcgcugacaaa

SEQ ID NO: 2258839 - RNA, 19 nt, Artificial Sequence
  Description of Artificial Sequence: Synthetic oligonucleotide
  Antisense strand to SEQ ID NO: 2258838
uuugucagcgcuaucucca

SEQ ID NO: 2258840 - RNA, 19 nt, Artificial Sequence
  Description of Artificial Sequence: Synthetic oligonucleotide
  Sense strand starting at position 2796 of SEQ ID NO: 1884346
ggagauagcgcugacaaau

SEQ ID NO: 2258841 - RNA, 19 nt, Artificial Sequence
  Description of Artificial Sequence: Synthetic oligonucleotide
  Antisense strand to SEQ ID NO: 2258840
auuugucagcgcuaucucc

SEQ ID NO: 2258842 - RNA, 19 nt, Artificial Sequence
  Description of Artificial Sequence: Synthetic oligonucleotide
  Sense strand starting at position 2850 of SEQ ID NO: 1884346
cucuguucuccugucgcua

SEQ ID NO: 2258843 - RNA, 19 nt, Artificial Sequence
  Description of Artificial Sequence: Synthetic oligonucleotide
  Antisense strand to SEQ ID NO: 2258842
uagcgacaggagaacagag

SEQ ID NO: 2258844 - RNA, 19 nt, Artificial Sequence
  Description of Artificial Sequence: Synthetic oligonucleotide
  Sense strand starting at position 2851 of SEQ ID NO: 1884346
ucuguucuccugucgcuaa

SEQ ID NO: 2258845 - RNA, 19 nt, Artificial Sequence
  Description of Artificial Sequence: Synthetic oligonucleotide
  Antisense strand to SEQ ID NO: 2258844
uuagcgacaggagaacaga

SEQ ID NO: 2258846 - RNA, 19 nt, Artificial Sequence
  Description of Artificial Sequence: Synthetic oligonucleotide
  Sense strand starting at position 2887 of SEQ ID NO: 1884346
cccuuagugccuugauuaa

SEQ ID NO: 2258847 - RNA, 19 nt, Artificial Sequence
  Description of Artificial Sequence: Synthetic oligonucleotide
  Antisense strand to SEQ ID NO: 2258846
uuaaucaaggcacuaaggg

SEQ ID NO: 2258848 - RNA, 19 nt, Artificial Sequence
  Description of Artificial Sequence: Synthetic oligonucleotide
  Sense strand starting at position 2930 of SEQ ID NO: 1884346
uugggaacagcuuguccua

SEQ ID NO: 2258849 - RNA, 19 nt, Artificial Sequence
  Description of Artificial Sequence: Synthetic oligonucleotide
  Antisense strand to SEQ ID NO: 2258848
uaggacaagcuguucccaa

SEQ ID NO: 2258850 - RNA, 19 nt, Artificial Sequence
  Description of Artificial Sequence: Synthetic oligonucleotide
  Sense strand starting at position 2932 of SEQ ID NO: 1884346
gggaacagcuuguccuaau

SEQ ID NO: 2258851 - RNA, 19 nt, Artificial Sequence
  Description of Artificial Sequence: Synthetic oligonucleotide
  Antisense strand to SEQ ID NO: 2258850
auuaggacaagcuguuccc

SEQ ID NO: 2258852 - RNA, 19 nt, Artificial Sequence
  Description of Artificial Sequence: Synthetic oligonucleotide
  Sense strand starting at position 2933 of SEQ ID NO: 1884346
ggaacagcuuguccuaauc

SEQ ID NO: 2258853 - RNA, 19 nt, Artificial Sequence
  Description of Artificial Sequence: Synthetic oligonucleotide
  Antisense strand to SEQ ID NO: 2258852
gauuaggacaagcuguucc

SEQ ID NO: 2258854 - RNA, 19 nt, Artificial Sequence
  Description of Artificial Sequence: Synthetic oligonucleotide
  Sense strand starting at position 2942 of SEQ ID NO: 1884346
uguccuaaucaaugucauu

SEQ ID NO: 2258855 - RNA, 19 nt, Artificial Sequence
  Description of Artificial Sequence: Synthetic oligonucleotide
  Antisense strand to SEQ ID NO: 2258854
aaugacauugauuaggaca

SEQ ID NO: 2258856 - RNA, 19 nt, Artificial Sequence
  Description of Artificial Sequence: Synthetic oligonucleotide
  Sense strand starting at position 3009 of SEQ ID NO: 1884346
gcgagccagccaugacauu

SEQ ID NO: 2258857 - RNA, 19 nt, Artificial Sequence
  Description of Artificial Sequence: Synthetic oligonucleotide
  Antisense strand to SEQ ID NO: 2258856
aaugucauggcuggcucgc

SEQ ID NO: 2258858 - RNA, 19 nt, Artificial Sequence
  Description of Artificial Sequence: Synthetic oligonucleotide
  Sense strand starting at position 3125 of SEQ ID NO: 1884346
gucguuggccuuuagaaua

SEQ ID NO: 2258859 - RNA, 19 nt, Artificial Sequence
  Description of Artificial Sequence: Synthetic oligonucleotide
  Antisense strand to SEQ ID NO: 2258858
uauucuaaaggccaacgac

SEQ ID NO: 2258860 - RNA, 19 nt, Artificial Sequence
  Description of Artificial Sequence: Synthetic oligonucleotide
  Sense strand starting at position 3273 of SEQ ID NO: 1884346
ucgucacagggugaugaaa

SEQ ID NO: 2258861 - RNA, 19 nt, Artificial Sequence
  Description of Artificial Sequence: Synthetic oligonucleotide
  Antisense strand to SEQ ID NO: 2258860
uuucaucacccugugacga

SEQ ID NO: 2258862 - RNA, 19 nt, Artificial Sequence
  Description of Artificial Sequence: Synthetic oligonucleotide
  Sense strand starting at position 3349 of SEQ ID NO: 1884346
ucaguuguccuacauguca

SEQ ID NO: 2258863 - RNA, 19 nt, Artificial Sequence
  Description of Artificial Sequence: Synthetic oligonucleotide
  Antisense strand to SEQ ID NO: 2258862
ugacauguaggacaacuga

SEQ ID NO: 2258864 - RNA, 19 nt, Artificial Sequence
  Description of Artificial Sequence: Synthetic oligonucleotide
  Sense strand starting at position 3416 of SEQ ID NO: 1884346
gaggcaaagccuugggagu

SEQ ID NO: 2258865 - RNA, 19 nt, Artificial Sequence
  Description of Artificial Sequence: Synthetic oligonucleotide
  Antisense strand to SEQ ID NO: 2258864
acucccaaggcuuugccuc

SEQ ID NO: 2258866 - RNA, 19 nt, Artificial Sequence
  Description of Artificial Sequence: Synthetic oligonucleotide
  Sense strand starting at position 3475 of SEQ ID NO: 1884346
uccacuggacaauguuauu

SEQ ID NO: 2258867 - RNA, 19 nt, Artificial Sequence
  Description of Artificial Sequence: Synthetic oligonucleotide
  Antisense strand to SEQ ID NO: 2258866
aauaacauuguccagugga

SEQ ID NO: 2258868 - RNA, 19 nt, Artificial Sequence
  Description of Artificial Sequence: Synthetic oligonucleotide
  Sense strand starting at position 46 of SEQ ID NO: 1884347
uucugaaauccguaucuga

SEQ ID NO: 2258869 - RNA, 19 nt, Artificial Sequence
  Description of Artificial Sequence: Synthetic oligonucleotide
  Antisense strand to SEQ ID NO: 2258868
ucagauacggauuucagaa

SEQ ID NO: 2258870 - RNA, 19 nt, Artificial Sequence
  Description of Artificial Sequence: Synthetic oligonucleotide
  Sense strand starting at position 49 of SEQ ID NO: 1884347
ugaaauccguaucugagau

SEQ ID NO: 2258871 - RNA, 19 nt, Artificial Sequence
  Description of Artificial Sequence: Synthetic oligonucleotide
  Antisense strand to SEQ ID NO: 2258870
aucucagauacggauuuca

SEQ ID NO: 2258872 - RNA, 19 nt, Artificial Sequence
  Description of Artificial Sequence: Synthetic oligonucleotide
  Sense strand starting at position 55 of SEQ ID NO: 1884347
ccguaucugagaugacuag

SEQ ID NO: 2258873 - RNA, 19 nt, Artificial Sequence
  Description of Artificial Sequence: Synthetic oligonucleotide
  Antisense strand to SEQ ID NO: 2258872
cuagucaucucagauacgg

SEQ ID NO: 2258874 - RNA, 19 nt, Artificial Sequence
  Description of Artificial Sequence: Synthetic oligonucleotide
  Sense strand starting at position 146 of SEQ ID NO: 1884347
gaagucacuguuuauggga

SEQ ID NO: 2258875 - RNA, 19 nt, Artificial Sequence
  Description of Artificial Sequence: Synthetic oligonucleotide
  Antisense strand to SEQ ID NO: 2258874
ucccauaaacagugacuuc

SEQ ID NO: 2258876 - RNA, 19 nt, Artificial Sequence
  Description of Artificial Sequence: Synthetic oligonucleotide
  Sense strand starting at position 161 of SEQ ID NO: 1884347
gggagucuaaacugugacu

SEQ ID NO: 2258877 - RNA, 19 nt, Artificial Sequence
  Description of Artificial Sequence: Synthetic oligonucleotide
  Antisense strand to SEQ ID NO: 2258876
agucacaguuuagacuccc

SEQ ID NO: 2258878 - RNA, 19 nt, Artificial Sequence
  Description of Artificial Sequence: Synthetic oligonucleotide
  Sense strand starting at position 163 of SEQ ID NO: 1884347
gagucuaaacugugacuuu

SEQ ID NO: 2258879 - RNA, 19 nt, Artificial Sequence
  Description of Artificial Sequence: Synthetic oligonucleotide
  Antisense strand to SEQ ID NO: 2258878
aaagucacaguuuagacuc

SEQ ID NO: 2258880 - RNA, 19 nt, Artificial Sequence
  Description of Artificial Sequence: Synthetic oligonucleotide
  Sense strand starting at position 217 of SEQ ID NO: 1884347
augcacuaagcuggaaaua

SEQ ID NO: 2258881 - RNA, 19 nt, Artificial Sequence
  Description of Artificial Sequence: Synthetic oligonucleotide
  Antisense strand to SEQ ID NO: 2258880
uauuuccagcuuagugcau

SEQ ID NO: 2258882 - RNA, 19 nt, Artificial Sequence
  Description of Artificial Sequence: Synthetic oligonucleotide
  Sense strand starting at position 218 of SEQ ID NO: 1884347
ugcacuaagcuggaaauaa

SEQ ID NO: 2258883 - RNA, 19 nt, Artificial Sequence
  Description of Artificial Sequence: Synthetic oligonucleotide
  Antisense strand to SEQ ID NO: 2258882
uuauuuccagcuuagugca

SEQ ID NO: 2258884 - RNA, 19 nt, Artificial Sequence
  Description of Artificial Sequence: Synthetic oligonucleotide
  Sense strand starting at position 280 of SEQ ID NO: 1884347
uuuccuugagucggaggaa

SEQ ID NO: 2258885 - RNA, 19 nt, Artificial Sequence
  Description of Artificial Sequence: Synthetic oligonucleotide
  Antisense strand to SEQ ID NO: 2258884
uuccuccgacucaaggaaa

SEQ ID NO: 2258886 - RNA, 19 nt, Artificial Sequence
  Description of Artificial Sequence: Synthetic oligonucleotide
  Sense strand starting at position 283 of SEQ ID NO: 1884347
ccuugagucggaggaacua

SEQ ID NO: 2258887 - RNA, 19 nt, Artificial Sequence
  Description of Artificial Sequence: Synthetic oligonucleotide
  Antisense strand to SEQ ID NO: 2258886
uaguuccuccgacucaagg

SEQ ID NO: 2258888 - RNA, 19 nt, Artificial Sequence
  Description of Artificial Sequence: Synthetic oligonucleotide
  Sense strand starting at position 295 of SEQ ID NO: 1884347
ggaacuaagugagcuguua

SEQ ID NO: 2258889 - RNA, 19 nt, Artificial Sequence
  Description of Artificial Sequence: Synthetic oligonucleotide
  Antisense strand to SEQ ID NO: 2258888
uaacagcucacuuaguucc

SEQ ID NO: 2258890 - RNA, 19 nt, Artificial Sequence
  Description of Artificial Sequence: Synthetic oligonucleotide
  Sense strand starting at position 339 of SEQ ID NO: 1884347
ggcgacguugcuuugguua

SEQ ID NO: 2258891 - RNA, 19 nt, Artificial Sequence
  Description of Artificial Sequence: Synthetic oligonucleotide
  Antisense strand to SEQ ID NO: 2258890
uaaccaaagcaacgucgcc

SEQ ID NO: 2258892 - RNA, 19 nt, Artificial Sequence
  Description of Artificial Sequence: Synthetic oligonucleotide
  Sense strand starting at position 413 of SEQ ID NO: 1884347
auuucuaauuucugcagga

SEQ ID NO: 2258893 - RNA, 19 nt, Artificial Sequence
  Description of Artificial Sequence: Synthetic oligonucleotide
  Antisense strand to SEQ ID NO: 2258892
uccugcagaaauuagaaau

SEQ ID NO: 2258894 - RNA, 19 nt, Artificial Sequence
  Description of Artificial Sequence: Synthetic oligonucleotide
  Sense strand starting at position 624 of SEQ ID NO: 1884347
caggaaaugcugcacuguu

SEQ ID NO: 2258895 - RNA, 19 nt, Artificial Sequence
  Description of Artificial Sequence: Synthetic oligonucleotide
  Antisense strand to SEQ ID NO: 2258894
aacagugcagcauuuccug

SEQ ID NO: 2258896 - RNA, 19 nt, Artificial Sequence
  Description of Artificial Sequence: Synthetic oligonucleotide
  Sense strand starting at position 650 of SEQ ID NO: 1884347
cagagagugcguuaugaaa

SEQ ID NO: 2258897 - RNA, 19 nt, Artificial Sequence
  Description of Artificial Sequence: Synthetic oligonucleotide
  Antisense strand to SEQ ID NO: 2258896
uuucauaacgcacucucug

SEQ ID NO: 2258898 - RNA, 19 nt, Artificial Sequence
  Description of Artificial Sequence: Synthetic oligonucleotide
  Sense strand starting at position 674 of SEQ ID NO: 1884347
gcgauaaugccagggaaau

SEQ ID NO: 2258899 - RNA, 19 nt, Artificial Sequence
  Description of Artificial Sequence: Synthetic oligonucleotide
  Antisense strand to SEQ ID NO: 2258898
auuucccuggcauuaucgc

SEQ ID NO: 2258900 - RNA, 19 nt, Artificial Sequence
  Description of Artificial Sequence: Synthetic oligonucleotide
  Sense strand starting at position 675 of SEQ ID NO: 1884347
cgauaaugccagggaaaua

SEQ ID NO: 2258901 - RNA, 19 nt, Artificial Sequence
  Description of Artificial Sequence: Synthetic oligonucleotide
  Antisense strand to SEQ ID NO: 2258900
uauuucccuggcauuaucg

SEQ ID NO: 2258902 - RNA, 19 nt, Artificial Sequence
  Description of Artificial Sequence: Synthetic oligonucleotide
  Sense strand starting at position 725 of SEQ ID NO: 1884347
auuggaguaauguaugcaa

SEQ ID NO: 2258903 - RNA, 19 nt, Artificial Sequence
  Description of Artificial Sequence: Synthetic oligonucleotide
  Antisense strand to SEQ ID NO: 2258902
uugcauacauuacuccaau

SEQ ID NO: 2258904 - RNA, 19 nt, Artificial Sequence
  Description of Artificial Sequence: Synthetic oligonucleotide
  Sense strand starting at position 862 of SEQ ID NO: 1884347
guucucaguggguggaaga

SEQ ID NO: 2258905 - RNA, 19 nt, Artificial Sequence
  Description of Artificial Sequence: Synthetic oligonucleotide
  Antisense strand to SEQ ID NO: 2258904
ucuuccacccacugagaac

SEQ ID NO: 2258906 - RNA, 19 nt, Artificial Sequence
  Description of Artificial Sequence: Synthetic oligonucleotide
  Sense strand starting at position 887 of SEQ ID NO: 1884347
gaccauauucuaggguuau

SEQ ID NO: 2258907 - RNA, 19 nt, Artificial Sequence
  Description of Artificial Sequence: Synthetic oligonucleotide
  Antisense strand to SEQ ID NO: 2258906
auaacccuagaauaugguc

SEQ ID NO: 2258908 - RNA, 19 nt, Artificial Sequence
  Description of Artificial Sequence: Synthetic oligonucleotide
  Sense strand starting at position 891 of SEQ ID NO: 1884347
auauucuaggguuaucuua

SEQ ID NO: 2258909 - RNA, 19 nt, Artificial Sequence
  Description of Artificial Sequence: Synthetic oligonucleotide
  Antisense strand to SEQ ID NO: 2258908
uaagauaacccuagaauau

SEQ ID NO: 2258910 - RNA, 19 nt, Artificial Sequence
  Description of Artificial Sequence: Synthetic oligonucleotide
  Sense strand starting at position 1000 of SEQ ID NO: 1884347
uuauuagacuaugucgaga

SEQ ID NO: 2258911 - RNA, 19 nt, Artificial Sequence
  Description of Artificial Sequence: Synthetic oligonucleotide
  Antisense strand to SEQ ID NO: 2258910
ucucgacauagucuaauaa

SEQ ID NO: 2258912 - RNA, 19 nt, Artificial Sequence
  Description of Artificial Sequence: Synthetic oligonucleotide
  Sense strand starting at position 1014 of SEQ ID NO: 1884347
cgagacaggcaccauuaua

SEQ ID NO: 2258913 - RNA, 19 nt, Artificial Sequence
  Description of Artificial Sequence: Synthetic oligonucleotide
  Antisense strand to SEQ ID NO: 2258912
uauaauggugccugucucg

SEQ ID NO: 2258914 - RNA, 19 nt, Artificial Sequence
  Description of Artificial Sequence: Synthetic oligonucleotide
  Sense strand starting at position 1585 of SEQ ID NO: 1884347
ugccacuugaguggagaaa

SEQ ID NO: 2258915 - RNA, 19 nt, Artificial Sequence
  Description of Artificial Sequence: Synthetic oligonucleotide
  Antisense strand to SEQ ID NO: 2258914
uuucuccacucaaguggca

SEQ ID NO: 2258916 - RNA, 19 nt, Artificial Sequence
  Description of Artificial Sequence: Synthetic oligonucleotide
  Sense strand starting at position 1614 of SEQ ID NO: 1884347
aucugaagguguucaugga

SEQ ID NO: 2258917 - RNA, 19 nt, Artificial Sequence
  Description of Artificial Sequence: Synthetic oligonucleotide
  Antisense strand to SEQ ID NO: 2258916
uccaugaacaccuucagau

SEQ ID NO: 2258918 - RNA, 19 nt, Artificial Sequence
  Description of Artificial Sequence: Synthetic oligonucleotide
  Sense strand starting at position 2112 of SEQ ID NO: 1884347
auuggaagguuaucacuga

SEQ ID NO: 2258919 - RNA, 19 nt, Artificial Sequence
  Description of Artificial Sequence: Synthetic oligonucleotide
  Antisense strand to SEQ ID NO: 2258918
ucagugauaaccuuccaau

SEQ ID NO: 2258920 - RNA, 19 nt, Artificial Sequence
  Description of Artificial Sequence: Synthetic oligonucleotide
  Sense strand starting at position 2116 of SEQ ID NO: 1884347
gaagguuaucacugagggu

SEQ ID NO: 2258921 - RNA, 19 nt, Artificial Sequence
  Description of Artificial Sequence: Synthetic oligonucleotide
  Antisense strand to SEQ ID NO: 2258920
acccucagugauaaccuuc

SEQ ID NO: 2258922 - RNA, 19 nt, Artificial Sequence
  Description of Artificial Sequence: Synthetic oligonucleotide
  Sense strand starting at position 2539 of SEQ ID NO: 1884347
gcaccaucaccugaguucu

SEQ ID NO: 2258923 - RNA, 19 nt, Artificial Sequence
  Description of Artificial Sequence: Synthetic oligonucleotide
  Antisense strand to SEQ ID NO: 2258922
agaacucaggugauggugc

SEQ ID NO: 2258924 - RNA, 19 nt, Artificial Sequence
  Description of Artificial Sequence: Synthetic oligonucleotide
  Sense strand starting at position 2608 of SEQ ID NO: 1884347
cguugaggcucauuugaau

SEQ ID NO: 2258925 - RNA, 19 nt, Artificial Sequence
  Description of Artificial Sequence: Synthetic oligonucleotide
  Antisense strand to SEQ ID NO: 2258924
auucaaaugagccucaacg

SEQ ID NO: 2258926 - RNA, 19 nt, Artificial Sequence
  Description of Artificial Sequence: Synthetic oligonucleotide
  Sense strand starting at position 2617 of SEQ ID NO: 1884347
ucauuugaauguuacagau

SEQ ID NO: 2258927 - RNA, 19 nt, Artificial Sequence
  Description of Artificial Sequence: Synthetic oligonucleotide
  Antisense strand to SEQ ID NO: 2258926
aucuguaacauucaaauga

SEQ ID NO: 2258928 - RNA, 19 nt, Artificial Sequence
  Description of Artificial Sequence: Synthetic oligonucleotide
  Sense strand starting at position 2619 of SEQ ID NO: 1884347
auuugaauguuacagauca

SEQ ID NO: 2258929 - RNA, 19 nt, Artificial Sequence
  Description of Artificial Sequence: Synthetic oligonucleotide
  Antisense strand to SEQ ID NO: 2258928
ugaucuguaacauucaaau

SEQ ID NO: 2258930 - RNA, 19 nt, Artificial Sequence
  Description of Artificial Sequence: Synthetic oligonucleotide
  Sense strand starting at position 2885 of SEQ ID NO: 1884347
agcugagaucccuggguga

SEQ ID NO: 2258931 - RNA, 19 nt, Artificial Sequence
  Description of Artificial Sequence: Synthetic oligonucleotide
  Antisense strand to SEQ ID NO: 2258930
ucacccagggaucucagcu

SEQ ID NO: 2258932 - RNA, 19 nt, Artificial Sequence
  Description of Artificial Sequence: Synthetic oligonucleotide
  Sense strand starting at position 2887 of SEQ ID NO: 1884347
cugagaucccugggugaca

SEQ ID NO: 2258933 - RNA, 19 nt, Artificial Sequence
  Description of Artificial Sequence: Synthetic oligonucleotide
  Antisense strand to SEQ ID NO: 2258932
ugucacccagggaucucag

SEQ ID NO: 2258934 - RNA, 19 nt, Artificial Sequence
  Description of Artificial Sequence: Synthetic oligonucleotide
  Sense strand starting at position 2938 of SEQ ID NO: 1884347
agaagugauucuccucuag

SEQ ID NO: 2258935 - RNA, 19 nt, Artificial Sequence
  Description of Artificial Sequence: Synthetic oligonucleotide
  Antisense strand to SEQ ID NO: 2258934
cuagaggagaaucacuucu

SEQ ID NO: 2258936 - RNA, 19 nt, Artificial Sequence
  Description of Artificial Sequence: Synthetic oligonucleotide
  Sense strand starting at position 2942 of SEQ ID NO: 1884347
gugauucuccucuagucua

SEQ ID NO: 2258937 - RNA, 19 nt, Artificial Sequence
  Description of Artificial Sequence: Synthetic oligonucleotide
  Antisense strand to SEQ ID NO: 2258936
uagacuagaggagaaucac

SEQ ID NO: 2258938 - RNA, 19 nt, Artificial Sequence
  Description of Artificial Sequence: Synthetic oligonucleotide
  Sense strand starting at position 3086 of SEQ ID NO: 1884347
gacaauggcgcguuagcaa

SEQ ID NO: 2258939 - RNA, 19 nt, Artificial Sequence
  Description of Artificial Sequence: Synthetic oligonucleotide
  Antisense strand to SEQ ID NO: 2258938
uugcuaacgcgccauuguc

SEQ ID NO: 2258940 - RNA, 19 nt, Artificial Sequence
  Description of Artificial Sequence: Synthetic oligonucleotide
  Sense strand starting at position 3480 of SEQ ID NO: 1884347
ugaaucucgcuccagagau

SEQ ID NO: 2258941 - RNA, 19 nt, Artificial Sequence
  Description of Artificial Sequence: Synthetic oligonucleotide
  Antisense strand to SEQ ID NO: 2258940
aucucuggagcgagauuca

SEQ ID NO: 2258942 - RNA, 19 nt, Artificial Sequence
  Description of Artificial Sequence: Synthetic oligonucleotide
  Sense strand starting at position 3753 of SEQ ID NO: 1884347
cgcuguggugugccuaauu

SEQ ID NO: 2258943 - RNA, 19 nt, Artificial Sequence
  Description of Artificial Sequence: Synthetic oligonucleotide
  Antisense strand to SEQ ID NO: 2258942
aauuaggcacaccacagcg

SEQ ID NO: 2258944 - RNA, 19 nt, Artificial Sequence
  Description of Artificial Sequence: Synthetic oligonucleotide
  Sense strand starting at position 3808 of SEQ ID NO: 1884347
aacauuauugcagggagca

SEQ ID NO: 2258945 - RNA, 19 nt, Artificial Sequence
  Description of Artificial Sequence: Synthetic oligonucleotide
  Antisense strand to SEQ ID NO: 2258944
ugcucccugcaauaauguu

SEQ ID NO: 2258946 - RNA, 19 nt, Artificial Sequence
  Description of Artificial Sequence: Synthetic oligonucleotide
  Sense strand starting at position 3827 of SEQ ID NO: 1884347
gcuuaaggcaguuaacaga

SEQ ID NO: 2258947 - RNA, 19 nt, Artificial Sequence
  Description of Artificial Sequence: Synthetic oligonucleotide
  Antisense strand to SEQ ID NO: 2258946
ucuguuaacugccuuaagc

SEQ ID NO: 2258948 - RNA, 19 nt, Artificial Sequence
  Description of Artificial Sequence: Synthetic oligonucleotide
  Sense strand starting at position 6 of SEQ ID NO: 1884348
ccgugcucugggcaggaaa

SEQ ID NO: 2258949 - RNA, 19 nt, Artificial Sequence
  Description of Artificial Sequence: Synthetic oligonucleotide
  Antisense strand to SEQ ID NO: 2258948
uuuccugcccagagcacgg

SEQ ID NO: 2258950 - RNA, 19 nt, Artificial Sequence
  Description of Artificial Sequence: Synthetic oligonucleotide
  Sense strand starting at position 167 of SEQ ID NO: 1884348
gucagauacgucugucaug

SEQ ID NO: 2258951 - RNA, 19 nt, Artificial Sequence
  Description of Artificial Sequence: Synthetic oligonucleotide
  Antisense strand to SEQ ID NO: 2258950
caugacagacguaucugac

SEQ ID NO: 2258952 - RNA, 19 nt, Artificial Sequence
  Description of Artificial Sequence: Synthetic oligonucleotide
  Sense strand starting at position 358 of SEQ ID NO: 1884348
cugagugucguuugucaca

SEQ ID NO: 2258953 - RNA, 19 nt, Artificial Sequence
  Description of Artificial Sequence: Synthetic oligonucleotide
  Antisense strand to SEQ ID NO: 2258952
ugugacaaacgacacucag

SEQ ID NO: 2258954 - RNA, 19 nt, Artificial Sequence
  Description of Artificial Sequence: Synthetic oligonucleotide
  Sense strand starting at position 360 of SEQ ID NO: 1884348
gagugucguuugucacacu

SEQ ID NO: 2258955 - RNA, 19 nt, Artificial Sequence
  Description of Artificial Sequence: Synthetic oligonucleotide
  Antisense strand to SEQ ID NO: 2258954
agugugacaaacgacacuc

SEQ ID NO: 2258956 - RNA, 19 nt, Artificial Sequence
  Description of Artificial Sequence: Synthetic oligonucleotide
  Sense strand starting at position 591 of SEQ ID NO: 1884348
ggugaaguggccuguccau

SEQ ID NO: 2258957 - RNA, 19 nt, Artificial Sequence
  Description of Artificial Sequence: Synthetic oligonucleotide
  Antisense strand to SEQ ID NO: 2258956
auggacaggccacuucacc

SEQ ID NO: 2258958 - RNA, 19 nt, Artificial Sequence
  Description of Artificial Sequence: Synthetic oligonucleotide
  Sense strand starting at position 629 of SEQ ID NO: 1884348
gccacuugggcuuagcuaa

SEQ ID NO: 2258959 - RNA, 19 nt, Artificial Sequence
  Description of Artificial Sequence: Synthetic oligonucleotide
  Antisense strand to SEQ ID NO: 2258958
uuagcuaagcccaaguggc

SEQ ID NO: 2258960 - RNA, 19 nt, Artificial Sequence
  Description of Artificial Sequence: Synthetic oligonucleotide
  Sense strand starting at position 764 of SEQ ID NO: 1884348
ggguucuaacuaggucuuu

SEQ ID NO: 2258961 - RNA, 19 nt, Artificial Sequence
  Description of Artificial Sequence: Synthetic oligonucleotide
  Antisense strand to SEQ ID NO: 2258960
aaagaccuaguuagaaccc

SEQ ID NO: 2258962 - RNA, 19 nt, Artificial Sequence
  Description of Artificial Sequence: Synthetic oligonucleotide
  Sense strand starting at position 1263 of SEQ ID NO: 1884348
ugggccucuuggccugaaa

SEQ ID NO: 2258963 - RNA, 19 nt, Artificial Sequence
  Description of Artificial Sequence: Synthetic oligonucleotide
  Antisense strand to SEQ ID NO: 2258962
uuucaggccaagaggccca

SEQ ID NO: 2258964 - RNA, 19 nt, Artificial Sequence
  Description of Artificial Sequence: Synthetic oligonucleotide
  Sense strand starting at position 1294 of SEQ ID NO: 1884348
cggucauccuggccagaug

SEQ ID NO: 2258965 - RNA, 19 nt, Artificial Sequence
  Description of Artificial Sequence: Synthetic oligonucleotide
  Antisense strand to SEQ ID NO: 2258964
caucuggccaggaugaccg

SEQ ID NO: 2258966 - RNA, 19 nt, Artificial Sequence
  Description of Artificial Sequence: Synthetic oligonucleotide
  Sense strand starting at position 1412 of SEQ ID NO: 1884348
uccgcuucuccagacagau

SEQ ID NO: 2258967 - RNA, 19 nt, Artificial Sequence
  Description of Artificial Sequence: Synthetic oligonucleotide
  Antisense strand to SEQ ID NO: 2258966
aucugucuggagaagcgga

SEQ ID NO: 2258968 - RNA, 19 nt, Artificial Sequence
  Description of Artificial Sequence: Synthetic oligonucleotide
  Sense strand starting at position 1609 of SEQ ID NO: 1884348
aggccagauccucaccuaa

SEQ ID NO: 2258969 - RNA, 19 nt, Artificial Sequence
  Description of Artificial Sequence: Synthetic oligonucleotide
  Antisense strand to SEQ ID NO: 2258968
uuaggugaggaucuggccu

SEQ ID NO: 2258970 - RNA, 19 nt, Artificial Sequence
  Description of Artificial Sequence: Synthetic oligonucleotide
  Sense strand starting at position 1652 of SEQ ID NO: 1884348
gggugaagccgugauaggu

SEQ ID NO: 2258971 - RNA, 19 nt, Artificial Sequence
  Description of Artificial Sequence: Synthetic oligonucleotide
  Antisense strand to SEQ ID NO: 2258970
accuaucacggcuucaccc

SEQ ID NO: 2258972 - RNA, 19 nt, Artificial Sequence
  Description of Artificial Sequence: Synthetic oligonucleotide
  Sense strand starting at position 1660 of SEQ ID NO: 1884348
ccgugauaggugagugucu

SEQ ID NO: 2258973 - RNA, 19 nt, Artificial Sequence
  Description of Artificial Sequence: Synthetic oligonucleotide
  Antisense strand to SEQ ID NO: 2258972
agacacucaccuaucacgg

SEQ ID NO: 2258974 - RNA, 19 nt, Artificial Sequence
  Description of Artificial Sequence: Synthetic oligonucleotide
  Sense strand starting at position 1669 of SEQ ID NO: 1884348
gugagugucuccucccaga

SEQ ID NO: 2258975 - RNA, 19 nt, Artificial Sequence
  Description of Artificial Sequence: Synthetic oligonucleotide
  Antisense strand to SEQ ID NO: 2258974
ucugggaggagacacucac

SEQ ID NO: 2258976 - RNA, 19 nt, Artificial Sequence
  Description of Artificial Sequence: Synthetic oligonucleotide
  Sense strand starting at position 1968 of SEQ ID NO: 1884348
gcagauuggcuuugacaua

SEQ ID NO: 2258977 - RNA, 19 nt, Artificial Sequence
  Description of Artificial Sequence: Synthetic oligonucleotide
  Antisense strand to SEQ ID NO: 2258976
uaugucaaagccaaucugc

SEQ ID NO: 2258978 - RNA, 19 nt, Artificial Sequence
  Description of Artificial Sequence: Synthetic oligonucleotide
  Sense strand starting at position 1973 of SEQ ID NO: 1884348
uuggcuuugacauaggcau

SEQ ID NO: 2258979 - RNA, 19 nt, Artificial Sequence
  Description of Artificial Sequence: Synthetic oligonucleotide
  Antisense strand to SEQ ID NO: 2258978
augccuaugucaaagccaa

SEQ ID NO: 2258980 - RNA, 19 nt, Artificial Sequence
  Description of Artificial Sequence: Synthetic oligonucleotide
  Sense strand starting at position 2103 of SEQ ID NO: 1884348
gcacgaugagccgugcaau

SEQ ID NO: 2258981 - RNA, 19 nt, Artificial Sequence
  Description of Artificial Sequence: Synthetic oligonucleotide
  Antisense strand to SEQ ID NO: 2258980
auugcacggcucaucgugc

SEQ ID NO: 2258982 - RNA, 19 nt, Artificial Sequence
  Description of Artificial Sequence: Synthetic oligonucleotide
  Sense strand starting at position 2473 of SEQ ID NO: 1884348
gcgggaaguagugggaaau

SEQ ID NO: 2258983 - RNA, 19 nt, Artificial Sequence
  Description of Artificial Sequence: Synthetic oligonucleotide
  Antisense strand to SEQ ID NO: 2258982
auuucccacuacuucccgc

SEQ ID NO: 2258984 - RNA, 19 nt, Artificial Sequence
  Description of Artificial Sequence: Synthetic oligonucleotide
  Sense strand starting at position 2617 of SEQ ID NO: 1884348
ggcggagacucagagaaau

SEQ ID NO: 2258985 - RNA, 19 nt, Artificial Sequence
  Description of Artificial Sequence: Synthetic oligonucleotide
  Antisense strand to SEQ ID NO: 2258984
auuucucugagucuccgcc

SEQ ID NO: 2258986 - RNA, 19 nt, Artificial Sequence
  Description of Artificial Sequence: Synthetic oligonucleotide
  Sense strand starting at position 2685 of SEQ ID NO: 1884348
gaagaagcaucgcugauac

SEQ ID NO: 2258987 - RNA, 19 nt, Artificial Sequence
  Description of Artificial Sequence: Synthetic oligonucleotide
  Antisense strand to SEQ ID NO: 2258986
guaucagcgaugcuucuuc

SEQ ID NO: 2258988 - RNA, 19 nt, Artificial Sequence
  Description of Artificial Sequence: Synthetic oligonucleotide
  Sense strand starting at position 2687 of SEQ ID NO: 1884348
agaagcaucgcugauacca

SEQ ID NO: 2258989 - RNA, 19 nt, Artificial Sequence
  Description of Artificial Sequence: Synthetic oligonucleotide
  Antisense strand to SEQ ID NO: 2258988
ugguaucagcgaugcuucu

SEQ ID NO: 2258990 - RNA, 19 nt, Artificial Sequence
  Description of Artificial Sequence: Synthetic oligonucleotide
  Sense strand starting at position 2795 of SEQ ID NO: 1884348
ggguguguugggagucagu

SEQ ID NO: 2258991 - RNA, 19 nt, Artificial Sequence
  Description of Artificial Sequence: Synthetic oligonucleotide
  Antisense strand to SEQ ID NO: 2258990
acugacucccaacacaccc

SEQ ID NO: 2258992 - RNA, 19 nt, Artificial Sequence
  Description of Artificial Sequence: Synthetic oligonucleotide
  Sense strand starting at position 3015 of SEQ ID NO: 1884348
cuuugucaaagggaguuau

SEQ ID NO: 2258993 - RNA, 19 nt, Artificial Sequence
  Description of Artificial Sequence: Synthetic oligonucleotide
  Antisense strand to SEQ ID NO: 2258992
auaacucccuuugacaaag

SEQ ID NO: 2258994 - RNA, 19 nt, Artificial Sequence
  Description of Artificial Sequence: Synthetic oligonucleotide
  Sense strand starting at position 3094 of SEQ ID NO: 1884348
gagggcuguggaggugaua

SEQ ID NO: 2258995 - RNA, 19 nt, Artificial Sequence
  Description of Artificial Sequence: Synthetic oligonucleotide
  Antisense strand to SEQ ID NO: 2258994
uaucaccuccacagcccuc

SEQ ID NO: 2258996 - RNA, 19 nt, Artificial Sequence
  Description of Artificial Sequence: Synthetic oligonucleotide
  Sense strand starting at position 3097 of SEQ ID NO: 1884348
ggcuguggaggugauaagu

SEQ ID NO: 2258997 - RNA, 19 nt, Artificial Sequence
  Description of Artificial Sequence: Synthetic oligonucleotide
  Antisense strand to SEQ ID NO: 2258996
acuuaucaccuccacagcc

SEQ ID NO: 2258998 - RNA, 19 nt, Artificial Sequence
  Description of Artificial Sequence: Synthetic oligonucleotide
  Sense strand starting at position 3108 of SEQ ID NO: 1884348
ugauaagugguuuguggga

SEQ ID NO: 2258999 - RNA, 19 nt, Artificial Sequence
  Description of Artificial Sequence: Synthetic oligonucleotide
  Antisense strand to SEQ ID NO: 2258998
ucccacaaaccacuuauca

SEQ ID NO: 2259000 - RNA, 19 nt, Artificial Sequence
  Description of Artificial Sequence: Synthetic oligonucleotide
  Sense strand starting at position 3573 of SEQ ID NO: 1884348
acaauaugguguucugaug

SEQ ID NO: 2259001 - RNA, 19 nt, Artificial Sequence
  Description of Artificial Sequence: Synthetic oligonucleotide
  Antisense strand to SEQ ID NO: 2259000
caucagaacaccauauugu

SEQ ID NO: 2259002 - RNA, 19 nt, Artificial Sequence
  Description of Artificial Sequence: Synthetic oligonucleotide
  Sense strand starting at position 3580 of SEQ ID NO: 1884348
gguguucugaugugauaug

SEQ ID NO: 2259003 - RNA, 19 nt, Artificial Sequence
  Description of Artificial Sequence: Synthetic oligonucleotide
  Antisense strand to SEQ ID NO: 2259002
cauaucacaucagaacacc

SEQ ID NO: 2259004 - RNA, 19 nt, Artificial Sequence
  Description of Artificial Sequence: Synthetic oligonucleotide
  Sense strand starting at position 3587 of SEQ ID NO: 1884348
ugaugugauauguguagaa

SEQ ID NO: 2259005 - RNA, 19 nt, Artificial Sequence
  Description of Artificial Sequence: Synthetic oligonucleotide
  Antisense strand to SEQ ID NO: 2259004
uucuacacauaucacauca

SEQ ID NO: 2259006 - RNA, 19 nt, Artificial Sequence
  Description of Artificial Sequence: Synthetic oligonucleotide
  Sense strand starting at position 3589 of SEQ ID NO: 1884348
augugauauguguagaaau

SEQ ID NO: 2259007 - RNA, 19 nt, Artificial Sequence
  Description of Artificial Sequence: Synthetic oligonucleotide
  Antisense strand to SEQ ID NO: 2259006
auuucuacacauaucacau

SEQ ID NO: 2259008 - RNA, 19 nt, Artificial Sequence
  Description of Artificial Sequence: Synthetic oligonucleotide
  Sense strand starting at position 3618 of SEQ ID NO: 1884348
caauaugcauuguagaaag

SEQ ID NO: 2259009 - RNA, 19 nt, Artificial Sequence
  Description of Artificial Sequence: Synthetic oligonucleotide
  Antisense strand to SEQ ID NO: 2259008
cuuucuacaaugcauauug

SEQ ID NO: 2259010 - RNA, 19 nt, Artificial Sequence
  Description of Artificial Sequence: Synthetic oligonucleotide
  Sense strand starting at position 3632 of SEQ ID NO: 1884348
gaaagagucagucaggcua

SEQ ID NO: 2259011 - RNA, 19 nt, Artificial Sequence
  Description of Artificial Sequence: Synthetic oligonucleotide
  Antisense strand to SEQ ID NO: 2259010
uagccugacugacucuuuc

SEQ ID NO: 2259012 - RNA, 19 nt, Artificial Sequence
  Description of Artificial Sequence: Synthetic oligonucleotide
  Sense strand starting at position 3704 of SEQ ID NO: 1884348
ggcgcuauuguuagggaug

SEQ ID NO: 2259013 - RNA, 19 nt, Artificial Sequence
  Description of Artificial Sequence: Synthetic oligonucleotide
  Antisense strand to SEQ ID NO: 2259012
caucccuaacaauagcgcc

SEQ ID NO: 2259014 - RNA, 19 nt, Artificial Sequence
  Description of Artificial Sequence: Synthetic oligonucleotide
  Sense strand starting at position 3707 of SEQ ID NO: 1884348
gcuauuguuagggauguuu

SEQ ID NO: 2259015 - RNA, 19 nt, Artificial Sequence
  Description of Artificial Sequence: Synthetic oligonucleotide
  Antisense strand to SEQ ID NO: 2259014
aaacaucccuaacaauagc

SEQ ID NO: 2259016 - RNA, 19 nt, Artificial Sequence
  Description of Artificial Sequence: Synthetic oligonucleotide
  Sense strand starting at position 3709 of SEQ ID NO: 1884348
uauuguuagggauguuugu

SEQ ID NO: 2259017 - RNA, 19 nt, Artificial Sequence
  Description of Artificial Sequence: Synthetic oligonucleotide
  Antisense strand to SEQ ID NO: 2259016
acaaacaucccuaacaaua

SEQ ID NO: 2259018 - RNA, 19 nt, Artificial Sequence
  Description of Artificial Sequence: Synthetic oligonucleotide
  Sense strand starting at position 3715 of SEQ ID NO: 1884348
uagggauguuugucaugcu

SEQ ID NO: 2259019 - RNA, 19 nt, Artificial Sequence
  Description of Artificial Sequence: Synthetic oligonucleotide
  Antisense strand to SEQ ID NO: 2259018
agcaugacaaacaucccua

SEQ ID NO: 2259020 - RNA, 19 nt, Artificial Sequence
  Description of Artificial Sequence: Synthetic oligonucleotide
  Sense strand starting at position 3723 of SEQ ID NO: 1884348
uuugucaugcugugcaaca

SEQ ID NO: 2259021 - RNA, 19 nt, Artificial Sequence
  Description of Artificial Sequence: Synthetic oligonucleotide
  Antisense strand to SEQ ID NO: 2259020
uguugcacagcaugacaaa

SEQ ID NO: 2259022 - RNA, 19 nt, Artificial Sequence
  Description of Artificial Sequence: Synthetic oligonucleotide
  Sense strand starting at position 3768 of SEQ ID NO: 1884348
ggaacuuuguacccuaaga

SEQ ID NO: 2259023 - RNA, 19 nt, Artificial Sequence
  Description of Artificial Sequence: Synthetic oligonucleotide
  Antisense strand to SEQ ID NO: 2259022
ucuuaggguacaaaguucc

SEQ ID NO: 2259024 - RNA, 19 nt, Artificial Sequence
  Description of Artificial Sequence: Synthetic oligonucleotide
  Sense strand starting at position 3898 of SEQ ID NO: 1884348
ccguauaguauuugucuuu

SEQ ID NO: 2259025 - RNA, 19 nt, Artificial Sequence
  Description of Artificial Sequence: Synthetic oligonucleotide
  Antisense strand to SEQ ID NO: 2259024
aaagacaaauacuauacgg

SEQ ID NO: 2259026 - RNA, 19 nt, Artificial Sequence
  Description of Artificial Sequence: Synthetic oligonucleotide
  Sense strand starting at position 3976 of SEQ ID NO: 1884348
augauagaauguccaucuu

SEQ ID NO: 2259027 - RNA, 19 nt, Artificial Sequence
  Description of Artificial Sequence: Synthetic oligonucleotide
  Antisense strand to SEQ ID NO: 2259026
aagauggacauucuaucau

SEQ ID NO: 2259028 - RNA, 19 nt, Artificial Sequence
  Description of Artificial Sequence: Synthetic oligonucleotide
  Sense strand starting at position 94 of SEQ ID NO: 1884349
acaugagugucuggaugag

SEQ ID NO: 2259029 - RNA, 19 nt, Artificial Sequence
  Description of Artificial Sequence: Synthetic oligonucleotide
  Antisense strand to SEQ ID NO: 2259028
cucauccagacacucaugu

SEQ ID NO: 2259030 - RNA, 19 nt, Artificial Sequence
  Description of Artificial Sequence: Synthetic oligonucleotide
  Sense strand starting at position 151 of SEQ ID NO: 1884349
gaacaugaggucugaguuu

SEQ ID NO: 2259031 - RNA, 19 nt, Artificial Sequence
  Description of Artificial Sequence: Synthetic oligonucleotide
  Antisense strand to SEQ ID NO: 2259030
aaacucagaccucauguuc

SEQ ID NO: 2259032 - RNA, 19 nt, Artificial Sequence
  Description of Artificial Sequence: Synthetic oligonucleotide
  Sense strand starting at position 312 of SEQ ID NO: 1884349
ccguguaggucguugauga

SEQ ID NO: 2259033 - RNA, 19 nt, Artificial Sequence
  Description of Artificial Sequence: Synthetic oligonucleotide
  Antisense strand to SEQ ID NO: 2259032
ucaucaacgaccuacacgg

SEQ ID NO: 2259034 - RNA, 19 nt, Artificial Sequence
  Description of Artificial Sequence: Synthetic oligonucleotide
  Sense strand starting at position 411 of SEQ ID NO: 1884349
gucagacacucguugacau

SEQ ID NO: 2259035 - RNA, 19 nt, Artificial Sequence
  Description of Artificial Sequence: Synthetic oligonucleotide
  Antisense strand to SEQ ID NO: 2259034
augucaacgagugucugac

SEQ ID NO: 2259036 - RNA, 19 nt, Artificial Sequence
  Description of Artificial Sequence: Synthetic oligonucleotide
  Sense strand starting at position 504 of SEQ ID NO: 1884349
ucggccuucucugagaugu

SEQ ID NO: 2259037 - RNA, 19 nt, Artificial Sequence
  Description of Artificial Sequence: Synthetic oligonucleotide
  Antisense strand to SEQ ID NO: 2259036
acaucucagagaaggccga

SEQ ID NO: 2259038 - RNA, 19 nt, Artificial Sequence
  Description of Artificial Sequence: Synthetic oligonucleotide
  Sense strand starting at position 506 of SEQ ID NO: 1884349
ggccuucucugagaugugu

SEQ ID NO: 2259039 - RNA, 19 nt, Artificial Sequence
  Description of Artificial Sequence: Synthetic oligonucleotide
  Antisense strand to SEQ ID NO: 2259038
acacaucucagagaaggcc

SEQ ID NO: 2259040 - RNA, 19 nt, Artificial Sequence
  Description of Artificial Sequence: Synthetic oligonucleotide
  Sense strand starting at position 737 of SEQ ID NO: 1884349
cucccagguugugaugaga

SEQ ID NO: 2259041 - RNA, 19 nt, Artificial Sequence
  Description of Artificial Sequence: Synthetic oligonucleotide
  Antisense strand to SEQ ID NO: 2259040
ucucaucacaaccugggag

SEQ ID NO: 2259042 - RNA, 19 nt, Artificial Sequence
  Description of Artificial Sequence: Synthetic oligonucleotide
  Sense strand starting at position 821 of SEQ ID NO: 1884349
ggacaagguuuccuggguu

SEQ ID NO: 2259043 - RNA, 19 nt, Artificial Sequence
  Description of Artificial Sequence: Synthetic oligonucleotide
  Antisense strand to SEQ ID NO: 2259042
aacccaggaaaccuugucc

SEQ ID NO: 2259044 - RNA, 19 nt, Artificial Sequence
  Description of Artificial Sequence: Synthetic oligonucleotide
  Sense strand starting at position 1076 of SEQ ID NO: 1884349
ugugcauuccuggaaggga

SEQ ID NO: 2259045 - RNA, 19 nt, Artificial Sequence
  Description of Artificial Sequence: Synthetic oligonucleotide
  Antisense strand to SEQ ID NO: 2259044
ucccuuccaggaaugcaca

SEQ ID NO: 2259046 - RNA, 19 nt, Artificial Sequence
  Description of Artificial Sequence: Synthetic oligonucleotide
  Sense strand starting at position 1329 of SEQ ID NO: 1884349
ucagaauccugaggagaag

SEQ ID NO: 2259047 - RNA, 19 nt, Artificial Sequence
  Description of Artificial Sequence: Synthetic oligonucleotide
  Antisense strand to SEQ ID NO: 2259046
cuucuccucaggauucuga

SEQ ID NO: 2259048 - RNA, 19 nt, Artificial Sequence
  Description of Artificial Sequence: Synthetic oligonucleotide
  Sense strand starting at position 2137 of SEQ ID NO: 1884349
augucauccugcucaccua

SEQ ID NO: 2259049 - RNA, 19 nt, Artificial Sequence
  Description of Artificial Sequence: Synthetic oligonucleotide
  Antisense strand to SEQ ID NO: 2259048
uaggugagcaggaugacau

SEQ ID NO: 2259050 - RNA, 19 nt, Artificial Sequence
  Description of Artificial Sequence: Synthetic oligonucleotide
  Sense strand starting at position 2242 of SEQ ID NO: 1884349
ccgagaucguccuggguac

SEQ ID NO: 2259051 - RNA, 19 nt, Artificial Sequence
  Description of Artificial Sequence: Synthetic oligonucleotide
  Antisense strand to SEQ ID NO: 2259050
guacccaggacgaucucgg

SEQ ID NO: 2259052 - RNA, 19 nt, Artificial Sequence
  Description of Artificial Sequence: Synthetic oligonucleotide
  Sense strand starting at position 2326 of SEQ ID NO: 1884349
cccagaccgucauuguaaa

SEQ ID NO: 2259053 - RNA, 19 nt, Artificial Sequence
  Description of Artificial Sequence: Synthetic oligonucleotide
  Antisense strand to SEQ ID NO: 2259052
uuuacaaugacggucuggg

SEQ ID NO: 2259054 - RNA, 19 nt, Artificial Sequence
  Description of Artificial Sequence: Synthetic oligonucleotide
  Sense strand starting at position 3457 of SEQ ID NO: 1884349
caaagaaauuagcuggugu

SEQ ID NO: 2259055 - RNA, 19 nt, Artificial Sequence
  Description of Artificial Sequence: Synthetic oligonucleotide
  Antisense strand to SEQ ID NO: 2259054
acaccagcuaauuucuuug

SEQ ID NO: 2259056 - RNA, 19 nt, Artificial Sequence
  Description of Artificial Sequence: Synthetic oligonucleotide
  Sense strand starting at position 3459 of SEQ ID NO: 1884349
aagaaauuagcugguguag

SEQ ID NO: 2259057 - RNA, 19 nt, Artificial Sequence
  Description of Artificial Sequence: Synthetic oligonucleotide
  Antisense strand to SEQ ID NO: 2259056
cuacaccagcuaauuucuu

SEQ ID NO: 2259058 - RNA, 19 nt, Artificial Sequence
  Description of Artificial Sequence: Synthetic oligonucleotide
  Sense strand starting at position 3461 of SEQ ID NO: 1884349
gaaauuagcugguguagug

SEQ ID NO: 2259059 - RNA, 19 nt, Artificial Sequence
  Description of Artificial Sequence: Synthetic oligonucleotide
  Antisense strand to SEQ ID NO: 2259058
cacuacaccagcuaauuuc

SEQ ID NO: 2259060 - RNA, 19 nt, Artificial Sequence
  Description of Artificial Sequence: Synthetic oligonucleotide
  Sense strand starting at position 3699 of SEQ ID NO: 1884349
ugcacuguugguggacaau

SEQ ID NO: 2259061 - RNA, 19 nt, Artificial Sequence
  Description of Artificial Sequence: Synthetic oligonucleotide
  Antisense strand to SEQ ID NO: 2259060
auuguccaccaacagugca

SEQ ID NO: 2259062 - RNA, 19 nt, Artificial Sequence
  Description of Artificial Sequence: Synthetic oligonucleotide
  Sense strand starting at position 3710 of SEQ ID NO: 1884349
uggacaauggucuggcagu

SEQ ID NO: 2259063 - RNA, 19 nt, Artificial Sequence
  Description of Artificial Sequence: Synthetic oligonucleotide
  Antisense strand to SEQ ID NO: 2259062
acugccagaccauugucca

SEQ ID NO: 2259064 - RNA, 19 nt, Artificial Sequence
  Description of Artificial Sequence: Synthetic oligonucleotide
  Sense strand starting at position 3711 of SEQ ID NO: 1884349
ggacaauggucuggcaguu

SEQ ID NO: 2259065 - RNA, 19 nt, Artificial Sequence
  Description of Artificial Sequence: Synthetic oligonucleotide
  Antisense strand to SEQ ID NO: 2259064
aacugccagaccauugucc

SEQ ID NO: 2259066 - RNA, 19 nt, Artificial Sequence
  Description of Artificial Sequence: Synthetic oligonucleotide
  Sense strand starting at position 3817 of SEQ ID NO: 1884349
ucuguacgcagcguuuaua

SEQ ID NO: 2259067 - RNA, 19 nt, Artificial Sequence
  Description of Artificial Sequence: Synthetic oligonucleotide
  Antisense strand to SEQ ID NO: 2259066
uauaaacgcugcguacaga

SEQ ID NO: 2259068 - RNA, 19 nt, Artificial Sequence
  Description of Artificial Sequence: Synthetic oligonucleotide
  Sense strand starting at position 3826 of SEQ ID NO: 1884349
agcguuuauagcugcacua

SEQ ID NO: 2259069 - RNA, 19 nt, Artificial Sequence
  Description of Artificial Sequence: Synthetic oligonucleotide
  Antisense strand to SEQ ID NO: 2259068
uagugcagcuauaaacgcu

SEQ ID NO: 2259070 - RNA, 19 nt, Artificial Sequence
  Description of Artificial Sequence: Synthetic oligonucleotide
  Sense strand starting at position 3827 of SEQ ID NO: 1884349
gcguuuauagcugcacuau

SEQ ID NO: 2259071 - RNA, 19 nt, Artificial Sequence
  Description of Artificial Sequence: Synthetic oligonucleotide
  Antisense strand to SEQ ID NO: 2259070
auagugcagcuauaaacgc

SEQ ID NO: 2259072 - RNA, 19 nt, Artificial Sequence
  Description of Artificial Sequence: Synthetic oligonucleotide
  Sense strand starting at position 3828 of SEQ ID NO: 1884349
cguuuauagcugcacuaua

SEQ ID NO: 2259073 - RNA, 19 nt, Artificial Sequence
  Description of Artificial Sequence: Synthetic oligonucleotide
  Antisense strand to SEQ ID NO: 2259072
uauagugcagcuauaaacg

SEQ ID NO: 2259074 - RNA, 19 nt, Artificial Sequence
  Description of Artificial Sequence: Synthetic oligonucleotide
  Sense strand starting at position 3878 of SEQ ID NO: 1884349
gccgucaacugaugaauaa

SEQ ID NO: 2259075 - RNA, 19 nt, Artificial Sequence
  Description of Artificial Sequence: Synthetic oligonucleotide
  Antisense strand to SEQ ID NO: 2259074
uuauucaucaguugacggc

SEQ ID NO: 2259076 - RNA, 19 nt, Artificial Sequence
  Description of Artificial Sequence: Synthetic oligonucleotide
  Sense strand starting at position 3879 of SEQ ID NO: 1884349
ccgucaacugaugaauaac

SEQ ID NO: 2259077 - RNA, 19 nt, Artificial Sequence
  Description of Artificial Sequence: Synthetic oligonucleotide
  Antisense strand to SEQ ID NO: 2259076
guuauucaucaguugacgg

SEQ ID NO: 2259078 - RNA, 19 nt, Artificial Sequence
  Description of Artificial Sequence: Synthetic oligonucleotide
  Sense strand starting at position 3956 of SEQ ID NO: 1884349
ugaugcaugccacaauaua

SEQ ID NO: 2259079 - RNA, 19 nt, Artificial Sequence
  Description of Artificial Sequence: Synthetic oligonucleotide
  Antisense strand to SEQ ID NO: 2259078
uauauuguggcaugcauca

SEQ ID NO: 2259080 - RNA, 19 nt, Artificial Sequence
  Description of Artificial Sequence: Synthetic oligonucleotide
  Sense strand starting at position 3964 of SEQ ID NO: 1884349
gccacaauauaggugaauu

SEQ ID NO: 2259081 - RNA, 19 nt, Artificial Sequence
  Description of Artificial Sequence: Synthetic oligonucleotide
  Antisense strand to SEQ ID NO: 2259080
aauucaccuauauuguggc

SEQ ID NO: 2259082 - RNA, 19 nt, Artificial Sequence
  Description of Artificial Sequence: Synthetic oligonucleotide
  Sense strand starting at position 131 of SEQ ID NO: 1884350
cucaguuuaagagguauga

SEQ ID NO: 2259083 - RNA, 19 nt, Artificial Sequence
  Description of Artificial Sequence: Synthetic oligonucleotide
  Antisense strand to SEQ ID NO: 2259082
ucauaccucuuaaacugag

SEQ ID NO: 2259084 - RNA, 19 nt, Artificial Sequence
  Description of Artificial Sequence: Synthetic oligonucleotide
  Sense strand starting at position 135 of SEQ ID NO: 1884350
guuuaagagguaugaccau

SEQ ID NO: 2259085 - RNA, 19 nt, Artificial Sequence
  Description of Artificial Sequence: Synthetic oligonucleotide
  Antisense strand to SEQ ID NO: 2259084
auggucauaccucuuaaac

SEQ ID NO: 2259086 - RNA, 19 nt, Artificial Sequence
  Description of Artificial Sequence: Synthetic oligonucleotide
  Sense strand starting at position 376 of SEQ ID NO: 1884350
gcucacuucggauagaagu

SEQ ID NO: 2259087 - RNA, 19 nt, Artificial Sequence
  Description of Artificial Sequence: Synthetic oligonucleotide
  Antisense strand to SEQ ID NO: 2259086
acuucuauccgaagugagc

SEQ ID NO: 2259088 - RNA, 19 nt, Artificial Sequence
  Description of Artificial Sequence: Synthetic oligonucleotide
  Sense strand starting at position 512 of SEQ ID NO: 1884350
gcagcugagcuagauaacu

SEQ ID NO: 2259089 - RNA, 19 nt, Artificial Sequence
  Description of Artificial Sequence: Synthetic oligonucleotide
  Antisense strand to SEQ ID NO: 2259088
aguuaucuagcucagcugc

SEQ ID NO: 2259090 - RNA, 19 nt, Artificial Sequence
  Description of Artificial Sequence: Synthetic oligonucleotide
  Sense strand starting at position 529 of SEQ ID NO: 1884350
cuagcaaaggcucagugau

SEQ ID NO: 2259091 - RNA, 19 nt, Artificial Sequence
  Description of Artificial Sequence: Synthetic oligonucleotide
  Antisense strand to SEQ ID NO: 2259090
aucacugagccuuugcuag

SEQ ID NO: 2259092 - RNA, 19 nt, Artificial Sequence
  Description of Artificial Sequence: Synthetic oligonucleotide
  Sense strand starting at position 531 of SEQ ID NO: 1884350
agcaaaggcucagugauau

SEQ ID NO: 2259093 - RNA, 19 nt, Artificial Sequence
  Description of Artificial Sequence: Synthetic oligonucleotide
  Antisense strand to SEQ ID NO: 2259092
auaucacugagccuuugcu

SEQ ID NO: 2259094 - RNA, 19 nt, Artificial Sequence
  Description of Artificial Sequence: Synthetic oligonucleotide
  Sense strand starting at position 539 of SEQ ID NO: 1884350
cucagugauaugcacgaca

SEQ ID NO: 2259095 - RNA, 19 nt, Artificial Sequence
  Description of Artificial Sequence: Synthetic oligonucleotide
  Antisense strand to SEQ ID NO: 2259094
ugucgugcauaucacugag

SEQ ID NO: 2259096 - RNA, 19 nt, Artificial Sequence
  Description of Artificial Sequence: Synthetic oligonucleotide
  Sense strand starting at position 542 of SEQ ID NO: 1884350
agugauaugcacgacacua

SEQ ID NO: 2259097 - RNA, 19 nt, Artificial Sequence
  Description of Artificial Sequence: Synthetic oligonucleotide
  Antisense strand to SEQ ID NO: 2259096
uagugucgugcauaucacu

SEQ ID NO: 2259098 - RNA, 19 nt, Artificial Sequence
  Description of Artificial Sequence: Synthetic oligonucleotide
  Sense strand starting at position 553 of SEQ ID NO: 1884350
cgacacuaguuuguaaaga

SEQ ID NO: 2259099 - RNA, 19 nt, Artificial Sequence
  Description of Artificial Sequence: Synthetic oligonucleotide
  Antisense strand to SEQ ID NO: 2259098
ucuuuacaaacuagugucg

SEQ ID NO: 2259100 - RNA, 19 nt, Artificial Sequence
  Description of Artificial Sequence: Synthetic oligonucleotide
  Sense strand starting at position 753 of SEQ ID NO: 1884350
cuggauuucucacagggaa

SEQ ID NO: 2259101 - RNA, 19 nt, Artificial Sequence
  Description of Artificial Sequence: Synthetic oligonucleotide
  Antisense strand to SEQ ID NO: 2259100
uucccugugagaaauccag

SEQ ID NO: 2259102 - RNA, 19 nt, Artificial Sequence
  Description of Artificial Sequence: Synthetic oligonucleotide
  Sense strand starting at position 809 of SEQ ID NO: 1884350
acagcugugucauuugauc

SEQ ID NO: 2259103 - RNA, 19 nt, Artificial Sequence
  Description of Artificial Sequence: Synthetic oligonucleotide
  Antisense strand to SEQ ID NO: 2259102
gaucaaaugacacagcugu

SEQ ID NO: 2259104 - RNA, 19 nt, Artificial Sequence
  Description of Artificial Sequence: Synthetic oligonucleotide
  Sense strand starting at position 877 of SEQ ID NO: 1884350
uccuaagagugaccuauga

SEQ ID NO: 2259105 - RNA, 19 nt, Artificial Sequence
  Description of Artificial Sequence: Synthetic oligonucleotide
  Antisense strand to SEQ ID NO: 2259104
ucauaggucacucuuagga

SEQ ID NO: 2259106 - RNA, 19 nt, Artificial Sequence
  Description of Artificial Sequence: Synthetic oligonucleotide
  Sense strand starting at position 942 of SEQ ID NO: 1884350
acaggaauauuuggugaau

SEQ ID NO: 2259107 - RNA, 19 nt, Artificial Sequence
  Description of Artificial Sequence: Synthetic oligonucleotide
  Antisense strand to SEQ ID NO: 2259106
auucaccaaauauuccugu

SEQ ID NO: 2259108 - RNA, 19 nt, Artificial Sequence
  Description of Artificial Sequence: Synthetic oligonucleotide
  Sense strand starting at position 970 of SEQ ID NO: 1884350
ugacaaauagcugaggcau

SEQ ID NO: 2259109 - RNA, 19 nt, Artificial Sequence
  Description of Artificial Sequence: Synthetic oligonucleotide
  Antisense strand to SEQ ID NO: 2259108
augccucagcuauuuguca

SEQ ID NO: 2259110 - RNA, 19 nt, Artificial Sequence
  Description of Artificial Sequence: Synthetic oligonucleotide
  Sense strand starting at position 1004 of SEQ ID NO: 1884350
gccacaauuugagaacaca

SEQ ID NO: 2259111 - RNA, 19 nt, Artificial Sequence
  Description of Artificial Sequence: Synthetic oligonucleotide
  Antisense strand to SEQ ID NO: 2259110
uguguucucaaauuguggc

SEQ ID NO: 2259112 - RNA, 19 nt, Artificial Sequence
  Description of Artificial Sequence: Synthetic oligonucleotide
  Sense strand starting at position 1072 of SEQ ID NO: 1884350
ugaagaugcaucuggcuca

SEQ ID NO: 2259113 - RNA, 19 nt, Artificial Sequence
  Description of Artificial Sequence: Synthetic oligonucleotide
  Antisense strand to SEQ ID NO: 2259112
ugagccagaugcaucuuca

SEQ ID NO: 2259114 - RNA, 19 nt, Artificial Sequence
  Description of Artificial Sequence: Synthetic oligonucleotide
  Sense strand starting at position 1075 of SEQ ID NO: 1884350
agaugcaucuggcucauuu

SEQ ID NO: 2259115 - RNA, 19 nt, Artificial Sequence
  Description of Artificial Sequence: Synthetic oligonucleotide
  Antisense strand to SEQ ID NO: 2259114
aaaugagccagaugcaucu

SEQ ID NO: 2259116 - RNA, 19 nt, Artificial Sequence
  Description of Artificial Sequence: Synthetic oligonucleotide
  Sense strand starting at position 1181 of SEQ ID NO: 1884350
cgguguucuaacguuaccu

SEQ ID NO: 2259117 - RNA, 19 nt, Artificial Sequence
  Description of Artificial Sequence: Synthetic oligonucleotide
  Antisense strand to SEQ ID NO: 2259116
agguaacguuagaacaccg

SEQ ID NO: 2259118 - RNA, 19 nt, Artificial Sequence
  Description of Artificial Sequence: Synthetic oligonucleotide
  Sense strand starting at position 1253 of SEQ ID NO: 1884350
cgagcaucccauggacaaa

SEQ ID NO: 2259119 - RNA, 19 nt, Artificial Sequence
  Description of Artificial Sequence: Synthetic oligonucleotide
  Antisense strand to SEQ ID NO: 2259118
uuuguccaugggaugcucg

SEQ ID NO: 2259120 - RNA, 19 nt, Artificial Sequence
  Description of Artificial Sequence: Synthetic oligonucleotide
  Sense strand starting at position 1309 of SEQ ID NO: 1884350
ucccaacagucauuagaag

SEQ ID NO: 2259121 - RNA, 19 nt, Artificial Sequence
  Description of Artificial Sequence: Synthetic oligonucleotide
  Antisense strand to SEQ ID NO: 2259120
cuucuaaugacuguuggga

SEQ ID NO: 2259122 - RNA, 19 nt, Artificial Sequence
  Description of Artificial Sequence: Synthetic oligonucleotide
  Sense strand starting at position 1373 of SEQ ID NO: 1884350
acccaagucucggcaaaca

SEQ ID NO: 2259123 - RNA, 19 nt, Artificial Sequence
  Description of Artificial Sequence: Synthetic oligonucleotide
  Antisense strand to SEQ ID NO: 2259122
uguuugccgagacuugggu

SEQ ID NO: 2259124 - RNA, 19 nt, Artificial Sequence
  Description of Artificial Sequence: Synthetic oligonucleotide
  Sense strand starting at position 1508 of SEQ ID NO: 1884350
cuaggcaauucggcagaaa

SEQ ID NO: 2259125 - RNA, 19 nt, Artificial Sequence
  Description of Artificial Sequence: Synthetic oligonucleotide
  Antisense strand to SEQ ID NO: 2259124
uuucugccgaauugccuag

SEQ ID NO: 2259126 - RNA, 19 nt, Artificial Sequence
  Description of Artificial Sequence: Synthetic oligonucleotide
  Sense strand starting at position 2151 of SEQ ID NO: 1884350
cgccgaucccguucucaca

SEQ ID NO: 2259127 - RNA, 19 nt, Artificial Sequence
  Description of Artificial Sequence: Synthetic oligonucleotide
  Antisense strand to SEQ ID NO: 2259126
ugugagaacgggaucggcg

SEQ ID NO: 2259128 - RNA, 19 nt, Artificial Sequence
  Description of Artificial Sequence: Synthetic oligonucleotide
  Sense strand starting at position 2167 of SEQ ID NO: 1884350
acagaucucuccuccuguu

SEQ ID NO: 2259129 - RNA, 19 nt, Artificial Sequence
  Description of Artificial Sequence: Synthetic oligonucleotide
  Antisense strand to SEQ ID NO: 2259128
aacaggaggagagaucugu

SEQ ID NO: 2259130 - RNA, 19 nt, Artificial Sequence
  Description of Artificial Sequence: Synthetic oligonucleotide
  Sense strand starting at position 2213 of SEQ ID NO: 1884350
cgcugcuugcguuucuaaa

SEQ ID NO: 2259131 - RNA, 19 nt, Artificial Sequence
  Description of Artificial Sequence: Synthetic oligonucleotide
  Antisense strand to SEQ ID NO: 2259130
uuuagaaacgcaagcagcg

SEQ ID NO: 2259132 - RNA, 19 nt, Artificial Sequence
  Description of Artificial Sequence: Synthetic oligonucleotide
  Sense strand starting at position 2246 of SEQ ID NO: 1884350
guaacaggaugccuuuaau

SEQ ID NO: 2259133 - RNA, 19 nt, Artificial Sequence
  Description of Artificial Sequence: Synthetic oligonucleotide
  Antisense strand to SEQ ID NO: 2259132
auuaaaggcauccuguuac

SEQ ID NO: 2259134 - RNA, 19 nt, Artificial Sequence
  Description of Artificial Sequence: Synthetic oligonucleotide
  Sense strand starting at position 2727 of SEQ ID NO: 1884350
ucggcuaaggaaugagaau

SEQ ID NO: 2259135 - RNA, 19 nt, Artificial Sequence
  Description of Artificial Sequence: Synthetic oligonucleotide
  Antisense strand to SEQ ID NO: 2259134
auucucauuccuuagccga

SEQ ID NO: 2259136 - RNA, 19 nt, Artificial Sequence
  Description of Artificial Sequence: Synthetic oligonucleotide
  Sense strand starting at position 2923 of SEQ ID NO: 1884350
agaccuaagugguuuaaug

SEQ ID NO: 2259137 - RNA, 19 nt, Artificial Sequence
  Description of Artificial Sequence: Synthetic oligonucleotide
  Antisense strand to SEQ ID NO: 2259136
cauuaaaccacuuaggucu

SEQ ID NO: 2259138 - RNA, 19 nt, Artificial Sequence
  Description of Artificial Sequence: Synthetic oligonucleotide
  Sense strand starting at position 2925 of SEQ ID NO: 1884350
accuaagugguuuaaugac

SEQ ID NO: 2259139 - RNA, 19 nt, Artificial Sequence
  Description of Artificial Sequence: Synthetic oligonucleotide
  Antisense strand to SEQ ID NO: 2259138
gucauuaaaccacuuaggu

SEQ ID NO: 2259140 - RNA, 19 nt, Artificial Sequence
  Description of Artificial Sequence: Synthetic oligonucleotide
  Sense strand starting at position 2939 of SEQ ID NO: 1884350
augacaaacugauuauugu

SEQ ID NO: 2259141 - RNA, 19 nt, Artificial Sequence
  Description of Artificial Sequence: Synthetic oligonucleotide
  Antisense strand to SEQ ID NO: 2259140
acaauaaucaguuugucau

SEQ ID NO: 2259142 - RNA, 19 nt, Artificial Sequence
  Description of Artificial Sequence: Synthetic oligonucleotide
  Sense strand starting at position 2946 of SEQ ID NO: 1884350
acugauuauugugcuauua

SEQ ID NO: 2259143 - RNA, 19 nt, Artificial Sequence
  Description of Artificial Sequence: Synthetic oligonucleotide
  Antisense strand to SEQ ID NO: 2259142
uaauagcacaauaaucagu

SEQ ID NO: 2259144 - RNA, 19 nt, Artificial Sequence
  Description of Artificial Sequence: Synthetic oligonucleotide
  Sense strand starting at position 2995 of SEQ ID NO: 1884350
auucuuucucaagaguguc

SEQ ID NO: 2259145 - RNA, 19 nt, Artificial Sequence
  Description of Artificial Sequence: Synthetic oligonucleotide
  Antisense strand to SEQ ID NO: 2259144
gacacucuugagaaagaau

SEQ ID NO: 2259146 - RNA, 19 nt, Artificial Sequence
  Description of Artificial Sequence: Synthetic oligonucleotide
  Sense strand starting at position 2998 of SEQ ID NO: 1884350
cuuucucaagagugucaau

SEQ ID NO: 2259147 - RNA, 19 nt, Artificial Sequence
  Description of Artificial Sequence: Synthetic oligonucleotide
  Antisense strand to SEQ ID NO: 2259146
auugacacucuugagaaag

SEQ ID NO: 2259148 - RNA, 19 nt, Artificial Sequence
  Description of Artificial Sequence: Synthetic oligonucleotide
  Sense strand starting at position 3032 of SEQ ID NO: 1884350
gaaagaauuuaguagguau

SEQ ID NO: 2259149 - RNA, 19 nt, Artificial Sequence
  Description of Artificial Sequence: Synthetic oligonucleotide
  Antisense strand to SEQ ID NO: 2259148
auaccuacuaaauucuuuc

SEQ ID NO: 2259150 - RNA, 19 nt, Artificial Sequence
  Description of Artificial Sequence: Synthetic oligonucleotide
  Sense strand starting at position 3062 of SEQ ID NO: 1884350
ggcuuacuucaugggagga

SEQ ID NO: 2259151 - RNA, 19 nt, Artificial Sequence
  Description of Artificial Sequence: Synthetic oligonucleotide
  Antisense strand to SEQ ID NO: 2259150
uccucccaugaaguaagcc

SEQ ID NO: 2259152 - RNA, 19 nt, Artificial Sequence
  Description of Artificial Sequence: Synthetic oligonucleotide
  Sense strand starting at position 3472 of SEQ ID NO: 1884350
cucucacaugcuuauguau

SEQ ID NO: 2259153 - RNA, 19 nt, Artificial Sequence
  Description of Artificial Sequence: Synthetic oligonucleotide
  Antisense strand to SEQ ID NO: 2259152
auacauaagcaugugagag

SEQ ID NO: 2259154 - RNA, 19 nt, Artificial Sequence
  Description of Artificial Sequence: Synthetic oligonucleotide
  Sense strand starting at position 3478 of SEQ ID NO: 1884350
caugcuuauguaugauuag

SEQ ID NO: 2259155 - RNA, 19 nt, Artificial Sequence
  Description of Artificial Sequence: Synthetic oligonucleotide
  Antisense strand to SEQ ID NO: 2259154
cuaaucauacauaagcaug

SEQ ID NO: 2259156 - RNA, 19 nt, Artificial Sequence
  Description of Artificial Sequence: Synthetic oligonucleotide
  Sense strand starting at position 3481 of SEQ ID NO: 1884350
gcuuauguaugauuagaug

SEQ ID NO: 2259157 - RNA, 19 nt, Artificial Sequence
  Description of Artificial Sequence: Synthetic oligonucleotide
  Antisense strand to SEQ ID NO: 2259156
caucuaaucauacauaagc

SEQ ID NO: 2259158 - RNA, 19 nt, Artificial Sequence
  Description of Artificial Sequence: Synthetic oligonucleotide
  Sense strand starting at position 3558 of SEQ ID NO: 1884350
ggcagagcacuuugagaag

SEQ ID NO: 2259159 - RNA, 19 nt, Artificial Sequence
  Description of Artificial Sequence: Synthetic oligonucleotide
  Antisense strand to SEQ ID NO: 2259158
cuucucaaagugcucugcc

SEQ ID NO: 2259160 - RNA, 19 nt, Artificial Sequence
  Description of Artificial Sequence: Synthetic oligonucleotide
  Sense strand starting at position 3635 of SEQ ID NO: 1884350
gagacagugucucucuauc

SEQ ID NO: 2259161 - RNA, 19 nt, Artificial Sequence
  Description of Artificial Sequence: Synthetic oligonucleotide
  Antisense strand to SEQ ID NO: 2259160
gauagagagacacugucuc

SEQ ID NO: 2259162 - RNA, 19 nt, Artificial Sequence
  Description of Artificial Sequence: Synthetic oligonucleotide
  Sense strand starting at position 76 of SEQ ID NO: 1884351
aguggaaaugcagaauguu

SEQ ID NO: 2259163 - RNA, 19 nt, Artificial Sequence
  Description of Artificial Sequence: Synthetic oligonucleotide
  Antisense strand to SEQ ID NO: 2259162
aacauucugcauuuccacu

SEQ ID NO: 2259164 - RNA, 19 nt, Artificial Sequence
  Description of Artificial Sequence: Synthetic oligonucleotide
  Sense strand starting at position 85 of SEQ ID NO: 1884351
gcagaauguucccauacca

SEQ ID NO: 2259165 - RNA, 19 nt, Artificial Sequence
  Description of Artificial Sequence: Synthetic oligonucleotide
  Antisense strand to SEQ ID NO: 2259164
ugguaugggaacauucugc

SEQ ID NO: 2259166 - RNA, 19 nt, Artificial Sequence
  Description of Artificial Sequence: Synthetic oligonucleotide
  Sense strand starting at position 340 of SEQ ID NO: 1884351
ugcuguuguuccucaacaa

SEQ ID NO: 2259167 - RNA, 19 nt, Artificial Sequence
  Description of Artificial Sequence: Synthetic oligonucleotide
  Antisense strand to SEQ ID NO: 2259166
uuguugaggaacaacagca

SEQ ID NO: 2259168 - RNA, 19 nt, Artificial Sequence
  Description of Artificial Sequence: Synthetic oligonucleotide
  Sense strand starting at position 341 of SEQ ID NO: 1884351
gcuguuguuccucaacaac

SEQ ID NO: 2259169 - RNA, 19 nt, Artificial Sequence
  Description of Artificial Sequence: Synthetic oligonucleotide
  Antisense strand to SEQ ID NO: 2259168
guuguugaggaacaacagc

SEQ ID NO: 2259170 - RNA, 19 nt, Artificial Sequence
  Description of Artificial Sequence: Synthetic oligonucleotide
  Sense strand starting at position 958 of SEQ ID NO: 1884351
gucaaaugugagugaugau

SEQ ID NO: 2259171 - RNA, 19 nt, Artificial Sequence
  Description of Artificial Sequence: Synthetic oligonucleotide
  Antisense strand to SEQ ID NO: 2259170
aucaucacucacauuugac

SEQ ID NO: 2259172 - RNA, 19 nt, Artificial Sequence
  Description of Artificial Sequence: Synthetic oligonucleotide
  Sense strand starting at position 961 of SEQ ID NO: 1884351
aaaugugagugaugauaau

SEQ ID NO: 2259173 - RNA, 19 nt, Artificial Sequence
  Description of Artificial Sequence: Synthetic oligonucleotide
  Antisense strand to SEQ ID NO: 2259172
auuaucaucacucacauuu

SEQ ID NO: 2259174 - RNA, 19 nt, Artificial Sequence
  Description of Artificial Sequence: Synthetic oligonucleotide
  Sense strand starting at position 1015 of SEQ ID NO: 1884351
guuagcuuucagcguggca

SEQ ID NO: 2259175 - RNA, 19 nt, Artificial Sequence
  Description of Artificial Sequence: Synthetic oligonucleotide
  Antisense strand to SEQ ID NO: 2259174
ugccacgcugaaagcuaac

SEQ ID NO: 2259176 - RNA, 19 nt, Artificial Sequence
  Description of Artificial Sequence: Synthetic oligonucleotide
  Sense strand starting at position 1024 of SEQ ID NO: 1884351
cagcguggcaugugaacaa

SEQ ID NO: 2259177 - RNA, 19 nt, Artificial Sequence
  Description of Artificial Sequence: Synthetic oligonucleotide
  Antisense strand to SEQ ID NO: 2259176
uuguucacaugccacgcug

SEQ ID NO: 2259178 - RNA, 19 nt, Artificial Sequence
  Description of Artificial Sequence: Synthetic oligonucleotide
  Sense strand starting at position 1028 of SEQ ID NO: 1884351
guggcaugugaacaauuau

SEQ ID NO: 2259179 - RNA, 19 nt, Artificial Sequence
  Description of Artificial Sequence: Synthetic oligonucleotide
  Antisense strand to SEQ ID NO: 2259178
auaauuguucacaugccac

SEQ ID NO: 2259180 - RNA, 19 nt, Artificial Sequence
  Description of Artificial Sequence: Synthetic oligonucleotide
  Sense strand starting at position 1161 of SEQ ID NO: 1884351
aauggaauagcgcaaauga

SEQ ID NO: 2259181 - RNA, 19 nt, Artificial Sequence
  Description of Artificial Sequence: Synthetic oligonucleotide
  Antisense strand to SEQ ID NO: 2259180
ucauuugcgcuauuccauu

SEQ ID NO: 2259182 - RNA, 19 nt, Artificial Sequence
  Description of Artificial Sequence: Synthetic oligonucleotide
  Sense strand starting at position 1169 of SEQ ID NO: 1884351
agcgcaaaugauuaagcaa

SEQ ID NO: 2259183 - RNA, 19 nt, Artificial Sequence
  Description of Artificial Sequence: Synthetic oligonucleotide
  Antisense strand to SEQ ID NO: 2259182
uugcuuaaucauuugcgcu

SEQ ID NO: 2259184 - RNA, 19 nt, Artificial Sequence
  Description of Artificial Sequence: Synthetic oligonucleotide
  Sense strand starting at position 1255 of SEQ ID NO: 1884351
ccgcacauggauuacaaau

SEQ ID NO: 2259185 - RNA, 19 nt, Artificial Sequence
  Description of Artificial Sequence: Synthetic oligonucleotide
  Antisense strand to SEQ ID NO: 2259184
auuuguaauccaugugcgg

SEQ ID NO: 2259186 - RNA, 19 nt, Artificial Sequence
  Description of Artificial Sequence: Synthetic oligonucleotide
  Sense strand starting at position 1580 of SEQ ID NO: 1884351
aacgguuacugccuuuaaa

SEQ ID NO: 2259187 - RNA, 19 nt, Artificial Sequence
  Description of Artificial Sequence: Synthetic oligonucleotide
  Antisense strand to SEQ ID NO: 2259186
uuuaaaggcaguaaccguu

SEQ ID NO: 2259188 - RNA, 19 nt, Artificial Sequence
  Description of Artificial Sequence: Synthetic oligonucleotide
  Sense strand starting at position 3546 of SEQ ID NO: 1884351
ugugucuugaguugaacgu

SEQ ID NO: 2259189 - RNA, 19 nt, Artificial Sequence
  Description of Artificial Sequence: Synthetic oligonucleotide
  Antisense strand to SEQ ID NO: 2259188
acguucaacucaagacaca

SEQ ID NO: 2259190 - RNA, 19 nt, Artificial Sequence
  Description of Artificial Sequence: Synthetic oligonucleotide
  Sense strand starting at position 3552 of SEQ ID NO: 1884351
uugaguugaacgugucuuu

SEQ ID NO: 2259191 - RNA, 19 nt, Artificial Sequence
  Description of Artificial Sequence: Synthetic oligonucleotide
  Antisense strand to SEQ ID NO: 2259190
aaagacacguucaacucaa

SEQ ID NO: 2259192 - RNA, 19 nt, Artificial Sequence
  Description of Artificial Sequence: Synthetic oligonucleotide
  Sense strand starting at position 3555 of SEQ ID NO: 1884351
aguugaacgugucuuuagu

SEQ ID NO: 2259193 - RNA, 19 nt, Artificial Sequence
  Description of Artificial Sequence: Synthetic oligonucleotide
  Antisense strand to SEQ ID NO: 2259192
acuaaagacacguucaacu

SEQ ID NO: 2259194 - RNA, 19 nt, Artificial Sequence
  Description of Artificial Sequence: Synthetic oligonucleotide
  Sense strand starting at position 3572 of SEQ ID NO: 1884351
guucaaaguuauugugugu

SEQ ID NO: 2259195 - RNA, 19 nt, Artificial Sequence
  Description of Artificial Sequence: Synthetic oligonucleotide
  Antisense strand to SEQ ID NO: 2259194
acacacaauaacuuugaac

SEQ ID NO: 2259196 - RNA, 19 nt, Artificial Sequence
  Description of Artificial Sequence: Synthetic oligonucleotide
  Sense strand starting at position 3575 of SEQ ID NO: 1884351
caaaguuauuguguguuga

SEQ ID NO: 2259197 - RNA, 19 nt, Artificial Sequence
  Description of Artificial Sequence: Synthetic oligonucleotide
  Antisense strand to SEQ ID NO: 2259196
ucaacacacaauaacuuug

SEQ ID NO: 2259198 - RNA, 19 nt, Artificial Sequence
  Description of Artificial Sequence: Synthetic oligonucleotide
  Sense strand starting at position 3576 of SEQ ID NO: 1884351
aaaguuauuguguguugag

SEQ ID NO: 2259199 - RNA, 19 nt, Artificial Sequence
  Description of Artificial Sequence: Synthetic oligonucleotide
  Antisense strand to SEQ ID NO: 2259198
cucaacacacaauaacuuu

SEQ ID NO: 2259200 - RNA, 19 nt, Artificial Sequence
  Description of Artificial Sequence: Synthetic oligonucleotide
  Sense strand starting at position 3577 of SEQ ID NO: 1884351
aaguuauuguguguugaga

SEQ ID NO: 2259201 - RNA, 19 nt, Artificial Sequence
  Description of Artificial Sequence: Synthetic oligonucleotide
  Antisense strand to SEQ ID NO: 2259200
ucucaacacacaauaacuu

SEQ ID NO: 2259202 - RNA, 19 nt, Artificial Sequence
  Description of Artificial Sequence: Synthetic oligonucleotide
  Sense strand starting at position 3579 of SEQ ID NO: 1884351
guuauuguguguugagauu

SEQ ID NO: 2259203 - RNA, 19 nt, Artificial Sequence
  Description of Artificial Sequence: Synthetic oligonucleotide
  Antisense strand to SEQ ID NO: 2259202
aaucucaacacacaauaac

SEQ ID NO: 2259204 - RNA, 19 nt, Artificial Sequence
  Description of Artificial Sequence: Synthetic oligonucleotide
  Sense strand starting at position 3777 of SEQ ID NO: 1884351
ccugcucagcugugagaau

SEQ ID NO: 2259205 - RNA, 19 nt, Artificial Sequence
  Description of Artificial Sequence: Synthetic oligonucleotide
  Antisense strand to SEQ ID NO: 2259204
auucucacagcugagcagg

SEQ ID NO: 2259206 - RNA, 19 nt, Artificial Sequence
  Description of Artificial Sequence: Synthetic oligonucleotide
  Sense strand starting at position 3778 of SEQ ID NO: 1884351
cugcucagcugugagaaua

SEQ ID NO: 2259207 - RNA, 19 nt, Artificial Sequence
  Description of Artificial Sequence: Synthetic oligonucleotide
  Antisense strand to SEQ ID NO: 2259206
uauucucacagcugagcag

SEQ ID NO: 2259208 - RNA, 19 nt, Artificial Sequence
  Description of Artificial Sequence: Synthetic oligonucleotide
  Sense strand starting at position 893 of SEQ ID NO: 1884352
gggucucugugggaauauc

SEQ ID NO: 2259209 - RNA, 19 nt, Artificial Sequence
  Description of Artificial Sequence: Synthetic oligonucleotide
  Antisense strand to SEQ ID NO: 2259208
gauauucccacagagaccc

SEQ ID NO: 2259210 - RNA, 19 nt, Artificial Sequence
  Description of Artificial Sequence: Synthetic oligonucleotide
  Sense strand starting at position 901 of SEQ ID NO: 1884352
gugggaauaucugugacac

SEQ ID NO: 2259211 - RNA, 19 nt, Artificial Sequence
  Description of Artificial Sequence: Synthetic oligonucleotide
  Antisense strand to SEQ ID NO: 2259210
gugucacagauauucccac

SEQ ID NO: 2259212 - RNA, 19 nt, Artificial Sequence
  Description of Artificial Sequence: Synthetic oligonucleotide
  Sense strand starting at position 902 of SEQ ID NO: 1884352
ugggaauaucugugacacg

SEQ ID NO: 2259213 - RNA, 19 nt, Artificial Sequence
  Description of Artificial Sequence: Synthetic oligonucleotide
  Antisense strand to SEQ ID NO: 2259212
cgugucacagauauuccca

SEQ ID NO: 2259214 - RNA, 19 nt, Artificial Sequence
  Description of Artificial Sequence: Synthetic oligonucleotide
  Sense strand starting at position 1153 of SEQ ID NO: 1884352
ccucuaguguguucuggaa

SEQ ID NO: 2259215 - RNA, 19 nt, Artificial Sequence
  Description of Artificial Sequence: Synthetic oligonucleotide
  Antisense strand to SEQ ID NO: 2259214
uuccagaacacacuagagg

SEQ ID NO: 2259216 - RNA, 19 nt, Artificial Sequence
  Description of Artificial Sequence: Synthetic oligonucleotide
  Sense strand starting at position 1592 of SEQ ID NO: 1884352
gcugcucuucguggagaca

SEQ ID NO: 2259217 - RNA, 19 nt, Artificial Sequence
  Description of Artificial Sequence: Synthetic oligonucleotide
  Antisense strand to SEQ ID NO: 2259216
ugucuccacgaagagcagc

SEQ ID NO: 2259218 - RNA, 19 nt, Artificial Sequence
  Description of Artificial Sequence: Synthetic oligonucleotide
  Sense strand starting at position 1603 of SEQ ID NO: 1884352
uggagacacugauguccuu

SEQ ID NO: 2259219 - RNA, 19 nt, Artificial Sequence
  Description of Artificial Sequence: Synthetic oligonucleotide
  Antisense strand to SEQ ID NO: 2259218
aaggacaucagugucucca

SEQ ID NO: 2259220 - RNA, 19 nt, Artificial Sequence
  Description of Artificial Sequence: Synthetic oligonucleotide
  Sense strand starting at position 1694 of SEQ ID NO: 1884352
ggucuccuccucuaggaua

SEQ ID NO: 2259221 - RNA, 19 nt, Artificial Sequence
  Description of Artificial Sequence: Synthetic oligonucleotide
  Antisense strand to SEQ ID NO: 2259220
uauccuagaggaggagacc

SEQ ID NO: 2259222 - RNA, 19 nt, Artificial Sequence
  Description of Artificial Sequence: Synthetic oligonucleotide
  Sense strand starting at position 1790 of SEQ ID NO: 1884352
cuuuguccucccuggagau

SEQ ID NO: 2259223 - RNA, 19 nt, Artificial Sequence
  Description of Artificial Sequence: Synthetic oligonucleotide
  Antisense strand to SEQ ID NO: 2259222
aucuccagggaggacaaag

SEQ ID NO: 2259224 - RNA, 19 nt, Artificial Sequence
  Description of Artificial Sequence: Synthetic oligonucleotide
  Sense strand starting at position 1791 of SEQ ID NO: 1884352
uuuguccucccuggagauu

SEQ ID NO: 2259225 - RNA, 19 nt, Artificial Sequence
  Description of Artificial Sequence: Synthetic oligonucleotide
  Antisense strand to SEQ ID NO: 2259224
aaucuccagggaggacaaa

SEQ ID NO: 2259226 - RNA, 19 nt, Artificial Sequence
  Description of Artificial Sequence: Synthetic oligonucleotide
  Sense strand starting at position 2230 of SEQ ID NO: 1884352
gcagaucuggccugagacu

SEQ ID NO: 2259227 - RNA, 19 nt, Artificial Sequence
  Description of Artificial Sequence: Synthetic oligonucleotide
  Antisense strand to SEQ ID NO: 2259226
agucucaggccagaucugc

SEQ ID NO: 2259228 - RNA, 19 nt, Artificial Sequence
  Description of Artificial Sequence: Synthetic oligonucleotide
  Sense strand starting at position 2401 of SEQ ID NO: 1884352
auuggaugccucuaaguau

SEQ ID NO: 2259229 - RNA, 19 nt, Artificial Sequence
  Description of Artificial Sequence: Synthetic oligonucleotide
  Antisense strand to SEQ ID NO: 2259228
auacuuagaggcauccaau

SEQ ID NO: 2259230 - RNA, 19 nt, Artificial Sequence
  Description of Artificial Sequence: Synthetic oligonucleotide
  Sense strand starting at position 2414 of SEQ ID NO: 1884352
aaguaucagccuugauguc

SEQ ID NO: 2259231 - RNA, 19 nt, Artificial Sequence
  Description of Artificial Sequence: Synthetic oligonucleotide
  Antisense strand to SEQ ID NO: 2259230
gacaucaaggcugauacuu

SEQ ID NO: 2259232 - RNA, 19 nt, Artificial Sequence
  Description of Artificial Sequence: Synthetic oligonucleotide
  Sense strand starting at position 2451 of SEQ ID NO: 1884352
gugucuucucccugggaca

SEQ ID NO: 2259233 - RNA, 19 nt, Artificial Sequence
  Description of Artificial Sequence: Synthetic oligonucleotide
  Antisense strand to SEQ ID NO: 2259232
ugucccagggagaagacac

SEQ ID NO: 2259234 - RNA, 19 nt, Artificial Sequence
  Description of Artificial Sequence: Synthetic oligonucleotide
  Sense strand starting at position 3054 of SEQ ID NO: 1884352
cuuccucucuggucaaaug

SEQ ID NO: 2259235 - RNA, 19 nt, Artificial Sequence
  Description of Artificial Sequence: Synthetic oligonucleotide
  Antisense strand to SEQ ID NO: 2259234
cauuugaccagagaggaag

SEQ ID NO: 2259236 - RNA, 19 nt, Artificial Sequence
  Description of Artificial Sequence: Synthetic oligonucleotide
  Sense strand starting at position 3063 of SEQ ID NO: 1884352
uggucaaaugcggguacau

SEQ ID NO: 2259237 - RNA, 19 nt, Artificial Sequence
  Description of Artificial Sequence: Synthetic oligonucleotide
  Antisense strand to SEQ ID NO: 2259236
auguacccgcauuugacca

SEQ ID NO: 2259238 - RNA, 19 nt, Artificial Sequence
  Description of Artificial Sequence: Synthetic oligonucleotide
  Sense strand starting at position 3065 of SEQ ID NO: 1884352
gucaaaugcggguacauga

SEQ ID NO: 2259239 - RNA, 19 nt, Artificial Sequence
  Description of Artificial Sequence: Synthetic oligonucleotide
  Antisense strand to SEQ ID NO: 2259238
ucauguacccgcauuugac

SEQ ID NO: 2259240 - RNA, 19 nt, Artificial Sequence
  Description of Artificial Sequence: Synthetic oligonucleotide
  Sense strand starting at position 3078 of SEQ ID NO: 1884352
acaugagaguucccaccau

SEQ ID NO: 2259241 - RNA, 19 nt, Artificial Sequence
  Description of Artificial Sequence: Synthetic oligonucleotide
  Antisense strand to SEQ ID NO: 2259240
auggugggaacucucaugu

SEQ ID NO: 2259242 - RNA, 19 nt, Artificial Sequence
  Description of Artificial Sequence: Synthetic oligonucleotide
  Sense strand starting at position 3197 of SEQ ID NO: 1884352
ggagcuccguccugacuaa

SEQ ID NO: 2259243 - RNA, 19 nt, Artificial Sequence
  Description of Artificial Sequence: Synthetic oligonucleotide
  Antisense strand to SEQ ID NO: 2259242
uuagucaggacggagcucc

SEQ ID NO: 2259244 - RNA, 19 nt, Artificial Sequence
  Description of Artificial Sequence: Synthetic oligonucleotide
  Sense strand starting at position 3198 of SEQ ID NO: 1884352
gagcuccguccugacuaau

SEQ ID NO: 2259245 - RNA, 19 nt, Artificial Sequence
  Description of Artificial Sequence: Synthetic oligonucleotide
  Antisense strand to SEQ ID NO: 2259244
auuagucaggacggagcuc

SEQ ID NO: 2259246 - RNA, 19 nt, Artificial Sequence
  Description of Artificial Sequence: Synthetic oligonucleotide
  Sense strand starting at position 3515 of SEQ ID NO: 1884352
augggugucugaguccauu

SEQ ID NO: 2259247 - RNA, 19 nt, Artificial Sequence
  Description of Artificial Sequence: Synthetic oligonucleotide
  Antisense strand to SEQ ID NO: 2259246
aauggacucagacacccau

SEQ ID NO: 2259248 - RNA, 19 nt, Artificial Sequence
  Description of Artificial Sequence: Synthetic oligonucleotide
  Sense strand starting at position 3527 of SEQ ID NO: 1884352
guccauucuguguagccau

SEQ ID NO: 2259249 - RNA, 19 nt, Artificial Sequence
  Description of Artificial Sequence: Synthetic oligonucleotide
  Antisense strand to SEQ ID NO: 2259248
auggcuacacagaauggac

SEQ ID NO: 2259250 - RNA, 19 nt, Artificial Sequence
  Description of Artificial Sequence: Synthetic oligonucleotide
  Sense strand starting at position 3583 of SEQ ID NO: 1884352
caguucugcuggcugagaa

SEQ ID NO: 2259251 - RNA, 19 nt, Artificial Sequence
  Description of Artificial Sequence: Synthetic oligonucleotide
  Antisense strand to SEQ ID NO: 2259250
uucucagccagcagaacug

SEQ ID NO: 2259252 - RNA, 19 nt, Artificial Sequence
  Description of Artificial Sequence: Synthetic oligonucleotide
  Sense strand starting at position 3665 of SEQ ID NO: 1884352
agauaaagcucagggaugu

SEQ ID NO: 2259253 - RNA, 19 nt, Artificial Sequence
  Description of Artificial Sequence: Synthetic oligonucleotide
  Antisense strand to SEQ ID NO: 2259252
acaucccugagcuuuaucu

SEQ ID NO: 2259254 - RNA, 19 nt, Artificial Sequence
  Description of Artificial Sequence: Synthetic oligonucleotide
  Sense strand starting at position 3731 of SEQ ID NO: 1884352
gggaacucacccuguauca

SEQ ID NO: 2259255 - RNA, 19 nt, Artificial Sequence
  Description of Artificial Sequence: Synthetic oligonucleotide
  Antisense strand to SEQ ID NO: 2259254
ugauacagggugaguuccc

SEQ ID NO: 2259256 - RNA, 19 nt, Artificial Sequence
  Description of Artificial Sequence: Synthetic oligonucleotide
  Sense strand starting at position 3934 of SEQ ID NO: 1884352
uugagucccugcuuugauu

SEQ ID NO: 2259257 - RNA, 19 nt, Artificial Sequence
  Description of Artificial Sequence: Synthetic oligonucleotide
  Antisense strand to SEQ ID NO: 2259256
aaucaaagcagggacucaa

SEQ ID NO: 2259258 - RNA, 19 nt, Artificial Sequence
  Description of Artificial Sequence: Synthetic oligonucleotide
  Sense strand starting at position 3982 of SEQ ID NO: 1884352
ggcggcuucgcaggguaau

SEQ ID NO: 2259259 - RNA, 19 nt, Artificial Sequence
  Description of Artificial Sequence: Synthetic oligonucleotide
  Antisense strand to SEQ ID NO: 2259258
auuacccugcgaagccgcc

SEQ ID NO: 2259260 - RNA, 19 nt, Artificial Sequence
  Description of Artificial Sequence: Synthetic oligonucleotide
  Sense strand starting at position 3983 of SEQ ID NO: 1884352
gcggcuucgcaggguaauu

SEQ ID NO: 2259261 - RNA, 19 nt, Artificial Sequence
  Description of Artificial Sequence: Synthetic oligonucleotide
  Antisense strand to SEQ ID NO: 2259260
aauuacccugcgaagccgc

SEQ ID NO: 2259262 - RNA, 19 nt, Artificial Sequence
  Description of Artificial Sequence: Synthetic oligonucleotide
  Sense strand starting at position 899 of SEQ ID NO: 1884353
gugggaauaucugugacac

SEQ ID NO: 2259263 - RNA, 19 nt, Artificial Sequence
  Description of Artificial Sequence: Synthetic oligonucleotide
  Antisense strand to SEQ ID NO: 2259262
gugucacagauauucccac

SEQ ID NO: 2259264 - RNA, 19 nt, Artificial Sequence
  Description of Artificial Sequence: Synthetic oligonucleotide
  Sense strand starting at position 900 of SEQ ID NO: 1884353
ugggaauaucugugacacg

SEQ ID NO: 2259265 - RNA, 19 nt, Artificial Sequence
  Description of Artificial Sequence: Synthetic oligonucleotide
  Antisense strand to SEQ ID NO: 2259264
cgugucacagauauuccca

SEQ ID NO: 2259266 - RNA, 19 nt, Artificial Sequence
  Description of Artificial Sequence: Synthetic oligonucleotide
  Sense strand starting at position 1151 of SEQ ID NO: 1884353
ccucuaguguguucuggaa

SEQ ID NO: 2259267 - RNA, 19 nt, Artificial Sequence
  Description of Artificial Sequence: Synthetic oligonucleotide
  Antisense strand to SEQ ID NO: 2259266
uuccagaacacacuagagg

SEQ ID NO: 2259268 - RNA, 19 nt, Artificial Sequence
  Description of Artificial Sequence: Synthetic oligonucleotide
  Sense strand starting at position 1692 of SEQ ID NO: 1884353
ggucuccuccucuaggaua

SEQ ID NO: 2259269 - RNA, 19 nt, Artificial Sequence
  Description of Artificial Sequence: Synthetic oligonucleotide
  Antisense strand to SEQ ID NO: 2259268
uauccuagaggaggagacc

SEQ ID NO: 2259270 - RNA, 19 nt, Artificial Sequence
  Description of Artificial Sequence: Synthetic oligonucleotide
  Sense strand starting at position 1788 of SEQ ID NO: 1884353
cuuuguccucccuggagau

SEQ ID NO: 2259271 - RNA, 19 nt, Artificial Sequence
  Description of Artificial Sequence: Synthetic oligonucleotide
  Antisense strand to SEQ ID NO: 2259270
aucuccagggaggacaaag

SEQ ID NO: 2259272 - RNA, 19 nt, Artificial Sequence
  Description of Artificial Sequence: Synthetic oligonucleotide
  Sense strand starting at position 1789 of SEQ ID NO: 1884353
uuuguccucccuggagauu

SEQ ID NO: 2259273 - RNA, 19 nt, Artificial Sequence
  Description of Artificial Sequence: Synthetic oligonucleotide
  Antisense strand to SEQ ID NO: 2259272
aaucuccagggaggacaaa

SEQ ID NO: 2259274 - RNA, 19 nt, Artificial Sequence
  Description of Artificial Sequence: Synthetic oligonucleotide
  Sense strand starting at position 2228 of SEQ ID NO: 1884353
gcagaucuggccugagacu

SEQ ID NO: 2259275 - RNA, 19 nt, Artificial Sequence
  Description of Artificial Sequence: Synthetic oligonucleotide
  Antisense strand to SEQ ID NO: 2259274
agucucaggccagaucugc

SEQ ID NO: 2259276 - RNA, 19 nt, Artificial Sequence
  Description of Artificial Sequence: Synthetic oligonucleotide
  Sense strand starting at position 2399 of SEQ ID NO: 1884353
auuggaugccucuaaguau

SEQ ID NO: 2259277 - RNA, 19 nt, Artificial Sequence
  Description of Artificial Sequence: Synthetic oligonucleotide
  Antisense strand to SEQ ID NO: 2259276
auacuuagaggcauccaau

SEQ ID NO: 2259278 - RNA, 19 nt, Artificial Sequence
  Description of Artificial Sequence: Synthetic oligonucleotide
  Sense strand starting at position 2412 of SEQ ID NO: 1884353
aaguaucagccuugauguc

SEQ ID NO: 2259279 - RNA, 19 nt, Artificial Sequence
  Description of Artificial Sequence: Synthetic oligonucleotide
  Antisense strand to SEQ ID NO: 2259278
gacaucaaggcugauacuu

SEQ ID NO: 2259280 - RNA, 19 nt, Artificial Sequence
  Description of Artificial Sequence: Synthetic oligonucleotide
  Sense strand starting at position 2449 of SEQ ID NO: 1884353
gugucuucucccugggaca

SEQ ID NO: 2259281 - RNA, 19 nt, Artificial Sequence
  Description of Artificial Sequence: Synthetic oligonucleotide
  Antisense strand to SEQ ID NO: 2259280
ugucccagggagaagacac

SEQ ID NO: 2259282 - RNA, 19 nt, Artificial Sequence
  Description of Artificial Sequence: Synthetic oligonucleotide
  Sense strand starting at position 3052 of SEQ ID NO: 1884353
cuuccucucuggucaaaug

SEQ ID NO: 2259283 - RNA, 19 nt, Artificial Sequence
  Description of Artificial Sequence: Synthetic oligonucleotide
  Antisense strand to SEQ ID NO: 2259282
cauuugaccagagaggaag

SEQ ID NO: 2259284 - RNA, 19 nt, Artificial Sequence
  Description of Artificial Sequence: Synthetic oligonucleotide
  Sense strand starting at position 3063 of SEQ ID NO: 1884353
gucaaaugcggguacauga

SEQ ID NO: 2259285 - RNA, 19 nt, Artificial Sequence
  Description of Artificial Sequence: Synthetic oligonucleotide
  Antisense strand to SEQ ID NO: 2259284
ucauguacccgcauuugac

SEQ ID NO: 2259286 - RNA, 19 nt, Artificial Sequence
  Description of Artificial Sequence: Synthetic oligonucleotide
  Sense strand starting at position 3076 of SEQ ID NO: 1884353
acaugagaguucccaccau

SEQ ID NO: 2259287 - RNA, 19 nt, Artificial Sequence
  Description of Artificial Sequence: Synthetic oligonucleotide
  Antisense strand to SEQ ID NO: 2259286
auggugggaacucucaugu

SEQ ID NO: 2259288 - RNA, 19 nt, Artificial Sequence
  Description of Artificial Sequence: Synthetic oligonucleotide
  Sense strand starting at position 3196 of SEQ ID NO: 1884353
gagcuccguccugacuaau

SEQ ID NO: 2259289 - RNA, 19 nt, Artificial Sequence
  Description of Artificial Sequence: Synthetic oligonucleotide
  Antisense strand to SEQ ID NO: 2259288
auuagucaggacggagcuc

SEQ ID NO: 2259290 - RNA, 19 nt, Artificial Sequence
  Description of Artificial Sequence: Synthetic oligonucleotide
  Sense strand starting at position 3513 of SEQ ID NO: 1884353
augggugucugaguccauu

SEQ ID NO: 2259291 - RNA, 19 nt, Artificial Sequence
  Description of Artificial Sequence: Synthetic oligonucleotide
  Antisense strand to SEQ ID NO: 2259290
aauggacucagacacccau

SEQ ID NO: 2259292 - RNA, 19 nt, Artificial Sequence
  Description of Artificial Sequence: Synthetic oligonucleotide
  Sense strand starting at position 3581 of SEQ ID NO: 1884353
caguucugcuggcugagaa

SEQ ID NO: 2259293 - RNA, 19 nt, Artificial Sequence
  Description of Artificial Sequence: Synthetic oligonucleotide
  Antisense strand to SEQ ID NO: 2259292
uucucagccagcagaacug

SEQ ID NO: 2259294 - RNA, 19 nt, Artificial Sequence
  Description of Artificial Sequence: Synthetic oligonucleotide
  Sense strand starting at position 3729 of SEQ ID NO: 1884353
gggaacucacccuguauca

SEQ ID NO: 2259295 - RNA, 19 nt, Artificial Sequence
  Description of Artificial Sequence: Synthetic oligonucleotide
  Antisense strand to SEQ ID NO: 2259294
ugauacagggugaguuccc

SEQ ID NO: 2259296 - RNA, 19 nt, Artificial Sequence
  Description of Artificial Sequence: Synthetic oligonucleotide
  Sense strand starting at position 19 of SEQ ID NO: 1884354
agagcugcuuccuuaauug

SEQ ID NO: 2259297 - RNA, 19 nt, Artificial Sequence
  Description of Artificial Sequence: Synthetic oligonucleotide
  Antisense strand to SEQ ID NO: 2259296
caauuaaggaagcagcucu

SEQ ID NO: 2259298 - RNA, 19 nt, Artificial Sequence
  Description of Artificial Sequence: Synthetic oligonucleotide
  Sense strand starting at position 73 of SEQ ID NO: 1884354
ucacuuggaucagcuaauu

SEQ ID NO: 2259299 - RNA, 19 nt, Artificial Sequence
  Description of Artificial Sequence: Synthetic oligonucleotide
  Antisense strand to SEQ ID NO: 2259298
aauuagcugauccaaguga

SEQ ID NO: 2259300 - RNA, 19 nt, Artificial Sequence
  Description of Artificial Sequence: Synthetic oligonucleotide
  Sense strand starting at position 126 of SEQ ID NO: 1884354
ugcagagauuugggauuua

SEQ ID NO: 2259301 - RNA, 19 nt, Artificial Sequence
  Description of Artificial Sequence: Synthetic oligonucleotide
  Antisense strand to SEQ ID NO: 2259300
uaaaucccaaaucucugca

SEQ ID NO: 2259302 - RNA, 19 nt, Artificial Sequence
  Description of Artificial Sequence: Synthetic oligonucleotide
  Sense strand starting at position 261 of SEQ ID NO: 1884354
ggcucugaugcagauguuu

SEQ ID NO: 2259303 - RNA, 19 nt, Artificial Sequence
  Description of Artificial Sequence: Synthetic oligonucleotide
  Antisense strand to SEQ ID NO: 2259302
aaacaucugcaucagagcc

SEQ ID NO: 2259304 - RNA, 19 nt, Artificial Sequence
  Description of Artificial Sequence: Synthetic oligonucleotide
  Sense strand starting at position 270 of SEQ ID NO: 1884354
gcagauguuuaccugaugu

SEQ ID NO: 2259305 - RNA, 19 nt, Artificial Sequence
  Description of Artificial Sequence: Synthetic oligonucleotide
  Antisense strand to SEQ ID NO: 2259304
acaucagguaaacaucugc

SEQ ID NO: 2259306 - RNA, 19 nt, Artificial Sequence
  Description of Artificial Sequence: Synthetic oligonucleotide
  Sense strand starting at position 294 of SEQ ID NO: 1884354
gccugaaucugguuuacau

SEQ ID NO: 2259307 - RNA, 19 nt, Artificial Sequence
  Description of Artificial Sequence: Synthetic oligonucleotide
  Antisense strand to SEQ ID NO: 2259306
auguaaaccagauucaggc

SEQ ID NO: 2259308 - RNA, 19 nt, Artificial Sequence
  Description of Artificial Sequence: Synthetic oligonucleotide
  Sense strand starting at position 301 of SEQ ID NO: 1884354
ucugguuuacauuggaaau

SEQ ID NO: 2259309 - RNA, 19 nt, Artificial Sequence
  Description of Artificial Sequence: Synthetic oligonucleotide
  Antisense strand to SEQ ID NO: 2259308
auuuccaauguaaaccaga

SEQ ID NO: 2259310 - RNA, 19 nt, Artificial Sequence
  Description of Artificial Sequence: Synthetic oligonucleotide
  Sense strand starting at position 313 of SEQ ID NO: 1884354
uggaaaucagacuguuuac

SEQ ID NO: 2259311 - RNA, 19 nt, Artificial Sequence
  Description of Artificial Sequence: Synthetic oligonucleotide
  Antisense strand to SEQ ID NO: 2259310
guaaacagucugauuucca

SEQ ID NO: 2259312 - RNA, 19 nt, Artificial Sequence
  Description of Artificial Sequence: Synthetic oligonucleotide
  Sense strand starting at position 408 of SEQ ID NO: 1884354
gugggaauaucugugacac

SEQ ID NO: 2259313 - RNA, 19 nt, Artificial Sequence
  Description of Artificial Sequence: Synthetic oligonucleotide
  Antisense strand to SEQ ID NO: 2259312
gugucacagauauucccac

SEQ ID NO: 2259314 - RNA, 19 nt, Artificial Sequence
  Description of Artificial Sequence: Synthetic oligonucleotide
  Sense strand starting at position 409 of SEQ ID NO: 1884354
ugggaauaucugugacacg

SEQ ID NO: 2259315 - RNA, 19 nt, Artificial Sequence
  Description of Artificial Sequence: Synthetic oligonucleotide
  Antisense strand to SEQ ID NO: 2259314
cgugucacagauauuccca

SEQ ID NO: 2259316 - RNA, 19 nt, Artificial Sequence
  Description of Artificial Sequence: Synthetic oligonucleotide
  Sense strand starting at position 1667 of SEQ ID NO: 1884354
ggucuccuccucuaggaua

SEQ ID NO: 2259317 - RNA, 19 nt, Artificial Sequence
  Description of Artificial Sequence: Synthetic oligonucleotide
  Antisense strand to SEQ ID NO: 2259316
uauccuagaggaggagacc

SEQ ID NO: 2259318 - RNA, 19 nt, Artificial Sequence
  Description of Artificial Sequence: Synthetic oligonucleotide
  Sense strand starting at position 1763 of SEQ ID NO: 1884354
cuuuguccucccuggagau

SEQ ID NO: 2259319 - RNA, 19 nt, Artificial Sequence
  Description of Artificial Sequence: Synthetic oligonucleotide
  Antisense strand to SEQ ID NO: 2259318
aucuccagggaggacaaag

SEQ ID NO: 2259320 - RNA, 19 nt, Artificial Sequence
  Description of Artificial Sequence: Synthetic oligonucleotide
  Sense strand starting at position 1764 of SEQ ID NO: 1884354
uuuguccucccuggagauu

SEQ ID NO: 2259321 - RNA, 19 nt, Artificial Sequence
  Description of Artificial Sequence: Synthetic oligonucleotide
  Antisense strand to SEQ ID NO: 2259320
aaucuccagggaggacaaa

SEQ ID NO: 2259322 - RNA, 19 nt, Artificial Sequence
  Description of Artificial Sequence: Synthetic oligonucleotide
  Sense strand starting at position 2001 of SEQ ID NO: 1884354
gucaguuuccaagaguguc

SEQ ID NO: 2259323 - RNA, 19 nt, Artificial Sequence
  Description of Artificial Sequence: Synthetic oligonucleotide
  Antisense strand to SEQ ID NO: 2259322
gacacucuuggaaacugac

SEQ ID NO: 2259324 - RNA, 19 nt, Artificial Sequence
  Description of Artificial Sequence: Synthetic oligonucleotide
  Sense strand starting at position 2183 of SEQ ID NO: 1884354
gucggugaccucugacacu

SEQ ID NO: 2259325 - RNA, 19 nt, Artificial Sequence
  Description of Artificial Sequence: Synthetic oligonucleotide
  Antisense strand to SEQ ID NO: 2259324
agugucagaggucaccgac

SEQ ID NO: 2259326 - RNA, 19 nt, Artificial Sequence
  Description of Artificial Sequence: Synthetic oligonucleotide
  Sense strand starting at position 2326 of SEQ ID NO: 1884354
gcagaucuggccugagacu

SEQ ID NO: 2259327 - RNA, 19 nt, Artificial Sequence
  Description of Artificial Sequence: Synthetic oligonucleotide
  Antisense strand to SEQ ID NO: 2259326
agucucaggccagaucugc

SEQ ID NO: 2259328 - RNA, 19 nt, Artificial Sequence
  Description of Artificial Sequence: Synthetic oligonucleotide
  Sense strand starting at position 2497 of SEQ ID NO: 1884354
auuggaugccucuaaguau

SEQ ID NO: 2259329 - RNA, 19 nt, Artificial Sequence
  Description of Artificial Sequence: Synthetic oligonucleotide
  Antisense strand to SEQ ID NO: 2259328
auacuuagaggcauccaau

SEQ ID NO: 2259330 - RNA, 19 nt, Artificial Sequence
  Description of Artificial Sequence: Synthetic oligonucleotide
  Sense strand starting at position 2510 of SEQ ID NO: 1884354
aaguaucagccuugauguc

SEQ ID NO: 2259331 - RNA, 19 nt, Artificial Sequence
  Description of Artificial Sequence: Synthetic oligonucleotide
  Antisense strand to SEQ ID NO: 2259330
gacaucaaggcugauacuu

SEQ ID NO: 2259332 - RNA, 19 nt, Artificial Sequence
  Description of Artificial Sequence: Synthetic oligonucleotide
  Sense strand starting at position 2547 of SEQ ID NO: 1884354
gugucuucucccugggaca

SEQ ID NO: 2259333 - RNA, 19 nt, Artificial Sequence
  Description of Artificial Sequence: Synthetic oligonucleotide
  Antisense strand to SEQ ID NO: 2259332
ugucccagggagaagacac

SEQ ID NO: 2259334 - RNA, 19 nt, Artificial Sequence
  Description of Artificial Sequence: Synthetic oligonucleotide
  Sense strand starting at position 3465 of SEQ ID NO: 1884354
cuuccucucuggucaaaug

SEQ ID NO: 2259335 - RNA, 19 nt, Artificial Sequence
  Description of Artificial Sequence: Synthetic oligonucleotide
  Antisense strand to SEQ ID NO: 2259334
cauuugaccagagaggaag

SEQ ID NO: 2259336 - RNA, 19 nt, Artificial Sequence
  Description of Artificial Sequence: Synthetic oligonucleotide
  Sense strand starting at position 3476 of SEQ ID NO: 1884354
gucaaaugcggguacauga

SEQ ID NO: 2259337 - RNA, 19 nt, Artificial Sequence
  Description of Artificial Sequence: Synthetic oligonucleotide
  Antisense strand to SEQ ID NO: 2259336
ucauguacccgcauuugac

SEQ ID NO: 2259338 - RNA, 19 nt, Artificial Sequence
  Description of Artificial Sequence: Synthetic oligonucleotide
  Sense strand starting at position 3489 of SEQ ID NO: 1884354
acaugagaguucccaccau

SEQ ID NO: 2259339 - RNA, 19 nt, Artificial Sequence
  Description of Artificial Sequence: Synthetic oligonucleotide
  Antisense strand to SEQ ID NO: 2259338
auggugggaacucucaugu

SEQ ID NO: 2259340 - RNA, 19 nt, Artificial Sequence
  Description of Artificial Sequence: Synthetic oligonucleotide
  Sense strand starting at position 3609 of SEQ ID NO: 1884354
gagcuccguccugacuaau

SEQ ID NO: 2259341 - RNA, 19 nt, Artificial Sequence
  Description of Artificial Sequence: Synthetic oligonucleotide
  Antisense strand to SEQ ID NO: 2259340
auuagucaggacggagcuc

SEQ ID NO: 2259342 - RNA, 19 nt, Artificial Sequence
  Description of Artificial Sequence: Synthetic oligonucleotide
  Sense strand starting at position 165 of SEQ ID NO: 1884355
gcucuaauauggcuuacau

SEQ ID NO: 2259343 - RNA, 19 nt, Artificial Sequence
  Description of Artificial Sequence: Synthetic oligonucleotide
  Antisense strand to SEQ ID NO: 2259342
auguaagccauauuagagc

SEQ ID NO: 2259344 - RNA, 19 nt, Artificial Sequence
  Description of Artificial Sequence: Synthetic oligonucleotide
  Sense strand starting at position 205 of SEQ ID NO: 1884355
uguuuaagaguuugguauu

SEQ ID NO: 2259345 - RNA, 19 nt, Artificial Sequence
  Description of Artificial Sequence: Synthetic oligonucleotide
  Antisense strand to SEQ ID NO: 2259344
aauaccaaacucuuaaaca

SEQ ID NO: 2259346 - RNA, 19 nt, Artificial Sequence
  Description of Artificial Sequence: Synthetic oligonucleotide
  Sense strand starting at position 363 of SEQ ID NO: 1884355
aguucuggcccugacaguu

SEQ ID NO: 2259347 - RNA, 19 nt, Artificial Sequence
  Description of Artificial Sequence: Synthetic oligonucleotide
  Antisense strand to SEQ ID NO: 2259346
aacugucagggccagaacu

SEQ ID NO: 2259348 - RNA, 19 nt, Artificial Sequence
  Description of Artificial Sequence: Synthetic oligonucleotide
  Sense strand starting at position 580 of SEQ ID NO: 1884355
aagguaugguucccuugua

SEQ ID NO: 2259349 - RNA, 19 nt, Artificial Sequence
  Description of Artificial Sequence: Synthetic oligonucleotide
  Antisense strand to SEQ ID NO: 2259348
uacaagggaaccauaccuu

SEQ ID NO: 2259350 - RNA, 19 nt, Artificial Sequence
  Description of Artificial Sequence: Synthetic oligonucleotide
  Sense strand starting at position 581 of SEQ ID NO: 1884355
agguaugguucccuuguaa

SEQ ID NO: 2259351 - RNA, 19 nt, Artificial Sequence
  Description of Artificial Sequence: Synthetic oligonucleotide
  Antisense strand to SEQ ID NO: 2259350
uuacaagggaaccauaccu

SEQ ID NO: 2259352 - RNA, 19 nt, Artificial Sequence
  Description of Artificial Sequence: Synthetic oligonucleotide
  Sense strand starting at position 602 of SEQ ID NO: 1884355
agaaaugauuauucugucu

SEQ ID NO: 2259353 - RNA, 19 nt, Artificial Sequence
  Description of Artificial Sequence: Synthetic oligonucleotide
  Antisense strand to SEQ ID NO: 2259352
agacagaauaaucauuucu

SEQ ID NO: 2259354 - RNA, 19 nt, Artificial Sequence
  Description of Artificial Sequence: Synthetic oligonucleotide
  Sense strand starting at position 648 of SEQ ID NO: 1884355
acuuucuaguuguugaaua

SEQ ID NO: 2259355 - RNA, 19 nt, Artificial Sequence
  Description of Artificial Sequence: Synthetic oligonucleotide
  Antisense strand to SEQ ID NO: 2259354
uauucaacaacuagaaagu

SEQ ID NO: 2259356 - RNA, 19 nt, Artificial Sequence
  Description of Artificial Sequence: Synthetic oligonucleotide
  Sense strand starting at position 650 of SEQ ID NO: 1884355
uuucuaguuguugaauaac

SEQ ID NO: 2259357 - RNA, 19 nt, Artificial Sequence
  Description of Artificial Sequence: Synthetic oligonucleotide
  Antisense strand to SEQ ID NO: 2259356
guuauucaacaacuagaaa

SEQ ID NO: 2259358 - RNA, 19 nt, Artificial Sequence
  Description of Artificial Sequence: Synthetic oligonucleotide
  Sense strand starting at position 668 of SEQ ID NO: 1884355
cuugcuaagcccugaaauu

SEQ ID NO: 2259359 - RNA, 19 nt, Artificial Sequence
  Description of Artificial Sequence: Synthetic oligonucleotide
  Antisense strand to SEQ ID NO: 2259358
aauuucagggcuuagcaag

SEQ ID NO: 2259360 - RNA, 19 nt, Artificial Sequence
  Description of Artificial Sequence: Synthetic oligonucleotide
  Sense strand starting at position 669 of SEQ ID NO: 1884355
uugcuaagcccugaaauua

SEQ ID NO: 2259361 - RNA, 19 nt, Artificial Sequence
  Description of Artificial Sequence: Synthetic oligonucleotide
  Antisense strand to SEQ ID NO: 2259360
uaauuucagggcuuagcaa

SEQ ID NO: 2259362 - RNA, 19 nt, Artificial Sequence
  Description of Artificial Sequence: Synthetic oligonucleotide
  Sense strand starting at position 895 of SEQ ID NO: 1884355
gcauuaaugguaugaagaa

SEQ ID NO: 2259363 - RNA, 19 nt, Artificial Sequence
  Description of Artificial Sequence: Synthetic oligonucleotide
  Antisense strand to SEQ ID NO: 2259362
uucuucauaccauuaaugc

SEQ ID NO: 2259364 - RNA, 19 nt, Artificial Sequence
  Description of Artificial Sequence: Synthetic oligonucleotide
  Sense strand starting at position 961 of SEQ ID NO: 1884355
ccaaauaauugagagaaac

SEQ ID NO: 2259365 - RNA, 19 nt, Artificial Sequence
  Description of Artificial Sequence: Synthetic oligonucleotide
  Antisense strand to SEQ ID NO: 2259364
guuucucucaauuauuugg

SEQ ID NO: 2259366 - RNA, 19 nt, Artificial Sequence
  Description of Artificial Sequence: Synthetic oligonucleotide
  Sense strand starting at position 1007 of SEQ ID NO: 1884355
gaacuuagugacugaugca

SEQ ID NO: 2259367 - RNA, 19 nt, Artificial Sequence
  Description of Artificial Sequence: Synthetic oligonucleotide
  Antisense strand to SEQ ID NO: 2259366
ugcaucagucacuaaguuc

SEQ ID NO: 2259368 - RNA, 19 nt, Artificial Sequence
  Description of Artificial Sequence: Synthetic oligonucleotide
  Sense strand starting at position 1014 of SEQ ID NO: 1884355
gugacugaugcauguauaa

SEQ ID NO: 2259369 - RNA, 19 nt, Artificial Sequence
  Description of Artificial Sequence: Synthetic oligonucleotide
  Antisense strand to SEQ ID NO: 2259368
uuauacaugcaucagucac

SEQ ID NO: 2259370 - RNA, 19 nt, Artificial Sequence
  Description of Artificial Sequence: Synthetic oligonucleotide
  Sense strand starting at position 1436 of SEQ ID NO: 1884355
ggaucuaaacccuggccaa

SEQ ID NO: 2259371 - RNA, 19 nt, Artificial Sequence
  Description of Artificial Sequence: Synthetic oligonucleotide
  Antisense strand to SEQ ID NO: 2259370
uuggccaggguuuagaucc

SEQ ID NO: 2259372 - RNA, 19 nt, Artificial Sequence
  Description of Artificial Sequence: Synthetic oligonucleotide
  Sense strand starting at position 1629 of SEQ ID NO: 1884355
uuuccuuaauuugggagaa

SEQ ID NO: 2259373 - RNA, 19 nt, Artificial Sequence
  Description of Artificial Sequence: Synthetic oligonucleotide
  Antisense strand to SEQ ID NO: 2259372
uucucccaaauuaaggaaa

SEQ ID NO: 2259374 - RNA, 19 nt, Artificial Sequence
  Description of Artificial Sequence: Synthetic oligonucleotide
  Sense strand starting at position 1630 of SEQ ID NO: 1884355
uuccuuaauuugggagaag

SEQ ID NO: 2259375 - RNA, 19 nt, Artificial Sequence
  Description of Artificial Sequence: Synthetic oligonucleotide
  Antisense strand to SEQ ID NO: 2259374
cuucucccaaauuaaggaa

SEQ ID NO: 2259376 - RNA, 19 nt, Artificial Sequence
  Description of Artificial Sequence: Synthetic oligonucleotide
  Sense strand starting at position 1855 of SEQ ID NO: 1884355
ccugcauacugaguguaaa

SEQ ID NO: 2259377 - RNA, 19 nt, Artificial Sequence
  Description of Artificial Sequence: Synthetic oligonucleotide
  Antisense strand to SEQ ID NO: 2259376
uuuacacucaguaugcagg

SEQ ID NO: 2259378 - RNA, 19 nt, Artificial Sequence
  Description of Artificial Sequence: Synthetic oligonucleotide
  Sense strand starting at position 2662 of SEQ ID NO: 1884355
gucccugcugcuguguaaa

SEQ ID NO: 2259379 - RNA, 19 nt, Artificial Sequence
  Description of Artificial Sequence: Synthetic oligonucleotide
  Antisense strand to SEQ ID NO: 2259378
uuuacacagcagcagggac

SEQ ID NO: 2259380 - RNA, 19 nt, Artificial Sequence
  Description of Artificial Sequence: Synthetic oligonucleotide
  Sense strand starting at position 2843 of SEQ ID NO: 1884355
acuucagugcgugagaauu

SEQ ID NO: 2259381 - RNA, 19 nt, Artificial Sequence
  Description of Artificial Sequence: Synthetic oligonucleotide
  Antisense strand to SEQ ID NO: 2259380
aauucucacgcacugaagu

SEQ ID NO: 2259382 - RNA, 19 nt, Artificial Sequence
  Description of Artificial Sequence: Synthetic oligonucleotide
  Sense strand starting at position 2966 of SEQ ID NO: 1884355
uuggguuucccacauuacu

SEQ ID NO: 2259383 - RNA, 19 nt, Artificial Sequence
  Description of Artificial Sequence: Synthetic oligonucleotide
  Antisense strand to SEQ ID NO: 2259382
aguaaugugggaaacccaa

SEQ ID NO: 2259384 - RNA, 19 nt, Artificial Sequence
  Description of Artificial Sequence: Synthetic oligonucleotide
  Sense strand starting at position 2982 of SEQ ID NO: 1884355
acuagcaucuguuccagaa

SEQ ID NO: 2259385 - RNA, 19 nt, Artificial Sequence
  Description of Artificial Sequence: Synthetic oligonucleotide
  Antisense strand to SEQ ID NO: 2259384
uucuggaacagaugcuagu

SEQ ID NO: 2259386 - RNA, 19 nt, Artificial Sequence
  Description of Artificial Sequence: Synthetic oligonucleotide
  Sense strand starting at position 2986 of SEQ ID NO: 1884355
gcaucuguuccagaaauaa

SEQ ID NO: 2259387 - RNA, 19 nt, Artificial Sequence
  Description of Artificial Sequence: Synthetic oligonucleotide
  Antisense strand to SEQ ID NO: 2259386
uuauuucuggaacagaugc

SEQ ID NO: 2259388 - RNA, 19 nt, Artificial Sequence
  Description of Artificial Sequence: Synthetic oligonucleotide
  Sense strand starting at position 3013 of SEQ ID NO: 1884355
ugcugauaagggugguuca

SEQ ID NO: 2259389 - RNA, 19 nt, Artificial Sequence
  Description of Artificial Sequence: Synthetic oligonucleotide
  Antisense strand to SEQ ID NO: 2259388
ugaaccacccuuaucagca

SEQ ID NO: 2259390 - RNA, 19 nt, Artificial Sequence
  Description of Artificial Sequence: Synthetic oligonucleotide
  Sense strand starting at position 3014 of SEQ ID NO: 1884355
gcugauaagggugguucaa

SEQ ID NO: 2259391 - RNA, 19 nt, Artificial Sequence
  Description of Artificial Sequence: Synthetic oligonucleotide
  Antisense strand to SEQ ID NO: 2259390
uugaaccacccuuaucagc

SEQ ID NO: 2259392 - RNA, 19 nt, Artificial Sequence
  Description of Artificial Sequence: Synthetic oligonucleotide
  Sense strand starting at position 3016 of SEQ ID NO: 1884355
ugauaagggugguucaaug

SEQ ID NO: 2259393 - RNA, 19 nt, Artificial Sequence
  Description of Artificial Sequence: Synthetic oligonucleotide
  Antisense strand to SEQ ID NO: 2259392
cauugaaccacccuuauca

SEQ ID NO: 2259394 - RNA, 19 nt, Artificial Sequence
  Description of Artificial Sequence: Synthetic oligonucleotide
  Sense strand starting at position 3099 of SEQ ID NO: 1884355
cccagcugucaggauuguu

SEQ ID NO: 2259395 - RNA, 19 nt, Artificial Sequence
  Description of Artificial Sequence: Synthetic oligonucleotide
  Antisense strand to SEQ ID NO: 2259394
aacaauccugacagcuggg

SEQ ID NO: 2259396 - RNA, 19 nt, Artificial Sequence
  Description of Artificial Sequence: Synthetic oligonucleotide
  Sense strand starting at position 3156 of SEQ ID NO: 1884355
ugugcuaccguauauauuu

SEQ ID NO: 2259397 - RNA, 19 nt, Artificial Sequence
  Description of Artificial Sequence: Synthetic oligonucleotide
  Antisense strand to SEQ ID NO: 2259396
aaauauauacgguagcaca

SEQ ID NO: 2259398 - RNA, 19 nt, Artificial Sequence
  Description of Artificial Sequence: Synthetic oligonucleotide
  Sense strand starting at position 3200 of SEQ ID NO: 1884355
aggauaggugggcgagauu

SEQ ID NO: 2259399 - RNA, 19 nt, Artificial Sequence
  Description of Artificial Sequence: Synthetic oligonucleotide
  Antisense strand to SEQ ID NO: 2259398
aaucucgcccaccuauccu

SEQ ID NO: 2259400 - RNA, 19 nt, Artificial Sequence
  Description of Artificial Sequence: Synthetic oligonucleotide
  Sense strand starting at position 3223 of SEQ ID NO: 1884355
uuguguuuggauuaaccau

SEQ ID NO: 2259401 - RNA, 19 nt, Artificial Sequence
  Description of Artificial Sequence: Synthetic oligonucleotide
  Antisense strand to SEQ ID NO: 2259400
augguuaauccaaacacaa

SEQ ID NO: 2259402 - RNA, 19 nt, Artificial Sequence
  Description of Artificial Sequence: Synthetic oligonucleotide
  Sense strand starting at position 3298 of SEQ ID NO: 1884355
acagauuucuuggagcuac

SEQ ID NO: 2259403 - RNA, 19 nt, Artificial Sequence
  Description of Artificial Sequence: Synthetic oligonucleotide
  Antisense strand to SEQ ID NO: 2259402
guagcuccaagaaaucugu

SEQ ID NO: 2259404 - RNA, 19 nt, Artificial Sequence
  Description of Artificial Sequence: Synthetic oligonucleotide
  Sense strand starting at position 3470 of SEQ ID NO: 1884355
agaguaaucuuuccaagac

SEQ ID NO: 2259405 - RNA, 19 nt, Artificial Sequence
  Description of Artificial Sequence: Synthetic oligonucleotide
  Antisense strand to SEQ ID NO: 2259404
gucuuggaaagauuacucu

SEQ ID NO: 2259406 - RNA, 19 nt, Artificial Sequence
  Description of Artificial Sequence: Synthetic oligonucleotide
  Sense strand starting at position 3485 of SEQ ID NO: 1884355
agacacaucugguugucau

SEQ ID NO: 2259407 - RNA, 19 nt, Artificial Sequence
  Description of Artificial Sequence: Synthetic oligonucleotide
  Antisense strand to SEQ ID NO: 2259406
augacaaccagaugugucu

SEQ ID NO: 2259408 - RNA, 19 nt, Artificial Sequence
  Description of Artificial Sequence: Synthetic oligonucleotide
  Sense strand starting at position 3486 of SEQ ID NO: 1884355
gacacaucugguugucauu

SEQ ID NO: 2259409 - RNA, 19 nt, Artificial Sequence
  Description of Artificial Sequence: Synthetic oligonucleotide
  Antisense strand to SEQ ID NO: 2259408
aaugacaaccagauguguc

SEQ ID NO: 2259410 - RNA, 19 nt, Artificial Sequence
  Description of Artificial Sequence: Synthetic oligonucleotide
  Sense strand starting at position 3495 of SEQ ID NO: 1884355
gguugucauucuccuuaaa

SEQ ID NO: 2259411 - RNA, 19 nt, Artificial Sequence
  Description of Artificial Sequence: Synthetic oligonucleotide
  Antisense strand to SEQ ID NO: 2259410
uuuaaggagaaugacaacc

SEQ ID NO: 2259412 - RNA, 19 nt, Artificial Sequence
  Description of Artificial Sequence: Synthetic oligonucleotide
  Sense strand starting at position 3594 of SEQ ID NO: 1884355
uaagguccuccaggacuua

SEQ ID NO: 2259413 - RNA, 19 nt, Artificial Sequence
  Description of Artificial Sequence: Synthetic oligonucleotide
  Antisense strand to SEQ ID NO: 2259412
uaaguccuggaggaccuua

SEQ ID NO: 2259414 - RNA, 19 nt, Artificial Sequence
  Description of Artificial Sequence: Synthetic oligonucleotide
  Sense strand starting at position 3793 of SEQ ID NO: 1884355
cuucuuccugcagaauuga

SEQ ID NO: 2259415 - RNA, 19 nt, Artificial Sequence
  Description of Artificial Sequence: Synthetic oligonucleotide
  Antisense strand to SEQ ID NO: 2259414
ucaauucugcaggaagaag

SEQ ID NO: 2259416 - RNA, 19 nt, Artificial Sequence
  Description of Artificial Sequence: Synthetic oligonucleotide
  Sense strand starting at position 3824 of SEQ ID NO: 1884355
gguagauggcgugcuucuu

SEQ ID NO: 2259417 - RNA, 19 nt, Artificial Sequence
  Description of Artificial Sequence: Synthetic oligonucleotide
  Antisense strand to SEQ ID NO: 2259416
aagaagcacgccaucuacc

SEQ ID NO: 2259418 - RNA, 19 nt, Artificial Sequence
  Description of Artificial Sequence: Synthetic oligonucleotide
  Sense strand starting at position 3916 of SEQ ID NO: 1884355
cuguuaaguguugagggua

SEQ ID NO: 2259419 - RNA, 19 nt, Artificial Sequence
  Description of Artificial Sequence: Synthetic oligonucleotide
  Antisense strand to SEQ ID NO: 2259418
uacccucaacacuuaacag

SEQ ID NO: 2259420 - RNA, 19 nt, Artificial Sequence
  Description of Artificial Sequence: Synthetic oligonucleotide
  Sense strand starting at position 3921 of SEQ ID NO: 1884355
aaguguugaggguacagua

SEQ ID NO: 2259421 - RNA, 19 nt, Artificial Sequence
  Description of Artificial Sequence: Synthetic oligonucleotide
  Antisense strand to SEQ ID NO: 2259420
uacuguacccucaacacuu

SEQ ID NO: 2259422 - RNA, 19 nt, Artificial Sequence
  Description of Artificial Sequence: Synthetic oligonucleotide
  Sense strand starting at position 358 of SEQ ID NO: 1884356
cccaguuaguuacuauuaa

SEQ ID NO: 2259423 - RNA, 19 nt, Artificial Sequence
  Description of Artificial Sequence: Synthetic oligonucleotide
  Antisense strand to SEQ ID NO: 2259422
uuaauaguaacuaacuggg

SEQ ID NO: 2259424 - RNA, 19 nt, Artificial Sequence
  Description of Artificial Sequence: Synthetic oligonucleotide
  Sense strand starting at position 407 of SEQ ID NO: 1884356
gcauguaaagauuaaguaa

SEQ ID NO: 2259425 - RNA, 19 nt, Artificial Sequence
  Description of Artificial Sequence: Synthetic oligonucleotide
  Antisense strand to SEQ ID NO: 2259424
uuacuuaaucuuuacaugc

SEQ ID NO: 2259426 - RNA, 19 nt, Artificial Sequence
  Description of Artificial Sequence: Synthetic oligonucleotide
  Sense strand starting at position 825 of SEQ ID NO: 1884356
guucuuagccauuagacua

SEQ ID NO: 2259427 - RNA, 19 nt, Artificial Sequence
  Description of Artificial Sequence: Synthetic oligonucleotide
  Antisense strand to SEQ ID NO: 2259426
uagucuaauggcuaagaac

SEQ ID NO: 2259428 - RNA, 19 nt, Artificial Sequence
  Description of Artificial Sequence: Synthetic oligonucleotide
  Sense strand starting at position 934 of SEQ ID NO: 1884356
ggguuuauauaucugucuu

SEQ ID NO: 2259429 - RNA, 19 nt, Artificial Sequence
  Description of Artificial Sequence: Synthetic oligonucleotide
  Antisense strand to SEQ ID NO: 2259428
aagacagauauauaaaccc

SEQ ID NO: 2259430 - RNA, 19 nt, Artificial Sequence
  Description of Artificial Sequence: Synthetic oligonucleotide
  Sense strand starting at position 1035 of SEQ ID NO: 1884356
ggguacaguaacuauguua

SEQ ID NO: 2259431 - RNA, 19 nt, Artificial Sequence
  Description of Artificial Sequence: Synthetic oligonucleotide
  Antisense strand to SEQ ID NO: 2259430
uaacauaguuacuguaccc

SEQ ID NO: 2259432 - RNA, 19 nt, Artificial Sequence
  Description of Artificial Sequence: Synthetic oligonucleotide
  Sense strand starting at position 1046 of SEQ ID NO: 1884356
cuauguuauggacaucuua

SEQ ID NO: 2259433 - RNA, 19 nt, Artificial Sequence
  Description of Artificial Sequence: Synthetic oligonucleotide
  Antisense strand to SEQ ID NO: 2259432
uaagauguccauaacauag

SEQ ID NO: 2259434 - RNA, 19 nt, Artificial Sequence
  Description of Artificial Sequence: Synthetic oligonucleotide
  Sense strand starting at position 1140 of SEQ ID NO: 1884356
gccagcuuugcguccacaa

SEQ ID NO: 2259435 - RNA, 19 nt, Artificial Sequence
  Description of Artificial Sequence: Synthetic oligonucleotide
  Antisense strand to SEQ ID NO: 2259434
uuguggacgcaaagcuggc

SEQ ID NO: 2259436 - RNA, 19 nt, Artificial Sequence
  Description of Artificial Sequence: Synthetic oligonucleotide
  Sense strand starting at position 1351 of SEQ ID NO: 1884356
gcccaagucugggcacaaa

SEQ ID NO: 2259437 - RNA, 19 nt, Artificial Sequence
  Description of Artificial Sequence: Synthetic oligonucleotide
  Antisense strand to SEQ ID NO: 2259436
uuugugcccagacuugggc

SEQ ID NO: 2259438 - RNA, 19 nt, Artificial Sequence
  Description of Artificial Sequence: Synthetic oligonucleotide
  Sense strand starting at position 1374 of SEQ ID NO: 1884356
gcuuuaugugaauauccgu

SEQ ID NO: 2259439 - RNA, 19 nt, Artificial Sequence
  Description of Artificial Sequence: Synthetic oligonucleotide
  Antisense strand to SEQ ID NO: 2259438
acggauauucacauaaagc

SEQ ID NO: 2259440 - RNA, 19 nt, Artificial Sequence
  Description of Artificial Sequence: Synthetic oligonucleotide
  Sense strand starting at position 1381 of SEQ ID NO: 1884356
gugaauauccgugggacga

SEQ ID NO: 2259441 - RNA, 19 nt, Artificial Sequence
  Description of Artificial Sequence: Synthetic oligonucleotide
  Antisense strand to SEQ ID NO: 2259440
ucgucccacggauauucac

SEQ ID NO: 2259442 - RNA, 19 nt, Artificial Sequence
  Description of Artificial Sequence: Synthetic oligonucleotide
  Sense strand starting at position 1382 of SEQ ID NO: 1884356
ugaauauccgugggacgau

SEQ ID NO: 2259443 - RNA, 19 nt, Artificial Sequence
  Description of Artificial Sequence: Synthetic oligonucleotide
  Antisense strand to SEQ ID NO: 2259442
aucgucccacggauauuca

SEQ ID NO: 2259444 - RNA, 19 nt, Artificial Sequence
  Description of Artificial Sequence: Synthetic oligonucleotide
  Sense strand starting at position 1404 of SEQ ID NO: 1884356
gaacaaucuccacgugggu

SEQ ID NO: 2259445 - RNA, 19 nt, Artificial Sequence
  Description of Artificial Sequence: Synthetic oligonucleotide
  Antisense strand to SEQ ID NO: 2259444
acccacguggagauuguuc

SEQ ID NO: 2259446 - RNA, 19 nt, Artificial Sequence
  Description of Artificial Sequence: Synthetic oligonucleotide
  Sense strand starting at position 1406 of SEQ ID NO: 1884356
acaaucuccacguggguua

SEQ ID NO: 2259447 - RNA, 19 nt, Artificial Sequence
  Description of Artificial Sequence: Synthetic oligonucleotide
  Antisense strand to SEQ ID NO: 2259446
uaacccacguggagauugu

SEQ ID NO: 2259448 - RNA, 19 nt, Artificial Sequence
  Description of Artificial Sequence: Synthetic oligonucleotide
  Sense strand starting at position 1585 of SEQ ID NO: 1884356
uaaguugagugcucugauc

SEQ ID NO: 2259449 - RNA, 19 nt, Artificial Sequence
  Description of Artificial Sequence: Synthetic oligonucleotide
  Antisense strand to SEQ ID NO: 2259448
gaucagagcacucaacuua

SEQ ID NO: 2259450 - RNA, 19 nt, Artificial Sequence
  Description of Artificial Sequence: Synthetic oligonucleotide
  Sense strand starting at position 1752 of SEQ ID NO: 1884356
ccgucuucucccgucacua

SEQ ID NO: 2259451 - RNA, 19 nt, Artificial Sequence
  Description of Artificial Sequence: Synthetic oligonucleotide
  Antisense strand to SEQ ID NO: 2259450
uagugacgggagaagacgg

SEQ ID NO: 2259452 - RNA, 19 nt, Artificial Sequence
  Description of Artificial Sequence: Synthetic oligonucleotide
  Sense strand starting at position 2183 of SEQ ID NO: 1884356
aagaguauugagugucuau

SEQ ID NO: 2259453 - RNA, 19 nt, Artificial Sequence
  Description of Artificial Sequence: Synthetic oligonucleotide
  Antisense strand to SEQ ID NO: 2259452
auagacacucaauacucuu

SEQ ID NO: 2259454 - RNA, 19 nt, Artificial Sequence
  Description of Artificial Sequence: Synthetic oligonucleotide
  Sense strand starting at position 2216 of SEQ ID NO: 1884356
cugugagggugguuacgau

SEQ ID NO: 2259455 - RNA, 19 nt, Artificial Sequence
  Description of Artificial Sequence: Synthetic oligonucleotide
  Antisense strand to SEQ ID NO: 2259454
aucguaaccacccucacag

SEQ ID NO: 2259456 - RNA, 19 nt, Artificial Sequence
  Description of Artificial Sequence: Synthetic oligonucleotide
  Sense strand starting at position 2217 of SEQ ID NO: 1884356
ugugagggugguuacgaua

SEQ ID NO: 2259457 - RNA, 19 nt, Artificial Sequence
  Description of Artificial Sequence: Synthetic oligonucleotide
  Antisense strand to SEQ ID NO: 2259456
uaucguaaccacccucaca

SEQ ID NO: 2259458 - RNA, 19 nt, Artificial Sequence
  Description of Artificial Sequence: Synthetic oligonucleotide
  Sense strand starting at position 2224 of SEQ ID NO: 1884356
gugguuacgauauguggau

SEQ ID NO: 2259459 - RNA, 19 nt, Artificial Sequence
  Description of Artificial Sequence: Synthetic oligonucleotide
  Antisense strand to SEQ ID NO: 2259458
auccacauaucguaaccac

SEQ ID NO: 2259460 - RNA, 19 nt, Artificial Sequence
  Description of Artificial Sequence: Synthetic oligonucleotide
  Sense strand starting at position 2226 of SEQ ID NO: 1884356
gguuacgauauguggauga

SEQ ID NO: 2259461 - RNA, 19 nt, Artificial Sequence
  Description of Artificial Sequence: Synthetic oligonucleotide
  Antisense strand to SEQ ID NO: 2259460
ucauccacauaucguaacc

SEQ ID NO: 2259462 - RNA, 19 nt, Artificial Sequence
  Description of Artificial Sequence: Synthetic oligonucleotide
  Sense strand starting at position 2230 of SEQ ID NO: 1884356
acgauauguggaugaacaa

SEQ ID NO: 2259463 - RNA, 19 nt, Artificial Sequence
  Description of Artificial Sequence: Synthetic oligonucleotide
  Antisense strand to SEQ ID NO: 2259462
uuguucauccacauaucgu

SEQ ID NO: 2259464 - RNA, 19 nt, Artificial Sequence
  Description of Artificial Sequence: Synthetic oligonucleotide
  Sense strand starting at position 2349 of SEQ ID NO: 1884356
agaagaacguuaccaaguu

SEQ ID NO: 2259465 - RNA, 19 nt, Artificial Sequence
  Description of Artificial Sequence: Synthetic oligonucleotide
  Antisense strand to SEQ ID NO: 2259464
aacuugguaacguucuucu

SEQ ID NO: 2259466 - RNA, 19 nt, Artificial Sequence
  Description of Artificial Sequence: Synthetic oligonucleotide
  Sense strand starting at position 2382 of SEQ ID NO: 1884356
gucagagaguccuuggaug

SEQ ID NO: 2259467 - RNA, 19 nt, Artificial Sequence
  Description of Artificial Sequence: Synthetic oligonucleotide
  Antisense strand to SEQ ID NO: 2259466
cauccaaggacucucugac

SEQ ID NO: 2259468 - RNA, 19 nt, Artificial Sequence
  Description of Artificial Sequence: Synthetic oligonucleotide
  Sense strand starting at position 2399 of SEQ ID NO: 1884356
ugaaguaaacccgaguuga

SEQ ID NO: 2259469 - RNA, 19 nt, Artificial Sequence
  Description of Artificial Sequence: Synthetic oligonucleotide
  Antisense strand to SEQ ID NO: 2259468
ucaacucggguuuacuuca

SEQ ID NO: 2259470 - RNA, 19 nt, Artificial Sequence
  Description of Artificial Sequence: Synthetic oligonucleotide
  Sense strand starting at position 2502 of SEQ ID NO: 1884356
gaaacagaauaguugaguu

SEQ ID NO: 2259471 - RNA, 19 nt, Artificial Sequence
  Description of Artificial Sequence: Synthetic oligonucleotide
  Antisense strand to SEQ ID NO: 2259470
aacucaacuauucuguuuc

SEQ ID NO: 2259472 - RNA, 19 nt, Artificial Sequence
  Description of Artificial Sequence: Synthetic oligonucleotide
  Sense strand starting at position 2512 of SEQ ID NO: 1884356
aguugaguuuggcugaaac

SEQ ID NO: 2259473 - RNA, 19 nt, Artificial Sequence
  Description of Artificial Sequence: Synthetic oligonucleotide
  Antisense strand to SEQ ID NO: 2259472
guuucagccaaacucaacu

SEQ ID NO: 2259474 - RNA, 19 nt, Artificial Sequence
  Description of Artificial Sequence: Synthetic oligonucleotide
  Sense strand starting at position 2514 of SEQ ID NO: 1884356
uugaguuuggcugaaacac

SEQ ID NO: 2259475 - RNA, 19 nt, Artificial Sequence
  Description of Artificial Sequence: Synthetic oligonucleotide
  Antisense strand to SEQ ID NO: 2259474
guguuucagccaaacucaa

SEQ ID NO: 2259476 - RNA, 19 nt, Artificial Sequence
  Description of Artificial Sequence: Synthetic oligonucleotide
  Sense strand starting at position 2842 of SEQ ID NO: 1884356
agguauuuauaccagagca

SEQ ID NO: 2259477 - RNA, 19 nt, Artificial Sequence
  Description of Artificial Sequence: Synthetic oligonucleotide
  Antisense strand to SEQ ID NO: 2259476
ugcucugguauaaauaccu

SEQ ID NO: 2259478 - RNA, 19 nt, Artificial Sequence
  Description of Artificial Sequence: Synthetic oligonucleotide
  Sense strand starting at position 2945 of SEQ ID NO: 1884356
ugagauagcucagcacaag

SEQ ID NO: 2259479 - RNA, 19 nt, Artificial Sequence
  Description of Artificial Sequence: Synthetic oligonucleotide
  Antisense strand to SEQ ID NO: 2259478
cuugugcugagcuaucuca

SEQ ID NO: 2259480 - RNA, 19 nt, Artificial Sequence
  Description of Artificial Sequence: Synthetic oligonucleotide
  Sense strand starting at position 3302 of SEQ ID NO: 1884356
cuugaauuauuucuugugu

SEQ ID NO: 2259481 - RNA, 19 nt, Artificial Sequence
  Description of Artificial Sequence: Synthetic oligonucleotide
  Antisense strand to SEQ ID NO: 2259480
acacaagaaauaauucaag

SEQ ID NO: 2259482 - RNA, 19 nt, Artificial Sequence
  Description of Artificial Sequence: Synthetic oligonucleotide
  Sense strand starting at position 3492 of SEQ ID NO: 1884356
ucuccuuuccuguggagaa

SEQ ID NO: 2259483 - RNA, 19 nt, Artificial Sequence
  Description of Artificial Sequence: Synthetic oligonucleotide
  Antisense strand to SEQ ID NO: 2259482
uucuccacaggaaaggaga

SEQ ID NO: 2259484 - RNA, 19 nt, Artificial Sequence
  Description of Artificial Sequence: Synthetic oligonucleotide
  Sense strand starting at position 3705 of SEQ ID NO: 1884356
aggcuucuggcuuggacaa

SEQ ID NO: 2259485 - RNA, 19 nt, Artificial Sequence
  Description of Artificial Sequence: Synthetic oligonucleotide
  Antisense strand to SEQ ID NO: 2259484
uuguccaagccagaagccu

SEQ ID NO: 2259486 - RNA, 19 nt, Artificial Sequence
  Description of Artificial Sequence: Synthetic oligonucleotide
  Sense strand starting at position 3731 of SEQ ID NO: 1884356
gauggugaugucugucauu

SEQ ID NO: 2259487 - RNA, 19 nt, Artificial Sequence
  Description of Artificial Sequence: Synthetic oligonucleotide
  Antisense strand to SEQ ID NO: 2259486
aaugacagacaucaccauc

SEQ ID NO: 2259488 - RNA, 19 nt, Artificial Sequence
  Description of Artificial Sequence: Synthetic oligonucleotide
  Sense strand starting at position 3768 of SEQ ID NO: 1884356
acaccuagaucuccaguau

SEQ ID NO: 2259489 - RNA, 19 nt, Artificial Sequence
  Description of Artificial Sequence: Synthetic oligonucleotide
  Antisense strand to SEQ ID NO: 2259488
auacuggagaucuaggugu

SEQ ID NO: 2259490 - RNA, 19 nt, Artificial Sequence
  Description of Artificial Sequence: Synthetic oligonucleotide
  Sense strand starting at position 3772 of SEQ ID NO: 1884356
cuagaucuccaguaugagu

SEQ ID NO: 2259491 - RNA, 19 nt, Artificial Sequence
  Description of Artificial Sequence: Synthetic oligonucleotide
  Antisense strand to SEQ ID NO: 2259490
acucauacuggagaucuag

SEQ ID NO: 2259492 - RNA, 19 nt, Artificial Sequence
  Description of Artificial Sequence: Synthetic oligonucleotide
  Sense strand starting at position 3832 of SEQ ID NO: 1884356
ucauguuguuugguaacau

SEQ ID NO: 2259493 - RNA, 19 nt, Artificial Sequence
  Description of Artificial Sequence: Synthetic oligonucleotide
  Antisense strand to SEQ ID NO: 2259492
auguuaccaaacaacauga

SEQ ID NO: 2259494 - RNA, 19 nt, Artificial Sequence
  Description of Artificial Sequence: Synthetic oligonucleotide
  Sense strand starting at position 3844 of SEQ ID NO: 1884356
guaacaucagugcaugcau

SEQ ID NO: 2259495 - RNA, 19 nt, Artificial Sequence
  Description of Artificial Sequence: Synthetic oligonucleotide
  Antisense strand to SEQ ID NO: 2259494
augcaugcacugauguuac

SEQ ID NO: 2259496 - RNA, 19 nt, Artificial Sequence
  Description of Artificial Sequence: Synthetic oligonucleotide
  Sense strand starting at position 3888 of SEQ ID NO: 1884356
gaggguaguuaccugggau

SEQ ID NO: 2259497 - RNA, 19 nt, Artificial Sequence
  Description of Artificial Sequence: Synthetic oligonucleotide
  Antisense strand to SEQ ID NO: 2259496
aucccagguaacuacccuc

SEQ ID NO: 2259498 - RNA, 19 nt, Artificial Sequence
  Description of Artificial Sequence: Synthetic oligonucleotide
  Sense strand starting at position 3889 of SEQ ID NO: 1884356
aggguaguuaccugggaug

SEQ ID NO: 2259499 - RNA, 19 nt, Artificial Sequence
  Description of Artificial Sequence: Synthetic oligonucleotide
  Antisense strand to SEQ ID NO: 2259498
caucccagguaacuacccu

SEQ ID NO: 2259500 - RNA, 19 nt, Artificial Sequence
  Description of Artificial Sequence: Synthetic oligonucleotide
  Sense strand starting at position 3891 of SEQ ID NO: 1884356
gguaguuaccugggauguc

SEQ ID NO: 2259501 - RNA, 19 nt, Artificial Sequence
  Description of Artificial Sequence: Synthetic oligonucleotide
  Antisense strand to SEQ ID NO: 2259500
gacaucccagguaacuacc

SEQ ID NO: 2259502 - RNA, 19 nt, Artificial Sequence
  Description of Artificial Sequence: Synthetic oligonucleotide
  Sense strand starting at position 107 of SEQ ID NO: 1884357
cucugucuucuauggagga

SEQ ID NO: 2259503 - RNA, 19 nt, Artificial Sequence
  Description of Artificial Sequence: Synthetic oligonucleotide
  Antisense strand to SEQ ID NO: 2259502
uccuccauagaagacagag

SEQ ID NO: 2259504 - RNA, 19 nt, Artificial Sequence
  Description of Artificial Sequence: Synthetic oligonucleotide
  Sense strand starting at position 111 of SEQ ID NO: 1884357
gucuucuauggaggauauu

SEQ ID NO: 2259505 - RNA, 19 nt, Artificial Sequence
  Description of Artificial Sequence: Synthetic oligonucleotide
  Antisense strand to SEQ ID NO: 2259504
aauauccuccauagaagac

SEQ ID NO: 2259506 - RNA, 19 nt, Artificial Sequence
  Description of Artificial Sequence: Synthetic oligonucleotide
  Sense strand starting at position 123 of SEQ ID NO: 1884357
ggauauugacagugaauuc

SEQ ID NO: 2259507 - RNA, 19 nt, Artificial Sequence
  Description of Artificial Sequence: Synthetic oligonucleotide
  Antisense strand to SEQ ID NO: 2259506
gaauucacugucaauaucc

SEQ ID NO: 2259508 - RNA, 19 nt, Artificial Sequence
  Description of Artificial Sequence: Synthetic oligonucleotide
  Sense strand starting at position 173 of SEQ ID NO: 1884357
guugguaaggucuggaucu

SEQ ID NO: 2259509 - RNA, 19 nt, Artificial Sequence
  Description of Artificial Sequence: Synthetic oligonucleotide
  Antisense strand to SEQ ID NO: 2259508
agauccagaccuuaccaac

SEQ ID NO: 2259510 - RNA, 19 nt, Artificial Sequence
  Description of Artificial Sequence: Synthetic oligonucleotide
  Sense strand starting at position 225 of SEQ ID NO: 1884357
uaaauugagcagugggagu

SEQ ID NO: 2259511 - RNA, 19 nt, Artificial Sequence
  Description of Artificial Sequence: Synthetic oligonucleotide
  Antisense strand to SEQ ID NO: 2259510
acucccacugcucaauuua

SEQ ID NO: 2259512 - RNA, 19 nt, Artificial Sequence
  Description of Artificial Sequence: Synthetic oligonucleotide
  Sense strand starting at position 317 of SEQ ID NO: 1884357
cuugugucgcuggcgagaa

SEQ ID NO: 2259513 - RNA, 19 nt, Artificial Sequence
  Description of Artificial Sequence: Synthetic oligonucleotide
  Antisense strand to SEQ ID NO: 2259512
uucucgccagcgacacaag

SEQ ID NO: 2259514 - RNA, 19 nt, Artificial Sequence
  Description of Artificial Sequence: Synthetic oligonucleotide
  Sense strand starting at position 335 of SEQ ID NO: 1884357
aaugcaaacguuugugaau

SEQ ID NO: 2259515 - RNA, 19 nt, Artificial Sequence
  Description of Artificial Sequence: Synthetic oligonucleotide
  Antisense strand to SEQ ID NO: 2259514
auucacaaacguuugcauu

SEQ ID NO: 2259516 - RNA, 19 nt, Artificial Sequence
  Description of Artificial Sequence: Synthetic oligonucleotide
  Sense strand starting at position 392 of SEQ ID NO: 1884357
agcacacccgcauaugauu

SEQ ID NO: 2259517 - RNA, 19 nt, Artificial Sequence
  Description of Artificial Sequence: Synthetic oligonucleotide
  Antisense strand to SEQ ID NO: 2259516
aaucauaugcgggugugcu

SEQ ID NO: 2259518 - RNA, 19 nt, Artificial Sequence
  Description of Artificial Sequence: Synthetic oligonucleotide
  Sense strand starting at position 400 of SEQ ID NO: 1884357
cgcauaugauucuccagac

SEQ ID NO: 2259519 - RNA, 19 nt, Artificial Sequence
  Description of Artificial Sequence: Synthetic oligonucleotide
  Antisense strand to SEQ ID NO: 2259518
gucuggagaaucauaugcg

SEQ ID NO: 2259520 - RNA, 19 nt, Artificial Sequence
  Description of Artificial Sequence: Synthetic oligonucleotide
  Sense strand starting at position 401 of SEQ ID NO: 1884357
gcauaugauucuccagaca

SEQ ID NO: 2259521 - RNA, 19 nt, Artificial Sequence
  Description of Artificial Sequence: Synthetic oligonucleotide
  Antisense strand to SEQ ID NO: 2259520
ugucuggagaaucauaugc

SEQ ID NO: 2259522 - RNA, 19 nt, Artificial Sequence
  Description of Artificial Sequence: Synthetic oligonucleotide
  Sense strand starting at position 1022 of SEQ ID NO: 1884357
auauguguauuuggaagaa

SEQ ID NO: 2259523 - RNA, 19 nt, Artificial Sequence
  Description of Artificial Sequence: Synthetic oligonucleotide
  Antisense strand to SEQ ID NO: 2259522
uucuuccaaauacacauau

SEQ ID NO: 2259524 - RNA, 19 nt, Artificial Sequence
  Description of Artificial Sequence: Synthetic oligonucleotide
  Sense strand starting at position 1275 of SEQ ID NO: 1884357
aucagugagagcugaacaa

SEQ ID NO: 2259525 - RNA, 19 nt, Artificial Sequence
  Description of Artificial Sequence: Synthetic oligonucleotide
  Antisense strand to SEQ ID NO: 2259524
uuguucagcucucacugau

SEQ ID NO: 2259526 - RNA, 19 nt, Artificial Sequence
  Description of Artificial Sequence: Synthetic oligonucleotide
  Sense strand starting at position 1398 of SEQ ID NO: 1884357
gcuuaauaacaaggugaug

SEQ ID NO: 2259527 - RNA, 19 nt, Artificial Sequence
  Description of Artificial Sequence: Synthetic oligonucleotide
  Antisense strand to SEQ ID NO: 2259526
caucaccuuguuauuaagc

SEQ ID NO: 2259528 - RNA, 19 nt, Artificial Sequence
  Description of Artificial Sequence: Synthetic oligonucleotide
  Sense strand starting at position 1417 of SEQ ID NO: 1884357
gguugauaggugcaacaca

SEQ ID NO: 2259529 - RNA, 19 nt, Artificial Sequence
  Description of Artificial Sequence: Synthetic oligonucleotide
  Antisense strand to SEQ ID NO: 2259528
uguguugcaccuaucaacc

SEQ ID NO: 2259530 - RNA, 19 nt, Artificial Sequence
  Description of Artificial Sequence: Synthetic oligonucleotide
  Sense strand starting at position 1430 of SEQ ID NO: 1884357
aacacaucaccguggcaua

SEQ ID NO: 2259531 - RNA, 19 nt, Artificial Sequence
  Description of Artificial Sequence: Synthetic oligonucleotide
  Antisense strand to SEQ ID NO: 2259530
uaugccacggugauguguu

SEQ ID NO: 2259532 - RNA, 19 nt, Artificial Sequence
  Description of Artificial Sequence: Synthetic oligonucleotide
  Sense strand starting at position 1440 of SEQ ID NO: 1884357
cguggcauacguuuaccua

SEQ ID NO: 2259533 - RNA, 19 nt, Artificial Sequence
  Description of Artificial Sequence: Synthetic oligonucleotide
  Antisense strand to SEQ ID NO: 2259532
uagguaaacguaugccacg

SEQ ID NO: 2259534 - RNA, 19 nt, Artificial Sequence
  Description of Artificial Sequence: Synthetic oligonucleotide
  Sense strand starting at position 1447 of SEQ ID NO: 1884357
uacguuuaccuaugugaca

SEQ ID NO: 2259535 - RNA, 19 nt, Artificial Sequence
  Description of Artificial Sequence: Synthetic oligonucleotide
  Antisense strand to SEQ ID NO: 2259534
ugucacauagguaaacgua

SEQ ID NO: 2259536 - RNA, 19 nt, Artificial Sequence
  Description of Artificial Sequence: Synthetic oligonucleotide
  Sense strand starting at position 1563 of SEQ ID NO: 1884357
gucugugucagacauguua

SEQ ID NO: 2259537 - RNA, 19 nt, Artificial Sequence
  Description of Artificial Sequence: Synthetic oligonucleotide
  Antisense strand to SEQ ID NO: 2259536
uaacaugucugacacagac

SEQ ID NO: 2259538 - RNA, 19 nt, Artificial Sequence
  Description of Artificial Sequence: Synthetic oligonucleotide
  Sense strand starting at position 1565 of SEQ ID NO: 1884357
cugugucagacauguuaca

SEQ ID NO: 2259539 - RNA, 19 nt, Artificial Sequence
  Description of Artificial Sequence: Synthetic oligonucleotide
  Antisense strand to SEQ ID NO: 2259538
uguaacaugucugacacag

SEQ ID NO: 2259540 - RNA, 19 nt, Artificial Sequence
  Description of Artificial Sequence: Synthetic oligonucleotide
  Sense strand starting at position 1651 of SEQ ID NO: 1884357
agcacaugcccacagaaau

SEQ ID NO: 2259541 - RNA, 19 nt, Artificial Sequence
  Description of Artificial Sequence: Synthetic oligonucleotide
  Antisense strand to SEQ ID NO: 2259540
auuucugugggcaugugcu

SEQ ID NO: 2259542 - RNA, 19 nt, Artificial Sequence
  Description of Artificial Sequence: Synthetic oligonucleotide
  Sense strand starting at position 1706 of SEQ ID NO: 1884357
cagaauaaagucuggcaca

SEQ ID NO: 2259543 - RNA, 19 nt, Artificial Sequence
  Description of Artificial Sequence: Synthetic oligonucleotide
  Antisense strand to SEQ ID NO: 2259542
ugugccagacuuuauucug

SEQ ID NO: 2259544 - RNA, 19 nt, Artificial Sequence
  Description of Artificial Sequence: Synthetic oligonucleotide
  Sense strand starting at position 1711 of SEQ ID NO: 1884357
uaaagucuggcacauagua

SEQ ID NO: 2259545 - RNA, 19 nt, Artificial Sequence
  Description of Artificial Sequence: Synthetic oligonucleotide
  Antisense strand to SEQ ID NO: 2259544
uacuaugugccagacuuua

SEQ ID NO: 2259546 - RNA, 19 nt, Artificial Sequence
  Description of Artificial Sequence: Synthetic oligonucleotide
  Sense strand starting at position 1783 of SEQ ID NO: 1884357
ggaacaagaucacagaacu

SEQ ID NO: 2259547 - RNA, 19 nt, Artificial Sequence
  Description of Artificial Sequence: Synthetic oligonucleotide
  Antisense strand to SEQ ID NO: 2259546
aguucugugaucuuguucc

SEQ ID NO: 2259548 - RNA, 19 nt, Artificial Sequence
  Description of Artificial Sequence: Synthetic oligonucleotide
  Sense strand starting at position 1796 of SEQ ID NO: 1884357
agaacuaauucgguuccau

SEQ ID NO: 2259549 - RNA, 19 nt, Artificial Sequence
  Description of Artificial Sequence: Synthetic oligonucleotide
  Antisense strand to SEQ ID NO: 2259548
auggaaccgaauuaguucu

SEQ ID NO: 2259550 - RNA, 19 nt, Artificial Sequence
  Description of Artificial Sequence: Synthetic oligonucleotide
  Sense strand starting at position 2389 of SEQ ID NO: 1884357
ccaccaucaugcgcaauaa

SEQ ID NO: 2259551 - RNA, 19 nt, Artificial Sequence
  Description of Artificial Sequence: Synthetic oligonucleotide
  Antisense strand to SEQ ID NO: 2259550
uuauugcgcaugauggugg

SEQ ID NO: 2259552 - RNA, 19 nt, Artificial Sequence
  Description of Artificial Sequence: Synthetic oligonucleotide
  Sense strand starting at position 2409 of SEQ ID NO: 1884357
ggcaaugugcuguaacaca

SEQ ID NO: 2259553 - RNA, 19 nt, Artificial Sequence
  Description of Artificial Sequence: Synthetic oligonucleotide
  Antisense strand to SEQ ID NO: 2259552
uguguuacagcacauugcc

SEQ ID NO: 2259554 - RNA, 19 nt, Artificial Sequence
  Description of Artificial Sequence: Synthetic oligonucleotide
  Sense strand starting at position 2421 of SEQ ID NO: 1884357
uaacacagccgugaucuua

SEQ ID NO: 2259555 - RNA, 19 nt, Artificial Sequence
  Description of Artificial Sequence: Synthetic oligonucleotide
  Antisense strand to SEQ ID NO: 2259554
uaagaucacggcuguguua

SEQ ID NO: 2259556 - RNA, 19 nt, Artificial Sequence
  Description of Artificial Sequence: Synthetic oligonucleotide
  Sense strand starting at position 2514 of SEQ ID NO: 1884357
guguuucuacuuuaucuau

SEQ ID NO: 2259557 - RNA, 19 nt, Artificial Sequence
  Description of Artificial Sequence: Synthetic oligonucleotide
  Antisense strand to SEQ ID NO: 2259556
auagauaaaguagaaacac

SEQ ID NO: 2259558 - RNA, 19 nt, Artificial Sequence
  Description of Artificial Sequence: Synthetic oligonucleotide
  Sense strand starting at position 2641 of SEQ ID NO: 1884357
ugaagagagcucgaaguau

SEQ ID NO: 2259559 - RNA, 19 nt, Artificial Sequence
  Description of Artificial Sequence: Synthetic oligonucleotide
  Antisense strand to SEQ ID NO: 2259558
auacuucgagcucucuuca

SEQ ID NO: 2259560 - RNA, 19 nt, Artificial Sequence
  Description of Artificial Sequence: Synthetic oligonucleotide
  Sense strand starting at position 2846 of SEQ ID NO: 1884357
gcaauaggcagcuguagaa

SEQ ID NO: 2259561 - RNA, 19 nt, Artificial Sequence
  Description of Artificial Sequence: Synthetic oligonucleotide
  Antisense strand to SEQ ID NO: 2259560
uucuacagcugccuauugc

SEQ ID NO: 2259562 - RNA, 19 nt, Artificial Sequence
  Description of Artificial Sequence: Synthetic oligonucleotide
  Sense strand starting at position 2934 of SEQ ID NO: 1884357
gguagucaggacugcugaa

SEQ ID NO: 2259563 - RNA, 19 nt, Artificial Sequence
  Description of Artificial Sequence: Synthetic oligonucleotide
  Antisense strand to SEQ ID NO: 2259562
uucagcaguccugacuacc

SEQ ID NO: 2259564 - RNA, 19 nt, Artificial Sequence
  Description of Artificial Sequence: Synthetic oligonucleotide
  Sense strand starting at position 3157 of SEQ ID NO: 1884357
gcuggaguaguggacuuua

SEQ ID NO: 2259565 - RNA, 19 nt, Artificial Sequence
  Description of Artificial Sequence: Synthetic oligonucleotide
  Antisense strand to SEQ ID NO: 2259564
uaaaguccacuacuccagc

SEQ ID NO: 2259566 - RNA, 19 nt, Artificial Sequence
  Description of Artificial Sequence: Synthetic oligonucleotide
  Sense strand starting at position 3188 of SEQ ID NO: 1884357
ccauaugucagggaccagu

SEQ ID NO: 2259567 - RNA, 19 nt, Artificial Sequence
  Description of Artificial Sequence: Synthetic oligonucleotide
  Antisense strand to SEQ ID NO: 2259566
acuggucccugacauaugg

SEQ ID NO: 2259568 - RNA, 19 nt, Artificial Sequence
  Description of Artificial Sequence: Synthetic oligonucleotide
  Sense strand starting at position 3244 of SEQ ID NO: 1884357
accagauguugacugucau

SEQ ID NO: 2259569 - RNA, 19 nt, Artificial Sequence
  Description of Artificial Sequence: Synthetic oligonucleotide
  Antisense strand to SEQ ID NO: 2259568
augacagucaacaucuggu

SEQ ID NO: 2259570 - RNA, 19 nt, Artificial Sequence
  Description of Artificial Sequence: Synthetic oligonucleotide
  Sense strand starting at position 3245 of SEQ ID NO: 1884357
ccagauguugacugucauc

SEQ ID NO: 2259571 - RNA, 19 nt, Artificial Sequence
  Description of Artificial Sequence: Synthetic oligonucleotide
  Antisense strand to SEQ ID NO: 2259570
gaugacagucaacaucugg

SEQ ID NO: 2259572 - RNA, 19 nt, Artificial Sequence
  Description of Artificial Sequence: Synthetic oligonucleotide
  Sense strand starting at position 3254 of SEQ ID NO: 1884357
gacugucaucacugggacu

SEQ ID NO: 2259573 - RNA, 19 nt, Artificial Sequence
  Description of Artificial Sequence: Synthetic oligonucleotide
  Antisense strand to SEQ ID NO: 2259572
agucccagugaugacaguc

SEQ ID NO: 2259574 - RNA, 19 nt, Artificial Sequence
  Description of Artificial Sequence: Synthetic oligonucleotide
  Sense strand starting at position 3256 of SEQ ID NO: 1884357
cugucaucacugggacuca

SEQ ID NO: 2259575 - RNA, 19 nt, Artificial Sequence
  Description of Artificial Sequence: Synthetic oligonucleotide
  Antisense strand to SEQ ID NO: 2259574
ugagucccagugaugacag

SEQ ID NO: 2259576 - RNA, 19 nt, Artificial Sequence
  Description of Artificial Sequence: Synthetic oligonucleotide
  Sense strand starting at position 3298 of SEQ ID NO: 1884357
caaauuugcugcucuaggu

SEQ ID NO: 2259577 - RNA, 19 nt, Artificial Sequence
  Description of Artificial Sequence: Synthetic oligonucleotide
  Antisense strand to SEQ ID NO: 2259576
accuagagcagcaaauuug

SEQ ID NO: 2259578 - RNA, 19 nt, Artificial Sequence
  Description of Artificial Sequence: Synthetic oligonucleotide
  Sense strand starting at position 3315 of SEQ ID NO: 1884357
gugcuaagggucuguagga

SEQ ID NO: 2259579 - RNA, 19 nt, Artificial Sequence
  Description of Artificial Sequence: Synthetic oligonucleotide
  Antisense strand to SEQ ID NO: 2259578
uccuacagacccuuagcac

SEQ ID NO: 2259580 - RNA, 19 nt, Artificial Sequence
  Description of Artificial Sequence: Synthetic oligonucleotide
  Sense strand starting at position 3336 of SEQ ID NO: 1884357
gagcuuugggacuguuaga

SEQ ID NO: 2259581 - RNA, 19 nt, Artificial Sequence
  Description of Artificial Sequence: Synthetic oligonucleotide
  Antisense strand to SEQ ID NO: 2259580
ucuaacagucccaaagcuc

SEQ ID NO: 2259582 - RNA, 19 nt, Artificial Sequence
  Description of Artificial Sequence: Synthetic oligonucleotide
  Sense strand starting at position 58 of SEQ ID NO: 1884358
uauuguuacaggugaggau

SEQ ID NO: 2259583 - RNA, 19 nt, Artificial Sequence
  Description of Artificial Sequence: Synthetic oligonucleotide
  Antisense strand to SEQ ID NO: 2259582
auccucaccuguaacaaua

SEQ ID NO: 2259584 - RNA, 19 nt, Artificial Sequence
  Description of Artificial Sequence: Synthetic oligonucleotide
  Sense strand starting at position 59 of SEQ ID NO: 1884358
auuguuacaggugaggauu

SEQ ID NO: 2259585 - RNA, 19 nt, Artificial Sequence
  Description of Artificial Sequence: Synthetic oligonucleotide
  Antisense strand to SEQ ID NO: 2259584
aauccucaccuguaacaau

SEQ ID NO: 2259586 - RNA, 19 nt, Artificial Sequence
  Description of Artificial Sequence: Synthetic oligonucleotide
  Sense strand starting at position 67 of SEQ ID NO: 1884358
aggugaggauuacaggauu

SEQ ID NO: 2259587 - RNA, 19 nt, Artificial Sequence
  Description of Artificial Sequence: Synthetic oligonucleotide
  Antisense strand to SEQ ID NO: 2259586
aauccuguaauccucaccu

SEQ ID NO: 2259588 - RNA, 19 nt, Artificial Sequence
  Description of Artificial Sequence: Synthetic oligonucleotide
  Sense strand starting at position 399 of SEQ ID NO: 1884358
cucuauagucugggcaaca

SEQ ID NO: 2259589 - RNA, 19 nt, Artificial Sequence
  Description of Artificial Sequence: Synthetic oligonucleotide
  Antisense strand to SEQ ID NO: 2259588
uguugcccagacuauagag

SEQ ID NO: 2259590 - RNA, 19 nt, Artificial Sequence
  Description of Artificial Sequence: Synthetic oligonucleotide
  Sense strand starting at position 473 of SEQ ID NO: 1884358
aaauuaguggcauaaaguu

SEQ ID NO: 2259591 - RNA, 19 nt, Artificial Sequence
  Description of Artificial Sequence: Synthetic oligonucleotide
  Antisense strand to SEQ ID NO: 2259590
aacuuuaugccacuaauuu

SEQ ID NO: 2259592 - RNA, 19 nt, Artificial Sequence
  Description of Artificial Sequence: Synthetic oligonucleotide
  Sense strand starting at position 522 of SEQ ID NO: 1884358
cuucgauuccgugaaauau

SEQ ID NO: 2259593 - RNA, 19 nt, Artificial Sequence
  Description of Artificial Sequence: Synthetic oligonucleotide
  Antisense strand to SEQ ID NO: 2259592
auauuucacggaaucgaag

SEQ ID NO: 2259594 - RNA, 19 nt, Artificial Sequence
  Description of Artificial Sequence: Synthetic oligonucleotide
  Sense strand starting at position 526 of SEQ ID NO: 1884358
gauuccgugaaauauggua

SEQ ID NO: 2259595 - RNA, 19 nt, Artificial Sequence
  Description of Artificial Sequence: Synthetic oligonucleotide
  Antisense strand to SEQ ID NO: 2259594
uaccauauuucacggaauc

SEQ ID NO: 2259596 - RNA, 19 nt, Artificial Sequence
  Description of Artificial Sequence: Synthetic oligonucleotide
  Sense strand starting at position 528 of SEQ ID NO: 1884358
uuccgugaaauaugguaaa

SEQ ID NO: 2259597 - RNA, 19 nt, Artificial Sequence
  Description of Artificial Sequence: Synthetic oligonucleotide
  Antisense strand to SEQ ID NO: 2259596
uuuaccauauuucacggaa

SEQ ID NO: 2259598 - RNA, 19 nt, Artificial Sequence
  Description of Artificial Sequence: Synthetic oligonucleotide
  Sense strand starting at position 540 of SEQ ID NO: 1884358
ugguaaaugauguagcaag

SEQ ID NO: 2259599 - RNA, 19 nt, Artificial Sequence
  Description of Artificial Sequence: Synthetic oligonucleotide
  Antisense strand to SEQ ID NO: 2259598
cuugcuacaucauuuacca

SEQ ID NO: 2259600 - RNA, 19 nt, Artificial Sequence
  Description of Artificial Sequence: Synthetic oligonucleotide
  Sense strand starting at position 625 of SEQ ID NO: 1884358
cucaguguucugggagaag

SEQ ID NO: 2259601 - RNA, 19 nt, Artificial Sequence
  Description of Artificial Sequence: Synthetic oligonucleotide
  Antisense strand to SEQ ID NO: 2259600
cuucucccagaacacugag

SEQ ID NO: 2259602 - RNA, 19 nt, Artificial Sequence
  Description of Artificial Sequence: Synthetic oligonucleotide
  Sense strand starting at position 2101 of SEQ ID NO: 1884358
gacguagcugcccauacau

SEQ ID NO: 2259603 - RNA, 19 nt, Artificial Sequence
  Description of Artificial Sequence: Synthetic oligonucleotide
  Antisense strand to SEQ ID NO: 2259602
auguaugggcagcuacguc

SEQ ID NO: 2259604 - RNA, 19 nt, Artificial Sequence
  Description of Artificial Sequence: Synthetic oligonucleotide
  Sense strand starting at position 2334 of SEQ ID NO: 1884358
uaaggcuucgaguauauga

SEQ ID NO: 2259605 - RNA, 19 nt, Artificial Sequence
  Description of Artificial Sequence: Synthetic oligonucleotide
  Antisense strand to SEQ ID NO: 2259604
ucauauacucgaagccuua

SEQ ID NO: 2259606 - RNA, 19 nt, Artificial Sequence
  Description of Artificial Sequence: Synthetic oligonucleotide
  Sense strand starting at position 2336 of SEQ ID NO: 1884358
aggcuucgaguauaugaaa

SEQ ID NO: 2259607 - RNA, 19 nt, Artificial Sequence
  Description of Artificial Sequence: Synthetic oligonucleotide
  Antisense strand to SEQ ID NO: 2259606
uuucauauacucgaagccu

SEQ ID NO: 2259608 - RNA, 19 nt, Artificial Sequence
  Description of Artificial Sequence: Synthetic oligonucleotide
  Sense strand starting at position 2356 of SEQ ID NO: 1884358
gugaauaaaugacaaacca

SEQ ID NO: 2259609 - RNA, 19 nt, Artificial Sequence
  Description of Artificial Sequence: Synthetic oligonucleotide
  Antisense strand to SEQ ID NO: 2259608
ugguuugucauuuauucac

SEQ ID NO: 2259610 - RNA, 19 nt, Artificial Sequence
  Description of Artificial Sequence: Synthetic oligonucleotide
  Sense strand starting at position 2478 of SEQ ID NO: 1884358
gcucaacuuccugagcuaa

SEQ ID NO: 2259611 - RNA, 19 nt, Artificial Sequence
  Description of Artificial Sequence: Synthetic oligonucleotide
  Antisense strand to SEQ ID NO: 2259610
uuagcucaggaaguugagc

SEQ ID NO: 2259612 - RNA, 19 nt, Artificial Sequence
  Description of Artificial Sequence: Synthetic oligonucleotide
  Sense strand starting at position 2629 of SEQ ID NO: 1884358
aaauguuugcgauaaggua

SEQ ID NO: 2259613 - RNA, 19 nt, Artificial Sequence
  Description of Artificial Sequence: Synthetic oligonucleotide
  Antisense strand to SEQ ID NO: 2259612
uaccuuaucgcaaacauuu

SEQ ID NO: 2259614 - RNA, 19 nt, Artificial Sequence
  Description of Artificial Sequence: Synthetic oligonucleotide
  Sense strand starting at position 2744 of SEQ ID NO: 1884358
uguccugaggucugauaaa

SEQ ID NO: 2259615 - RNA, 19 nt, Artificial Sequence
  Description of Artificial Sequence: Synthetic oligonucleotide
  Antisense strand to SEQ ID NO: 2259614
uuuaucagaccucaggaca

SEQ ID NO: 2259616 - RNA, 19 nt, Artificial Sequence
  Description of Artificial Sequence: Synthetic oligonucleotide
  Sense strand starting at position 2822 of SEQ ID NO: 1884358
gaguaugucaaaggugagu

SEQ ID NO: 2259617 - RNA, 19 nt, Artificial Sequence
  Description of Artificial Sequence: Synthetic oligonucleotide
  Antisense strand to SEQ ID NO: 2259616
acucaccuuugacauacuc

SEQ ID NO: 2259618 - RNA, 19 nt, Artificial Sequence
  Description of Artificial Sequence: Synthetic oligonucleotide
  Sense strand starting at position 2824 of SEQ ID NO: 1884358
guaugucaaaggugaguga

SEQ ID NO: 2259619 - RNA, 19 nt, Artificial Sequence
  Description of Artificial Sequence: Synthetic oligonucleotide
  Antisense strand to SEQ ID NO: 2259618
ucacucaccuuugacauac

SEQ ID NO: 2259620 - RNA, 19 nt, Artificial Sequence
  Description of Artificial Sequence: Synthetic oligonucleotide
  Sense strand starting at position 2828 of SEQ ID NO: 1884358
gucaaaggugagugaaugu

SEQ ID NO: 2259621 - RNA, 19 nt, Artificial Sequence
  Description of Artificial Sequence: Synthetic oligonucleotide
  Antisense strand to SEQ ID NO: 2259620
acauucacucaccuuugac

SEQ ID NO: 2259622 - RNA, 19 nt, Artificial Sequence
  Description of Artificial Sequence: Synthetic oligonucleotide
  Sense strand starting at position 2839 of SEQ ID NO: 1884358
gugaaugugaggcagguau

SEQ ID NO: 2259623 - RNA, 19 nt, Artificial Sequence
  Description of Artificial Sequence: Synthetic oligonucleotide
  Antisense strand to SEQ ID NO: 2259622
auaccugccucacauucac

SEQ ID NO: 2259624 - RNA, 19 nt, Artificial Sequence
  Description of Artificial Sequence: Synthetic oligonucleotide
  Sense strand starting at position 2841 of SEQ ID NO: 1884358
gaaugugaggcagguauca

SEQ ID NO: 2259625 - RNA, 19 nt, Artificial Sequence
  Description of Artificial Sequence: Synthetic oligonucleotide
  Antisense strand to SEQ ID NO: 2259624
ugauaccugccucacauuc

SEQ ID NO: 2259626 - RNA, 19 nt, Artificial Sequence
  Description of Artificial Sequence: Synthetic oligonucleotide
  Sense strand starting at position 2854 of SEQ ID NO: 1884358
guaucauccucaucucugu

SEQ ID NO: 2259627 - RNA, 19 nt, Artificial Sequence
  Description of Artificial Sequence: Synthetic oligonucleotide
  Antisense strand to SEQ ID NO: 2259626
acagagaugaggaugauac

SEQ ID NO: 2259628 - RNA, 19 nt, Artificial Sequence
  Description of Artificial Sequence: Synthetic oligonucleotide
  Sense strand starting at position 2917 of SEQ ID NO: 1884358
gcuugaagucgcuaaguga

SEQ ID NO: 2259629 - RNA, 19 nt, Artificial Sequence
  Description of Artificial Sequence: Synthetic oligonucleotide
  Antisense strand to SEQ ID NO: 2259628
ucacuuagcgacuucaagc

SEQ ID NO: 2259630 - RNA, 19 nt, Artificial Sequence
  Description of Artificial Sequence: Synthetic oligonucleotide
  Sense strand starting at position 3030 of SEQ ID NO: 1884358
gucgcacauccagaauguu

SEQ ID NO: 2259631 - RNA, 19 nt, Artificial Sequence
  Description of Artificial Sequence: Synthetic oligonucleotide
  Antisense strand to SEQ ID NO: 2259630
aacauucuggaugugcgac

SEQ ID NO: 2259632 - RNA, 19 nt, Artificial Sequence
  Description of Artificial Sequence: Synthetic oligonucleotide
  Sense strand starting at position 3033 of SEQ ID NO: 1884358
gcacauccagaauguuagu

SEQ ID NO: 2259633 - RNA, 19 nt, Artificial Sequence
  Description of Artificial Sequence: Synthetic oligonucleotide
  Antisense strand to SEQ ID NO: 2259632
acuaacauucuggaugugc

SEQ ID NO: 2259634 - RNA, 19 nt, Artificial Sequence
  Description of Artificial Sequence: Synthetic oligonucleotide
  Sense strand starting at position 3119 of SEQ ID NO: 1884358
ggaguacugagcugucagu

SEQ ID NO: 2259635 - RNA, 19 nt, Artificial Sequence
  Description of Artificial Sequence: Synthetic oligonucleotide
  Antisense strand to SEQ ID NO: 2259634
acugacagcucaguacucc

SEQ ID NO: 2259636 - RNA, 19 nt, Artificial Sequence
  Description of Artificial Sequence: Synthetic oligonucleotide
  Sense strand starting at position 3329 of SEQ ID NO: 1884358
ggcuuaagccagggagguu

SEQ ID NO: 2259637 - RNA, 19 nt, Artificial Sequence
  Description of Artificial Sequence: Synthetic oligonucleotide
  Antisense strand to SEQ ID NO: 2259636
aaccucccuggcuuaagcc

SEQ ID NO: 2259638 - RNA, 19 nt, Artificial Sequence
  Description of Artificial Sequence: Synthetic oligonucleotide
  Sense strand starting at position 3491 of SEQ ID NO: 1884358
gggcuacuuuccuugggaa

SEQ ID NO: 2259639 - RNA, 19 nt, Artificial Sequence
  Description of Artificial Sequence: Synthetic oligonucleotide
  Antisense strand to SEQ ID NO: 2259638
uucccaaggaaaguagccc

SEQ ID NO: 2259640 - RNA, 19 nt, Artificial Sequence
  Description of Artificial Sequence: Synthetic oligonucleotide
  Sense strand starting at position 3492 of SEQ ID NO: 1884358
ggcuacuuuccuugggaac

SEQ ID NO: 2259641 - RNA, 19 nt, Artificial Sequence
  Description of Artificial Sequence: Synthetic oligonucleotide
  Antisense strand to SEQ ID NO: 2259640
guucccaaggaaaguagcc

SEQ ID NO: 2259642 - RNA, 19 nt, Artificial Sequence
  Description of Artificial Sequence: Synthetic oligonucleotide
  Sense strand starting at position 3493 of SEQ ID NO: 1884358
gcuacuuuccuugggaaca

SEQ ID NO: 2259643 - RNA, 19 nt, Artificial Sequence
  Description of Artificial Sequence: Synthetic oligonucleotide
  Antisense strand to SEQ ID NO: 2259642
uguucccaaggaaaguagc

SEQ ID NO: 2259644 - RNA, 19 nt, Artificial Sequence
  Description of Artificial Sequence: Synthetic oligonucleotide
  Sense strand starting at position 3574 of SEQ ID NO: 1884358
guucuagucccagagcuac

SEQ ID NO: 2259645 - RNA, 19 nt, Artificial Sequence
  Description of Artificial Sequence: Synthetic oligonucleotide
  Antisense strand to SEQ ID NO: 2259644
guagcucugggacuagaac

SEQ ID NO: 2259646 - RNA, 19 nt, Artificial Sequence
  Description of Artificial Sequence: Synthetic oligonucleotide
  Sense strand starting at position 3659 of SEQ ID NO: 1884358
agagcuguugugggaucaa

SEQ ID NO: 2259647 - RNA, 19 nt, Artificial Sequence
  Description of Artificial Sequence: Synthetic oligonucleotide
  Antisense strand to SEQ ID NO: 2259646
uugaucccacaacagcucu

SEQ ID NO: 2259648 - RNA, 19 nt, Artificial Sequence
  Description of Artificial Sequence: Synthetic oligonucleotide
  Sense strand starting at position 3670 of SEQ ID NO: 1884358
gggaucaagugagaucaca

SEQ ID NO: 2259649 - RNA, 19 nt, Artificial Sequence
  Description of Artificial Sequence: Synthetic oligonucleotide
  Antisense strand to SEQ ID NO: 2259648
ugugaucucacuugauccc

SEQ ID NO: 2259650 - RNA, 19 nt, Artificial Sequence
  Description of Artificial Sequence: Synthetic oligonucleotide
  Sense strand starting at position 3717 of SEQ ID NO: 1884358
guguuaugcacucagaaag

SEQ ID NO: 2259651 - RNA, 19 nt, Artificial Sequence
  Description of Artificial Sequence: Synthetic oligonucleotide
  Antisense strand to SEQ ID NO: 2259650
cuuucugagugcauaacac

SEQ ID NO: 2259652 - RNA, 19 nt, Artificial Sequence
  Description of Artificial Sequence: Synthetic oligonucleotide
  Sense strand starting at position 3894 of SEQ ID NO: 1884358
gcaguaugauccguggaca

SEQ ID NO: 2259653 - RNA, 19 nt, Artificial Sequence
  Description of Artificial Sequence: Synthetic oligonucleotide
  Antisense strand to SEQ ID NO: 2259652
uguccacggaucauacugc

SEQ ID NO: 2259654 - RNA, 19 nt, Artificial Sequence
  Description of Artificial Sequence: Synthetic oligonucleotide
  Sense strand starting at position 3895 of SEQ ID NO: 1884358
caguaugauccguggacag

SEQ ID NO: 2259655 - RNA, 19 nt, Artificial Sequence
  Description of Artificial Sequence: Synthetic oligonucleotide
  Antisense strand to SEQ ID NO: 2259654
cuguccacggaucauacug

SEQ ID NO: 2259656 - RNA, 19 nt, Artificial Sequence
  Description of Artificial Sequence: Synthetic oligonucleotide
  Sense strand starting at position 3897 of SEQ ID NO: 1884358
guaugauccguggacagaa

SEQ ID NO: 2259657 - RNA, 19 nt, Artificial Sequence
  Description of Artificial Sequence: Synthetic oligonucleotide
  Antisense strand to SEQ ID NO: 2259656
uucuguccacggaucauac

SEQ ID NO: 2259658 - RNA, 19 nt, Artificial Sequence
  Description of Artificial Sequence: Synthetic oligonucleotide
  Sense strand starting at position 3972 of SEQ ID NO: 1884358
ucaccaguugugugaccua

SEQ ID NO: 2259659 - RNA, 19 nt, Artificial Sequence
  Description of Artificial Sequence: Synthetic oligonucleotide
  Antisense strand to SEQ ID NO: 2259658
uaggucacacaacugguga

SEQ ID NO: 2259660 - RNA, 19 nt, Artificial Sequence
  Description of Artificial Sequence: Synthetic oligonucleotide
  Sense strand starting at position 3977 of SEQ ID NO: 1884358
aguugugugaccuagguga

SEQ ID NO: 2259661 - RNA, 19 nt, Artificial Sequence
  Description of Artificial Sequence: Synthetic oligonucleotide
  Antisense strand to SEQ ID NO: 2259660
ucaccuaggucacacaacu

SEQ ID NO: 2259662 - RNA, 19 nt, Artificial Sequence
  Description of Artificial Sequence: Synthetic oligonucleotide
  Sense strand starting at position 9 of SEQ ID NO: 1884359
gcuuauccuggauauccau

SEQ ID NO: 2259663 - RNA, 19 nt, Artificial Sequence
  Description of Artificial Sequence: Synthetic oligonucleotide
  Antisense strand to SEQ ID NO: 2259662
auggauauccaggauaagc

SEQ ID NO: 2259664 - RNA, 19 nt, Artificial Sequence
  Description of Artificial Sequence: Synthetic oligonucleotide
  Sense strand starting at position 226 of SEQ ID NO: 1884359
cugugaacauguuuacaau

SEQ ID NO: 2259665 - RNA, 19 nt, Artificial Sequence
  Description of Artificial Sequence: Synthetic oligonucleotide
  Antisense strand to SEQ ID NO: 2259664
auuguaaacauguucacag

SEQ ID NO: 2259666 - RNA, 19 nt, Artificial Sequence
  Description of Artificial Sequence: Synthetic oligonucleotide
  Sense strand starting at position 508 of SEQ ID NO: 1884359
guuaauuccuugcuuggga

SEQ ID NO: 2259667 - RNA, 19 nt, Artificial Sequence
  Description of Artificial Sequence: Synthetic oligonucleotide
  Antisense strand to SEQ ID NO: 2259666
ucccaagcaaggaauuaac

SEQ ID NO: 2259668 - RNA, 19 nt, Artificial Sequence
  Description of Artificial Sequence: Synthetic oligonucleotide
  Sense strand starting at position 509 of SEQ ID NO: 1884359
uuaauuccuugcuugggaa

SEQ ID NO: 2259669 - RNA, 19 nt, Artificial Sequence
  Description of Artificial Sequence: Synthetic oligonucleotide
  Antisense strand to SEQ ID NO: 2259668
uucccaagcaaggaauuaa

SEQ ID NO: 2259670 - RNA, 19 nt, Artificial Sequence
  Description of Artificial Sequence: Synthetic oligonucleotide
  Sense strand starting at position 562 of SEQ ID NO: 1884359
acaugaucucuuggacaca

SEQ ID NO: 2259671 - RNA, 19 nt, Artificial Sequence
  Description of Artificial Sequence: Synthetic oligonucleotide
  Antisense strand to SEQ ID NO: 2259670
uguguccaagagaucaugu

SEQ ID NO: 2259672 - RNA, 19 nt, Artificial Sequence
  Description of Artificial Sequence: Synthetic oligonucleotide
  Sense strand starting at position 685 of SEQ ID NO: 1884359
gugcucaguaaguaucuua

SEQ ID NO: 2259673 - RNA, 19 nt, Artificial Sequence
  Description of Artificial Sequence: Synthetic oligonucleotide
  Antisense strand to SEQ ID NO: 2259672
uaagauacuuacugagcac

SEQ ID NO: 2259674 - RNA, 19 nt, Artificial Sequence
  Description of Artificial Sequence: Synthetic oligonucleotide
  Sense strand starting at position 688 of SEQ ID NO: 1884359
cucaguaaguaucuuaaau

SEQ ID NO: 2259675 - RNA, 19 nt, Artificial Sequence
  Description of Artificial Sequence: Synthetic oligonucleotide
  Antisense strand to SEQ ID NO: 2259674
auuuaagauacuuacugag

SEQ ID NO: 2259676 - RNA, 19 nt, Artificial Sequence
  Description of Artificial Sequence: Synthetic oligonucleotide
  Sense strand starting at position 757 of SEQ ID NO: 1884359
acuggaaucuuucuuuggu

SEQ ID NO: 2259677 - RNA, 19 nt, Artificial Sequence
  Description of Artificial Sequence: Synthetic oligonucleotide
  Antisense strand to SEQ ID NO: 2259676
accaaagaaagauuccagu

SEQ ID NO: 2259678 - RNA, 19 nt, Artificial Sequence
  Description of Artificial Sequence: Synthetic oligonucleotide
  Sense strand starting at position 1007 of SEQ ID NO: 1884359
gcauuaaguugaguucuag

SEQ ID NO: 2259679 - RNA, 19 nt, Artificial Sequence
  Description of Artificial Sequence: Synthetic oligonucleotide
  Antisense strand to SEQ ID NO: 2259678
cuagaacucaacuuaaugc

SEQ ID NO: 2259680 - RNA, 19 nt, Artificial Sequence
  Description of Artificial Sequence: Synthetic oligonucleotide
  Sense strand starting at position 1347 of SEQ ID NO: 1884359
uggccuacugucuauugaa

SEQ ID NO: 2259681 - RNA, 19 nt, Artificial Sequence
  Description of Artificial Sequence: Synthetic oligonucleotide
  Antisense strand to SEQ ID NO: 2259680
uucaauagacaguaggcca

SEQ ID NO: 2259682 - RNA, 19 nt, Artificial Sequence
  Description of Artificial Sequence: Synthetic oligonucleotide
  Sense strand starting at position 1478 of SEQ ID NO: 1884359
ggacuuaaugcacaucugu

SEQ ID NO: 2259683 - RNA, 19 nt, Artificial Sequence
  Description of Artificial Sequence: Synthetic oligonucleotide
  Antisense strand to SEQ ID NO: 2259682
acagaugugcauuaagucc

SEQ ID NO: 2259684 - RNA, 19 nt, Artificial Sequence
  Description of Artificial Sequence: Synthetic oligonucleotide
  Sense strand starting at position 1494 of SEQ ID NO: 1884359
ugugccaccgauuaucaau

SEQ ID NO: 2259685 - RNA, 19 nt, Artificial Sequence
  Description of Artificial Sequence: Synthetic oligonucleotide
  Antisense strand to SEQ ID NO: 2259684
auugauaaucgguggcaca

SEQ ID NO: 2259686 - RNA, 19 nt, Artificial Sequence
  Description of Artificial Sequence: Synthetic oligonucleotide
  Sense strand starting at position 1509 of SEQ ID NO: 1884359
caaucagucugacuguaag

SEQ ID NO: 2259687 - RNA, 19 nt, Artificial Sequence
  Description of Artificial Sequence: Synthetic oligonucleotide
  Antisense strand to SEQ ID NO: 2259686
cuuacagucagacugauug

SEQ ID NO: 2259688 - RNA, 19 nt, Artificial Sequence
  Description of Artificial Sequence: Synthetic oligonucleotide
  Sense strand starting at position 1515 of SEQ ID NO: 1884359
gucugacuguaagcuuaaa

SEQ ID NO: 2259689 - RNA, 19 nt, Artificial Sequence
  Description of Artificial Sequence: Synthetic oligonucleotide
  Antisense strand to SEQ ID NO: 2259688
uuuaagcuuacagucagac

SEQ ID NO: 2259690 - RNA, 19 nt, Artificial Sequence
  Description of Artificial Sequence: Synthetic oligonucleotide
  Sense strand starting at position 1523 of SEQ ID NO: 1884359
guaagcuuaaauggagaau

SEQ ID NO: 2259691 - RNA, 19 nt, Artificial Sequence
  Description of Artificial Sequence: Synthetic oligonucleotide
  Antisense strand to SEQ ID NO: 2259690
auucuccauuuaagcuuac

SEQ ID NO: 2259692 - RNA, 19 nt, Artificial Sequence
  Description of Artificial Sequence: Synthetic oligonucleotide
  Sense strand starting at position 2182 of SEQ ID NO: 1884359
ggcgaacgcggccugaauu

SEQ ID NO: 2259693 - RNA, 19 nt, Artificial Sequence
  Description of Artificial Sequence: Synthetic oligonucleotide
  Antisense strand to SEQ ID NO: 2259692
aauucaggccgcguucgcc

SEQ ID NO: 2259694 - RNA, 19 nt, Artificial Sequence
  Description of Artificial Sequence: Synthetic oligonucleotide
  Sense strand starting at position 2294 of SEQ ID NO: 1884359
ggcguuagcgacucaugca

SEQ ID NO: 2259695 - RNA, 19 nt, Artificial Sequence
  Description of Artificial Sequence: Synthetic oligonucleotide
  Antisense strand to SEQ ID NO: 2259694
ugcaugagucgcuaacgcc

SEQ ID NO: 2259696 - RNA, 19 nt, Artificial Sequence
  Description of Artificial Sequence: Synthetic oligonucleotide
  Sense strand starting at position 2317 of SEQ ID NO: 1884359
acccguuaacgcguugauu

SEQ ID NO: 2259697 - RNA, 19 nt, Artificial Sequence
  Description of Artificial Sequence: Synthetic oligonucleotide
  Antisense strand to SEQ ID NO: 2259696
aaucaacgcguuaacgggu

SEQ ID NO: 2259698 - RNA, 19 nt, Artificial Sequence
  Description of Artificial Sequence: Synthetic oligonucleotide
  Sense strand starting at position 2552 of SEQ ID NO: 1884359
ucucaacucuagccgaauu

SEQ ID NO: 2259699 - RNA, 19 nt, Artificial Sequence
  Description of Artificial Sequence: Synthetic oligonucleotide
  Antisense strand to SEQ ID NO: 2259698
aauucggcuagaguugaga

SEQ ID NO: 2259700 - RNA, 19 nt, Artificial Sequence
  Description of Artificial Sequence: Synthetic oligonucleotide
  Sense strand starting at position 2632 of SEQ ID NO: 1884359
uuucgagccuaggugaaau

SEQ ID NO: 2259701 - RNA, 19 nt, Artificial Sequence
  Description of Artificial Sequence: Synthetic oligonucleotide
  Antisense strand to SEQ ID NO: 2259700
auuucaccuaggcucgaaa

SEQ ID NO: 2259702 - RNA, 19 nt, Artificial Sequence
  Description of Artificial Sequence: Synthetic oligonucleotide
  Sense strand starting at position 2696 of SEQ ID NO: 1884359
cuaguaaucugauuguuua

SEQ ID NO: 2259703 - RNA, 19 nt, Artificial Sequence
  Description of Artificial Sequence: Synthetic oligonucleotide
  Antisense strand to SEQ ID NO: 2259702
uaaacaaucagauuacuag

SEQ ID NO: 2259704 - RNA, 19 nt, Artificial Sequence
  Description of Artificial Sequence: Synthetic oligonucleotide
  Sense strand starting at position 2699 of SEQ ID NO: 1884359
guaaucugauuguuuacau

SEQ ID NO: 2259705 - RNA, 19 nt, Artificial Sequence
  Description of Artificial Sequence: Synthetic oligonucleotide
  Antisense strand to SEQ ID NO: 2259704
auguaaacaaucagauuac

SEQ ID NO: 2259706 - RNA, 19 nt, Artificial Sequence
  Description of Artificial Sequence: Synthetic oligonucleotide
  Sense strand starting at position 2856 of SEQ ID NO: 1884359
gggaaauguuuggcucuuu

SEQ ID NO: 2259707 - RNA, 19 nt, Artificial Sequence
  Description of Artificial Sequence: Synthetic oligonucleotide
  Antisense strand to SEQ ID NO: 2259706
aaagagccaaacauuuccc

SEQ ID NO: 2259708 - RNA, 19 nt, Artificial Sequence
  Description of Artificial Sequence: Synthetic oligonucleotide
  Sense strand starting at position 2857 of SEQ ID NO: 1884359
ggaaauguuuggcucuuuc

SEQ ID NO: 2259709 - RNA, 19 nt, Artificial Sequence
  Description of Artificial Sequence: Synthetic oligonucleotide
  Antisense strand to SEQ ID NO: 2259708
gaaagagccaaacauuucc

SEQ ID NO: 2259710 - RNA, 19 nt, Artificial Sequence
  Description of Artificial Sequence: Synthetic oligonucleotide
  Sense strand starting at position 2922 of SEQ ID NO: 1884359
uagucugaacacugagaca

SEQ ID NO: 2259711 - RNA, 19 nt, Artificial Sequence
  Description of Artificial Sequence: Synthetic oligonucleotide
  Antisense strand to SEQ ID NO: 2259710
ugucucaguguucagacua

SEQ ID NO: 2259712 - RNA, 19 nt, Artificial Sequence
  Description of Artificial Sequence: Synthetic oligonucleotide
  Sense strand starting at position 3059 of SEQ ID NO: 1884359
ggacgauugcauuguuaac

SEQ ID NO: 2259713 - RNA, 19 nt, Artificial Sequence
  Description of Artificial Sequence: Synthetic oligonucleotide
  Antisense strand to SEQ ID NO: 2259712
guuaacaaugcaaucgucc

SEQ ID NO: 2259714 - RNA, 19 nt, Artificial Sequence
  Description of Artificial Sequence: Synthetic oligonucleotide
  Sense strand starting at position 3061 of SEQ ID NO: 1884359
acgauugcauuguuaacau

SEQ ID NO: 2259715 - RNA, 19 nt, Artificial Sequence
  Description of Artificial Sequence: Synthetic oligonucleotide
  Antisense strand to SEQ ID NO: 2259714
auguuaacaaugcaaucgu

SEQ ID NO: 2259716 - RNA, 19 nt, Artificial Sequence
  Description of Artificial Sequence: Synthetic oligonucleotide
  Sense strand starting at position 3118 of SEQ ID NO: 1884359
aguguauaugaugacguaa

SEQ ID NO: 2259717 - RNA, 19 nt, Artificial Sequence
  Description of Artificial Sequence: Synthetic oligonucleotide
  Antisense strand to SEQ ID NO: 2259716
uuacgucaucauauacacu

SEQ ID NO: 2259718 - RNA, 19 nt, Artificial Sequence
  Description of Artificial Sequence: Synthetic oligonucleotide
  Sense strand starting at position 3232 of SEQ ID NO: 1884359
agcugaaccuaucucugaa

SEQ ID NO: 2259719 - RNA, 19 nt, Artificial Sequence
  Description of Artificial Sequence: Synthetic oligonucleotide
  Antisense strand to SEQ ID NO: 2259718
uucagagauagguucagcu

SEQ ID NO: 2259720 - RNA, 19 nt, Artificial Sequence
  Description of Artificial Sequence: Synthetic oligonucleotide
  Sense strand starting at position 3272 of SEQ ID NO: 1884359
ccuccauucuaggcuagua

SEQ ID NO: 2259721 - RNA, 19 nt, Artificial Sequence
  Description of Artificial Sequence: Synthetic oligonucleotide
  Antisense strand to SEQ ID NO: 2259720
uacuagccuagaauggagg

SEQ ID NO: 2259722 - RNA, 19 nt, Artificial Sequence
  Description of Artificial Sequence: Synthetic oligonucleotide
  Sense strand starting at position 3391 of SEQ ID NO: 1884359
gcuguuucgggacaaguac

SEQ ID NO: 2259723 - RNA, 19 nt, Artificial Sequence
  Description of Artificial Sequence: Synthetic oligonucleotide
  Antisense strand to SEQ ID NO: 2259722
guacuugucccgaaacagc

SEQ ID NO: 2259724 - RNA, 19 nt, Artificial Sequence
  Description of Artificial Sequence: Synthetic oligonucleotide
  Sense strand starting at position 3402 of SEQ ID NO: 1884359
acaaguaccgcacagagau

SEQ ID NO: 2259725 - RNA, 19 nt, Artificial Sequence
  Description of Artificial Sequence: Synthetic oligonucleotide
  Antisense strand to SEQ ID NO: 2259724
aucucugugcgguacuugu

SEQ ID NO: 2259726 - RNA, 19 nt, Artificial Sequence
  Description of Artificial Sequence: Synthetic oligonucleotide
  Sense strand starting at position 3426 of SEQ ID NO: 1884359
agcaaagugcuuuaaguuu

SEQ ID NO: 2259727 - RNA, 19 nt, Artificial Sequence
  Description of Artificial Sequence: Synthetic oligonucleotide
  Antisense strand to SEQ ID NO: 2259726
aaacuuaaagcacuuugcu

SEQ ID NO: 2259728 - RNA, 19 nt, Artificial Sequence
  Description of Artificial Sequence: Synthetic oligonucleotide
  Sense strand starting at position 3536 of SEQ ID NO: 1884359
ugaugaccucucugaaggu

SEQ ID NO: 2259729 - RNA, 19 nt, Artificial Sequence
  Description of Artificial Sequence: Synthetic oligonucleotide
  Antisense strand to SEQ ID NO: 2259728
accuucagagaggucauca

SEQ ID NO: 2259730 - RNA, 19 nt, Artificial Sequence
  Description of Artificial Sequence: Synthetic oligonucleotide
  Sense strand starting at position 3554 of SEQ ID NO: 1884359
ugguucaaaggugguaaau

SEQ ID NO: 2259731 - RNA, 19 nt, Artificial Sequence
  Description of Artificial Sequence: Synthetic oligonucleotide
  Antisense strand to SEQ ID NO: 2259730
auuuaccaccuuugaacca

SEQ ID NO: 2259732 - RNA, 19 nt, Artificial Sequence
  Description of Artificial Sequence: Synthetic oligonucleotide
  Sense strand starting at position 3774 of SEQ ID NO: 1884359
ccaagaaaccugugagguc

SEQ ID NO: 2259733 - RNA, 19 nt, Artificial Sequence
  Description of Artificial Sequence: Synthetic oligonucleotide
  Antisense strand to SEQ ID NO: 2259732
gaccucacagguuucuugg

SEQ ID NO: 2259734 - RNA, 19 nt, Artificial Sequence
  Description of Artificial Sequence: Synthetic oligonucleotide
  Sense strand starting at position 3781 of SEQ ID NO: 1884359
accugugagguccaugauu

SEQ ID NO: 2259735 - RNA, 19 nt, Artificial Sequence
  Description of Artificial Sequence: Synthetic oligonucleotide
  Antisense strand to SEQ ID NO: 2259734
aaucauggaccucacaggu

SEQ ID NO: 2259736 - RNA, 19 nt, Artificial Sequence
  Description of Artificial Sequence: Synthetic oligonucleotide
  Sense strand starting at position 3783 of SEQ ID NO: 1884359
cugugagguccaugauuga

SEQ ID NO: 2259737 - RNA, 19 nt, Artificial Sequence
  Description of Artificial Sequence: Synthetic oligonucleotide
  Antisense strand to SEQ ID NO: 2259736
ucaaucauggaccucacag

SEQ ID NO: 2259738 - RNA, 19 nt, Artificial Sequence
  Description of Artificial Sequence: Synthetic oligonucleotide
  Sense strand starting at position 3869 of SEQ ID NO: 1884359
aaguuugaguucuuuggau

SEQ ID NO: 2259739 - RNA, 19 nt, Artificial Sequence
  Description of Artificial Sequence: Synthetic oligonucleotide
  Antisense strand to SEQ ID NO: 2259738
auccaaagaacucaaacuu

SEQ ID NO: 2259740 - RNA, 19 nt, Artificial Sequence
  Description of Artificial Sequence: Synthetic oligonucleotide
  Sense strand starting at position 3894 of SEQ ID NO: 1884359
ggacaugaaagguguuaac

SEQ ID NO: 2259741 - RNA, 19 nt, Artificial Sequence
  Description of Artificial Sequence: Synthetic oligonucleotide
  Antisense strand to SEQ ID NO: 2259740
guuaacaccuuucaugucc

SEQ ID NO: 2259742 - RNA, 19 nt, Artificial Sequence
  Description of Artificial Sequence: Synthetic oligonucleotide
  Sense strand starting at position 114 of SEQ ID NO: 1884360
gcuuauccuggauauccau

SEQ ID NO: 2259743 - RNA, 19 nt, Artificial Sequence
  Description of Artificial Sequence: Synthetic oligonucleotide
  Antisense strand to SEQ ID NO: 2259742
auggauauccaggauaagc

SEQ ID NO: 2259744 - RNA, 19 nt, Artificial Sequence
  Description of Artificial Sequence: Synthetic oligonucleotide
  Sense strand starting at position 331 of SEQ ID NO: 1884360
cugugaacauguuuacaau

SEQ ID NO: 2259745 - RNA, 19 nt, Artificial Sequence
  Description of Artificial Sequence: Synthetic oligonucleotide
  Antisense strand to SEQ ID NO: 2259744
auuguaaacauguucacag

SEQ ID NO: 2259746 - RNA, 19 nt, Artificial Sequence
  Description of Artificial Sequence: Synthetic oligonucleotide
  Sense strand starting at position 613 of SEQ ID NO: 1884360
guuaauuccuugcuuggga

SEQ ID NO: 2259747 - RNA, 19 nt, Artificial Sequence
  Description of Artificial Sequence: Synthetic oligonucleotide
  Antisense strand to SEQ ID NO: 2259746
ucccaagcaaggaauuaac

SEQ ID NO: 2259748 - RNA, 19 nt, Artificial Sequence
  Description of Artificial Sequence: Synthetic oligonucleotide
  Sense strand starting at position 614 of SEQ ID NO: 1884360
uuaauuccuugcuugggaa

SEQ ID NO: 2259749 - RNA, 19 nt, Artificial Sequence
  Description of Artificial Sequence: Synthetic oligonucleotide
  Antisense strand to SEQ ID NO: 2259748
uucccaagcaaggaauuaa

SEQ ID NO: 2259750 - RNA, 19 nt, Artificial Sequence
  Description of Artificial Sequence: Synthetic oligonucleotide
  Sense strand starting at position 667 of SEQ ID NO: 1884360
acaugaucucuuggacaca

SEQ ID NO: 2259751 - RNA, 19 nt, Artificial Sequence
  Description of Artificial Sequence: Synthetic oligonucleotide
  Antisense strand to SEQ ID NO: 2259750
uguguccaagagaucaugu

SEQ ID NO: 2259752 - RNA, 19 nt, Artificial Sequence
  Description of Artificial Sequence: Synthetic oligonucleotide
  Sense strand starting at position 690 of SEQ ID NO: 1884360
caguuuguauuguuacaua

SEQ ID NO: 2259753 - RNA, 19 nt, Artificial Sequence
  Description of Artificial Sequence: Synthetic oligonucleotide
  Antisense strand to SEQ ID NO: 2259752
uauguaacaauacaaacug

SEQ ID NO: 2259754 - RNA, 19 nt, Artificial Sequence
  Description of Artificial Sequence: Synthetic oligonucleotide
  Sense strand starting at position 790 of SEQ ID NO: 1884360
gugcucaguaaguaucuua

SEQ ID NO: 2259755 - RNA, 19 nt, Artificial Sequence
  Description of Artificial Sequence: Synthetic oligonucleotide
  Antisense strand to SEQ ID NO: 2259754
uaagauacuuacugagcac

SEQ ID NO: 2259756 - RNA, 19 nt, Artificial Sequence
  Description of Artificial Sequence: Synthetic oligonucleotide
  Sense strand starting at position 793 of SEQ ID NO: 1884360
cucaguaaguaucuuaaau

SEQ ID NO: 2259757 - RNA, 19 nt, Artificial Sequence
  Description of Artificial Sequence: Synthetic oligonucleotide
  Antisense strand to SEQ ID NO: 2259756
auuuaagauacuuacugag

SEQ ID NO: 2259758 - RNA, 19 nt, Artificial Sequence
  Description of Artificial Sequence: Synthetic oligonucleotide
  Sense strand starting at position 862 of SEQ ID NO: 1884360
acuggaaucuuucuuuggu

SEQ ID NO: 2259759 - RNA, 19 nt, Artificial Sequence
  Description of Artificial Sequence: Synthetic oligonucleotide
  Antisense strand to SEQ ID NO: 2259758
accaaagaaagauuccagu

SEQ ID NO: 2259760 - RNA, 19 nt, Artificial Sequence
  Description of Artificial Sequence: Synthetic oligonucleotide
  Sense strand starting at position 1112 of SEQ ID NO: 1884360
gcauuaaguugaguucuag

SEQ ID NO: 2259761 - RNA, 19 nt, Artificial Sequence
  Description of Artificial Sequence: Synthetic oligonucleotide
  Antisense strand to SEQ ID NO: 2259760
cuagaacucaacuuaaugc

SEQ ID NO: 2259762 - RNA, 19 nt, Artificial Sequence
  Description of Artificial Sequence: Synthetic oligonucleotide
  Sense strand starting at position 1452 of SEQ ID NO: 1884360
uggccuacugucuauugaa

SEQ ID NO: 2259763 - RNA, 19 nt, Artificial Sequence
  Description of Artificial Sequence: Synthetic oligonucleotide
  Antisense strand to SEQ ID NO: 2259762
uucaauagacaguaggcca

SEQ ID NO: 2259764 - RNA, 19 nt, Artificial Sequence
  Description of Artificial Sequence: Synthetic oligonucleotide
  Sense strand starting at position 1583 of SEQ ID NO: 1884360
ggacuuaaugcacaucugu

SEQ ID NO: 2259765 - RNA, 19 nt, Artificial Sequence
  Description of Artificial Sequence: Synthetic oligonucleotide
  Antisense strand to SEQ ID NO: 2259764
acagaugugcauuaagucc

SEQ ID NO: 2259766 - RNA, 19 nt, Artificial Sequence
  Description of Artificial Sequence: Synthetic oligonucleotide
  Sense strand starting at position 1599 of SEQ ID NO: 1884360
ugugccaccgauuaucaau

SEQ ID NO: 2259767 - RNA, 19 nt, Artificial Sequence
  Description of Artificial Sequence: Synthetic oligonucleotide
  Antisense strand to SEQ ID NO: 2259766
auugauaaucgguggcaca

SEQ ID NO: 2259768 - RNA, 19 nt, Artificial Sequence
  Description of Artificial Sequence: Synthetic oligonucleotide
  Sense strand starting at position 1614 of SEQ ID NO: 1884360
caaucagucugacuguaag

SEQ ID NO: 2259769 - RNA, 19 nt, Artificial Sequence
  Description of Artificial Sequence: Synthetic oligonucleotide
  Antisense strand to SEQ ID NO: 2259768
cuuacagucagacugauug

SEQ ID NO: 2259770 - RNA, 19 nt, Artificial Sequence
  Description of Artificial Sequence: Synthetic oligonucleotide
  Sense strand starting at position 1620 of SEQ ID NO: 1884360
gucugacuguaagcuuaaa

SEQ ID NO: 2259771 - RNA, 19 nt, Artificial Sequence
  Description of Artificial Sequence: Synthetic oligonucleotide
  Antisense strand to SEQ ID NO: 2259770
uuuaagcuuacagucagac

SEQ ID NO: 2259772 - RNA, 19 nt, Artificial Sequence
  Description of Artificial Sequence: Synthetic oligonucleotide
  Sense strand starting at position 1628 of SEQ ID NO: 1884360
guaagcuuaaauggagaau

SEQ ID NO: 2259773 - RNA, 19 nt, Artificial Sequence
  Description of Artificial Sequence: Synthetic oligonucleotide
  Antisense strand to SEQ ID NO: 2259772
auucuccauuuaagcuuac

SEQ ID NO: 2259774 - RNA, 19 nt, Artificial Sequence
  Description of Artificial Sequence: Synthetic oligonucleotide
  Sense strand starting at position 2287 of SEQ ID NO: 1884360
ggcgaacgcggccugaauu

SEQ ID NO: 2259775 - RNA, 19 nt, Artificial Sequence
  Description of Artificial Sequence: Synthetic oligonucleotide
  Antisense strand to SEQ ID NO: 2259774
aauucaggccgcguucgcc

SEQ ID NO: 2259776 - RNA, 19 nt, Artificial Sequence
  Description of Artificial Sequence: Synthetic oligonucleotide
  Sense strand starting at position 2399 of SEQ ID NO: 1884360
ggcguuagcgacucaugca

SEQ ID NO: 2259777 - RNA, 19 nt, Artificial Sequence
  Description of Artificial Sequence: Synthetic oligonucleotide
  Antisense strand to SEQ ID NO: 2259776
ugcaugagucgcuaacgcc

SEQ ID NO: 2259778 - RNA, 19 nt, Artificial Sequence
  Description of Artificial Sequence: Synthetic oligonucleotide
  Sense strand starting at position 2422 of SEQ ID NO: 1884360
acccguuaacgcguugauu

SEQ ID NO: 2259779 - RNA, 19 nt, Artificial Sequence
  Description of Artificial Sequence: Synthetic oligonucleotide
  Antisense strand to SEQ ID NO: 2259778
aaucaacgcguuaacgggu

SEQ ID NO: 2259780 - RNA, 19 nt, Artificial Sequence
  Description of Artificial Sequence: Synthetic oligonucleotide
  Sense strand starting at position 2657 of SEQ ID NO: 1884360
ucucaacucuagccgaauu

SEQ ID NO: 2259781 - RNA, 19 nt, Artificial Sequence
  Description of Artificial Sequence: Synthetic oligonucleotide
  Antisense strand to SEQ ID NO: 2259780
aauucggcuagaguugaga

SEQ ID NO: 2259782 - RNA, 19 nt, Artificial Sequence
  Description of Artificial Sequence: Synthetic oligonucleotide
  Sense strand starting at position 2737 of SEQ ID NO: 1884360
uuucgagccuaggugaaau

SEQ ID NO: 2259783 - RNA, 19 nt, Artificial Sequence
  Description of Artificial Sequence: Synthetic oligonucleotide
  Antisense strand to SEQ ID NO: 2259782
auuucaccuaggcucgaaa

SEQ ID NO: 2259784 - RNA, 19 nt, Artificial Sequence
  Description of Artificial Sequence: Synthetic oligonucleotide
  Sense strand starting at position 2801 of SEQ ID NO: 1884360
cuaguaaucugauuguuua

SEQ ID NO: 2259785 - RNA, 19 nt, Artificial Sequence
  Description of Artificial Sequence: Synthetic oligonucleotide
  Antisense strand to SEQ ID NO: 2259784
uaaacaaucagauuacuag

SEQ ID NO: 2259786 - RNA, 19 nt, Artificial Sequence
  Description of Artificial Sequence: Synthetic oligonucleotide
  Sense strand starting at position 2804 of SEQ ID NO: 1884360
guaaucugauuguuuacau

SEQ ID NO: 2259787 - RNA, 19 nt, Artificial Sequence
  Description of Artificial Sequence: Synthetic oligonucleotide
  Antisense strand to SEQ ID NO: 2259786
auguaaacaaucagauuac

SEQ ID NO: 2259788 - RNA, 19 nt, Artificial Sequence
  Description of Artificial Sequence: Synthetic oligonucleotide
  Sense strand starting at position 2961 of SEQ ID NO: 1884360
gggaaauguuuggcucuuu

SEQ ID NO: 2259789 - RNA, 19 nt, Artificial Sequence
  Description of Artificial Sequence: Synthetic oligonucleotide
  Antisense strand to SEQ ID NO: 2259788
aaagagccaaacauuuccc

SEQ ID NO: 2259790 - RNA, 19 nt, Artificial Sequence
  Description of Artificial Sequence: Synthetic oligonucleotide
  Sense strand starting at position 2962 of SEQ ID NO: 1884360
ggaaauguuuggcucuuuc

SEQ ID NO: 2259791 - RNA, 19 nt, Artificial Sequence
  Description of Artificial Sequence: Synthetic oligonucleotide
  Antisense strand to SEQ ID NO: 2259790
gaaagagccaaacauuucc

SEQ ID NO: 2259792 - RNA, 19 nt, Artificial Sequence
  Description of Artificial Sequence: Synthetic oligonucleotide
  Sense strand starting at position 3027 of SEQ ID NO: 1884360
uagucugaacacugagaca

SEQ ID NO: 2259793 - RNA, 19 nt, Artificial Sequence
  Description of Artificial Sequence: Synthetic oligonucleotide
  Antisense strand to SEQ ID NO: 2259792
ugucucaguguucagacua

SEQ ID NO: 2259794 - RNA, 19 nt, Artificial Sequence
  Description of Artificial Sequence: Synthetic oligonucleotide
  Sense strand starting at position 3164 of SEQ ID NO: 1884360
ggacgauugcauuguuaac

SEQ ID NO: 2259795 - RNA, 19 nt, Artificial Sequence
  Description of Artificial Sequence: Synthetic oligonucleotide
  Antisense strand to SEQ ID NO: 2259794
guuaacaaugcaaucgucc

SEQ ID NO: 2259796 - RNA, 19 nt, Artificial Sequence
  Description of Artificial Sequence: Synthetic oligonucleotide
  Sense strand starting at position 3166 of SEQ ID NO: 1884360
acgauugcauuguuaacau

SEQ ID NO: 2259797 - RNA, 19 nt, Artificial Sequence
  Description of Artificial Sequence: Synthetic oligonucleotide
  Antisense strand to SEQ ID NO: 2259796
auguuaacaaugcaaucgu

SEQ ID NO: 2259798 - RNA, 19 nt, Artificial Sequence
  Description of Artificial Sequence: Synthetic oligonucleotide
  Sense strand starting at position 3223 of SEQ ID NO: 1884360
aguguauaugaugacguaa

SEQ ID NO: 2259799 - RNA, 19 nt, Artificial Sequence
  Description of Artificial Sequence: Synthetic oligonucleotide
  Antisense strand to SEQ ID NO: 2259798
uuacgucaucauauacacu

SEQ ID NO: 2259800 - RNA, 19 nt, Artificial Sequence
  Description of Artificial Sequence: Synthetic oligonucleotide
  Sense strand starting at position 3337 of SEQ ID NO: 1884360
agcugaaccuaucucugaa

SEQ ID NO: 2259801 - RNA, 19 nt, Artificial Sequence
  Description of Artificial Sequence: Synthetic oligonucleotide
  Antisense strand to SEQ ID NO: 2259800
uucagagauagguucagcu

SEQ ID NO: 2259802 - RNA, 19 nt, Artificial Sequence
  Description of Artificial Sequence: Synthetic oligonucleotide
  Sense strand starting at position 3377 of SEQ ID NO: 1884360
ccuccauucuaggcuagua

SEQ ID NO: 2259803 - RNA, 19 nt, Artificial Sequence
  Description of Artificial Sequence: Synthetic oligonucleotide
  Antisense strand to SEQ ID NO: 2259802
uacuagccuagaauggagg

SEQ ID NO: 2259804 - RNA, 19 nt, Artificial Sequence
  Description of Artificial Sequence: Synthetic oligonucleotide
  Sense strand starting at position 3496 of SEQ ID NO: 1884360
gcuguuucgggacaaguac

SEQ ID NO: 2259805 - RNA, 19 nt, Artificial Sequence
  Description of Artificial Sequence: Synthetic oligonucleotide
  Antisense strand to SEQ ID NO: 2259804
guacuugucccgaaacagc

SEQ ID NO: 2259806 - RNA, 19 nt, Artificial Sequence
  Description of Artificial Sequence: Synthetic oligonucleotide
  Sense strand starting at position 3507 of SEQ ID NO: 1884360
acaaguaccgcacagagau

SEQ ID NO: 2259807 - RNA, 19 nt, Artificial Sequence
  Description of Artificial Sequence: Synthetic oligonucleotide
  Antisense strand to SEQ ID NO: 2259806
aucucugugcgguacuugu

SEQ ID NO: 2259808 - RNA, 19 nt, Artificial Sequence
  Description of Artificial Sequence: Synthetic oligonucleotide
  Sense strand starting at position 3531 of SEQ ID NO: 1884360
agcaaagugcuuuaaguuu

SEQ ID NO: 2259809 - RNA, 19 nt, Artificial Sequence
  Description of Artificial Sequence: Synthetic oligonucleotide
  Antisense strand to SEQ ID NO: 2259808
aaacuuaaagcacuuugcu

SEQ ID NO: 2259810 - RNA, 19 nt, Artificial Sequence
  Description of Artificial Sequence: Synthetic oligonucleotide
  Sense strand starting at position 3641 of SEQ ID NO: 1884360
ugaugaccucucugaaggu

SEQ ID NO: 2259811 - RNA, 19 nt, Artificial Sequence
  Description of Artificial Sequence: Synthetic oligonucleotide
  Antisense strand to SEQ ID NO: 2259810
accuucagagaggucauca

SEQ ID NO: 2259812 - RNA, 19 nt, Artificial Sequence
  Description of Artificial Sequence: Synthetic oligonucleotide
  Sense strand starting at position 3659 of SEQ ID NO: 1884360
ugguucaaaggugguaaau

SEQ ID NO: 2259813 - RNA, 19 nt, Artificial Sequence
  Description of Artificial Sequence: Synthetic oligonucleotide
  Antisense strand to SEQ ID NO: 2259812
auuuaccaccuuugaacca

SEQ ID NO: 2259814 - RNA, 19 nt, Artificial Sequence
  Description of Artificial Sequence: Synthetic oligonucleotide
  Sense strand starting at position 3879 of SEQ ID NO: 1884360
ccaagaaaccugugagguc

SEQ ID NO: 2259815 - RNA, 19 nt, Artificial Sequence
  Description of Artificial Sequence: Synthetic oligonucleotide
  Antisense strand to SEQ ID NO: 2259814
gaccucacagguuucuugg

SEQ ID NO: 2259816 - RNA, 19 nt, Artificial Sequence
  Description of Artificial Sequence: Synthetic oligonucleotide
  Sense strand starting at position 3886 of SEQ ID NO: 1884360
accugugagguccaugauu

SEQ ID NO: 2259817 - RNA, 19 nt, Artificial Sequence
  Description of Artificial Sequence: Synthetic oligonucleotide
  Antisense strand to SEQ ID NO: 2259816
aaucauggaccucacaggu

SEQ ID NO: 2259818 - RNA, 19 nt, Artificial Sequence
  Description of Artificial Sequence: Synthetic oligonucleotide
  Sense strand starting at position 3888 of SEQ ID NO: 1884360
cugugagguccaugauuga

SEQ ID NO: 2259819 - RNA, 19 nt, Artificial Sequence
  Description of Artificial Sequence: Synthetic oligonucleotide
  Antisense strand to SEQ ID NO: 2259818
ucaaucauggaccucacag

SEQ ID NO: 2259820 - RNA, 19 nt, Artificial Sequence
  Description of Artificial Sequence: Synthetic oligonucleotide
  Sense strand starting at position 3974 of SEQ ID NO: 1884360
aaguuugaguucuuuggau

SEQ ID NO: 2259821 - RNA, 19 nt, Artificial Sequence
  Description of Artificial Sequence: Synthetic oligonucleotide
  Antisense strand to SEQ ID NO: 2259820
auccaaagaacucaaacuu

SEQ ID NO: 2259822 - RNA, 19 nt, Artificial Sequence
  Description of Artificial Sequence: Synthetic oligonucleotide
  Sense strand starting at position 80 of SEQ ID NO: 1884361
acuaaauaucccugaaacg

SEQ ID NO: 2259823 - RNA, 19 nt, Artificial Sequence
  Description of Artificial Sequence: Synthetic oligonucleotide
  Antisense strand to SEQ ID NO: 2259822
cguuucagggauauuuagu

SEQ ID NO: 2259824 - RNA, 19 nt, Artificial Sequence
  Description of Artificial Sequence: Synthetic oligonucleotide
  Sense strand starting at position 561 of SEQ ID NO: 1884361
ggugcaugcuuaguauuua

SEQ ID NO: 2259825 - RNA, 19 nt, Artificial Sequence
  Description of Artificial Sequence: Synthetic oligonucleotide
  Antisense strand to SEQ ID NO: 2259824
uaaauacuaagcaugcacc

SEQ ID NO: 2259826 - RNA, 19 nt, Artificial Sequence
  Description of Artificial Sequence: Synthetic oligonucleotide
  Sense strand starting at position 572 of SEQ ID NO: 1884361
aguauuuagucuuuagagc

SEQ ID NO: 2259827 - RNA, 19 nt, Artificial Sequence
  Description of Artificial Sequence: Synthetic oligonucleotide
  Antisense strand to SEQ ID NO: 2259826
gcucuaaagacuaaauacu

SEQ ID NO: 2259828 - RNA, 19 nt, Artificial Sequence
  Description of Artificial Sequence: Synthetic oligonucleotide
  Sense strand starting at position 726 of SEQ ID NO: 1884361
cucuaagaugcaugcagau

SEQ ID NO: 2259829 - RNA, 19 nt, Artificial Sequence
  Description of Artificial Sequence: Synthetic oligonucleotide
  Antisense strand to SEQ ID NO: 2259828
aucugcaugcaucuuagag

SEQ ID NO: 2259830 - RNA, 19 nt, Artificial Sequence
  Description of Artificial Sequence: Synthetic oligonucleotide
  Sense strand starting at position 728 of SEQ ID NO: 1884361
cuaagaugcaugcagauga

SEQ ID NO: 2259831 - RNA, 19 nt, Artificial Sequence
  Description of Artificial Sequence: Synthetic oligonucleotide
  Antisense strand to SEQ ID NO: 2259830
ucaucugcaugcaucuuag

SEQ ID NO: 2259832 - RNA, 19 nt, Artificial Sequence
  Description of Artificial Sequence: Synthetic oligonucleotide
  Sense strand starting at position 851 of SEQ ID NO: 1884361
guggacucagccuaauuaa

SEQ ID NO: 2259833 - RNA, 19 nt, Artificial Sequence
  Description of Artificial Sequence: Synthetic oligonucleotide
  Antisense strand to SEQ ID NO: 2259832
uuaauuaggcugaguccac

SEQ ID NO: 2259834 - RNA, 19 nt, Artificial Sequence
  Description of Artificial Sequence: Synthetic oligonucleotide
  Sense strand starting at position 879 of SEQ ID NO: 1884361
augcacaguccacgagaaa

SEQ ID NO: 2259835 - RNA, 19 nt, Artificial Sequence
  Description of Artificial Sequence: Synthetic oligonucleotide
  Antisense strand to SEQ ID NO: 2259834
uuucucguggacugugcau

SEQ ID NO: 2259836 - RNA, 19 nt, Artificial Sequence
  Description of Artificial Sequence: Synthetic oligonucleotide
  Sense strand starting at position 880 of SEQ ID NO: 1884361
ugcacaguccacgagaaau

SEQ ID NO: 2259837 - RNA, 19 nt, Artificial Sequence
  Description of Artificial Sequence: Synthetic oligonucleotide
  Antisense strand to SEQ ID NO: 2259836
auuucucguggacugugca

SEQ ID NO: 2259838 - RNA, 19 nt, Artificial Sequence
  Description of Artificial Sequence: Synthetic oligonucleotide
  Sense strand starting at position 891 of SEQ ID NO: 1884361
cgagaaaugaugcaguguu

SEQ ID NO: 2259839 - RNA, 19 nt, Artificial Sequence
  Description of Artificial Sequence: Synthetic oligonucleotide
  Antisense strand to SEQ ID NO: 2259838
aacacugcaucauuucucg

SEQ ID NO: 2259840 - RNA, 19 nt, Artificial Sequence
  Description of Artificial Sequence: Synthetic oligonucleotide
  Sense strand starting at position 994 of SEQ ID NO: 1884361
gagggugucccuggaaaca

SEQ ID NO: 2259841 - RNA, 19 nt, Artificial Sequence
  Description of Artificial Sequence: Synthetic oligonucleotide
  Antisense strand to SEQ ID NO: 2259840
uguuuccagggacacccuc

SEQ ID NO: 2259842 - RNA, 19 nt, Artificial Sequence
  Description of Artificial Sequence: Synthetic oligonucleotide
  Sense strand starting at position 1173 of SEQ ID NO: 1884361
cuguaauagcaagaaagcu

SEQ ID NO: 2259843 - RNA, 19 nt, Artificial Sequence
  Description of Artificial Sequence: Synthetic oligonucleotide
  Antisense strand to SEQ ID NO: 2259842
agcuuucuugcuauuacag

SEQ ID NO: 2259844 - RNA, 19 nt, Artificial Sequence
  Description of Artificial Sequence: Synthetic oligonucleotide
  Sense strand starting at position 1244 of SEQ ID NO: 1884361
ucgacaucacuuuaugcuu

SEQ ID NO: 2259845 - RNA, 19 nt, Artificial Sequence
  Description of Artificial Sequence: Synthetic oligonucleotide
  Antisense strand to SEQ ID NO: 2259844
aagcauaaagugaugucga

SEQ ID NO: 2259846 - RNA, 19 nt, Artificial Sequence
  Description of Artificial Sequence: Synthetic oligonucleotide
  Sense strand starting at position 1342 of SEQ ID NO: 1884361
uacuuaagcgacuauaggu

SEQ ID NO: 2259847 - RNA, 19 nt, Artificial Sequence
  Description of Artificial Sequence: Synthetic oligonucleotide
  Antisense strand to SEQ ID NO: 2259846
accuauagucgcuuaagua

SEQ ID NO: 2259848 - RNA, 19 nt, Artificial Sequence
  Description of Artificial Sequence: Synthetic oligonucleotide
  Sense strand starting at position 1498 of SEQ ID NO: 1884361
ugcugaagguuucccugaa

SEQ ID NO: 2259849 - RNA, 19 nt, Artificial Sequence
  Description of Artificial Sequence: Synthetic oligonucleotide
  Antisense strand to SEQ ID NO: 2259848
uucagggaaaccuucagca

SEQ ID NO: 2259850 - RNA, 19 nt, Artificial Sequence
  Description of Artificial Sequence: Synthetic oligonucleotide
  Sense strand starting at position 1499 of SEQ ID NO: 1884361
gcugaagguuucccugaau

SEQ ID NO: 2259851 - RNA, 19 nt, Artificial Sequence
  Description of Artificial Sequence: Synthetic oligonucleotide
  Antisense strand to SEQ ID NO: 2259850
auucagggaaaccuucagc

SEQ ID NO: 2259852 - RNA, 19 nt, Artificial Sequence
  Description of Artificial Sequence: Synthetic oligonucleotide
  Sense strand starting at position 1502 of SEQ ID NO: 1884361
gaagguuucccugaauugc

SEQ ID NO: 2259853 - RNA, 19 nt, Artificial Sequence
  Description of Artificial Sequence: Synthetic oligonucleotide
  Antisense strand to SEQ ID NO: 2259852
gcaauucagggaaaccuuc

SEQ ID NO: 2259854 - RNA, 19 nt, Artificial Sequence
  Description of Artificial Sequence: Synthetic oligonucleotide
  Sense strand starting at position 1512 of SEQ ID NO: 1884361
cugaauugcuuaucagcaa

SEQ ID NO: 2259855 - RNA, 19 nt, Artificial Sequence
  Description of Artificial Sequence: Synthetic oligonucleotide
  Antisense strand to SEQ ID NO: 2259854
uugcugauaagcaauucag

SEQ ID NO: 2259856 - RNA, 19 nt, Artificial Sequence
  Description of Artificial Sequence: Synthetic oligonucleotide
  Sense strand starting at position 2891 of SEQ ID NO: 1884361
cgaaguuuaggguacugaa

SEQ ID NO: 2259857 - RNA, 19 nt, Artificial Sequence
  Description of Artificial Sequence: Synthetic oligonucleotide
  Antisense strand to SEQ ID NO: 2259856
uucaguacccuaaacuucg

SEQ ID NO: 2259858 - RNA, 19 nt, Artificial Sequence
  Description of Artificial Sequence: Synthetic oligonucleotide
  Sense strand starting at position 2987 of SEQ ID NO: 1884361
aggaauaagaacugcguga

SEQ ID NO: 2259859 - RNA, 19 nt, Artificial Sequence
  Description of Artificial Sequence: Synthetic oligonucleotide
  Antisense strand to SEQ ID NO: 2259858
ucacgcaguucuuauuccu

SEQ ID NO: 2259860 - RNA, 19 nt, Artificial Sequence
  Description of Artificial Sequence: Synthetic oligonucleotide
  Sense strand starting at position 2989 of SEQ ID NO: 1884361
gaauaagaacugcgugaag

SEQ ID NO: 2259861 - RNA, 19 nt, Artificial Sequence
  Description of Artificial Sequence: Synthetic oligonucleotide
  Antisense strand to SEQ ID NO: 2259860
cuucacgcaguucuuauuc

SEQ ID NO: 2259862 - RNA, 19 nt, Artificial Sequence
  Description of Artificial Sequence: Synthetic oligonucleotide
  Sense strand starting at position 3169 of SEQ ID NO: 1884361
aggugucugacaggaagau

SEQ ID NO: 2259863 - RNA, 19 nt, Artificial Sequence
  Description of Artificial Sequence: Synthetic oligonucleotide
  Antisense strand to SEQ ID NO: 2259862
aucuuccugucagacaccu

SEQ ID NO: 2259864 - RNA, 19 nt, Artificial Sequence
  Description of Artificial Sequence: Synthetic oligonucleotide
  Sense strand starting at position 3275 of SEQ ID NO: 1884361
ugaugaugucaauaguugu

SEQ ID NO: 2259865 - RNA, 19 nt, Artificial Sequence
  Description of Artificial Sequence: Synthetic oligonucleotide
  Antisense strand to SEQ ID NO: 2259864
acaacuauugacaucauca

SEQ ID NO: 2259866 - RNA, 19 nt, Artificial Sequence
  Description of Artificial Sequence: Synthetic oligonucleotide
  Sense strand starting at position 3456 of SEQ ID NO: 1884361
guuucugauuuccucugua

SEQ ID NO: 2259867 - RNA, 19 nt, Artificial Sequence
  Description of Artificial Sequence: Synthetic oligonucleotide
  Antisense strand to SEQ ID NO: 2259866
uacagaggaaaucagaaac

SEQ ID NO: 2259868 - RNA, 19 nt, Artificial Sequence
  Description of Artificial Sequence: Synthetic oligonucleotide
  Sense strand starting at position 3460 of SEQ ID NO: 1884361
cugauuuccucuguauggu

SEQ ID NO: 2259869 - RNA, 19 nt, Artificial Sequence
  Description of Artificial Sequence: Synthetic oligonucleotide
  Antisense strand to SEQ ID NO: 2259868
accauacagaggaaaucag

SEQ ID NO: 2259870 - RNA, 19 nt, Artificial Sequence
  Description of Artificial Sequence: Synthetic oligonucleotide
  Sense strand starting at position 3489 of SEQ ID NO: 1884361
cugaucuaguuaguaaaua

SEQ ID NO: 2259871 - RNA, 19 nt, Artificial Sequence
  Description of Artificial Sequence: Synthetic oligonucleotide
  Antisense strand to SEQ ID NO: 2259870
uauuuacuaacuagaucag

SEQ ID NO: 2259872 - RNA, 19 nt, Artificial Sequence
  Description of Artificial Sequence: Synthetic oligonucleotide
  Sense strand starting at position 3520 of SEQ ID NO: 1884361
ccaauaagcugugugagag

SEQ ID NO: 2259873 - RNA, 19 nt, Artificial Sequence
  Description of Artificial Sequence: Synthetic oligonucleotide
  Antisense strand to SEQ ID NO: 2259872
cucucacacagcuuauugg

SEQ ID NO: 2259874 - RNA, 19 nt, Artificial Sequence
  Description of Artificial Sequence: Synthetic oligonucleotide
  Sense strand starting at position 3521 of SEQ ID NO: 1884361
caauaagcugugugagaga

SEQ ID NO: 2259875 - RNA, 19 nt, Artificial Sequence
  Description of Artificial Sequence: Synthetic oligonucleotide
  Antisense strand to SEQ ID NO: 2259874
ucucucacacagcuuauug

SEQ ID NO: 2259876 - RNA, 19 nt, Artificial Sequence
  Description of Artificial Sequence: Synthetic oligonucleotide
  Sense strand starting at position 3526 of SEQ ID NO: 1884361
agcugugugagagaaucau

SEQ ID NO: 2259877 - RNA, 19 nt, Artificial Sequence
  Description of Artificial Sequence: Synthetic oligonucleotide
  Antisense strand to SEQ ID NO: 2259876
augauucucucacacagcu

SEQ ID NO: 2259878 - RNA, 19 nt, Artificial Sequence
  Description of Artificial Sequence: Synthetic oligonucleotide
  Sense strand starting at position 3549 of SEQ ID NO: 1884361
aggagagguucuccuuaaa

SEQ ID NO: 2259879 - RNA, 19 nt, Artificial Sequence
  Description of Artificial Sequence: Synthetic oligonucleotide
  Antisense strand to SEQ ID NO: 2259878
uuuaaggagaaccucuccu

SEQ ID NO: 2259880 - RNA, 19 nt, Artificial Sequence
  Description of Artificial Sequence: Synthetic oligonucleotide
  Sense strand starting at position 3552 of SEQ ID NO: 1884361
agagguucuccuuaaacgu

SEQ ID NO: 2259881 - RNA, 19 nt, Artificial Sequence
  Description of Artificial Sequence: Synthetic oligonucleotide
  Antisense strand to SEQ ID NO: 2259880
acguuuaaggagaaccucu

SEQ ID NO: 2259882 - RNA, 19 nt, Artificial Sequence
  Description of Artificial Sequence: Synthetic oligonucleotide
  Sense strand starting at position 3559 of SEQ ID NO: 1884361
cuccuuaaacguuagggaa

SEQ ID NO: 2259883 - RNA, 19 nt, Artificial Sequence
  Description of Artificial Sequence: Synthetic oligonucleotide
  Antisense strand to SEQ ID NO: 2259882
uucccuaacguuuaaggag

SEQ ID NO: 2259884 - RNA, 19 nt, Artificial Sequence
  Description of Artificial Sequence: Synthetic oligonucleotide
  Sense strand starting at position 3616 of SEQ ID NO: 1884361
auagcaaaugccuagguuu

SEQ ID NO: 2259885 - RNA, 19 nt, Artificial Sequence
  Description of Artificial Sequence: Synthetic oligonucleotide
  Antisense strand to SEQ ID NO: 2259884
aaaccuaggcauuugcuau

SEQ ID NO: 2259886 - RNA, 19 nt, Artificial Sequence
  Description of Artificial Sequence: Synthetic oligonucleotide
  Sense strand starting at position 3627 of SEQ ID NO: 1884361
cuagguuugccugauauaa

SEQ ID NO: 2259887 - RNA, 19 nt, Artificial Sequence
  Description of Artificial Sequence: Synthetic oligonucleotide
  Antisense strand to SEQ ID NO: 2259886
uuauaucaggcaaaccuag

SEQ ID NO: 2259888 - RNA, 19 nt, Artificial Sequence
  Description of Artificial Sequence: Synthetic oligonucleotide
  Sense strand starting at position 3649 of SEQ ID NO: 1884361
uugagacuacaaugcuuaa

SEQ ID NO: 2259889 - RNA, 19 nt, Artificial Sequence
  Description of Artificial Sequence: Synthetic oligonucleotide
  Antisense strand to SEQ ID NO: 2259888
uuaagcauuguagucucaa

SEQ ID NO: 2259890 - RNA, 19 nt, Artificial Sequence
  Description of Artificial Sequence: Synthetic oligonucleotide
  Sense strand starting at position 3652 of SEQ ID NO: 1884361
agacuacaaugcuuaaagu

SEQ ID NO: 2259891 - RNA, 19 nt, Artificial Sequence
  Description of Artificial Sequence: Synthetic oligonucleotide
  Antisense strand to SEQ ID NO: 2259890
acuuuaagcauuguagucu

SEQ ID NO: 2259892 - RNA, 19 nt, Artificial Sequence
  Description of Artificial Sequence: Synthetic oligonucleotide
  Sense strand starting at position 3672 of SEQ ID NO: 1884361
gaauucuugcaagggacuu

SEQ ID NO: 2259893 - RNA, 19 nt, Artificial Sequence
  Description of Artificial Sequence: Synthetic oligonucleotide
  Antisense strand to SEQ ID NO: 2259892
aagucccuugcaagaauuc

SEQ ID NO: 2259894 - RNA, 19 nt, Artificial Sequence
  Description of Artificial Sequence: Synthetic oligonucleotide
  Sense strand starting at position 3773 of SEQ ID NO: 1884361
guauuuguaguuuguagau

SEQ ID NO: 2259895 - RNA, 19 nt, Artificial Sequence
  Description of Artificial Sequence: Synthetic oligonucleotide
  Antisense strand to SEQ ID NO: 2259894
aucuacaaacuacaaauac

SEQ ID NO: 2259896 - RNA, 19 nt, Artificial Sequence
  Description of Artificial Sequence: Synthetic oligonucleotide
  Sense strand starting at position 3881 of SEQ ID NO: 1884361
gucugcuuucccguuacau

SEQ ID NO: 2259897 - RNA, 19 nt, Artificial Sequence
  Description of Artificial Sequence: Synthetic oligonucleotide
  Antisense strand to SEQ ID NO: 2259896
auguaacgggaaagcagac

SEQ ID NO: 2259898 - RNA, 19 nt, Artificial Sequence
  Description of Artificial Sequence: Synthetic oligonucleotide
  Sense strand starting at position 3883 of SEQ ID NO: 1884361
cugcuuucccguuacauuu

SEQ ID NO: 2259899 - RNA, 19 nt, Artificial Sequence
  Description of Artificial Sequence: Synthetic oligonucleotide
  Antisense strand to SEQ ID NO: 2259898
aaauguaacgggaaagcag

SEQ ID NO: 2259900 - RNA, 19 nt, Artificial Sequence
  Description of Artificial Sequence: Synthetic oligonucleotide
  Sense strand starting at position 3928 of SEQ ID NO: 1884361
accuaauuguaacuguauu

SEQ ID NO: 2259901 - RNA, 19 nt, Artificial Sequence
  Description of Artificial Sequence: Synthetic oligonucleotide
  Antisense strand to SEQ ID NO: 2259900
aauacaguuacaauuaggu

SEQ ID NO: 2259902 - RNA, 19 nt, Artificial Sequence
  Description of Artificial Sequence: Synthetic oligonucleotide
  Sense strand starting at position 2134 of SEQ ID NO: 1884362
agcaguggacuguauagau

SEQ ID NO: 2259903 - RNA, 19 nt, Artificial Sequence
  Description of Artificial Sequence: Synthetic oligonucleotide
  Antisense strand to SEQ ID NO: 2259902
aucuauacaguccacugcu

SEQ ID NO: 2259904 - RNA, 19 nt, Artificial Sequence
  Description of Artificial Sequence: Synthetic oligonucleotide
  Sense strand starting at position 2254 of SEQ ID NO: 1884362
ggaaauaugcauuguuuau

SEQ ID NO: 2259905 - RNA, 19 nt, Artificial Sequence
  Description of Artificial Sequence: Synthetic oligonucleotide
  Antisense strand to SEQ ID NO: 2259904
auaaacaaugcauauuucc

SEQ ID NO: 2259906 - RNA, 19 nt, Artificial Sequence
  Description of Artificial Sequence: Synthetic oligonucleotide
  Sense strand starting at position 2315 of SEQ ID NO: 1884362
uguguugauagagguaaca

SEQ ID NO: 2259907 - RNA, 19 nt, Artificial Sequence
  Description of Artificial Sequence: Synthetic oligonucleotide
  Antisense strand to SEQ ID NO: 2259906
uguuaccucuaucaacaca

SEQ ID NO: 2259908 - RNA, 19 nt, Artificial Sequence
  Description of Artificial Sequence: Synthetic oligonucleotide
  Sense strand starting at position 2366 of SEQ ID NO: 1884362
auagauguguguuuacaaa

SEQ ID NO: 2259909 - RNA, 19 nt, Artificial Sequence
  Description of Artificial Sequence: Synthetic oligonucleotide
  Antisense strand to SEQ ID NO: 2259908
uuuguaaacacacaucuau

SEQ ID NO: 2259910 - RNA, 19 nt, Artificial Sequence
  Description of Artificial Sequence: Synthetic oligonucleotide
  Sense strand starting at position 2449 of SEQ ID NO: 1884362
guuuguguguagauguaug

SEQ ID NO: 2259911 - RNA, 19 nt, Artificial Sequence
  Description of Artificial Sequence: Synthetic oligonucleotide
  Antisense strand to SEQ ID NO: 2259910
cauacaucuacacacaaac

SEQ ID NO: 2259912 - RNA, 19 nt, Artificial Sequence
  Description of Artificial Sequence: Synthetic oligonucleotide
  Sense strand starting at position 2460 of SEQ ID NO: 1884362
gauguaugugcauauuaca

SEQ ID NO: 2259913 - RNA, 19 nt, Artificial Sequence
  Description of Artificial Sequence: Synthetic oligonucleotide
  Antisense strand to SEQ ID NO: 2259912
uguaauaugcacauacauc

SEQ ID NO: 2259914 - RNA, 19 nt, Artificial Sequence
  Description of Artificial Sequence: Synthetic oligonucleotide
  Sense strand starting at position 2513 of SEQ ID NO: 1884362
acugauucuugagcaaaua

SEQ ID NO: 2259915 - RNA, 19 nt, Artificial Sequence
  Description of Artificial Sequence: Synthetic oligonucleotide
  Antisense strand to SEQ ID NO: 2259914
uauuugcucaagaaucagu

SEQ ID NO: 2259916 - RNA, 19 nt, Artificial Sequence
  Description of Artificial Sequence: Synthetic oligonucleotide
  Sense strand starting at position 2514 of SEQ ID NO: 1884362
cugauucuugagcaaauau

SEQ ID NO: 2259917 - RNA, 19 nt, Artificial Sequence
  Description of Artificial Sequence: Synthetic oligonucleotide
  Antisense strand to SEQ ID NO: 2259916
auauuugcucaagaaucag

SEQ ID NO: 2259918 - RNA, 19 nt, Artificial Sequence
  Description of Artificial Sequence: Synthetic oligonucleotide
  Sense strand starting at position 2584 of SEQ ID NO: 1884362
augcuugauguauggaaga

SEQ ID NO: 2259919 - RNA, 19 nt, Artificial Sequence
  Description of Artificial Sequence: Synthetic oligonucleotide
  Antisense strand to SEQ ID NO: 2259918
ucuuccauacaucaagcau

SEQ ID NO: 2259920 - RNA, 19 nt, Artificial Sequence
  Description of Artificial Sequence: Synthetic oligonucleotide
  Sense strand starting at position 2697 of SEQ ID NO: 1884362
uauacagaauguguuugau

SEQ ID NO: 2259921 - RNA, 19 nt, Artificial Sequence
  Description of Artificial Sequence: Synthetic oligonucleotide
  Antisense strand to SEQ ID NO: 2259920
aucaaacacauucuguaua

SEQ ID NO: 2259922 - RNA, 19 nt, Artificial Sequence
  Description of Artificial Sequence: Synthetic oligonucleotide
  Sense strand starting at position 2699 of SEQ ID NO: 1884362
uacagaauguguuugaucu

SEQ ID NO: 2259923 - RNA, 19 nt, Artificial Sequence
  Description of Artificial Sequence: Synthetic oligonucleotide
  Antisense strand to SEQ ID NO: 2259922
agaucaaacacauucugua

SEQ ID NO: 2259924 - RNA, 19 nt, Artificial Sequence
  Description of Artificial Sequence: Synthetic oligonucleotide
  Sense strand starting at position 2700 of SEQ ID NO: 1884362
acagaauguguuugaucuu

SEQ ID NO: 2259925 - RNA, 19 nt, Artificial Sequence
  Description of Artificial Sequence: Synthetic oligonucleotide
  Antisense strand to SEQ ID NO: 2259924
aagaucaaacacauucugu

SEQ ID NO: 2259926 - RNA, 19 nt, Artificial Sequence
  Description of Artificial Sequence: Synthetic oligonucleotide
  Sense strand starting at position 2703 of SEQ ID NO: 1884362
gaauguguuugaucuuaac

SEQ ID NO: 2259927 - RNA, 19 nt, Artificial Sequence
  Description of Artificial Sequence: Synthetic oligonucleotide
  Antisense strand to SEQ ID NO: 2259926
guuaagaucaaacacauuc

SEQ ID NO: 2259928 - RNA, 19 nt, Artificial Sequence
  Description of Artificial Sequence: Synthetic oligonucleotide
  Sense strand starting at position 2771 of SEQ ID NO: 1884362
uuauucuaacgugauauga

SEQ ID NO: 2259929 - RNA, 19 nt, Artificial Sequence
  Description of Artificial Sequence: Synthetic oligonucleotide
  Antisense strand to SEQ ID NO: 2259928
ucauaucacguuagaauaa

SEQ ID NO: 2259930 - RNA, 19 nt, Artificial Sequence
  Description of Artificial Sequence: Synthetic oligonucleotide
  Sense strand starting at position 2779 of SEQ ID NO: 1884362
acgugauaugaaugguaau

SEQ ID NO: 2259931 - RNA, 19 nt, Artificial Sequence
  Description of Artificial Sequence: Synthetic oligonucleotide
  Antisense strand to SEQ ID NO: 2259930
auuaccauucauaucacgu

SEQ ID NO: 2259932 - RNA, 19 nt, Artificial Sequence
  Description of Artificial Sequence: Synthetic oligonucleotide
  Sense strand starting at position 2780 of SEQ ID NO: 1884362
cgugauaugaaugguaaua

SEQ ID NO: 2259933 - RNA, 19 nt, Artificial Sequence
  Description of Artificial Sequence: Synthetic oligonucleotide
  Antisense strand to SEQ ID NO: 2259932
uauuaccauucauaucacg

SEQ ID NO: 2259934 - RNA, 19 nt, Artificial Sequence
  Description of Artificial Sequence: Synthetic oligonucleotide
  Sense strand starting at position 3021 of SEQ ID NO: 1884362
gcuuuaaaugcagaaguga

SEQ ID NO: 2259935 - RNA, 19 nt, Artificial Sequence
  Description of Artificial Sequence: Synthetic oligonucleotide
  Antisense strand to SEQ ID NO: 2259934
ucacuucugcauuuaaagc

SEQ ID NO: 2259936 - RNA, 19 nt, Artificial Sequence
  Description of Artificial Sequence: Synthetic oligonucleotide
  Sense strand starting at position 3030 of SEQ ID NO: 1884362
gcagaagugaguuacaaua

SEQ ID NO: 2259937 - RNA, 19 nt, Artificial Sequence
  Description of Artificial Sequence: Synthetic oligonucleotide
  Antisense strand to SEQ ID NO: 2259936
uauuguaacucacuucugc

SEQ ID NO: 2259938 - RNA, 19 nt, Artificial Sequence
  Description of Artificial Sequence: Synthetic oligonucleotide
  Sense strand starting at position 3038 of SEQ ID NO: 1884362
gaguuacaauaaucuguga

SEQ ID NO: 2259939 - RNA, 19 nt, Artificial Sequence
  Description of Artificial Sequence: Synthetic oligonucleotide
  Antisense strand to SEQ ID NO: 2259938
ucacagauuauuguaacuc

SEQ ID NO: 2259940 - RNA, 19 nt, Artificial Sequence
  Description of Artificial Sequence: Synthetic oligonucleotide
  Sense strand starting at position 3041 of SEQ ID NO: 1884362
uuacaauaaucugugaagu

SEQ ID NO: 2259941 - RNA, 19 nt, Artificial Sequence
  Description of Artificial Sequence: Synthetic oligonucleotide
  Antisense strand to SEQ ID NO: 2259940
acuucacagauuauuguaa

SEQ ID NO: 2259942 - RNA, 19 nt, Artificial Sequence
  Description of Artificial Sequence: Synthetic oligonucleotide
  Sense strand starting at position 3078 of SEQ ID NO: 1884362
ccugauaaaugcucaauag

SEQ ID NO: 2259943 - RNA, 19 nt, Artificial Sequence
  Description of Artificial Sequence: Synthetic oligonucleotide
  Antisense strand to SEQ ID NO: 2259942
cuauugagcauuuaucagg

SEQ ID NO: 2259944 - RNA, 19 nt, Artificial Sequence
  Description of Artificial Sequence: Synthetic oligonucleotide
  Sense strand starting at position 3079 of SEQ ID NO: 1884362
cugauaaaugcucaauagu

SEQ ID NO: 2259945 - RNA, 19 nt, Artificial Sequence
  Description of Artificial Sequence: Synthetic oligonucleotide
  Antisense strand to SEQ ID NO: 2259944
acuauugagcauuuaucag

SEQ ID NO: 2259946 - RNA, 19 nt, Artificial Sequence
  Description of Artificial Sequence: Synthetic oligonucleotide
  Sense strand starting at position 3211 of SEQ ID NO: 1884362
agcauauauccuggaggaa

SEQ ID NO: 2259947 - RNA, 19 nt, Artificial Sequence
  Description of Artificial Sequence: Synthetic oligonucleotide
  Antisense strand to SEQ ID NO: 2259946
uuccuccaggauauaugcu

SEQ ID NO: 2259948 - RNA, 19 nt, Artificial Sequence
  Description of Artificial Sequence: Synthetic oligonucleotide
  Sense strand starting at position 3361 of SEQ ID NO: 1884362
uugguuaugcuguacauga

SEQ ID NO: 2259949 - RNA, 19 nt, Artificial Sequence
  Description of Artificial Sequence: Synthetic oligonucleotide
  Antisense strand to SEQ ID NO: 2259948
ucauguacagcauaaccaa

SEQ ID NO: 2259950 - RNA, 19 nt, Artificial Sequence
  Description of Artificial Sequence: Synthetic oligonucleotide
  Sense strand starting at position 3363 of SEQ ID NO: 1884362
gguuaugcuguacaugaau

SEQ ID NO: 2259951 - RNA, 19 nt, Artificial Sequence
  Description of Artificial Sequence: Synthetic oligonucleotide
  Antisense strand to SEQ ID NO: 2259950
auucauguacagcauaacc

SEQ ID NO: 2259952 - RNA, 19 nt, Artificial Sequence
  Description of Artificial Sequence: Synthetic oligonucleotide
  Sense strand starting at position 3366 of SEQ ID NO: 1884362
uaugcuguacaugaaugau

SEQ ID NO: 2259953 - RNA, 19 nt, Artificial Sequence
  Description of Artificial Sequence: Synthetic oligonucleotide
  Antisense strand to SEQ ID NO: 2259952
aucauucauguacagcaua

SEQ ID NO: 2259954 - RNA, 19 nt, Artificial Sequence
  Description of Artificial Sequence: Synthetic oligonucleotide
  Sense strand starting at position 3423 of SEQ ID NO: 1884362
guaugauagcuaggcagaa

SEQ ID NO: 2259955 - RNA, 19 nt, Artificial Sequence
  Description of Artificial Sequence: Synthetic oligonucleotide
  Antisense strand to SEQ ID NO: 2259954
uucugccuagcuaucauac

SEQ ID NO: 2259956 - RNA, 19 nt, Artificial Sequence
  Description of Artificial Sequence: Synthetic oligonucleotide
  Sense strand starting at position 3424 of SEQ ID NO: 1884362
uaugauagcuaggcagaaa

SEQ ID NO: 2259957 - RNA, 19 nt, Artificial Sequence
  Description of Artificial Sequence: Synthetic oligonucleotide
  Antisense strand to SEQ ID NO: 2259956
uuucugccuagcuaucaua

SEQ ID NO: 2259958 - RNA, 19 nt, Artificial Sequence
  Description of Artificial Sequence: Synthetic oligonucleotide
  Sense strand starting at position 3452 of SEQ ID NO: 1884362
gcacauagauaggcagaau

SEQ ID NO: 2259959 - RNA, 19 nt, Artificial Sequence
  Description of Artificial Sequence: Synthetic oligonucleotide
  Antisense strand to SEQ ID NO: 2259958
auucugccuaucuaugugc

SEQ ID NO: 2259960 - RNA, 19 nt, Artificial Sequence
  Description of Artificial Sequence: Synthetic oligonucleotide
  Sense strand starting at position 3745 of SEQ ID NO: 1884362
ggacauaagucucuuugag

SEQ ID NO: 2259961 - RNA, 19 nt, Artificial Sequence
  Description of Artificial Sequence: Synthetic oligonucleotide
  Antisense strand to SEQ ID NO: 2259960
cucaaagagacuuaugucc

SEQ ID NO: 2259962 - RNA, 19 nt, Artificial Sequence
  Description of Artificial Sequence: Synthetic oligonucleotide
  Sense strand starting at position 3747 of SEQ ID NO: 1884362
acauaagucucuuugaggu

SEQ ID NO: 2259963 - RNA, 19 nt, Artificial Sequence
  Description of Artificial Sequence: Synthetic oligonucleotide
  Antisense strand to SEQ ID NO: 2259962
accucaaagagacuuaugu

SEQ ID NO: 2259964 - RNA, 19 nt, Artificial Sequence
  Description of Artificial Sequence: Synthetic oligonucleotide
  Sense strand starting at position 3753 of SEQ ID NO: 1884362
gucucuuugagguaugauc

SEQ ID NO: 2259965 - RNA, 19 nt, Artificial Sequence
  Description of Artificial Sequence: Synthetic oligonucleotide
  Antisense strand to SEQ ID NO: 2259964
gaucauaccucaaagagac

SEQ ID NO: 2259966 - RNA, 19 nt, Artificial Sequence
  Description of Artificial Sequence: Synthetic oligonucleotide
  Sense strand starting at position 3755 of SEQ ID NO: 1884362
cucuuugagguaugaucua

SEQ ID NO: 2259967 - RNA, 19 nt, Artificial Sequence
  Description of Artificial Sequence: Synthetic oligonucleotide
  Antisense strand to SEQ ID NO: 2259966
uagaucauaccucaaagag

SEQ ID NO: 2259968 - RNA, 19 nt, Artificial Sequence
  Description of Artificial Sequence: Synthetic oligonucleotide
  Sense strand starting at position 3777 of SEQ ID NO: 1884362
acaggauaccuaugugaua

SEQ ID NO: 2259969 - RNA, 19 nt, Artificial Sequence
  Description of Artificial Sequence: Synthetic oligonucleotide
  Antisense strand to SEQ ID NO: 2259968
uaucacauagguauccugu

SEQ ID NO: 2259970 - RNA, 19 nt, Artificial Sequence
  Description of Artificial Sequence: Synthetic oligonucleotide
  Sense strand starting at position 3778 of SEQ ID NO: 1884362
caggauaccuaugugauau

SEQ ID NO: 2259971 - RNA, 19 nt, Artificial Sequence
  Description of Artificial Sequence: Synthetic oligonucleotide
  Antisense strand to SEQ ID NO: 2259970
auaucacauagguauccug

SEQ ID NO: 2259972 - RNA, 19 nt, Artificial Sequence
  Description of Artificial Sequence: Synthetic oligonucleotide
  Sense strand starting at position 3873 of SEQ ID NO: 1884362
cuaucagauuucuaugaug

SEQ ID NO: 2259973 - RNA, 19 nt, Artificial Sequence
  Description of Artificial Sequence: Synthetic oligonucleotide
  Antisense strand to SEQ ID NO: 2259972
caucauagaaaucugauag

SEQ ID NO: 2259974 - RNA, 19 nt, Artificial Sequence
  Description of Artificial Sequence: Synthetic oligonucleotide
  Sense strand starting at position 3876 of SEQ ID NO: 1884362
ucagauuucuaugaugaga

SEQ ID NO: 2259975 - RNA, 19 nt, Artificial Sequence
  Description of Artificial Sequence: Synthetic oligonucleotide
  Antisense strand to SEQ ID NO: 2259974
ucucaucauagaaaucuga

SEQ ID NO: 2259976 - RNA, 19 nt, Artificial Sequence
  Description of Artificial Sequence: Synthetic oligonucleotide
  Sense strand starting at position 3878 of SEQ ID NO: 1884362
agauuucuaugaugagaua

SEQ ID NO: 2259977 - RNA, 19 nt, Artificial Sequence
  Description of Artificial Sequence: Synthetic oligonucleotide
  Antisense strand to SEQ ID NO: 2259976
uaucucaucauagaaaucu

SEQ ID NO: 2259978 - RNA, 19 nt, Artificial Sequence
  Description of Artificial Sequence: Synthetic oligonucleotide
  Sense strand starting at position 3963 of SEQ ID NO: 1884362
ugaacugcugaauaguaau

SEQ ID NO: 2259979 - RNA, 19 nt, Artificial Sequence
  Description of Artificial Sequence: Synthetic oligonucleotide
  Antisense strand to SEQ ID NO: 2259978
auuacuauucagcaguuca

SEQ ID NO: 2259980 - RNA, 19 nt, Artificial Sequence
  Description of Artificial Sequence: Synthetic oligonucleotide
  Sense strand starting at position 3971 of SEQ ID NO: 1884362
ugaauaguaauaggugauu

SEQ ID NO: 2259981 - RNA, 19 nt, Artificial Sequence
  Description of Artificial Sequence: Synthetic oligonucleotide
  Antisense strand to SEQ ID NO: 2259980
aaucaccuauuacuauuca

SEQ ID NO: 2259982 - RNA, 19 nt, Artificial Sequence
  Description of Artificial Sequence: Synthetic oligonucleotide
  Sense strand starting at position 283 of SEQ ID NO: 1884363
aucugaguuugaucugaug

SEQ ID NO: 2259983 - RNA, 19 nt, Artificial Sequence
  Description of Artificial Sequence: Synthetic oligonucleotide
  Antisense strand to SEQ ID NO: 2259982
caucagaucaaacucagau

SEQ ID NO: 2259984 - RNA, 19 nt, Artificial Sequence
  Description of Artificial Sequence: Synthetic oligonucleotide
  Sense strand starting at position 285 of SEQ ID NO: 1884363
cugaguuugaucugaugaa

SEQ ID NO: 2259985 - RNA, 19 nt, Artificial Sequence
  Description of Artificial Sequence: Synthetic oligonucleotide
  Antisense strand to SEQ ID NO: 2259984
uucaucagaucaaacucag

SEQ ID NO: 2259986 - RNA, 19 nt, Artificial Sequence
  Description of Artificial Sequence: Synthetic oligonucleotide
  Sense strand starting at position 396 of SEQ ID NO: 1884363
cuccacuggcccugacaau

SEQ ID NO: 2259987 - RNA, 19 nt, Artificial Sequence
  Description of Artificial Sequence: Synthetic oligonucleotide
  Antisense strand to SEQ ID NO: 2259986
auugucagggccaguggag

SEQ ID NO: 2259988 - RNA, 19 nt, Artificial Sequence
  Description of Artificial Sequence: Synthetic oligonucleotide
  Sense strand starting at position 397 of SEQ ID NO: 1884363
uccacuggcccugacaauu

SEQ ID NO: 2259989 - RNA, 19 nt, Artificial Sequence
  Description of Artificial Sequence: Synthetic oligonucleotide
  Antisense strand to SEQ ID NO: 2259988
aauugucagggccagugga

SEQ ID NO: 2259990 - RNA, 19 nt, Artificial Sequence
  Description of Artificial Sequence: Synthetic oligonucleotide
  Sense strand starting at position 403 of SEQ ID NO: 1884363
ggcccugacaauugugaau

SEQ ID NO: 2259991 - RNA, 19 nt, Artificial Sequence
  Description of Artificial Sequence: Synthetic oligonucleotide
  Antisense strand to SEQ ID NO: 2259990
auucacaauugucagggcc

SEQ ID NO: 2259992 - RNA, 19 nt, Artificial Sequence
  Description of Artificial Sequence: Synthetic oligonucleotide
  Sense strand starting at position 550 of SEQ ID NO: 1884363
cacuucggccucugagaga

SEQ ID NO: 2259993 - RNA, 19 nt, Artificial Sequence
  Description of Artificial Sequence: Synthetic oligonucleotide
  Antisense strand to SEQ ID NO: 2259992
ucucucagaggccgaagug

SEQ ID NO: 2259994 - RNA, 19 nt, Artificial Sequence
  Description of Artificial Sequence: Synthetic oligonucleotide
  Sense strand starting at position 677 of SEQ ID NO: 1884363
gaagcauguugaccauuau

SEQ ID NO: 2259995 - RNA, 19 nt, Artificial Sequence
  Description of Artificial Sequence: Synthetic oligonucleotide
  Antisense strand to SEQ ID NO: 2259994
auaauggucaacaugcuuc

SEQ ID NO: 2259996 - RNA, 19 nt, Artificial Sequence
  Description of Artificial Sequence: Synthetic oligonucleotide
  Sense strand starting at position 1449 of SEQ ID NO: 1884363
uuugacuuagaguaaugcu

SEQ ID NO: 2259997 - RNA, 19 nt, Artificial Sequence
  Description of Artificial Sequence: Synthetic oligonucleotide
  Antisense strand to SEQ ID NO: 2259996
agcauuacucuaagucaaa

SEQ ID NO: 2259998 - RNA, 19 nt, Artificial Sequence
  Description of Artificial Sequence: Synthetic oligonucleotide
  Sense strand starting at position 1458 of SEQ ID NO: 1884363
gaguaaugcuuuccagguu

SEQ ID NO: 2259999 - RNA, 19 nt, Artificial Sequence
  Description of Artificial Sequence: Synthetic oligonucleotide
  Antisense strand to SEQ ID NO: 2259998
aaccuggaaagcauuacuc

SEQ ID NO: 2260000 - RNA, 19 nt, Artificial Sequence
  Description of Artificial Sequence: Synthetic oligonucleotide
  Sense strand starting at position 1523 of SEQ ID NO: 1884363
gcauaauacucacuguaug

SEQ ID NO: 2260001 - RNA, 19 nt, Artificial Sequence
  Description of Artificial Sequence: Synthetic oligonucleotide
  Antisense strand to SEQ ID NO: 2260000
cauacagugaguauuaugc

SEQ ID NO: 2260002 - RNA, 19 nt, Artificial Sequence
  Description of Artificial Sequence: Synthetic oligonucleotide
  Sense strand starting at position 1528 of SEQ ID NO: 1884363
auacucacuguaugauaga

SEQ ID NO: 2260003 - RNA, 19 nt, Artificial Sequence
  Description of Artificial Sequence: Synthetic oligonucleotide
  Antisense strand to SEQ ID NO: 2260002
ucuaucauacagugaguau

SEQ ID NO: 2260004 - RNA, 19 nt, Artificial Sequence
  Description of Artificial Sequence: Synthetic oligonucleotide
  Sense strand starting at position 1558 of SEQ ID NO: 1884363
uuaucaucaucggcuugua

SEQ ID NO: 2260005 - RNA, 19 nt, Artificial Sequence
  Description of Artificial Sequence: Synthetic oligonucleotide
  Antisense strand to SEQ ID NO: 2260004
uacaagccgaugaugauaa

SEQ ID NO: 2260006 - RNA, 19 nt, Artificial Sequence
  Description of Artificial Sequence: Synthetic oligonucleotide
  Sense strand starting at position 1630 of SEQ ID NO: 1884363
augcaucucuaccuuagua

SEQ ID NO: 2260007 - RNA, 19 nt, Artificial Sequence
  Description of Artificial Sequence: Synthetic oligonucleotide
  Antisense strand to SEQ ID NO: 2260006
uacuaagguagagaugcau

SEQ ID NO: 2260008 - RNA, 19 nt, Artificial Sequence
  Description of Artificial Sequence: Synthetic oligonucleotide
  Sense strand starting at position 1632 of SEQ ID NO: 1884363
gcaucucuaccuuaguaag

SEQ ID NO: 2260009 - RNA, 19 nt, Artificial Sequence
  Description of Artificial Sequence: Synthetic oligonucleotide
  Antisense strand to SEQ ID NO: 2260008
cuuacuaagguagagaugc

SEQ ID NO: 2260010 - RNA, 19 nt, Artificial Sequence
  Description of Artificial Sequence: Synthetic oligonucleotide
  Sense strand starting at position 2106 of SEQ ID NO: 1884363
gcccuuucucuugaggguu

SEQ ID NO: 2260011 - RNA, 19 nt, Artificial Sequence
  Description of Artificial Sequence: Synthetic oligonucleotide
  Antisense strand to SEQ ID NO: 2260010
aacccucaagagaaagggc

SEQ ID NO: 2260012 - RNA, 19 nt, Artificial Sequence
  Description of Artificial Sequence: Synthetic oligonucleotide
  Sense strand starting at position 2125 of SEQ ID NO: 1884363
ggaagcgcuguucuguauu

SEQ ID NO: 2260013 - RNA, 19 nt, Artificial Sequence
  Description of Artificial Sequence: Synthetic oligonucleotide
  Antisense strand to SEQ ID NO: 2260012
aauacagaacagcgcuucc

SEQ ID NO: 2260014 - RNA, 19 nt, Artificial Sequence
  Description of Artificial Sequence: Synthetic oligonucleotide
  Sense strand starting at position 2308 of SEQ ID NO: 1884363
ggauuagugacuugccuga

SEQ ID NO: 2260015 - RNA, 19 nt, Artificial Sequence
  Description of Artificial Sequence: Synthetic oligonucleotide
  Antisense strand to SEQ ID NO: 2260014
ucaggcaagucacuaaucc

SEQ ID NO: 2260016 - RNA, 19 nt, Artificial Sequence
  Description of Artificial Sequence: Synthetic oligonucleotide
  Sense strand starting at position 2880 of SEQ ID NO: 1884363
ucacgagacugacuguaua

SEQ ID NO: 2260017 - RNA, 19 nt, Artificial Sequence
  Description of Artificial Sequence: Synthetic oligonucleotide
  Antisense strand to SEQ ID NO: 2260016
uauacagucagucucguga

SEQ ID NO: 2260018 - RNA, 19 nt, Artificial Sequence
  Description of Artificial Sequence: Synthetic oligonucleotide
  Sense strand starting at position 2899 of SEQ ID NO: 1884363
gaacuugaguacccuaaag

SEQ ID NO: 2260019 - RNA, 19 nt, Artificial Sequence
  Description of Artificial Sequence: Synthetic oligonucleotide
  Antisense strand to SEQ ID NO: 2260018
cuuuaggguacucaaguuc

SEQ ID NO: 2260020 - RNA, 19 nt, Artificial Sequence
  Description of Artificial Sequence: Synthetic oligonucleotide
  Sense strand starting at position 2950 of SEQ ID NO: 1884363
ugcaaugcggucucauagu

SEQ ID NO: 2260021 - RNA, 19 nt, Artificial Sequence
  Description of Artificial Sequence: Synthetic oligonucleotide
  Antisense strand to SEQ ID NO: 2260020
acuaugagaccgcauugca

SEQ ID NO: 2260022 - RNA, 19 nt, Artificial Sequence
  Description of Artificial Sequence: Synthetic oligonucleotide
  Sense strand starting at position 3262 of SEQ ID NO: 1884363
gggacagugacuuguccaa

SEQ ID NO: 2260023 - RNA, 19 nt, Artificial Sequence
  Description of Artificial Sequence: Synthetic oligonucleotide
  Antisense strand to SEQ ID NO: 2260022
uuggacaagucacuguccc

SEQ ID NO: 2260024 - RNA, 19 nt, Artificial Sequence
  Description of Artificial Sequence: Synthetic oligonucleotide
  Sense strand starting at position 3287 of SEQ ID NO: 1884363
aucaaauguuaggacugaa

SEQ ID NO: 2260025 - RNA, 19 nt, Artificial Sequence
  Description of Artificial Sequence: Synthetic oligonucleotide
  Antisense strand to SEQ ID NO: 2260024
uucaguccuaacauuugau

SEQ ID NO: 2260026 - RNA, 19 nt, Artificial Sequence
  Description of Artificial Sequence: Synthetic oligonucleotide
  Sense strand starting at position 3290 of SEQ ID NO: 1884363
aaauguuaggacugaacuu

SEQ ID NO: 2260027 - RNA, 19 nt, Artificial Sequence
  Description of Artificial Sequence: Synthetic oligonucleotide
  Antisense strand to SEQ ID NO: 2260026
aaguucaguccuaacauuu

SEQ ID NO: 2260028 - RNA, 19 nt, Artificial Sequence
  Description of Artificial Sequence: Synthetic oligonucleotide
  Sense strand starting at position 3384 of SEQ ID NO: 1884363
gcugaaggauccuuggaga

SEQ ID NO: 2260029 - RNA, 19 nt, Artificial Sequence
  Description of Artificial Sequence: Synthetic oligonucleotide
  Antisense strand to SEQ ID NO: 2260028
ucuccaaggauccuucagc

SEQ ID NO: 2260030 - RNA, 19 nt, Artificial Sequence
  Description of Artificial Sequence: Synthetic oligonucleotide
  Sense strand starting at position 3387 of SEQ ID NO: 1884363
gaaggauccuuggagauau

SEQ ID NO: 2260031 - RNA, 19 nt, Artificial Sequence
  Description of Artificial Sequence: Synthetic oligonucleotide
  Antisense strand to SEQ ID NO: 2260030
auaucuccaaggauccuuc

SEQ ID NO: 2260032 - RNA, 19 nt, Artificial Sequence
  Description of Artificial Sequence: Synthetic oligonucleotide
  Sense strand starting at position 3416 of SEQ ID NO: 1884363
aucaauuccucuguguaca

SEQ ID NO: 2260033 - RNA, 19 nt, Artificial Sequence
  Description of Artificial Sequence: Synthetic oligonucleotide
  Antisense strand to SEQ ID NO: 2260032
uguacacagaggaauugau

SEQ ID NO: 2260034 - RNA, 19 nt, Artificial Sequence
  Description of Artificial Sequence: Synthetic oligonucleotide
  Sense strand starting at position 3417 of SEQ ID NO: 1884363
ucaauuccucuguguacag

SEQ ID NO: 2260035 - RNA, 19 nt, Artificial Sequence
  Description of Artificial Sequence: Synthetic oligonucleotide
  Antisense strand to SEQ ID NO: 2260034
cuguacacagaggaauuga

SEQ ID NO: 2260036 - RNA, 19 nt, Artificial Sequence
  Description of Artificial Sequence: Synthetic oligonucleotide
  Sense strand starting at position 3421 of SEQ ID NO: 1884363
uuccucuguguacagauaa

SEQ ID NO: 2260037 - RNA, 19 nt, Artificial Sequence
  Description of Artificial Sequence: Synthetic oligonucleotide
  Antisense strand to SEQ ID NO: 2260036
uuaucuguacacagaggaa

SEQ ID NO: 2260038 - RNA, 19 nt, Artificial Sequence
  Description of Artificial Sequence: Synthetic oligonucleotide
  Sense strand starting at position 3524 of SEQ ID NO: 1884363
augcucaguauccggagaa

SEQ ID NO: 2260039 - RNA, 19 nt, Artificial Sequence
  Description of Artificial Sequence: Synthetic oligonucleotide
  Antisense strand to SEQ ID NO: 2260038
uucuccggauacugagcau

SEQ ID NO: 2260040 - RNA, 19 nt, Artificial Sequence
  Description of Artificial Sequence: Synthetic oligonucleotide
  Sense strand starting at position 3528 of SEQ ID NO: 1884363
ucaguauccggagaacucu

SEQ ID NO: 2260041 - RNA, 19 nt, Artificial Sequence
  Description of Artificial Sequence: Synthetic oligonucleotide
  Antisense strand to SEQ ID NO: 2260040
agaguucuccggauacuga

SEQ ID NO: 2260042 - RNA, 19 nt, Artificial Sequence
  Description of Artificial Sequence: Synthetic oligonucleotide
  Sense strand starting at position 3536 of SEQ ID NO: 1884363
cggagaacucugcagugga

SEQ ID NO: 2260043 - RNA, 19 nt, Artificial Sequence
  Description of Artificial Sequence: Synthetic oligonucleotide
  Antisense strand to SEQ ID NO: 2260042
uccacugcagaguucuccg

SEQ ID NO: 2260044 - RNA, 19 nt, Artificial Sequence
  Description of Artificial Sequence: Synthetic oligonucleotide
  Sense strand starting at position 3639 of SEQ ID NO: 1884363
gccacugauuuaugggaca

SEQ ID NO: 2260045 - RNA, 19 nt, Artificial Sequence
  Description of Artificial Sequence: Synthetic oligonucleotide
  Antisense strand to SEQ ID NO: 2260044
ugucccauaaaucaguggc

SEQ ID NO: 2260046 - RNA, 19 nt, Artificial Sequence
  Description of Artificial Sequence: Synthetic oligonucleotide
  Sense strand starting at position 3642 of SEQ ID NO: 1884363
acugauuuaugggacagag

SEQ ID NO: 2260047 - RNA, 19 nt, Artificial Sequence
  Description of Artificial Sequence: Synthetic oligonucleotide
  Antisense strand to SEQ ID NO: 2260046
cucugucccauaaaucagu

SEQ ID NO: 2260048 - RNA, 19 nt, Artificial Sequence
  Description of Artificial Sequence: Synthetic oligonucleotide
  Sense strand starting at position 3703 of SEQ ID NO: 1884363
gagagcuuggcuuagacau

SEQ ID NO: 2260049 - RNA, 19 nt, Artificial Sequence
  Description of Artificial Sequence: Synthetic oligonucleotide
  Antisense strand to SEQ ID NO: 2260048
augucuaagccaagcucuc

SEQ ID NO: 2260050 - RNA, 19 nt, Artificial Sequence
  Description of Artificial Sequence: Synthetic oligonucleotide
  Sense strand starting at position 3705 of SEQ ID NO: 1884363
gagcuuggcuuagacauuu

SEQ ID NO: 2260051 - RNA, 19 nt, Artificial Sequence
  Description of Artificial Sequence: Synthetic oligonucleotide
  Antisense strand to SEQ ID NO: 2260050
aaaugucuaagccaagcuc

SEQ ID NO: 2260052 - RNA, 19 nt, Artificial Sequence
  Description of Artificial Sequence: Synthetic oligonucleotide
  Sense strand starting at position 3742 of SEQ ID NO: 1884363
caggucugauguucuacau

SEQ ID NO: 2260053 - RNA, 19 nt, Artificial Sequence
  Description of Artificial Sequence: Synthetic oligonucleotide
  Antisense strand to SEQ ID NO: 2260052
auguagaacaucagaccug

SEQ ID NO: 2260054 - RNA, 19 nt, Artificial Sequence
  Description of Artificial Sequence: Synthetic oligonucleotide
  Sense strand starting at position 3746 of SEQ ID NO: 1884363
ucugauguucuacauguuu

SEQ ID NO: 2260055 - RNA, 19 nt, Artificial Sequence
  Description of Artificial Sequence: Synthetic oligonucleotide
  Antisense strand to SEQ ID NO: 2260054
aaacauguagaacaucaga

SEQ ID NO: 2260056 - RNA, 19 nt, Artificial Sequence
  Description of Artificial Sequence: Synthetic oligonucleotide
  Sense strand starting at position 3751 of SEQ ID NO: 1884363
uguucuacauguuuacaaa

SEQ ID NO: 2260057 - RNA, 19 nt, Artificial Sequence
  Description of Artificial Sequence: Synthetic oligonucleotide
  Antisense strand to SEQ ID NO: 2260056
uuuguaaacauguagaaca

SEQ ID NO: 2260058 - RNA, 19 nt, Artificial Sequence
  Description of Artificial Sequence: Synthetic oligonucleotide
  Sense strand starting at position 3971 of SEQ ID NO: 1884363
gagccaagcuccucgaauu

SEQ ID NO: 2260059 - RNA, 19 nt, Artificial Sequence
  Description of Artificial Sequence: Synthetic oligonucleotide
  Antisense strand to SEQ ID NO: 2260058
aauucgaggagcuuggcuc

SEQ ID NO: 2260060 - RNA, 19 nt, Artificial Sequence
  Description of Artificial Sequence: Synthetic oligonucleotide
  Sense strand starting at position 3972 of SEQ ID NO: 1884363
agccaagcuccucgaauua

SEQ ID NO: 2260061 - RNA, 19 nt, Artificial Sequence
  Description of Artificial Sequence: Synthetic oligonucleotide
  Antisense strand to SEQ ID NO: 2260060
uaauucgaggagcuuggcu

SEQ ID NO: 2260062 - RNA, 19 nt, Artificial Sequence
  Description of Artificial Sequence: Synthetic oligonucleotide
  Sense strand starting at position 48 of SEQ ID NO: 1884364
cuuuacuuccaugagguua

SEQ ID NO: 2260063 - RNA, 19 nt, Artificial Sequence
  Description of Artificial Sequence: Synthetic oligonucleotide
  Antisense strand to SEQ ID NO: 2260062
uaaccucauggaaguaaag

SEQ ID NO: 2260064 - RNA, 19 nt, Artificial Sequence
  Description of Artificial Sequence: Synthetic oligonucleotide
  Sense strand starting at position 173 of SEQ ID NO: 1884364
gaggaaaguuugucacucu

SEQ ID NO: 2260065 - RNA, 19 nt, Artificial Sequence
  Description of Artificial Sequence: Synthetic oligonucleotide
  Antisense strand to SEQ ID NO: 2260064
agagugacaaacuuuccuc

SEQ ID NO: 2260066 - RNA, 19 nt, Artificial Sequence
  Description of Artificial Sequence: Synthetic oligonucleotide
  Sense strand starting at position 270 of SEQ ID NO: 1884364
guugaugguguuuacuaga

SEQ ID NO: 2260067 - RNA, 19 nt, Artificial Sequence
  Description of Artificial Sequence: Synthetic oligonucleotide
  Antisense strand to SEQ ID NO: 2260066
ucuaguaaacaccaucaac

SEQ ID NO: 2260068 - RNA, 19 nt, Artificial Sequence
  Description of Artificial Sequence: Synthetic oligonucleotide
  Sense strand starting at position 295 of SEQ ID NO: 1884364
ugcagacucuaaucuguga

SEQ ID NO: 2260069 - RNA, 19 nt, Artificial Sequence
  Description of Artificial Sequence: Synthetic oligonucleotide
  Antisense strand to SEQ ID NO: 2260068
ucacagauuagagucugca

SEQ ID NO: 2260070 - RNA, 19 nt, Artificial Sequence
  Description of Artificial Sequence: Synthetic oligonucleotide
  Sense strand starting at position 299 of SEQ ID NO: 1884364
gacucuaaucugugagaca

SEQ ID NO: 2260071 - RNA, 19 nt, Artificial Sequence
  Description of Artificial Sequence: Synthetic oligonucleotide
  Antisense strand to SEQ ID NO: 2260070
ugucucacagauuagaguc

SEQ ID NO: 2260072 - RNA, 19 nt, Artificial Sequence
  Description of Artificial Sequence: Synthetic oligonucleotide
  Sense strand starting at position 479 of SEQ ID NO: 1884364
ucuggaucugggcagugau

SEQ ID NO: 2260073 - RNA, 19 nt, Artificial Sequence
  Description of Artificial Sequence: Synthetic oligonucleotide
  Antisense strand to SEQ ID NO: 2260072
aucacugcccagauccaga

SEQ ID NO: 2260074 - RNA, 19 nt, Artificial Sequence
  Description of Artificial Sequence: Synthetic oligonucleotide
  Sense strand starting at position 652 of SEQ ID NO: 1884364
ccagcuuuccacuggacaa

SEQ ID NO: 2260075 - RNA, 19 nt, Artificial Sequence
  Description of Artificial Sequence: Synthetic oligonucleotide
  Antisense strand to SEQ ID NO: 2260074
uuguccaguggaaagcugg

SEQ ID NO: 2260076 - RNA, 19 nt, Artificial Sequence
  Description of Artificial Sequence: Synthetic oligonucleotide
  Sense strand starting at position 693 of SEQ ID NO: 1884364
accuguuugggccacagau

SEQ ID NO: 2260077 - RNA, 19 nt, Artificial Sequence
  Description of Artificial Sequence: Synthetic oligonucleotide
  Antisense strand to SEQ ID NO: 2260076
aucuguggcccaaacaggu

SEQ ID NO: 2260078 - RNA, 19 nt, Artificial Sequence
  Description of Artificial Sequence: Synthetic oligonucleotide
  Sense strand starting at position 695 of SEQ ID NO: 1884364
cuguuugggccacagauaa

SEQ ID NO: 2260079 - RNA, 19 nt, Artificial Sequence
  Description of Artificial Sequence: Synthetic oligonucleotide
  Antisense strand to SEQ ID NO: 2260078
uuaucuguggcccaaacag

SEQ ID NO: 2260080 - RNA, 19 nt, Artificial Sequence
  Description of Artificial Sequence: Synthetic oligonucleotide
  Sense strand starting at position 819 of SEQ ID NO: 1884364
guagcugucccuuaugaaa

SEQ ID NO: 2260081 - RNA, 19 nt, Artificial Sequence
  Description of Artificial Sequence: Synthetic oligonucleotide
  Antisense strand to SEQ ID NO: 2260080
uuucauaagggacagcuac

SEQ ID NO: 2260082 - RNA, 19 nt, Artificial Sequence
  Description of Artificial Sequence: Synthetic oligonucleotide
  Sense strand starting at position 888 of SEQ ID NO: 1884364
gcaauaacccucugaaaug

SEQ ID NO: 2260083 - RNA, 19 nt, Artificial Sequence
  Description of Artificial Sequence: Synthetic oligonucleotide
  Antisense strand to SEQ ID NO: 2260082
cauuucagaggguuauugc

SEQ ID NO: 2260084 - RNA, 19 nt, Artificial Sequence
  Description of Artificial Sequence: Synthetic oligonucleotide
  Sense strand starting at position 904 of SEQ ID NO: 1884364
auggcuuuccaccaguaga

SEQ ID NO: 2260085 - RNA, 19 nt, Artificial Sequence
  Description of Artificial Sequence: Synthetic oligonucleotide
  Antisense strand to SEQ ID NO: 2260084
ucuacugguggaaagccau

SEQ ID NO: 2260086 - RNA, 19 nt, Artificial Sequence
  Description of Artificial Sequence: Synthetic oligonucleotide
  Sense strand starting at position 958 of SEQ ID NO: 1884364
gagccaaaccuguggaaga

SEQ ID NO: 2260087 - RNA, 19 nt, Artificial Sequence
  Description of Artificial Sequence: Synthetic oligonucleotide
  Antisense strand to SEQ ID NO: 2260086
ucuuccacagguuuggcuc

SEQ ID NO: 2260088 - RNA, 19 nt, Artificial Sequence
  Description of Artificial Sequence: Synthetic oligonucleotide
  Sense strand starting at position 1001 of SEQ ID NO: 1884364
aggagaaccugucuggguu

SEQ ID NO: 2260089 - RNA, 19 nt, Artificial Sequence
  Description of Artificial Sequence: Synthetic oligonucleotide
  Antisense strand to SEQ ID NO: 2260088
aacccagacagguucuccu

SEQ ID NO: 2260090 - RNA, 19 nt, Artificial Sequence
  Description of Artificial Sequence: Synthetic oligonucleotide
  Sense strand starting at position 1002 of SEQ ID NO: 1884364
ggagaaccugucuggguuu

SEQ ID NO: 2260091 - RNA, 19 nt, Artificial Sequence
  Description of Artificial Sequence: Synthetic oligonucleotide
  Antisense strand to SEQ ID NO: 2260090
aaacccagacagguucucc

SEQ ID NO: 2260092 - RNA, 19 nt, Artificial Sequence
  Description of Artificial Sequence: Synthetic oligonucleotide
  Sense strand starting at position 1084 of SEQ ID NO: 1884364
agcugaucaaugggaaagu

SEQ ID NO: 2260093 - RNA, 19 nt, Artificial Sequence
  Description of Artificial Sequence: Synthetic oligonucleotide
  Antisense strand to SEQ ID NO: 2260092
acuuucccauugaucagcu

SEQ ID NO: 2260094 - RNA, 19 nt, Artificial Sequence
  Description of Artificial Sequence: Synthetic oligonucleotide
  Sense strand starting at position 1128 of SEQ ID NO: 1884364
gaacuugguugagcagaaa

SEQ ID NO: 2260095 - RNA, 19 nt, Artificial Sequence
  Description of Artificial Sequence: Synthetic oligonucleotide
  Antisense strand to SEQ ID NO: 2260094
uuucugcucaaccaaguuc

SEQ ID NO: 2260096 - RNA, 19 nt, Artificial Sequence
  Description of Artificial Sequence: Synthetic oligonucleotide
  Sense strand starting at position 1153 of SEQ ID NO: 1884364
uucucagaacuugauuguu

SEQ ID NO: 2260097 - RNA, 19 nt, Artificial Sequence
  Description of Artificial Sequence: Synthetic oligonucleotide
  Antisense strand to SEQ ID NO: 2260096
aacaaucaaguucugagaa

SEQ ID NO: 2260098 - RNA, 19 nt, Artificial Sequence
  Description of Artificial Sequence: Synthetic oligonucleotide
  Sense strand starting at position 1245 of SEQ ID NO: 1884364
ggcugaaguaguuaaacga

SEQ ID NO: 2260099 - RNA, 19 nt, Artificial Sequence
  Description of Artificial Sequence: Synthetic oligonucleotide
  Antisense strand to SEQ ID NO: 2260098
ucguuuaacuacuucagcc

SEQ ID NO: 2260100 - RNA, 19 nt, Artificial Sequence
  Description of Artificial Sequence: Synthetic oligonucleotide
  Sense strand starting at position 1276 of SEQ ID NO: 1884364
ucuaccaucuggguaaaca

SEQ ID NO: 2260101 - RNA, 19 nt, Artificial Sequence
  Description of Artificial Sequence: Synthetic oligonucleotide
  Antisense strand to SEQ ID NO: 2260100
uguuuacccagaugguaga

SEQ ID NO: 2260102 - RNA, 19 nt, Artificial Sequence
  Description of Artificial Sequence: Synthetic oligonucleotide
  Sense strand starting at position 1311 of SEQ ID NO: 1884364
agaugugaauuccuuuguu

SEQ ID NO: 2260103 - RNA, 19 nt, Artificial Sequence
  Description of Artificial Sequence: Synthetic oligonucleotide
  Antisense strand to SEQ ID NO: 2260102
aacaaaggaauucacaucu

SEQ ID NO: 2260104 - RNA, 19 nt, Artificial Sequence
  Description of Artificial Sequence: Synthetic oligonucleotide
  Sense strand starting at position 1475 of SEQ ID NO: 1884364
caucucuaucuggaagguu

SEQ ID NO: 2260105 - RNA, 19 nt, Artificial Sequence
  Description of Artificial Sequence: Synthetic oligonucleotide
  Antisense strand to SEQ ID NO: 2260104
aaccuuccagauagagaug

SEQ ID NO: 2260106 - RNA, 19 nt, Artificial Sequence
  Description of Artificial Sequence: Synthetic oligonucleotide
  Sense strand starting at position 1545 of SEQ ID NO: 1884364
uuccaugaguucccuuaga

SEQ ID NO: 2260107 - RNA, 19 nt, Artificial Sequence
  Description of Artificial Sequence: Synthetic oligonucleotide
  Antisense strand to SEQ ID NO: 2260106
ucuaagggaacucauggaa

SEQ ID NO: 2260108 - RNA, 19 nt, Artificial Sequence
  Description of Artificial Sequence: Synthetic oligonucleotide
  Sense strand starting at position 1872 of SEQ ID NO: 1884364
ccagguguuccugcagcuu

SEQ ID NO: 2260109 - RNA, 19 nt, Artificial Sequence
  Description of Artificial Sequence: Synthetic oligonucleotide
  Antisense strand to SEQ ID NO: 2260108
aagcugcaggaacaccugg

SEQ ID NO: 2260110 - RNA, 19 nt, Artificial Sequence
  Description of Artificial Sequence: Synthetic oligonucleotide
  Sense strand starting at position 1889 of SEQ ID NO: 1884364
uuggguaaccaguacucaa

SEQ ID NO: 2260111 - RNA, 19 nt, Artificial Sequence
  Description of Artificial Sequence: Synthetic oligonucleotide
  Antisense strand to SEQ ID NO: 2260110
uugaguacugguuacccaa

SEQ ID NO: 2260112 - RNA, 19 nt, Artificial Sequence
  Description of Artificial Sequence: Synthetic oligonucleotide
  Sense strand starting at position 1892 of SEQ ID NO: 1884364
gguaaccaguacucaacau

SEQ ID NO: 2260113 - RNA, 19 nt, Artificial Sequence
  Description of Artificial Sequence: Synthetic oligonucleotide
  Antisense strand to SEQ ID NO: 2260112
auguugaguacugguuacc

SEQ ID NO: 2260114 - RNA, 19 nt, Artificial Sequence
  Description of Artificial Sequence: Synthetic oligonucleotide
  Sense strand starting at position 2160 of SEQ ID NO: 1884364
gugugcaagccaucauugu

SEQ ID NO: 2260115 - RNA, 19 nt, Artificial Sequence
  Description of Artificial Sequence: Synthetic oligonucleotide
  Antisense strand to SEQ ID NO: 2260114
acaaugauggcuugcacac

SEQ ID NO: 2260116 - RNA, 19 nt, Artificial Sequence
  Description of Artificial Sequence: Synthetic oligonucleotide
  Sense strand starting at position 2218 of SEQ ID NO: 1884364
uggguugcaacuuacuaga

SEQ ID NO: 2260117 - RNA, 19 nt, Artificial Sequence
  Description of Artificial Sequence: Synthetic oligonucleotide
  Antisense strand to SEQ ID NO: 2260116
ucuaguaaguugcaaccca

SEQ ID NO: 2260118 - RNA, 19 nt, Artificial Sequence
  Description of Artificial Sequence: Synthetic oligonucleotide
  Sense strand starting at position 2220 of SEQ ID NO: 1884364
gguugcaacuuacuagacu

SEQ ID NO: 2260119 - RNA, 19 nt, Artificial Sequence
  Description of Artificial Sequence: Synthetic oligonucleotide
  Antisense strand to SEQ ID NO: 2260118
agucuaguaaguugcaacc

SEQ ID NO: 2260120 - RNA, 19 nt, Artificial Sequence
  Description of Artificial Sequence: Synthetic oligonucleotide
  Sense strand starting at position 2378 of SEQ ID NO: 1884364
auuaucuaguuucugugaa

SEQ ID NO: 2260121 - RNA, 19 nt, Artificial Sequence
  Description of Artificial Sequence: Synthetic oligonucleotide
  Antisense strand to SEQ ID NO: 2260120
uucacagaaacuagauaau

SEQ ID NO: 2260122 - RNA, 19 nt, Artificial Sequence
  Description of Artificial Sequence: Synthetic oligonucleotide
  Sense strand starting at position 2672 of SEQ ID NO: 1884364
aguauauauccuugaccag

SEQ ID NO: 2260123 - RNA, 19 nt, Artificial Sequence
  Description of Artificial Sequence: Synthetic oligonucleotide
  Antisense strand to SEQ ID NO: 2260122
cuggucaaggauauauacu

SEQ ID NO: 2260124 - RNA, 19 nt, Artificial Sequence
  Description of Artificial Sequence: Synthetic oligonucleotide
  Sense strand starting at position 2790 of SEQ ID NO: 1884364
ggccaaugggcgucuuguu

SEQ ID NO: 2260125 - RNA, 19 nt, Artificial Sequence
  Description of Artificial Sequence: Synthetic oligonucleotide
  Antisense strand to SEQ ID NO: 2260124
aacaagacgcccauuggcc

SEQ ID NO: 2260126 - RNA, 19 nt, Artificial Sequence
  Description of Artificial Sequence: Synthetic oligonucleotide
  Sense strand starting at position 2936 of SEQ ID NO: 1884364
aucggauugcuauaauagu

SEQ ID NO: 2260127 - RNA, 19 nt, Artificial Sequence
  Description of Artificial Sequence: Synthetic oligonucleotide
  Antisense strand to SEQ ID NO: 2260126
acuauuauagcaauccgau

SEQ ID NO: 2260128 - RNA, 19 nt, Artificial Sequence
  Description of Artificial Sequence: Synthetic oligonucleotide
  Sense strand starting at position 2960 of SEQ ID NO: 1884364
uaucuucuaugguuugaag

SEQ ID NO: 2260129 - RNA, 19 nt, Artificial Sequence
  Description of Artificial Sequence: Synthetic oligonucleotide
  Antisense strand to SEQ ID NO: 2260128
cuucaaaccauagaagaua

SEQ ID NO: 2260130 - RNA, 19 nt, Artificial Sequence
  Description of Artificial Sequence: Synthetic oligonucleotide
  Sense strand starting at position 2975 of SEQ ID NO: 1884364
gaagguuuguccucuccaa

SEQ ID NO: 2260131 - RNA, 19 nt, Artificial Sequence
  Description of Artificial Sequence: Synthetic oligonucleotide
  Antisense strand to SEQ ID NO: 2260130
uuggagaggacaaaccuuc

SEQ ID NO: 2260132 - RNA, 19 nt, Artificial Sequence
  Description of Artificial Sequence: Synthetic oligonucleotide
  Sense strand starting at position 3050 of SEQ ID NO: 1884364
uuaguauugagaggugauu

SEQ ID NO: 2260133 - RNA, 19 nt, Artificial Sequence
  Description of Artificial Sequence: Synthetic oligonucleotide
  Antisense strand to SEQ ID NO: 2260132
aaucaccucucaauacuaa

SEQ ID NO: 2260134 - RNA, 19 nt, Artificial Sequence
  Description of Artificial Sequence: Synthetic oligonucleotide
  Sense strand starting at position 3052 of SEQ ID NO: 1884364
aguauugagaggugauuag

SEQ ID NO: 2260135 - RNA, 19 nt, Artificial Sequence
  Description of Artificial Sequence: Synthetic oligonucleotide
  Antisense strand to SEQ ID NO: 2260134
cuaaucaccucucaauacu

SEQ ID NO: 2260136 - RNA, 19 nt, Artificial Sequence
  Description of Artificial Sequence: Synthetic oligonucleotide
  Sense strand starting at position 3106 of SEQ ID NO: 1884364
gcuguuaugaaagguugaa

SEQ ID NO: 2260137 - RNA, 19 nt, Artificial Sequence
  Description of Artificial Sequence: Synthetic oligonucleotide
  Antisense strand to SEQ ID NO: 2260136
uucaaccuuucauaacagc

SEQ ID NO: 2260138 - RNA, 19 nt, Artificial Sequence
  Description of Artificial Sequence: Synthetic oligonucleotide
  Sense strand starting at position 3264 of SEQ ID NO: 1884364
gucucaagugcucugcuau

SEQ ID NO: 2260139 - RNA, 19 nt, Artificial Sequence
  Description of Artificial Sequence: Synthetic oligonucleotide
  Antisense strand to SEQ ID NO: 2260138
auagcagagcacuugagac

SEQ ID NO: 2260140 - RNA, 19 nt, Artificial Sequence
  Description of Artificial Sequence: Synthetic oligonucleotide
  Sense strand starting at position 3564 of SEQ ID NO: 1884364
guuuaagaccuuugcaaac

SEQ ID NO: 2260141 - RNA, 19 nt, Artificial Sequence
  Description of Artificial Sequence: Synthetic oligonucleotide
  Antisense strand to SEQ ID NO: 2260140
guuugcaaaggucuuaaac

SEQ ID NO: 2260142 - RNA, 19 nt, Artificial Sequence
  Description of Artificial Sequence: Synthetic oligonucleotide
  Sense strand starting at position 46 of SEQ ID NO: 1884365
agagccgauuccugaguca

SEQ ID NO: 2260143 - RNA, 19 nt, Artificial Sequence
  Description of Artificial Sequence: Synthetic oligonucleotide
  Antisense strand to SEQ ID NO: 2260142
ugacucaggaaucggcucu

SEQ ID NO: 2260144 - RNA, 19 nt, Artificial Sequence
  Description of Artificial Sequence: Synthetic oligonucleotide
  Sense strand starting at position 49 of SEQ ID NO: 1884365
gccgauuccugagucaggu

SEQ ID NO: 2260145 - RNA, 19 nt, Artificial Sequence
  Description of Artificial Sequence: Synthetic oligonucleotide
  Antisense strand to SEQ ID NO: 2260144
accugacucaggaaucggc

SEQ ID NO: 2260146 - RNA, 19 nt, Artificial Sequence
  Description of Artificial Sequence: Synthetic oligonucleotide
  Sense strand starting at position 76 of SEQ ID NO: 1884365
gguuguaaagugcagcaua

SEQ ID NO: 2260147 - RNA, 19 nt, Artificial Sequence
  Description of Artificial Sequence: Synthetic oligonucleotide
  Antisense strand to SEQ ID NO: 2260146
uaugcugcacuuuacaacc

SEQ ID NO: 2260148 - RNA, 19 nt, Artificial Sequence
  Description of Artificial Sequence: Synthetic oligonucleotide
  Sense strand starting at position 348 of SEQ ID NO: 1884365
uaagguguucuguagaaga

SEQ ID NO: 2260149 - RNA, 19 nt, Artificial Sequence
  Description of Artificial Sequence: Synthetic oligonucleotide
  Antisense strand to SEQ ID NO: 2260148
ucuucuacagaacaccuua

SEQ ID NO: 2260150 - RNA, 19 nt, Artificial Sequence
  Description of Artificial Sequence: Synthetic oligonucleotide
  Sense strand starting at position 350 of SEQ ID NO: 1884365
agguguucuguagaagaca

SEQ ID NO: 2260151 - RNA, 19 nt, Artificial Sequence
  Description of Artificial Sequence: Synthetic oligonucleotide
  Antisense strand to SEQ ID NO: 2260150
ugucuucuacagaacaccu

SEQ ID NO: 2260152 - RNA, 19 nt, Artificial Sequence
  Description of Artificial Sequence: Synthetic oligonucleotide
  Sense strand starting at position 614 of SEQ ID NO: 1884365
gggagaacguguugguugu

SEQ ID NO: 2260153 - RNA, 19 nt, Artificial Sequence
  Description of Artificial Sequence: Synthetic oligonucleotide
  Antisense strand to SEQ ID NO: 2260152
acaaccaacacguucuccc

SEQ ID NO: 2260154 - RNA, 19 nt, Artificial Sequence
  Description of Artificial Sequence: Synthetic oligonucleotide
  Sense strand starting at position 1161 of SEQ ID NO: 1884365
ccggcauaggccugagaaa

SEQ ID NO: 2260155 - RNA, 19 nt, Artificial Sequence
  Description of Artificial Sequence: Synthetic oligonucleotide
  Antisense strand to SEQ ID NO: 2260154
uuucucaggccuaugccgg

SEQ ID NO: 2260156 - RNA, 19 nt, Artificial Sequence
  Description of Artificial Sequence: Synthetic oligonucleotide
  Sense strand starting at position 1196 of SEQ ID NO: 1884365
cccugugccugcuacuaaa

SEQ ID NO: 2260157 - RNA, 19 nt, Artificial Sequence
  Description of Artificial Sequence: Synthetic oligonucleotide
  Antisense strand to SEQ ID NO: 2260156
uuuaguagcaggcacaggg

SEQ ID NO: 2260158 - RNA, 19 nt, Artificial Sequence
  Description of Artificial Sequence: Synthetic oligonucleotide
  Sense strand starting at position 1213 of SEQ ID NO: 1884365
aaugaauugcgguggguga

SEQ ID NO: 2260159 - RNA, 19 nt, Artificial Sequence
  Description of Artificial Sequence: Synthetic oligonucleotide
  Antisense strand to SEQ ID NO: 2260158
ucacccaccgcaauucauu

SEQ ID NO: 2260160 - RNA, 19 nt, Artificial Sequence
  Description of Artificial Sequence: Synthetic oligonucleotide
  Sense strand starting at position 1266 of SEQ ID NO: 1884365
cugccaugucccugucuga

SEQ ID NO: 2260161 - RNA, 19 nt, Artificial Sequence
  Description of Artificial Sequence: Synthetic oligonucleotide
  Antisense strand to SEQ ID NO: 2260160
ucagacagggacauggcag

SEQ ID NO: 2260162 - RNA, 19 nt, Artificial Sequence
  Description of Artificial Sequence: Synthetic oligonucleotide
  Sense strand starting at position 1415 of SEQ ID NO: 1884365
ccgagaagaugucaccuuu

SEQ ID NO: 2260163 - RNA, 19 nt, Artificial Sequence
  Description of Artificial Sequence: Synthetic oligonucleotide
  Antisense strand to SEQ ID NO: 2260162
aaaggugacaucuucucgg

SEQ ID NO: 2260164 - RNA, 19 nt, Artificial Sequence
  Description of Artificial Sequence: Synthetic oligonucleotide
  Sense strand starting at position 1421 of SEQ ID NO: 1884365
agaugucaccuuugcuaac

SEQ ID NO: 2260165 - RNA, 19 nt, Artificial Sequence
  Description of Artificial Sequence: Synthetic oligonucleotide
  Antisense strand to SEQ ID NO: 2260164
guuagcaaaggugacaucu

SEQ ID NO: 2260166 - RNA, 19 nt, Artificial Sequence
  Description of Artificial Sequence: Synthetic oligonucleotide
  Sense strand starting at position 1853 of SEQ ID NO: 1884365
cgucaucacuccugccaga

SEQ ID NO: 2260167 - RNA, 19 nt, Artificial Sequence
  Description of Artificial Sequence: Synthetic oligonucleotide
  Antisense strand to SEQ ID NO: 2260166
ucuggcaggagugaugacg

SEQ ID NO: 2260168 - RNA, 19 nt, Artificial Sequence
  Description of Artificial Sequence: Synthetic oligonucleotide
  Sense strand starting at position 2560 of SEQ ID NO: 1884365
gcgguuuccgcaggacaga

SEQ ID NO: 2260169 - RNA, 19 nt, Artificial Sequence
  Description of Artificial Sequence: Synthetic oligonucleotide
  Antisense strand to SEQ ID NO: 2260168
ucuguccugcggaaaccgc

SEQ ID NO: 2260170 - RNA, 19 nt, Artificial Sequence
  Description of Artificial Sequence: Synthetic oligonucleotide
  Sense strand starting at position 2617 of SEQ ID NO: 1884365
ccacuuuccugucugaaga

SEQ ID NO: 2260171 - RNA, 19 nt, Artificial Sequence
  Description of Artificial Sequence: Synthetic oligonucleotide
  Antisense strand to SEQ ID NO: 2260170
ucuucagacaggaaagugg

SEQ ID NO: 2260172 - RNA, 19 nt, Artificial Sequence
  Description of Artificial Sequence: Synthetic oligonucleotide
  Sense strand starting at position 2857 of SEQ ID NO: 1884365
ucaagucucgagugucaaa

SEQ ID NO: 2260173 - RNA, 19 nt, Artificial Sequence
  Description of Artificial Sequence: Synthetic oligonucleotide
  Antisense strand to SEQ ID NO: 2260172
uuugacacucgagacuuga

SEQ ID NO: 2260174 - RNA, 19 nt, Artificial Sequence
  Description of Artificial Sequence: Synthetic oligonucleotide
  Sense strand starting at position 3039 of SEQ ID NO: 1884365
cgggcuuugucgugcguga

SEQ ID NO: 2260175 - RNA, 19 nt, Artificial Sequence
  Description of Artificial Sequence: Synthetic oligonucleotide
  Antisense strand to SEQ ID NO: 2260174
ucacgcacgacaaagcccg

SEQ ID NO: 2260176 - RNA, 19 nt, Artificial Sequence
  Description of Artificial Sequence: Synthetic oligonucleotide
  Sense strand starting at position 3040 of SEQ ID NO: 1884365
gggcuuugucgugcgugaa

SEQ ID NO: 2260177 - RNA, 19 nt, Artificial Sequence
  Description of Artificial Sequence: Synthetic oligonucleotide
  Antisense strand to SEQ ID NO: 2260176
uucacgcacgacaaagccc

SEQ ID NO: 2260178 - RNA, 19 nt, Artificial Sequence
  Description of Artificial Sequence: Synthetic oligonucleotide
  Sense strand starting at position 3041 of SEQ ID NO: 1884365
ggcuuugucgugcgugaac

SEQ ID NO: 2260179 - RNA, 19 nt, Artificial Sequence
  Description of Artificial Sequence: Synthetic oligonucleotide
  Antisense strand to SEQ ID NO: 2260178
guucacgcacgacaaagcc

SEQ ID NO: 2260180 - RNA, 19 nt, Artificial Sequence
  Description of Artificial Sequence: Synthetic oligonucleotide
  Sense strand starting at position 3186 of SEQ ID NO: 1884365
uucagacugugaugugagu

SEQ ID NO: 2260181 - RNA, 19 nt, Artificial Sequence
  Description of Artificial Sequence: Synthetic oligonucleotide
  Antisense strand to SEQ ID NO: 2260180
acucacaucacagucugaa

SEQ ID NO: 2260182 - RNA, 19 nt, Artificial Sequence
  Description of Artificial Sequence: Synthetic oligonucleotide
  Sense strand starting at position 3188 of SEQ ID NO: 1884365
cagacugugaugugaguca

SEQ ID NO: 2260183 - RNA, 19 nt, Artificial Sequence
  Description of Artificial Sequence: Synthetic oligonucleotide
  Antisense strand to SEQ ID NO: 2260182
ugacucacaucacagucug

SEQ ID NO: 2260184 - RNA, 19 nt, Artificial Sequence
  Description of Artificial Sequence: Synthetic oligonucleotide
  Sense strand starting at position 3255 of SEQ ID NO: 1884365
ugugccaucgcugggagau

SEQ ID NO: 2260185 - RNA, 19 nt, Artificial Sequence
  Description of Artificial Sequence: Synthetic oligonucleotide
  Antisense strand to SEQ ID NO: 2260184
aucucccagcgauggcaca

SEQ ID NO: 2260186 - RNA, 19 nt, Artificial Sequence
  Description of Artificial Sequence: Synthetic oligonucleotide
  Sense strand starting at position 3315 of SEQ ID NO: 1884365
aggaaauacuccggaaaua

SEQ ID NO: 2260187 - RNA, 19 nt, Artificial Sequence
  Description of Artificial Sequence: Synthetic oligonucleotide
  Antisense strand to SEQ ID NO: 2260186
uauuuccggaguauuuccu

SEQ ID NO: 2260188 - RNA, 19 nt, Artificial Sequence
  Description of Artificial Sequence: Synthetic oligonucleotide
  Sense strand starting at position 3331 of SEQ ID NO: 1884365
auacaaaugcuccaggcaa

SEQ ID NO: 2260189 - RNA, 19 nt, Artificial Sequence
  Description of Artificial Sequence: Synthetic oligonucleotide
  Antisense strand to SEQ ID NO: 2260188
uugccuggagcauuuguau

SEQ ID NO: 2260190 - RNA, 19 nt, Artificial Sequence
  Description of Artificial Sequence: Synthetic oligonucleotide
  Sense strand starting at position 3495 of SEQ ID NO: 1884365
cgugaugaucccugagcgu

SEQ ID NO: 2260191 - RNA, 19 nt, Artificial Sequence
  Description of Artificial Sequence: Synthetic oligonucleotide
  Antisense strand to SEQ ID NO: 2260190
acgcucagggaucaucacg

SEQ ID NO: 2260192 - RNA, 19 nt, Artificial Sequence
  Description of Artificial Sequence: Synthetic oligonucleotide
  Sense strand starting at position 3683 of SEQ ID NO: 1884365
ucuuaagcuccugaauuag

SEQ ID NO: 2260193 - RNA, 19 nt, Artificial Sequence
  Description of Artificial Sequence: Synthetic oligonucleotide
  Antisense strand to SEQ ID NO: 2260192
cuaauucaggagcuuaaga

SEQ ID NO: 2260194 - RNA, 19 nt, Artificial Sequence
  Description of Artificial Sequence: Synthetic oligonucleotide
  Sense strand starting at position 3710 of SEQ ID NO: 1884365
accugcauugaaugagaau

SEQ ID NO: 2260195 - RNA, 19 nt, Artificial Sequence
  Description of Artificial Sequence: Synthetic oligonucleotide
  Antisense strand to SEQ ID NO: 2260194
auucucauucaaugcaggu

SEQ ID NO: 2260196 - RNA, 19 nt, Artificial Sequence
  Description of Artificial Sequence: Synthetic oligonucleotide
  Sense strand starting at position 3754 of SEQ ID NO: 1884365
aggagaucagaguguucac

SEQ ID NO: 2260197 - RNA, 19 nt, Artificial Sequence
  Description of Artificial Sequence: Synthetic oligonucleotide
  Antisense strand to SEQ ID NO: 2260196
gugaacacucugaucuccu

SEQ ID NO: 2260198 - RNA, 19 nt, Artificial Sequence
  Description of Artificial Sequence: Synthetic oligonucleotide
  Sense strand starting at position 3836 of SEQ ID NO: 1884365
ggagcugugcucugggaua

SEQ ID NO: 2260199 - RNA, 19 nt, Artificial Sequence
  Description of Artificial Sequence: Synthetic oligonucleotide
  Antisense strand to SEQ ID NO: 2260198
uaucccagagcacagcucc

SEQ ID NO: 2260200 - RNA, 19 nt, Artificial Sequence
  Description of Artificial Sequence: Synthetic oligonucleotide
  Sense strand starting at position 3838 of SEQ ID NO: 1884365
agcugugcucugggauaga

SEQ ID NO: 2260201 - RNA, 19 nt, Artificial Sequence
  Description of Artificial Sequence: Synthetic oligonucleotide
  Antisense strand to SEQ ID NO: 2260200
ucuaucccagagcacagcu

SEQ ID NO: 2260202 - RNA, 19 nt, Artificial Sequence
  Description of Artificial Sequence: Synthetic oligonucleotide
  Sense strand starting at position 3841 of SEQ ID NO: 1884365
ugugcucugggauagaugu

SEQ ID NO: 2260203 - RNA, 19 nt, Artificial Sequence
  Description of Artificial Sequence: Synthetic oligonucleotide
  Antisense strand to SEQ ID NO: 2260202
acaucuaucccagagcaca

SEQ ID NO: 2260204 - RNA, 19 nt, Artificial Sequence
  Description of Artificial Sequence: Synthetic oligonucleotide
  Sense strand starting at position 3879 of SEQ ID NO: 1884365
uggaacacacugugaucau

SEQ ID NO: 2260205 - RNA, 19 nt, Artificial Sequence
  Description of Artificial Sequence: Synthetic oligonucleotide
  Antisense strand to SEQ ID NO: 2260204
augaucacaguguguucca

SEQ ID NO: 2260206 - RNA, 19 nt, Artificial Sequence
  Description of Artificial Sequence: Synthetic oligonucleotide
  Sense strand starting at position 3901 of SEQ ID NO: 1884365
auaaguaggcgugacuuga

SEQ ID NO: 2260207 - RNA, 19 nt, Artificial Sequence
  Description of Artificial Sequence: Synthetic oligonucleotide
  Antisense strand to SEQ ID NO: 2260206
ucaagucacgccuacuuau

SEQ ID NO: 2260208 - RNA, 19 nt, Artificial Sequence
  Description of Artificial Sequence: Synthetic oligonucleotide
  Sense strand starting at position 3974 of SEQ ID NO: 1884365
uggauaaugcccgaccuga

SEQ ID NO: 2260209 - RNA, 19 nt, Artificial Sequence
  Description of Artificial Sequence: Synthetic oligonucleotide
  Antisense strand to SEQ ID NO: 2260208
ucaggucgggcauuaucca

SEQ ID NO: 2260210 - RNA, 19 nt, Artificial Sequence
  Description of Artificial Sequence: Synthetic oligonucleotide
  Sense strand starting at position 12 of SEQ ID NO: 1884366
gagcuauauccugaguuuc

SEQ ID NO: 2260211 - RNA, 19 nt, Artificial Sequence
  Description of Artificial Sequence: Synthetic oligonucleotide
  Antisense strand to SEQ ID NO: 2260210
gaaacucaggauauagcuc

SEQ ID NO: 2260212 - RNA, 19 nt, Artificial Sequence
  Description of Artificial Sequence: Synthetic oligonucleotide
  Sense strand starting at position 152 of SEQ ID NO: 1884366
ugucuuauucuagagacga

SEQ ID NO: 2260213 - RNA, 19 nt, Artificial Sequence
  Description of Artificial Sequence: Synthetic oligonucleotide
  Antisense strand to SEQ ID NO: 2260212
ucgucucuagaauaagaca

SEQ ID NO: 2260214 - RNA, 19 nt, Artificial Sequence
  Description of Artificial Sequence: Synthetic oligonucleotide
  Sense strand starting at position 230 of SEQ ID NO: 1884366
gcaggauugcaagaaagua

SEQ ID NO: 2260215 - RNA, 19 nt, Artificial Sequence
  Description of Artificial Sequence: Synthetic oligonucleotide
  Antisense strand to SEQ ID NO: 2260214
uacuuucuugcaauccugc

SEQ ID NO: 2260216 - RNA, 19 nt, Artificial Sequence
  Description of Artificial Sequence: Synthetic oligonucleotide
  Sense strand starting at position 238 of SEQ ID NO: 1884366
gcaagaaaguaucuucucu

SEQ ID NO: 2260217 - RNA, 19 nt, Artificial Sequence
  Description of Artificial Sequence: Synthetic oligonucleotide
  Antisense strand to SEQ ID NO: 2260216
agagaagauacuuucuugc

SEQ ID NO: 2260218 - RNA, 19 nt, Artificial Sequence
  Description of Artificial Sequence: Synthetic oligonucleotide
  Sense strand starting at position 357 of SEQ ID NO: 1884366
ugauauuucuuagagagca

SEQ ID NO: 2260219 - RNA, 19 nt, Artificial Sequence
  Description of Artificial Sequence: Synthetic oligonucleotide
  Antisense strand to SEQ ID NO: 2260218
ugcucucuaagaaauauca

SEQ ID NO: 2260220 - RNA, 19 nt, Artificial Sequence
  Description of Artificial Sequence: Synthetic oligonucleotide
  Sense strand starting at position 563 of SEQ ID NO: 1884366
auuuguuaguuacugccaa

SEQ ID NO: 2260221 - RNA, 19 nt, Artificial Sequence
  Description of Artificial Sequence: Synthetic oligonucleotide
  Antisense strand to SEQ ID NO: 2260220
uuggcaguaacuaacaaau

SEQ ID NO: 2260222 - RNA, 19 nt, Artificial Sequence
  Description of Artificial Sequence: Synthetic oligonucleotide
  Sense strand starting at position 578 of SEQ ID NO: 1884366
ccaagaagccuguaucugu

SEQ ID NO: 2260223 - RNA, 19 nt, Artificial Sequence
  Description of Artificial Sequence: Synthetic oligonucleotide
  Antisense strand to SEQ ID NO: 2260222
acagauacaggcuucuugg

SEQ ID NO: 2260224 - RNA, 19 nt, Artificial Sequence
  Description of Artificial Sequence: Synthetic oligonucleotide
  Sense strand starting at position 775 of SEQ ID NO: 1884366
ucaccauuaugggcuagau

SEQ ID NO: 2260225 - RNA, 19 nt, Artificial Sequence
  Description of Artificial Sequence: Synthetic oligonucleotide
  Antisense strand to SEQ ID NO: 2260224
aucuagcccauaaugguga

SEQ ID NO: 2260226 - RNA, 19 nt, Artificial Sequence
  Description of Artificial Sequence: Synthetic oligonucleotide
  Sense strand starting at position 1066 of SEQ ID NO: 1884366
ucaucauucggagggaaac

SEQ ID NO: 2260227 - RNA, 19 nt, Artificial Sequence
  Description of Artificial Sequence: Synthetic oligonucleotide
  Antisense strand to SEQ ID NO: 2260226
guuucccuccgaaugauga

SEQ ID NO: 2260228 - RNA, 19 nt, Artificial Sequence
  Description of Artificial Sequence: Synthetic oligonucleotide
  Sense strand starting at position 1291 of SEQ ID NO: 1884366
agagcuaucaaaugguaag

SEQ ID NO: 2260229 - RNA, 19 nt, Artificial Sequence
  Description of Artificial Sequence: Synthetic oligonucleotide
  Antisense strand to SEQ ID NO: 2260228
cuuaccauuugauagcucu

SEQ ID NO: 2260230 - RNA, 19 nt, Artificial Sequence
  Description of Artificial Sequence: Synthetic oligonucleotide
  Sense strand starting at position 1454 of SEQ ID NO: 1884366
guacccauagugcaaauau

SEQ ID NO: 2260231 - RNA, 19 nt, Artificial Sequence
  Description of Artificial Sequence: Synthetic oligonucleotide
  Antisense strand to SEQ ID NO: 2260230
auauuugcacuauggguac

SEQ ID NO: 2260232 - RNA, 19 nt, Artificial Sequence
  Description of Artificial Sequence: Synthetic oligonucleotide
  Sense strand starting at position 1462 of SEQ ID NO: 1884366
agugcaaauaucuaagggu

SEQ ID NO: 2260233 - RNA, 19 nt, Artificial Sequence
  Description of Artificial Sequence: Synthetic oligonucleotide
  Antisense strand to SEQ ID NO: 2260232
acccuuagauauuugcacu

SEQ ID NO: 2260234 - RNA, 19 nt, Artificial Sequence
  Description of Artificial Sequence: Synthetic oligonucleotide
  Sense strand starting at position 1483 of SEQ ID NO: 1884366
agaagaaagcgugagugua

SEQ ID NO: 2260235 - RNA, 19 nt, Artificial Sequence
  Description of Artificial Sequence: Synthetic oligonucleotide
  Antisense strand to SEQ ID NO: 2260234
uacacucacgcuuucuucu

SEQ ID NO: 2260236 - RNA, 19 nt, Artificial Sequence
  Description of Artificial Sequence: Synthetic oligonucleotide
  Sense strand starting at position 1555 of SEQ ID NO: 1884366
ggucacucaguguagcaaa

SEQ ID NO: 2260237 - RNA, 19 nt, Artificial Sequence
  Description of Artificial Sequence: Synthetic oligonucleotide
  Antisense strand to SEQ ID NO: 2260236
uuugcuacacugagugacc

SEQ ID NO: 2260238 - RNA, 19 nt, Artificial Sequence
  Description of Artificial Sequence: Synthetic oligonucleotide
  Sense strand starting at position 1583 of SEQ ID NO: 1884366
gaggucauccgugagcaua

SEQ ID NO: 2260239 - RNA, 19 nt, Artificial Sequence
  Description of Artificial Sequence: Synthetic oligonucleotide
  Antisense strand to SEQ ID NO: 2260238
uaugcucacggaugaccuc

SEQ ID NO: 2260240 - RNA, 19 nt, Artificial Sequence
  Description of Artificial Sequence: Synthetic oligonucleotide
  Sense strand starting at position 1670 of SEQ ID NO: 1884366
acagucagagcccagauau

SEQ ID NO: 2260241 - RNA, 19 nt, Artificial Sequence
  Description of Artificial Sequence: Synthetic oligonucleotide
  Antisense strand to SEQ ID NO: 2260240
auaucugggcucugacugu

SEQ ID NO: 2260242 - RNA, 19 nt, Artificial Sequence
  Description of Artificial Sequence: Synthetic oligonucleotide
  Sense strand starting at position 1769 of SEQ ID NO: 1884366
aaagucagacuauguaaga

SEQ ID NO: 2260243 - RNA, 19 nt, Artificial Sequence
  Description of Artificial Sequence: Synthetic oligonucleotide
  Antisense strand to SEQ ID NO: 2260242
ucuuacauagucugacuuu

SEQ ID NO: 2260244 - RNA, 19 nt, Artificial Sequence
  Description of Artificial Sequence: Synthetic oligonucleotide
  Sense strand starting at position 1963 of SEQ ID NO: 1884366
gaguuuccuggugaucaca

SEQ ID NO: 2260245 - RNA, 19 nt, Artificial Sequence
  Description of Artificial Sequence: Synthetic oligonucleotide
  Antisense strand to SEQ ID NO: 2260244
ugugaucaccaggaaacuc

SEQ ID NO: 2260246 - RNA, 19 nt, Artificial Sequence
  Description of Artificial Sequence: Synthetic oligonucleotide
  Sense strand starting at position 1966 of SEQ ID NO: 1884366
uuuccuggugaucacagau

SEQ ID NO: 2260247 - RNA, 19 nt, Artificial Sequence
  Description of Artificial Sequence: Synthetic oligonucleotide
  Antisense strand to SEQ ID NO: 2260246
aucugugaucaccaggaaa

SEQ ID NO: 2260248 - RNA, 19 nt, Artificial Sequence
  Description of Artificial Sequence: Synthetic oligonucleotide
  Sense strand starting at position 2112 of SEQ ID NO: 1884366
gaaucuauuggucaagggu

SEQ ID NO: 2260249 - RNA, 19 nt, Artificial Sequence
  Description of Artificial Sequence: Synthetic oligonucleotide
  Antisense strand to SEQ ID NO: 2260248
acccuugaccaauagauuc

SEQ ID NO: 2260250 - RNA, 19 nt, Artificial Sequence
  Description of Artificial Sequence: Synthetic oligonucleotide
  Sense strand starting at position 2297 of SEQ ID NO: 1884366
gugugcaguuuauuucuca

SEQ ID NO: 2260251 - RNA, 19 nt, Artificial Sequence
  Description of Artificial Sequence: Synthetic oligonucleotide
  Antisense strand to SEQ ID NO: 2260250
ugagaaauaaacugcacac

SEQ ID NO: 2260252 - RNA, 19 nt, Artificial Sequence
  Description of Artificial Sequence: Synthetic oligonucleotide
  Sense strand starting at position 2298 of SEQ ID NO: 1884366
ugugcaguuuauuucucaa

SEQ ID NO: 2260253 - RNA, 19 nt, Artificial Sequence
  Description of Artificial Sequence: Synthetic oligonucleotide
  Antisense strand to SEQ ID NO: 2260252
uugagaaauaaacugcaca

SEQ ID NO: 2260254 - RNA, 19 nt, Artificial Sequence
  Description of Artificial Sequence: Synthetic oligonucleotide
  Sense strand starting at position 2333 of SEQ ID NO: 1884366
cgcuaauaaccugaaugcu

SEQ ID NO: 2260255 - RNA, 19 nt, Artificial Sequence
  Description of Artificial Sequence: Synthetic oligonucleotide
  Antisense strand to SEQ ID NO: 2260254
agcauucagguuauuagcg

SEQ ID NO: 2260256 - RNA, 19 nt, Artificial Sequence
  Description of Artificial Sequence: Synthetic oligonucleotide
  Sense strand starting at position 2392 of SEQ ID NO: 1884366
acgaauaucuuagccauca

SEQ ID NO: 2260257 - RNA, 19 nt, Artificial Sequence
  Description of Artificial Sequence: Synthetic oligonucleotide
  Antisense strand to SEQ ID NO: 2260256
ugauggcuaagauauucgu

SEQ ID NO: 2260258 - RNA, 19 nt, Artificial Sequence
  Description of Artificial Sequence: Synthetic oligonucleotide
  Sense strand starting at position 2393 of SEQ ID NO: 1884366
cgaauaucuuagccaucaa

SEQ ID NO: 2260259 - RNA, 19 nt, Artificial Sequence
  Description of Artificial Sequence: Synthetic oligonucleotide
  Antisense strand to SEQ ID NO: 2260258
uugauggcuaagauauucg

SEQ ID NO: 2260260 - RNA, 19 nt, Artificial Sequence
  Description of Artificial Sequence: Synthetic oligonucleotide
  Sense strand starting at position 2405 of SEQ ID NO: 1884366
ccaucaauuccuggaucag

SEQ ID NO: 2260261 - RNA, 19 nt, Artificial Sequence
  Description of Artificial Sequence: Synthetic oligonucleotide
  Antisense strand to SEQ ID NO: 2260260
cugauccaggaauugaugg

SEQ ID NO: 2260262 - RNA, 19 nt, Artificial Sequence
  Description of Artificial Sequence: Synthetic oligonucleotide
  Sense strand starting at position 2416 of SEQ ID NO: 1884366
uggaucaggaguugugaca

SEQ ID NO: 2260263 - RNA, 19 nt, Artificial Sequence
  Description of Artificial Sequence: Synthetic oligonucleotide
  Antisense strand to SEQ ID NO: 2260262
ugucacaacuccugaucca

SEQ ID NO: 2260264 - RNA, 19 nt, Artificial Sequence
  Description of Artificial Sequence: Synthetic oligonucleotide
  Sense strand starting at position 2464 of SEQ ID NO: 1884366
ccaggcuuuauguggaaga

SEQ ID NO: 2260265 - RNA, 19 nt, Artificial Sequence
  Description of Artificial Sequence: Synthetic oligonucleotide
  Antisense strand to SEQ ID NO: 2260264
ucuuccacauaaagccugg

SEQ ID NO: 2260266 - RNA, 19 nt, Artificial Sequence
  Description of Artificial Sequence: Synthetic oligonucleotide
  Sense strand starting at position 2999 of SEQ ID NO: 1884366
uccauuuaguagucagugu

SEQ ID NO: 2260267 - RNA, 19 nt, Artificial Sequence
  Description of Artificial Sequence: Synthetic oligonucleotide
  Antisense strand to SEQ ID NO: 2260266
acacugacuacuaaaugga

SEQ ID NO: 2260268 - RNA, 19 nt, Artificial Sequence
  Description of Artificial Sequence: Synthetic oligonucleotide
  Sense strand starting at position 3053 of SEQ ID NO: 1884366
ugaacaauaguccauguca

SEQ ID NO: 2260269 - RNA, 19 nt, Artificial Sequence
  Description of Artificial Sequence: Synthetic oligonucleotide
  Antisense strand to SEQ ID NO: 2260268
ugacauggacuauuguuca

SEQ ID NO: 2260270 - RNA, 19 nt, Artificial Sequence
  Description of Artificial Sequence: Synthetic oligonucleotide
  Sense strand starting at position 3177 of SEQ ID NO: 1884366
ggcauuaggucauuugugu

SEQ ID NO: 2260271 - RNA, 19 nt, Artificial Sequence
  Description of Artificial Sequence: Synthetic oligonucleotide
  Antisense strand to SEQ ID NO: 2260270
acacaaaugaccuaaugcc

SEQ ID NO: 2260272 - RNA, 19 nt, Artificial Sequence
  Description of Artificial Sequence: Synthetic oligonucleotide
  Sense strand starting at position 3185 of SEQ ID NO: 1884366
gucauuugugucuggcaca

SEQ ID NO: 2260273 - RNA, 19 nt, Artificial Sequence
  Description of Artificial Sequence: Synthetic oligonucleotide
  Antisense strand to SEQ ID NO: 2260272
ugugccagacacaaaugac

SEQ ID NO: 2260274 - RNA, 19 nt, Artificial Sequence
  Description of Artificial Sequence: Synthetic oligonucleotide
  Sense strand starting at position 3203 of SEQ ID NO: 1884366
aggcuugaucuauagucua

SEQ ID NO: 2260275 - RNA, 19 nt, Artificial Sequence
  Description of Artificial Sequence: Synthetic oligonucleotide
  Antisense strand to SEQ ID NO: 2260274
uagacuauagaucaagccu

SEQ ID NO: 2260276 - RNA, 19 nt, Artificial Sequence
  Description of Artificial Sequence: Synthetic oligonucleotide
  Sense strand starting at position 3206 of SEQ ID NO: 1884366
cuugaucuauagucuaaug

SEQ ID NO: 2260277 - RNA, 19 nt, Artificial Sequence
  Description of Artificial Sequence: Synthetic oligonucleotide
  Antisense strand to SEQ ID NO: 2260276
cauuagacuauagaucaag

SEQ ID NO: 2260278 - RNA, 19 nt, Artificial Sequence
  Description of Artificial Sequence: Synthetic oligonucleotide
  Sense strand starting at position 3208 of SEQ ID NO: 1884366
ugaucuauagucuaaugcu

SEQ ID NO: 2260279 - RNA, 19 nt, Artificial Sequence
  Description of Artificial Sequence: Synthetic oligonucleotide
  Antisense strand to SEQ ID NO: 2260278
agcauuagacuauagauca

SEQ ID NO: 2260280 - RNA, 19 nt, Artificial Sequence
  Description of Artificial Sequence: Synthetic oligonucleotide
  Sense strand starting at position 3558 of SEQ ID NO: 1884366
cugaauuucugauauuaga

SEQ ID NO: 2260281 - RNA, 19 nt, Artificial Sequence
  Description of Artificial Sequence: Synthetic oligonucleotide
  Antisense strand to SEQ ID NO: 2260280
ucuaauaucagaaauucag

SEQ ID NO: 2260282 - RNA, 19 nt, Artificial Sequence
  Description of Artificial Sequence: Synthetic oligonucleotide
  Sense strand starting at position 3587 of SEQ ID NO: 1884366
uuuagucuacuugauauag

SEQ ID NO: 2260283 - RNA, 19 nt, Artificial Sequence
  Description of Artificial Sequence: Synthetic oligonucleotide
  Antisense strand to SEQ ID NO: 2260282
cuauaucaaguagacuaaa

SEQ ID NO: 2260284 - RNA, 19 nt, Artificial Sequence
  Description of Artificial Sequence: Synthetic oligonucleotide
  Sense strand starting at position 3694 of SEQ ID NO: 1884366
agcagagaucgaugauaug

SEQ ID NO: 2260285 - RNA, 19 nt, Artificial Sequence
  Description of Artificial Sequence: Synthetic oligonucleotide
  Antisense strand to SEQ ID NO: 2260284
cauaucaucgaucucugcu

SEQ ID NO: 2260286 - RNA, 19 nt, Artificial Sequence
  Description of Artificial Sequence: Synthetic oligonucleotide
  Sense strand starting at position 3734 of SEQ ID NO: 1884366
ugacuauaugcaggaaaca

SEQ ID NO: 2260287 - RNA, 19 nt, Artificial Sequence
  Description of Artificial Sequence: Synthetic oligonucleotide
  Antisense strand to SEQ ID NO: 2260286
uguuuccugcauauaguca

SEQ ID NO: 2260288 - RNA, 19 nt, Artificial Sequence
  Description of Artificial Sequence: Synthetic oligonucleotide
  Sense strand starting at position 3858 of SEQ ID NO: 1884366
ucauauccuuagguacaua

SEQ ID NO: 2260289 - RNA, 19 nt, Artificial Sequence
  Description of Artificial Sequence: Synthetic oligonucleotide
  Antisense strand to SEQ ID NO: 2260288
uauguaccuaaggauauga

SEQ ID NO: 2260290 - RNA, 19 nt, Artificial Sequence
  Description of Artificial Sequence: Synthetic oligonucleotide
  Sense strand starting at position 328 of SEQ ID NO: 1884367
guaaguagaugagcauuga

SEQ ID NO: 2260291 - RNA, 19 nt, Artificial Sequence
  Description of Artificial Sequence: Synthetic oligonucleotide
  Antisense strand to SEQ ID NO: 2260290
ucaaugcucaucuacuuac

SEQ ID NO: 2260292 - RNA, 19 nt, Artificial Sequence
  Description of Artificial Sequence: Synthetic oligonucleotide
  Sense strand starting at position 392 of SEQ ID NO: 1884367
agagaagggcuauguguau

SEQ ID NO: 2260293 - RNA, 19 nt, Artificial Sequence
  Description of Artificial Sequence: Synthetic oligonucleotide
  Antisense strand to SEQ ID NO: 2260292
auacacauagcccuucucu

SEQ ID NO: 2260294 - RNA, 19 nt, Artificial Sequence
  Description of Artificial Sequence: Synthetic oligonucleotide
  Sense strand starting at position 398 of SEQ ID NO: 1884367
gggcuauguguauagugaa

SEQ ID NO: 2260295 - RNA, 19 nt, Artificial Sequence
  Description of Artificial Sequence: Synthetic oligonucleotide
  Antisense strand to SEQ ID NO: 2260294
uucacuauacacauagccc

SEQ ID NO: 2260296 - RNA, 19 nt, Artificial Sequence
  Description of Artificial Sequence: Synthetic oligonucleotide
  Sense strand starting at position 412 of SEQ ID NO: 1884367
gugaauaucgcagggaaga

SEQ ID NO: 2260297 - RNA, 19 nt, Artificial Sequence
  Description of Artificial Sequence: Synthetic oligonucleotide
  Antisense strand to SEQ ID NO: 2260296
ucuucccugcgauauucac

SEQ ID NO: 2260298 - RNA, 19 nt, Artificial Sequence
  Description of Artificial Sequence: Synthetic oligonucleotide
  Sense strand starting at position 659 of SEQ ID NO: 1884367
auuugucuagcaggaguuu

SEQ ID NO: 2260299 - RNA, 19 nt, Artificial Sequence
  Description of Artificial Sequence: Synthetic oligonucleotide
  Antisense strand to SEQ ID NO: 2260298
aaacuccugcuagacaaau

SEQ ID NO: 2260300 - RNA, 19 nt, Artificial Sequence
  Description of Artificial Sequence: Synthetic oligonucleotide
  Sense strand starting at position 826 of SEQ ID NO: 1884367
acaagaguugcucauuagc

SEQ ID NO: 2260301 - RNA, 19 nt, Artificial Sequence
  Description of Artificial Sequence: Synthetic oligonucleotide
  Antisense strand to SEQ ID NO: 2260300
gcuaaugagcaacucuugu

SEQ ID NO: 2260302 - RNA, 19 nt, Artificial Sequence
  Description of Artificial Sequence: Synthetic oligonucleotide
  Sense strand starting at position 843 of SEQ ID NO: 1884367
gcacgauacggcuaaugaa

SEQ ID NO: 2260303 - RNA, 19 nt, Artificial Sequence
  Description of Artificial Sequence: Synthetic oligonucleotide
  Antisense strand to SEQ ID NO: 2260302
uucauuagccguaucgugc

SEQ ID NO: 2260304 - RNA, 19 nt, Artificial Sequence
  Description of Artificial Sequence: Synthetic oligonucleotide
  Sense strand starting at position 892 of SEQ ID NO: 1884367
ggaguuuaaccuugggaag

SEQ ID NO: 2260305 - RNA, 19 nt, Artificial Sequence
  Description of Artificial Sequence: Synthetic oligonucleotide
  Antisense strand to SEQ ID NO: 2260304
cuucccaagguuaaacucc

SEQ ID NO: 2260306 - RNA, 19 nt, Artificial Sequence
  Description of Artificial Sequence: Synthetic oligonucleotide
  Sense strand starting at position 935 of SEQ ID NO: 1884367
cacugaugccuuugagaag

SEQ ID NO: 2260307 - RNA, 19 nt, Artificial Sequence
  Description of Artificial Sequence: Synthetic oligonucleotide
  Antisense strand to SEQ ID NO: 2260306
cuucucaaaggcaucagug

SEQ ID NO: 2260308 - RNA, 19 nt, Artificial Sequence
  Description of Artificial Sequence: Synthetic oligonucleotide
  Sense strand starting at position 960 of SEQ ID NO: 1884367
cagaaauuagccuaggguu

SEQ ID NO: 2260309 - RNA, 19 nt, Artificial Sequence
  Description of Artificial Sequence: Synthetic oligonucleotide
  Antisense strand to SEQ ID NO: 2260308
aacccuaggcuaauuucug

SEQ ID NO: 2260310 - RNA, 19 nt, Artificial Sequence
  Description of Artificial Sequence: Synthetic oligonucleotide
  Sense strand starting at position 975 of SEQ ID NO: 1884367
gguugcacucacuaagaga

SEQ ID NO: 2260311 - RNA, 19 nt, Artificial Sequence
  Description of Artificial Sequence: Synthetic oligonucleotide
  Antisense strand to SEQ ID NO: 2260310
ucucuuagugagugcaacc

SEQ ID NO: 2260312 - RNA, 19 nt, Artificial Sequence
  Description of Artificial Sequence: Synthetic oligonucleotide
  Sense strand starting at position 1006 of SEQ ID NO: 1884367
aguaaaggcacuuggaauu

SEQ ID NO: 2260313 - RNA, 19 nt, Artificial Sequence
  Description of Artificial Sequence: Synthetic oligonucleotide
  Antisense strand to SEQ ID NO: 2260312
aauuccaagugccuuuacu

SEQ ID NO: 2260314 - RNA, 19 nt, Artificial Sequence
  Description of Artificial Sequence: Synthetic oligonucleotide
  Sense strand starting at position 1144 of SEQ ID NO: 1884367
ccuguuauagaaugaaaug

SEQ ID NO: 2260315 - RNA, 19 nt, Artificial Sequence
  Description of Artificial Sequence: Synthetic oligonucleotide
  Antisense strand to SEQ ID NO: 2260314
cauuucauucuauaacagg

SEQ ID NO: 2260316 - RNA, 19 nt, Artificial Sequence
  Description of Artificial Sequence: Synthetic oligonucleotide
  Sense strand starting at position 1155 of SEQ ID NO: 1884367
augaaaugcuggcuuccaa

SEQ ID NO: 2260317 - RNA, 19 nt, Artificial Sequence
  Description of Artificial Sequence: Synthetic oligonucleotide
  Antisense strand to SEQ ID NO: 2260316
uuggaagccagcauuucau

SEQ ID NO: 2260318 - RNA, 19 nt, Artificial Sequence
  Description of Artificial Sequence: Synthetic oligonucleotide
  Sense strand starting at position 1270 of SEQ ID NO: 1884367
ucugaaauggcauguuuaa

SEQ ID NO: 2260319 - RNA, 19 nt, Artificial Sequence
  Description of Artificial Sequence: Synthetic oligonucleotide
  Antisense strand to SEQ ID NO: 2260318
uuaaacaugccauuucaga

SEQ ID NO: 2260320 - RNA, 19 nt, Artificial Sequence
  Description of Artificial Sequence: Synthetic oligonucleotide
  Sense strand starting at position 1390 of SEQ ID NO: 1884367
guaaacacaccauguuaca

SEQ ID NO: 2260321 - RNA, 19 nt, Artificial Sequence
  Description of Artificial Sequence: Synthetic oligonucleotide
  Antisense strand to SEQ ID NO: 2260320
uguaacaugguguguuuac

SEQ ID NO: 2260322 - RNA, 19 nt, Artificial Sequence
  Description of Artificial Sequence: Synthetic oligonucleotide
  Sense strand starting at position 1406 of SEQ ID NO: 1884367
acacgugcacguguuaauu

SEQ ID NO: 2260323 - RNA, 19 nt, Artificial Sequence
  Description of Artificial Sequence: Synthetic oligonucleotide
  Antisense strand to SEQ ID NO: 2260322
aauuaacacgugcacgugu

SEQ ID NO: 2260324 - RNA, 19 nt, Artificial Sequence
  Description of Artificial Sequence: Synthetic oligonucleotide
  Sense strand starting at position 1532 of SEQ ID NO: 1884367
cacucagggccugauaagu

SEQ ID NO: 2260325 - RNA, 19 nt, Artificial Sequence
  Description of Artificial Sequence: Synthetic oligonucleotide
  Antisense strand to SEQ ID NO: 2260324
acuuaucaggcccugagug

SEQ ID NO: 2260326 - RNA, 19 nt, Artificial Sequence
  Description of Artificial Sequence: Synthetic oligonucleotide
  Sense strand starting at position 1752 of SEQ ID NO: 1884367
agacguugcacugaacaua

SEQ ID NO: 2260327 - RNA, 19 nt, Artificial Sequence
  Description of Artificial Sequence: Synthetic oligonucleotide
  Antisense strand to SEQ ID NO: 2260326
uauguucagugcaacgucu

SEQ ID NO: 2260328 - RNA, 19 nt, Artificial Sequence
  Description of Artificial Sequence: Synthetic oligonucleotide
  Sense strand starting at position 1788 of SEQ ID NO: 1884367
cugauaauauggccaaaua

SEQ ID NO: 2260329 - RNA, 19 nt, Artificial Sequence
  Description of Artificial Sequence: Synthetic oligonucleotide
  Antisense strand to SEQ ID NO: 2260328
uauuuggccauauuaucag

SEQ ID NO: 2260330 - RNA, 19 nt, Artificial Sequence
  Description of Artificial Sequence: Synthetic oligonucleotide
  Sense strand starting at position 1799 of SEQ ID NO: 1884367
gccaaauaugcuggagaaa

SEQ ID NO: 2260331 - RNA, 19 nt, Artificial Sequence
  Description of Artificial Sequence: Synthetic oligonucleotide
  Antisense strand to SEQ ID NO: 2260330
uuucuccagcauauuuggc

SEQ ID NO: 2260332 - RNA, 19 nt, Artificial Sequence
  Description of Artificial Sequence: Synthetic oligonucleotide
  Sense strand starting at position 2116 of SEQ ID NO: 1884367
cuugcaagcgugucuucua

SEQ ID NO: 2260333 - RNA, 19 nt, Artificial Sequence
  Description of Artificial Sequence: Synthetic oligonucleotide
  Antisense strand to SEQ ID NO: 2260332
uagaagacacgcuugcaag

SEQ ID NO: 2260334 - RNA, 19 nt, Artificial Sequence
  Description of Artificial Sequence: Synthetic oligonucleotide
  Sense strand starting at position 2177 of SEQ ID NO: 1884367
ccacuccugccugaaugua

SEQ ID NO: 2260335 - RNA, 19 nt, Artificial Sequence
  Description of Artificial Sequence: Synthetic oligonucleotide
  Antisense strand to SEQ ID NO: 2260334
uacauucaggcaggagugg

SEQ ID NO: 2260336 - RNA, 19 nt, Artificial Sequence
  Description of Artificial Sequence: Synthetic oligonucleotide
  Sense strand starting at position 2328 of SEQ ID NO: 1884367
gagucuugucaacauguuu

SEQ ID NO: 2260337 - RNA, 19 nt, Artificial Sequence
  Description of Artificial Sequence: Synthetic oligonucleotide
  Antisense strand to SEQ ID NO: 2260336
aaacauguugacaagacuc

SEQ ID NO: 2260338 - RNA, 19 nt, Artificial Sequence
  Description of Artificial Sequence: Synthetic oligonucleotide
  Sense strand starting at position 2366 of SEQ ID NO: 1884367
ggguuuguguagaaggaga

SEQ ID NO: 2260339 - RNA, 19 nt, Artificial Sequence
  Description of Artificial Sequence: Synthetic oligonucleotide
  Antisense strand to SEQ ID NO: 2260338
ucuccuucuacacaaaccc

SEQ ID NO: 2260340 - RNA, 19 nt, Artificial Sequence
  Description of Artificial Sequence: Synthetic oligonucleotide
  Sense strand starting at position 2436 of SEQ ID NO: 1884367
gcagaucuugacuggacau

SEQ ID NO: 2260341 - RNA, 19 nt, Artificial Sequence
  Description of Artificial Sequence: Synthetic oligonucleotide
  Antisense strand to SEQ ID NO: 2260340
auguccagucaagaucugc

SEQ ID NO: 2260342 - RNA, 19 nt, Artificial Sequence
  Description of Artificial Sequence: Synthetic oligonucleotide
  Sense strand starting at position 2499 of SEQ ID NO: 1884367
ccaguuaaaccguaguuac

SEQ ID NO: 2260343 - RNA, 19 nt, Artificial Sequence
  Description of Artificial Sequence: Synthetic oligonucleotide
  Antisense strand to SEQ ID NO: 2260342
guaacuacgguuuaacugg

SEQ ID NO: 2260344 - RNA, 19 nt, Artificial Sequence
  Description of Artificial Sequence: Synthetic oligonucleotide
  Sense strand starting at position 2610 of SEQ ID NO: 1884367
gcaggcacucugucguaua

SEQ ID NO: 2260345 - RNA, 19 nt, Artificial Sequence
  Description of Artificial Sequence: Synthetic oligonucleotide
  Antisense strand to SEQ ID NO: 2260344
uauacgacagagugccugc

SEQ ID NO: 2260346 - RNA, 19 nt, Artificial Sequence
  Description of Artificial Sequence: Synthetic oligonucleotide
  Sense strand starting at position 2654 of SEQ ID NO: 1884367
aauugacuaccgugaauga

SEQ ID NO: 2260347 - RNA, 19 nt, Artificial Sequence
  Description of Artificial Sequence: Synthetic oligonucleotide
  Antisense strand to SEQ ID NO: 2260346
ucauucacgguagucaauu

SEQ ID NO: 2260348 - RNA, 19 nt, Artificial Sequence
  Description of Artificial Sequence: Synthetic oligonucleotide
  Sense strand starting at position 3221 of SEQ ID NO: 1884367
ggucauuacuauuccagaa

SEQ ID NO: 2260349 - RNA, 19 nt, Artificial Sequence
  Description of Artificial Sequence: Synthetic oligonucleotide
  Antisense strand to SEQ ID NO: 2260348
uucuggaauaguaaugacc

SEQ ID NO: 2260350 - RNA, 19 nt, Artificial Sequence
  Description of Artificial Sequence: Synthetic oligonucleotide
  Sense strand starting at position 3293 of SEQ ID NO: 1884367
gugauugcacaauagggua

SEQ ID NO: 2260351 - RNA, 19 nt, Artificial Sequence
  Description of Artificial Sequence: Synthetic oligonucleotide
  Antisense strand to SEQ ID NO: 2260350
uacccuauugugcaaucac

SEQ ID NO: 2260352 - RNA, 19 nt, Artificial Sequence
  Description of Artificial Sequence: Synthetic oligonucleotide
  Sense strand starting at position 3301 of SEQ ID NO: 1884367
acaauaggguauucuuuau

SEQ ID NO: 2260353 - RNA, 19 nt, Artificial Sequence
  Description of Artificial Sequence: Synthetic oligonucleotide
  Antisense strand to SEQ ID NO: 2260352
auaaagaauacccuauugu

SEQ ID NO: 2260354 - RNA, 19 nt, Artificial Sequence
  Description of Artificial Sequence: Synthetic oligonucleotide
  Sense strand starting at position 3479 of SEQ ID NO: 1884367
uuauaaggguucuucugau

SEQ ID NO: 2260355 - RNA, 19 nt, Artificial Sequence
  Description of Artificial Sequence: Synthetic oligonucleotide
  Antisense strand to SEQ ID NO: 2260354
aucagaagaacccuuauaa

SEQ ID NO: 2260356 - RNA, 19 nt, Artificial Sequence
  Description of Artificial Sequence: Synthetic oligonucleotide
  Sense strand starting at position 3694 of SEQ ID NO: 1884367
ggauguguccuggagaacu

SEQ ID NO: 2260357 - RNA, 19 nt, Artificial Sequence
  Description of Artificial Sequence: Synthetic oligonucleotide
  Antisense strand to SEQ ID NO: 2260356
aguucuccaggacacaucc

SEQ ID NO: 2260358 - RNA, 19 nt, Artificial Sequence
  Description of Artificial Sequence: Synthetic oligonucleotide
  Sense strand starting at position 3736 of SEQ ID NO: 1884367
uggguauugucauuugcga

SEQ ID NO: 2260359 - RNA, 19 nt, Artificial Sequence
  Description of Artificial Sequence: Synthetic oligonucleotide
  Antisense strand to SEQ ID NO: 2260358
ucgcaaaugacaauaccca

SEQ ID NO: 2260360 - RNA, 19 nt, Artificial Sequence
  Description of Artificial Sequence: Synthetic oligonucleotide
  Sense strand starting at position 3738 of SEQ ID NO: 1884367
gguauugucauuugcgaag

SEQ ID NO: 2260361 - RNA, 19 nt, Artificial Sequence
  Description of Artificial Sequence: Synthetic oligonucleotide
  Antisense strand to SEQ ID NO: 2260360
cuucgcaaaugacaauacc

SEQ ID NO: 2260362 - RNA, 19 nt, Artificial Sequence
  Description of Artificial Sequence: Synthetic oligonucleotide
  Sense strand starting at position 3782 of SEQ ID NO: 1884367
cccugugauuuguugagua

SEQ ID NO: 2260363 - RNA, 19 nt, Artificial Sequence
  Description of Artificial Sequence: Synthetic oligonucleotide
  Antisense strand to SEQ ID NO: 2260362
uacucaacaaaucacaggg

SEQ ID NO: 2260364 - RNA, 19 nt, Artificial Sequence
  Description of Artificial Sequence: Synthetic oligonucleotide
  Sense strand starting at position 3790 of SEQ ID NO: 1884367
uuuguugaguaacccagau

SEQ ID NO: 2260365 - RNA, 19 nt, Artificial Sequence
  Description of Artificial Sequence: Synthetic oligonucleotide
  Antisense strand to SEQ ID NO: 2260364
aucuggguuacucaacaaa

SEQ ID NO: 2260366 - RNA, 19 nt, Artificial Sequence
  Description of Artificial Sequence: Synthetic oligonucleotide
  Sense strand starting at position 3888 of SEQ ID NO: 1884367
ggaggcuuuguuugggaac

SEQ ID NO: 2260367 - RNA, 19 nt, Artificial Sequence
  Description of Artificial Sequence: Synthetic oligonucleotide
  Antisense strand to SEQ ID NO: 2260366
guucccaaacaaagccucc

SEQ ID NO: 2260368 - RNA, 19 nt, Artificial Sequence
  Description of Artificial Sequence: Synthetic oligonucleotide
  Sense strand starting at position 3973 of SEQ ID NO: 1884367
cuuaauauuugugaugaac

SEQ ID NO: 2260369 - RNA, 19 nt, Artificial Sequence
  Description of Artificial Sequence: Synthetic oligonucleotide
  Antisense strand to SEQ ID NO: 2260368
guucaucacaaauauuaag

SEQ ID NO: 2260370 - RNA, 19 nt, Artificial Sequence
  Description of Artificial Sequence: Synthetic oligonucleotide
  Sense strand starting at position 132 of SEQ ID NO: 1884368
uuuaucugcucuuugggau

SEQ ID NO: 2260371 - RNA, 19 nt, Artificial Sequence
  Description of Artificial Sequence: Synthetic oligonucleotide
  Antisense strand to SEQ ID NO: 2260370
aucccaaagagcagauaaa

SEQ ID NO: 2260372 - RNA, 19 nt, Artificial Sequence
  Description of Artificial Sequence: Synthetic oligonucleotide
  Sense strand starting at position 133 of SEQ ID NO: 1884368
uuaucugcucuuugggaua

SEQ ID NO: 2260373 - RNA, 19 nt, Artificial Sequence
  Description of Artificial Sequence: Synthetic oligonucleotide
  Antisense strand to SEQ ID NO: 2260372
uaucccaaagagcagauaa

SEQ ID NO: 2260374 - RNA, 19 nt, Artificial Sequence
  Description of Artificial Sequence: Synthetic oligonucleotide
  Sense strand starting at position 138 of SEQ ID NO: 1884368
ugcucuuugggauauacau

SEQ ID NO: 2260375 - RNA, 19 nt, Artificial Sequence
  Description of Artificial Sequence: Synthetic oligonucleotide
  Antisense strand to SEQ ID NO: 2260374
auguauaucccaaagagca

SEQ ID NO: 2260376 - RNA, 19 nt, Artificial Sequence
  Description of Artificial Sequence: Synthetic oligonucleotide
  Sense strand starting at position 156 of SEQ ID NO: 1884368
uaagucaaagguuauguaa

SEQ ID NO: 2260377 - RNA, 19 nt, Artificial Sequence
  Description of Artificial Sequence: Synthetic oligonucleotide
  Antisense strand to SEQ ID NO: 2260376
uuacauaaccuuugacuua

SEQ ID NO: 2260378 - RNA, 19 nt, Artificial Sequence
  Description of Artificial Sequence: Synthetic oligonucleotide
  Sense strand starting at position 209 of SEQ ID NO: 1884368
cugcaaguugcaugugauu

SEQ ID NO: 2260379 - RNA, 19 nt, Artificial Sequence
  Description of Artificial Sequence: Synthetic oligonucleotide
  Antisense strand to SEQ ID NO: 2260378
aaucacaugcaacuugcag

SEQ ID NO: 2260380 - RNA, 19 nt, Artificial Sequence
  Description of Artificial Sequence: Synthetic oligonucleotide
  Sense strand starting at position 211 of SEQ ID NO: 1884368
gcaaguugcaugugauugu

SEQ ID NO: 2260381 - RNA, 19 nt, Artificial Sequence
  Description of Artificial Sequence: Synthetic oligonucleotide
  Antisense strand to SEQ ID NO: 2260380
acaaucacaugcaacuugc

SEQ ID NO: 2260382 - RNA, 19 nt, Artificial Sequence
  Description of Artificial Sequence: Synthetic oligonucleotide
  Sense strand starting at position 215 of SEQ ID NO: 1884368
guugcaugugauuguugua

SEQ ID NO: 2260383 - RNA, 19 nt, Artificial Sequence
  Description of Artificial Sequence: Synthetic oligonucleotide
  Antisense strand to SEQ ID NO: 2260382
uacaacaaucacaugcaac

SEQ ID NO: 2260384 - RNA, 19 nt, Artificial Sequence
  Description of Artificial Sequence: Synthetic oligonucleotide
  Sense strand starting at position 236 of SEQ ID NO: 1884368
auggguuccgauuauacca

SEQ ID NO: 2260385 - RNA, 19 nt, Artificial Sequence
  Description of Artificial Sequence: Synthetic oligonucleotide
  Antisense strand to SEQ ID NO: 2260384
ugguauaaucggaacccau

SEQ ID NO: 2260386 - RNA, 19 nt, Artificial Sequence
  Description of Artificial Sequence: Synthetic oligonucleotide
  Sense strand starting at position 243 of SEQ ID NO: 1884368
ccgauuauaccaugacucu

SEQ ID NO: 2260387 - RNA, 19 nt, Artificial Sequence
  Description of Artificial Sequence: Synthetic oligonucleotide
  Antisense strand to SEQ ID NO: 2260386
agagucaugguauaaucgg

SEQ ID NO: 2260388 - RNA, 19 nt, Artificial Sequence
  Description of Artificial Sequence: Synthetic oligonucleotide
  Sense strand starting at position 348 of SEQ ID NO: 1884368
uguuauggaucaguucuaa

SEQ ID NO: 2260389 - RNA, 19 nt, Artificial Sequence
  Description of Artificial Sequence: Synthetic oligonucleotide
  Antisense strand to SEQ ID NO: 2260388
uuagaacugauccauaaca

SEQ ID NO: 2260390 - RNA, 19 nt, Artificial Sequence
  Description of Artificial Sequence: Synthetic oligonucleotide
  Sense strand starting at position 352 of SEQ ID NO: 1884368
auggaucaguucuaaccau

SEQ ID NO: 2260391 - RNA, 19 nt, Artificial Sequence
  Description of Artificial Sequence: Synthetic oligonucleotide
  Antisense strand to SEQ ID NO: 2260390
augguuagaacugauccau

SEQ ID NO: 2260392 - RNA, 19 nt, Artificial Sequence
  Description of Artificial Sequence: Synthetic oligonucleotide
  Sense strand starting at position 464 of SEQ ID NO: 1884368
gcaccucagucauuaccau

SEQ ID NO: 2260393 - RNA, 19 nt, Artificial Sequence
  Description of Artificial Sequence: Synthetic oligonucleotide
  Antisense strand to SEQ ID NO: 2260392
augguaaugacugaggugc

SEQ ID NO: 2260394 - RNA, 19 nt, Artificial Sequence
  Description of Artificial Sequence: Synthetic oligonucleotide
  Sense strand starting at position 556 of SEQ ID NO: 1884368
cggacucagugggacaauu

SEQ ID NO: 2260395 - RNA, 19 nt, Artificial Sequence
  Description of Artificial Sequence: Synthetic oligonucleotide
  Antisense strand to SEQ ID NO: 2260394
aauugucccacugaguccg

SEQ ID NO: 2260396 - RNA, 19 nt, Artificial Sequence
  Description of Artificial Sequence: Synthetic oligonucleotide
  Sense strand starting at position 741 of SEQ ID NO: 1884368
ucagauucucuguggcuca

SEQ ID NO: 2260397 - RNA, 19 nt, Artificial Sequence
  Description of Artificial Sequence: Synthetic oligonucleotide
  Antisense strand to SEQ ID NO: 2260396
ugagccacagagaaucuga

SEQ ID NO: 2260398 - RNA, 19 nt, Artificial Sequence
  Description of Artificial Sequence: Synthetic oligonucleotide
  Sense strand starting at position 878 of SEQ ID NO: 1884368
ccuaguucuccguguaauc

SEQ ID NO: 2260399 - RNA, 19 nt, Artificial Sequence
  Description of Artificial Sequence: Synthetic oligonucleotide
  Antisense strand to SEQ ID NO: 2260398
gauuacacggagaacuagg

SEQ ID NO: 2260400 - RNA, 19 nt, Artificial Sequence
  Description of Artificial Sequence: Synthetic oligonucleotide
  Sense strand starting at position 908 of SEQ ID NO: 1884368
agcacuuucucagcuaaga

SEQ ID NO: 2260401 - RNA, 19 nt, Artificial Sequence
  Description of Artificial Sequence: Synthetic oligonucleotide
  Antisense strand to SEQ ID NO: 2260400
ucuuagcugagaaagugcu

SEQ ID NO: 2260402 - RNA, 19 nt, Artificial Sequence
  Description of Artificial Sequence: Synthetic oligonucleotide
  Sense strand starting at position 948 of SEQ ID NO: 1884368
gagacuguuccacagguag

SEQ ID NO: 2260403 - RNA, 19 nt, Artificial Sequence
  Description of Artificial Sequence: Synthetic oligonucleotide
  Antisense strand to SEQ ID NO: 2260402
cuaccuguggaacagucuc

SEQ ID NO: 2260404 - RNA, 19 nt, Artificial Sequence
  Description of Artificial Sequence: Synthetic oligonucleotide
  Sense strand starting at position 2394 of SEQ ID NO: 1884368
auuagagaauguguugcaa

SEQ ID NO: 2260405 - RNA, 19 nt, Artificial Sequence
  Description of Artificial Sequence: Synthetic oligonucleotide
  Antisense strand to SEQ ID NO: 2260404
uugcaacacauucucuaau

SEQ ID NO: 2260406 - RNA, 19 nt, Artificial Sequence
  Description of Artificial Sequence: Synthetic oligonucleotide
  Sense strand starting at position 2591 of SEQ ID NO: 1884368
uccgauuggucauccguga

SEQ ID NO: 2260407 - RNA, 19 nt, Artificial Sequence
  Description of Artificial Sequence: Synthetic oligonucleotide
  Antisense strand to SEQ ID NO: 2260406
ucacggaugaccaaucgga

SEQ ID NO: 2260408 - RNA, 19 nt, Artificial Sequence
  Description of Artificial Sequence: Synthetic oligonucleotide
  Sense strand starting at position 2595 of SEQ ID NO: 1884368
auuggucauccgugaucgu

SEQ ID NO: 2260409 - RNA, 19 nt, Artificial Sequence
  Description of Artificial Sequence: Synthetic oligonucleotide
  Antisense strand to SEQ ID NO: 2260408
acgaucacggaugaccaau

SEQ ID NO: 2260410 - RNA, 19 nt, Artificial Sequence
  Description of Artificial Sequence: Synthetic oligonucleotide
  Sense strand starting at position 2695 of SEQ ID NO: 1884368
ucguuucugcgggauuauu

SEQ ID NO: 2260411 - RNA, 19 nt, Artificial Sequence
  Description of Artificial Sequence: Synthetic oligonucleotide
  Antisense strand to SEQ ID NO: 2260410
aauaaucccgcagaaacga

SEQ ID NO: 2260412 - RNA, 19 nt, Artificial Sequence
  Description of Artificial Sequence: Synthetic oligonucleotide
  Sense strand starting at position 2716 of SEQ ID NO: 1884368
uccggagccucuucugauu

SEQ ID NO: 2260413 - RNA, 19 nt, Artificial Sequence
  Description of Artificial Sequence: Synthetic oligonucleotide
  Antisense strand to SEQ ID NO: 2260412
aaucagaagaggcuccgga

SEQ ID NO: 2260414 - RNA, 19 nt, Artificial Sequence
  Description of Artificial Sequence: Synthetic oligonucleotide
  Sense strand starting at position 2752 of SEQ ID NO: 1884368
gcgcgcgacccucaagaua

SEQ ID NO: 2260415 - RNA, 19 nt, Artificial Sequence
  Description of Artificial Sequence: Synthetic oligonucleotide
  Antisense strand to SEQ ID NO: 2260414
uaucuugagggucgcgcgc

SEQ ID NO: 2260416 - RNA, 19 nt, Artificial Sequence
  Description of Artificial Sequence: Synthetic oligonucleotide
  Sense strand starting at position 2829 of SEQ ID NO: 1884368
ccaggagacuuccagguuu

SEQ ID NO: 2260417 - RNA, 19 nt, Artificial Sequence
  Description of Artificial Sequence: Synthetic oligonucleotide
  Antisense strand to SEQ ID NO: 2260416
aaaccuggaagucuccugg

SEQ ID NO: 2260418 - RNA, 19 nt, Artificial Sequence
  Description of Artificial Sequence: Synthetic oligonucleotide
  Sense strand starting at position 2955 of SEQ ID NO: 1884368
uuuauuuauugacgucaac

SEQ ID NO: 2260419 - RNA, 19 nt, Artificial Sequence
  Description of Artificial Sequence: Synthetic oligonucleotide
  Antisense strand to SEQ ID NO: 2260418
guugacgucaauaaauaaa

SEQ ID NO: 2260420 - RNA, 19 nt, Artificial Sequence
  Description of Artificial Sequence: Synthetic oligonucleotide
  Sense strand starting at position 2979 of SEQ ID NO: 1884368
aauguugaauaaggaagaa

SEQ ID NO: 2260421 - RNA, 19 nt, Artificial Sequence
  Description of Artificial Sequence: Synthetic oligonucleotide
  Antisense strand to SEQ ID NO: 2260420
uucuuccuuauucaacauu

SEQ ID NO: 2260422 - RNA, 19 nt, Artificial Sequence
  Description of Artificial Sequence: Synthetic oligonucleotide
  Sense strand starting at position 2998 of SEQ ID NO: 1884368
gaguuagaauugcuugaag

SEQ ID NO: 2260423 - RNA, 19 nt, Artificial Sequence
  Description of Artificial Sequence: Synthetic oligonucleotide
  Antisense strand to SEQ ID NO: 2260422
cuucaagcaauucuaacuc

SEQ ID NO: 2260424 - RNA, 19 nt, Artificial Sequence
  Description of Artificial Sequence: Synthetic oligonucleotide
  Sense strand starting at position 3010 of SEQ ID NO: 1884368
cuugaagcccucuggaguu

SEQ ID NO: 2260425 - RNA, 19 nt, Artificial Sequence
  Description of Artificial Sequence: Synthetic oligonucleotide
  Antisense strand to SEQ ID NO: 2260424
aacuccagagggcuucaag

SEQ ID NO: 2260426 - RNA, 19 nt, Artificial Sequence
  Description of Artificial Sequence: Synthetic oligonucleotide
  Sense strand starting at position 3688 of SEQ ID NO: 1884368
auaacaaucuagcugguaa

SEQ ID NO: 2260427 - RNA, 19 nt, Artificial Sequence
  Description of Artificial Sequence: Synthetic oligonucleotide
  Antisense strand to SEQ ID NO: 2260426
uuaccagcuagauuguuau

SEQ ID NO: 2260428 - RNA, 19 nt, Artificial Sequence
  Description of Artificial Sequence: Synthetic oligonucleotide
  Sense strand starting at position 3749 of SEQ ID NO: 1884368
augaacaucugugaacauu

SEQ ID NO: 2260429 - RNA, 19 nt, Artificial Sequence
  Description of Artificial Sequence: Synthetic oligonucleotide
  Antisense strand to SEQ ID NO: 2260428
aauguucacagauguucau

SEQ ID NO: 2260430 - RNA, 19 nt, Artificial Sequence
  Description of Artificial Sequence: Synthetic oligonucleotide
  Sense strand starting at position 3811 of SEQ ID NO: 1884368
uuuauucugccaugaauug

SEQ ID NO: 2260431 - RNA, 19 nt, Artificial Sequence
  Description of Artificial Sequence: Synthetic oligonucleotide
  Antisense strand to SEQ ID NO: 2260430
caauucauggcagaauaaa

SEQ ID NO: 2260432 - RNA, 19 nt, Artificial Sequence
  Description of Artificial Sequence: Synthetic oligonucleotide
  Sense strand starting at position 3829 of SEQ ID NO: 1884368
ggaauaaccugucaaucug

SEQ ID NO: 2260433 - RNA, 19 nt, Artificial Sequence
  Description of Artificial Sequence: Synthetic oligonucleotide
  Antisense strand to SEQ ID NO: 2260432
cagauugacagguuauucc

SEQ ID NO: 2260434 - RNA, 19 nt, Artificial Sequence
  Description of Artificial Sequence: Synthetic oligonucleotide
  Sense strand starting at position 3840 of SEQ ID NO: 1884368
ucaaucugugcggcuguaa

SEQ ID NO: 2260435 - RNA, 19 nt, Artificial Sequence
  Description of Artificial Sequence: Synthetic oligonucleotide
  Antisense strand to SEQ ID NO: 2260434
uuacagccgcacagauuga

SEQ ID NO: 2260436 - RNA, 19 nt, Artificial Sequence
  Description of Artificial Sequence: Synthetic oligonucleotide
  Sense strand starting at position 3841 of SEQ ID NO: 1884368
caaucugugcggcuguaau

SEQ ID NO: 2260437 - RNA, 19 nt, Artificial Sequence
  Description of Artificial Sequence: Synthetic oligonucleotide
  Antisense strand to SEQ ID NO: 2260436
auuacagccgcacagauug

SEQ ID NO: 2260438 - RNA, 19 nt, Artificial Sequence
  Description of Artificial Sequence: Synthetic oligonucleotide
  Sense strand starting at position 3843 of SEQ ID NO: 1884368
aucugugcggcuguaauua

SEQ ID NO: 2260439 - RNA, 19 nt, Artificial Sequence
  Description of Artificial Sequence: Synthetic oligonucleotide
  Antisense strand to SEQ ID NO: 2260438
uaauuacagccgcacagau

SEQ ID NO: 2260440 - RNA, 19 nt, Artificial Sequence
  Description of Artificial Sequence: Synthetic oligonucleotide
  Sense strand starting at position 3851 of SEQ ID NO: 1884368
ggcuguaauuaaguugcca

SEQ ID NO: 2260441 - RNA, 19 nt, Artificial Sequence
  Description of Artificial Sequence: Synthetic oligonucleotide
  Antisense strand to SEQ ID NO: 2260440
uggcaacuuaauuacagcc

SEQ ID NO: 2260442 - RNA, 19 nt, Artificial Sequence
  Description of Artificial Sequence: Synthetic oligonucleotide
  Sense strand starting at position 3855 of SEQ ID NO: 1884368
guaauuaaguugccauaga

SEQ ID NO: 2260443 - RNA, 19 nt, Artificial Sequence
  Description of Artificial Sequence: Synthetic oligonucleotide
  Antisense strand to SEQ ID NO: 2260442
ucuauggcaacuuaauuac

SEQ ID NO: 2260444 - RNA, 19 nt, Artificial Sequence
  Description of Artificial Sequence: Synthetic oligonucleotide
  Sense strand starting at position 3856 of SEQ ID NO: 1884368
uaauuaaguugccauagag

SEQ ID NO: 2260445 - RNA, 19 nt, Artificial Sequence
  Description of Artificial Sequence: Synthetic oligonucleotide
  Antisense strand to SEQ ID NO: 2260444
cucuauggcaacuuaauua

SEQ ID NO: 2260446 - RNA, 19 nt, Artificial Sequence
  Description of Artificial Sequence: Synthetic oligonucleotide
  Sense strand starting at position 3936 of SEQ ID NO: 1884368
cagagauucggaugggucu

SEQ ID NO: 2260447 - RNA, 19 nt, Artificial Sequence
  Description of Artificial Sequence: Synthetic oligonucleotide
  Antisense strand to SEQ ID NO: 2260446
agacccauccgaaucucug

SEQ ID NO: 2260448 - RNA, 19 nt, Artificial Sequence
  Description of Artificial Sequence: Synthetic oligonucleotide
  Sense strand starting at position 3962 of SEQ ID NO: 1884368
ggccuaucaguuugcauuu

SEQ ID NO: 2260449 - RNA, 19 nt, Artificial Sequence
  Description of Artificial Sequence: Synthetic oligonucleotide
  Antisense strand to SEQ ID NO: 2260448
aaaugcaaacugauaggcc

SEQ ID NO: 2260450 - RNA, 19 nt, Artificial Sequence
  Description of Artificial Sequence: Synthetic oligonucleotide
  Sense strand starting at position 50 of SEQ ID NO: 1884369
gcuggauguucucuugauu

SEQ ID NO: 2260451 - RNA, 19 nt, Artificial Sequence
  Description of Artificial Sequence: Synthetic oligonucleotide
  Antisense strand to SEQ ID NO: 2260450
aaucaagagaacauccagc

SEQ ID NO: 2260452 - RNA, 19 nt, Artificial Sequence
  Description of Artificial Sequence: Synthetic oligonucleotide
  Sense strand starting at position 53 of SEQ ID NO: 1884369
ggauguucucuugauugca

SEQ ID NO: 2260453 - RNA, 19 nt, Artificial Sequence
  Description of Artificial Sequence: Synthetic oligonucleotide
  Antisense strand to SEQ ID NO: 2260452
ugcaaucaagagaacaucc

SEQ ID NO: 2260454 - RNA, 19 nt, Artificial Sequence
  Description of Artificial Sequence: Synthetic oligonucleotide
  Sense strand starting at position 55 of SEQ ID NO: 1884369
auguucucuugauugcaga

SEQ ID NO: 2260455 - RNA, 19 nt, Artificial Sequence
  Description of Artificial Sequence: Synthetic oligonucleotide
  Antisense strand to SEQ ID NO: 2260454
ucugcaaucaagagaacau

SEQ ID NO: 2260456 - RNA, 19 nt, Artificial Sequence
  Description of Artificial Sequence: Synthetic oligonucleotide
  Sense strand starting at position 92 of SEQ ID NO: 1884369
accucaggcuuuccugaau

SEQ ID NO: 2260457 - RNA, 19 nt, Artificial Sequence
  Description of Artificial Sequence: Synthetic oligonucleotide
  Antisense strand to SEQ ID NO: 2260456
auucaggaaagccugaggu

SEQ ID NO: 2260458 - RNA, 19 nt, Artificial Sequence
  Description of Artificial Sequence: Synthetic oligonucleotide
  Sense strand starting at position 95 of SEQ ID NO: 1884369
ucaggcuuuccugaauaca

SEQ ID NO: 2260459 - RNA, 19 nt, Artificial Sequence
  Description of Artificial Sequence: Synthetic oligonucleotide
  Antisense strand to SEQ ID NO: 2260458
uguauucaggaaagccuga

SEQ ID NO: 2260460 - RNA, 19 nt, Artificial Sequence
  Description of Artificial Sequence: Synthetic oligonucleotide
  Sense strand starting at position 149 of SEQ ID NO: 1884369
cgugauaauuggagaggcu

SEQ ID NO: 2260461 - RNA, 19 nt, Artificial Sequence
  Description of Artificial Sequence: Synthetic oligonucleotide
  Antisense strand to SEQ ID NO: 2260460
agccucuccaauuaucacg

SEQ ID NO: 2260462 - RNA, 19 nt, Artificial Sequence
  Description of Artificial Sequence: Synthetic oligonucleotide
  Sense strand starting at position 150 of SEQ ID NO: 1884369
gugauaauuggagaggcuu

SEQ ID NO: 2260463 - RNA, 19 nt, Artificial Sequence
  Description of Artificial Sequence: Synthetic oligonucleotide
  Antisense strand to SEQ ID NO: 2260462
aagccucuccaauuaucac

SEQ ID NO: 2260464 - RNA, 19 nt, Artificial Sequence
  Description of Artificial Sequence: Synthetic oligonucleotide
  Sense strand starting at position 227 of SEQ ID NO: 1884369
gacagaccuuaguacauga

SEQ ID NO: 2260465 - RNA, 19 nt, Artificial Sequence
  Description of Artificial Sequence: Synthetic oligonucleotide
  Antisense strand to SEQ ID NO: 2260464
ucauguacuaaggucuguc

SEQ ID NO: 2260466 - RNA, 19 nt, Artificial Sequence
  Description of Artificial Sequence: Synthetic oligonucleotide
  Sense strand starting at position 386 of SEQ ID NO: 1884369
ggcuguuuggauggcauau

SEQ ID NO: 2260467 - RNA, 19 nt, Artificial Sequence
  Description of Artificial Sequence: Synthetic oligonucleotide
  Antisense strand to SEQ ID NO: 2260466
auaugccauccaaacagcc

SEQ ID NO: 2260468 - RNA, 19 nt, Artificial Sequence
  Description of Artificial Sequence: Synthetic oligonucleotide
  Sense strand starting at position 463 of SEQ ID NO: 1884369
ggaauuugaucuggagcca

SEQ ID NO: 2260469 - RNA, 19 nt, Artificial Sequence
  Description of Artificial Sequence: Synthetic oligonucleotide
  Antisense strand to SEQ ID NO: 2260468
uggcuccagaucaaauucc

SEQ ID NO: 2260470 - RNA, 19 nt, Artificial Sequence
  Description of Artificial Sequence: Synthetic oligonucleotide
  Sense strand starting at position 484 of SEQ ID NO: 1884369
gucagcuuccgggugugau

SEQ ID NO: 2260471 - RNA, 19 nt, Artificial Sequence
  Description of Artificial Sequence: Synthetic oligonucleotide
  Antisense strand to SEQ ID NO: 2260470
aucacacccggaagcugac

SEQ ID NO: 2260472 - RNA, 19 nt, Artificial Sequence
  Description of Artificial Sequence: Synthetic oligonucleotide
  Sense strand starting at position 496 of SEQ ID NO: 1884369
gugugaucucagcauccaa

SEQ ID NO: 2260473 - RNA, 19 nt, Artificial Sequence
  Description of Artificial Sequence: Synthetic oligonucleotide
  Antisense strand to SEQ ID NO: 2260472
uuggaugcugagaucacac

SEQ ID NO: 2260474 - RNA, 19 nt, Artificial Sequence
  Description of Artificial Sequence: Synthetic oligonucleotide
  Sense strand starting at position 534 of SEQ ID NO: 1884369
ugacguugggcacaucaaa

SEQ ID NO: 2260475 - RNA, 19 nt, Artificial Sequence
  Description of Artificial Sequence: Synthetic oligonucleotide
  Antisense strand to SEQ ID NO: 2260474
uuugaugugcccaacguca

SEQ ID NO: 2260476 - RNA, 19 nt, Artificial Sequence
  Description of Artificial Sequence: Synthetic oligonucleotide
  Sense strand starting at position 1626 of SEQ ID NO: 1884369
ucuugaggucagcaggaau

SEQ ID NO: 2260477 - RNA, 19 nt, Artificial Sequence
  Description of Artificial Sequence: Synthetic oligonucleotide
  Antisense strand to SEQ ID NO: 2260476
auuccugcugaccucaaga

SEQ ID NO: 2260478 - RNA, 19 nt, Artificial Sequence
  Description of Artificial Sequence: Synthetic oligonucleotide
  Sense strand starting at position 2405 of SEQ ID NO: 1884369
gggucuuucugcccagaug

SEQ ID NO: 2260479 - RNA, 19 nt, Artificial Sequence
  Description of Artificial Sequence: Synthetic oligonucleotide
  Antisense strand to SEQ ID NO: 2260478
caucugggcagaaagaccc

SEQ ID NO: 2260480 - RNA, 19 nt, Artificial Sequence
  Description of Artificial Sequence: Synthetic oligonucleotide
  Sense strand starting at position 2406 of SEQ ID NO: 1884369
ggucuuucugcccagaugu

SEQ ID NO: 2260481 - RNA, 19 nt, Artificial Sequence
  Description of Artificial Sequence: Synthetic oligonucleotide
  Antisense strand to SEQ ID NO: 2260480
acaucugggcagaaagacc

SEQ ID NO: 2260482 - RNA, 19 nt, Artificial Sequence
  Description of Artificial Sequence: Synthetic oligonucleotide
  Sense strand starting at position 2423 of SEQ ID NO: 1884369
gugggauccucuccuaaac

SEQ ID NO: 2260483 - RNA, 19 nt, Artificial Sequence
  Description of Artificial Sequence: Synthetic oligonucleotide
  Antisense strand to SEQ ID NO: 2260482
guuuaggagaggaucccac

SEQ ID NO: 2260484 - RNA, 19 nt, Artificial Sequence
  Description of Artificial Sequence: Synthetic oligonucleotide
  Sense strand starting at position 2479 of SEQ ID NO: 1884369
ugacauguugaccaucacu

SEQ ID NO: 2260485 - RNA, 19 nt, Artificial Sequence
  Description of Artificial Sequence: Synthetic oligonucleotide
  Antisense strand to SEQ ID NO: 2260484
agugauggucaacauguca

SEQ ID NO: 2260486 - RNA, 19 nt, Artificial Sequence
  Description of Artificial Sequence: Synthetic oligonucleotide
  Sense strand starting at position 2498 of SEQ ID NO: 1884369
gcucucuuccaaggacuca

SEQ ID NO: 2260487 - RNA, 19 nt, Artificial Sequence
  Description of Artificial Sequence: Synthetic oligonucleotide
  Antisense strand to SEQ ID NO: 2260486
ugaguccuuggaagagagc

SEQ ID NO: 2260488 - RNA, 19 nt, Artificial Sequence
  Description of Artificial Sequence: Synthetic oligonucleotide
  Sense strand starting at position 2536 of SEQ ID NO: 1884369
gggcucagccuaggaagau

SEQ ID NO: 2260489 - RNA, 19 nt, Artificial Sequence
  Description of Artificial Sequence: Synthetic oligonucleotide
  Antisense strand to SEQ ID NO: 2260488
aucuuccuaggcugagccc

SEQ ID NO: 2260490 - RNA, 19 nt, Artificial Sequence
  Description of Artificial Sequence: Synthetic oligonucleotide
  Sense strand starting at position 2577 of SEQ ID NO: 1884369
gauaguugcuggccugauu

SEQ ID NO: 2260491 - RNA, 19 nt, Artificial Sequence
  Description of Artificial Sequence: Synthetic oligonucleotide
  Antisense strand to SEQ ID NO: 2260490
aaucaggccagcaacuauc

SEQ ID NO: 2260492 - RNA, 19 nt, Artificial Sequence
  Description of Artificial Sequence: Synthetic oligonucleotide
  Sense strand starting at position 2677 of SEQ ID NO: 1884369
ugggauuccugacucugua

SEQ ID NO: 2260493 - RNA, 19 nt, Artificial Sequence
  Description of Artificial Sequence: Synthetic oligonucleotide
  Antisense strand to SEQ ID NO: 2260492
uacagagucaggaauccca

SEQ ID NO: 2260494 - RNA, 19 nt, Artificial Sequence
  Description of Artificial Sequence: Synthetic oligonucleotide
  Sense strand starting at position 2782 of SEQ ID NO: 1884369
ggcucagacguguuugugu

SEQ ID NO: 2260495 - RNA, 19 nt, Artificial Sequence
  Description of Artificial Sequence: Synthetic oligonucleotide
  Antisense strand to SEQ ID NO: 2260494
acacaaacacgucugagcc

SEQ ID NO: 2260496 - RNA, 19 nt, Artificial Sequence
  Description of Artificial Sequence: Synthetic oligonucleotide
  Sense strand starting at position 2807 of SEQ ID NO: 1884369
uuucuuagcucagugagua

SEQ ID NO: 2260497 - RNA, 19 nt, Artificial Sequence
  Description of Artificial Sequence: Synthetic oligonucleotide
  Antisense strand to SEQ ID NO: 2260496
uacucacugagcuaagaaa

SEQ ID NO: 2260498 - RNA, 19 nt, Artificial Sequence
  Description of Artificial Sequence: Synthetic oligonucleotide
  Sense strand starting at position 2808 of SEQ ID NO: 1884369
uucuuagcucagugaguac

SEQ ID NO: 2260499 - RNA, 19 nt, Artificial Sequence
  Description of Artificial Sequence: Synthetic oligonucleotide
  Antisense strand to SEQ ID NO: 2260498
guacucacugagcuaagaa

SEQ ID NO: 2260500 - RNA, 19 nt, Artificial Sequence
  Description of Artificial Sequence: Synthetic oligonucleotide
  Sense strand starting at position 2817 of SEQ ID NO: 1884369
cagugaguacuggguaugu

SEQ ID NO: 2260501 - RNA, 19 nt, Artificial Sequence
  Description of Artificial Sequence: Synthetic oligonucleotide
  Antisense strand to SEQ ID NO: 2260500
acauacccaguacucacug

SEQ ID NO: 2260502 - RNA, 19 nt, Artificial Sequence
  Description of Artificial Sequence: Synthetic oligonucleotide
  Sense strand starting at position 2819 of SEQ ID NO: 1884369
gugaguacuggguaugugu

SEQ ID NO: 2260503 - RNA, 19 nt, Artificial Sequence
  Description of Artificial Sequence: Synthetic oligonucleotide
  Antisense strand to SEQ ID NO: 2260502
acacauacccaguacucac

SEQ ID NO: 2260504 - RNA, 19 nt, Artificial Sequence
  Description of Artificial Sequence: Synthetic oligonucleotide
  Sense strand starting at position 2821 of SEQ ID NO: 1884369
gaguacuggguauguguca

SEQ ID NO: 2260505 - RNA, 19 nt, Artificial Sequence
  Description of Artificial Sequence: Synthetic oligonucleotide
  Antisense strand to SEQ ID NO: 2260504
ugacacauacccaguacuc

SEQ ID NO: 2260506 - RNA, 19 nt, Artificial Sequence
  Description of Artificial Sequence: Synthetic oligonucleotide
  Sense strand starting at position 2843 of SEQ ID NO: 1884369
ugccaaaucccggaucaca

SEQ ID NO: 2260507 - RNA, 19 nt, Artificial Sequence
  Description of Artificial Sequence: Synthetic oligonucleotide
  Antisense strand to SEQ ID NO: 2260506
ugugauccgggauuuggca

SEQ ID NO: 2260508 - RNA, 19 nt, Artificial Sequence
  Description of Artificial Sequence: Synthetic oligonucleotide
  Sense strand starting at position 2876 of SEQ ID NO: 1884369
gcuggugagcuaggauaau

SEQ ID NO: 2260509 - RNA, 19 nt, Artificial Sequence
  Description of Artificial Sequence: Synthetic oligonucleotide
  Antisense strand to SEQ ID NO: 2260508
auuauccuagcucaccagc

SEQ ID NO: 2260510 - RNA, 19 nt, Artificial Sequence
  Description of Artificial Sequence: Synthetic oligonucleotide
  Sense strand starting at position 3083 of SEQ ID NO: 1884369
uugaccaguucuucggaga

SEQ ID NO: 2260511 - RNA, 19 nt, Artificial Sequence
  Description of Artificial Sequence: Synthetic oligonucleotide
  Antisense strand to SEQ ID NO: 2260510
ucuccgaagaacuggucaa

SEQ ID NO: 2260512 - RNA, 19 nt, Artificial Sequence
  Description of Artificial Sequence: Synthetic oligonucleotide
  Sense strand starting at position 3105 of SEQ ID NO: 1884369
ccuguuggagucugaucuu

SEQ ID NO: 2260513 - RNA, 19 nt, Artificial Sequence
  Description of Artificial Sequence: Synthetic oligonucleotide
  Antisense strand to SEQ ID NO: 2260512
aagaucagacuccaacagg

SEQ ID NO: 2260514 - RNA, 19 nt, Artificial Sequence
  Description of Artificial Sequence: Synthetic oligonucleotide
  Sense strand starting at position 3201 of SEQ ID NO: 1884369
uggacucucagaggugagu

SEQ ID NO: 2260515 - RNA, 19 nt, Artificial Sequence
  Description of Artificial Sequence: Synthetic oligonucleotide
  Antisense strand to SEQ ID NO: 2260514
acucaccucugagagucca

SEQ ID NO: 2260516 - RNA, 19 nt, Artificial Sequence
  Description of Artificial Sequence: Synthetic oligonucleotide
  Sense strand starting at position 3310 of SEQ ID NO: 1884369
aggcacauguguguccaaa

SEQ ID NO: 2260517 - RNA, 19 nt, Artificial Sequence
  Description of Artificial Sequence: Synthetic oligonucleotide
  Antisense strand to SEQ ID NO: 2260516
uuuggacacacaugugccu

SEQ ID NO: 2260518 - RNA, 19 nt, Artificial Sequence
  Description of Artificial Sequence: Synthetic oligonucleotide
  Sense strand starting at position 3312 of SEQ ID NO: 1884369
gcacauguguguccaaaug

SEQ ID NO: 2260519 - RNA, 19 nt, Artificial Sequence
  Description of Artificial Sequence: Synthetic oligonucleotide
  Antisense strand to SEQ ID NO: 2260518
cauuuggacacacaugugc

SEQ ID NO: 2260520 - RNA, 19 nt, Artificial Sequence
  Description of Artificial Sequence: Synthetic oligonucleotide
  Sense strand starting at position 3319 of SEQ ID NO: 1884369
uguguccaaaugugaagaa

SEQ ID NO: 2260521 - RNA, 19 nt, Artificial Sequence
  Description of Artificial Sequence: Synthetic oligonucleotide
  Antisense strand to SEQ ID NO: 2260520
uucuucacauuuggacaca

SEQ ID NO: 2260522 - RNA, 19 nt, Artificial Sequence
  Description of Artificial Sequence: Synthetic oligonucleotide
  Sense strand starting at position 3738 of SEQ ID NO: 1884369
acgcccauuuguccuaaga

SEQ ID NO: 2260523 - RNA, 19 nt, Artificial Sequence
  Description of Artificial Sequence: Synthetic oligonucleotide
  Antisense strand to SEQ ID NO: 2260522
ucuuaggacaaaugggcgu

SEQ ID NO: 2260524 - RNA, 19 nt, Artificial Sequence
  Description of Artificial Sequence: Synthetic oligonucleotide
  Sense strand starting at position 3740 of SEQ ID NO: 1884369
gcccauuuguccuaagagg

SEQ ID NO: 2260525 - RNA, 19 nt, Artificial Sequence
  Description of Artificial Sequence: Synthetic oligonucleotide
  Antisense strand to SEQ ID NO: 2260524
ccucuuaggacaaaugggc

SEQ ID NO: 2260526 - RNA, 19 nt, Artificial Sequence
  Description of Artificial Sequence: Synthetic oligonucleotide
  Sense strand starting at position 3784 of SEQ ID NO: 1884369
gguugacagagcugucaca

SEQ ID NO: 2260527 - RNA, 19 nt, Artificial Sequence
  Description of Artificial Sequence: Synthetic oligonucleotide
  Antisense strand to SEQ ID NO: 2260526
ugugacagcucugucaacc

SEQ ID NO: 2260528 - RNA, 19 nt, Artificial Sequence
  Description of Artificial Sequence: Synthetic oligonucleotide
  Sense strand starting at position 3940 of SEQ ID NO: 1884369
agaagaggccuuugucuca

SEQ ID NO: 2260529 - RNA, 19 nt, Artificial Sequence
  Description of Artificial Sequence: Synthetic oligonucleotide
  Antisense strand to SEQ ID NO: 2260528
ugagacaaaggccucuucu

SEQ ID NO: 2260530 - RNA, 19 nt, Artificial Sequence
  Description of Artificial Sequence: Synthetic oligonucleotide
  Sense strand starting at position 107 of SEQ ID NO: 1884370
ggugcuguucuaugaagau

SEQ ID NO: 2260531 - RNA, 19 nt, Artificial Sequence
  Description of Artificial Sequence: Synthetic oligonucleotide
  Antisense strand to SEQ ID NO: 2260530
aucuucauagaacagcacc

SEQ ID NO: 2260532 - RNA, 19 nt, Artificial Sequence
  Description of Artificial Sequence: Synthetic oligonucleotide
  Sense strand starting at position 162 of SEQ ID NO: 1884370
ggagcacuuccagaagggu

SEQ ID NO: 2260533 - RNA, 19 nt, Artificial Sequence
  Description of Artificial Sequence: Synthetic oligonucleotide
  Antisense strand to SEQ ID NO: 2260532
acccuucuggaagugcucc

SEQ ID NO: 2260534 - RNA, 19 nt, Artificial Sequence
  Description of Artificial Sequence: Synthetic oligonucleotide
  Sense strand starting at position 354 of SEQ ID NO: 1884370
gugugcaaccuguacaaca

SEQ ID NO: 2260535 - RNA, 19 nt, Artificial Sequence
  Description of Artificial Sequence: Synthetic oligonucleotide
  Antisense strand to SEQ ID NO: 2260534
uguuguacagguugcacac

SEQ ID NO: 2260536 - RNA, 19 nt, Artificial Sequence
  Description of Artificial Sequence: Synthetic oligonucleotide
  Sense strand starting at position 514 of SEQ ID NO: 1884370
uuaagugucuccuuuggaa

SEQ ID NO: 2260537 - RNA, 19 nt, Artificial Sequence
  Description of Artificial Sequence: Synthetic oligonucleotide
  Antisense strand to SEQ ID NO: 2260536
uuccaaaggagacacuuaa

SEQ ID NO: 2260538 - RNA, 19 nt, Artificial Sequence
  Description of Artificial Sequence: Synthetic oligonucleotide
  Sense strand starting at position 516 of SEQ ID NO: 1884370
aagugucuccuuuggaaua

SEQ ID NO: 2260539 - RNA, 19 nt, Artificial Sequence
  Description of Artificial Sequence: Synthetic oligonucleotide
  Antisense strand to SEQ ID NO: 2260538
uauuccaaaggagacacuu

SEQ ID NO: 2260540 - RNA, 19 nt, Artificial Sequence
  Description of Artificial Sequence: Synthetic oligonucleotide
  Sense strand starting at position 703 of SEQ ID NO: 1884370
gguccuauugacugggauc

SEQ ID NO: 2260541 - RNA, 19 nt, Artificial Sequence
  Description of Artificial Sequence: Synthetic oligonucleotide
  Antisense strand to SEQ ID NO: 2260540
gaucccagucaauaggacc

SEQ ID NO: 2260542 - RNA, 19 nt, Artificial Sequence
  Description of Artificial Sequence: Synthetic oligonucleotide
  Sense strand starting at position 771 of SEQ ID NO: 1884370
ggaccauugcuaggaggga

SEQ ID NO: 2260543 - RNA, 19 nt, Artificial Sequence
  Description of Artificial Sequence: Synthetic oligonucleotide
  Antisense strand to SEQ ID NO: 2260542
ucccuccuagcaauggucc

SEQ ID NO: 2260544 - RNA, 19 nt, Artificial Sequence
  Description of Artificial Sequence: Synthetic oligonucleotide
  Sense strand starting at position 786 of SEQ ID NO: 1884370
gggacagaguuucuucuca

SEQ ID NO: 2260545 - RNA, 19 nt, Artificial Sequence
  Description of Artificial Sequence: Synthetic oligonucleotide
  Antisense strand to SEQ ID NO: 2260544
ugagaagaaacucuguccc

SEQ ID NO: 2260546 - RNA, 19 nt, Artificial Sequence
  Description of Artificial Sequence: Synthetic oligonucleotide
  Sense strand starting at position 788 of SEQ ID NO: 1884370
gacagaguuucuucucagu

SEQ ID NO: 2260547 - RNA, 19 nt, Artificial Sequence
  Description of Artificial Sequence: Synthetic oligonucleotide
  Antisense strand to SEQ ID NO: 2260546
acugagaagaaacucuguc

SEQ ID NO: 2260548 - RNA, 19 nt, Artificial Sequence
  Description of Artificial Sequence: Synthetic oligonucleotide
  Sense strand starting at position 819 of SEQ ID NO: 1884370
cgaccacagucaucacuua

SEQ ID NO: 2260549 - RNA, 19 nt, Artificial Sequence
  Description of Artificial Sequence: Synthetic oligonucleotide
  Antisense strand to SEQ ID NO: 2260548
uaagugaugacuguggucg

SEQ ID NO: 2260550 - RNA, 19 nt, Artificial Sequence
  Description of Artificial Sequence: Synthetic oligonucleotide
  Sense strand starting at position 932 of SEQ ID NO: 1884370
cuggauggcuuccucuaau

SEQ ID NO: 2260551 - RNA, 19 nt, Artificial Sequence
  Description of Artificial Sequence: Synthetic oligonucleotide
  Antisense strand to SEQ ID NO: 2260550
auuagaggaagccauccag

SEQ ID NO: 2260552 - RNA, 19 nt, Artificial Sequence
  Description of Artificial Sequence: Synthetic oligonucleotide
  Sense strand starting at position 935 of SEQ ID NO: 1884370
gauggcuuccucuaauugu

SEQ ID NO: 2260553 - RNA, 19 nt, Artificial Sequence
  Description of Artificial Sequence: Synthetic oligonucleotide
  Antisense strand to SEQ ID NO: 2260552
acaauuagaggaagccauc

SEQ ID NO: 2260554 - RNA, 19 nt, Artificial Sequence
  Description of Artificial Sequence: Synthetic oligonucleotide
  Sense strand starting at position 1009 of SEQ ID NO: 1884370
gaacauggucugcagcaaa

SEQ ID NO: 2260555 - RNA, 19 nt, Artificial Sequence
  Description of Artificial Sequence: Synthetic oligonucleotide
  Antisense strand to SEQ ID NO: 2260554
uuugcugcagaccauguuc

SEQ ID NO: 2260556 - RNA, 19 nt, Artificial Sequence
  Description of Artificial Sequence: Synthetic oligonucleotide
  Sense strand starting at position 1103 of SEQ ID NO: 1884370
agagaaauugggcguuacu

SEQ ID NO: 2260557 - RNA, 19 nt, Artificial Sequence
  Description of Artificial Sequence: Synthetic oligonucleotide
  Antisense strand to SEQ ID NO: 2260556
aguaacgcccaauuucucu

SEQ ID NO: 2260558 - RNA, 19 nt, Artificial Sequence
  Description of Artificial Sequence: Synthetic oligonucleotide
  Sense strand starting at position 1106 of SEQ ID NO: 1884370
gaaauugggcguuacugga

SEQ ID NO: 2260559 - RNA, 19 nt, Artificial Sequence
  Description of Artificial Sequence: Synthetic oligonucleotide
  Antisense strand to SEQ ID NO: 2260558
uccaguaacgcccaauuuc

SEQ ID NO: 2260560 - RNA, 19 nt, Artificial Sequence
  Description of Artificial Sequence: Synthetic oligonucleotide
  Sense strand starting at position 1119 of SEQ ID NO: 1884370
acuggaguuuaguccugga

SEQ ID NO: 2260561 - RNA, 19 nt, Artificial Sequence
  Description of Artificial Sequence: Synthetic oligonucleotide
  Antisense strand to SEQ ID NO: 2260560
uccaggacuaaacuccagu

SEQ ID NO: 2260562 - RNA, 19 nt, Artificial Sequence
  Description of Artificial Sequence: Synthetic oligonucleotide
  Sense strand starting at position 1123 of SEQ ID NO: 1884370
gaguuuaguccuggaaagg

SEQ ID NO: 2260563 - RNA, 19 nt, Artificial Sequence
  Description of Artificial Sequence: Synthetic oligonucleotide
  Antisense strand to SEQ ID NO: 2260562
ccuuuccaggacuaaacuc

SEQ ID NO: 2260564 - RNA, 19 nt, Artificial Sequence
  Description of Artificial Sequence: Synthetic oligonucleotide
  Sense strand starting at position 1243 of SEQ ID NO: 1884370
caagcugugugaccuugaa

SEQ ID NO: 2260565 - RNA, 19 nt, Artificial Sequence
  Description of Artificial Sequence: Synthetic oligonucleotide
  Antisense strand to SEQ ID NO: 2260564
uucaaggucacacagcuug

SEQ ID NO: 2260566 - RNA, 19 nt, Artificial Sequence
  Description of Artificial Sequence: Synthetic oligonucleotide
  Sense strand starting at position 1247 of SEQ ID NO: 1884370
cugugugaccuugaaugaa

SEQ ID NO: 2260567 - RNA, 19 nt, Artificial Sequence
  Description of Artificial Sequence: Synthetic oligonucleotide
  Antisense strand to SEQ ID NO: 2260566
uucauucaaggucacacag

SEQ ID NO: 2260568 - RNA, 19 nt, Artificial Sequence
  Description of Artificial Sequence: Synthetic oligonucleotide
  Sense strand starting at position 1548 of SEQ ID NO: 1884370
ugguaagauagcugaccuu

SEQ ID NO: 2260569 - RNA, 19 nt, Artificial Sequence
  Description of Artificial Sequence: Synthetic oligonucleotide
  Antisense strand to SEQ ID NO: 2260568
aaggucagcuaucuuacca

SEQ ID NO: 2260570 - RNA, 19 nt, Artificial Sequence
  Description of Artificial Sequence: Synthetic oligonucleotide
  Sense strand starting at position 2108 of SEQ ID NO: 1884370
ugcagaagcccaugagaca

SEQ ID NO: 2260571 - RNA, 19 nt, Artificial Sequence
  Description of Artificial Sequence: Synthetic oligonucleotide
  Antisense strand to SEQ ID NO: 2260570
ugucucaugggcuucugca

SEQ ID NO: 2260572 - RNA, 19 nt, Artificial Sequence
  Description of Artificial Sequence: Synthetic oligonucleotide
  Sense strand starting at position 2172 of SEQ ID NO: 1884370
auugaugucccuuggcaag

SEQ ID NO: 2260573 - RNA, 19 nt, Artificial Sequence
  Description of Artificial Sequence: Synthetic oligonucleotide
  Antisense strand to SEQ ID NO: 2260572
cuugccaagggacaucaau

SEQ ID NO: 2260574 - RNA, 19 nt, Artificial Sequence
  Description of Artificial Sequence: Synthetic oligonucleotide
  Sense strand starting at position 2349 of SEQ ID NO: 1884370
guccucaucuaauuaguua

SEQ ID NO: 2260575 - RNA, 19 nt, Artificial Sequence
  Description of Artificial Sequence: Synthetic oligonucleotide
  Antisense strand to SEQ ID NO: 2260574
uaacuaauuagaugaggac

SEQ ID NO: 2260576 - RNA, 19 nt, Artificial Sequence
  Description of Artificial Sequence: Synthetic oligonucleotide
  Sense strand starting at position 2493 of SEQ ID NO: 1884370
auacaugcacuuuguagaa

SEQ ID NO: 2260577 - RNA, 19 nt, Artificial Sequence
  Description of Artificial Sequence: Synthetic oligonucleotide
  Antisense strand to SEQ ID NO: 2260576
uucuacaaagugcauguau

SEQ ID NO: 2260578 - RNA, 19 nt, Artificial Sequence
  Description of Artificial Sequence: Synthetic oligonucleotide
  Sense strand starting at position 2604 of SEQ ID NO: 1884370
caguaauguguauacaaug

SEQ ID NO: 2260579 - RNA, 19 nt, Artificial Sequence
  Description of Artificial Sequence: Synthetic oligonucleotide
  Antisense strand to SEQ ID NO: 2260578
cauuguauacacauuacug

SEQ ID NO: 2260580 - RNA, 19 nt, Artificial Sequence
  Description of Artificial Sequence: Synthetic oligonucleotide
  Sense strand starting at position 2609 of SEQ ID NO: 1884370
auguguauacaaugaagua

SEQ ID NO: 2260581 - RNA, 19 nt, Artificial Sequence
  Description of Artificial Sequence: Synthetic oligonucleotide
  Antisense strand to SEQ ID NO: 2260580
uacuucauuguauacacau

SEQ ID NO: 2260582 - RNA, 19 nt, Artificial Sequence
  Description of Artificial Sequence: Synthetic oligonucleotide
  Sense strand starting at position 2964 of SEQ ID NO: 1884370
ggaagcgucuuucuugaaa

SEQ ID NO: 2260583 - RNA, 19 nt, Artificial Sequence
  Description of Artificial Sequence: Synthetic oligonucleotide
  Antisense strand to SEQ ID NO: 2260582
uuucaagaaagacgcuucc

SEQ ID NO: 2260584 - RNA, 19 nt, Artificial Sequence
  Description of Artificial Sequence: Synthetic oligonucleotide
  Sense strand starting at position 2967 of SEQ ID NO: 1884370
agcgucuuucuugaaagaa

SEQ ID NO: 2260585 - RNA, 19 nt, Artificial Sequence
  Description of Artificial Sequence: Synthetic oligonucleotide
  Antisense strand to SEQ ID NO: 2260584
uucuuucaagaaagacgcu

SEQ ID NO: 2260586 - RNA, 19 nt, Artificial Sequence
  Description of Artificial Sequence: Synthetic oligonucleotide
  Sense strand starting at position 3053 of SEQ ID NO: 1884370
uaaaguugccugcaagaag

SEQ ID NO: 2260587 - RNA, 19 nt, Artificial Sequence
  Description of Artificial Sequence: Synthetic oligonucleotide
  Antisense strand to SEQ ID NO: 2260586
cuucuugcaggcaacuuua

SEQ ID NO: 2260588 - RNA, 19 nt, Artificial Sequence
  Description of Artificial Sequence: Synthetic oligonucleotide
  Sense strand starting at position 3056 of SEQ ID NO: 1884370
aguugccugcaagaagaau

SEQ ID NO: 2260589 - RNA, 19 nt, Artificial Sequence
  Description of Artificial Sequence: Synthetic oligonucleotide
  Antisense strand to SEQ ID NO: 2260588
auucuucuugcaggcaacu

SEQ ID NO: 2260590 - RNA, 19 nt, Artificial Sequence
  Description of Artificial Sequence: Synthetic oligonucleotide
  Sense strand starting at position 3195 of SEQ ID NO: 1884370
cuugacucuaaguguggaa

SEQ ID NO: 2260591 - RNA, 19 nt, Artificial Sequence
  Description of Artificial Sequence: Synthetic oligonucleotide
  Antisense strand to SEQ ID NO: 2260590
uuccacacuuagagucaag

SEQ ID NO: 2260592 - RNA, 19 nt, Artificial Sequence
  Description of Artificial Sequence: Synthetic oligonucleotide
  Sense strand starting at position 3197 of SEQ ID NO: 1884370
ugacucuaaguguggaaua

SEQ ID NO: 2260593 - RNA, 19 nt, Artificial Sequence
  Description of Artificial Sequence: Synthetic oligonucleotide
  Antisense strand to SEQ ID NO: 2260592
uauuccacacuuagaguca

SEQ ID NO: 2260594 - RNA, 19 nt, Artificial Sequence
  Description of Artificial Sequence: Synthetic oligonucleotide
  Sense strand starting at position 3245 of SEQ ID NO: 1884370
uucugaauuguagguaagu

SEQ ID NO: 2260595 - RNA, 19 nt, Artificial Sequence
  Description of Artificial Sequence: Synthetic oligonucleotide
  Antisense strand to SEQ ID NO: 2260594
acuuaccuacaauucagaa

SEQ ID NO: 2260596 - RNA, 19 nt, Artificial Sequence
  Description of Artificial Sequence: Synthetic oligonucleotide
  Sense strand starting at position 3246 of SEQ ID NO: 1884370
ucugaauuguagguaaguu

SEQ ID NO: 2260597 - RNA, 19 nt, Artificial Sequence
  Description of Artificial Sequence: Synthetic oligonucleotide
  Antisense strand to SEQ ID NO: 2260596
aacuuaccuacaauucaga

SEQ ID NO: 2260598 - RNA, 19 nt, Artificial Sequence
  Description of Artificial Sequence: Synthetic oligonucleotide
  Sense strand starting at position 3247 of SEQ ID NO: 1884370
cugaauuguagguaaguua

SEQ ID NO: 2260599 - RNA, 19 nt, Artificial Sequence
  Description of Artificial Sequence: Synthetic oligonucleotide
  Antisense strand to SEQ ID NO: 2260598
uaacuuaccuacaauucag

SEQ ID NO: 2260600 - RNA, 19 nt, Artificial Sequence
  Description of Artificial Sequence: Synthetic oligonucleotide
  Sense strand starting at position 3324 of SEQ ID NO: 1884370
auuccugugcauuaugaaa

SEQ ID NO: 2260601 - RNA, 19 nt, Artificial Sequence
  Description of Artificial Sequence: Synthetic oligonucleotide
  Antisense strand to SEQ ID NO: 2260600
uuucauaaugcacaggaau

SEQ ID NO: 2260602 - RNA, 19 nt, Artificial Sequence
  Description of Artificial Sequence: Synthetic oligonucleotide
  Sense strand starting at position 3437 of SEQ ID NO: 1884370
cugggcuacucuucucuua

SEQ ID NO: 2260603 - RNA, 19 nt, Artificial Sequence
  Description of Artificial Sequence: Synthetic oligonucleotide
  Antisense strand to SEQ ID NO: 2260602
uaagagaagaguagcccag

SEQ ID NO: 2260604 - RNA, 19 nt, Artificial Sequence
  Description of Artificial Sequence: Synthetic oligonucleotide
  Sense strand starting at position 3439 of SEQ ID NO: 1884370
gggcuacucuucucuuaag

SEQ ID NO: 2260605 - RNA, 19 nt, Artificial Sequence
  Description of Artificial Sequence: Synthetic oligonucleotide
  Antisense strand to SEQ ID NO: 2260604
cuuaagagaagaguagccc

SEQ ID NO: 2260606 - RNA, 19 nt, Artificial Sequence
  Description of Artificial Sequence: Synthetic oligonucleotide
  Sense strand starting at position 3604 of SEQ ID NO: 1884370
cagaaugaauguccucaga

SEQ ID NO: 2260607 - RNA, 19 nt, Artificial Sequence
  Description of Artificial Sequence: Synthetic oligonucleotide
  Antisense strand to SEQ ID NO: 2260606
ucugaggacauucauucug

SEQ ID NO: 2260608 - RNA, 19 nt, Artificial Sequence
  Description of Artificial Sequence: Synthetic oligonucleotide
  Sense strand starting at position 3606 of SEQ ID NO: 1884370
gaaugaauguccucagacc

SEQ ID NO: 2260609 - RNA, 19 nt, Artificial Sequence
  Description of Artificial Sequence: Synthetic oligonucleotide
  Antisense strand to SEQ ID NO: 2260608
ggucugaggacauucauuc

SEQ ID NO: 2260610 - RNA, 19 nt, Artificial Sequence
  Description of Artificial Sequence: Synthetic oligonucleotide
  Sense strand starting at position 61 of SEQ ID NO: 1884371
agguaacuucgaugagggu

SEQ ID NO: 2260611 - RNA, 19 nt, Artificial Sequence
  Description of Artificial Sequence: Synthetic oligonucleotide
  Antisense strand to SEQ ID NO: 2260610
acccucaucgaaguuaccu

SEQ ID NO: 2260612 - RNA, 19 nt, Artificial Sequence
  Description of Artificial Sequence: Synthetic oligonucleotide
  Sense strand starting at position 508 of SEQ ID NO: 1884371
acugacguucccggaaaga

SEQ ID NO: 2260613 - RNA, 19 nt, Artificial Sequence
  Description of Artificial Sequence: Synthetic oligonucleotide
  Antisense strand to SEQ ID NO: 2260612
ucuuuccgggaacgucagu

SEQ ID NO: 2260614 - RNA, 19 nt, Artificial Sequence
  Description of Artificial Sequence: Synthetic oligonucleotide
  Sense strand starting at position 908 of SEQ ID NO: 1884371
agugaugccuccugaucua

SEQ ID NO: 2260615 - RNA, 19 nt, Artificial Sequence
  Description of Artificial Sequence: Synthetic oligonucleotide
  Antisense strand to SEQ ID NO: 2260614
uagaucaggaggcaucacu

SEQ ID NO: 2260616 - RNA, 19 nt, Artificial Sequence
  Description of Artificial Sequence: Synthetic oligonucleotide
  Sense strand starting at position 925 of SEQ ID NO: 1884371
uauccauaggccuggaaga

SEQ ID NO: 2260617 - RNA, 19 nt, Artificial Sequence
  Description of Artificial Sequence: Synthetic oligonucleotide
  Antisense strand to SEQ ID NO: 2260616
ucuuccaggccuauggaua

SEQ ID NO: 2260618 - RNA, 19 nt, Artificial Sequence
  Description of Artificial Sequence: Synthetic oligonucleotide
  Sense strand starting at position 926 of SEQ ID NO: 1884371
auccauaggccuggaagau

SEQ ID NO: 2260619 - RNA, 19 nt, Artificial Sequence
  Description of Artificial Sequence: Synthetic oligonucleotide
  Antisense strand to SEQ ID NO: 2260618
aucuuccaggccuauggau

SEQ ID NO: 2260620 - RNA, 19 nt, Artificial Sequence
  Description of Artificial Sequence: Synthetic oligonucleotide
  Sense strand starting at position 959 of SEQ ID NO: 1884371
cgaugagcagaauggucau

SEQ ID NO: 2260621 - RNA, 19 nt, Artificial Sequence
  Description of Artificial Sequence: Synthetic oligonucleotide
  Antisense strand to SEQ ID NO: 2260620
augaccauucugcucaucg

SEQ ID NO: 2260622 - RNA, 19 nt, Artificial Sequence
  Description of Artificial Sequence: Synthetic oligonucleotide
  Sense strand starting at position 974 of SEQ ID NO: 1884371
ucaugaggaugcccagaau

SEQ ID NO: 2260623 - RNA, 19 nt, Artificial Sequence
  Description of Artificial Sequence: Synthetic oligonucleotide
  Antisense strand to SEQ ID NO: 2260622
auucugggcauccucauga

SEQ ID NO: 2260624 - RNA, 19 nt, Artificial Sequence
  Description of Artificial Sequence: Synthetic oligonucleotide
  Sense strand starting at position 1280 of SEQ ID NO: 1884371
ggugaagucaccugugagu

SEQ ID NO: 2260625 - RNA, 19 nt, Artificial Sequence
  Description of Artificial Sequence: Synthetic oligonucleotide
  Antisense strand to SEQ ID NO: 2260624
acucacaggugacuucacc

SEQ ID NO: 2260626 - RNA, 19 nt, Artificial Sequence
  Description of Artificial Sequence: Synthetic oligonucleotide
  Sense strand starting at position 1282 of SEQ ID NO: 1884371
ugaagucaccugugaguuc

SEQ ID NO: 2260627 - RNA, 19 nt, Artificial Sequence
  Description of Artificial Sequence: Synthetic oligonucleotide
  Antisense strand to SEQ ID NO: 2260626
gaacucacaggugacuuca

SEQ ID NO: 2260628 - RNA, 19 nt, Artificial Sequence
  Description of Artificial Sequence: Synthetic oligonucleotide
  Sense strand starting at position 1302 of SEQ ID NO: 1884371
cuucucacuuucugggaga

SEQ ID NO: 2260629 - RNA, 19 nt, Artificial Sequence
  Description of Artificial Sequence: Synthetic oligonucleotide
  Antisense strand to SEQ ID NO: 2260628
ucucccagaaagugagaag

SEQ ID NO: 2260630 - RNA, 19 nt, Artificial Sequence
  Description of Artificial Sequence: Synthetic oligonucleotide
  Sense strand starting at position 1350 of SEQ ID NO: 1884371
guaauuucuuacugggcua

SEQ ID NO: 2260631 - RNA, 19 nt, Artificial Sequence
  Description of Artificial Sequence: Synthetic oligonucleotide
  Antisense strand to SEQ ID NO: 2260630
uagcccaguaagaaauuac

SEQ ID NO: 2260632 - RNA, 19 nt, Artificial Sequence
  Description of Artificial Sequence: Synthetic oligonucleotide
  Sense strand starting at position 1372 of SEQ ID NO: 1884371
ggagaacugcucugggcua

SEQ ID NO: 2260633 - RNA, 19 nt, Artificial Sequence
  Description of Artificial Sequence: Synthetic oligonucleotide
  Antisense strand to SEQ ID NO: 2260632
uagcccagagcaguucucc

SEQ ID NO: 2260634 - RNA, 19 nt, Artificial Sequence
  Description of Artificial Sequence: Synthetic oligonucleotide
  Sense strand starting at position 1432 of SEQ ID NO: 1884371
ccuggagccuccuccuaaa

SEQ ID NO: 2260635 - RNA, 19 nt, Artificial Sequence
  Description of Artificial Sequence: Synthetic oligonucleotide
  Antisense strand to SEQ ID NO: 2260634
uuuaggaggaggcuccagg

SEQ ID NO: 2260636 - RNA, 19 nt, Artificial Sequence
  Description of Artificial Sequence: Synthetic oligonucleotide
  Sense strand starting at position 1878 of SEQ ID NO: 1884371
agguuuggacagugugauu

SEQ ID NO: 2260637 - RNA, 19 nt, Artificial Sequence
  Description of Artificial Sequence: Synthetic oligonucleotide
  Antisense strand to SEQ ID NO: 2260636
aaucacacuguccaaaccu

SEQ ID NO: 2260638 - RNA, 19 nt, Artificial Sequence
  Description of Artificial Sequence: Synthetic oligonucleotide
  Sense strand starting at position 1893 of SEQ ID NO: 1884371
gauucaugguguccagcga

SEQ ID NO: 2260639 - RNA, 19 nt, Artificial Sequence
  Description of Artificial Sequence: Synthetic oligonucleotide
  Antisense strand to SEQ ID NO: 2260638
ucgcuggacaccaugaauc

SEQ ID NO: 2260640 - RNA, 19 nt, Artificial Sequence
  Description of Artificial Sequence: Synthetic oligonucleotide
  Sense strand starting at position 1894 of SEQ ID NO: 1884371
auucaugguguccagcgaa

SEQ ID NO: 2260641 - RNA, 19 nt, Artificial Sequence
  Description of Artificial Sequence: Synthetic oligonucleotide
  Antisense strand to SEQ ID NO: 2260640
uucgcuggacaccaugaau

SEQ ID NO: 2260642 - RNA, 19 nt, Artificial Sequence
  Description of Artificial Sequence: Synthetic oligonucleotide
  Sense strand starting at position 1933 of SEQ ID NO: 1884371
cugggaugguucucaguga

SEQ ID NO: 2260643 - RNA, 19 nt, Artificial Sequence
  Description of Artificial Sequence: Synthetic oligonucleotide
  Antisense strand to SEQ ID NO: 2260642
ucacugagaaccaucccag

SEQ ID NO: 2260644 - RNA, 19 nt, Artificial Sequence
  Description of Artificial Sequence: Synthetic oligonucleotide
  Sense strand starting at position 1969 of SEQ ID NO: 1884371
uaguuucgguuucucaaca

SEQ ID NO: 2260645 - RNA, 19 nt, Artificial Sequence
  Description of Artificial Sequence: Synthetic oligonucleotide
  Antisense strand to SEQ ID NO: 2260644
uguugagaaaccgaaacua

SEQ ID NO: 2260646 - RNA, 19 nt, Artificial Sequence
  Description of Artificial Sequence: Synthetic oligonucleotide
  Sense strand starting at position 2043 of SEQ ID NO: 1884371
ggaacaaauuccugaggau

SEQ ID NO: 2260647 - RNA, 19 nt, Artificial Sequence
  Description of Artificial Sequence: Synthetic oligonucleotide
  Antisense strand to SEQ ID NO: 2260646
auccucaggaauuuguucc

SEQ ID NO: 2260648 - RNA, 19 nt, Artificial Sequence
  Description of Artificial Sequence: Synthetic oligonucleotide
  Sense strand starting at position 2046 of SEQ ID NO: 1884371
acaaauuccugaggaucaa

SEQ ID NO: 2260649 - RNA, 19 nt, Artificial Sequence
  Description of Artificial Sequence: Synthetic oligonucleotide
  Antisense strand to SEQ ID NO: 2260648
uugauccucaggaauuugu

SEQ ID NO: 2260650 - RNA, 19 nt, Artificial Sequence
  Description of Artificial Sequence: Synthetic oligonucleotide
  Sense strand starting at position 2134 of SEQ ID NO: 1884371
gcacaaggcucaucuuguu

SEQ ID NO: 2260651 - RNA, 19 nt, Artificial Sequence
  Description of Artificial Sequence: Synthetic oligonucleotide
  Antisense strand to SEQ ID NO: 2260650
aacaagaugagccuugugc

SEQ ID NO: 2260652 - RNA, 19 nt, Artificial Sequence
  Description of Artificial Sequence: Synthetic oligonucleotide
  Sense strand starting at position 2137 of SEQ ID NO: 1884371
caaggcucaucuuguuagu

SEQ ID NO: 2260653 - RNA, 19 nt, Artificial Sequence
  Description of Artificial Sequence: Synthetic oligonucleotide
  Antisense strand to SEQ ID NO: 2260652
acuaacaagaugagccuug

SEQ ID NO: 2260654 - RNA, 19 nt, Artificial Sequence
  Description of Artificial Sequence: Synthetic oligonucleotide
  Sense strand starting at position 2140 of SEQ ID NO: 1884371
ggcucaucuuguuaguggu

SEQ ID NO: 2260655 - RNA, 19 nt, Artificial Sequence
  Description of Artificial Sequence: Synthetic oligonucleotide
  Antisense strand to SEQ ID NO: 2260654
accacuaacaagaugagcc

SEQ ID NO: 2260656 - RNA, 19 nt, Artificial Sequence
  Description of Artificial Sequence: Synthetic oligonucleotide
  Sense strand starting at position 2686 of SEQ ID NO: 1884371
gcagcuggauuaucccaua

SEQ ID NO: 2260657 - RNA, 19 nt, Artificial Sequence
  Description of Artificial Sequence: Synthetic oligonucleotide
  Antisense strand to SEQ ID NO: 2260656
uaugggauaauccagcugc

SEQ ID NO: 2260658 - RNA, 19 nt, Artificial Sequence
  Description of Artificial Sequence: Synthetic oligonucleotide
  Sense strand starting at position 2689 of SEQ ID NO: 1884371
gcuggauuaucccauaacc

SEQ ID NO: 2260659 - RNA, 19 nt, Artificial Sequence
  Description of Artificial Sequence: Synthetic oligonucleotide
  Antisense strand to SEQ ID NO: 2260658
gguuaugggauaauccagc

SEQ ID NO: 2260660 - RNA, 19 nt, Artificial Sequence
  Description of Artificial Sequence: Synthetic oligonucleotide
  Sense strand starting at position 3837 of SEQ ID NO: 1884371
uucuucucccuguguuaag

SEQ ID NO: 2260661 - RNA, 19 nt, Artificial Sequence
  Description of Artificial Sequence: Synthetic oligonucleotide
  Antisense strand to SEQ ID NO: 2260660
cuuaacacagggagaagaa

SEQ ID NO: 2260662 - RNA, 19 nt, Artificial Sequence
  Description of Artificial Sequence: Synthetic oligonucleotide
  Sense strand starting at position 3864 of SEQ ID NO: 1884371
gggagagucucagagcaca

SEQ ID NO: 2260663 - RNA, 19 nt, Artificial Sequence
  Description of Artificial Sequence: Synthetic oligonucleotide
  Antisense strand to SEQ ID NO: 2260662
ugugcucugagacucuccc

SEQ ID NO: 2260664 - RNA, 19 nt, Artificial Sequence
  Description of Artificial Sequence: Synthetic oligonucleotide
  Sense strand starting at position 187 of SEQ ID NO: 1884372
ugagcaacuucccuagauc

SEQ ID NO: 2260665 - RNA, 19 nt, Artificial Sequence
  Description of Artificial Sequence: Synthetic oligonucleotide
  Antisense strand to SEQ ID NO: 2260664
gaucuagggaaguugcuca

SEQ ID NO: 2260666 - RNA, 19 nt, Artificial Sequence
  Description of Artificial Sequence: Synthetic oligonucleotide
  Sense strand starting at position 246 of SEQ ID NO: 1884372
gguauugucucccagccuu

SEQ ID NO: 2260667 - RNA, 19 nt, Artificial Sequence
  Description of Artificial Sequence: Synthetic oligonucleotide
  Antisense strand to SEQ ID NO: 2260666
aaggcugggagacaauacc

SEQ ID NO: 2260668 - RNA, 19 nt, Artificial Sequence
  Description of Artificial Sequence: Synthetic oligonucleotide
  Sense strand starting at position 331 of SEQ ID NO: 1884372
uuaugagucuccugacuuu

SEQ ID NO: 2260669 - RNA, 19 nt, Artificial Sequence
  Description of Artificial Sequence: Synthetic oligonucleotide
  Antisense strand to SEQ ID NO: 2260668
aaagucaggagacucauaa

SEQ ID NO: 2260670 - RNA, 19 nt, Artificial Sequence
  Description of Artificial Sequence: Synthetic oligonucleotide
  Sense strand starting at position 419 of SEQ ID NO: 1884372
gucccugggucccaagaaa

SEQ ID NO: 2260671 - RNA, 19 nt, Artificial Sequence
  Description of Artificial Sequence: Synthetic oligonucleotide
  Antisense strand to SEQ ID NO: 2260670
uuucuugggacccagggac

SEQ ID NO: 2260672 - RNA, 19 nt, Artificial Sequence
  Description of Artificial Sequence: Synthetic oligonucleotide
  Sense strand starting at position 454 of SEQ ID NO: 1884372
accugcgaccuauaaguuu

SEQ ID NO: 2260673 - RNA, 19 nt, Artificial Sequence
  Description of Artificial Sequence: Synthetic oligonucleotide
  Antisense strand to SEQ ID NO: 2260672
aaacuuauaggucgcaggu

SEQ ID NO: 2260674 - RNA, 19 nt, Artificial Sequence
  Description of Artificial Sequence: Synthetic oligonucleotide
  Sense strand starting at position 481 of SEQ ID NO: 1884372
cuaacuagguuuccagaaa

SEQ ID NO: 2260675 - RNA, 19 nt, Artificial Sequence
  Description of Artificial Sequence: Synthetic oligonucleotide
  Antisense strand to SEQ ID NO: 2260674
uuucuggaaaccuaguuag

SEQ ID NO: 2260676 - RNA, 19 nt, Artificial Sequence
  Description of Artificial Sequence: Synthetic oligonucleotide
  Sense strand starting at position 508 of SEQ ID NO: 1884372
ucaaaucuccauuggguaa

SEQ ID NO: 2260677 - RNA, 19 nt, Artificial Sequence
  Description of Artificial Sequence: Synthetic oligonucleotide
  Antisense strand to SEQ ID NO: 2260676
uuacccaauggagauuuga

SEQ ID NO: 2260678 - RNA, 19 nt, Artificial Sequence
  Description of Artificial Sequence: Synthetic oligonucleotide
  Sense strand starting at position 519 of SEQ ID NO: 1884372
uuggguaauuuccaugugu

SEQ ID NO: 2260679 - RNA, 19 nt, Artificial Sequence
  Description of Artificial Sequence: Synthetic oligonucleotide
  Antisense strand to SEQ ID NO: 2260678
acacauggaaauuacccaa

SEQ ID NO: 2260680 - RNA, 19 nt, Artificial Sequence
  Description of Artificial Sequence: Synthetic oligonucleotide
  Sense strand starting at position 521 of SEQ ID NO: 1884372
ggguaauuuccaugugucc

SEQ ID NO: 2260681 - RNA, 19 nt, Artificial Sequence
  Description of Artificial Sequence: Synthetic oligonucleotide
  Antisense strand to SEQ ID NO: 2260680
ggacacauggaaauuaccc

SEQ ID NO: 2260682 - RNA, 19 nt, Artificial Sequence
  Description of Artificial Sequence: Synthetic oligonucleotide
  Sense strand starting at position 763 of SEQ ID NO: 1884372
ccaucucugaaggguguua

SEQ ID NO: 2260683 - RNA, 19 nt, Artificial Sequence
  Description of Artificial Sequence: Synthetic oligonucleotide
  Antisense strand to SEQ ID NO: 2260682
uaacacccuucagagaugg

SEQ ID NO: 2260684 - RNA, 19 nt, Artificial Sequence
  Description of Artificial Sequence: Synthetic oligonucleotide
  Sense strand starting at position 765 of SEQ ID NO: 1884372
aucucugaaggguguuaaa

SEQ ID NO: 2260685 - RNA, 19 nt, Artificial Sequence
  Description of Artificial Sequence: Synthetic oligonucleotide
  Antisense strand to SEQ ID NO: 2260684
uuuaacacccuucagagau

SEQ ID NO: 2260686 - RNA, 19 nt, Artificial Sequence
  Description of Artificial Sequence: Synthetic oligonucleotide
  Sense strand starting at position 799 of SEQ ID NO: 1884372
cacaguaauuaugaagguu

SEQ ID NO: 2260687 - RNA, 19 nt, Artificial Sequence
  Description of Artificial Sequence: Synthetic oligonucleotide
  Antisense strand to SEQ ID NO: 2260686
aaccuucauaauuacugug

SEQ ID NO: 2260688 - RNA, 19 nt, Artificial Sequence
  Description of Artificial Sequence: Synthetic oligonucleotide
  Sense strand starting at position 904 of SEQ ID NO: 1884372
ccaagaauguguuuggauc

SEQ ID NO: 2260689 - RNA, 19 nt, Artificial Sequence
  Description of Artificial Sequence: Synthetic oligonucleotide
  Antisense strand to SEQ ID NO: 2260688
gauccaaacacauucuugg

SEQ ID NO: 2260690 - RNA, 19 nt, Artificial Sequence
  Description of Artificial Sequence: Synthetic oligonucleotide
  Sense strand starting at position 961 of SEQ ID NO: 1884372
guaauauggcucuacggca

SEQ ID NO: 2260691 - RNA, 19 nt, Artificial Sequence
  Description of Artificial Sequence: Synthetic oligonucleotide
  Antisense strand to SEQ ID NO: 2260690
ugccguagagccauauuac

SEQ ID NO: 2260692 - RNA, 19 nt, Artificial Sequence
  Description of Artificial Sequence: Synthetic oligonucleotide
  Sense strand starting at position 1062 of SEQ ID NO: 1884372
agaccucuuucucuauguu

SEQ ID NO: 2260693 - RNA, 19 nt, Artificial Sequence
  Description of Artificial Sequence: Synthetic oligonucleotide
  Antisense strand to SEQ ID NO: 2260692
aacauagagaaagaggucu

SEQ ID NO: 2260694 - RNA, 19 nt, Artificial Sequence
  Description of Artificial Sequence: Synthetic oligonucleotide
  Sense strand starting at position 1136 of SEQ ID NO: 1884372
gagucucgaguuuagucau

SEQ ID NO: 2260695 - RNA, 19 nt, Artificial Sequence
  Description of Artificial Sequence: Synthetic oligonucleotide
  Antisense strand to SEQ ID NO: 2260694
augacuaaacucgagacuc

SEQ ID NO: 2260696 - RNA, 19 nt, Artificial Sequence
  Description of Artificial Sequence: Synthetic oligonucleotide
  Sense strand starting at position 1139 of SEQ ID NO: 1884372
ucucgaguuuagucauuaa

SEQ ID NO: 2260697 - RNA, 19 nt, Artificial Sequence
  Description of Artificial Sequence: Synthetic oligonucleotide
  Antisense strand to SEQ ID NO: 2260696
uuaaugacuaaacucgaga

SEQ ID NO: 2260698 - RNA, 19 nt, Artificial Sequence
  Description of Artificial Sequence: Synthetic oligonucleotide
  Sense strand starting at position 1142 of SEQ ID NO: 1884372
cgaguuuagucauuaauca

SEQ ID NO: 2260699 - RNA, 19 nt, Artificial Sequence
  Description of Artificial Sequence: Synthetic oligonucleotide
  Antisense strand to SEQ ID NO: 2260698
ugauuaaugacuaaacucg

SEQ ID NO: 2260700 - RNA, 19 nt, Artificial Sequence
  Description of Artificial Sequence: Synthetic oligonucleotide
  Sense strand starting at position 1366 of SEQ ID NO: 1884372
caacucggauuugggaaau

SEQ ID NO: 2260701 - RNA, 19 nt, Artificial Sequence
  Description of Artificial Sequence: Synthetic oligonucleotide
  Antisense strand to SEQ ID NO: 2260700
auuucccaaauccgaguug

SEQ ID NO: 2260702 - RNA, 19 nt, Artificial Sequence
  Description of Artificial Sequence: Synthetic oligonucleotide
  Sense strand starting at position 1379 of SEQ ID NO: 1884372
ggaaauuucucucuagcgu

SEQ ID NO: 2260703 - RNA, 19 nt, Artificial Sequence
  Description of Artificial Sequence: Synthetic oligonucleotide
  Antisense strand to SEQ ID NO: 2260702
acgcuagagagaaauuucc

SEQ ID NO: 2260704 - RNA, 19 nt, Artificial Sequence
  Description of Artificial Sequence: Synthetic oligonucleotide
  Sense strand starting at position 2048 of SEQ ID NO: 1884372
cgaagugauugauggcgga

SEQ ID NO: 2260705 - RNA, 19 nt, Artificial Sequence
  Description of Artificial Sequence: Synthetic oligonucleotide
  Antisense strand to SEQ ID NO: 2260704
uccgccaucaaucacuucg

SEQ ID NO: 2260706 - RNA, 19 nt, Artificial Sequence
  Description of Artificial Sequence: Synthetic oligonucleotide
  Sense strand starting at position 2199 of SEQ ID NO: 1884372
agugcuuucuuacaucguu

SEQ ID NO: 2260707 - RNA, 19 nt, Artificial Sequence
  Description of Artificial Sequence: Synthetic oligonucleotide
  Antisense strand to SEQ ID NO: 2260706
aacgauguaagaaagcacu

SEQ ID NO: 2260708 - RNA, 19 nt, Artificial Sequence
  Description of Artificial Sequence: Synthetic oligonucleotide
  Sense strand starting at position 2277 of SEQ ID NO: 1884372
cgaacucgcgucuaugcaa

SEQ ID NO: 2260709 - RNA, 19 nt, Artificial Sequence
  Description of Artificial Sequence: Synthetic oligonucleotide
  Antisense strand to SEQ ID NO: 2260708
uugcauagacgcgaguucg

SEQ ID NO: 2260710 - RNA, 19 nt, Artificial Sequence
  Description of Artificial Sequence: Synthetic oligonucleotide
  Sense strand starting at position 2315 of SEQ ID NO: 1884372
ggguaaccauuauccagau

SEQ ID NO: 2260711 - RNA, 19 nt, Artificial Sequence
  Description of Artificial Sequence: Synthetic oligonucleotide
  Antisense strand to SEQ ID NO: 2260710
aucuggauaaugguuaccc

SEQ ID NO: 2260712 - RNA, 19 nt, Artificial Sequence
  Description of Artificial Sequence: Synthetic oligonucleotide
  Sense strand starting at position 2316 of SEQ ID NO: 1884372
gguaaccauuauccagaua

SEQ ID NO: 2260713 - RNA, 19 nt, Artificial Sequence
  Description of Artificial Sequence: Synthetic oligonucleotide
  Antisense strand to SEQ ID NO: 2260712
uaucuggauaaugguuacc

SEQ ID NO: 2260714 - RNA, 19 nt, Artificial Sequence
  Description of Artificial Sequence: Synthetic oligonucleotide
  Sense strand starting at position 2396 of SEQ ID NO: 1884372
uaggauuugagcuguguuu

SEQ ID NO: 2260715 - RNA, 19 nt, Artificial Sequence
  Description of Artificial Sequence: Synthetic oligonucleotide
  Antisense strand to SEQ ID NO: 2260714
aaacacagcucaaauccua

SEQ ID NO: 2260716 - RNA, 19 nt, Artificial Sequence
  Description of Artificial Sequence: Synthetic oligonucleotide
  Sense strand starting at position 2407 of SEQ ID NO: 1884372
cuguguuucccgcccugau

SEQ ID NO: 2260717 - RNA, 19 nt, Artificial Sequence
  Description of Artificial Sequence: Synthetic oligonucleotide
  Antisense strand to SEQ ID NO: 2260716
aucagggcgggaaacacag

SEQ ID NO: 2260718 - RNA, 19 nt, Artificial Sequence
  Description of Artificial Sequence: Synthetic oligonucleotide
  Sense strand starting at position 2837 of SEQ ID NO: 1884372
cccugaauucucuagaacg

SEQ ID NO: 2260719 - RNA, 19 nt, Artificial Sequence
  Description of Artificial Sequence: Synthetic oligonucleotide
  Antisense strand to SEQ ID NO: 2260718
cguucuagagaauucaggg

SEQ ID NO: 2260720 - RNA, 19 nt, Artificial Sequence
  Description of Artificial Sequence: Synthetic oligonucleotide
  Sense strand starting at position 157 of SEQ ID NO: 1884373
uccacaugugucugauucu

SEQ ID NO: 2260721 - RNA, 19 nt, Artificial Sequence
  Description of Artificial Sequence: Synthetic oligonucleotide
  Antisense strand to SEQ ID NO: 2260720
agaaucagacacaugugga

SEQ ID NO: 2260722 - RNA, 19 nt, Artificial Sequence
  Description of Artificial Sequence: Synthetic oligonucleotide
  Sense strand starting at position 160 of SEQ ID NO: 1884373
acaugugucugauucuaga

SEQ ID NO: 2260723 - RNA, 19 nt, Artificial Sequence
  Description of Artificial Sequence: Synthetic oligonucleotide
  Antisense strand to SEQ ID NO: 2260722
ucuagaaucagacacaugu

SEQ ID NO: 2260724 - RNA, 19 nt, Artificial Sequence
  Description of Artificial Sequence: Synthetic oligonucleotide
  Sense strand starting at position 209 of SEQ ID NO: 1884373
ugcucucugugaucagaag

SEQ ID NO: 2260725 - RNA, 19 nt, Artificial Sequence
  Description of Artificial Sequence: Synthetic oligonucleotide
  Antisense strand to SEQ ID NO: 2260724
cuucugaucacagagagca

SEQ ID NO: 2260726 - RNA, 19 nt, Artificial Sequence
  Description of Artificial Sequence: Synthetic oligonucleotide
  Sense strand starting at position 313 of SEQ ID NO: 1884373
ugagcucucagauguguua

SEQ ID NO: 2260727 - RNA, 19 nt, Artificial Sequence
  Description of Artificial Sequence: Synthetic oligonucleotide
  Antisense strand to SEQ ID NO: 2260726
uaacacaucugagagcuca

SEQ ID NO: 2260728 - RNA, 19 nt, Artificial Sequence
  Description of Artificial Sequence: Synthetic oligonucleotide
  Sense strand starting at position 545 of SEQ ID NO: 1884373
cugggagggcuuugccuau

SEQ ID NO: 2260729 - RNA, 19 nt, Artificial Sequence
  Description of Artificial Sequence: Synthetic oligonucleotide
  Antisense strand to SEQ ID NO: 2260728
auaggcaaagcccucccag

SEQ ID NO: 2260730 - RNA, 19 nt, Artificial Sequence
  Description of Artificial Sequence: Synthetic oligonucleotide
  Sense strand starting at position 754 of SEQ ID NO: 1884373
ggcauugucuucuuuguaa

SEQ ID NO: 2260731 - RNA, 19 nt, Artificial Sequence
  Description of Artificial Sequence: Synthetic oligonucleotide
  Antisense strand to SEQ ID NO: 2260730
uuacaaagaagacaaugcc

SEQ ID NO: 2260732 - RNA, 19 nt, Artificial Sequence
  Description of Artificial Sequence: Synthetic oligonucleotide
  Sense strand starting at position 757 of SEQ ID NO: 1884373
auugucuucuuuguaagaa

SEQ ID NO: 2260733 - RNA, 19 nt, Artificial Sequence
  Description of Artificial Sequence: Synthetic oligonucleotide
  Antisense strand to SEQ ID NO: 2260732
uucuuacaaagaagacaau

SEQ ID NO: 2260734 - RNA, 19 nt, Artificial Sequence
  Description of Artificial Sequence: Synthetic oligonucleotide
  Sense strand starting at position 795 of SEQ ID NO: 1884373
uuaagagucuuguugauca

SEQ ID NO: 2260735 - RNA, 19 nt, Artificial Sequence
  Description of Artificial Sequence: Synthetic oligonucleotide
  Antisense strand to SEQ ID NO: 2260734
ugaucaacaagacucuuaa

SEQ ID NO: 2260736 - RNA, 19 nt, Artificial Sequence
  Description of Artificial Sequence: Synthetic oligonucleotide
  Sense strand starting at position 799 of SEQ ID NO: 1884373
gagucuuguugaucaagca

SEQ ID NO: 2260737 - RNA, 19 nt, Artificial Sequence
  Description of Artificial Sequence: Synthetic oligonucleotide
  Antisense strand to SEQ ID NO: 2260736
ugcuugaucaacaagacuc

SEQ ID NO: 2260738 - RNA, 19 nt, Artificial Sequence
  Description of Artificial Sequence: Synthetic oligonucleotide
  Sense strand starting at position 1014 of SEQ ID NO: 1884373
cuuauaccgucuuugaucu

SEQ ID NO: 2260739 - RNA, 19 nt, Artificial Sequence
  Description of Artificial Sequence: Synthetic oligonucleotide
  Antisense strand to SEQ ID NO: 2260738
agaucaaagacgguauaag

SEQ ID NO: 2260740 - RNA, 19 nt, Artificial Sequence
  Description of Artificial Sequence: Synthetic oligonucleotide
  Sense strand starting at position 1035 of SEQ ID NO: 1884373
acgucagugccuugauuuc

SEQ ID NO: 2260741 - RNA, 19 nt, Artificial Sequence
  Description of Artificial Sequence: Synthetic oligonucleotide
  Antisense strand to SEQ ID NO: 2260740
gaaaucaaggcacugacgu

SEQ ID NO: 2260742 - RNA, 19 nt, Artificial Sequence
  Description of Artificial Sequence: Synthetic oligonucleotide
  Sense strand starting at position 1042 of SEQ ID NO: 1884373
ugccuugauuucgaaacau

SEQ ID NO: 2260743 - RNA, 19 nt, Artificial Sequence
  Description of Artificial Sequence: Synthetic oligonucleotide
  Antisense strand to SEQ ID NO: 2260742
auguuucgaaaucaaggca

SEQ ID NO: 2260744 - RNA, 19 nt, Artificial Sequence
  Description of Artificial Sequence: Synthetic oligonucleotide
  Sense strand starting at position 1081 of SEQ ID NO: 1884373
cagcgagucguugugguau

SEQ ID NO: 2260745 - RNA, 19 nt, Artificial Sequence
  Description of Artificial Sequence: Synthetic oligonucleotide
  Antisense strand to SEQ ID NO: 2260744
auaccacaacgacucgcug

SEQ ID NO: 2260746 - RNA, 19 nt, Artificial Sequence
  Description of Artificial Sequence: Synthetic oligonucleotide
  Sense strand starting at position 1094 of SEQ ID NO: 1884373
ugguauuugggcugcacau

SEQ ID NO: 2260747 - RNA, 19 nt, Artificial Sequence
  Description of Artificial Sequence: Synthetic oligonucleotide
  Antisense strand to SEQ ID NO: 2260746
augugcagcccaaauacca

SEQ ID NO: 2260748 - RNA, 19 nt, Artificial Sequence
  Description of Artificial Sequence: Synthetic oligonucleotide
  Sense strand starting at position 1274 of SEQ ID NO: 1884373
gcagaaaccuugccggaga

SEQ ID NO: 2260749 - RNA, 19 nt, Artificial Sequence
  Description of Artificial Sequence: Synthetic oligonucleotide
  Antisense strand to SEQ ID NO: 2260748
ucuccggcaagguuucugc

SEQ ID NO: 2260750 - RNA, 19 nt, Artificial Sequence
  Description of Artificial Sequence: Synthetic oligonucleotide
  Sense strand starting at position 1277 of SEQ ID NO: 1884373
gaaaccuugccggagaacu

SEQ ID NO: 2260751 - RNA, 19 nt, Artificial Sequence
  Description of Artificial Sequence: Synthetic oligonucleotide
  Antisense strand to SEQ ID NO: 2260750
aguucuccggcaagguuuc

SEQ ID NO: 2260752 - RNA, 19 nt, Artificial Sequence
  Description of Artificial Sequence: Synthetic oligonucleotide
  Sense strand starting at position 1287 of SEQ ID NO: 1884373
cggagaacugucuggguua

SEQ ID NO: 2260753 - RNA, 19 nt, Artificial Sequence
  Description of Artificial Sequence: Synthetic oligonucleotide
  Antisense strand to SEQ ID NO: 2260752
uaacccagacaguucuccg

SEQ ID NO: 2260754 - RNA, 19 nt, Artificial Sequence
  Description of Artificial Sequence: Synthetic oligonucleotide
  Sense strand starting at position 1290 of SEQ ID NO: 1884373
agaacugucuggguuagga

SEQ ID NO: 2260755 - RNA, 19 nt, Artificial Sequence
  Description of Artificial Sequence: Synthetic oligonucleotide
  Antisense strand to SEQ ID NO: 2260754
uccuaacccagacaguucu

SEQ ID NO: 2260756 - RNA, 19 nt, Artificial Sequence
  Description of Artificial Sequence: Synthetic oligonucleotide
  Sense strand starting at position 1307 of SEQ ID NO: 1884373
gagccugaacuggguuaga

SEQ ID NO: 2260757 - RNA, 19 nt, Artificial Sequence
  Description of Artificial Sequence: Synthetic oligonucleotide
  Antisense strand to SEQ ID NO: 2260756
ucuaacccaguucaggcuc

SEQ ID NO: 2260758 - RNA, 19 nt, Artificial Sequence
  Description of Artificial Sequence: Synthetic oligonucleotide
  Sense strand starting at position 1318 of SEQ ID NO: 1884373
ggguuagaagccugaacug

SEQ ID NO: 2260759 - RNA, 19 nt, Artificial Sequence
  Description of Artificial Sequence: Synthetic oligonucleotide
  Antisense strand to SEQ ID NO: 2260758
caguucaggcuucuaaccc

SEQ ID NO: 2260760 - RNA, 19 nt, Artificial Sequence
  Description of Artificial Sequence: Synthetic oligonucleotide
  Sense strand starting at position 1327 of SEQ ID NO: 1884373
gccugaacuggcuggguua

SEQ ID NO: 2260761 - RNA, 19 nt, Artificial Sequence
  Description of Artificial Sequence: Synthetic oligonucleotide
  Antisense strand to SEQ ID NO: 2260760
uaacccagccaguucaggc

SEQ ID NO: 2260762 - RNA, 19 nt, Artificial Sequence
  Description of Artificial Sequence: Synthetic oligonucleotide
  Sense strand starting at position 1416 of SEQ ID NO: 1884373
gugaucagugagggaugaa

SEQ ID NO: 2260763 - RNA, 19 nt, Artificial Sequence
  Description of Artificial Sequence: Synthetic oligonucleotide
  Antisense strand to SEQ ID NO: 2260762
uucaucccucacugaucac

SEQ ID NO: 2260764 - RNA, 19 nt, Artificial Sequence
  Description of Artificial Sequence: Synthetic oligonucleotide
  Sense strand starting at position 1573 of SEQ ID NO: 1884373
acuuacggcucaucuagaa

SEQ ID NO: 2260765 - RNA, 19 nt, Artificial Sequence
  Description of Artificial Sequence: Synthetic oligonucleotide
  Antisense strand to SEQ ID NO: 2260764
uucuagaugagccguaagu

SEQ ID NO: 2260766 - RNA, 19 nt, Artificial Sequence
  Description of Artificial Sequence: Synthetic oligonucleotide
  Sense strand starting at position 1713 of SEQ ID NO: 1884373
gauccagguuugccagagu

SEQ ID NO: 2260767 - RNA, 19 nt, Artificial Sequence
  Description of Artificial Sequence: Synthetic oligonucleotide
  Antisense strand to SEQ ID NO: 2260766
acucuggcaaaccuggauc

SEQ ID NO: 2260768 - RNA, 19 nt, Artificial Sequence
  Description of Artificial Sequence: Synthetic oligonucleotide
  Sense strand starting at position 2365 of SEQ ID NO: 1884373
ccggcuuggcguuaaggau

SEQ ID NO: 2260769 - RNA, 19 nt, Artificial Sequence
  Description of Artificial Sequence: Synthetic oligonucleotide
  Antisense strand to SEQ ID NO: 2260768
auccuuaacgccaagccgg

SEQ ID NO: 2260770 - RNA, 19 nt, Artificial Sequence
  Description of Artificial Sequence: Synthetic oligonucleotide
  Sense strand starting at position 3023 of SEQ ID NO: 1884373
uccucugggccucaagaua

SEQ ID NO: 2260771 - RNA, 19 nt, Artificial Sequence
  Description of Artificial Sequence: Synthetic oligonucleotide
  Antisense strand to SEQ ID NO: 2260770
uaucuugaggcccagagga

SEQ ID NO: 2260772 - RNA, 19 nt, Artificial Sequence
  Description of Artificial Sequence: Synthetic oligonucleotide
  Sense strand starting at position 3050 of SEQ ID NO: 1884373
agacaaacugcauguaugu

SEQ ID NO: 2260773 - RNA, 19 nt, Artificial Sequence
  Description of Artificial Sequence: Synthetic oligonucleotide
  Antisense strand to SEQ ID NO: 2260772
acauacaugcaguuugucu

SEQ ID NO: 2260774 - RNA, 19 nt, Artificial Sequence
  Description of Artificial Sequence: Synthetic oligonucleotide
  Sense strand starting at position 3133 of SEQ ID NO: 1884373
acuguacucccaugccuua

SEQ ID NO: 2260775 - RNA, 19 nt, Artificial Sequence
  Description of Artificial Sequence: Synthetic oligonucleotide
  Antisense strand to SEQ ID NO: 2260774
uaaggcaugggaguacagu

SEQ ID NO: 2260776 - RNA, 19 nt, Artificial Sequence
  Description of Artificial Sequence: Synthetic oligonucleotide
  Sense strand starting at position 3191 of SEQ ID NO: 1884373
augcucuuaccuggucaua

SEQ ID NO: 2260777 - RNA, 19 nt, Artificial Sequence
  Description of Artificial Sequence: Synthetic oligonucleotide
  Antisense strand to SEQ ID NO: 2260776
uaugaccagguaagagcau

SEQ ID NO: 2260778 - RNA, 19 nt, Artificial Sequence
  Description of Artificial Sequence: Synthetic oligonucleotide
  Sense strand starting at position 3193 of SEQ ID NO: 1884373
gcucuuaccuggucauaua

SEQ ID NO: 2260779 - RNA, 19 nt, Artificial Sequence
  Description of Artificial Sequence: Synthetic oligonucleotide
  Antisense strand to SEQ ID NO: 2260778
uauaugaccagguaagagc

SEQ ID NO: 2260780 - RNA, 19 nt, Artificial Sequence
  Description of Artificial Sequence: Synthetic oligonucleotide
  Sense strand starting at position 3194 of SEQ ID NO: 1884373
cucuuaccuggucauauau

SEQ ID NO: 2260781 - RNA, 19 nt, Artificial Sequence
  Description of Artificial Sequence: Synthetic oligonucleotide
  Antisense strand to SEQ ID NO: 2260780
auauaugaccagguaagag

SEQ ID NO: 2260782 - RNA, 19 nt, Artificial Sequence
  Description of Artificial Sequence: Synthetic oligonucleotide
  Sense strand starting at position 3309 of SEQ ID NO: 1884373
ccugcugaagaguaacuaa

SEQ ID NO: 2260783 - RNA, 19 nt, Artificial Sequence
  Description of Artificial Sequence: Synthetic oligonucleotide
  Antisense strand to SEQ ID NO: 2260782
uuaguuacucuucagcagg

SEQ ID NO: 2260784 - RNA, 19 nt, Artificial Sequence
  Description of Artificial Sequence: Synthetic oligonucleotide
  Sense strand starting at position 3619 of SEQ ID NO: 1884373
acauccaguuucuucgaaa

SEQ ID NO: 2260785 - RNA, 19 nt, Artificial Sequence
  Description of Artificial Sequence: Synthetic oligonucleotide
  Antisense strand to SEQ ID NO: 2260784
uuucgaagaaacuggaugu

SEQ ID NO: 2260786 - RNA, 19 nt, Artificial Sequence
  Description of Artificial Sequence: Synthetic oligonucleotide
  Sense strand starting at position 3752 of SEQ ID NO: 1884373
acaguugaaguaugauaac

SEQ ID NO: 2260787 - RNA, 19 nt, Artificial Sequence
  Description of Artificial Sequence: Synthetic oligonucleotide
  Antisense strand to SEQ ID NO: 2260786
guuaucauacuucaacugu

SEQ ID NO: 2260788 - RNA, 19 nt, Artificial Sequence
  Description of Artificial Sequence: Synthetic oligonucleotide
  Sense strand starting at position 3802 of SEQ ID NO: 1884373
acaguaaguguuugcacuu

SEQ ID NO: 2260789 - RNA, 19 nt, Artificial Sequence
  Description of Artificial Sequence: Synthetic oligonucleotide
  Antisense strand to SEQ ID NO: 2260788
aagugcaaacacuuacugu

SEQ ID NO: 2260790 - RNA, 19 nt, Artificial Sequence
  Description of Artificial Sequence: Synthetic oligonucleotide
  Sense strand starting at position 3803 of SEQ ID NO: 1884373
caguaaguguuugcacuua

SEQ ID NO: 2260791 - RNA, 19 nt, Artificial Sequence
  Description of Artificial Sequence: Synthetic oligonucleotide
  Antisense strand to SEQ ID NO: 2260790
uaagugcaaacacuuacug

SEQ ID NO: 2260792 - RNA, 19 nt, Artificial Sequence
  Description of Artificial Sequence: Synthetic oligonucleotide
  Sense strand starting at position 3844 of SEQ ID NO: 1884373
gggaaucucagaggucuuc

SEQ ID NO: 2260793 - RNA, 19 nt, Artificial Sequence
  Description of Artificial Sequence: Synthetic oligonucleotide
  Antisense strand to SEQ ID NO: 2260792
gaagaccucugagauuccc

SEQ ID NO: 2260794 - RNA, 19 nt, Artificial Sequence
  Description of Artificial Sequence: Synthetic oligonucleotide
  Sense strand starting at position 3961 of SEQ ID NO: 1884373
uucccuugcuugcuugaaa

SEQ ID NO: 2260795 - RNA, 19 nt, Artificial Sequence
  Description of Artificial Sequence: Synthetic oligonucleotide
  Antisense strand to SEQ ID NO: 2260794
uuucaagcaagcaagggaa

SEQ ID NO: 2260796 - RNA, 19 nt, Artificial Sequence
  Description of Artificial Sequence: Synthetic oligonucleotide
  Sense strand starting at position 3962 of SEQ ID NO: 1884373
ucccuugcuugcuugaaau

SEQ ID NO: 2260797 - RNA, 19 nt, Artificial Sequence
  Description of Artificial Sequence: Synthetic oligonucleotide
  Antisense strand to SEQ ID NO: 2260796
auuucaagcaagcaaggga

SEQ ID NO: 2260798 - RNA, 19 nt, Artificial Sequence
  Description of Artificial Sequence: Synthetic oligonucleotide
  Sense strand starting at position 3964 of SEQ ID NO: 1884373
ccuugcuugcuugaaaucu

SEQ ID NO: 2260799 - RNA, 19 nt, Artificial Sequence
  Description of Artificial Sequence: Synthetic oligonucleotide
  Antisense strand to SEQ ID NO: 2260798
agauuucaagcaagcaagg

SEQ ID NO: 2260800 - RNA, 19 nt, Artificial Sequence
  Description of Artificial Sequence: Synthetic oligonucleotide
  Sense strand starting at position 175 of SEQ ID NO: 1884374
gggacuccaucagaaauaa

SEQ ID NO: 2260801 - RNA, 19 nt, Artificial Sequence
  Description of Artificial Sequence: Synthetic oligonucleotide
  Antisense strand to SEQ ID NO: 2260800
uuauuucugauggaguccc

SEQ ID NO: 2260802 - RNA, 19 nt, Artificial Sequence
  Description of Artificial Sequence: Synthetic oligonucleotide
  Sense strand starting at position 639 of SEQ ID NO: 1884374
gcgucuaguugcaguaguu

SEQ ID NO: 2260803 - RNA, 19 nt, Artificial Sequence
  Description of Artificial Sequence: Synthetic oligonucleotide
  Antisense strand to SEQ ID NO: 2260802
aacuacugcaacuagacgc

SEQ ID NO: 2260804 - RNA, 19 nt, Artificial Sequence
  Description of Artificial Sequence: Synthetic oligonucleotide
  Sense strand starting at position 688 of SEQ ID NO: 1884374
acagcauuguuccacaaug

SEQ ID NO: 2260805 - RNA, 19 nt, Artificial Sequence
  Description of Artificial Sequence: Synthetic oligonucleotide
  Antisense strand to SEQ ID NO: 2260804
cauuguggaacaaugcugu

SEQ ID NO: 2260806 - RNA, 19 nt, Artificial Sequence
  Description of Artificial Sequence: Synthetic oligonucleotide
  Sense strand starting at position 1041 of SEQ ID NO: 1884374
aggugaucccaguacuucu

SEQ ID NO: 2260807 - RNA, 19 nt, Artificial Sequence
  Description of Artificial Sequence: Synthetic oligonucleotide
  Antisense strand to SEQ ID NO: 2260806
agaaguacugggaucaccu

SEQ ID NO: 2260808 - RNA, 19 nt, Artificial Sequence
  Description of Artificial Sequence: Synthetic oligonucleotide
  Sense strand starting at position 1177 of SEQ ID NO: 1884374
ggguguucgcccagaggca

SEQ ID NO: 2260809 - RNA, 19 nt, Artificial Sequence
  Description of Artificial Sequence: Synthetic oligonucleotide
  Antisense strand to SEQ ID NO: 2260808
ugccucugggcgaacaccc

SEQ ID NO: 2260810 - RNA, 19 nt, Artificial Sequence
  Description of Artificial Sequence: Synthetic oligonucleotide
  Sense strand starting at position 1251 of SEQ ID NO: 1884374
acuugaaucugcggucauc

SEQ ID NO: 2260811 - RNA, 19 nt, Artificial Sequence
  Description of Artificial Sequence: Synthetic oligonucleotide
  Antisense strand to SEQ ID NO: 2260810
gaugaccgcagauucaagu

SEQ ID NO: 2260812 - RNA, 19 nt, Artificial Sequence
  Description of Artificial Sequence: Synthetic oligonucleotide
  Sense strand starting at position 1254 of SEQ ID NO: 1884374
ugaaucugcggucaucaaa

SEQ ID NO: 2260813 - RNA, 19 nt, Artificial Sequence
  Description of Artificial Sequence: Synthetic oligonucleotide
  Antisense strand to SEQ ID NO: 2260812
uuugaugaccgcagauuca

SEQ ID NO: 2260814 - RNA, 19 nt, Artificial Sequence
  Description of Artificial Sequence: Synthetic oligonucleotide
  Sense strand starting at position 1332 of SEQ ID NO: 1884374
ugcccacccucugauguau

SEQ ID NO: 2260815 - RNA, 19 nt, Artificial Sequence
  Description of Artificial Sequence: Synthetic oligonucleotide
  Antisense strand to SEQ ID NO: 2260814
auacaucagagggugggca

SEQ ID NO: 2260816 - RNA, 19 nt, Artificial Sequence
  Description of Artificial Sequence: Synthetic oligonucleotide
  Sense strand starting at position 1373 of SEQ ID NO: 1884374
ccguccucaggcugagauu

SEQ ID NO: 2260817 - RNA, 19 nt, Artificial Sequence
  Description of Artificial Sequence: Synthetic oligonucleotide
  Antisense strand to SEQ ID NO: 2260816
aaucucagccugaggacgg

SEQ ID NO: 2260818 - RNA, 19 nt, Artificial Sequence
  Description of Artificial Sequence: Synthetic oligonucleotide
  Sense strand starting at position 1600 of SEQ ID NO: 1884374
gggucuuggguguguagaa

SEQ ID NO: 2260819 - RNA, 19 nt, Artificial Sequence
  Description of Artificial Sequence: Synthetic oligonucleotide
  Antisense strand to SEQ ID NO: 2260818
uucuacacacccaagaccc

SEQ ID NO: 2260820 - RNA, 19 nt, Artificial Sequence
  Description of Artificial Sequence: Synthetic oligonucleotide
  Sense strand starting at position 2020 of SEQ ID NO: 1884374
cuggcuuuauagucucaga

SEQ ID NO: 2260821 - RNA, 19 nt, Artificial Sequence
  Description of Artificial Sequence: Synthetic oligonucleotide
  Antisense strand to SEQ ID NO: 2260820
ucugagacuauaaagccag

SEQ ID NO: 2260822 - RNA, 19 nt, Artificial Sequence
  Description of Artificial Sequence: Synthetic oligonucleotide
  Sense strand starting at position 2123 of SEQ ID NO: 1884374
gcugcaauuuccggaccau

SEQ ID NO: 2260823 - RNA, 19 nt, Artificial Sequence
  Description of Artificial Sequence: Synthetic oligonucleotide
  Antisense strand to SEQ ID NO: 2260822
augguccggaaauugcagc

SEQ ID NO: 2260824 - RNA, 19 nt, Artificial Sequence
  Description of Artificial Sequence: Synthetic oligonucleotide
  Sense strand starting at position 2151 of SEQ ID NO: 1884374
gcugggucugugggaagau

SEQ ID NO: 2260825 - RNA, 19 nt, Artificial Sequence
  Description of Artificial Sequence: Synthetic oligonucleotide
  Antisense strand to SEQ ID NO: 2260824
aucuucccacagacccagc

SEQ ID NO: 2260826 - RNA, 19 nt, Artificial Sequence
  Description of Artificial Sequence: Synthetic oligonucleotide
  Sense strand starting at position 2160 of SEQ ID NO: 1884374
gugggaagaucuccuuggu

SEQ ID NO: 2260827 - RNA, 19 nt, Artificial Sequence
  Description of Artificial Sequence: Synthetic oligonucleotide
  Antisense strand to SEQ ID NO: 2260826
accaaggagaucuucccac

SEQ ID NO: 2260828 - RNA, 19 nt, Artificial Sequence
  Description of Artificial Sequence: Synthetic oligonucleotide
  Sense strand starting at position 2163 of SEQ ID NO: 1884374
ggaagaucuccuuggucgu

SEQ ID NO: 2260829 - RNA, 19 nt, Artificial Sequence
  Description of Artificial Sequence: Synthetic oligonucleotide
  Antisense strand to SEQ ID NO: 2260828
acgaccaaggagaucuucc

SEQ ID NO: 2260830 - RNA, 19 nt, Artificial Sequence
  Description of Artificial Sequence: Synthetic oligonucleotide
  Sense strand starting at position 2209 of SEQ ID NO: 1884374
ucauuagagucuuaaccag

SEQ ID NO: 2260831 - RNA, 19 nt, Artificial Sequence
  Description of Artificial Sequence: Synthetic oligonucleotide
  Antisense strand to SEQ ID NO: 2260830
cugguuaagacucuaauga

SEQ ID NO: 2260832 - RNA, 19 nt, Artificial Sequence
  Description of Artificial Sequence: Synthetic oligonucleotide
  Sense strand starting at position 2265 of SEQ ID NO: 1884374
gggcaaaugucuccaggag

SEQ ID NO: 2260833 - RNA, 19 nt, Artificial Sequence
  Description of Artificial Sequence: Synthetic oligonucleotide
  Antisense strand to SEQ ID NO: 2260832
cuccuggagacauuugccc

SEQ ID NO: 2260834 - RNA, 19 nt, Artificial Sequence
  Description of Artificial Sequence: Synthetic oligonucleotide
  Sense strand starting at position 2301 of SEQ ID NO: 1884374
ggccacuuuccacauuaga

SEQ ID NO: 2260835 - RNA, 19 nt, Artificial Sequence
  Description of Artificial Sequence: Synthetic oligonucleotide
  Antisense strand to SEQ ID NO: 2260834
ucuaauguggaaaguggcc

SEQ ID NO: 2260836 - RNA, 19 nt, Artificial Sequence
  Description of Artificial Sequence: Synthetic oligonucleotide
  Sense strand starting at position 2780 of SEQ ID NO: 1884374
ccaagaugccgccauggau

SEQ ID NO: 2260837 - RNA, 19 nt, Artificial Sequence
  Description of Artificial Sequence: Synthetic oligonucleotide
  Antisense strand to SEQ ID NO: 2260836
auccauggcggcaucuugg

SEQ ID NO: 2260838 - RNA, 19 nt, Artificial Sequence
  Description of Artificial Sequence: Synthetic oligonucleotide
  Sense strand starting at position 2983 of SEQ ID NO: 1884374
gaccucaucuuccguguga

SEQ ID NO: 2260839 - RNA, 19 nt, Artificial Sequence
  Description of Artificial Sequence: Synthetic oligonucleotide
  Antisense strand to SEQ ID NO: 2260838
ucacacggaagaugagguc

SEQ ID NO: 2260840 - RNA, 19 nt, Artificial Sequence
  Description of Artificial Sequence: Synthetic oligonucleotide
  Sense strand starting at position 2984 of SEQ ID NO: 1884374
accucaucuuccgugugau

SEQ ID NO: 2260841 - RNA, 19 nt, Artificial Sequence
  Description of Artificial Sequence: Synthetic oligonucleotide
  Antisense strand to SEQ ID NO: 2260840
aucacacggaagaugaggu

SEQ ID NO: 2260842 - RNA, 19 nt, Artificial Sequence
  Description of Artificial Sequence: Synthetic oligonucleotide
  Sense strand starting at position 2985 of SEQ ID NO: 1884374
ccucaucuuccgugugauc

SEQ ID NO: 2260843 - RNA, 19 nt, Artificial Sequence
  Description of Artificial Sequence: Synthetic oligonucleotide
  Antisense strand to SEQ ID NO: 2260842
gaucacacggaagaugagg

SEQ ID NO: 2260844 - RNA, 19 nt, Artificial Sequence
  Description of Artificial Sequence: Synthetic oligonucleotide
  Sense strand starting at position 2987 of SEQ ID NO: 1884374
ucaucuuccgugugaucug

SEQ ID NO: 2260845 - RNA, 19 nt, Artificial Sequence
  Description of Artificial Sequence: Synthetic oligonucleotide
  Antisense strand to SEQ ID NO: 2260844
cagaucacacggaagauga

SEQ ID NO: 2260846 - RNA, 19 nt, Artificial Sequence
  Description of Artificial Sequence: Synthetic oligonucleotide
  Sense strand starting at position 3795 of SEQ ID NO: 1884374
gcacuaacaagguguguga

SEQ ID NO: 2260847 - RNA, 19 nt, Artificial Sequence
  Description of Artificial Sequence: Synthetic oligonucleotide
  Antisense strand to SEQ ID NO: 2260846
ucacacaccuuguuagugc

SEQ ID NO: 2260848 - RNA, 19 nt, Artificial Sequence
  Description of Artificial Sequence: Synthetic oligonucleotide
  Sense strand starting at position 3799 of SEQ ID NO: 1884374
uaacaaggugugugaggaa

SEQ ID NO: 2260849 - RNA, 19 nt, Artificial Sequence
  Description of Artificial Sequence: Synthetic oligonucleotide
  Antisense strand to SEQ ID NO: 2260848
uuccucacacaccuuguua

SEQ ID NO: 2260850 - RNA, 19 nt, Artificial Sequence
  Description of Artificial Sequence: Synthetic oligonucleotide
  Sense strand starting at position 3862 of SEQ ID NO: 1884374
cguggaugaguaggaguuu

SEQ ID NO: 2260851 - RNA, 19 nt, Artificial Sequence
  Description of Artificial Sequence: Synthetic oligonucleotide
  Antisense strand to SEQ ID NO: 2260850
aaacuccuacucauccacg

SEQ ID NO: 2260852 - RNA, 19 nt, Artificial Sequence
  Description of Artificial Sequence: Synthetic oligonucleotide
  Sense strand starting at position 3871 of SEQ ID NO: 1884374
guaggaguuugccaguguu

SEQ ID NO: 2260853 - RNA, 19 nt, Artificial Sequence
  Description of Artificial Sequence: Synthetic oligonucleotide
  Antisense strand to SEQ ID NO: 2260852
aacacuggcaaacuccuac

SEQ ID NO: 2260854 - RNA, 19 nt, Artificial Sequence
  Description of Artificial Sequence: Synthetic oligonucleotide
  Sense strand starting at position 3874 of SEQ ID NO: 1884374
ggaguuugccaguguuguc

SEQ ID NO: 2260855 - RNA, 19 nt, Artificial Sequence
  Description of Artificial Sequence: Synthetic oligonucleotide
  Antisense strand to SEQ ID NO: 2260854
gacaacacuggcaaacucc

SEQ ID NO: 2260856 - RNA, 19 nt, Artificial Sequence
  Description of Artificial Sequence: Synthetic oligonucleotide
  Sense strand starting at position 239 of SEQ ID NO: 1884375
gacugacuugcugcgcuua

SEQ ID NO: 2260857 - RNA, 19 nt, Artificial Sequence
  Description of Artificial Sequence: Synthetic oligonucleotide
  Antisense strand to SEQ ID NO: 2260856
uaagcgcagcaagucaguc

SEQ ID NO: 2260858 - RNA, 19 nt, Artificial Sequence
  Description of Artificial Sequence: Synthetic oligonucleotide
  Sense strand starting at position 414 of SEQ ID NO: 1884375
gagcuauggcugcaggaca

SEQ ID NO: 2260859 - RNA, 19 nt, Artificial Sequence
  Description of Artificial Sequence: Synthetic oligonucleotide
  Antisense strand to SEQ ID NO: 2260858
uguccugcagccauagcuc

SEQ ID NO: 2260860 - RNA, 19 nt, Artificial Sequence
  Description of Artificial Sequence: Synthetic oligonucleotide
  Sense strand starting at position 497 of SEQ ID NO: 1884375
uugucuguuggauacucua

SEQ ID NO: 2260861 - RNA, 19 nt, Artificial Sequence
  Description of Artificial Sequence: Synthetic oligonucleotide
  Antisense strand to SEQ ID NO: 2260860
uagaguauccaacagacaa

SEQ ID NO: 2260862 - RNA, 19 nt, Artificial Sequence
  Description of Artificial Sequence: Synthetic oligonucleotide
  Sense strand starting at position 500 of SEQ ID NO: 1884375
ucuguuggauacucuaagu

SEQ ID NO: 2260863 - RNA, 19 nt, Artificial Sequence
  Description of Artificial Sequence: Synthetic oligonucleotide
  Antisense strand to SEQ ID NO: 2260862
acuuagaguauccaacaga

SEQ ID NO: 2260864 - RNA, 19 nt, Artificial Sequence
  Description of Artificial Sequence: Synthetic oligonucleotide
  Sense strand starting at position 1225 of SEQ ID NO: 1884375
aagucucuucugugugaaa

SEQ ID NO: 2260865 - RNA, 19 nt, Artificial Sequence
  Description of Artificial Sequence: Synthetic oligonucleotide
  Antisense strand to SEQ ID NO: 2260864
uuucacacagaagagacuu

SEQ ID NO: 2260866 - RNA, 19 nt, Artificial Sequence
  Description of Artificial Sequence: Synthetic oligonucleotide
  Sense strand starting at position 1398 of SEQ ID NO: 1884375
acaucucauuccucuggua

SEQ ID NO: 2260867 - RNA, 19 nt, Artificial Sequence
  Description of Artificial Sequence: Synthetic oligonucleotide
  Antisense strand to SEQ ID NO: 2260866
uaccagaggaaugagaugu

SEQ ID NO: 2260868 - RNA, 19 nt, Artificial Sequence
  Description of Artificial Sequence: Synthetic oligonucleotide
  Sense strand starting at position 1448 of SEQ ID NO: 1884375
cuggaauagcagggauauc

SEQ ID NO: 2260869 - RNA, 19 nt, Artificial Sequence
  Description of Artificial Sequence: Synthetic oligonucleotide
  Antisense strand to SEQ ID NO: 2260868
gauaucccugcuauuccag

SEQ ID NO: 2260870 - RNA, 19 nt, Artificial Sequence
  Description of Artificial Sequence: Synthetic oligonucleotide
  Sense strand starting at position 1526 of SEQ ID NO: 1884375
ugcacacuuccaugacaag

SEQ ID NO: 2260871 - RNA, 19 nt, Artificial Sequence
  Description of Artificial Sequence: Synthetic oligonucleotide
  Antisense strand to SEQ ID NO: 2260870
cuugucauggaagugugca

SEQ ID NO: 2260872 - RNA, 19 nt, Artificial Sequence
  Description of Artificial Sequence: Synthetic oligonucleotide
  Sense strand starting at position 1595 of SEQ ID NO: 1884375
gggcucuagaccuguuaau

SEQ ID NO: 2260873 - RNA, 19 nt, Artificial Sequence
  Description of Artificial Sequence: Synthetic oligonucleotide
  Antisense strand to SEQ ID NO: 2260872
auuaacaggucuagagccc

SEQ ID NO: 2260874 - RNA, 19 nt, Artificial Sequence
  Description of Artificial Sequence: Synthetic oligonucleotide
  Sense strand starting at position 1604 of SEQ ID NO: 1884375
accuguuaaucgcugagaa

SEQ ID NO: 2260875 - RNA, 19 nt, Artificial Sequence
  Description of Artificial Sequence: Synthetic oligonucleotide
  Antisense strand to SEQ ID NO: 2260874
uucucagcgauuaacaggu

SEQ ID NO: 2260876 - RNA, 19 nt, Artificial Sequence
  Description of Artificial Sequence: Synthetic oligonucleotide
  Sense strand starting at position 1606 of SEQ ID NO: 1884375
cuguuaaucgcugagaagg

SEQ ID NO: 2260877 - RNA, 19 nt, Artificial Sequence
  Description of Artificial Sequence: Synthetic oligonucleotide
  Antisense strand to SEQ ID NO: 2260876
ccuucucagcgauuaacag

SEQ ID NO: 2260878 - RNA, 19 nt, Artificial Sequence
  Description of Artificial Sequence: Synthetic oligonucleotide
  Sense strand starting at position 1625 of SEQ ID NO: 1884375
gggacauauguguauacuu

SEQ ID NO: 2260879 - RNA, 19 nt, Artificial Sequence
  Description of Artificial Sequence: Synthetic oligonucleotide
  Antisense strand to SEQ ID NO: 2260878
aaguauacacauauguccc

SEQ ID NO: 2260880 - RNA, 19 nt, Artificial Sequence
  Description of Artificial Sequence: Synthetic oligonucleotide
  Sense strand starting at position 1696 of SEQ ID NO: 1884375
gcccuaaggcuccaugaca

SEQ ID NO: 2260881 - RNA, 19 nt, Artificial Sequence
  Description of Artificial Sequence: Synthetic oligonucleotide
  Antisense strand to SEQ ID NO: 2260880
ugucauggagccuuagggc

SEQ ID NO: 2260882 - RNA, 19 nt, Artificial Sequence
  Description of Artificial Sequence: Synthetic oligonucleotide
  Sense strand starting at position 1720 of SEQ ID NO: 1884375
gcagaaauccaucaaguua

SEQ ID NO: 2260883 - RNA, 19 nt, Artificial Sequence
  Description of Artificial Sequence: Synthetic oligonucleotide
  Antisense strand to SEQ ID NO: 2260882
uaacuugauggauuucugc

SEQ ID NO: 2260884 - RNA, 19 nt, Artificial Sequence
  Description of Artificial Sequence: Synthetic oligonucleotide
  Sense strand starting at position 2085 of SEQ ID NO: 1884375
gcaagaauguuacuccaaa

SEQ ID NO: 2260885 - RNA, 19 nt, Artificial Sequence
  Description of Artificial Sequence: Synthetic oligonucleotide
  Antisense strand to SEQ ID NO: 2260884
uuuggaguaacauucuugc

SEQ ID NO: 2260886 - RNA, 19 nt, Artificial Sequence
  Description of Artificial Sequence: Synthetic oligonucleotide
  Sense strand starting at position 2188 of SEQ ID NO: 1884375
agauucaggcugugagaaa

SEQ ID NO: 2260887 - RNA, 19 nt, Artificial Sequence
  Description of Artificial Sequence: Synthetic oligonucleotide
  Antisense strand to SEQ ID NO: 2260886
uuucucacagccugaaucu

SEQ ID NO: 2260888 - RNA, 19 nt, Artificial Sequence
  Description of Artificial Sequence: Synthetic oligonucleotide
  Sense strand starting at position 2350 of SEQ ID NO: 1884375
cuaucauauucuguuggga

SEQ ID NO: 2260889 - RNA, 19 nt, Artificial Sequence
  Description of Artificial Sequence: Synthetic oligonucleotide
  Antisense strand to SEQ ID NO: 2260888
ucccaacagaauaugauag

SEQ ID NO: 2260890 - RNA, 19 nt, Artificial Sequence
  Description of Artificial Sequence: Synthetic oligonucleotide
  Sense strand starting at position 2353 of SEQ ID NO: 1884375
ucauauucuguugggagaa

SEQ ID NO: 2260891 - RNA, 19 nt, Artificial Sequence
  Description of Artificial Sequence: Synthetic oligonucleotide
  Antisense strand to SEQ ID NO: 2260890
uucucccaacagaauauga

SEQ ID NO: 2260892 - RNA, 19 nt, Artificial Sequence
  Description of Artificial Sequence: Synthetic oligonucleotide
  Sense strand starting at position 2384 of SEQ ID NO: 1884375
caccacguucuggaggaau

SEQ ID NO: 2260893 - RNA, 19 nt, Artificial Sequence
  Description of Artificial Sequence: Synthetic oligonucleotide
  Antisense strand to SEQ ID NO: 2260892
auuccuccagaacguggug

SEQ ID NO: 2260894 - RNA, 19 nt, Artificial Sequence
  Description of Artificial Sequence: Synthetic oligonucleotide
  Sense strand starting at position 2386 of SEQ ID NO: 1884375
ccacguucuggaggaauaa

SEQ ID NO: 2260895 - RNA, 19 nt, Artificial Sequence
  Description of Artificial Sequence: Synthetic oligonucleotide
  Antisense strand to SEQ ID NO: 2260894
uuauuccuccagaacgugg

SEQ ID NO: 2260896 - RNA, 19 nt, Artificial Sequence
  Description of Artificial Sequence: Synthetic oligonucleotide
  Sense strand starting at position 2459 of SEQ ID NO: 1884375
agcuauauggcccagaucu

SEQ ID NO: 2260897 - RNA, 19 nt, Artificial Sequence
  Description of Artificial Sequence: Synthetic oligonucleotide
  Antisense strand to SEQ ID NO: 2260896
agaucugggccauauagcu

SEQ ID NO: 2260898 - RNA, 19 nt, Artificial Sequence
  Description of Artificial Sequence: Synthetic oligonucleotide
  Sense strand starting at position 2691 of SEQ ID NO: 1884375
gacaauggacgaugguuaa

SEQ ID NO: 2260899 - RNA, 19 nt, Artificial Sequence
  Description of Artificial Sequence: Synthetic oligonucleotide
  Antisense strand to SEQ ID NO: 2260898
uuaaccaucguccauuguc

SEQ ID NO: 2260900 - RNA, 19 nt, Artificial Sequence
  Description of Artificial Sequence: Synthetic oligonucleotide
  Sense strand starting at position 3097 of SEQ ID NO: 1884375
ugcugauccuuucuaagaa

SEQ ID NO: 2260901 - RNA, 19 nt, Artificial Sequence
  Description of Artificial Sequence: Synthetic oligonucleotide
  Antisense strand to SEQ ID NO: 2260900
uucuuagaaaggaucagca

SEQ ID NO: 2260902 - RNA, 19 nt, Artificial Sequence
  Description of Artificial Sequence: Synthetic oligonucleotide
  Sense strand starting at position 3197 of SEQ ID NO: 1884375
ucccaaaugcaagaguaau

SEQ ID NO: 2260903 - RNA, 19 nt, Artificial Sequence
  Description of Artificial Sequence: Synthetic oligonucleotide
  Antisense strand to SEQ ID NO: 2260902
auuacucuugcauuuggga

SEQ ID NO: 2260904 - RNA, 19 nt, Artificial Sequence
  Description of Artificial Sequence: Synthetic oligonucleotide
  Sense strand starting at position 3245 of SEQ ID NO: 1884375
gagagagugguauguacuc

SEQ ID NO: 2260905 - RNA, 19 nt, Artificial Sequence
  Description of Artificial Sequence: Synthetic oligonucleotide
  Antisense strand to SEQ ID NO: 2260904
gaguacauaccacucucuc

SEQ ID NO: 2260906 - RNA, 19 nt, Artificial Sequence
  Description of Artificial Sequence: Synthetic oligonucleotide
  Sense strand starting at position 3247 of SEQ ID NO: 1884375
gagagugguauguacucuu

SEQ ID NO: 2260907 - RNA, 19 nt, Artificial Sequence
  Description of Artificial Sequence: Synthetic oligonucleotide
  Antisense strand to SEQ ID NO: 2260906
aagaguacauaccacucuc

SEQ ID NO: 2260908 - RNA, 19 nt, Artificial Sequence
  Description of Artificial Sequence: Synthetic oligonucleotide
  Sense strand starting at position 3267 of SEQ ID NO: 1884375
uuaaguuuagaaggucauu

SEQ ID NO: 2260909 - RNA, 19 nt, Artificial Sequence
  Description of Artificial Sequence: Synthetic oligonucleotide
  Antisense strand to SEQ ID NO: 2260908
aaugaccuucuaaacuuaa

SEQ ID NO: 2260910 - RNA, 19 nt, Artificial Sequence
  Description of Artificial Sequence: Synthetic oligonucleotide
  Sense strand starting at position 3346 of SEQ ID NO: 1884375
ugcugcugugucucuacaa

SEQ ID NO: 2260911 - RNA, 19 nt, Artificial Sequence
  Description of Artificial Sequence: Synthetic oligonucleotide
  Antisense strand to SEQ ID NO: 2260910
uuguagagacacagcagca

SEQ ID NO: 2260912 - RNA, 19 nt, Artificial Sequence
  Description of Artificial Sequence: Synthetic oligonucleotide
  Sense strand starting at position 3371 of SEQ ID NO: 1884375
ugcaucguuagauauuaag

SEQ ID NO: 2260913 - RNA, 19 nt, Artificial Sequence
  Description of Artificial Sequence: Synthetic oligonucleotide
  Antisense strand to SEQ ID NO: 2260912
cuuaauaucuaacgaugca

SEQ ID NO: 2260914 - RNA, 19 nt, Artificial Sequence
  Description of Artificial Sequence: Synthetic oligonucleotide
  Sense strand starting at position 3422 of SEQ ID NO: 1884375
auaguaucacaaggaguau

SEQ ID NO: 2260915 - RNA, 19 nt, Artificial Sequence
  Description of Artificial Sequence: Synthetic oligonucleotide
  Antisense strand to SEQ ID NO: 2260914
auacuccuugugauacuau

SEQ ID NO: 2260916 - RNA, 19 nt, Artificial Sequence
  Description of Artificial Sequence: Synthetic oligonucleotide
  Sense strand starting at position 3593 of SEQ ID NO: 1884375
ccuggaugaugagugaguu

SEQ ID NO: 2260917 - RNA, 19 nt, Artificial Sequence
  Description of Artificial Sequence: Synthetic oligonucleotide
  Antisense strand to SEQ ID NO: 2260916
aacucacucaucauccagg

SEQ ID NO: 2260918 - RNA, 19 nt, Artificial Sequence
  Description of Artificial Sequence: Synthetic oligonucleotide
  Sense strand starting at position 3594 of SEQ ID NO: 1884375
cuggaugaugagugaguuu

SEQ ID NO: 2260919 - RNA, 19 nt, Artificial Sequence
  Description of Artificial Sequence: Synthetic oligonucleotide
  Antisense strand to SEQ ID NO: 2260918
aaacucacucaucauccag

SEQ ID NO: 2260920 - RNA, 19 nt, Artificial Sequence
  Description of Artificial Sequence: Synthetic oligonucleotide
  Sense strand starting at position 3597 of SEQ ID NO: 1884375
gaugaugagugaguuuacu

SEQ ID NO: 2260921 - RNA, 19 nt, Artificial Sequence
  Description of Artificial Sequence: Synthetic oligonucleotide
  Antisense strand to SEQ ID NO: 2260920
aguaaacucacucaucauc

SEQ ID NO: 2260922 - RNA, 19 nt, Artificial Sequence
  Description of Artificial Sequence: Synthetic oligonucleotide
  Sense strand starting at position 3603 of SEQ ID NO: 1884375
gagugaguuuacuucuuua

SEQ ID NO: 2260923 - RNA, 19 nt, Artificial Sequence
  Description of Artificial Sequence: Synthetic oligonucleotide
  Antisense strand to SEQ ID NO: 2260922
uaaagaaguaaacucacuc

SEQ ID NO: 2260924 - RNA, 19 nt, Artificial Sequence
  Description of Artificial Sequence: Synthetic oligonucleotide
  Sense strand starting at position 3606 of SEQ ID NO: 1884375
ugaguuuacuucuuuaaga

SEQ ID NO: 2260925 - RNA, 19 nt, Artificial Sequence
  Description of Artificial Sequence: Synthetic oligonucleotide
  Antisense strand to SEQ ID NO: 2260924
ucuuaaagaaguaaacuca

SEQ ID NO: 2260926 - RNA, 19 nt, Artificial Sequence
  Description of Artificial Sequence: Synthetic oligonucleotide
  Sense strand starting at position 3729 of SEQ ID NO: 1884375
ucaggauuaguuugaacag

SEQ ID NO: 2260927 - RNA, 19 nt, Artificial Sequence
  Description of Artificial Sequence: Synthetic oligonucleotide
  Antisense strand to SEQ ID NO: 2260926
cuguucaaacuaauccuga

SEQ ID NO: 2260928 - RNA, 19 nt, Artificial Sequence
  Description of Artificial Sequence: Synthetic oligonucleotide
  Sense strand starting at position 3746 of SEQ ID NO: 1884375
agcauaauccuagaagugu

SEQ ID NO: 2260929 - RNA, 19 nt, Artificial Sequence
  Description of Artificial Sequence: Synthetic oligonucleotide
  Antisense strand to SEQ ID NO: 2260928
acacuucuaggauuaugcu

SEQ ID NO: 2260930 - RNA, 19 nt, Artificial Sequence
  Description of Artificial Sequence: Synthetic oligonucleotide
  Sense strand starting at position 3772 of SEQ ID NO: 1884375
guuccaguuagugagguuu

SEQ ID NO: 2260931 - RNA, 19 nt, Artificial Sequence
  Description of Artificial Sequence: Synthetic oligonucleotide
  Antisense strand to SEQ ID NO: 2260930
aaaccucacuaacuggaac

SEQ ID NO: 2260932 - RNA, 19 nt, Artificial Sequence
  Description of Artificial Sequence: Synthetic oligonucleotide
  Sense strand starting at position 3861 of SEQ ID NO: 1884375
uggagauggucuccuguag

SEQ ID NO: 2260933 - RNA, 19 nt, Artificial Sequence
  Description of Artificial Sequence: Synthetic oligonucleotide
  Antisense strand to SEQ ID NO: 2260932
cuacaggagaccaucucca

SEQ ID NO: 2260934 - RNA, 19 nt, Artificial Sequence
  Description of Artificial Sequence: Synthetic oligonucleotide
  Sense strand starting at position 3940 of SEQ ID NO: 1884375
caccuaugguucccugaga

SEQ ID NO: 2260935 - RNA, 19 nt, Artificial Sequence
  Description of Artificial Sequence: Synthetic oligonucleotide
  Antisense strand to SEQ ID NO: 2260934
ucucagggaaccauaggug

SEQ ID NO: 2260936 - RNA, 19 nt, Artificial Sequence
  Description of Artificial Sequence: Synthetic oligonucleotide
  Sense strand starting at position 255 of SEQ ID NO: 1884376
cagguuaucucaguaagaa

SEQ ID NO: 2260937 - RNA, 19 nt, Artificial Sequence
  Description of Artificial Sequence: Synthetic oligonucleotide
  Antisense strand to SEQ ID NO: 2260936
uucuuacugagauaaccug

SEQ ID NO: 2260938 - RNA, 19 nt, Artificial Sequence
  Description of Artificial Sequence: Synthetic oligonucleotide
  Sense strand starting at position 384 of SEQ ID NO: 1884376
cccuaaacuuacccgagau

SEQ ID NO: 2260939 - RNA, 19 nt, Artificial Sequence
  Description of Artificial Sequence: Synthetic oligonucleotide
  Antisense strand to SEQ ID NO: 2260938
aucucggguaaguuuaggg

SEQ ID NO: 2260940 - RNA, 19 nt, Artificial Sequence
  Description of Artificial Sequence: Synthetic oligonucleotide
  Sense strand starting at position 397 of SEQ ID NO: 1884376
cgagaugauaucugugagu

SEQ ID NO: 2260941 - RNA, 19 nt, Artificial Sequence
  Description of Artificial Sequence: Synthetic oligonucleotide
  Antisense strand to SEQ ID NO: 2260940
acucacagauaucaucucg

SEQ ID NO: 2260942 - RNA, 19 nt, Artificial Sequence
  Description of Artificial Sequence: Synthetic oligonucleotide
  Sense strand starting at position 399 of SEQ ID NO: 1884376
agaugauaucugugaguaa

SEQ ID NO: 2260943 - RNA, 19 nt, Artificial Sequence
  Description of Artificial Sequence: Synthetic oligonucleotide
  Antisense strand to SEQ ID NO: 2260942
uuacucacagauaucaucu

SEQ ID NO: 2260944 - RNA, 19 nt, Artificial Sequence
  Description of Artificial Sequence: Synthetic oligonucleotide
  Sense strand starting at position 431 of SEQ ID NO: 1884376
uggagaaauuccucuguau

SEQ ID NO: 2260945 - RNA, 19 nt, Artificial Sequence
  Description of Artificial Sequence: Synthetic oligonucleotide
  Antisense strand to SEQ ID NO: 2260944
auacagaggaauuucucca

SEQ ID NO: 2260946 - RNA, 19 nt, Artificial Sequence
  Description of Artificial Sequence: Synthetic oligonucleotide
  Sense strand starting at position 480 of SEQ ID NO: 1884376
agugcuuggcagccguaua

SEQ ID NO: 2260947 - RNA, 19 nt, Artificial Sequence
  Description of Artificial Sequence: Synthetic oligonucleotide
  Antisense strand to SEQ ID NO: 2260946
uauacggcugccaagcacu

SEQ ID NO: 2260948 - RNA, 19 nt, Artificial Sequence
  Description of Artificial Sequence: Synthetic oligonucleotide
  Sense strand starting at position 577 of SEQ ID NO: 1884376
ccgagagcauuccucaaag

SEQ ID NO: 2260949 - RNA, 19 nt, Artificial Sequence
  Description of Artificial Sequence: Synthetic oligonucleotide
  Antisense strand to SEQ ID NO: 2260948
cuuugaggaaugcucucgg

SEQ ID NO: 2260950 - RNA, 19 nt, Artificial Sequence
  Description of Artificial Sequence: Synthetic oligonucleotide
  Sense strand starting at position 596 of SEQ ID NO: 1884376
agagaugucagcugauaca

SEQ ID NO: 2260951 - RNA, 19 nt, Artificial Sequence
  Description of Artificial Sequence: Synthetic oligonucleotide
  Antisense strand to SEQ ID NO: 2260950
uguaucagcugacaucucu

SEQ ID NO: 2260952 - RNA, 19 nt, Artificial Sequence
  Description of Artificial Sequence: Synthetic oligonucleotide
  Sense strand starting at position 750 of SEQ ID NO: 1884376
ucagguuggaagugaacau

SEQ ID NO: 2260953 - RNA, 19 nt, Artificial Sequence
  Description of Artificial Sequence: Synthetic oligonucleotide
  Antisense strand to SEQ ID NO: 2260952
auguucacuuccaaccuga

SEQ ID NO: 2260954 - RNA, 19 nt, Artificial Sequence
  Description of Artificial Sequence: Synthetic oligonucleotide
  Sense strand starting at position 902 of SEQ ID NO: 1884376
ccugaaugugaccgaucuu

SEQ ID NO: 2260955 - RNA, 19 nt, Artificial Sequence
  Description of Artificial Sequence: Synthetic oligonucleotide
  Antisense strand to SEQ ID NO: 2260954
aagaucggucacauucagg

SEQ ID NO: 2260956 - RNA, 19 nt, Artificial Sequence
  Description of Artificial Sequence: Synthetic oligonucleotide
  Sense strand starting at position 903 of SEQ ID NO: 1884376
cugaaugugaccgaucuuu

SEQ ID NO: 2260957 - RNA, 19 nt, Artificial Sequence
  Description of Artificial Sequence: Synthetic oligonucleotide
  Antisense strand to SEQ ID NO: 2260956
aaagaucggucacauucag

SEQ ID NO: 2260958 - RNA, 19 nt, Artificial Sequence
  Description of Artificial Sequence: Synthetic oligonucleotide
  Sense strand starting at position 908 of SEQ ID NO: 1884376
ugugaccgaucuuugaaag

SEQ ID NO: 2260959 - RNA, 19 nt, Artificial Sequence
  Description of Artificial Sequence: Synthetic oligonucleotide
  Antisense strand to SEQ ID NO: 2260958
cuuucaaagaucggucaca

SEQ ID NO: 2260960 - RNA, 19 nt, Artificial Sequence
  Description of Artificial Sequence: Synthetic oligonucleotide
  Sense strand starting at position 1030 of SEQ ID NO: 1884376
ucuugaguaaccugaggaa

SEQ ID NO: 2260961 - RNA, 19 nt, Artificial Sequence
  Description of Artificial Sequence: Synthetic oligonucleotide
  Antisense strand to SEQ ID NO: 2260960
uuccucagguuacucaaga

SEQ ID NO: 2260962 - RNA, 19 nt, Artificial Sequence
  Description of Artificial Sequence: Synthetic oligonucleotide
  Sense strand starting at position 1150 of SEQ ID NO: 1884376
caugaugucccugacgcua

SEQ ID NO: 2260963 - RNA, 19 nt, Artificial Sequence
  Description of Artificial Sequence: Synthetic oligonucleotide
  Antisense strand to SEQ ID NO: 2260962
uagcgucagggacaucaug

SEQ ID NO: 2260964 - RNA, 19 nt, Artificial Sequence
  Description of Artificial Sequence: Synthetic oligonucleotide
  Sense strand starting at position 1264 of SEQ ID NO: 1884376
acggaauaauuccuuucca

SEQ ID NO: 2260965 - RNA, 19 nt, Artificial Sequence
  Description of Artificial Sequence: Synthetic oligonucleotide
  Antisense strand to SEQ ID NO: 2260964
uggaaaggaauuauuccgu

SEQ ID NO: 2260966 - RNA, 19 nt, Artificial Sequence
  Description of Artificial Sequence: Synthetic oligonucleotide
  Sense strand starting at position 1265 of SEQ ID NO: 1884376
cggaauaauuccuuuccau

SEQ ID NO: 2260967 - RNA, 19 nt, Artificial Sequence
  Description of Artificial Sequence: Synthetic oligonucleotide
  Antisense strand to SEQ ID NO: 2260966
auggaaaggaauuauuccg

SEQ ID NO: 2260968 - RNA, 19 nt, Artificial Sequence
  Description of Artificial Sequence: Synthetic oligonucleotide
  Sense strand starting at position 1494 of SEQ ID NO: 1884376
gaagccuagccugggauau

SEQ ID NO: 2260969 - RNA, 19 nt, Artificial Sequence
  Description of Artificial Sequence: Synthetic oligonucleotide
  Antisense strand to SEQ ID NO: 2260968
auaucccaggcuaggcuuc

SEQ ID NO: 2260970 - RNA, 19 nt, Artificial Sequence
  Description of Artificial Sequence: Synthetic oligonucleotide
  Sense strand starting at position 2412 of SEQ ID NO: 1884376
cuggcaaaucuuggagauc

SEQ ID NO: 2260971 - RNA, 19 nt, Artificial Sequence
  Description of Artificial Sequence: Synthetic oligonucleotide
  Antisense strand to SEQ ID NO: 2260970
gaucuccaagauuugccag

SEQ ID NO: 2260972 - RNA, 19 nt, Artificial Sequence
  Description of Artificial Sequence: Synthetic oligonucleotide
  Sense strand starting at position 2424 of SEQ ID NO: 1884376
ggagaucugacuugcagug

SEQ ID NO: 2260973 - RNA, 19 nt, Artificial Sequence
  Description of Artificial Sequence: Synthetic oligonucleotide
  Antisense strand to SEQ ID NO: 2260972
cacugcaagucagaucucc

SEQ ID NO: 2260974 - RNA, 19 nt, Artificial Sequence
  Description of Artificial Sequence: Synthetic oligonucleotide
  Sense strand starting at position 2587 of SEQ ID NO: 1884376
cucagagcccuguaauaau

SEQ ID NO: 2260975 - RNA, 19 nt, Artificial Sequence
  Description of Artificial Sequence: Synthetic oligonucleotide
  Antisense strand to SEQ ID NO: 2260974
auuauuacagggcucugag

SEQ ID NO: 2260976 - RNA, 19 nt, Artificial Sequence
  Description of Artificial Sequence: Synthetic oligonucleotide
  Sense strand starting at position 2606 of SEQ ID NO: 1884376
aguaccuagcguuaauuga

SEQ ID NO: 2260977 - RNA, 19 nt, Artificial Sequence
  Description of Artificial Sequence: Synthetic oligonucleotide
  Antisense strand to SEQ ID NO: 2260976
ucaauuaacgcuagguacu

SEQ ID NO: 2260978 - RNA, 19 nt, Artificial Sequence
  Description of Artificial Sequence: Synthetic oligonucleotide
  Sense strand starting at position 2849 of SEQ ID NO: 1884376
gugugauugcucagugguu

SEQ ID NO: 2260979 - RNA, 19 nt, Artificial Sequence
  Description of Artificial Sequence: Synthetic oligonucleotide
  Antisense strand to SEQ ID NO: 2260978
aaccacugagcaaucacac

SEQ ID NO: 2260980 - RNA, 19 nt, Artificial Sequence
  Description of Artificial Sequence: Synthetic oligonucleotide
  Sense strand starting at position 2873 of SEQ ID NO: 1884376
uugcaugaaugaguaugua

SEQ ID NO: 2260981 - RNA, 19 nt, Artificial Sequence
  Description of Artificial Sequence: Synthetic oligonucleotide
  Antisense strand to SEQ ID NO: 2260980
uacauacucauucaugcaa

SEQ ID NO: 2260982 - RNA, 19 nt, Artificial Sequence
  Description of Artificial Sequence: Synthetic oligonucleotide
  Sense strand starting at position 2876 of SEQ ID NO: 1884376
caugaaugaguauguacau

SEQ ID NO: 2260983 - RNA, 19 nt, Artificial Sequence
  Description of Artificial Sequence: Synthetic oligonucleotide
  Antisense strand to SEQ ID NO: 2260982
auguacauacucauucaug

SEQ ID NO: 2260984 - RNA, 19 nt, Artificial Sequence
  Description of Artificial Sequence: Synthetic oligonucleotide
  Sense strand starting at position 2877 of SEQ ID NO: 1884376
augaaugaguauguacaua

SEQ ID NO: 2260985 - RNA, 19 nt, Artificial Sequence
  Description of Artificial Sequence: Synthetic oligonucleotide
  Antisense strand to SEQ ID NO: 2260984
uauguacauacucauucau

SEQ ID NO: 2260986 - RNA, 19 nt, Artificial Sequence
  Description of Artificial Sequence: Synthetic oligonucleotide
  Sense strand starting at position 3072 of SEQ ID NO: 1884376
agagucugugagggaucuu

SEQ ID NO: 2260987 - RNA, 19 nt, Artificial Sequence
  Description of Artificial Sequence: Synthetic oligonucleotide
  Antisense strand to SEQ ID NO: 2260986
aagaucccucacagacucu

SEQ ID NO: 2260988 - RNA, 19 nt, Artificial Sequence
  Description of Artificial Sequence: Synthetic oligonucleotide
  Sense strand starting at position 3098 of SEQ ID NO: 1884376
ugaaguucuuagcuugaga

SEQ ID NO: 2260989 - RNA, 19 nt, Artificial Sequence
  Description of Artificial Sequence: Synthetic oligonucleotide
  Antisense strand to SEQ ID NO: 2260988
ucucaagcuaagaacuuca

SEQ ID NO: 2260990 - RNA, 19 nt, Artificial Sequence
  Description of Artificial Sequence: Synthetic oligonucleotide
  Sense strand starting at position 3100 of SEQ ID NO: 1884376
aaguucuuagcuugagaac

SEQ ID NO: 2260991 - RNA, 19 nt, Artificial Sequence
  Description of Artificial Sequence: Synthetic oligonucleotide
  Antisense strand to SEQ ID NO: 2260990
guucucaagcuaagaacuu

SEQ ID NO: 2260992 - RNA, 19 nt, Artificial Sequence
  Description of Artificial Sequence: Synthetic oligonucleotide
  Sense strand starting at position 3109 of SEQ ID NO: 1884376
gcuugagaaccugguauaa

SEQ ID NO: 2260993 - RNA, 19 nt, Artificial Sequence
  Description of Artificial Sequence: Synthetic oligonucleotide
  Antisense strand to SEQ ID NO: 2260992
uuauaccagguucucaagc

SEQ ID NO: 2260994 - RNA, 19 nt, Artificial Sequence
  Description of Artificial Sequence: Synthetic oligonucleotide
  Sense strand starting at position 3186 of SEQ ID NO: 1884376
cuuagucugacaggagaac

SEQ ID NO: 2260995 - RNA, 19 nt, Artificial Sequence
  Description of Artificial Sequence: Synthetic oligonucleotide
  Antisense strand to SEQ ID NO: 2260994
guucuccugucagacuaag

SEQ ID NO: 2260996 - RNA, 19 nt, Artificial Sequence
  Description of Artificial Sequence: Synthetic oligonucleotide
  Sense strand starting at position 3207 of SEQ ID NO: 1884376
agacuacugcuuuagcaga

SEQ ID NO: 2260997 - RNA, 19 nt, Artificial Sequence
  Description of Artificial Sequence: Synthetic oligonucleotide
  Antisense strand to SEQ ID NO: 2260996
ucugcuaaagcaguagucu

SEQ ID NO: 2260998 - RNA, 19 nt, Artificial Sequence
  Description of Artificial Sequence: Synthetic oligonucleotide
  Sense strand starting at position 3209 of SEQ ID NO: 1884376
acuacugcuuuagcagaaa

SEQ ID NO: 2260999 - RNA, 19 nt, Artificial Sequence
  Description of Artificial Sequence: Synthetic oligonucleotide
  Antisense strand to SEQ ID NO: 2260998
uuucugcuaaagcaguagu

SEQ ID NO: 2261000 - RNA, 19 nt, Artificial Sequence
  Description of Artificial Sequence: Synthetic oligonucleotide
  Sense strand starting at position 3292 of SEQ ID NO: 1884376
uaguaagagucuuucugag

SEQ ID NO: 2261001 - RNA, 19 nt, Artificial Sequence
  Description of Artificial Sequence: Synthetic oligonucleotide
  Antisense strand to SEQ ID NO: 2261000
cucagaaagacucuuacua

SEQ ID NO: 2261002 - RNA, 19 nt, Artificial Sequence
  Description of Artificial Sequence: Synthetic oligonucleotide
  Sense strand starting at position 3294 of SEQ ID NO: 1884376
guaagagucuuucugagga

SEQ ID NO: 2261003 - RNA, 19 nt, Artificial Sequence
  Description of Artificial Sequence: Synthetic oligonucleotide
  Antisense strand to SEQ ID NO: 2261002
uccucagaaagacucuuac

SEQ ID NO: 2261004 - RNA, 19 nt, Artificial Sequence
  Description of Artificial Sequence: Synthetic oligonucleotide
  Sense strand starting at position 3403 of SEQ ID NO: 1884376
cagggagccuuuccuggau

SEQ ID NO: 2261005 - RNA, 19 nt, Artificial Sequence
  Description of Artificial Sequence: Synthetic oligonucleotide
  Antisense strand to SEQ ID NO: 2261004
auccaggaaaggcucccug

SEQ ID NO: 2261006 - RNA, 19 nt, Artificial Sequence
  Description of Artificial Sequence: Synthetic oligonucleotide
  Sense strand starting at position 3606 of SEQ ID NO: 1884376
agguaauacuuacuaaugu

SEQ ID NO: 2261007 - RNA, 19 nt, Artificial Sequence
  Description of Artificial Sequence: Synthetic oligonucleotide
  Antisense strand to SEQ ID NO: 2261006
acauuaguaaguauuaccu

SEQ ID NO: 2261008 - RNA, 19 nt, Artificial Sequence
  Description of Artificial Sequence: Synthetic oligonucleotide
  Sense strand starting at position 3623 of SEQ ID NO: 1884376
guuauuugggucuggguca

SEQ ID NO: 2261009 - RNA, 19 nt, Artificial Sequence
  Description of Artificial Sequence: Synthetic oligonucleotide
  Antisense strand to SEQ ID NO: 2261008
ugacccagacccaaauaac

SEQ ID NO: 2261010 - RNA, 19 nt, Artificial Sequence
  Description of Artificial Sequence: Synthetic oligonucleotide
  Sense strand starting at position 3630 of SEQ ID NO: 1884376
gggucugggucaagaaaga

SEQ ID NO: 2261011 - RNA, 19 nt, Artificial Sequence
  Description of Artificial Sequence: Synthetic oligonucleotide
  Antisense strand to SEQ ID NO: 2261010
ucuuucuugacccagaccc

SEQ ID NO: 2261012 - RNA, 19 nt, Artificial Sequence
  Description of Artificial Sequence: Synthetic oligonucleotide
  Sense strand starting at position 3735 of SEQ ID NO: 1884376
agcauuaaaccaggugacu

SEQ ID NO: 2261013 - RNA, 19 nt, Artificial Sequence
  Description of Artificial Sequence: Synthetic oligonucleotide
  Antisense strand to SEQ ID NO: 2261012
agucaccugguuuaaugcu

SEQ ID NO: 2261014 - RNA, 19 nt, Artificial Sequence
  Description of Artificial Sequence: Synthetic oligonucleotide
  Sense strand starting at position 3748 of SEQ ID NO: 1884376
gugacuccagcugaaguua

SEQ ID NO: 2261015 - RNA, 19 nt, Artificial Sequence
  Description of Artificial Sequence: Synthetic oligonucleotide
  Antisense strand to SEQ ID NO: 2261014
uaacuucagcuggagucac

SEQ ID NO: 2261016 - RNA, 19 nt, Artificial Sequence
  Description of Artificial Sequence: Synthetic oligonucleotide
  Sense strand starting at position 225 of SEQ ID NO: 1884377
gaaugcaggucuuuaggaa

SEQ ID NO: 2261017 - RNA, 19 nt, Artificial Sequence
  Description of Artificial Sequence: Synthetic oligonucleotide
  Antisense strand to SEQ ID NO: 2261016
uuccuaaagaccugcauuc

SEQ ID NO: 2261018 - RNA, 19 nt, Artificial Sequence
  Description of Artificial Sequence: Synthetic oligonucleotide
  Sense strand starting at position 507 of SEQ ID NO: 1884377
ggagucacucgaggucaga

SEQ ID NO: 2261019 - RNA, 19 nt, Artificial Sequence
  Description of Artificial Sequence: Synthetic oligonucleotide
  Antisense strand to SEQ ID NO: 2261018
ucugaccucgagugacucc

SEQ ID NO: 2261020 - RNA, 19 nt, Artificial Sequence
  Description of Artificial Sequence: Synthetic oligonucleotide
  Sense strand starting at position 510 of SEQ ID NO: 1884377
gucacucgaggucagaaau

SEQ ID NO: 2261021 - RNA, 19 nt, Artificial Sequence
  Description of Artificial Sequence: Synthetic oligonucleotide
  Antisense strand to SEQ ID NO: 2261020
auuucugaccucgagugac

SEQ ID NO: 2261022 - RNA, 19 nt, Artificial Sequence
  Description of Artificial Sequence: Synthetic oligonucleotide
  Sense strand starting at position 545 of SEQ ID NO: 1884377
agaugcaacuuguaacaga

SEQ ID NO: 2261023 - RNA, 19 nt, Artificial Sequence
  Description of Artificial Sequence: Synthetic oligonucleotide
  Antisense strand to SEQ ID NO: 2261022
ucuguuacaaguugcaucu

SEQ ID NO: 2261024 - RNA, 19 nt, Artificial Sequence
  Description of Artificial Sequence: Synthetic oligonucleotide
  Sense strand starting at position 548 of SEQ ID NO: 1884377
ugcaacuuguaacagacau

SEQ ID NO: 2261025 - RNA, 19 nt, Artificial Sequence
  Description of Artificial Sequence: Synthetic oligonucleotide
  Antisense strand to SEQ ID NO: 2261024
augucuguuacaaguugca

SEQ ID NO: 2261026 - RNA, 19 nt, Artificial Sequence
  Description of Artificial Sequence: Synthetic oligonucleotide
  Sense strand starting at position 591 of SEQ ID NO: 1884377
cuaauaugucagggaggcu

SEQ ID NO: 2261027 - RNA, 19 nt, Artificial Sequence
  Description of Artificial Sequence: Synthetic oligonucleotide
  Antisense strand to SEQ ID NO: 2261026
agccucccugacauauuag

SEQ ID NO: 2261028 - RNA, 19 nt, Artificial Sequence
  Description of Artificial Sequence: Synthetic oligonucleotide
  Sense strand starting at position 623 of SEQ ID NO: 1884377
gggcgcuggcccuuuauua

SEQ ID NO: 2261029 - RNA, 19 nt, Artificial Sequence
  Description of Artificial Sequence: Synthetic oligonucleotide
  Antisense strand to SEQ ID NO: 2261028
uaauaaagggccagcgccc

SEQ ID NO: 2261030 - RNA, 19 nt, Artificial Sequence
  Description of Artificial Sequence: Synthetic oligonucleotide
  Sense strand starting at position 630 of SEQ ID NO: 1884377
ggcccuuuauuaggagacu

SEQ ID NO: 2261031 - RNA, 19 nt, Artificial Sequence
  Description of Artificial Sequence: Synthetic oligonucleotide
  Antisense strand to SEQ ID NO: 2261030
agucuccuaauaaagggcc

SEQ ID NO: 2261032 - RNA, 19 nt, Artificial Sequence
  Description of Artificial Sequence: Synthetic oligonucleotide
  Sense strand starting at position 1150 of SEQ ID NO: 1884377
gcccgaucucuggugcuca

SEQ ID NO: 2261033 - RNA, 19 nt, Artificial Sequence
  Description of Artificial Sequence: Synthetic oligonucleotide
  Antisense strand to SEQ ID NO: 2261032
ugagcaccagagaucgggc

SEQ ID NO: 2261034 - RNA, 19 nt, Artificial Sequence
  Description of Artificial Sequence: Synthetic oligonucleotide
  Sense strand starting at position 2142 of SEQ ID NO: 1884377
cggcgauuuaugggccuuu

SEQ ID NO: 2261035 - RNA, 19 nt, Artificial Sequence
  Description of Artificial Sequence: Synthetic oligonucleotide
  Antisense strand to SEQ ID NO: 2261034
aaaggcccauaaaucgccg

SEQ ID NO: 2261036 - RNA, 19 nt, Artificial Sequence
  Description of Artificial Sequence: Synthetic oligonucleotide
  Sense strand starting at position 2677 of SEQ ID NO: 1884377
gacucuguucgcgucuauu

SEQ ID NO: 2261037 - RNA, 19 nt, Artificial Sequence
  Description of Artificial Sequence: Synthetic oligonucleotide
  Antisense strand to SEQ ID NO: 2261036
aauagacgcgaacagaguc

SEQ ID NO: 2261038 - RNA, 19 nt, Artificial Sequence
  Description of Artificial Sequence: Synthetic oligonucleotide
  Sense strand starting at position 2679 of SEQ ID NO: 1884377
cucuguucgcgucuauuau

SEQ ID NO: 2261039 - RNA, 19 nt, Artificial Sequence
  Description of Artificial Sequence: Synthetic oligonucleotide
  Antisense strand to SEQ ID NO: 2261038
auaauagacgcgaacagag

SEQ ID NO: 2261040 - RNA, 19 nt, Artificial Sequence
  Description of Artificial Sequence: Synthetic oligonucleotide
  Sense strand starting at position 2680 of SEQ ID NO: 1884377
ucuguucgcgucuauuaug

SEQ ID NO: 2261041 - RNA, 19 nt, Artificial Sequence
  Description of Artificial Sequence: Synthetic oligonucleotide
  Antisense strand to SEQ ID NO: 2261040
cauaauagacgcgaacaga

SEQ ID NO: 2261042 - RNA, 19 nt, Artificial Sequence
  Description of Artificial Sequence: Synthetic oligonucleotide
  Sense strand starting at position 2687 of SEQ ID NO: 1884377
gcgucuauuauggaugcga

SEQ ID NO: 2261043 - RNA, 19 nt, Artificial Sequence
  Description of Artificial Sequence: Synthetic oligonucleotide
  Antisense strand to SEQ ID NO: 2261042
ucgcauccauaauagacgc

SEQ ID NO: 2261044 - RNA, 19 nt, Artificial Sequence
  Description of Artificial Sequence: Synthetic oligonucleotide
  Sense strand starting at position 2689 of SEQ ID NO: 1884377
gucuauuauggaugcgaac

SEQ ID NO: 2261045 - RNA, 19 nt, Artificial Sequence
  Description of Artificial Sequence: Synthetic oligonucleotide
  Antisense strand to SEQ ID NO: 2261044
guucgcauccauaauagac

SEQ ID NO: 2261046 - RNA, 19 nt, Artificial Sequence
  Description of Artificial Sequence: Synthetic oligonucleotide
  Sense strand starting at position 2762 of SEQ ID NO: 1884377
auaugugagcccggauuca

SEQ ID NO: 2261047 - RNA, 19 nt, Artificial Sequence
  Description of Artificial Sequence: Synthetic oligonucleotide
  Antisense strand to SEQ ID NO: 2261046
ugaauccgggcucacauau

SEQ ID NO: 2261048 - RNA, 19 nt, Artificial Sequence
  Description of Artificial Sequence: Synthetic oligonucleotide
  Sense strand starting at position 2810 of SEQ ID NO: 1884377
gggcgacuuuauuagguau

SEQ ID NO: 2261049 - RNA, 19 nt, Artificial Sequence
  Description of Artificial Sequence: Synthetic oligonucleotide
  Antisense strand to SEQ ID NO: 2261048
auaccuaauaaagucgccc

SEQ ID NO: 2261050 - RNA, 19 nt, Artificial Sequence
  Description of Artificial Sequence: Synthetic oligonucleotide
  Sense strand starting at position 2812 of SEQ ID NO: 1884377
gcgacuuuauuagguauag

SEQ ID NO: 2261051 - RNA, 19 nt, Artificial Sequence
  Description of Artificial Sequence: Synthetic oligonucleotide
  Antisense strand to SEQ ID NO: 2261050
cuauaccuaauaaagucgc

SEQ ID NO: 2261052 - RNA, 19 nt, Artificial Sequence
  Description of Artificial Sequence: Synthetic oligonucleotide
  Sense strand starting at position 2813 of SEQ ID NO: 1884377
cgacuuuauuagguauaga

SEQ ID NO: 2261053 - RNA, 19 nt, Artificial Sequence
  Description of Artificial Sequence: Synthetic oligonucleotide
  Antisense strand to SEQ ID NO: 2261052
ucuauaccuaauaaagucg

SEQ ID NO: 2261054 - RNA, 19 nt, Artificial Sequence
  Description of Artificial Sequence: Synthetic oligonucleotide
  Sense strand starting at position 2882 of SEQ ID NO: 1884377
ucuugaaauguccgggaga

SEQ ID NO: 2261055 - RNA, 19 nt, Artificial Sequence
  Description of Artificial Sequence: Synthetic oligonucleotide
  Antisense strand to SEQ ID NO: 2261054
ucucccggacauuucaaga

SEQ ID NO: 2261056 - RNA, 19 nt, Artificial Sequence
  Description of Artificial Sequence: Synthetic oligonucleotide
  Sense strand starting at position 2883 of SEQ ID NO: 1884377
cuugaaauguccgggagag

SEQ ID NO: 2261057 - RNA, 19 nt, Artificial Sequence
  Description of Artificial Sequence: Synthetic oligonucleotide
  Antisense strand to SEQ ID NO: 2261056
cucucccggacauuucaag

SEQ ID NO: 2261058 - RNA, 19 nt, Artificial Sequence
  Description of Artificial Sequence: Synthetic oligonucleotide
  Sense strand starting at position 2885 of SEQ ID NO: 1884377
ugaaauguccgggagagcu

SEQ ID NO: 2261059 - RNA, 19 nt, Artificial Sequence
  Description of Artificial Sequence: Synthetic oligonucleotide
  Antisense strand to SEQ ID NO: 2261058
agcucucccggacauuuca

SEQ ID NO: 2261060 - RNA, 19 nt, Artificial Sequence
  Description of Artificial Sequence: Synthetic oligonucleotide
  Sense strand starting at position 3281 of SEQ ID NO: 1884377
aggucuuccuuccgaguuu

SEQ ID NO: 2261061 - RNA, 19 nt, Artificial Sequence
  Description of Artificial Sequence: Synthetic oligonucleotide
  Antisense strand to SEQ ID NO: 2261060
aaacucggaaggaagaccu

SEQ ID NO: 2261062 - RNA, 19 nt, Artificial Sequence
  Description of Artificial Sequence: Synthetic oligonucleotide
  Sense strand starting at position 3288 of SEQ ID NO: 1884377
ccuuccgaguuugcagaau

SEQ ID NO: 2261063 - RNA, 19 nt, Artificial Sequence
  Description of Artificial Sequence: Synthetic oligonucleotide
  Antisense strand to SEQ ID NO: 2261062
auucugcaaacucggaagg

SEQ ID NO: 2261064 - RNA, 19 nt, Artificial Sequence
  Description of Artificial Sequence: Synthetic oligonucleotide
  Sense strand starting at position 3294 of SEQ ID NO: 1884377
gaguuugcagaaugaguga

SEQ ID NO: 2261065 - RNA, 19 nt, Artificial Sequence
  Description of Artificial Sequence: Synthetic oligonucleotide
  Antisense strand to SEQ ID NO: 2261064
ucacucauucugcaaacuc

SEQ ID NO: 2261066 - RNA, 19 nt, Artificial Sequence
  Description of Artificial Sequence: Synthetic oligonucleotide
  Sense strand starting at position 3423 of SEQ ID NO: 1884377
cgauuucuuuaccaagaaa

SEQ ID NO: 2261067 - RNA, 19 nt, Artificial Sequence
  Description of Artificial Sequence: Synthetic oligonucleotide
  Antisense strand to SEQ ID NO: 2261066
uuucuugguaaagaaaucg

SEQ ID NO: 2261068 - RNA, 19 nt, Artificial Sequence
  Description of Artificial Sequence: Synthetic oligonucleotide
  Sense strand starting at position 3459 of SEQ ID NO: 1884377
gccuccgauucuuugagga

SEQ ID NO: 2261069 - RNA, 19 nt, Artificial Sequence
  Description of Artificial Sequence: Synthetic oligonucleotide
  Antisense strand to SEQ ID NO: 2261068
uccucaaagaaucggaggc

SEQ ID NO: 2261070 - RNA, 19 nt, Artificial Sequence
  Description of Artificial Sequence: Synthetic oligonucleotide
  Sense strand starting at position 3461 of SEQ ID NO: 1884377
cuccgauucuuugaggaag

SEQ ID NO: 2261071 - RNA, 19 nt, Artificial Sequence
  Description of Artificial Sequence: Synthetic oligonucleotide
  Antisense strand to SEQ ID NO: 2261070
cuuccucaaagaaucggag

SEQ ID NO: 2261072 - RNA, 19 nt, Artificial Sequence
  Description of Artificial Sequence: Synthetic oligonucleotide
  Sense strand starting at position 3463 of SEQ ID NO: 1884377
ccgauucuuugaggaagga

SEQ ID NO: 2261073 - RNA, 19 nt, Artificial Sequence
  Description of Artificial Sequence: Synthetic oligonucleotide
  Antisense strand to SEQ ID NO: 2261072
uccuuccucaaagaaucgg

SEQ ID NO: 2261074 - RNA, 19 nt, Artificial Sequence
  Description of Artificial Sequence: Synthetic oligonucleotide
  Sense strand starting at position 3485 of SEQ ID NO: 1884377
ggagaaagcuuguuagaga

SEQ ID NO: 2261075 - RNA, 19 nt, Artificial Sequence
  Description of Artificial Sequence: Synthetic oligonucleotide
  Antisense strand to SEQ ID NO: 2261074
ucucuaacaagcuuucucc

SEQ ID NO: 2261076 - RNA, 19 nt, Artificial Sequence
  Description of Artificial Sequence: Synthetic oligonucleotide
  Sense strand starting at position 3486 of SEQ ID NO: 1884377
gagaaagcuuguuagagag

SEQ ID NO: 2261077 - RNA, 19 nt, Artificial Sequence
  Description of Artificial Sequence: Synthetic oligonucleotide
  Antisense strand to SEQ ID NO: 2261076
cucucuaacaagcuuucuc

SEQ ID NO: 2261078 - RNA, 19 nt, Artificial Sequence
  Description of Artificial Sequence: Synthetic oligonucleotide
  Sense strand starting at position 3539 of SEQ ID NO: 1884377
gcaauuauguuccagcuuu

SEQ ID NO: 2261079 - RNA, 19 nt, Artificial Sequence
  Description of Artificial Sequence: Synthetic oligonucleotide
  Antisense strand to SEQ ID NO: 2261078
aaagcuggaacauaauugc

SEQ ID NO: 2261080 - RNA, 19 nt, Artificial Sequence
  Description of Artificial Sequence: Synthetic oligonucleotide
  Sense strand starting at position 3578 of SEQ ID NO: 1884377
agccaaaugucugaauaaa

SEQ ID NO: 2261081 - RNA, 19 nt, Artificial Sequence
  Description of Artificial Sequence: Synthetic oligonucleotide
  Antisense strand to SEQ ID NO: 2261080
uuuauucagacauuuggcu

SEQ ID NO: 2261082 - RNA, 19 nt, Artificial Sequence
  Description of Artificial Sequence: Synthetic oligonucleotide
  Sense strand starting at position 3650 of SEQ ID NO: 1884377
ggcgcugcuggcgagauua

SEQ ID NO: 2261083 - RNA, 19 nt, Artificial Sequence
  Description of Artificial Sequence: Synthetic oligonucleotide
  Antisense strand to SEQ ID NO: 2261082
uaaucucgccagcagcgcc

SEQ ID NO: 2261084 - RNA, 19 nt, Artificial Sequence
  Description of Artificial Sequence: Synthetic oligonucleotide
  Sense strand starting at position 3686 of SEQ ID NO: 1884377
ccgcauugcuucuaugaaa

SEQ ID NO: 2261085 - RNA, 19 nt, Artificial Sequence
  Description of Artificial Sequence: Synthetic oligonucleotide
  Antisense strand to SEQ ID NO: 2261084
uuucauagaagcaaugcgg

SEQ ID NO: 2261086 - RNA, 19 nt, Artificial Sequence
  Description of Artificial Sequence: Synthetic oligonucleotide
  Sense strand starting at position 3806 of SEQ ID NO: 1884377
cgaggagcgcguuccgaau

SEQ ID NO: 2261087 - RNA, 19 nt, Artificial Sequence
  Description of Artificial Sequence: Synthetic oligonucleotide
  Antisense strand to SEQ ID NO: 2261086
auucggaacgcgcuccucg

SEQ ID NO: 2261088 - RNA, 19 nt, Artificial Sequence
  Description of Artificial Sequence: Synthetic oligonucleotide
  Sense strand starting at position 3852 of SEQ ID NO: 1884377
aaugaauugucuccucgca

SEQ ID NO: 2261089 - RNA, 19 nt, Artificial Sequence
  Description of Artificial Sequence: Synthetic oligonucleotide
  Antisense strand to SEQ ID NO: 2261088
ugcgaggagacaauucauu

SEQ ID NO: 2261090 - RNA, 19 nt, Artificial Sequence
  Description of Artificial Sequence: Synthetic oligonucleotide
  Sense strand starting at position 3860 of SEQ ID NO: 1884377
gucuccucgcaggaggauu

SEQ ID NO: 2261091 - RNA, 19 nt, Artificial Sequence
  Description of Artificial Sequence: Synthetic oligonucleotide
  Antisense strand to SEQ ID NO: 2261090
aauccuccugcgaggagac

SEQ ID NO: 2261092 - RNA, 19 nt, Artificial Sequence
  Description of Artificial Sequence: Synthetic oligonucleotide
  Sense strand starting at position 3871 of SEQ ID NO: 1884377
ggaggauucuguagaaagg

SEQ ID NO: 2261093 - RNA, 19 nt, Artificial Sequence
  Description of Artificial Sequence: Synthetic oligonucleotide
  Antisense strand to SEQ ID NO: 2261092
ccuuucuacagaauccucc

SEQ ID NO: 2261094 - RNA, 19 nt, Artificial Sequence
  Description of Artificial Sequence: Synthetic oligonucleotide
  Sense strand starting at position 3982 of SEQ ID NO: 1884377
ucugaaaguuggugacuga

SEQ ID NO: 2261095 - RNA, 19 nt, Artificial Sequence
  Description of Artificial Sequence: Synthetic oligonucleotide
  Antisense strand to SEQ ID NO: 2261094
ucagucaccaacuuucaga

SEQ ID NO: 2261096 - RNA, 19 nt, Artificial Sequence
  Description of Artificial Sequence: Synthetic oligonucleotide
  Sense strand starting at position 42 of SEQ ID NO: 1884378
auagaaaucugguuaaucc

SEQ ID NO: 2261097 - RNA, 19 nt, Artificial Sequence
  Description of Artificial Sequence: Synthetic oligonucleotide
  Antisense strand to SEQ ID NO: 2261096
ggauuaaccagauuucuau

SEQ ID NO: 2261098 - RNA, 19 nt, Artificial Sequence
  Description of Artificial Sequence: Synthetic oligonucleotide
  Sense strand starting at position 78 of SEQ ID NO: 1884378
ucaaguacugacugaguaa

SEQ ID NO: 2261099 - RNA, 19 nt, Artificial Sequence
  Description of Artificial Sequence: Synthetic oligonucleotide
  Antisense strand to SEQ ID NO: 2261098
uuacucagucaguacuuga

SEQ ID NO: 2261100 - RNA, 19 nt, Artificial Sequence
  Description of Artificial Sequence: Synthetic oligonucleotide
  Sense strand starting at position 90 of SEQ ID NO: 1884378
ugaguaaggcuguguauca

SEQ ID NO: 2261101 - RNA, 19 nt, Artificial Sequence
  Description of Artificial Sequence: Synthetic oligonucleotide
  Antisense strand to SEQ ID NO: 2261100
ugauacacagccuuacuca

SEQ ID NO: 2261102 - RNA, 19 nt, Artificial Sequence
  Description of Artificial Sequence: Synthetic oligonucleotide
  Sense strand starting at position 208 of SEQ ID NO: 1884378
cugguaaaugcacaucaaa

SEQ ID NO: 2261103 - RNA, 19 nt, Artificial Sequence
  Description of Artificial Sequence: Synthetic oligonucleotide
  Antisense strand to SEQ ID NO: 2261102
uuugaugugcauuuaccag

SEQ ID NO: 2261104 - RNA, 19 nt, Artificial Sequence
  Description of Artificial Sequence: Synthetic oligonucleotide
  Sense strand starting at position 211 of SEQ ID NO: 1884378
guaaaugcacaucaaaugu

SEQ ID NO: 2261105 - RNA, 19 nt, Artificial Sequence
  Description of Artificial Sequence: Synthetic oligonucleotide
  Antisense strand to SEQ ID NO: 2261104
acauuugaugugcauuuac

SEQ ID NO: 2261106 - RNA, 19 nt, Artificial Sequence
  Description of Artificial Sequence: Synthetic oligonucleotide
  Sense strand starting at position 227 of SEQ ID NO: 1884378
uguggauauuaucaggaaa

SEQ ID NO: 2261107 - RNA, 19 nt, Artificial Sequence
  Description of Artificial Sequence: Synthetic oligonucleotide
  Antisense strand to SEQ ID NO: 2261106
uuuccugauaauauccaca

SEQ ID NO: 2261108 - RNA, 19 nt, Artificial Sequence
  Description of Artificial Sequence: Synthetic oligonucleotide
  Sense strand starting at position 259 of SEQ ID NO: 1884378
gugauaaucuaagacagaa

SEQ ID NO: 2261109 - RNA, 19 nt, Artificial Sequence
  Description of Artificial Sequence: Synthetic oligonucleotide
  Antisense strand to SEQ ID NO: 2261108
uucugucuuagauuaucac

SEQ ID NO: 2261110 - RNA, 19 nt, Artificial Sequence
  Description of Artificial Sequence: Synthetic oligonucleotide
  Sense strand starting at position 277 of SEQ ID NO: 1884378
acuauucuaccuggaugaa

SEQ ID NO: 2261111 - RNA, 19 nt, Artificial Sequence
  Description of Artificial Sequence: Synthetic oligonucleotide
  Antisense strand to SEQ ID NO: 2261110
uucauccagguagaauagu

SEQ ID NO: 2261112 - RNA, 19 nt, Artificial Sequence
  Description of Artificial Sequence: Synthetic oligonucleotide
  Sense strand starting at position 280 of SEQ ID NO: 1884378
auucuaccuggaugaauua

SEQ ID NO: 2261113 - RNA, 19 nt, Artificial Sequence
  Description of Artificial Sequence: Synthetic oligonucleotide
  Antisense strand to SEQ ID NO: 2261112
uaauucauccagguagaau

SEQ ID NO: 2261114 - RNA, 19 nt, Artificial Sequence
  Description of Artificial Sequence: Synthetic oligonucleotide
  Sense strand starting at position 392 of SEQ ID NO: 1884378
gguacugggaucugaacau

SEQ ID NO: 2261115 - RNA, 19 nt, Artificial Sequence
  Description of Artificial Sequence: Synthetic oligonucleotide
  Antisense strand to SEQ ID NO: 2261114
auguucagaucccaguacc

SEQ ID NO: 2261116 - RNA, 19 nt, Artificial Sequence
  Description of Artificial Sequence: Synthetic oligonucleotide
  Sense strand starting at position 930 of SEQ ID NO: 1884378
cccgaauucugaucccaac

SEQ ID NO: 2261117 - RNA, 19 nt, Artificial Sequence
  Description of Artificial Sequence: Synthetic oligonucleotide
  Antisense strand to SEQ ID NO: 2261116
guugggaucagaauucggg

SEQ ID NO: 2261118 - RNA, 19 nt, Artificial Sequence
  Description of Artificial Sequence: Synthetic oligonucleotide
  Sense strand starting at position 1376 of SEQ ID NO: 1884378
cgugcugaccguguucaaa

SEQ ID NO: 2261119 - RNA, 19 nt, Artificial Sequence
  Description of Artificial Sequence: Synthetic oligonucleotide
  Antisense strand to SEQ ID NO: 2261118
uuugaacacggucagcacg

SEQ ID NO: 2261120 - RNA, 19 nt, Artificial Sequence
  Description of Artificial Sequence: Synthetic oligonucleotide
  Sense strand starting at position 1988 of SEQ ID NO: 1884378
gaccguucugccuggagac

SEQ ID NO: 2261121 - RNA, 19 nt, Artificial Sequence
  Description of Artificial Sequence: Synthetic oligonucleotide
  Antisense strand to SEQ ID NO: 2261120
gucuccaggcagaacgguc

SEQ ID NO: 2261122 - RNA, 19 nt, Artificial Sequence
  Description of Artificial Sequence: Synthetic oligonucleotide
  Sense strand starting at position 2143 of SEQ ID NO: 1884378
ccugucauuggccgaaaga

SEQ ID NO: 2261123 - RNA, 19 nt, Artificial Sequence
  Description of Artificial Sequence: Synthetic oligonucleotide
  Antisense strand to SEQ ID NO: 2261122
ucuuucggccaaugacagg

SEQ ID NO: 2261124 - RNA, 19 nt, Artificial Sequence
  Description of Artificial Sequence: Synthetic oligonucleotide
  Sense strand starting at position 2144 of SEQ ID NO: 1884378
cugucauuggccgaaagag

SEQ ID NO: 2261125 - RNA, 19 nt, Artificial Sequence
  Description of Artificial Sequence: Synthetic oligonucleotide
  Antisense strand to SEQ ID NO: 2261124
cucuuucggccaaugacag

SEQ ID NO: 2261126 - RNA, 19 nt, Artificial Sequence
  Description of Artificial Sequence: Synthetic oligonucleotide
  Sense strand starting at position 2360 of SEQ ID NO: 1884378
cugcgugauguguucacca

SEQ ID NO: 2261127 - RNA, 19 nt, Artificial Sequence
  Description of Artificial Sequence: Synthetic oligonucleotide
  Antisense strand to SEQ ID NO: 2261126
uggugaacacaucacgcag

SEQ ID NO: 2261128 - RNA, 19 nt, Artificial Sequence
  Description of Artificial Sequence: Synthetic oligonucleotide
  Sense strand starting at position 2869 of SEQ ID NO: 1884378
ugccaagcauugccauaaa

SEQ ID NO: 2261129 - RNA, 19 nt, Artificial Sequence
  Description of Artificial Sequence: Synthetic oligonucleotide
  Antisense strand to SEQ ID NO: 2261128
uuuauggcaaugcuuggca

SEQ ID NO: 2261130 - RNA, 19 nt, Artificial Sequence
  Description of Artificial Sequence: Synthetic oligonucleotide
  Sense strand starting at position 3009 of SEQ ID NO: 1884378
gcaggacucuggguauguu

SEQ ID NO: 2261131 - RNA, 19 nt, Artificial Sequence
  Description of Artificial Sequence: Synthetic oligonucleotide
  Antisense strand to SEQ ID NO: 2261130
aacauacccagaguccugc

SEQ ID NO: 2261132 - RNA, 19 nt, Artificial Sequence
  Description of Artificial Sequence: Synthetic oligonucleotide
  Sense strand starting at position 3017 of SEQ ID NO: 1884378
cuggguauguucucgaaag

SEQ ID NO: 2261133 - RNA, 19 nt, Artificial Sequence
  Description of Artificial Sequence: Synthetic oligonucleotide
  Antisense strand to SEQ ID NO: 2261132
cuuucgagaacauacccag

SEQ ID NO: 2261134 - RNA, 19 nt, Artificial Sequence
  Description of Artificial Sequence: Synthetic oligonucleotide
  Sense strand starting at position 3019 of SEQ ID NO: 1884378
ggguauguucucgaaaguu

SEQ ID NO: 2261135 - RNA, 19 nt, Artificial Sequence
  Description of Artificial Sequence: Synthetic oligonucleotide
  Antisense strand to SEQ ID NO: 2261134
aacuuucgagaacauaccc

SEQ ID NO: 2261136 - RNA, 19 nt, Artificial Sequence
  Description of Artificial Sequence: Synthetic oligonucleotide
  Sense strand starting at position 3025 of SEQ ID NO: 1884378
guucucgaaaguuguuaca

SEQ ID NO: 2261137 - RNA, 19 nt, Artificial Sequence
  Description of Artificial Sequence: Synthetic oligonucleotide
  Antisense strand to SEQ ID NO: 2261136
uguaacaacuuucgagaac

SEQ ID NO: 2261138 - RNA, 19 nt, Artificial Sequence
  Description of Artificial Sequence: Synthetic oligonucleotide
  Sense strand starting at position 3027 of SEQ ID NO: 1884378
ucucgaaaguuguuacaac

SEQ ID NO: 2261139 - RNA, 19 nt, Artificial Sequence
  Description of Artificial Sequence: Synthetic oligonucleotide
  Antisense strand to SEQ ID NO: 2261138
guuguaacaacuuucgaga

SEQ ID NO: 2261140 - RNA, 19 nt, Artificial Sequence
  Description of Artificial Sequence: Synthetic oligonucleotide
  Sense strand starting at position 3167 of SEQ ID NO: 1884378
aauauacgucuacgggaga

SEQ ID NO: 2261141 - RNA, 19 nt, Artificial Sequence
  Description of Artificial Sequence: Synthetic oligonucleotide
  Antisense strand to SEQ ID NO: 2261140
ucucccguagacguauauu

SEQ ID NO: 2261142 - RNA, 19 nt, Artificial Sequence
  Description of Artificial Sequence: Synthetic oligonucleotide
  Sense strand starting at position 3275 of SEQ ID NO: 1884378
ggcagcaagugauuccuuu

SEQ ID NO: 2261143 - RNA, 19 nt, Artificial Sequence
  Description of Artificial Sequence: Synthetic oligonucleotide
  Antisense strand to SEQ ID NO: 2261142
aaaggaaucacuugcugcc

SEQ ID NO: 2261144 - RNA, 19 nt, Artificial Sequence
  Description of Artificial Sequence: Synthetic oligonucleotide
  Sense strand starting at position 3351 of SEQ ID NO: 1884378
aggcaaucugggcacaagu

SEQ ID NO: 2261145 - RNA, 19 nt, Artificial Sequence
  Description of Artificial Sequence: Synthetic oligonucleotide
  Antisense strand to SEQ ID NO: 2261144
acuugugcccagauugccu

SEQ ID NO: 2261146 - RNA, 19 nt, Artificial Sequence
  Description of Artificial Sequence: Synthetic oligonucleotide
  Sense strand starting at position 3409 of SEQ ID NO: 1884378
gggaguucaugugucugau

SEQ ID NO: 2261147 - RNA, 19 nt, Artificial Sequence
  Description of Artificial Sequence: Synthetic oligonucleotide
  Antisense strand to SEQ ID NO: 2261146
aucagacacaugaacuccc

SEQ ID NO: 2261148 - RNA, 19 nt, Artificial Sequence
  Description of Artificial Sequence: Synthetic oligonucleotide
  Sense strand starting at position 3415 of SEQ ID NO: 1884378
ucaugugucugaucagagg

SEQ ID NO: 2261149 - RNA, 19 nt, Artificial Sequence
  Description of Artificial Sequence: Synthetic oligonucleotide
  Antisense strand to SEQ ID NO: 2261148
ccucugaucagacacauga

SEQ ID NO: 2261150 - RNA, 19 nt, Artificial Sequence
  Description of Artificial Sequence: Synthetic oligonucleotide
  Sense strand starting at position 3446 of SEQ ID NO: 1884378
cucacuaucuagcugggaa

SEQ ID NO: 2261151 - RNA, 19 nt, Artificial Sequence
  Description of Artificial Sequence: Synthetic oligonucleotide
  Antisense strand to SEQ ID NO: 2261150
uucccagcuagauagugag

SEQ ID NO: 2261152 - RNA, 19 nt, Artificial Sequence
  Description of Artificial Sequence: Synthetic oligonucleotide
  Sense strand starting at position 3447 of SEQ ID NO: 1884378
ucacuaucuagcugggaag

SEQ ID NO: 2261153 - RNA, 19 nt, Artificial Sequence
  Description of Artificial Sequence: Synthetic oligonucleotide
  Antisense strand to SEQ ID NO: 2261152
cuucccagcuagauaguga

SEQ ID NO: 2261154 - RNA, 19 nt, Artificial Sequence
  Description of Artificial Sequence: Synthetic oligonucleotide
  Sense strand starting at position 3449 of SEQ ID NO: 1884378
acuaucuagcugggaaguu

SEQ ID NO: 2261155 - RNA, 19 nt, Artificial Sequence
  Description of Artificial Sequence: Synthetic oligonucleotide
  Antisense strand to SEQ ID NO: 2261154
aacuucccagcuagauagu

SEQ ID NO: 2261156 - RNA, 19 nt, Artificial Sequence
  Description of Artificial Sequence: Synthetic oligonucleotide
  Sense strand starting at position 3548 of SEQ ID NO: 1884378
aggguuucacgcuauaaug

SEQ ID NO: 2261157 - RNA, 19 nt, Artificial Sequence
  Description of Artificial Sequence: Synthetic oligonucleotide
  Antisense strand to SEQ ID NO: 2261156
cauuauagcgugaaacccu

SEQ ID NO: 2261158 - RNA, 19 nt, Artificial Sequence
  Description of Artificial Sequence: Synthetic oligonucleotide
  Sense strand starting at position 3559 of SEQ ID NO: 1884378
cuauaaugucacugucuug

SEQ ID NO: 2261159 - RNA, 19 nt, Artificial Sequence
  Description of Artificial Sequence: Synthetic oligonucleotide
  Antisense strand to SEQ ID NO: 2261158
caagacagugacauuauag

SEQ ID NO: 2261160 - RNA, 19 nt, Artificial Sequence
  Description of Artificial Sequence: Synthetic oligonucleotide
  Sense strand starting at position 3582 of SEQ ID NO: 1884378
ucuugauaguuacuaucuu

SEQ ID NO: 2261161 - RNA, 19 nt, Artificial Sequence
  Description of Artificial Sequence: Synthetic oligonucleotide
  Antisense strand to SEQ ID NO: 2261160
aagauaguaacuaucaaga

SEQ ID NO: 2261162 - RNA, 19 nt, Artificial Sequence
  Description of Artificial Sequence: Synthetic oligonucleotide
  Sense strand starting at position 3682 of SEQ ID NO: 1884378
gccuccucaggacagauua

SEQ ID NO: 2261163 - RNA, 19 nt, Artificial Sequence
  Description of Artificial Sequence: Synthetic oligonucleotide
  Antisense strand to SEQ ID NO: 2261162
uaaucuguccugaggaggc

SEQ ID NO: 2261164 - RNA, 19 nt, Artificial Sequence
  Description of Artificial Sequence: Synthetic oligonucleotide
  Sense strand starting at position 3692 of SEQ ID NO: 1884378
gacagauuaucagcugccu

SEQ ID NO: 2261165 - RNA, 19 nt, Artificial Sequence
  Description of Artificial Sequence: Synthetic oligonucleotide
  Antisense strand to SEQ ID NO: 2261164
aggcagcugauaaucuguc

SEQ ID NO: 2261166 - RNA, 19 nt, Artificial Sequence
  Description of Artificial Sequence: Synthetic oligonucleotide
  Sense strand starting at position 3771 of SEQ ID NO: 1884378
cucagugaccacuauuauu

SEQ ID NO: 2261167 - RNA, 19 nt, Artificial Sequence
  Description of Artificial Sequence: Synthetic oligonucleotide
  Antisense strand to SEQ ID NO: 2261166
aauaauaguggucacugag

SEQ ID NO: 2261168 - RNA, 19 nt, Artificial Sequence
  Description of Artificial Sequence: Synthetic oligonucleotide
  Sense strand starting at position 3854 of SEQ ID NO: 1884378
ugcagagauaccugcaagu

SEQ ID NO: 2261169 - RNA, 19 nt, Artificial Sequence
  Description of Artificial Sequence: Synthetic oligonucleotide
  Antisense strand to SEQ ID NO: 2261168
acuugcagguaucucugca

SEQ ID NO: 2261170 - RNA, 19 nt, Artificial Sequence
  Description of Artificial Sequence: Synthetic oligonucleotide
  Sense strand starting at position 3856 of SEQ ID NO: 1884378
cagagauaccugcaagucu

SEQ ID NO: 2261171 - RNA, 19 nt, Artificial Sequence
  Description of Artificial Sequence: Synthetic oligonucleotide
  Antisense strand to SEQ ID NO: 2261170
agacuugcagguaucucug

SEQ ID NO: 2261172 - RNA, 19 nt, Artificial Sequence
  Description of Artificial Sequence: Synthetic oligonucleotide
  Sense strand starting at position 3941 of SEQ ID NO: 1884378
gagagauuaugugagaaga

SEQ ID NO: 2261173 - RNA, 19 nt, Artificial Sequence
  Description of Artificial Sequence: Synthetic oligonucleotide
  Antisense strand to SEQ ID NO: 2261172
ucuucucacauaaucucuc

SEQ ID NO: 2261174 - RNA, 19 nt, Artificial Sequence
  Description of Artificial Sequence: Synthetic oligonucleotide
  Sense strand starting at position 3943 of SEQ ID NO: 1884378
gagauuaugugagaagaca

SEQ ID NO: 2261175 - RNA, 19 nt, Artificial Sequence
  Description of Artificial Sequence: Synthetic oligonucleotide
  Antisense strand to SEQ ID NO: 2261174
ugucuucucacauaaucuc

SEQ ID NO: 2261176 - RNA, 19 nt, Artificial Sequence
  Description of Artificial Sequence: Synthetic oligonucleotide
  Sense strand starting at position 210 of SEQ ID NO: 1884379
aaaguaaucgauuguaagg

SEQ ID NO: 2261177 - RNA, 19 nt, Artificial Sequence
  Description of Artificial Sequence: Synthetic oligonucleotide
  Antisense strand to SEQ ID NO: 2261176
ccuuacaaucgauuacuuu

SEQ ID NO: 2261178 - RNA, 19 nt, Artificial Sequence
  Description of Artificial Sequence: Synthetic oligonucleotide
  Sense strand starting at position 219 of SEQ ID NO: 1884379
gauuguaaggauggaaguu

SEQ ID NO: 2261179 - RNA, 19 nt, Artificial Sequence
  Description of Artificial Sequence: Synthetic oligonucleotide
  Antisense strand to SEQ ID NO: 2261178
aacuuccauccuuacaauc

SEQ ID NO: 2261180 - RNA, 19 nt, Artificial Sequence
  Description of Artificial Sequence: Synthetic oligonucleotide
  Sense strand starting at position 228 of SEQ ID NO: 1884379
gauggaaguugguuggaau

SEQ ID NO: 2261181 - RNA, 19 nt, Artificial Sequence
  Description of Artificial Sequence: Synthetic oligonucleotide
  Antisense strand to SEQ ID NO: 2261180
auuccaaccaacuuccauc

SEQ ID NO: 2261182 - RNA, 19 nt, Artificial Sequence
  Description of Artificial Sequence: Synthetic oligonucleotide
  Sense strand starting at position 235 of SEQ ID NO: 1884379
guugguuggaaugauguga

SEQ ID NO: 2261183 - RNA, 19 nt, Artificial Sequence
  Description of Artificial Sequence: Synthetic oligonucleotide
  Antisense strand to SEQ ID NO: 2261182
ucacaucauuccaaccaac

SEQ ID NO: 2261184 - RNA, 19 nt, Artificial Sequence
  Description of Artificial Sequence: Synthetic oligonucleotide
  Sense strand starting at position 357 of SEQ ID NO: 1884379
acuuuacuccagugacuga

SEQ ID NO: 2261185 - RNA, 19 nt, Artificial Sequence
  Description of Artificial Sequence: Synthetic oligonucleotide
  Antisense strand to SEQ ID NO: 2261184
ucagucacuggaguaaagu

SEQ ID NO: 2261186 - RNA, 19 nt, Artificial Sequence
  Description of Artificial Sequence: Synthetic oligonucleotide
  Sense strand starting at position 388 of SEQ ID NO: 1884379
gguuuacagaacuguaaga

SEQ ID NO: 2261187 - RNA, 19 nt, Artificial Sequence
  Description of Artificial Sequence: Synthetic oligonucleotide
  Antisense strand to SEQ ID NO: 2261186
ucuuacaguucuguaaacc

SEQ ID NO: 2261188 - RNA, 19 nt, Artificial Sequence
  Description of Artificial Sequence: Synthetic oligonucleotide
  Sense strand starting at position 848 of SEQ ID NO: 1884379
agugcugagcuagaaaucu

SEQ ID NO: 2261189 - RNA, 19 nt, Artificial Sequence
  Description of Artificial Sequence: Synthetic oligonucleotide
  Antisense strand to SEQ ID NO: 2261188
agauuucuagcucagcacu

SEQ ID NO: 2261190 - RNA, 19 nt, Artificial Sequence
  Description of Artificial Sequence: Synthetic oligonucleotide
  Sense strand starting at position 856 of SEQ ID NO: 1884379
gcuagaaaucugugaauca

SEQ ID NO: 2261191 - RNA, 19 nt, Artificial Sequence
  Description of Artificial Sequence: Synthetic oligonucleotide
  Antisense strand to SEQ ID NO: 2261190
ugauucacagauuucuagc

SEQ ID NO: 2261192 - RNA, 19 nt, Artificial Sequence
  Description of Artificial Sequence: Synthetic oligonucleotide
  Sense strand starting at position 1001 of SEQ ID NO: 1884379
uuauucuguccuggaauca

SEQ ID NO: 2261193 - RNA, 19 nt, Artificial Sequence
  Description of Artificial Sequence: Synthetic oligonucleotide
  Antisense strand to SEQ ID NO: 2261192
ugauuccaggacagaauaa

SEQ ID NO: 2261194 - RNA, 19 nt, Artificial Sequence
  Description of Artificial Sequence: Synthetic oligonucleotide
  Sense strand starting at position 1062 of SEQ ID NO: 1884379
aguuuaugaggcugaaacu

SEQ ID NO: 2261195 - RNA, 19 nt, Artificial Sequence
  Description of Artificial Sequence: Synthetic oligonucleotide
  Antisense strand to SEQ ID NO: 2261194
aguuucagccucauaaacu

SEQ ID NO: 2261196 - RNA, 19 nt, Artificial Sequence
  Description of Artificial Sequence: Synthetic oligonucleotide
  Sense strand starting at position 1063 of SEQ ID NO: 1884379
guuuaugaggcugaaacuu

SEQ ID NO: 2261197 - RNA, 19 nt, Artificial Sequence
  Description of Artificial Sequence: Synthetic oligonucleotide
  Antisense strand to SEQ ID NO: 2261196
aaguuucagccucauaaac

SEQ ID NO: 2261198 - RNA, 19 nt, Artificial Sequence
  Description of Artificial Sequence: Synthetic oligonucleotide
  Sense strand starting at position 1533 of SEQ ID NO: 1884379
gucauuacgcaaucugcga

SEQ ID NO: 2261199 - RNA, 19 nt, Artificial Sequence
  Description of Artificial Sequence: Synthetic oligonucleotide
  Antisense strand to SEQ ID NO: 2261198
ucgcagauugcguaaugac

SEQ ID NO: 2261200 - RNA, 19 nt, Artificial Sequence
  Description of Artificial Sequence: Synthetic oligonucleotide
  Sense strand starting at position 1540 of SEQ ID NO: 1884379
cgcaaucugcgaguuuguu

SEQ ID NO: 2261201 - RNA, 19 nt, Artificial Sequence
  Description of Artificial Sequence: Synthetic oligonucleotide
  Antisense strand to SEQ ID NO: 2261200
aacaaacucgcagauugcg

SEQ ID NO: 2261202 - RNA, 19 nt, Artificial Sequence
  Description of Artificial Sequence: Synthetic oligonucleotide
  Sense strand starting at position 2264 of SEQ ID NO: 1884379
gggugacucuucucaaaug

SEQ ID NO: 2261203 - RNA, 19 nt, Artificial Sequence
  Description of Artificial Sequence: Synthetic oligonucleotide
  Antisense strand to SEQ ID NO: 2261202
cauuugagaagagucaccc

SEQ ID NO: 2261204 - RNA, 19 nt, Artificial Sequence
  Description of Artificial Sequence: Synthetic oligonucleotide
  Sense strand starting at position 2371 of SEQ ID NO: 1884379
uggauaucccuggguauga

SEQ ID NO: 2261205 - RNA, 19 nt, Artificial Sequence
  Description of Artificial Sequence: Synthetic oligonucleotide
  Antisense strand to SEQ ID NO: 2261204
ucauacccagggauaucca

SEQ ID NO: 2261206 - RNA, 19 nt, Artificial Sequence
  Description of Artificial Sequence: Synthetic oligonucleotide
  Sense strand starting at position 2372 of SEQ ID NO: 1884379
ggauaucccuggguaugaa

SEQ ID NO: 2261207 - RNA, 19 nt, Artificial Sequence
  Description of Artificial Sequence: Synthetic oligonucleotide
  Antisense strand to SEQ ID NO: 2261206
uucauacccagggauaucc

SEQ ID NO: 2261208 - RNA, 19 nt, Artificial Sequence
  Description of Artificial Sequence: Synthetic oligonucleotide
  Sense strand starting at position 2439 of SEQ ID NO: 1884379
ucuguuucgccaguuguua

SEQ ID NO: 2261209 - RNA, 19 nt, Artificial Sequence
  Description of Artificial Sequence: Synthetic oligonucleotide
  Antisense strand to SEQ ID NO: 2261208
uaacaacuggcgaaacaga

SEQ ID NO: 2261210 - RNA, 19 nt, Artificial Sequence
  Description of Artificial Sequence: Synthetic oligonucleotide
  Sense strand starting at position 2492 of SEQ ID NO: 1884379
ggcgcugucugauuuggaa

SEQ ID NO: 2261211 - RNA, 19 nt, Artificial Sequence
  Description of Artificial Sequence: Synthetic oligonucleotide
  Antisense strand to SEQ ID NO: 2261210
uuccaaaucagacagcgcc

SEQ ID NO: 2261212 - RNA, 19 nt, Artificial Sequence
  Description of Artificial Sequence: Synthetic oligonucleotide
  Sense strand starting at position 2494 of SEQ ID NO: 1884379
cgcugucugauuuggaaca

SEQ ID NO: 2261213 - RNA, 19 nt, Artificial Sequence
  Description of Artificial Sequence: Synthetic oligonucleotide
  Antisense strand to SEQ ID NO: 2261212
uguuccaaaucagacagcg

SEQ ID NO: 2261214 - RNA, 19 nt, Artificial Sequence
  Description of Artificial Sequence: Synthetic oligonucleotide
  Sense strand starting at position 2496 of SEQ ID NO: 1884379
cugucugauuuggaacaaa

SEQ ID NO: 2261215 - RNA, 19 nt, Artificial Sequence
  Description of Artificial Sequence: Synthetic oligonucleotide
  Antisense strand to SEQ ID NO: 2261214
uuuguuccaaaucagacag

SEQ ID NO: 2261216 - RNA, 19 nt, Artificial Sequence
  Description of Artificial Sequence: Synthetic oligonucleotide
  Sense strand starting at position 2590 of SEQ ID NO: 1884379
cagccaguauuaucagaug

SEQ ID NO: 2261217 - RNA, 19 nt, Artificial Sequence
  Description of Artificial Sequence: Synthetic oligonucleotide
  Antisense strand to SEQ ID NO: 2261216
caucugauaauacuggcug

SEQ ID NO: 2261218 - RNA, 19 nt, Artificial Sequence
  Description of Artificial Sequence: Synthetic oligonucleotide
  Sense strand starting at position 2628 of SEQ ID NO: 1884379
uucuaacucccgggagaug

SEQ ID NO: 2261219 - RNA, 19 nt, Artificial Sequence
  Description of Artificial Sequence: Synthetic oligonucleotide
  Antisense strand to SEQ ID NO: 2261218
caucucccgggaguuagaa

SEQ ID NO: 2261220 - RNA, 19 nt, Artificial Sequence
  Description of Artificial Sequence: Synthetic oligonucleotide
  Sense strand starting at position 2768 of SEQ ID NO: 1884379
ccuuuagaaggugauguuu

SEQ ID NO: 2261221 - RNA, 19 nt, Artificial Sequence
  Description of Artificial Sequence: Synthetic oligonucleotide
  Antisense strand to SEQ ID NO: 2261220
aaacaucaccuucuaaagg

SEQ ID NO: 2261222 - RNA, 19 nt, Artificial Sequence
  Description of Artificial Sequence: Synthetic oligonucleotide
  Sense strand starting at position 2780 of SEQ ID NO: 1884379
gauguuugaguugaaauuc

SEQ ID NO: 2261223 - RNA, 19 nt, Artificial Sequence
  Description of Artificial Sequence: Synthetic oligonucleotide
  Antisense strand to SEQ ID NO: 2261222
gaauuucaacucaaacauc

SEQ ID NO: 2261224 - RNA, 19 nt, Artificial Sequence
  Description of Artificial Sequence: Synthetic oligonucleotide
  Sense strand starting at position 2830 of SEQ ID NO: 1884379
gcaguucaggcauaggaaa

SEQ ID NO: 2261225 - RNA, 19 nt, Artificial Sequence
  Description of Artificial Sequence: Synthetic oligonucleotide
  Antisense strand to SEQ ID NO: 2261224
uuuccuaugccugaacugc

SEQ ID NO: 2261226 - RNA, 19 nt, Artificial Sequence
  Description of Artificial Sequence: Synthetic oligonucleotide
  Sense strand starting at position 3082 of SEQ ID NO: 1884379
acaguagguacucaguauu

SEQ ID NO: 2261227 - RNA, 19 nt, Artificial Sequence
  Description of Artificial Sequence: Synthetic oligonucleotide
  Antisense strand to SEQ ID NO: 2261226
aauacugaguaccuacugu

SEQ ID NO: 2261228 - RNA, 19 nt, Artificial Sequence
  Description of Artificial Sequence: Synthetic oligonucleotide
  Sense strand starting at position 3238 of SEQ ID NO: 1884379
ucuuguugaauaugggaga

SEQ ID NO: 2261229 - RNA, 19 nt, Artificial Sequence
  Description of Artificial Sequence: Synthetic oligonucleotide
  Antisense strand to SEQ ID NO: 2261228
ucucccauauucaacaaga

SEQ ID NO: 2261230 - RNA, 19 nt, Artificial Sequence
  Description of Artificial Sequence: Synthetic oligonucleotide
  Sense strand starting at position 3251 of SEQ ID NO: 1884379
gggagagucauauguauag

SEQ ID NO: 2261231 - RNA, 19 nt, Artificial Sequence
  Description of Artificial Sequence: Synthetic oligonucleotide
  Antisense strand to SEQ ID NO: 2261230
cuauacauaugacucuccc

SEQ ID NO: 2261232 - RNA, 19 nt, Artificial Sequence
  Description of Artificial Sequence: Synthetic oligonucleotide
  Sense strand starting at position 3257 of SEQ ID NO: 1884379
gucauauguauagaaugua

SEQ ID NO: 2261233 - RNA, 19 nt, Artificial Sequence
  Description of Artificial Sequence: Synthetic oligonucleotide
  Antisense strand to SEQ ID NO: 2261232
uacauucuauacauaugac

SEQ ID NO: 2261234 - RNA, 19 nt, Artificial Sequence
  Description of Artificial Sequence: Synthetic oligonucleotide
  Sense strand starting at position 3297 of SEQ ID NO: 1884379
guaaucauguaaguggaau

SEQ ID NO: 2261235 - RNA, 19 nt, Artificial Sequence
  Description of Artificial Sequence: Synthetic oligonucleotide
  Antisense strand to SEQ ID NO: 2261234
auuccacuuacaugauuac

SEQ ID NO: 2261236 - RNA, 19 nt, Artificial Sequence
  Description of Artificial Sequence: Synthetic oligonucleotide
  Sense strand starting at position 3303 of SEQ ID NO: 1884379
auguaaguggaauguauau

SEQ ID NO: 2261237 - RNA, 19 nt, Artificial Sequence
  Description of Artificial Sequence: Synthetic oligonucleotide
  Antisense strand to SEQ ID NO: 2261236
auauacauuccacuuacau

SEQ ID NO: 2261238 - RNA, 19 nt, Artificial Sequence
  Description of Artificial Sequence: Synthetic oligonucleotide
  Sense strand starting at position 3305 of SEQ ID NO: 1884379
guaaguggaauguauaugu

SEQ ID NO: 2261239 - RNA, 19 nt, Artificial Sequence
  Description of Artificial Sequence: Synthetic oligonucleotide
  Antisense strand to SEQ ID NO: 2261238
acauauacauuccacuuac

SEQ ID NO: 2261240 - RNA, 19 nt, Artificial Sequence
  Description of Artificial Sequence: Synthetic oligonucleotide
  Sense strand starting at position 3309 of SEQ ID NO: 1884379
guggaauguauauguagau

SEQ ID NO: 2261241 - RNA, 19 nt, Artificial Sequence
  Description of Artificial Sequence: Synthetic oligonucleotide
  Antisense strand to SEQ ID NO: 2261240
aucuacauauacauuccac

SEQ ID NO: 2261242 - RNA, 19 nt, Artificial Sequence
  Description of Artificial Sequence: Synthetic oligonucleotide
  Sense strand starting at position 3310 of SEQ ID NO: 1884379
uggaauguauauguagauu

SEQ ID NO: 2261243 - RNA, 19 nt, Artificial Sequence
  Description of Artificial Sequence: Synthetic oligonucleotide
  Antisense strand to SEQ ID NO: 2261242
aaucuacauauacauucca

SEQ ID NO: 2261244 - RNA, 19 nt, Artificial Sequence
  Description of Artificial Sequence: Synthetic oligonucleotide
  Sense strand starting at position 3347 of SEQ ID NO: 1884379
uaggucugugcauaagauu

SEQ ID NO: 2261245 - RNA, 19 nt, Artificial Sequence
  Description of Artificial Sequence: Synthetic oligonucleotide
  Antisense strand to SEQ ID NO: 2261244
aaucuuaugcacagaccua

SEQ ID NO: 2261246 - RNA, 19 nt, Artificial Sequence
  Description of Artificial Sequence: Synthetic oligonucleotide
  Sense strand starting at position 3373 of SEQ ID NO: 1884379
gcuuuaguugccucaggcu

SEQ ID NO: 2261247 - RNA, 19 nt, Artificial Sequence
  Description of Artificial Sequence: Synthetic oligonucleotide
  Antisense strand to SEQ ID NO: 2261246
agccugaggcaacuaaagc

SEQ ID NO: 2261248 - RNA, 19 nt, Artificial Sequence
  Description of Artificial Sequence: Synthetic oligonucleotide
  Sense strand starting at position 3390 of SEQ ID NO: 1884379
cuagaaauguauccucaga

SEQ ID NO: 2261249 - RNA, 19 nt, Artificial Sequence
  Description of Artificial Sequence: Synthetic oligonucleotide
  Antisense strand to SEQ ID NO: 2261248
ucugaggauacauuucuag

SEQ ID NO: 2261250 - RNA, 19 nt, Artificial Sequence
  Description of Artificial Sequence: Synthetic oligonucleotide
  Sense strand starting at position 3392 of SEQ ID NO: 1884379
agaaauguauccucagagu

SEQ ID NO: 2261251 - RNA, 19 nt, Artificial Sequence
  Description of Artificial Sequence: Synthetic oligonucleotide
  Antisense strand to SEQ ID NO: 2261250
acucugaggauacauuucu

SEQ ID NO: 2261252 - RNA, 19 nt, Artificial Sequence
  Description of Artificial Sequence: Synthetic oligonucleotide
  Sense strand starting at position 3755 of SEQ ID NO: 1884379
cuugguccagguuaagaau

SEQ ID NO: 2261253 - RNA, 19 nt, Artificial Sequence
  Description of Artificial Sequence: Synthetic oligonucleotide
  Antisense strand to SEQ ID NO: 2261252
auucuuaaccuggaccaag

SEQ ID NO: 2261254 - RNA, 19 nt, Artificial Sequence
  Description of Artificial Sequence: Synthetic oligonucleotide
  Sense strand starting at position 3761 of SEQ ID NO: 1884379
ccagguuaagaauguauau

SEQ ID NO: 2261255 - RNA, 19 nt, Artificial Sequence
  Description of Artificial Sequence: Synthetic oligonucleotide
  Antisense strand to SEQ ID NO: 2261254
auauacauucuuaaccugg

SEQ ID NO: 2261256 - RNA, 19 nt, Artificial Sequence
  Description of Artificial Sequence: Synthetic oligonucleotide
  Sense strand starting at position 83 of SEQ ID NO: 1884380
ugugcuuucuguucacgga

SEQ ID NO: 2261257 - RNA, 19 nt, Artificial Sequence
  Description of Artificial Sequence: Synthetic oligonucleotide
  Antisense strand to SEQ ID NO: 2261256
uccgugaacagaaagcaca

SEQ ID NO: 2261258 - RNA, 19 nt, Artificial Sequence
  Description of Artificial Sequence: Synthetic oligonucleotide
  Sense strand starting at position 84 of SEQ ID NO: 1884380
gugcuuucuguucacggaa

SEQ ID NO: 2261259 - RNA, 19 nt, Artificial Sequence
  Description of Artificial Sequence: Synthetic oligonucleotide
  Antisense strand to SEQ ID NO: 2261258
uuccgugaacagaaagcac

SEQ ID NO: 2261260 - RNA, 19 nt, Artificial Sequence
  Description of Artificial Sequence: Synthetic oligonucleotide
  Sense strand starting at position 86 of SEQ ID NO: 1884380
gcuuucuguucacggaaag

SEQ ID NO: 2261261 - RNA, 19 nt, Artificial Sequence
  Description of Artificial Sequence: Synthetic oligonucleotide
  Antisense strand to SEQ ID NO: 2261260
cuuuccgugaacagaaagc

SEQ ID NO: 2261262 - RNA, 19 nt, Artificial Sequence
  Description of Artificial Sequence: Synthetic oligonucleotide
  Sense strand starting at position 103 of SEQ ID NO: 1884380
aggaguauuuaagguaagu

SEQ ID NO: 2261263 - RNA, 19 nt, Artificial Sequence
  Description of Artificial Sequence: Synthetic oligonucleotide
  Antisense strand to SEQ ID NO: 2261262
acuuaccuuaaauacuccu

SEQ ID NO: 2261264 - RNA, 19 nt, Artificial Sequence
  Description of Artificial Sequence: Synthetic oligonucleotide
  Sense strand starting at position 154 of SEQ ID NO: 1884380
ucaugaguuugggaccuuu

SEQ ID NO: 2261265 - RNA, 19 nt, Artificial Sequence
  Description of Artificial Sequence: Synthetic oligonucleotide
  Antisense strand to SEQ ID NO: 2261264
aaaggucccaaacucauga

SEQ ID NO: 2261266 - RNA, 19 nt, Artificial Sequence
  Description of Artificial Sequence: Synthetic oligonucleotide
  Sense strand starting at position 245 of SEQ ID NO: 1884380
acgagauguugguuucagu

SEQ ID NO: 2261267 - RNA, 19 nt, Artificial Sequence
  Description of Artificial Sequence: Synthetic oligonucleotide
  Antisense strand to SEQ ID NO: 2261266
acugaaaccaacaucucgu

SEQ ID NO: 2261268 - RNA, 19 nt, Artificial Sequence
  Description of Artificial Sequence: Synthetic oligonucleotide
  Sense strand starting at position 255 of SEQ ID NO: 1884380
gguuucaguuccuugugga

SEQ ID NO: 2261269 - RNA, 19 nt, Artificial Sequence
  Description of Artificial Sequence: Synthetic oligonucleotide
  Antisense strand to SEQ ID NO: 2261268
uccacaaggaacugaaacc

SEQ ID NO: 2261270 - RNA, 19 nt, Artificial Sequence
  Description of Artificial Sequence: Synthetic oligonucleotide
  Sense strand starting at position 586 of SEQ ID NO: 1884380
cggaucuuaucauucccaa

SEQ ID NO: 2261271 - RNA, 19 nt, Artificial Sequence
  Description of Artificial Sequence: Synthetic oligonucleotide
  Antisense strand to SEQ ID NO: 2261270
uugggaaugauaagauccg

SEQ ID NO: 2261272 - RNA, 19 nt, Artificial Sequence
  Description of Artificial Sequence: Synthetic oligonucleotide
  Sense strand starting at position 624 of SEQ ID NO: 1884380
acaagaugugcacaacucu

SEQ ID NO: 2261273 - RNA, 19 nt, Artificial Sequence
  Description of Artificial Sequence: Synthetic oligonucleotide
  Antisense strand to SEQ ID NO: 2261272
agaguugugcacaucuugu

SEQ ID NO: 2261274 - RNA, 19 nt, Artificial Sequence
  Description of Artificial Sequence: Synthetic oligonucleotide
  Sense strand starting at position 630 of SEQ ID NO: 1884380
ugugcacaacucugaaaca

SEQ ID NO: 2261275 - RNA, 19 nt, Artificial Sequence
  Description of Artificial Sequence: Synthetic oligonucleotide
  Antisense strand to SEQ ID NO: 2261274
uguuucagaguugugcaca

SEQ ID NO: 2261276 - RNA, 19 nt, Artificial Sequence
  Description of Artificial Sequence: Synthetic oligonucleotide
  Sense strand starting at position 631 of SEQ ID NO: 1884380
gugcacaacucugaaacaa

SEQ ID NO: 2261277 - RNA, 19 nt, Artificial Sequence
  Description of Artificial Sequence: Synthetic oligonucleotide
  Antisense strand to SEQ ID NO: 2261276
uuguuucagaguugugcac

SEQ ID NO: 2261278 - RNA, 19 nt, Artificial Sequence
  Description of Artificial Sequence: Synthetic oligonucleotide
  Sense strand starting at position 821 of SEQ ID NO: 1884380
uucuaaauauucucgugga

SEQ ID NO: 2261279 - RNA, 19 nt, Artificial Sequence
  Description of Artificial Sequence: Synthetic oligonucleotide
  Antisense strand to SEQ ID NO: 2261278
uccacgagaauauuuagaa

SEQ ID NO: 2261280 - RNA, 19 nt, Artificial Sequence
  Description of Artificial Sequence: Synthetic oligonucleotide
  Sense strand starting at position 822 of SEQ ID NO: 1884380
ucuaaauauucucguggau

SEQ ID NO: 2261281 - RNA, 19 nt, Artificial Sequence
  Description of Artificial Sequence: Synthetic oligonucleotide
  Antisense strand to SEQ ID NO: 2261280
auccacgagaauauuuaga

SEQ ID NO: 2261282 - RNA, 19 nt, Artificial Sequence
  Description of Artificial Sequence: Synthetic oligonucleotide
  Sense strand starting at position 824 of SEQ ID NO: 1884380
uaaauauucucguggauaa

SEQ ID NO: 2261283 - RNA, 19 nt, Artificial Sequence
  Description of Artificial Sequence: Synthetic oligonucleotide
  Antisense strand to SEQ ID NO: 2261282
uuauccacgagaauauuua

SEQ ID NO: 2261284 - RNA, 19 nt, Artificial Sequence
  Description of Artificial Sequence: Synthetic oligonucleotide
  Sense strand starting at position 825 of SEQ ID NO: 1884380
aaauauucucguggauaau

SEQ ID NO: 2261285 - RNA, 19 nt, Artificial Sequence
  Description of Artificial Sequence: Synthetic oligonucleotide
  Antisense strand to SEQ ID NO: 2261284
auuauccacgagaauauuu

SEQ ID NO: 2261286 - RNA, 19 nt, Artificial Sequence
  Description of Artificial Sequence: Synthetic oligonucleotide
  Sense strand starting at position 826 of SEQ ID NO: 1884380
aauauucucguggauaaug

SEQ ID NO: 2261287 - RNA, 19 nt, Artificial Sequence
  Description of Artificial Sequence: Synthetic oligonucleotide
  Antisense strand to SEQ ID NO: 2261286
cauuauccacgagaauauu

SEQ ID NO: 2261288 - RNA, 19 nt, Artificial Sequence
  Description of Artificial Sequence: Synthetic oligonucleotide
  Sense strand starting at position 834 of SEQ ID NO: 1884380
cguggauaauggcuuccau

SEQ ID NO: 2261289 - RNA, 19 nt, Artificial Sequence
  Description of Artificial Sequence: Synthetic oligonucleotide
  Antisense strand to SEQ ID NO: 2261288
auggaagccauuauccacg

SEQ ID NO: 2261290 - RNA, 19 nt, Artificial Sequence
  Description of Artificial Sequence: Synthetic oligonucleotide
  Sense strand starting at position 844 of SEQ ID NO: 1884380
ggcuuccauugagaacaca

SEQ ID NO: 2261291 - RNA, 19 nt, Artificial Sequence
  Description of Artificial Sequence: Synthetic oligonucleotide
  Antisense strand to SEQ ID NO: 2261290
uguguucucaauggaagcc

SEQ ID NO: 2261292 - RNA, 19 nt, Artificial Sequence
  Description of Artificial Sequence: Synthetic oligonucleotide
  Sense strand starting at position 2190 of SEQ ID NO: 1884380
ggaugcgucggccucgaau

SEQ ID NO: 2261293 - RNA, 19 nt, Artificial Sequence
  Description of Artificial Sequence: Synthetic oligonucleotide
  Antisense strand to SEQ ID NO: 2261292
auucgaggccgacgcaucc

SEQ ID NO: 2261294 - RNA, 19 nt, Artificial Sequence
  Description of Artificial Sequence: Synthetic oligonucleotide
  Sense strand starting at position 3266 of SEQ ID NO: 1884380
gaagaugucuccuguuggu

SEQ ID NO: 2261295 - RNA, 19 nt, Artificial Sequence
  Description of Artificial Sequence: Synthetic oligonucleotide
  Antisense strand to SEQ ID NO: 2261294
accaacaggagacaucuuc

SEQ ID NO: 2261296 - RNA, 19 nt, Artificial Sequence
  Description of Artificial Sequence: Synthetic oligonucleotide
  Sense strand starting at position 3579 of SEQ ID NO: 1884380
cuugcugagcggugucaca

SEQ ID NO: 2261297 - RNA, 19 nt, Artificial Sequence
  Description of Artificial Sequence: Synthetic oligonucleotide
  Antisense strand to SEQ ID NO: 2261296
ugugacaccgcucagcaag

SEQ ID NO: 2261298 - RNA, 19 nt, Artificial Sequence
  Description of Artificial Sequence: Synthetic oligonucleotide
  Sense strand starting at position 3586 of SEQ ID NO: 1884380
agcggugucacacaaaucu

SEQ ID NO: 2261299 - RNA, 19 nt, Artificial Sequence
  Description of Artificial Sequence: Synthetic oligonucleotide
  Antisense strand to SEQ ID NO: 2261298
agauuugugugacaccgcu

SEQ ID NO: 2261300 - RNA, 19 nt, Artificial Sequence
  Description of Artificial Sequence: Synthetic oligonucleotide
  Sense strand starting at position 3729 of SEQ ID NO: 1884380
ggacguuagcgagacaauu

SEQ ID NO: 2261301 - RNA, 19 nt, Artificial Sequence
  Description of Artificial Sequence: Synthetic oligonucleotide
  Antisense strand to SEQ ID NO: 2261300
aauugucucgcuaacgucc

SEQ ID NO: 2261302 - RNA, 19 nt, Artificial Sequence
  Description of Artificial Sequence: Synthetic oligonucleotide
  Sense strand starting at position 3731 of SEQ ID NO: 1884380
acguuagcgagacaauuaa

SEQ ID NO: 2261303 - RNA, 19 nt, Artificial Sequence
  Description of Artificial Sequence: Synthetic oligonucleotide
  Antisense strand to SEQ ID NO: 2261302
uuaauugucucgcuaacgu

SEQ ID NO: 2261304 - RNA, 19 nt, Artificial Sequence
  Description of Artificial Sequence: Synthetic oligonucleotide
  Sense strand starting at position 3776 of SEQ ID NO: 1884380
aggcuugaacuccaaggua

SEQ ID NO: 2261305 - RNA, 19 nt, Artificial Sequence
  Description of Artificial Sequence: Synthetic oligonucleotide
  Antisense strand to SEQ ID NO: 2261304
uaccuuggaguucaagccu

SEQ ID NO: 2261306 - RNA, 19 nt, Artificial Sequence
  Description of Artificial Sequence: Synthetic oligonucleotide
  Sense strand starting at position 3803 of SEQ ID NO: 1884380
acguaaaugcaagguauua

SEQ ID NO: 2261307 - RNA, 19 nt, Artificial Sequence
  Description of Artificial Sequence: Synthetic oligonucleotide
  Antisense strand to SEQ ID NO: 2261306
uaauaccuugcauuuacgu

SEQ ID NO: 2261308 - RNA, 19 nt, Artificial Sequence
  Description of Artificial Sequence: Synthetic oligonucleotide
  Sense strand starting at position 3864 of SEQ ID NO: 1884380
ggaguuuguacagacauuc

SEQ ID NO: 2261309 - RNA, 19 nt, Artificial Sequence
  Description of Artificial Sequence: Synthetic oligonucleotide
  Antisense strand to SEQ ID NO: 2261308
gaaugucuguacaaacucc

SEQ ID NO: 2261310 - RNA, 19 nt, Artificial Sequence
  Description of Artificial Sequence: Synthetic oligonucleotide
  Sense strand starting at position 3896 of SEQ ID NO: 1884380
acaacauccuuaggagaca

SEQ ID NO: 2261311 - RNA, 19 nt, Artificial Sequence
  Description of Artificial Sequence: Synthetic oligonucleotide
  Antisense strand to SEQ ID NO: 2261310
ugucuccuaaggauguugu

SEQ ID NO: 2261312 - RNA, 19 nt, Artificial Sequence
  Description of Artificial Sequence: Synthetic oligonucleotide
  Sense strand starting at position 3922 of SEQ ID NO: 1884380
gugccuguuagcgcuauau

SEQ ID NO: 2261313 - RNA, 19 nt, Artificial Sequence
  Description of Artificial Sequence: Synthetic oligonucleotide
  Antisense strand to SEQ ID NO: 2261312
auauagcgcuaacaggcac

SEQ ID NO: 2261314 - RNA, 19 nt, Artificial Sequence
  Description of Artificial Sequence: Synthetic oligonucleotide
  Sense strand starting at position 3924 of SEQ ID NO: 1884380
gccuguuagcgcuauauuc

SEQ ID NO: 2261315 - RNA, 19 nt, Artificial Sequence
  Description of Artificial Sequence: Synthetic oligonucleotide
  Antisense strand to SEQ ID NO: 2261314
gaauauagcgcuaacaggc

SEQ ID NO: 2261316 - RNA, 19 nt, Artificial Sequence
  Description of Artificial Sequence: Synthetic oligonucleotide
  Sense strand starting at position 3974 of SEQ ID NO: 1884380
gguuaaagagcuugcauaa

SEQ ID NO: 2261317 - RNA, 19 nt, Artificial Sequence
  Description of Artificial Sequence: Synthetic oligonucleotide
  Antisense strand to SEQ ID NO: 2261316
uuaugcaagcucuuuaacc

SEQ ID NO: 2261318 - RNA, 19 nt, Artificial Sequence
  Description of Artificial Sequence: Synthetic oligonucleotide
  Sense strand starting at position 53 of SEQ ID NO: 1884381
guugcauuacacugaagga

SEQ ID NO: 2261319 - RNA, 19 nt, Artificial Sequence
  Description of Artificial Sequence: Synthetic oligonucleotide
  Antisense strand to SEQ ID NO: 2261318
uccuucaguguaaugcaac

SEQ ID NO: 2261320 - RNA, 19 nt, Artificial Sequence
  Description of Artificial Sequence: Synthetic oligonucleotide
  Sense strand starting at position 339 of SEQ ID NO: 1884381
uacagugggcaguaugaau

SEQ ID NO: 2261321 - RNA, 19 nt, Artificial Sequence
  Description of Artificial Sequence: Synthetic oligonucleotide
  Antisense strand to SEQ ID NO: 2261320
auucauacugcccacugua

SEQ ID NO: 2261322 - RNA, 19 nt, Artificial Sequence
  Description of Artificial Sequence: Synthetic oligonucleotide
  Sense strand starting at position 420 of SEQ ID NO: 1884381
guuaaagauacucaguguu

SEQ ID NO: 2261323 - RNA, 19 nt, Artificial Sequence
  Description of Artificial Sequence: Synthetic oligonucleotide
  Antisense strand to SEQ ID NO: 2261322
aacacugaguaucuuuaac

SEQ ID NO: 2261324 - RNA, 19 nt, Artificial Sequence
  Description of Artificial Sequence: Synthetic oligonucleotide
  Sense strand starting at position 490 of SEQ ID NO: 1884381
ucaacuauaugguugagaa

SEQ ID NO: 2261325 - RNA, 19 nt, Artificial Sequence
  Description of Artificial Sequence: Synthetic oligonucleotide
  Antisense strand to SEQ ID NO: 2261324
uucucaaccauauaguuga

SEQ ID NO: 2261326 - RNA, 19 nt, Artificial Sequence
  Description of Artificial Sequence: Synthetic oligonucleotide
  Sense strand starting at position 491 of SEQ ID NO: 1884381
caacuauaugguugagaau

SEQ ID NO: 2261327 - RNA, 19 nt, Artificial Sequence
  Description of Artificial Sequence: Synthetic oligonucleotide
  Antisense strand to SEQ ID NO: 2261326
auucucaaccauauaguug

SEQ ID NO: 2261328 - RNA, 19 nt, Artificial Sequence
  Description of Artificial Sequence: Synthetic oligonucleotide
  Sense strand starting at position 607 of SEQ ID NO: 1884381
gcguacgcucuauuccaga

SEQ ID NO: 2261329 - RNA, 19 nt, Artificial Sequence
  Description of Artificial Sequence: Synthetic oligonucleotide
  Antisense strand to SEQ ID NO: 2261328
ucuggaauagagcguacgc

SEQ ID NO: 2261330 - RNA, 19 nt, Artificial Sequence
  Description of Artificial Sequence: Synthetic oligonucleotide
  Sense strand starting at position 612 of SEQ ID NO: 1884381
cgcucuauuccagaagacu

SEQ ID NO: 2261331 - RNA, 19 nt, Artificial Sequence
  Description of Artificial Sequence: Synthetic oligonucleotide
  Antisense strand to SEQ ID NO: 2261330
agucuucuggaauagagcg

SEQ ID NO: 2261332 - RNA, 19 nt, Artificial Sequence
  Description of Artificial Sequence: Synthetic oligonucleotide
  Sense strand starting at position 831 of SEQ ID NO: 1884381
guuuaaggaacuuguugau

SEQ ID NO: 2261333 - RNA, 19 nt, Artificial Sequence
  Description of Artificial Sequence: Synthetic oligonucleotide
  Antisense strand to SEQ ID NO: 2261332
aucaacaaguuccuuaaac

SEQ ID NO: 2261334 - RNA, 19 nt, Artificial Sequence
  Description of Artificial Sequence: Synthetic oligonucleotide
  Sense strand starting at position 1057 of SEQ ID NO: 1884381
guacuauuccaggaauccu

SEQ ID NO: 2261335 - RNA, 19 nt, Artificial Sequence
  Description of Artificial Sequence: Synthetic oligonucleotide
  Antisense strand to SEQ ID NO: 2261334
aggauuccuggaauaguac

SEQ ID NO: 2261336 - RNA, 19 nt, Artificial Sequence
  Description of Artificial Sequence: Synthetic oligonucleotide
  Sense strand starting at position 1236 of SEQ ID NO: 1884381
cugagaaucaccuggugag

SEQ ID NO: 2261337 - RNA, 19 nt, Artificial Sequence
  Description of Artificial Sequence: Synthetic oligonucleotide
  Antisense strand to SEQ ID NO: 2261336
cucaccaggugauucucag

SEQ ID NO: 2261338 - RNA, 19 nt, Artificial Sequence
  Description of Artificial Sequence: Synthetic oligonucleotide
  Sense strand starting at position 1237 of SEQ ID NO: 1884381
ugagaaucaccuggugagu

SEQ ID NO: 2261339 - RNA, 19 nt, Artificial Sequence
  Description of Artificial Sequence: Synthetic oligonucleotide
  Antisense strand to SEQ ID NO: 2261338
acucaccaggugauucuca

SEQ ID NO: 2261340 - RNA, 19 nt, Artificial Sequence
  Description of Artificial Sequence: Synthetic oligonucleotide
  Sense strand starting at position 1240 of SEQ ID NO: 1884381
gaaucaccuggugagugau

SEQ ID NO: 2261341 - RNA, 19 nt, Artificial Sequence
  Description of Artificial Sequence: Synthetic oligonucleotide
  Antisense strand to SEQ ID NO: 2261340
aucacucaccaggugauuc

SEQ ID NO: 2261342 - RNA, 19 nt, Artificial Sequence
  Description of Artificial Sequence: Synthetic oligonucleotide
  Sense strand starting at position 1301 of SEQ ID NO: 1884381
ucaugagucuggguuagga

SEQ ID NO: 2261343 - RNA, 19 nt, Artificial Sequence
  Description of Artificial Sequence: Synthetic oligonucleotide
  Antisense strand to SEQ ID NO: 2261342
uccuaacccagacucauga

SEQ ID NO: 2261344 - RNA, 19 nt, Artificial Sequence
  Description of Artificial Sequence: Synthetic oligonucleotide
  Sense strand starting at position 1316 of SEQ ID NO: 1884381
aggacucaucucuguauac

SEQ ID NO: 2261345 - RNA, 19 nt, Artificial Sequence
  Description of Artificial Sequence: Synthetic oligonucleotide
  Antisense strand to SEQ ID NO: 2261344
guauacagagaugaguccu

SEQ ID NO: 2261346 - RNA, 19 nt, Artificial Sequence
  Description of Artificial Sequence: Synthetic oligonucleotide
  Sense strand starting at position 1350 of SEQ ID NO: 1884381
aagugauucugauuauuag

SEQ ID NO: 2261347 - RNA, 19 nt, Artificial Sequence
  Description of Artificial Sequence: Synthetic oligonucleotide
  Antisense strand to SEQ ID NO: 2261346
cuaauaaucagaaucacuu

SEQ ID NO: 2261348 - RNA, 19 nt, Artificial Sequence
  Description of Artificial Sequence: Synthetic oligonucleotide
  Sense strand starting at position 1356 of SEQ ID NO: 1884381
uucugauuauuagcagacu

SEQ ID NO: 2261349 - RNA, 19 nt, Artificial Sequence
  Description of Artificial Sequence: Synthetic oligonucleotide
  Antisense strand to SEQ ID NO: 2261348
agucugcuaauaaucagaa

SEQ ID NO: 2261350 - RNA, 19 nt, Artificial Sequence
  Description of Artificial Sequence: Synthetic oligonucleotide
  Sense strand starting at position 1560 of SEQ ID NO: 1884381
aggaaauggacuugugggu

SEQ ID NO: 2261351 - RNA, 19 nt, Artificial Sequence
  Description of Artificial Sequence: Synthetic oligonucleotide
  Antisense strand to SEQ ID NO: 2261350
acccacaaguccauuuccu

SEQ ID NO: 2261352 - RNA, 19 nt, Artificial Sequence
  Description of Artificial Sequence: Synthetic oligonucleotide
  Sense strand starting at position 1564 of SEQ ID NO: 1884381
aauggacuuguggguaaga

SEQ ID NO: 2261353 - RNA, 19 nt, Artificial Sequence
  Description of Artificial Sequence: Synthetic oligonucleotide
  Antisense strand to SEQ ID NO: 2261352
ucuuacccacaaguccauu

SEQ ID NO: 2261354 - RNA, 19 nt, Artificial Sequence
  Description of Artificial Sequence: Synthetic oligonucleotide
  Sense strand starting at position 1565 of SEQ ID NO: 1884381
auggacuuguggguaagau

SEQ ID NO: 2261355 - RNA, 19 nt, Artificial Sequence
  Description of Artificial Sequence: Synthetic oligonucleotide
  Antisense strand to SEQ ID NO: 2261354
aucuuacccacaaguccau

SEQ ID NO: 2261356 - RNA, 19 nt, Artificial Sequence
  Description of Artificial Sequence: Synthetic oligonucleotide
  Sense strand starting at position 1566 of SEQ ID NO: 1884381
uggacuuguggguaagauc

SEQ ID NO: 2261357 - RNA, 19 nt, Artificial Sequence
  Description of Artificial Sequence: Synthetic oligonucleotide
  Antisense strand to SEQ ID NO: 2261356
gaucuuacccacaagucca

SEQ ID NO: 2261358 - RNA, 19 nt, Artificial Sequence
  Description of Artificial Sequence: Synthetic oligonucleotide
  Sense strand starting at position 1573 of SEQ ID NO: 1884381
guggguaagaucuaguauu

SEQ ID NO: 2261359 - RNA, 19 nt, Artificial Sequence
  Description of Artificial Sequence: Synthetic oligonucleotide
  Antisense strand to SEQ ID NO: 2261358
aauacuagaucuuacccac

SEQ ID NO: 2261360 - RNA, 19 nt, Artificial Sequence
  Description of Artificial Sequence: Synthetic oligonucleotide
  Sense strand starting at position 1632 of SEQ ID NO: 1884381
acacaagaaugcucaauug

SEQ ID NO: 2261361 - RNA, 19 nt, Artificial Sequence
  Description of Artificial Sequence: Synthetic oligonucleotide
  Antisense strand to SEQ ID NO: 2261360
caauugagcauucuugugu

SEQ ID NO: 2261362 - RNA, 19 nt, Artificial Sequence
  Description of Artificial Sequence: Synthetic oligonucleotide
  Sense strand starting at position 1660 of SEQ ID NO: 1884381
caugaauggugucugaauu

SEQ ID NO: 2261363 - RNA, 19 nt, Artificial Sequence
  Description of Artificial Sequence: Synthetic oligonucleotide
  Antisense strand to SEQ ID NO: 2261362
aauucagacaccauucaug

SEQ ID NO: 2261364 - RNA, 19 nt, Artificial Sequence
  Description of Artificial Sequence: Synthetic oligonucleotide
  Sense strand starting at position 1661 of SEQ ID NO: 1884381
augaauggugucugaauua

SEQ ID NO: 2261365 - RNA, 19 nt, Artificial Sequence
  Description of Artificial Sequence: Synthetic oligonucleotide
  Antisense strand to SEQ ID NO: 2261364
uaauucagacaccauucau

SEQ ID NO: 2261366 - RNA, 19 nt, Artificial Sequence
  Description of Artificial Sequence: Synthetic oligonucleotide
  Sense strand starting at position 1666 of SEQ ID NO: 1884381
uggugucugaauuaucuag

SEQ ID NO: 2261367 - RNA, 19 nt, Artificial Sequence
  Description of Artificial Sequence: Synthetic oligonucleotide
  Antisense strand to SEQ ID NO: 2261366
cuagauaauucagacacca

SEQ ID NO: 2261368 - RNA, 19 nt, Artificial Sequence
  Description of Artificial Sequence: Synthetic oligonucleotide
  Sense strand starting at position 1710 of SEQ ID NO: 1884381
ucugguagucaacagacua

SEQ ID NO: 2261369 - RNA, 19 nt, Artificial Sequence
  Description of Artificial Sequence: Synthetic oligonucleotide
  Antisense strand to SEQ ID NO: 2261368
uagucuguugacuaccaga

SEQ ID NO: 2261370 - RNA, 19 nt, Artificial Sequence
  Description of Artificial Sequence: Synthetic oligonucleotide
  Sense strand starting at position 1742 of SEQ ID NO: 1884381
cuagguaauuaucuggaua

SEQ ID NO: 2261371 - RNA, 19 nt, Artificial Sequence
  Description of Artificial Sequence: Synthetic oligonucleotide
  Antisense strand to SEQ ID NO: 2261370
uauccagauaauuaccuag

SEQ ID NO: 2261372 - RNA, 19 nt, Artificial Sequence
  Description of Artificial Sequence: Synthetic oligonucleotide
  Sense strand starting at position 1813 of SEQ ID NO: 1884381
gugaacucacuaggacaau

SEQ ID NO: 2261373 - RNA, 19 nt, Artificial Sequence
  Description of Artificial Sequence: Synthetic oligonucleotide
  Antisense strand to SEQ ID NO: 2261372
auuguccuagugaguucac

SEQ ID NO: 2261374 - RNA, 19 nt, Artificial Sequence
  Description of Artificial Sequence: Synthetic oligonucleotide
  Sense strand starting at position 2215 of SEQ ID NO: 1884381
uuaaaugcaguccagagua

SEQ ID NO: 2261375 - RNA, 19 nt, Artificial Sequence
  Description of Artificial Sequence: Synthetic oligonucleotide
  Antisense strand to SEQ ID NO: 2261374
uacucuggacugcauuuaa

SEQ ID NO: 2261376 - RNA, 19 nt, Artificial Sequence
  Description of Artificial Sequence: Synthetic oligonucleotide
  Sense strand starting at position 2217 of SEQ ID NO: 1884381
aaaugcaguccagaguagu

SEQ ID NO: 2261377 - RNA, 19 nt, Artificial Sequence
  Description of Artificial Sequence: Synthetic oligonucleotide
  Antisense strand to SEQ ID NO: 2261376
acuacucuggacugcauuu

SEQ ID NO: 2261378 - RNA, 19 nt, Artificial Sequence
  Description of Artificial Sequence: Synthetic oligonucleotide
  Sense strand starting at position 2483 of SEQ ID NO: 1884381
aagauauaggcucaauguu

SEQ ID NO: 2261379 - RNA, 19 nt, Artificial Sequence
  Description of Artificial Sequence: Synthetic oligonucleotide
  Antisense strand to SEQ ID NO: 2261378
aacauugagccuauaucuu

SEQ ID NO: 2261380 - RNA, 19 nt, Artificial Sequence
  Description of Artificial Sequence: Synthetic oligonucleotide
  Sense strand starting at position 2548 of SEQ ID NO: 1884381
guuugacaauccuuugaga

SEQ ID NO: 2261381 - RNA, 19 nt, Artificial Sequence
  Description of Artificial Sequence: Synthetic oligonucleotide
  Antisense strand to SEQ ID NO: 2261380
ucucaaaggauugucaaac

SEQ ID NO: 2261382 - RNA, 19 nt, Artificial Sequence
  Description of Artificial Sequence: Synthetic oligonucleotide
  Sense strand starting at position 2550 of SEQ ID NO: 1884381
uugacaauccuuugagagc

SEQ ID NO: 2261383 - RNA, 19 nt, Artificial Sequence
  Description of Artificial Sequence: Synthetic oligonucleotide
  Antisense strand to SEQ ID NO: 2261382
gcucucaaaggauugucaa

SEQ ID NO: 2261384 - RNA, 19 nt, Artificial Sequence
  Description of Artificial Sequence: Synthetic oligonucleotide
  Sense strand starting at position 2722 of SEQ ID NO: 1884381
gagucugaagguugguaga

SEQ ID NO: 2261385 - RNA, 19 nt, Artificial Sequence
  Description of Artificial Sequence: Synthetic oligonucleotide
  Antisense strand to SEQ ID NO: 2261384
ucuaccaaccuucagacuc

SEQ ID NO: 2261386 - RNA, 19 nt, Artificial Sequence
  Description of Artificial Sequence: Synthetic oligonucleotide
  Sense strand starting at position 2774 of SEQ ID NO: 1884381
gguaaagucuaaucagauu

SEQ ID NO: 2261387 - RNA, 19 nt, Artificial Sequence
  Description of Artificial Sequence: Synthetic oligonucleotide
  Antisense strand to SEQ ID NO: 2261386
aaucugauuagacuuuacc

SEQ ID NO: 2261388 - RNA, 19 nt, Artificial Sequence
  Description of Artificial Sequence: Synthetic oligonucleotide
  Sense strand starting at position 2812 of SEQ ID NO: 1884381
uccuaaugauugucccaag

SEQ ID NO: 2261389 - RNA, 19 nt, Artificial Sequence
  Description of Artificial Sequence: Synthetic oligonucleotide
  Antisense strand to SEQ ID NO: 2261388
cuugggacaaucauuagga

SEQ ID NO: 2261390 - RNA, 19 nt, Artificial Sequence
  Description of Artificial Sequence: Synthetic oligonucleotide
  Sense strand starting at position 3231 of SEQ ID NO: 1884381
agcauuggaacuugugaaa

SEQ ID NO: 2261391 - RNA, 19 nt, Artificial Sequence
  Description of Artificial Sequence: Synthetic oligonucleotide
  Antisense strand to SEQ ID NO: 2261390
uuucacaaguuccaaugcu

SEQ ID NO: 2261392 - RNA, 19 nt, Artificial Sequence
  Description of Artificial Sequence: Synthetic oligonucleotide
  Sense strand starting at position 3326 of SEQ ID NO: 1884381
guuccaugaucccuugaaa

SEQ ID NO: 2261393 - RNA, 19 nt, Artificial Sequence
  Description of Artificial Sequence: Synthetic oligonucleotide
  Antisense strand to SEQ ID NO: 2261392
uuucaagggaucauggaac

SEQ ID NO: 2261394 - RNA, 19 nt, Artificial Sequence
  Description of Artificial Sequence: Synthetic oligonucleotide
  Sense strand starting at position 3345 of SEQ ID NO: 1884381
agacuucuccaucaguucu

SEQ ID NO: 2261395 - RNA, 19 nt, Artificial Sequence
  Description of Artificial Sequence: Synthetic oligonucleotide
  Antisense strand to SEQ ID NO: 2261394
agaacugauggagaagucu

SEQ ID NO: 2261396 - RNA, 19 nt, Artificial Sequence
  Description of Artificial Sequence: Synthetic oligonucleotide
  Sense strand starting at position 3484 of SEQ ID NO: 1884381
gaugauguugcccaucuca

SEQ ID NO: 2261397 - RNA, 19 nt, Artificial Sequence
  Description of Artificial Sequence: Synthetic oligonucleotide
  Antisense strand to SEQ ID NO: 2261396
ugagaugggcaacaucauc

SEQ ID NO: 2261398 - RNA, 19 nt, Artificial Sequence
  Description of Artificial Sequence: Synthetic oligonucleotide
  Sense strand starting at position 98 of SEQ ID NO: 1884382
uguguuaaaucccuggaca

SEQ ID NO: 2261399 - RNA, 19 nt, Artificial Sequence
  Description of Artificial Sequence: Synthetic oligonucleotide
  Antisense strand to SEQ ID NO: 2261398
uguccagggauuuaacaca

SEQ ID NO: 2261400 - RNA, 19 nt, Artificial Sequence
  Description of Artificial Sequence: Synthetic oligonucleotide
  Sense strand starting at position 99 of SEQ ID NO: 1884382
guguuaaaucccuggacaa

SEQ ID NO: 2261401 - RNA, 19 nt, Artificial Sequence
  Description of Artificial Sequence: Synthetic oligonucleotide
  Antisense strand to SEQ ID NO: 2261400
uuguccagggauuuaacac

SEQ ID NO: 2261402 - RNA, 19 nt, Artificial Sequence
  Description of Artificial Sequence: Synthetic oligonucleotide
  Sense strand starting at position 100 of SEQ ID NO: 1884382
uguuaaaucccuggacaaa

SEQ ID NO: 2261403 - RNA, 19 nt, Artificial Sequence
  Description of Artificial Sequence: Synthetic oligonucleotide
  Antisense strand to SEQ ID NO: 2261402
uuuguccagggauuuaaca

SEQ ID NO: 2261404 - RNA, 19 nt, Artificial Sequence
  Description of Artificial Sequence: Synthetic oligonucleotide
  Sense strand starting at position 129 of SEQ ID NO: 1884382
ccaguacuggcaggauaua

SEQ ID NO: 2261405 - RNA, 19 nt, Artificial Sequence
  Description of Artificial Sequence: Synthetic oligonucleotide
  Antisense strand to SEQ ID NO: 2261404
uauauccugccaguacugg

SEQ ID NO: 2261406 - RNA, 19 nt, Artificial Sequence
  Description of Artificial Sequence: Synthetic oligonucleotide
  Sense strand starting at position 130 of SEQ ID NO: 1884382
caguacuggcaggauauau

SEQ ID NO: 2261407 - RNA, 19 nt, Artificial Sequence
  Description of Artificial Sequence: Synthetic oligonucleotide
  Antisense strand to SEQ ID NO: 2261406
auauauccugccaguacug

SEQ ID NO: 2261408 - RNA, 19 nt, Artificial Sequence
  Description of Artificial Sequence: Synthetic oligonucleotide
  Sense strand starting at position 216 of SEQ ID NO: 1884382
aggcaauucucuguacaug

SEQ ID NO: 2261409 - RNA, 19 nt, Artificial Sequence
  Description of Artificial Sequence: Synthetic oligonucleotide
  Antisense strand to SEQ ID NO: 2261408
cauguacagagaauugccu

SEQ ID NO: 2261410 - RNA, 19 nt, Artificial Sequence
  Description of Artificial Sequence: Synthetic oligonucleotide
  Sense strand starting at position 217 of SEQ ID NO: 1884382
ggcaauucucuguacauga

SEQ ID NO: 2261411 - RNA, 19 nt, Artificial Sequence
  Description of Artificial Sequence: Synthetic oligonucleotide
  Antisense strand to SEQ ID NO: 2261410
ucauguacagagaauugcc

SEQ ID NO: 2261412 - RNA, 19 nt, Artificial Sequence
  Description of Artificial Sequence: Synthetic oligonucleotide
  Sense strand starting at position 262 of SEQ ID NO: 1884382
cucccucuucuuggugaua

SEQ ID NO: 2261413 - RNA, 19 nt, Artificial Sequence
  Description of Artificial Sequence: Synthetic oligonucleotide
  Antisense strand to SEQ ID NO: 2261412
uaucaccaagaagagggag

SEQ ID NO: 2261414 - RNA, 19 nt, Artificial Sequence
  Description of Artificial Sequence: Synthetic oligonucleotide
  Sense strand starting at position 263 of SEQ ID NO: 1884382
ucccucuucuuggugauaa

SEQ ID NO: 2261415 - RNA, 19 nt, Artificial Sequence
  Description of Artificial Sequence: Synthetic oligonucleotide
  Antisense strand to SEQ ID NO: 2261414
uuaucaccaagaagaggga

SEQ ID NO: 2261416 - RNA, 19 nt, Artificial Sequence
  Description of Artificial Sequence: Synthetic oligonucleotide
  Sense strand starting at position 276 of SEQ ID NO: 1884382
ugauaauggugucucauga

SEQ ID NO: 2261417 - RNA, 19 nt, Artificial Sequence
  Description of Artificial Sequence: Synthetic oligonucleotide
  Antisense strand to SEQ ID NO: 2261416
ucaugagacaccauuauca

SEQ ID NO: 2261418 - RNA, 19 nt, Artificial Sequence
  Description of Artificial Sequence: Synthetic oligonucleotide
  Sense strand starting at position 297 of SEQ ID NO: 1884382
acagaauagcugugacugu

SEQ ID NO: 2261419 - RNA, 19 nt, Artificial Sequence
  Description of Artificial Sequence: Synthetic oligonucleotide
  Antisense strand to SEQ ID NO: 2261418
acagucacagcuauucugu

SEQ ID NO: 2261420 - RNA, 19 nt, Artificial Sequence
  Description of Artificial Sequence: Synthetic oligonucleotide
  Sense strand starting at position 2022 of SEQ ID NO: 1884382
ccuguacgugugccugauu

SEQ ID NO: 2261421 - RNA, 19 nt, Artificial Sequence
  Description of Artificial Sequence: Synthetic oligonucleotide
  Antisense strand to SEQ ID NO: 2261420
aaucaggcacacguacagg

SEQ ID NO: 2261422 - RNA, 19 nt, Artificial Sequence
  Description of Artificial Sequence: Synthetic oligonucleotide
  Sense strand starting at position 2197 of SEQ ID NO: 1884382
uguugcuaccuuugauaga

SEQ ID NO: 2261423 - RNA, 19 nt, Artificial Sequence
  Description of Artificial Sequence: Synthetic oligonucleotide
  Antisense strand to SEQ ID NO: 2261422
ucuaucaaagguagcaaca

SEQ ID NO: 2261424 - RNA, 19 nt, Artificial Sequence
  Description of Artificial Sequence: Synthetic oligonucleotide
  Sense strand starting at position 2226 of SEQ ID NO: 1884382
ucuaguauuuguccuauuc

SEQ ID NO: 2261425 - RNA, 19 nt, Artificial Sequence
  Description of Artificial Sequence: Synthetic oligonucleotide
  Antisense strand to SEQ ID NO: 2261424
gaauaggacaaauacuaga

SEQ ID NO: 2261426 - RNA, 19 nt, Artificial Sequence
  Description of Artificial Sequence: Synthetic oligonucleotide
  Sense strand starting at position 2327 of SEQ ID NO: 1884382
gcgcuauacauagaguuau

SEQ ID NO: 2261427 - RNA, 19 nt, Artificial Sequence
  Description of Artificial Sequence: Synthetic oligonucleotide
  Antisense strand to SEQ ID NO: 2261426
auaacucuauguauagcgc

SEQ ID NO: 2261428 - RNA, 19 nt, Artificial Sequence
  Description of Artificial Sequence: Synthetic oligonucleotide
  Sense strand starting at position 2349 of SEQ ID NO: 1884382
cagucuuacuguguuauuu

SEQ ID NO: 2261429 - RNA, 19 nt, Artificial Sequence
  Description of Artificial Sequence: Synthetic oligonucleotide
  Antisense strand to SEQ ID NO: 2261428
aaauaacacaguaagacug

SEQ ID NO: 2261430 - RNA, 19 nt, Artificial Sequence
  Description of Artificial Sequence: Synthetic oligonucleotide
  Sense strand starting at position 2357 of SEQ ID NO: 1884382
cuguguuauuuggcauaug

SEQ ID NO: 2261431 - RNA, 19 nt, Artificial Sequence
  Description of Artificial Sequence: Synthetic oligonucleotide
  Antisense strand to SEQ ID NO: 2261430
cauaugccaaauaacacag

SEQ ID NO: 2261432 - RNA, 19 nt, Artificial Sequence
  Description of Artificial Sequence: Synthetic oligonucleotide
  Sense strand starting at position 2441 of SEQ ID NO: 1884382
ucuguuacaccaggcuaau

SEQ ID NO: 2261433 - RNA, 19 nt, Artificial Sequence
  Description of Artificial Sequence: Synthetic oligonucleotide
  Antisense strand to SEQ ID NO: 2261432
auuagccugguguaacaga

SEQ ID NO: 2261434 - RNA, 19 nt, Artificial Sequence
  Description of Artificial Sequence: Synthetic oligonucleotide
  Sense strand starting at position 2685 of SEQ ID NO: 1884382
uguagaucuuuggugucaa

SEQ ID NO: 2261435 - RNA, 19 nt, Artificial Sequence
  Description of Artificial Sequence: Synthetic oligonucleotide
  Antisense strand to SEQ ID NO: 2261434
uugacaccaaagaucuaca

SEQ ID NO: 2261436 - RNA, 19 nt, Artificial Sequence
  Description of Artificial Sequence: Synthetic oligonucleotide
  Sense strand starting at position 2792 of SEQ ID NO: 1884382
aguuaacauccgcauggaa

SEQ ID NO: 2261437 - RNA, 19 nt, Artificial Sequence
  Description of Artificial Sequence: Synthetic oligonucleotide
  Antisense strand to SEQ ID NO: 2261436
uuccaugcggauguuaacu

SEQ ID NO: 2261438 - RNA, 19 nt, Artificial Sequence
  Description of Artificial Sequence: Synthetic oligonucleotide
  Sense strand starting at position 2794 of SEQ ID NO: 1884382
uuaacauccgcauggaaac

SEQ ID NO: 2261439 - RNA, 19 nt, Artificial Sequence
  Description of Artificial Sequence: Synthetic oligonucleotide
  Antisense strand to SEQ ID NO: 2261438
guuuccaugcggauguuaa

SEQ ID NO: 2261440 - RNA, 19 nt, Artificial Sequence
  Description of Artificial Sequence: Synthetic oligonucleotide
  Sense strand starting at position 3023 of SEQ ID NO: 1884382
gugcauaacguugaauauu

SEQ ID NO: 2261441 - RNA, 19 nt, Artificial Sequence
  Description of Artificial Sequence: Synthetic oligonucleotide
  Antisense strand to SEQ ID NO: 2261440
aauauucaacguuaugcac

SEQ ID NO: 2261442 - RNA, 19 nt, Artificial Sequence
  Description of Artificial Sequence: Synthetic oligonucleotide
  Sense strand starting at position 3055 of SEQ ID NO: 1884382
uuguuauguccuuagaguu

SEQ ID NO: 2261443 - RNA, 19 nt, Artificial Sequence
  Description of Artificial Sequence: Synthetic oligonucleotide
  Antisense strand to SEQ ID NO: 2261442
aacucuaaggacauaacaa

SEQ ID NO: 2261444 - RNA, 19 nt, Artificial Sequence
  Description of Artificial Sequence: Synthetic oligonucleotide
  Sense strand starting at position 3093 of SEQ ID NO: 1884382
cugcuugcacacuagauua

SEQ ID NO: 2261445 - RNA, 19 nt, Artificial Sequence
  Description of Artificial Sequence: Synthetic oligonucleotide
  Antisense strand to SEQ ID NO: 2261444
uaaucuagugugcaagcag

SEQ ID NO: 2261446 - RNA, 19 nt, Artificial Sequence
  Description of Artificial Sequence: Synthetic oligonucleotide
  Sense strand starting at position 3127 of SEQ ID NO: 1884382
auggucugugccuauuauu

SEQ ID NO: 2261447 - RNA, 19 nt, Artificial Sequence
  Description of Artificial Sequence: Synthetic oligonucleotide
  Antisense strand to SEQ ID NO: 2261446
aauaauaggcacagaccau

SEQ ID NO: 2261448 - RNA, 19 nt, Artificial Sequence
  Description of Artificial Sequence: Synthetic oligonucleotide
  Sense strand starting at position 3179 of SEQ ID NO: 1884382
ugccuaaaugucuauuaag

SEQ ID NO: 2261449 - RNA, 19 nt, Artificial Sequence
  Description of Artificial Sequence: Synthetic oligonucleotide
  Antisense strand to SEQ ID NO: 2261448
cuuaauagacauuuaggca

SEQ ID NO: 2261450 - RNA, 19 nt, Artificial Sequence
  Description of Artificial Sequence: Synthetic oligonucleotide
  Sense strand starting at position 3220 of SEQ ID NO: 1884382
uguugauauccuggaggaa

SEQ ID NO: 2261451 - RNA, 19 nt, Artificial Sequence
  Description of Artificial Sequence: Synthetic oligonucleotide
  Antisense strand to SEQ ID NO: 2261450
uuccuccaggauaucaaca

SEQ ID NO: 2261452 - RNA, 19 nt, Artificial Sequence
  Description of Artificial Sequence: Synthetic oligonucleotide
  Sense strand starting at position 3240 of SEQ ID NO: 1884382
ccgaguuugauuugagugu

SEQ ID NO: 2261453 - RNA, 19 nt, Artificial Sequence
  Description of Artificial Sequence: Synthetic oligonucleotide
  Antisense strand to SEQ ID NO: 2261452
acacucaaaucaaacucgg

SEQ ID NO: 2261454 - RNA, 19 nt, Artificial Sequence
  Description of Artificial Sequence: Synthetic oligonucleotide
  Sense strand starting at position 3251 of SEQ ID NO: 1884382
uugaguguggagugugaau

SEQ ID NO: 2261455 - RNA, 19 nt, Artificial Sequence
  Description of Artificial Sequence: Synthetic oligonucleotide
  Antisense strand to SEQ ID NO: 2261454
auucacacuccacacucaa

SEQ ID NO: 2261456 - RNA, 19 nt, Artificial Sequence
  Description of Artificial Sequence: Synthetic oligonucleotide
  Sense strand starting at position 3287 of SEQ ID NO: 1884382
gcuugaagauccuuaggac

SEQ ID NO: 2261457 - RNA, 19 nt, Artificial Sequence
  Description of Artificial Sequence: Synthetic oligonucleotide
  Antisense strand to SEQ ID NO: 2261456
guccuaaggaucuucaagc

SEQ ID NO: 2261458 - RNA, 19 nt, Artificial Sequence
  Description of Artificial Sequence: Synthetic oligonucleotide
  Sense strand starting at position 3348 of SEQ ID NO: 1884382
acagcaccucuuggagaaa

SEQ ID NO: 2261459 - RNA, 19 nt, Artificial Sequence
  Description of Artificial Sequence: Synthetic oligonucleotide
  Antisense strand to SEQ ID NO: 2261458
uuucuccaagaggugcugu

SEQ ID NO: 2261460 - RNA, 19 nt, Artificial Sequence
  Description of Artificial Sequence: Synthetic oligonucleotide
  Sense strand starting at position 3432 of SEQ ID NO: 1884382
cccuguccucguuaggaaa

SEQ ID NO: 2261461 - RNA, 19 nt, Artificial Sequence
  Description of Artificial Sequence: Synthetic oligonucleotide
  Antisense strand to SEQ ID NO: 2261460
uuuccuaacgaggacaggg

SEQ ID NO: 2261462 - RNA, 19 nt, Artificial Sequence
  Description of Artificial Sequence: Synthetic oligonucleotide
  Sense strand starting at position 3459 of SEQ ID NO: 1884382
ccaggauaaugauaauaaa

SEQ ID NO: 2261463 - RNA, 19 nt, Artificial Sequence
  Description of Artificial Sequence: Synthetic oligonucleotide
  Antisense strand to SEQ ID NO: 2261462
uuuauuaucauuauccugg

SEQ ID NO: 2261464 - RNA, 19 nt, Artificial Sequence
  Description of Artificial Sequence: Synthetic oligonucleotide
  Sense strand starting at position 3524 of SEQ ID NO: 1884382
uuugucuuccaggagcagu

SEQ ID NO: 2261465 - RNA, 19 nt, Artificial Sequence
  Description of Artificial Sequence: Synthetic oligonucleotide
  Antisense strand to SEQ ID NO: 2261464
acugcuccuggaagacaaa

SEQ ID NO: 2261466 - RNA, 19 nt, Artificial Sequence
  Description of Artificial Sequence: Synthetic oligonucleotide
  Sense strand starting at position 3618 of SEQ ID NO: 1884382
acaggaaacucucagaaau

SEQ ID NO: 2261467 - RNA, 19 nt, Artificial Sequence
  Description of Artificial Sequence: Synthetic oligonucleotide
  Antisense strand to SEQ ID NO: 2261466
auuucugagaguuuccugu

SEQ ID NO: 2261468 - RNA, 19 nt, Artificial Sequence
  Description of Artificial Sequence: Synthetic oligonucleotide
  Sense strand starting at position 3693 of SEQ ID NO: 1884382
aguccuuccgagggaaaga

SEQ ID NO: 2261469 - RNA, 19 nt, Artificial Sequence
  Description of Artificial Sequence: Synthetic oligonucleotide
  Antisense strand to SEQ ID NO: 2261468
ucuuucccucggaaggacu

SEQ ID NO: 2261470 - RNA, 19 nt, Artificial Sequence
  Description of Artificial Sequence: Synthetic oligonucleotide
  Sense strand starting at position 3694 of SEQ ID NO: 1884382
guccuuccgagggaaagau

SEQ ID NO: 2261471 - RNA, 19 nt, Artificial Sequence
  Description of Artificial Sequence: Synthetic oligonucleotide
  Antisense strand to SEQ ID NO: 2261470
aucuuucccucggaaggac

SEQ ID NO: 2261472 - RNA, 19 nt, Artificial Sequence
  Description of Artificial Sequence: Synthetic oligonucleotide
  Sense strand starting at position 3792 of SEQ ID NO: 1884382
caugcauguggauagucau

SEQ ID NO: 2261473 - RNA, 19 nt, Artificial Sequence
  Description of Artificial Sequence: Synthetic oligonucleotide
  Antisense strand to SEQ ID NO: 2261472
augacuauccacaugcaug

SEQ ID NO: 2261474 - RNA, 19 nt, Artificial Sequence
  Description of Artificial Sequence: Synthetic oligonucleotide
  Sense strand starting at position 3798 of SEQ ID NO: 1884382
uguggauagucauccuuaa

SEQ ID NO: 2261475 - RNA, 19 nt, Artificial Sequence
  Description of Artificial Sequence: Synthetic oligonucleotide
  Antisense strand to SEQ ID NO: 2261474
uuaaggaugacuauccaca

SEQ ID NO: 2261476 - RNA, 19 nt, Artificial Sequence
  Description of Artificial Sequence: Synthetic oligonucleotide
  Sense strand starting at position 3830 of SEQ ID NO: 1884382
caggacaucguguggacaa

SEQ ID NO: 2261477 - RNA, 19 nt, Artificial Sequence
  Description of Artificial Sequence: Synthetic oligonucleotide
  Antisense strand to SEQ ID NO: 2261476
uuguccacacgauguccug

SEQ ID NO: 2261478 - RNA, 19 nt, Artificial Sequence
  Description of Artificial Sequence: Synthetic oligonucleotide
  Sense strand starting at position 59 of SEQ ID NO: 1884383
accucugacuugguguuaa

SEQ ID NO: 2261479 - RNA, 19 nt, Artificial Sequence
  Description of Artificial Sequence: Synthetic oligonucleotide
  Antisense strand to SEQ ID NO: 2261478
uuaacaccaagucagaggu

SEQ ID NO: 2261480 - RNA, 19 nt, Artificial Sequence
  Description of Artificial Sequence: Synthetic oligonucleotide
  Sense strand starting at position 71 of SEQ ID NO: 1884383
guguuaacagaaugguggu

SEQ ID NO: 2261481 - RNA, 19 nt, Artificial Sequence
  Description of Artificial Sequence: Synthetic oligonucleotide
  Antisense strand to SEQ ID NO: 2261480
accaccauucuguuaacac

SEQ ID NO: 2261482 - RNA, 19 nt, Artificial Sequence
  Description of Artificial Sequence: Synthetic oligonucleotide
  Sense strand starting at position 2032 of SEQ ID NO: 1884383
ggaagaucaaggugguauc

SEQ ID NO: 2261483 - RNA, 19 nt, Artificial Sequence
  Description of Artificial Sequence: Synthetic oligonucleotide
  Antisense strand to SEQ ID NO: 2261482
gauaccaccuugaucuucc

SEQ ID NO: 2261484 - RNA, 19 nt, Artificial Sequence
  Description of Artificial Sequence: Synthetic oligonucleotide
  Sense strand starting at position 2184 of SEQ ID NO: 1884383
gaaggcauuuccugagagg

SEQ ID NO: 2261485 - RNA, 19 nt, Artificial Sequence
  Description of Artificial Sequence: Synthetic oligonucleotide
  Antisense strand to SEQ ID NO: 2261484
ccucucaggaaaugccuuc

SEQ ID NO: 2261486 - RNA, 19 nt, Artificial Sequence
  Description of Artificial Sequence: Synthetic oligonucleotide
  Sense strand starting at position 2216 of SEQ ID NO: 1884383
aggaguuugccacgaugac

SEQ ID NO: 2261487 - RNA, 19 nt, Artificial Sequence
  Description of Artificial Sequence: Synthetic oligonucleotide
  Antisense strand to SEQ ID NO: 2261486
gucaucguggcaaacuccu

SEQ ID NO: 2261488 - RNA, 19 nt, Artificial Sequence
  Description of Artificial Sequence: Synthetic oligonucleotide
  Sense strand starting at position 2217 of SEQ ID NO: 1884383
ggaguuugccacgaugaca

SEQ ID NO: 2261489 - RNA, 19 nt, Artificial Sequence
  Description of Artificial Sequence: Synthetic oligonucleotide
  Antisense strand to SEQ ID NO: 2261488
ugucaucguggcaaacucc

SEQ ID NO: 2261490 - RNA, 19 nt, Artificial Sequence
  Description of Artificial Sequence: Synthetic oligonucleotide
  Sense strand starting at position 2263 of SEQ ID NO: 1884383
ggagaaguaguccacaugu

SEQ ID NO: 2261491 - RNA, 19 nt, Artificial Sequence
  Description of Artificial Sequence: Synthetic oligonucleotide
  Antisense strand to SEQ ID NO: 2261490
acauguggacuacuucucc

SEQ ID NO: 2261492 - RNA, 19 nt, Artificial Sequence
  Description of Artificial Sequence: Synthetic oligonucleotide
  Sense strand starting at position 2265 of SEQ ID NO: 1884383
agaaguaguccacauguca

SEQ ID NO: 2261493 - RNA, 19 nt, Artificial Sequence
  Description of Artificial Sequence: Synthetic oligonucleotide
  Antisense strand to SEQ ID NO: 2261492
ugacauguggacuacuucu

SEQ ID NO: 2261494 - RNA, 19 nt, Artificial Sequence
  Description of Artificial Sequence: Synthetic oligonucleotide
  Sense strand starting at position 2324 of SEQ ID NO: 1884383
acugaauggugucccauga

SEQ ID NO: 2261495 - RNA, 19 nt, Artificial Sequence
  Description of Artificial Sequence: Synthetic oligonucleotide
  Antisense strand to SEQ ID NO: 2261494
ucaugggacaccauucagu

SEQ ID NO: 2261496 - RNA, 19 nt, Artificial Sequence
  Description of Artificial Sequence: Synthetic oligonucleotide
  Sense strand starting at position 2582 of SEQ ID NO: 1884383
ggaccucagcugcagaaua

SEQ ID NO: 2261497 - RNA, 19 nt, Artificial Sequence
  Description of Artificial Sequence: Synthetic oligonucleotide
  Antisense strand to SEQ ID NO: 2261496
uauucugcagcugaggucc

SEQ ID NO: 2261498 - RNA, 19 nt, Artificial Sequence
  Description of Artificial Sequence: Synthetic oligonucleotide
  Sense strand starting at position 2708 of SEQ ID NO: 1884383
gguuguaagccauauugac

SEQ ID NO: 2261499 - RNA, 19 nt, Artificial Sequence
  Description of Artificial Sequence: Synthetic oligonucleotide
  Antisense strand to SEQ ID NO: 2261498
gucaauauggcuuacaacc

SEQ ID NO: 2261500 - RNA, 19 nt, Artificial Sequence
  Description of Artificial Sequence: Synthetic oligonucleotide
  Sense strand starting at position 2783 of SEQ ID NO: 1884383
cacguuuguaaggauguca

SEQ ID NO: 2261501 - RNA, 19 nt, Artificial Sequence
  Description of Artificial Sequence: Synthetic oligonucleotide
  Antisense strand to SEQ ID NO: 2261500
ugacauccuuacaaacgug

SEQ ID NO: 2261502 - RNA, 19 nt, Artificial Sequence
  Description of Artificial Sequence: Synthetic oligonucleotide
  Sense strand starting at position 2965 of SEQ ID NO: 1884383
ggaagaauagcacaugugu

SEQ ID NO: 2261503 - RNA, 19 nt, Artificial Sequence
  Description of Artificial Sequence: Synthetic oligonucleotide
  Antisense strand to SEQ ID NO: 2261502
acacaugugcuauucuucc

SEQ ID NO: 2261504 - RNA, 19 nt, Artificial Sequence
  Description of Artificial Sequence: Synthetic oligonucleotide
  Sense strand starting at position 2974 of SEQ ID NO: 1884383
gcacaugugugauuucuuu

SEQ ID NO: 2261505 - RNA, 19 nt, Artificial Sequence
  Description of Artificial Sequence: Synthetic oligonucleotide
  Antisense strand to SEQ ID NO: 2261504
aaagaaaucacacaugugc

SEQ ID NO: 2261506 - RNA, 19 nt, Artificial Sequence
  Description of Artificial Sequence: Synthetic oligonucleotide
  Sense strand starting at position 2978 of SEQ ID NO: 1884383
augugugauuucuuugcca

SEQ ID NO: 2261507 - RNA, 19 nt, Artificial Sequence
  Description of Artificial Sequence: Synthetic oligonucleotide
  Antisense strand to SEQ ID NO: 2261506
uggcaaagaaaucacacau

SEQ ID NO: 2261508 - RNA, 19 nt, Artificial Sequence
  Description of Artificial Sequence: Synthetic oligonucleotide
  Sense strand starting at position 2980 of SEQ ID NO: 1884383
gugugauuucuuugccagg

SEQ ID NO: 2261509 - RNA, 19 nt, Artificial Sequence
  Description of Artificial Sequence: Synthetic oligonucleotide
  Antisense strand to SEQ ID NO: 2261508
ccuggcaaagaaaucacac

SEQ ID NO: 2261510 - RNA, 19 nt, Artificial Sequence
  Description of Artificial Sequence: Synthetic oligonucleotide
  Sense strand starting at position 2982 of SEQ ID NO: 1884383
gugauuucuuugccaggca

SEQ ID NO: 2261511 - RNA, 19 nt, Artificial Sequence
  Description of Artificial Sequence: Synthetic oligonucleotide
  Antisense strand to SEQ ID NO: 2261510
ugccuggcaaagaaaucac

SEQ ID NO: 2261512 - RNA, 19 nt, Artificial Sequence
  Description of Artificial Sequence: Synthetic oligonucleotide
  Sense strand starting at position 2985 of SEQ ID NO: 1884383
auuucuuugccaggcacaa

SEQ ID NO: 2261513 - RNA, 19 nt, Artificial Sequence
  Description of Artificial Sequence: Synthetic oligonucleotide
  Antisense strand to SEQ ID NO: 2261512
uugugccuggcaaagaaau

SEQ ID NO: 2261514 - RNA, 19 nt, Artificial Sequence
  Description of Artificial Sequence: Synthetic oligonucleotide
  Sense strand starting at position 3028 of SEQ ID NO: 1884383
gaguuuaaugggcagcuuu

SEQ ID NO: 2261515 - RNA, 19 nt, Artificial Sequence
  Description of Artificial Sequence: Synthetic oligonucleotide
  Antisense strand to SEQ ID NO: 2261514
aaagcugcccauuaaacuc

SEQ ID NO: 2261516 - RNA, 19 nt, Artificial Sequence
  Description of Artificial Sequence: Synthetic oligonucleotide
  Sense strand starting at position 3057 of SEQ ID NO: 1884383
augcuuuaacuggagcuaa

SEQ ID NO: 2261517 - RNA, 19 nt, Artificial Sequence
  Description of Artificial Sequence: Synthetic oligonucleotide
  Antisense strand to SEQ ID NO: 2261516
uuagcuccaguuaaagcau

SEQ ID NO: 2261518 - RNA, 19 nt, Artificial Sequence
  Description of Artificial Sequence: Synthetic oligonucleotide
  Sense strand starting at position 3073 of SEQ ID NO: 1884383
uaaagaggucugugccaca

SEQ ID NO: 2261519 - RNA, 19 nt, Artificial Sequence
  Description of Artificial Sequence: Synthetic oligonucleotide
  Antisense strand to SEQ ID NO: 2261518
uguggcacagaccucuuua

SEQ ID NO: 2261520 - RNA, 19 nt, Artificial Sequence
  Description of Artificial Sequence: Synthetic oligonucleotide
  Sense strand starting at position 3098 of SEQ ID NO: 1884383
gcaguuucuaguuggauuu

SEQ ID NO: 2261521 - RNA, 19 nt, Artificial Sequence
  Description of Artificial Sequence: Synthetic oligonucleotide
  Antisense strand to SEQ ID NO: 2261520
aaauccaacuagaaacugc

SEQ ID NO: 2261522 - RNA, 19 nt, Artificial Sequence
  Description of Artificial Sequence: Synthetic oligonucleotide
  Sense strand starting at position 3154 of SEQ ID NO: 1884383
gccugaugcaguggagaga

SEQ ID NO: 2261523 - RNA, 19 nt, Artificial Sequence
  Description of Artificial Sequence: Synthetic oligonucleotide
  Antisense strand to SEQ ID NO: 2261522
ucucuccacugcaucaggc

SEQ ID NO: 2261524 - RNA, 19 nt, Artificial Sequence
  Description of Artificial Sequence: Synthetic oligonucleotide
  Sense strand starting at position 3240 of SEQ ID NO: 1884383
acugaagauuuacaaaugu

SEQ ID NO: 2261525 - RNA, 19 nt, Artificial Sequence
  Description of Artificial Sequence: Synthetic oligonucleotide
  Antisense strand to SEQ ID NO: 2261524
acauuuguaaaucuucagu

SEQ ID NO: 2261526 - RNA, 19 nt, Artificial Sequence
  Description of Artificial Sequence: Synthetic oligonucleotide
  Sense strand starting at position 3277 of SEQ ID NO: 1884383
accagaaauagcugagugu

SEQ ID NO: 2261527 - RNA, 19 nt, Artificial Sequence
  Description of Artificial Sequence: Synthetic oligonucleotide
  Antisense strand to SEQ ID NO: 2261526
acacucagcuauuucuggu

SEQ ID NO: 2261528 - RNA, 19 nt, Artificial Sequence
  Description of Artificial Sequence: Synthetic oligonucleotide
  Sense strand starting at position 3412 of SEQ ID NO: 1884383
cucagauagcuccaucaag

SEQ ID NO: 2261529 - RNA, 19 nt, Artificial Sequence
  Description of Artificial Sequence: Synthetic oligonucleotide
  Antisense strand to SEQ ID NO: 2261528
cuugauggagcuaucugag

SEQ ID NO: 2261530 - RNA, 19 nt, Artificial Sequence
  Description of Artificial Sequence: Synthetic oligonucleotide
  Sense strand starting at position 3654 of SEQ ID NO: 1884383
gugcgugugccugcauaua

SEQ ID NO: 2261531 - RNA, 19 nt, Artificial Sequence
  Description of Artificial Sequence: Synthetic oligonucleotide
  Antisense strand to SEQ ID NO: 2261530
uauaugcaggcacacgcac

SEQ ID NO: 2261532 - RNA, 19 nt, Artificial Sequence
  Description of Artificial Sequence: Synthetic oligonucleotide
  Sense strand starting at position 3687 of SEQ ID NO: 1884383
uauauaaucgcaggagaaa

SEQ ID NO: 2261533 - RNA, 19 nt, Artificial Sequence
  Description of Artificial Sequence: Synthetic oligonucleotide
  Antisense strand to SEQ ID NO: 2261532
uuucuccugcgauuauaua

SEQ ID NO: 2261534 - RNA, 19 nt, Artificial Sequence
  Description of Artificial Sequence: Synthetic oligonucleotide
  Sense strand starting at position 3718 of SEQ ID NO: 1884383
cggagaagcucagugaaga

SEQ ID NO: 2261535 - RNA, 19 nt, Artificial Sequence
  Description of Artificial Sequence: Synthetic oligonucleotide
  Antisense strand to SEQ ID NO: 2261534
ucuucacugagcuucuccg

SEQ ID NO: 2261536 - RNA, 19 nt, Artificial Sequence
  Description of Artificial Sequence: Synthetic oligonucleotide
  Sense strand starting at position 3759 of SEQ ID NO: 1884383
uguuugguugcguccggaa

SEQ ID NO: 2261537 - RNA, 19 nt, Artificial Sequence
  Description of Artificial Sequence: Synthetic oligonucleotide
  Antisense strand to SEQ ID NO: 2261536
uuccggacgcaaccaaaca

SEQ ID NO: 2261538 - RNA, 19 nt, Artificial Sequence
  Description of Artificial Sequence: Synthetic oligonucleotide
  Sense strand starting at position 3760 of SEQ ID NO: 1884383
guuugguugcguccggaaa

SEQ ID NO: 2261539 - RNA, 19 nt, Artificial Sequence
  Description of Artificial Sequence: Synthetic oligonucleotide
  Antisense strand to SEQ ID NO: 2261538
uuuccggacgcaaccaaac

SEQ ID NO: 2261540 - RNA, 19 nt, Artificial Sequence
  Description of Artificial Sequence: Synthetic oligonucleotide
  Sense strand starting at position 3764 of SEQ ID NO: 1884383
gguugcguccggaaauugu

SEQ ID NO: 2261541 - RNA, 19 nt, Artificial Sequence
  Description of Artificial Sequence: Synthetic oligonucleotide
  Antisense strand to SEQ ID NO: 2261540
acaauuuccggacgcaacc

SEQ ID NO: 2261542 - RNA, 19 nt, Artificial Sequence
  Description of Artificial Sequence: Synthetic oligonucleotide
  Sense strand starting at position 3773 of SEQ ID NO: 1884383
cggaaauuguuacuauauu

SEQ ID NO: 2261543 - RNA, 19 nt, Artificial Sequence
  Description of Artificial Sequence: Synthetic oligonucleotide
  Antisense strand to SEQ ID NO: 2261542
aauauaguaacaauuuccg

SEQ ID NO: 2261544 - RNA, 19 nt, Artificial Sequence
  Description of Artificial Sequence: Synthetic oligonucleotide
  Sense strand starting at position 3798 of SEQ ID NO: 1884383
uggagugauggugggugua

SEQ ID NO: 2261545 - RNA, 19 nt, Artificial Sequence
  Description of Artificial Sequence: Synthetic oligonucleotide
  Antisense strand to SEQ ID NO: 2261544
uacacccaccaucacucca

SEQ ID NO: 2261546 - RNA, 19 nt, Artificial Sequence
  Description of Artificial Sequence: Synthetic oligonucleotide
  Sense strand starting at position 3799 of SEQ ID NO: 1884383
ggagugaugguggguguau

SEQ ID NO: 2261547 - RNA, 19 nt, Artificial Sequence
  Description of Artificial Sequence: Synthetic oligonucleotide
  Antisense strand to SEQ ID NO: 2261546
auacacccaccaucacucc

SEQ ID NO: 2261548 - RNA, 19 nt, Artificial Sequence
  Description of Artificial Sequence: Synthetic oligonucleotide
  Sense strand starting at position 3837 of SEQ ID NO: 1884383
ucaagugugauaugggaag

SEQ ID NO: 2261549 - RNA, 19 nt, Artificial Sequence
  Description of Artificial Sequence: Synthetic oligonucleotide
  Antisense strand to SEQ ID NO: 2261548
cuucccauaucacacuuga

SEQ ID NO: 2261550 - RNA, 19 nt, Artificial Sequence
  Description of Artificial Sequence: Synthetic oligonucleotide
  Sense strand starting at position 3937 of SEQ ID NO: 1884383
agaccugauguuuaugagu

SEQ ID NO: 2261551 - RNA, 19 nt, Artificial Sequence
  Description of Artificial Sequence: Synthetic oligonucleotide
  Antisense strand to SEQ ID NO: 2261550
acucauaaacaucaggucu

SEQ ID NO: 2261552 - RNA, 19 nt, Artificial Sequence
  Description of Artificial Sequence: Synthetic oligonucleotide
  Sense strand starting at position 3945 of SEQ ID NO: 1884383
uguuuaugaguucagguga

SEQ ID NO: 2261553 - RNA, 19 nt, Artificial Sequence
  Description of Artificial Sequence: Synthetic oligonucleotide
  Antisense strand to SEQ ID NO: 2261552
ucaccugaacucauaaaca

SEQ ID NO: 2261554 - RNA, 19 nt, Artificial Sequence
  Description of Artificial Sequence: Synthetic oligonucleotide
  Sense strand starting at position 3950 of SEQ ID NO: 1884383
augaguucaggugaucgua

SEQ ID NO: 2261555 - RNA, 19 nt, Artificial Sequence
  Description of Artificial Sequence: Synthetic oligonucleotide
  Antisense strand to SEQ ID NO: 2261554
uacgaucaccugaacucau

SEQ ID NO: 2261556 - RNA, 19 nt, Artificial Sequence
  Description of Artificial Sequence: Synthetic oligonucleotide
  Sense strand starting at position 3952 of SEQ ID NO: 1884383
gaguucaggugaucguaaa

SEQ ID NO: 2261557 - RNA, 19 nt, Artificial Sequence
  Description of Artificial Sequence: Synthetic oligonucleotide
  Antisense strand to SEQ ID NO: 2261556
uuuacgaucaccugaacuc

SEQ ID NO: 2261558 - RNA, 19 nt, Artificial Sequence
  Description of Artificial Sequence: Synthetic oligonucleotide
  Sense strand starting at position 344 of SEQ ID NO: 1884384
uaacgcucucagugcuuau

SEQ ID NO: 2261559 - RNA, 19 nt, Artificial Sequence
  Description of Artificial Sequence: Synthetic oligonucleotide
  Antisense strand to SEQ ID NO: 2261558
auaagcacugagagcguua

SEQ ID NO: 2261560 - RNA, 19 nt, Artificial Sequence
  Description of Artificial Sequence: Synthetic oligonucleotide
  Sense strand starting at position 353 of SEQ ID NO: 1884384
cagugcuuauuugcaugaa

SEQ ID NO: 2261561 - RNA, 19 nt, Artificial Sequence
  Description of Artificial Sequence: Synthetic oligonucleotide
  Antisense strand to SEQ ID NO: 2261560
uucaugcaaauaagcacug

SEQ ID NO: 2261562 - RNA, 19 nt, Artificial Sequence
  Description of Artificial Sequence: Synthetic oligonucleotide
  Sense strand starting at position 751 of SEQ ID NO: 1884384
gugacugccuccucaagga

SEQ ID NO: 2261563 - RNA, 19 nt, Artificial Sequence
  Description of Artificial Sequence: Synthetic oligonucleotide
  Antisense strand to SEQ ID NO: 2261562
uccuugaggaggcagucac

SEQ ID NO: 2261564 - RNA, 19 nt, Artificial Sequence
  Description of Artificial Sequence: Synthetic oligonucleotide
  Sense strand starting at position 1132 of SEQ ID NO: 1884384
agcugcaagcgcuuauuaa

SEQ ID NO: 2261565 - RNA, 19 nt, Artificial Sequence
  Description of Artificial Sequence: Synthetic oligonucleotide
  Antisense strand to SEQ ID NO: 2261564
uuaauaagcgcuugcagcu

SEQ ID NO: 2261566 - RNA, 19 nt, Artificial Sequence
  Description of Artificial Sequence: Synthetic oligonucleotide
  Sense strand starting at position 1133 of SEQ ID NO: 1884384
gcugcaagcgcuuauuaau

SEQ ID NO: 2261567 - RNA, 19 nt, Artificial Sequence
  Description of Artificial Sequence: Synthetic oligonucleotide
  Antisense strand to SEQ ID NO: 2261566
auuaauaagcgcuugcagc

SEQ ID NO: 2261568 - RNA, 19 nt, Artificial Sequence
  Description of Artificial Sequence: Synthetic oligonucleotide
  Sense strand starting at position 1139 of SEQ ID NO: 1884384
agcgcuuauuaaucgccaa

SEQ ID NO: 2261569 - RNA, 19 nt, Artificial Sequence
  Description of Artificial Sequence: Synthetic oligonucleotide
  Antisense strand to SEQ ID NO: 2261568
uuggcgauuaauaagcgcu

SEQ ID NO: 2261570 - RNA, 19 nt, Artificial Sequence
  Description of Artificial Sequence: Synthetic oligonucleotide
  Sense strand starting at position 1143 of SEQ ID NO: 1884384
cuuauuaaucgccaacggu

SEQ ID NO: 2261571 - RNA, 19 nt, Artificial Sequence
  Description of Artificial Sequence: Synthetic oligonucleotide
  Antisense strand to SEQ ID NO: 2261570
accguuggcgauuaauaag

SEQ ID NO: 2261572 - RNA, 19 nt, Artificial Sequence
  Description of Artificial Sequence: Synthetic oligonucleotide
  Sense strand starting at position 1486 of SEQ ID NO: 1884384
agaaaugucuagggugucu

SEQ ID NO: 2261573 - RNA, 19 nt, Artificial Sequence
  Description of Artificial Sequence: Synthetic oligonucleotide
  Antisense strand to SEQ ID NO: 2261572
agacacccuagacauuucu

SEQ ID NO: 2261574 - RNA, 19 nt, Artificial Sequence
  Description of Artificial Sequence: Synthetic oligonucleotide
  Sense strand starting at position 1495 of SEQ ID NO: 1884384
uagggugucucgugacaac

SEQ ID NO: 2261575 - RNA, 19 nt, Artificial Sequence
  Description of Artificial Sequence: Synthetic oligonucleotide
  Antisense strand to SEQ ID NO: 2261574
guugucacgagacacccua

SEQ ID NO: 2261576 - RNA, 19 nt, Artificial Sequence
  Description of Artificial Sequence: Synthetic oligonucleotide
  Sense strand starting at position 1664 of SEQ ID NO: 1884384
gugcaauuacccgugcguu

SEQ ID NO: 2261577 - RNA, 19 nt, Artificial Sequence
  Description of Artificial Sequence: Synthetic oligonucleotide
  Antisense strand to SEQ ID NO: 2261576
aacgcacggguaauugcac

SEQ ID NO: 2261578 - RNA, 19 nt, Artificial Sequence
  Description of Artificial Sequence: Synthetic oligonucleotide
  Sense strand starting at position 2222 of SEQ ID NO: 1884384
ccgcguggucccuuuaaga
